United States Patent Application Publication US 2011/0183924 A1 - sequence listing, part 106

SEQ ID NO: 319035 - DNA, 2184 bp, Homo sapiens
ggagcctaccataagcacctcatggaactcgctcttcagcaaacatatcaggacacctgtaattgcatcaagtcgcggatcaagttggaatttgaaaaacgtcaacaggagcggcttctgctctccctgctgccggcccacatcgccatggagatgaaagcggagatcatccagaggctgcagggccccaaggcgggccagatggagaacacaaataacttccacaacctgtatgtgaagcggcatacaaacgtgagcatcttatacgctgacatcgttggctttacccggctggcaagtgactgctccccgggagaactagtccacatgctgaatgagctctttggaaagtttgatcaaattgcaaaggagaatgaatgcatgagaattaaaattttaggagactgctactactgtgtatctggactccctatatctctccctaaccatgccaagaactgtgtgaaaatggggctggacatgtgtgaagccataaagaaagtgagggatgctactggagttgatatcaacatgcgcgtgggcgtgcattctgggaatgtcctgtgtggcgtgattggtctgcagaagtggcaatatgatgtgtggtcacatgatgtgaccttggccaaccacatggaagctggaggggtccctggacgtgttcacatttcttctgtcaccctggagcacttgaatggcgcttataaagtggaggagggagatggtgacattagggacccatatttaaaacagcacctggtgaaaacctactttgtgatcaaccccaagggagaacgacggagcccccagcatctcttcagacctcgccacacccttgatggagccaaaatgagggcctcggtccgcatgacccggtacttggagtcctggggggcagccaagccctttgcacacctacatcacagggacagcatgaccacagagaacggcaagatcagcaccacggatgtacccatgggtcagcataattttcaaaatcgcaccttaagaaccaagtcacaaaagaagagatttgaagaagaattgaatgaaaggatgattcaagcaattgatgggattaatgcacagaagcaatggctcaagtctgaagacattcagagaatctcactgcttttctataacaaagtactagaaaaagagtaccgggccacggcactgccagcgttcaagtattatgtgacttgtgcctgtctcatattcttctgcatcttcattgtgcagattctcgtgctgccaaaaacgtctgtcctgggcatctcctttggggctgcgtttctcttgctggccttcatcctcttcgtctgctttgctggacagcttctgcaatgcagcaaaaaagcctctcccctgctcatgtggcttttgaagtcctcgggcatcattgccaaccgcccctggccacggatctctctcacgatcatcaccacagccatcatattaatgatggccgtgttcaacatgtttttcctgagtgactcagaggaaacaatccctccaactgccaacacaacaaacacaagcttttcagcctcaaataatcaggtggcgattctgcgtgcgcagaatttatttttcctcccgtactttatctacagctgcattctgggactgatatcctgttccgtgttcctgcgggtaaactatgagctgaagatgttgatcatgatggtggccttggtgggctacaacaccatcctactccacacccacgcccacgtcctgggcgactacagccaggtcttatttgagagaccaggcatttggaaagacctgaagaccatgggctctgtgtctctctctatattcttcatcacactgcttgttctgggtagacaggtaagaagtctgtttatatatatgtatgtataccttctctaaagtgctgtattaatagtgctttgctgtgcattgtagttaatcttcttggaaacaaacgtctaagaattagaatcatcttatcactgaagataaaactagttagtacagggtgtggatgcttcgatatagacaaaaggaaaaatatctttcgtattttccacaaaaggcaaatgttatgaatggccaaaattttaatcagttaatttcctgttaaatctcaaaacaaattttgtagtttttgtaagcctacaaaagtgttccttcaataactgacactatttgaaa

SEQ ID NO: 319036 - DNA, 1349 bp, Homo sapiens
tctagcttcctccaagctccccctccacccaccactattcctcaggaagactcaagatctgggagatggaccaggcatttggaaagacctgaagaccatgggctctgtgtctctctctatattcttcatcacactgcttgttctgggtagacagcacatgcacatcattcactgtcaggttcagcacttcattcatggcacagcacaccaacattcatacacacaagcagcgggcaggcagcatcagcagcacccatggccagcacacctgcacaccggcgctgctagctaggcagcaacggtgctatcccagcgacacgtggactgaagccacttccctggccccaggcagccatgcacagcaatgcaggcagctcatacccacccagctcctcatgcacatggcagtccctgcgatccatagtataagcacgtccacatctccaggaatttcccaacagcacatcttctcatcaccagcacataccgcacagatgcaacgaagggcaggcgcctctggcacaatgccctatcggagcatccttagcaacggcagcatcgcaatcgacataggaacctacaaggaatggccatcgttatctatatcacacaaggccacaaccacatcacaagcagggaagattagcacacacaaggcatgcaacagcaacccaatcgaggcccaaggcaaacatcaccaatggggcaaggacccacacaaggggtcgttggcagacggacctggaggcaccaacagaacaacgagaacgccaccttcacaccaagaggcacgaccactgcaggacgagacccagaccacagagtggcgaacacactttagagcgcaacacacatggggcagtggcaagaatcacaggacttatcagggacacgcacgaagatcagcggcgacaacgccatggagcacgtgaccaagatccaacaaacaacaaggcccatcgtccccgtctcaccaaccgggaccgcctatcacccacgttcggcgccaccacaggcggcaggcagtaacatacacagccgcccacagtgggaggaaaccgcacctggcgggacaatagaggacctgggggacggggctgcgacacactagggagaacaaagccactcaaccagcaaagcgacagcccaccgcacgcagacaggcgaacaacaagccagtaggagagcgccagaccaacacacgacggagtaccacaaacagggacggccccacccacgacccaagagcgcacaccggcgcagacactagaaagcccagaggacaaccgcaactcgcaccacgcccacaccagccacagagagaaacgccaagacaagagcataaacga

SEQ ID NO: 319037 - DNA, 3271 bp, Homo sapiens
ggagcctaccataagcacctcatggaactcgctcttcagcaaacatatcaggacacctgtaattgcatcaagtcgcggatcaagttggaatttgaaaaacgtcaacaggagcggcttctgctctccctgctgccggcccacatcgccatggagatgaaagcggagatcatccagaggctgcagggccccaaggcgggccagatggagaacacaaataacttccacaacctgtatgtgaagcggcatacaaacgtgagcatcttatacgctgacatcgttggctttacccggctggcaagtgactgctccccgggagaactagtccacatgctgaatgagctctttggaaagtttgatcaaattgcaaaggagaatgaatgcatgagaattaaaattttaggagactgctactactgtgtatctggactccctatatctctccctaaccatgccaagaactgtgtgaaaatggggctggacatgtgtgaagccataaagaaagtgagggatgctactggagttgatatcaacatgcgcgtgggcgtgcattctgggaatgtcctgtgtggcgtgattggtctgcagaagtggcaatatgatgtgtggtcacatgatgtgaccttggccaaccacatggaagctggaggggtccctggacgtgttcacatttcttctgtcaccctggagcacttgaatggcgcttataaagtggaggagggagatggtgacattagggacccatatttaaaacagcacctggtgaaaacctactttgtgatcaaccccaagggagaacgacggagcccccagcatctcttcagacctcgccacacccttgatggagccaaaatgagggcctcggtccgcatgacccggtacttggagtcctggggggcagccaagccctttgcacacctacatcacagggacagcatgaccacagagaacggcaagatcagcaccacggatgtacccatgggtcagcataattttcaaaatcgcaccttaagaaccaagtcacaaaagaagagatttgaagaagaattgaatgaaaggatgattcaagcaattgatgggattaatgcacagaagcaatggctcaagtctgaagacattcagagaatctcactgcttttctataacaaagtactagaaaaagagtaccgggccacggcactgccagcgttcaagtattatgtgacttgtgcctgtctcatattcttctgcatcttcattgtgcagattctcgtgctgccaaaaacgtctgtcctgggcatctcctttggggctgcgtttctcttgctggccttcatcctcttcgtctgctttgctggacagcttctgcaatgcagcaaaaaagcctctcccctgctcatgtggcttttgaagtcctcgggcatcattgccaaccgcccctggccacggatctctctcacgatcatcaccacagccatcatattaatgatggccgtgttcaacatgtttttcctgagtgactcagaggaaacaatccctccaactgccaacacaacaaacacaagcttttcagcctcaaataatcaggtggcgattctgcgtgcgcagaatttatttttcctcccgtactttatctacagctgcattctgggactgatatcctgttccgtgttcctgcgggtaaactatgagctgaagatgttgatcatgatggtggccttggtgggctacaacaccatcctactccacacccacgcccacgtcctgggcgactacagccaggtcttatttgagagaccaggcatttggaaagacctgaagaccatgggctctgtgtctctctctatattcttcatcacactgcttgttctgggtagacagaatgaatattactgtaggttagacttcttatggaagaacaaattcaaaaaagagcgggaggagatagagaccatggagaacctgaaccgcgtgctgctggagaacgtgcttcccgcgcacgtggctgagcacttcctggccaggagcctgaagaatgaggagctataccaccagtcctatgactgcgtctgcgtcatgtttgcctccattccggatttcaaagaattttatacagaatccgacgtgaacaaggagggcttggaatgccttcggctcctgaacgagatcatcgctgactttgatgatcttctttccaagccaaaattcagtggagctgtgcccagccaggagcactcccaggagcccgagcggcagtacatgcacattggcaccatggtggagtttgcttttgccctggtagggaagctggatgccatcaacaagcactccttcaacgacttcaaattgcgagtgggtattaaccatggacctgtgatagctggtgtgattggagctcagaagccacaatatgatatctggggcaacactgtcaatgtggccagtaggatggacagcaccggagtcctggacaaaatacaggttaccgaggagacgagcctcgtcctgcagaccctcggatacacgtgcacctgtcgaggaataatcaacgtgaaaggaaagggggacctgaagacgtactttgtaaacacagaaatgtcaaggtccctttcccagagcaacgtggcatcctgaagagtcaccttcattttggcaagaagactgtattttcaggaaggtatcacacactttctgactgcaacttctgtcccttgtttttgatgtgcgtgctgtctgtcctatggagcctctgcagactcgttctcgtgacccagtggcataccgtttggtgtctgatgtgtgcccagatcgttctgccacttgcactgtgcttgctcctaagcaaaagggaaaaggagcgcgcgtgatagaagaaaagcactgggagaactaacagaggagaaaggtgaaacacacacacattcttaaggcaataaaactagggggtgtatattatcttctggtgcatgttcttttctggaaaatatggtagctcgccaaccgcatctgctcatctgatattcaaacacacagtattcgtgaataagttgattctgtcccccacgtggactctgtgctcacccattgtctcattgccagtggtgtccaagggcccccgttgggacccacggctctcgtccctctgctccgtgtgtctcatgccagcagcacgtcgccatccgtcaccagaattagtcctcacagcctaggaccagttttgtatcaaactcgtctgatgttttgatgccatttgtcttttgtaaagttaattcattaaaagttttatgtactttga

SEQ ID NO: 319038 - DNA, 5874 bp, Homo sapiens
  misc_feature (4647)..(4647): n is a, c, g, or t
  misc_feature (4845)..(4845): n is a, c, g, or t
  misc_feature (5493)..(5493): n is a, c, g, or t
  misc_feature (5621)..(5621): n is a, c, g, or t
ggagcctaccataagcacctcatggaactcgctcttcagcaaacatatcaggacacctgtaattgcatcaagtcgcggatcaagttggaatttgaaaaacgtcaacaggagcggcttctgctctccctgctgccggcccacatcgccatggagatgaaagcggagatcatccagaggctgcagggccccaaggcgggccagatggagaacacaaataacttccacaacctgtatgtgaagcggcatacaaacgtgagcatcttatacgctgacatcgttggctttacccggctggcaagtgactgctccccgggagaactagtccacatgctgaatgagctctttggaaagtttgatcaaattgcaaaggagaatgaatgcatgagaattaaaattttaggagactgctactactgtgtatctggactccctatatctctccctaaccatgccaagaactgtgtgaaaatggggctggacatgtgtgaagccataaagaaagtgagggatgctactggagttgatatcaacatgcgcgtgggcgtgcattctgggaatgtcctgtgtggcgtgattggtctgcagaagtggcaatatgatgtgtggtcacatgatgtgaccttggccaaccacatggaagctggaggggtccctggacgtgttcacatttcttctgtcaccctggagcacttgaatggcgcttataaagtggaggagggagatggtgacattagggacccatatttaaaacagcacctggtgaaaacctactttgtgatcaaccccaagggagaacgacggagcccccagcatctcttcagacctcgccacacccttgatggagccaaaatgagggcctcggtccgcatgacccggtacttggagtcctggggggcagccaagccctttgcacacctacatcacagggacagcatgaccacagagaacggcaagatcagcaccacggatgtacccatgggtcagcataattttcaaaatcgcaccttaagaaccaagtcacaaaagaagagatttgaagaagaattgaatgaaaggatgattcaagcaattgatgggattaatgcacagaagcaatggctcaagtctgaagacattcagagaatctcactgcttttctataacaaagtactagaaaaagagtaccgggccacggcactgccagcgttcaagtattatgtgacttgtgcctgtctcatattcttctgcatcttcattgtgcagattctcgtgctgccaaaaacgtctgtcctgggcatctcctttggggctgcgtttctcttgctggccttcatcctcttcgtctgctttgctggacagcttctgcaatgcagcaaaaaagcctctcccctgctcatgtggcttttgaagtcctcgggcatcattgccaaccgcccctggccacggatctctctcacgatcatcaccacagccatcatattaatgatggccgtgttcaacatgtttttcctgagtgactcagaggaaacaatccctccaactgccaacacaacaaacacaagcttttcagcctcaaataatcaggtggcgattctgcgtgcgcagaatttatttttcctcccgtactttatctacagctgcattctgggactgatatcctgttccgtgttcctgcgggtaaactatgagctgaagatgttgatcatgatggtggccttggtgggctacaacaccatcctactccacacccacgcccacgtcctgggcgactacagccaggtcttatttgagagaccaggcatttggaaagacctgaagaccatgggctctgtgtctctctctatattcttcatcacactgcttgttctgggtagacagaatgaatattactgtaggttagacttcttatggaagaacaaattcaaaaaagagcgggaggagatagagaccatggagaacctgaaccgcgtgctgctggagaacgtgcttcccgcgcacgtggctgagcacttcctggccaggagcctgaagaatgaggagctataccaccagtcctatgactgcgtctgcgtcatgtttgcctccattccggatttcaaagaattttatacagaatccgacgtgaacaaggagggcttggaatgccttcggctcctgaacgagatcatcgctgactttgatgatcttctttccaagccaaaattcagtggagttgaaaagattaagaccattggcagcacatacatggcagcaacaggtctgagcgctgtgcccagccaggagcactcccaggagcccgagcggcagtacatgcacattggcaccatggtggagtttgcttttgccctggtagggaagctggatgccatcaacaagcactccttcaacgacttcaaattgcgagtgggtattaaccatggacctgtgatagctggtgtgattggagctcagaagccacaatatgatatctggggcaacactgtcaatgtggccagtaggatggacagcaccggagtcctggacaaaatacaggttaccgaggagacgagcctcgtcctgcagaccctcggatacacgtgcacctgtcgaggaataatcaacgtgaaaggaaagggggacctgaagacgtactttgtaaacacagaaatgtcaaggtccctttcccagagcaacgtggcatcctgaagagtcaccttcattttggcaagaagactgtattttcaggaaggtatcacacactttctgactgcaacttctgtcccttgtttttgatgtgcgtgctgtctgtcctatggagcctctgcagactcgttctcgtgacccagtggcataccgtttggtgtctgatgtgtgcccagatcgttctgccacttgcactgtgcttgctcctaagcaaaagggaaaaggagcgcgcgtgatagaagaaaagcactgggagaactaacagaggagaaaggtgaaacacacacacattcttaaggcaataaaactagggggtgtatattatcttctggtgcatgttcttttctggaaaatggggctggacatgtgtgaagccataaagaaagtgagggatgctactggagttgatatcaacatgcgcgtgggcgtgcattctgggaatgtcctgtgtggcgtgattggtctgcagtggtgtccaagggcccccgttgggacccacggctctcgtccctctgctccgtgtgtctcatgccagcagcacgtcgccatccgtcaccagaattagtcctcacagcctaggaccagttttgtatcaaactcgtctgatgttttgatgccatttgtcttttgtaaagttaattcattaaaagttttatgtactttgatttacagtgcctgtatcttttattttcctgtcttctttctcctgtggtttgctccagaattaaggtttgttttccatccattctcccttttgacacagttgtttcagaaagagctctccagaagccaatattgagatgtaattcagattaggacacagtgtgtgacgcagataactggttactcagctccctggaaagcaggcaagcatgttgaatgtatctagtggtctgattttaatttgggcatctctagagaacgctttcagggaaaaatactttaatagtaaaaagattctctgcgagcaacagtgccccctccgtccactacgctcctgtctccaagaatgttttgctagagctaacagacatagactgcaaaagaataatttggaatcagctatgcaaatcagtctcacaatagcgtgagctaactgagagaagtactaagacccacaaactgcctgttaagtctgagaaggctaaagaagacacacagccaacgttcatgcatttttaaagacagaaggccttgaagaatttgttcttgtaaatccaacacaagttgtttggtacttttaacataaagaaatcatactttgccaaatagtgaaaagtagagcaatcgtgtataagctaatgtttaaaagcaaaactgcaaattgtagcccagttggtcaaacttgttttctttttataactcatggcaggcatctgtaagaagtagagaacccagatgatctcttaggaagccttttattcgtgggaactcgaacttgaagcacaagttcctggtttgaatcctggctctgattttttactggctgtgtgactttgaacacatctcttagtccctcttaggagtactttccttattggcaacttatggactcgctagtgattaaacgaggcaatgactgtgagcgagcctggcaggtgccccgtggtacattcacagcacgggcacagctgctgtgccaggactgtgactcattcccagtaaaaggcacttatcgaagctgataaccgtccttcatcaccgaagtgtgagtagagcatgacttatttagtattctgcctcaatggggaattttttgatcctgtaatcacaactcagcattggccttaatatacctaaatctccaaaaacagtgattaaagcaagagaattattacaagggcttttctctttcctctaactcattcttcacggatgccgtagcgtttccgtgagctcaaactggccttggtgtaaaatgtgtaaggatgagcagcaggcgtgcctcgtgggttcttcctctgttacatcctgctacactcatcngcaggtcaccttagttcacctaccctgagtgaacacccccagctgggtggtccaccaagttctcataaacagagtccctcccattcccccacggggtgcaccgaacttgggtttgcgctaaaaagaactcaaaaggagaactgtgctctcccaaagccatatcaccagtcttaccaaacaataggcttttaaaagcantgagtcattgtcagaatccactatgggaagctctgtgtgtacctggtcccttctaggtgtggtcccataggagcagccttagcatcccctgtgaacttatcaaaaatgcaaattctcaggccccaacctgaaggaggaccctgaatttgagatccccggggctggggcccagcacaactgctgtttagtgaacaggttctccaggtgattctgatccctgatcaagcttcagacctccctccctccccagtgtttttgcaggtgaggaaacaggggcagagtaattcaggcacatgtgttcagagttccacagttgattagcagttgaggccaggctagaatggaaaactgcctgttccttgaatctgaaagagcattattcctggtcaaagctccttaaagttctgggcagctaaaagcatccctgtgagcaaaaatgccaggcagaaaactggcagtgcacctctcatcagcccaggtcccagtgccattggcttcaagaaaaaaaaaaatctctccccaatgctctccttaacctttaagtcttacaggaagcctctcatagaaattgcctccagtccagtttcccaaaaaccccagtgttttacatatctgtttaggagtgtctaagttttgtcatcaatccangatgttattcttccttcccaactcactgtgctcctaaaggcagcaaccattcatctttcctttgctctggatacaccgaatgaccaggtaacatcatcaggccgggtgcagtggctcctataatcccnatattttgggaggccgaggagagaggatcacttaagcccaggagtctgagaccagcctgggcaacatagcaagacccccatctctgcaaaaaaataagaaaattagcttggcatggtggcacgtgcctgtagtcccagctacatgggaggctgaggtgggaggatcacttgagcccaggaagtccagaacgtagtgagccttgattataccactgcactccagcctgggtgacagagcgagactctgtctcag

SEQ ID NO: 319039 - DNA, 649 bp, Homo sapiens
  misc_feature (25)..(25): n is a, c, g, or t
actagttctagatcgcgagcggccncctttttttttttaaattttgtagccattcttatgatgctcttgatttgttggttacacaaatcaattttattaaaaatccaaagataagtctttaggtatattttgtaccaaattaaattagaagacaaaaattgtgctttcatagttgctacaaaggtaaataatggagagatttggtacaaaacaacaaaatatatatatattctcatatatatatatatagctgataaaattacctgaggagtgtaatgcttatttttttgtgtatatctttgcaatctattttatatatattgacaaaagagactgtgaaatacttagccatgcagaatatgtgaccagaccagagcatgtgtaggaagactttacagtaatcattaactctaccccgaaatgatggactacaagttataatgtgtgttacctacacttcaatcagtaatattagcaaatctccaaatgttagtcacattggtttgtctcccttgtacattctttattcatgatattacagtgctgtaactgggtggtcctttttaaacaaaacattatttgcaaaacagagggtattatttgtttttaaagcttttgtaaataaaggcttcaaaatgttttcttataa

SEQ ID NO: 319040 - DNA, 598 bp, Homo sapiens
tttattaaaaatccaaagataagtcttctaatttaattgggtacaaaatatacctaaagacttatctttaggtatattttgtaccaaattaaattagaagacaaaaattgtgctttcatagttgctacaaaggtaaataatggagagatttggtacaaaacaacaaaatatatatatattctcatatatatatatatagctgataaaattacctgaggagtgtaatgcttatttttttgtgtatatctttgcaatctattttatatatattgacaaaagagactgtgaaatacttagccatgcagaatatgtgaccagaccagagcatgtgtaggaagactttacagtaatcattaactctaccccgaaatgatggactacaagttataatgtgtgttacctacacttcaatcagtaatattagcaaatctccaaatgttagtcacattggtttgtctcccttgtacattctttattcatgatattacagtgctgtaactgggtggtcctttttaaacaaaacattatttgcaaaacagagggtattatttgtttttaaagcttttgtaaataaaggcttcaaaatgttttcttataa

SEQ ID NO: 319041 - DNA, 392 bp, Homo sapiens
  misc_feature (25)..(25): n is a, c, g, or t
actagttctagatcgcgagcggccntttttttgtgtatatctttgcaatctattttatatatattgacaaaagagactgtgaaatacttagccatgcagaatatgtgaccagaccagagcatgtgtaggaagactttacagtaatcattaactctaccccgaaatgatggactacaagttataatgtgtgttacctacacttcaatcagtaatattagcaaatctccaaatgttagtcacattggtttgtctcccttgtacattctttattcatgatattacagtgctgtaactgggtggtcctttttaaacaaaacattatttgcaaaacagagggtattatttgtttttaaagcttttgtaaataaaggcttcaaaatgttttcttataa

SEQ ID NO: 319042 - DNA, 2646 bp, Homo sapiens
  misc_feature (24)..(24): n is a, c, g, or t
taaggctaggtcgggctgggtgtnaatcggccgacggcgcagcacggtgcggcgcagctcctgctcgcctttcccttcgctgggcgagaggtgtctatggggcacccgctgccgccgccgctaccgccaccgccaccgccaccgccgccgagtgctgtctctatggcgaggaggaggaggaggagcgcgagctcagcgacacaagtacataaataaaggataaaatattttatgaaacaaatcttcaatcaagtataacattttgatgcttggcatctagactcccttgtgccctcactatgccagcggcaactgtagatcatagccaaagaatttgtgaagtttgggcttgcaacttggatgaagagatgaagaaaattcgtcaagttatccgaaaatataattacgttgctatggacaccgagtttccaggtgtggttgcaagacccattggagaattcaggagcaatgctgactatcaataccaactattgcggtgtaatgtagacttgttaaagataattcagctaggactgacatttatgaatgagcaaggagaataccctccaggaacttcaacttggcagtttaattttaaatttaatttgacggaggacatgtatgcccaggactctatagagctactaacaacatctggtatccagtttaaaaaacatgaggaggaaggaattgaaacccagtactttgcagaacttcttatgacttctggagtggtcctctgtgaaggggtcaaatggttgtcatttcatagcggttacgactttggctacttaatcaaaatcctaaccaactctaacttgcctgaagaagaacttgacttctttgagatccttcgattgttttttcctgtcatttatgatgtgaagtacctcatgaagagctgcaaaaatctcaaaggtggattacaggaggtggcagaacagttagagctggaacggataggaccacaacatcaggcaggatctgattcattgctcacaggaatggcctttttcaaaatgagagaaatgttctttgaagatcatattgatgatgccaaatattgtggtcatttgtatggccttggttctggttcatcctatgtacagaatggcacagggaatgcatatgaagaggaagccaacaagcagtcatgacatgaaatagtccttttatttttatttcgagctacacacatgcttgtatataggttttatctctggttgaatccctcgaacaatagacagtacctttcccccccctttcatggcccattttattgtctgcctttcagtactaagtatgaccgttcctatctcagatcttaataaaaagaaaaaaaaaaacgcattcaggttaaatttggccttaatttaatatacttgttagcaagcgtgtgtgacagagagtggggaaagctacatcattgaatattttgataaactttaccgacttgagtttggtttatttttcccttttcctaaattaactagcactgactgtaatttatttccctgtttcacgtctctcccttccattctgcaggagttttagctatttgagatcgtggaccatcagttttgcactttagagagtgtttctgactctaaacctgttttatcagaaaatttgttttttcttgatcttagctggaaaaatctgccaactttacacagtatttacttggttttgacccacagaatatagcacgttgtgcaaactgtcgattcagcgaaacttaaaaaagacaagaaactactgaggagcttagtaactgctgtttctgtacgtagtgtttaatcttccaagcacatctagtgtctgtcagtttctaattggcatgtgtaggctgctctgtgactgaagaattttcaaaccagctttacacccttcaggaaaaatcccttgtgattggatgtttactatctgccaggaaactggtactcaagatgttgaagctacagttattttatgatagcacacttcccttgatctgcttatttttattccatcaccatttaccctttttttttttaaattttgtagccattcttatgatgctcttgatttgttggttacacaaatcaattttattaaaaatccaaagataagtctttaggtatattttgtaccaaattaaattagaagacaaaaattgtgctttcatagttgctacaaaggtaaataatggagagatttggtacaaaacaacaaaatatatatatattctcatatatatatatatagctgataaaattacctgaggagtgtaatgcttatttttttgtgtatatctttgcaatctattttatatatattgacaaaagagactgtgaaatacttagccatgcagaatatgtgaccagaccagagcatgtgtaggaagactttacagtaatcattaactctaccccgaaatgatggactacaagttataatgtgtgttacctacacttcaatcagtaatattagcaaatctccaaatgttagtcacattggtttgtctcccttgtacattctttattcatgatattacagtgctgtaactgggtggtcctttttaaacaaaacattatttgcaaaacagagggtattatttgtttttaaagcttttgtaaataaaggcttcaaaatgttttcttataa

SEQ ID NO: 319043 - DNA, 2585 bp, Homo sapiens
atctagcgcccccgtcaggacgtgcgaaaagcgacggcgcagcacggtgcggcgcagctcctgctcgcctttcccttcgctgggcgagaggtgtctatggggcacccgctgccgccgccgctaccgccaccgccaccgccaccgccgccgagtgctgtctctatggcgaggaggaggaggaggagcgcgagctcagcgacacaagtacataaataaaggataaaatattttatgaaacaaatcttcaatcaagtataacattttgatgcttggcatctagactcccttgtgccctcactatgccagcggcaactgtagatcatagccaaagaatttgtgaagtttgggcttgcaacttggatgaagagatgaagaaaattcgtcaagttatccgaaaatataattacgttgctatggacaccgagtttccaggtgtggttgcaagacccattggagaattcaggagcaatgctgactatcaataccaactattgcggtgtaatgtagacttgttaaagataattcagctaggactgacatttatgaatgagcaaggagaataccctccaggaacttcaacttggcagtttaattttaaatttaatttgacggaggacatgtatgcccaggactctatagagctactaacaacatctggtatccagtttaaaaaacatgaggaggaaggaattgaaacccagtactttgcagaacttcttatgacttctggagtggtcctctgtgaaggggtcaaatggttgtcatttcatagcggttacgactttggctacttaatcaaaatcctaaccaactctaacttgcctgaagaagaacttgacttctttgagatccttcgattgttttttcctgtcatttatgatgtgaagtacctcatgaagagctgcaaaaatctcaaaggtggattacaggaggtggcagaacagttagagctggaacggataggaccacaacatcaggcaggatctgattcattgctcacaggaatggcctttttcaaaatgagagaaatgttctttgaagatcatattgatgatgccaaatattgtggtcatttgtatggccttggttctggttcatcctatgtacagaatggcacagggaatgcatatgaagaggaagccaacaagcagtcatgacatgaaatagtccttttatttttatttcgagctacacacatgcttgtatataggttttatctctggttgaatccctcgaacaatagacagtacctttcccccccctttcatggcccattttattgtctgcctttcagtactaagtatgaccgttcctatctcagatcttaataaaaagaaaaaaaaaaacgcattcaggttaaatttggccttaatttaatatacttgttagcaagcgtgtgtgacagagagtggggaaagctacatcattgaatattttgataaactttaccgacttgagtttggtttatttttcccttttcctaaattaactagcactgactgtaatttatttccctgtttcacgtctctcccttccattctgcaggagttttagctatttgagatcgtggaccatcagttttgcactttagagagtgtttctgactctaaacctgttttatcagaaaatttgttttttcttgatcttagctggaaaaatctgccaactttacacagtatttacttggttttgacccacagaatatagcacgttgtgcaaactgtcgattcagcgaaacttaaaaaagacaagaaactactgaggagcttagtaactgctgtttctgtacgtagtgtttaatcttccaagcacatctagtgtctgtcagtttctaattggcatgtgtaggctgctctgtgactgaagaattttcaaaccagctttacacccttcaggaaaaatcccttgtgattggatgtttactatctgccaggaaactggtactcaagatgttgaagctacagttattttatgatagcacacttcccttgatctgcttatttttattccatcaccatttaccctttttttttttaaattttgtagccattcttatgatgctcttgatttgttggttacacaaatcaattttattaaaaatccaaagataagtctttaggtatattttgtaccaaattaaattagaagacaaaaattgtgctttcatagttgctacaaaggtaaataatggagagatttggtacaaaacaacaaaatatatatatattctcatatatatatatatagctgattatattgacaaaagagactgtgaaatacttagccatgcagaatatgtgaccagaccagagcatgtgtaggaagactttacagtaatcattaactctaccccgaaatgatggactacaagttataatgtgtgttacctacacttcaatcagtaatattagcaaatctccaaatgttagtcacattggtttgtctcccttgtacattctttattcatgatattacagtgctgtaactgggtggtcctttttaaacaaaacattatttgcaaaacagagggtattatttgtttttaaagcttttgtaaataaaggcttcaaaatgttttcttataa

SEQ ID NO: 319044 - DNA, 4226 bp, Homo sapiens
  misc_feature (1402)..(1402): n is a, c, g, or t
atctagcgcccccgtcaggacgtgcgaaaagcgacggcgcagcacggtgcggcgcagctcctgctcgcctttcccttcgctgggcgagaggtgtctatggggcacccgctgccgccgccgctaccgccaccgccaccgccaccgccgccgagtgctgtctctatggcgaggaggaggaggaggagcgcgagctcagcgacacaagtacataaataaaggataaaatattttatgaaacaaatcttcaatcaagtataacattttgatgcttggcatctagactcccttgtgccctcactatgccagcggcaactgtagatcatagccaaagaatttgtgaagtttgggcttgcaacttggatgaagagatgaagaaaattcgtcaagttatccgaaaatataattacgttgctatggacaccgagtttccaggtgtggttgcaagacccattggagaattcaggagcaatgctgactatcaataccaactattgcggtgtaatgtagacttgttaaagataattcagctaggactgacatttatgaatgagcaaggagaataccctccaggaacttcaacttggcagtttaattttaaatttaatttgacggaggacatgtatgcccaggactctatagagctactaacaacatctggtatccagtttaaaaaacatgaggaggaaggaattgaaacccagtactttgcagaacttcttatgacttctggagtggtcctctgtgaaggggtcaaatggttgtcatttcatagcggttacgactttggctacttaatcaaaatcctaaccaactctaacttgcctgaagaagaacttgacttctttgagatccttcgattgttttttcctgtcatttatgatgtgaagtacctcatgaagagctgcaaaaatctcaaaggtggattacaggaggtggcagaacagttagagctggaacggataggaccacaacatcaggcaggatctgattcattgctcacaggaatggcctttttcaaaatgagagaagtatgaagacatcactgcctttttctcagttggttgttaggttgagaacattaaaaatcttgtggccaaagattttgggcaacaagtacctactaagtaaagatataatgttagagataccatatgagtcacatccaccacacttaaaagtattcaaaaataagtcatcttgaaatgtagttcagaaggaactgggagaacatgttcatcatagaaccaacaattttaaaacataaactacctgagaagtcatgtaggtccaaccatattatttctcaggtgagaaaacaggctaataacttccatgattaaacacattactagtgggagaactccagagttcttttctgactcccattggtgctccttctacnaggcaaggaatctttatattaggtttattctagcatgaccccttttaaggtttaaactggtgataaatatattatttgctcatgtcattcttcagtgctttgaagattttatagagaagaactcaggctcttttactgcattgagtcttaaaaggggggttgaattccgaagggatcaaataaatccaacgtagtagttgcatcagaaaccatattaggaaaaccctccttaaacggcaaaaggcagagatcagttccttgagtataaagtgttagggatggaagaatgaaactaaatgaacccattatctactcctaagtaattaagtgatgtgcacagatacacctagctataggtaaacaggaaaattggttgtgcaaaaaacaagtgaggtttttcttgactataagttttcccttttggaaaaattcgctgtggatttgagtatattttctcttagacattaaattgagactgagaatttaaaactttttgtagcaatgtattgataatagaaagcattaaagctgttttgctaagtagtgttgttgattcagaagtgatttggactatccattcatgacacgtaaatattttgttttggactccttccaattgtttcattagataattgaaacaaccttttggattttttagctttgcattttaaaaatgtcttaatggtttatttaactaaaggtggatttctggcactaatttatctttatttttcttggcttcttcaaggacagtaatagagtgtgaatgtttggattttactgtccatgactttatggtttgatcatttatagccagctcagccttgcatacagatttaagacagtttatgaacctaaactttttttcccccaccatcattggctttcttcattcttgagtattgttaaattaatggaatagttatttttccatgatgaaaaattcttataaaaatggtctaaatggaaaagacatgcatttatacactttttttgtagtctctttctttggtttctgagctctgtacttttgaggacattagtcttactcattgaactgaaatgcgtagcctcaaaggaacaccatagaaaagagccatcattattgtcagtgaacagtcagtacttacattgctgaaatataaattacaagtggttccttttggttaaaattatcttttttttttcttcaaaattcctttttagatgttctttgaagatcatattgatgatgccaaatattgtggtcatttgtatggccttggttctggttcatcctatgtacagaatggcacagggaatgcatatgaagaggaagccaacaagcagtcatgacatgaaatagtccttttatttttatttcgagctacacacatgcttgtatataggttttatctctggttgaatccctcgaacaatagacagtacctttcccccccctttcatggcccattttattgtctgcctttcagtactaagtatgaccgttcctatctcagatcttaataaaaagaaaaaaaaaaacgcattcaggttaaatttggccttaatttaatatacttgttagcaagcgtgtgtgacagagagtggggaaagctacatcattgaatattttgataaactttaccgacttgagtttggtttatttttcccttttcctaaattaactagcactgactgtaatttatttccctgtttcacgtctctcccttccattctgcaggagttttagctatttgagatcgtggaccatcagttttgcactttagagagtgtttctgactctaaacctgttttatcagaaaatttgttttttcttgatcttagctggaaaaatctgccaactttacacagtatttacttggttttgacccacagaatatagcacgttgtgcaaactgtcgattcagcgaaacttaaaaaagacaagaaactactgaggagcttagtaactgctgtttctgtacgtagtgtttaatcttccaagcacatctagtgtctgtcagtttctaattggcatgtgtaggctgctctgtgactgaagaattttcaaaccagctttacacccttcaggaaaaatcccttgtgattggatgtttactatctgccaggaaactggtactcaagatgttgaagctacagttattttatgatagcacacttcccttgatctgcttatttttattccatcaccatttaccctttttttttttaaattttgtagccattcttatgatgctcttgatttgttggttacacaaatcaattttattaaaaatccaaagataagtctttaggtatattttgtaccaaattaaattagaagacaaaaattgtgctttcatagttgctacaaaggtaaataatggagagatttggtacaaaacaacaaaatatatatatattctcatatatatatatatagctgataaaattacctgaggagtgtaatgcttatttttttgtgtatatctttgcaatctattttatatatattgacaaaagagactgtgaaatacttagccatgcagaatatgtgaccagaccagagcatgtgtaggaagactttacagtaatcattaactctaccccgaaatgatggactacaagttataatgtgtgttacctacacttcaatcagtaatattagcaaatctccaaatgttagtcacattggtttgtctcccttgtacattctttattcatgatattacagtgctgtaactgggtggtcctttttaaacaaaacattatttgcaaaacagagggtattatttgtttttaaagcttttgtaaataaaggcttcaaaatgttttcttataa

SEQ ID NO: 319045 - DNA, 1680 bp, Homo sapiens
  misc_feature (1524)..(1524): n is a, c, g, or t
atctagcgcccccgtcaggacgtgcgaaaagcgacggcgcagcacggtgcggcgcagctcctgctcgcctttcccttcgctgggcgagaggtgtctatggggcacccgctgccgccgccgctaccgccaccgccaccgccaccgccgccgagtgctgtctctatggcgaggaggaggaggaggagcgcgagctcagcgacacaagtacataaataaaggataaaatattttatgaaacaaatcttcaatcaagtataacattttgatgcttggcatctagactcccttgtgccctcactatgccagcggcaactgtagatcatagccaaagaatttgtgaagtttgggcttgcaacttggatgaagagatgaagaaaattcgtcaagttatccgaaaatataattacgttgctatggacaccgagtttccaggtgtggttgcaagacccattggagaattcaggagcaatgctgactatcaataccaactattgcggtgtaatgtagacttgttaaagataattcagctaggactgacatttatgaatgagcaaggagaataccctccaggaacttcaacttggcagtttaattttaaatttaatttgacggaggacatgtatgcccaggactctatagagctactaacaacatctggtatccagtttaaaaaacatgaggaggaaggaattgaaacccagtactttgcagaacttcttatgacttctggagtggtcctctgtgaaggggtcaaatggttgtcatttcatagcggttacgactttggctacttaatcaaaatcctaaccaactctaacttgcctgaagaagaacttgacttctttgagatccttcgattgttttttcctgtcatttatgatgtgaagtacctcatgaagagctgcaaaaatctcaaaggtggattacaggaggtggcagaacagttagagctggaacggataggaccacaacatcaggcaggatctgattcattgctcacaggaatggcctttttcaaaatgagagaaatgttctttgaagatcatattgatgatgccaaatattgtggtcatttgtatggccttggttctggttcatcctatgtacagaatggcacagggaatgcatatgaagaggaagccaacaagcagtcatgacatgaaatagtccttttatttttatttcgagctacacacatgcttgtatataggttttatctctggttgaatccctcgaacaatagacagtacctttcccccccctttcatggcccattttattgtctgcctttcagtactaagtatgaccgttcctatctcagatcttaataaaaagaaaaaaaaaaaaaaaattgtgtgtggggcgcgcccgtgggcccctggaaaaagtttttaaaaccttcggttgggggcggcgggggccccaggggttagggtaaccgtgggccaaagggtgttcccaaagggagaactcgggcgccaactgagacgataaggggccgggggttctcttccaccaacttanaaaacacgcgccggggcgggcacaccgagagccggtccgtggaacaatcccaagaagggagaggtccgggagggccatcaccgggggatctcctatcaaacgagggggtcctacgcgaagacgcccggatactaaattaaccgccggggtcggggt

SEQ ID NO: 319046 - DNA, 2815 bp, Homo sapiens
ggctttgtacctggggcagcgcagtgggacggaaattgggagtggagggcggtggcctagatcctcacctcttcgtattgtttcacgcggcagtgcttgggagtcagtgtagctccagtcagtgttatcagcaccttcgcactggcgctttgccagggaagagagttatctatggcttgaatacctcggtgccgtcctctcgtttctctgggaaactgcagtacggagatgctatctccagtaatgagaaggcctttggtgtctcttcggggcttctgggactgcagtagagagagagaaggatttgaaatttccctgcccaagaatcaacaggaactctgtttatagaccagaaatgtgacatctatctttggtacataaataaaggataaaatattttatgaaacaaatcttcaatcaagtataacattttgatgcttggcatctagactcccttgtgccctcactatgccagcggcaactgtagatcatagccaaagaatttgtgaagtttgggcttgcaacttggatgaagagatgaagaaaattcgtcaagttatccgaaaatataattacgttgctatggacaccgagtttccaggtgtggttgcaagacccattggagaattcaggagcaatgctgactatcaataccaactattgcggtgtaatgtagacttgttaaagataattcagctaggactgacatttatgaatgagcaaggagaataccctccaggaacttcaacttggcagtttaattttaaatttaatttgacggaggacatgtatgcccaggactctatagagctactaacaacatctggtatccagtttaaaaaacatgaggaggaaggaattgaaacccagtactttgcagaacttcttatgacttctggagtggtcctctgtgaaggggtcaaatggttgtcatttcatagcggttacgactttggctacttaatcaaaatcctaaccaactctaacttgcctgaagaagaacttgacttctttgagatccttcgattgttttttcctgtcatttatgatgtgaagtacctcatgaagagctgcaaaaatctcaaaggtggattacaggaggtggcagaacagttagagctggaacggataggaccacaacatcaggcaggatctgattcattgctcacaggaatggcctttttcaaaatgagagaaatgttctttgaagatcatattgatgatgccaaatattgtggtcatttgtatggccttggttctggttcatcctatgtacagaatggcacagggaatgcatatgaagaggaagccaacaagcagtcatgacatgaaatagtccttttatttttatttcgagctacacacatgcttgtatataggttttatctctggttgaatccctcgaacaatagacagtacctttcccccccctttcatggcccattttattgtctgcctttcagtactaagtatgaccgttcctatctcagatcttaataaaaagaaaaaaaaaaacgcattcaggttaaatttggccttaatttaatatacttgttagcaagcgtgtgtgacagagagtggggaaagctacatcattgaatattttgataaactttaccgacttgagtttggtttatttttcccttttcctaaattaactagcactgactgtaatttatttccctgtttcacgtctctcccttccattctgcaggagttttagctatttgagatcgtggaccatcagttttgcactttagagagtgtttctgactctaaacctgttttatcagaaaatttgttttttcttgatcttagctggaaaaatctgccaactttacacagtatttacttggttttgacccacagaatatagcacgttgtgcaaactgtcgattcagcgaaacttaaaaaagacaagaaactactgaggagcttagtaactgctgtttctgtacgtagtgtttaatcttccaagcacatctagtgtctgtcagtttctaattggcatgtgtaggctgctctgtgactgaagaattttcaaaccagctttacacccttcaggaaaaatcccttgtgattggatgtttactatctgccaggaaactggtactcaagatgttgaagctacagttattttatgatagcacacttcccttgatctgcttatttttattccatcaccatttaccctttttttttttaaattttgtagccattcttatgatgctcttgatttgttggttacacaaatcaattttattaaaaatccaaagataagtctttaggtatattttgtaccaaattaaattagaagacaaaaattgtgctttcatagttgctacaaaggtaaataatggagagatttggtacaaaacaacaaaatatatatatattctcatatatatatatatagctgataaaattacctgaggagtgtaatgcttatttttttgtgtatatctttgcaatctattttatatatattgacaaaagagactgtgaaatacttagccatgcagaatatgtgaccagaccagagcatgtgtaggaagactttacagtaatcattaactctaccccgaaatgatggactacaagttataatgtgtgttacctacacttcaatcagtaatattagcaaatctccaaatgttagtcacattggtttgtctcccttgtacattctttattcatgatattacagtgctgtaactgggtggtcctttttaaacaaaacattatttgcaaaacagagggtattatttgtttttaaagcttttgtaaataaaggcttcaaaatgttttcttataa

SEQ ID NO: 319047 - DNA, 2757 bp, Homo sapiens
ggctttgtacctggggcagcgcagtgggacggaaattgggagtggagggcggtggcctagatcctcacctcttcgtattgtttcacgcggcagtgcttgggagtcagtgtagctccagtcagtgttatcagcaccttcgcactggcgctttgccagggaagagagttatctatggcttgaatacctcggtgccgtcctctcgtttctctgggaaactgcagtacggagatgctatctccaaaggatttgaaatttccctgcccaagaatcaacaggaactctgtttatagaccagaaatgtgacatctatctttggtacataaataaaggataaaatattttatgaaacaaatcttcaatcaagtataacattttgatgcttggcatctagactcccttgtgccctcactatgccagcggcaactgtagatcatagccaaagaatttgtgaagtttgggcttgcaacttggatgaagagatgaagaaaattcgtcaagttatccgaaaatataattacgttgctatggacaccgagtttccaggtgtggttgcaagacccattggagaattcaggagcaatgctgactatcaataccaactattgcggtgtaatgtagacttgttaaagataattcagctaggactgacatttatgaatgagcaaggagaataccctccaggaacttcaacttggcagtttaattttaaatttaatttgacggaggacatgtatgcccaggactctatagagctactaacaacatctggtatccagtttaaaaaacatgaggaggaaggaattgaaacccagtactttgcagaacttcttatgacttctggagtggtcctctgtgaaggggtcaaatggttgtcatttcatagcggttacgactttggctacttaatcaaaatcctaaccaactctaacttgcctgaagaagaacttgacttctttgagatccttcgattgttttttcctgtcatttatgatgtgaagtacctcatgaagagctgcaaaaatctcaaaggtggattacaggaggtggcagaacagttagagctggaacggataggaccacaacatcaggcaggatctgattcattgctcacaggaatggcctttttcaaaatgagagaaatgttctttgaagatcatattgatgatgccaaatattgtggtcatttgtatggccttggttctggttcatcctatgtacagaatggcacagggaatgcatatgaagaggaagccaacaagcagtcatgacatgaaatagtccttttatttttatttcgagctacacacatgcttgtatataggttttatctctggttgaatccctcgaacaatagacagtacctttcccccccctttcatggcccattttattgtctgcctttcagtactaagtatgaccgttcctatctcagatcttaataaaaagaaaaaaaaaaacgcattcaggttaaatttggccttaatttaatatacttgttagcaagcgtgtgtgacagagagtggggaaagctacatcattgaatattttgataaactttaccgacttgagtttggtttatttttcccttttcctaaattaactagcactgactgtaatttatttccctgtttcacgtctctcccttccattctgcaggagttttagctatttgagatcgtggaccatcagttttgcactttagagagtgtttctgactctaaacctgttttatcagaaaatttgttttttcttgatcttagctggaaaaatctgccaactttacacagtatttacttggttttgacccacagaatatagcacgttgtgcaaactgtcgattcagcgaaacttaaaaaagacaagaaactactgaggagcttagtaactgctgtttctgtacgtagtgtttaatcttccaagcacatctagtgtctgtcagtttctaattggcatgtgtaggctgctctgtgactgaagaattttcaaaccagctttacacccttcaggaaaaatcccttgtgattggatgtttactatctgccaggaaactggtactcaagatgttgaagctacagttattttatgatagcacacttcccttgatctgcttatttttattccatcaccatttaccctttttttttttaaattttgtagccattcttatgatgctcttgatttgttggttacacaaatcaattttattaaaaatccaaagataagtctttaggtatattttgtaccaaattaaattagaagacaaaaattgtgctttcatagttgctacaaaggtaaataatggagagatttggtacaaaacaacaaaatatatatatattctcatatatatatatatagctgataaaattacctgaggagtgtaatgcttatttttttgtgtatatctttgcaatctattttatatatattgacaaaagagactgtgaaatacttagccatgcagaatatgtgaccagaccagagcatgtgtaggaagactttacagtaatcattaactctaccccgaaatgatggactacaagttataatgtgtgttacctacacttcaatcagtaatattagcaaatctccaaatgttagtcacattggtttgtctcccttgtacattctttattcatgatattacagtgctgtaactgggtggtcctttttaaacaaaacattatttgcaaaacagagggtattatttgtttttaaagcttttgtaaataaaggcttcaaaatgttttcttataa

SEQ ID NO: 319048 - DNA, 2523 bp, Homo sapiens
atctagcgcccccgtcaggacgtgcgaaaagcgacggcgcagcacggtgcggcgcagctcctgctcgcctttcccttcgctgggcgagaggtgtctatggggcacccgctgccgccgccgctaccgccaccgccaccgccaccgccgccgagtgctgtctctatggcgaggaggaggaggaggagcgcgagctcagcgacacaagtacataaataaaggataaaatattttatgaaacaaatcttcaatcaagtataacattttgatgcttggcatctagactcccttgtgccctcactatgccagcggcaactgtagatcatagccaaagaatttgtgaagtttgggcttgcaacttggatgaagagatgaagaaaattcgtcaagttatccgaaaatataattacgttgctatggacaccgagtttccaggtgtggttgcaagacccattggagaattcaggagcaatgctgactatcaataccaactattgcggtgtaatgtagacttgttaaagataattcagctaggactgacatttatgaatgagcaaggagaataccctccaggaacttcaacttggcagtttaattttaaatttaatttgacggaggacatgtatgcccaggactctatagagctactaacaacatctggtatccagtttaaaaaacatgaggaggaaggaattgaaacccagtactttgcagaacttcttatgacttctggagtggtcctctgtgaaggggtcaaatggttgtcatttcatagcggttacgactttggctacttaatcaaaatcctaaccaactctaacttgcctgaagaagaacttgacttctttgagatccttcgattgttttttcctgtcatttatgatgtgaagtacctcatgaagagctgcaaaaatctcaaaggtggattacaggaggtggcagaacagttagagctggaacggataggaccacaacatcaggcaggatctgattcattgctcacagcatatgaagaggaagccaacaagcagtcatgacatgaaatagtccttttatttttatttcgagctacacacatgcttgtatataggttttatctctggttgaatccctcgaacaatagacagtacctttcccccccctttcatggcccattttattgtctgcctttcagtactaagtatgaccgttcctatctcagatcttaataaaaagaaaaaaaaaaacgcattcaggttaaatttggccttaatttaatatacttgttagcaagcgtgtgtgacagagagtggggaaagctacatcattgaatattttgataaactttaccgacttgagtttggtttatttttcccttttcctaaattaactagcactgactgtaatttatttccctgtttcacgtctctcccttccattctgcaggagttttagctatttgagatcgtggaccatcagttttgcactttagagagtgtttctgactctaaacctgttttatcagaaaatttgttttttcttgatcttagctggaaaaatctgccaactttacacagtatttacttggttttgacccacagaatatagcacgttgtgcaaactgtcgattcagcgaaacttaaaaaagacaagaaactactgaggagcttagtaactgctgtttctgtacgtagtgtttaatcttccaagcacatctagtgtctgtcagtttctaattggcatgtgtaggctgctctgtgactgaagaattttcaaaccagctttacacccttcaggaaaaatcccttgtgattggatgtttactatctgccaggaaactggtactcaagatgttgaagctacagttattttatgatagcacacttcccttgatctgcttatttttattccatcaccatttaccctttttttttttaaattttgtagccattcttatgatgctcttgatttgttggttacacaaatcaattttattaaaaatccaaagataagtctttaggtatattttgtaccaaattaaattagaagacaaaaattgtgctttcatagttgctacaaaggtaaataatggagagatttggtacaaaacaacaaaatatatatatattctcatatatatatatatagctgataaaattacctgaggagtgtaatgcttatttttttgtgtatatctttgcaatctattttatatatattgacaaaagagactgtgaaatacttagccatgcagaatatgtgaccagaccagagcatgtgtaggaagactttacagtaatcattaactctaccccgaaatgatggactacaagttataatgtgtgttacctacacttcaatcagtaatattagcaaatctccaaatgttagtcacattggtttgtctcccttgtacattctttattcatgatattacagtgctgtaactgggtggtcctttttaaacaaaacattatttgcaaaacagagggtattatttgtttttaaagcttttgtaaataaaggcttcaaaatgttttcttataa

SEQ ID NO: 319049 - DNA, 2712 bp, Homo sapiens
atctagcgcccccgtcaggacgtgcgaaaagcgacggcgcagcacggtgcggcgcagctcctgctcgcctttcccttcgctgggcgagaggtgtctatggggcacccgctgccgccgccgctaccgccaccgccaccgccaccgccgccgagtgctgtctctatggcgaggaggaggaggaggagcgcgagctcagcgacacaagtacataaataaaggataaaatattttatgaaacaaatcttcaatcaagtataacattttgatgcttggcatctagactcccttgtgccctcactatgccagcggcaactgtagatcatagccaaagaatttgtgaagtttgggcttgcaacttggatgaagagatgaagaaaattcgtcaagttatccgaaaatataattacgttgctatggacaccgagtttccaggtgtggttgcaagacccattggagaattcaggagcaatgctgactatcaataccaactattgcggtgtaatgtagacttgttaaagataattcagctaggactgacatttatgaatgagcaaggagaataccctccaggaacttcaacttggcagtttaattttaaatttaatttgacgctgggcgtggtggctcacgcctgtaatcccagcactttgggaggccgaggcgggcggatcacaacggaggacatgtatgcccaggactctatagagctactaacaacatctggtatccagtttaaaaaacatgaggaggaaggaattgaaacccagtactttgcagaacttcttatgacttctggagtggtcctctgtgaaggggtcaaatggttgtcatttcatagcggttacgactttggctacttaatcaaaatcctaaccaactctaacttgcctgaagaagaacttgacttctttgagatccttcgattgttttttcctgtcatttatgatgtgaagtacctcatgaagagctgcaaaaatctcaaaggtggattacaggaggtggcagaacagttagagctggaacggataggaccacaacatcaggcaggatctgattcattgctcacaggaatggcctttttcaaaatgagagaaatgttctttgaagatcatattgatgatgccaaatattgtggtcatttgtatggccttggttctggttcatcctatgtacagaatggcacagggaatgcatatgaagaggaagccaacaagcagtcatgacatgaaatagtccttttatttttatttcgagctacacacatgcttgtatataggttttatctctggttgaatccctcgaacaatagacagtacctttcccccccctttcatggcccattttattgtctgcctttcagtactaagtatgaccgttcctatctcagatcttaataaaaagaaaaaaaaaaacgcattcaggttaaatttggccttaatttaatatacttgttagcaagcgtgtgtgacagagagtggggaaagctacatcattgaatattttgataaactttaccgacttgagtttggtttatttttcccttttcctaaattaactagcactgactgtaatttatttccctgtttcacgtctctcccttccattctgcaggagttttagctatttgagatcgtggaccatcagttttgcactttagagagtgtttctgactctaaacctgttttatcagaaaatttgttttttcttgatcttagctggaaaaatctgccaactttacacagtatttacttggttttgacccacagaatatagcacgttgtgcaaactgtcgattcagcgaaacttaaaaaagacaagaaactactgaggagcttagtaactgctgtttctgtacgtagtgtttaatcttccaagcacatctagtgtctgtcagtttctaattggcatgtgtaggctgctctgtgactgaagaattttcaaaccagctttacacccttcaggaaaaatcccttgtgattggatgtttactatctgccaggaaactggtactcaagatgttgaagctacagttattttatgatagcacacttcccttgatctgcttatttttattccatcaccatttaccctttttttttttaaattttgtagccattcttatgatgctcttgatttgttggttacacaaatcaattttattaaaaatccaaagataagtctttaggtatattttgtaccaaattaaattagaagacaaaaattgtgctttcatagttgctacaaaggtaaataatggagagatttggtacaaaacaacaaaatatatatatattctcatatatatatatatagctgataaaattacctgaggagtgtaatgcttatttttttgtgtatatctttgcaatctattttatatatattgacaaaagagactgtgaaatacttagccatgcagaatatgtgaccagaccagagcatgtgtaggaagactttacagtaatcattaactctaccccgaaatgatggactacaagttataatgtgtgttacctacacttcaatcagtaatattagcaaatctccaaatgttagtcacattggtttgtctcccttgtacattctttattcatgatattacagtgctgtaactgggtggtcctttttaaacaaaacattatttgcaaaacagagggtattatttgtttttaaagcttttgtaaataaaggcttcaaaatgttttcttataa

SEQ ID NO: 319050 - DNA, 2535 bp, Homo sapiens
atctagcgcccccgtcaggacgtgcgaaaagcgacggcgcagcacggtgcggcgcagctcctgctcgcctttcccttcgctgggcgagaggtgtctatggggcacccgctgccgccgccgctaccgccaccgccaccgccaccgccgccgagtgctgtctctatggcgaggaggaggaggaggagcgcgagctcagcgacacaagtacataaataaaggataaaatattttatgaaacaaatcttcaatcaagtataacattttgatgcttggcatctagactcccttgtgccctcactatgccagcggcaactgtagatcatagccaaagaatttgtgaagtttgggcttgcaacttggatgaagagatgaagaaaattcgtcaagttatccgaaaatataattacgttgctatggacaccgagtttccaggtgtggttgcaagacccattggagaattcaggagcaatgctgactatcaataccaactattgcggtgtaatgtagacttgttaaagataattcagctaggactgacatttatgaatgagcaaggagaataccctccaggaacttcaacttggcagtttaattttaaatttaatttgacggaggacatgtatgcccaggactctatagagctactaacaacatctggtatccagtttaaaaaacatgaggaggaaggaattgaaacccagtactttgcagaacttcttatgacttctggagtggtcctctgtgaaggggtcaaatggttgtcatttcatagcggttacgactttggctacttaatcaaaatcctaaccaactctaacttgcctgaagaagaacttgacttctttgagatccttcgattgttttttcctgtcatttatgatgtgaagtacctcatgaagagctgcaaaaatctcaaaatgttctttgaagatcatattgatgatgccaaatattgtggtcatttgtatggccttggttctggttcatcctatgtacagaatggcacagggaatgcatatgaagaggaagccaacaagcagtcatgacatgaaatagtccttttatttttatttcgagctacacacatgcttgtatataggttttatctctggttgaatccctcgaacaatagacagtacctttcccccccctttcatggcccattttattgtctgcctttcagtactaagtatgaccgttcctatctcagatcttaataaaaagaaaaaaaaaaacgcattcaggttaaatttggccttaatttaatatacttgttagcaagcgtgtgtgacagagagtggggaaagctacatcattgaatattttgataaactttaccgacttgagtttggtttatttttcccttttcctaaattaactagcactgactgtaatttatttccctgtttcacgtctctcccttccattctgcaggagttttagctatttgagatcgtggaccatcagttttgcactttagagagtgtttctgactctaaacctgttttatcagaaaatttgttttttcttgatcttagctggaaaaatctgccaactttacacagtatttacttggttttgacccacagaatatagcacgttgtgcaaactgtcgattcagcgaaacttaaaaaagacaagaaactactgaggagcttagtaactgctgtttctgtacgtagtgtttaatcttccaagcacatctagtgtctgtcagtttctaattggcatgtgtaggctgctctgtgactgaagaattttcaaaccagctttacacccttcaggaaaaatcccttgtgattggatgtttactatctgccaggaaactggtactcaagatgttgaagctacagttattttatgatagcacacttcccttgatctgcttatttttattccatcaccatttaccctttttttttttaaattttgtagccattcttatgatgctcttgatttgttggttacacaaatcaattttattaaaaatccaaagataagtctttaggtatattttgtaccaaattaaattagaagacaaaaattgtgctttcatagttgctacaaaggtaaataatggagagatttggtacaaaacaacaaaatatatatatattctcatatatatatatatagctgataaaattacctgaggagtgtaatgcttatttttttgtgtatatctttgcaatctattttatatatattgacaaaagagactgtgaaatacttagccatgcagaatatgtgaccagaccagagcatgtgtaggaagactttacagtaatcattaactctaccccgaaatgatggactacaagttataatgtgtgttacctacacttcaatcagtaatattagcaaatctccaaatgttagtcacattggtttgtctcccttgtacattctttattcatgatattacagtgctgtaactgggtggtcctttttaaacaaaacattatttgcaaaacagagggtattatttgtttttaaagcttttgtaaataaaggcttcaaaatgttttcttataa

SEQ ID NO: 319051 - DNA, 3584 bp, Homo sapiens
  misc_feature (760)..(760): n is a, c, g, or t
tatctctaacataacctatgtgtagggaaaagcacacacatgtttactgcccattataaaaaattcaggatccttaaattcagggctcctctcctatacgcaacccactacatgtacatgtgtcccctttctgcattgccataggaactgtggctcgggaaaccagtgcaaatgccaatacccttgttactattattgcagtgaataacgagctgtcctttgtctctagcccagtggtctcatgtctaatgttagagatacgtatctctaacattggtggattacaggaggtggcagaacagttagagctggaacggataggaccacaacatcaggcaggatctgattcattgctcacaggaatggcctttttcaaaatgagagaagtatgaagacatcactgcctttttctcagttggttgttaggttgagaacattaaaaatcttgtggccaaagattttgggcaacaagtacctactaagtaaagatataatgttagagataccatatgagtcacatccaccacacttaaaagtattcaaaaataagtcatcttgaaatgtagttcagaaggaactgggagaacatgttcatcatagaaccaacaattttaaaacataaactacctgagaagtcatgtaggtccaaccatattatttctcaggtgagaaaacaggctaataacttccatgattaaacacattactagtgggagaactccagagttcttttctgactcccattggtgctccttctacnaggcaaggaatctttatattaggtttattctagcatgaccccttttaaggtttaaactggtgataaatatattatttgctcatgtcattcttcagtgctttgaagattttatagagaagaactcaggctcttttactgcattgagtcttaaaaggggggttgaattccgaagggatcaaataaatccaacgtagtagttgcatcagaaaccatattaggaaaaccctccttaaacggcaaaaggcagagatcagttccttgagtataaagtgttagggatggaagaatgaaactaaatgaacccattatctactcctaagtaattaagtgatgtgcacagatacacctagctataggtaaacaggaaaattggttgtgcaaaaaacaagtgaggtttttcttgactataagttttcccttttggaaaaattcgctgtggatttgagtatattttctcttagacattaaattgagactgagaatttaaaactttttgtagcaatgtattgataatagaaagcattaaagctgttttgctaagtagtgttgttgattcagaagtgatttggactatccattcatgacacgtaaatattttgttttggactccttccaattgtttcattagataattgaaacaaccttttggattttttagctttgcattttaaaaatgtcttaatggtttatttaactaaaggtggatttctggcactaatttatctttatttttcttggcttcttcaaggacagtaatagagtgtgaatgtttggattttactgtccatgactttatggtttgatcatttatagccagctcagccttgcatacagatttaagacagtttatgaacctaaactttttttcccccaccatcattggctttcttcattcttgagtattgttaaattaatggaatagttatttttccatgatgaaaaattcttataaaaatggtctaaatggaaaagacatgcatttatacactttttttgtagtctctttctttggtttctgagctctgtacttttgaggacattagtcttactcattgaactgaaatgcgtagcctcaaaggaacaccatagaaaagagccatcattattgtcagtgaacagtcagtacttacattgctgaaatataaattacaagtggttccttttggttaaaattatcttttttttttcttcaaaattcctttttagatgttctttgaagatcatattgatgatgccaaatattgtggtcatttgtatggccttggttctggttcatcctatgtacagaatggcacagggaatgcatatgaagaggaagccaacaagcagtcatgacatgaaatagtccttttatttttatttcgagctacacacatgcttgtatataggttttatctctggttgaatccctcgaacaatagacagtacctttcccccccctttcatggcccattttattgtctgcctttcagtactaagtatgaccgttcctatctcagatcttaataaaaagaaaaaaaaaaacgcattcaggttaaatttggccttaatttaatatacttgttagcaagcgtgtgtgacagagagtggggaaagctacatcattgaatattttgataaactttaccgacttgagtttggtttatttttcccttttcctaaattaactagcactgactgtaatttatttccctgtttcacgtctctcccttccattctgcaggagttttagctatttgagatcgtggaccatcagttttgcactttagagagtgtttctgactctaaacctgttttatcagaaaatttgttttttcttgatcttagctggaaaaatctgccaactttacacagtatttacttggttttgacccacagaatatagcacgttgtgcaaactgtcgattcagcgaaacttaaaaaagacaagaaactactgaggagcttagtaactgctgtttctgtacgtagtgtttaatcttccaagcacatctagtgtctgtcagtttctaattggcatgtgtaggctgctctgtgactgaagaattttcaaaccagctttacacccttcaggaaaaatcccttgtgattggatgtttactatctgccaggaaactggtactcaagatgttgaagctacagttattttatgatagcacacttcccttgatctgcttatttttattccatcaccatttaccctttttttttttaaattttgtagccattcttatgatgctcttgatttgttggttacacaaatcaattttattaaaaatccaaagataagtctttaggtatattttgtaccaaattaaattagaagacaaaaattgtgctttcatagttgctacaaaggtaaataatggagagatttggtacaaaacaacaaaatatatatatattctcatatatatatatatagctgataaaattacctgaggagtgtaatgcttatttttttgtgtatatctttgcaatctattttatatatattgacaaaagagactgtgaaatacttagccatgcagaatatgtgaccagaccagagcatgtgtaggaagactttacagtaatcattaactctaccccgaaatgatggactacaagttataatgtgtgttacctacacttcaatcagtaatattagcaaatctccaaatgttagtcacattggtttgtctcccttgtacattctttattcatgatattacagtgctgtaactgggtggtcctttttaaacaaaacattatttgcaaaacagagggtattatttgtttttaaagcttttgtaaataaaggcttcaaaatgttttcttataa

SEQ ID NO: 319052 - DNA, 3343 bp, Homo sapiens
  misc_feature (519)..(519): n is a, c, g, or t
tcttcttgacaagcaattttttattttttctaggggtggattacaggaggtggcagaacagttagagctggaacggataggaccacaacatcaggcaggatctgattcattgctcacaggaatggcctttttcaaaatgagagaagtatgaagacatcactgcctttttctcagttggttgttaggttgagaacattaaaaatcttgtggccaaagattttgggcaacaagtacctactaagtaaagatataatgttagagataccatatgagtcacatccaccacacttaaaagtattcaaaaataagtcatcttgaaatgtagttcagaaggaactgggagaacatgttcatcatagaaccaacaattttaaaacataaactacctgagaagtcatgtaggtccaaccatattatttctcaggtgagaaaacaggctaataacttccatgattaaacacattactagtgggagaactccagagttcttttctgactcccattggtgctccttctacnaggcaaggaatctttatattaggtttattctagcatgaccccttttaaggtttaaactggtgataaatatattatttgctcatgtcattcttcagtgctttgaagattttatagagaagaactcaggctcttttactgcattgagtcttaaaaggggggttgaattccgaagggatcaaataaatccaacgtagtagttgcatcagaaaccatattaggaaaaccctccttaaacggcaaaaggcagagatcagttccttgagtataaagtgttagggatggaagaatgaaactaaatgaacccattatctactcctaagtaattaagtgatgtgcacagatacacctagctataggtaaacaggaaaattggttgtgcaaaaaacaagtgaggtttttcttgactataagttttcccttttggaaaaattcgctgtggatttgagtatattttctcttagacattaaattgagactgagaatttaaaactttttgtagcaatgtattgataatagaaagcattaaagctgttttgctaagtagtgttgttgattcagaagtgatttggactatccattcatgacacgtaaatattttgttttggactccttccaattgtttcattagataattgaaacaaccttttggattttttagctttgcattttaaaaatgtcttaatggtttatttaactaaaggtggatttctggcactaatttatctttatttttcttggcttcttcaaggacagtaatagagtgtgaatgtttggattttactgtccatgactttatggtttgatcatttatagccagctcagccttgcatacagatttaagacagtttatgaacctaaactttttttcccccaccatcattggctttcttcattcttgagtattgttaaattaatggaatagttatttttccatgatgaaaaattcttataaaaatggtctaaatggaaaagacatgcatttatacactttttttgtagtctctttctttggtttctgagctctgtacttttgaggacattagtcttactcattgaactgaaatgcgtagcctcaaaggaacaccatagaaaagagccatcattattgtcagtgaacagtcagtacttacattgctgaaatataaattacaagtggttccttttggttaaaattatcttttttttttcttcaaaattcctttttagatgttctttgaagatcatattgatgatgccaaatattgtggtcatttgtatggccttggttctggttcatcctatgtacagaatggcacagggaatgcatatgaagaggaagccaacaagcagtcatgacatgaaatagtccttttatttttatttcgagctacacacatgcttgtatataggttttatctctggttgaatccctcgaacaatagacagtacctttcccccccctttcatggcccattttattgtctgcctttcagtactaagtatgaccgttcctatctcagatcttaataaaaagaaaaaaaaaaacgcattcaggttaaatttggccttaatttaatatacttgttagcaagcgtgtgtgacagagagtggggaaagctacatcattgaatattttgataaactttaccgacttgagtttggtttatttttcccttttcctaaattaactagcactgactgtaatttatttccctgtttcacgtctctcccttccattctgcaggagttttagctatttgagatcgtggaccatcagttttgcactttagagagtgtttctgactctaaacctgttttatcagaaaatttgttttttcttgatcttagctggaaaaatctgccaactttacacagtatttacttggttttgacccacagaatatagcacgttgtgcaaactgtcgattcagcgaaacttaaaaaagacaagaaactactgaggagcttagtaactgctgtttctgtacgtagtgtttaatcttccaagcacatctagtgtctgtcagtttctaattggcatgtgtaggctgctctgtgactgaagaattttcaaaccagctttacacccttcaggaaaaatcccttgtgattggatgtttactatctgccaggaaactggtactcaagatgttgaagctacagttattttatgatagcacacttcccttgatctgcttatttttattccatcaccatttaccctttttttttttaaattttgtagccattcttatgatgctcttgatttgttggttacacaaatcaattttattaaaaatccaaagataagtctttaggtatattttgtaccaaattaaattagaagacaaaaattgtgctttcatagttgctacaaaggtaaataatggagagatttggtacaaaacaacaaaatatatatatattctcatatatatatatatagctgataaaattacctgaggagtgtaatgcttatttttttgtgtatatctttgcaatctattttatatatattgacaaaagagactgtgaaatacttagccatgcagaatatgtgaccagaccagagcatgtgtaggaagactttacagtaatcattaactctaccccgaaatgatggactacaagttataatgtgtgttacctacacttcaatcagtaatattagcaaatctccaaatgttagtcacattggtttgtctcccttgtacattctttattcatgatattacagtgctgtaactgggtggtcctttttaaacaaaacattatttgcaaaacagagggtattatttgtttttaaagcttttgtaaataaaggcttcaaaatgttttcttataa

SEQ ID NO: 319053 - DNA, 1945 bp, Homo sapiens
  misc_feature (1402)..(1402): n is a, c, g, or t
atctagcgcccccgtcaggacgtgcgaaaagcgacggcgcagcacggtgcggcgcagctcctgctcgcctttcccttcgctgggcgagaggtgtctatggggcacccgctgccgccgccgctaccgccaccgccaccgccaccgccgccgagtgctgtctctatggcgaggaggaggaggaggagcgcgagctcagcgacacaagtacataaataaaggataaaatattttatgaaacaaatcttcaatcaagtataacattttgatgcttggcatctagactcccttgtgccctcactatgccagcggcaactgtagatcatagccaaagaatttgtgaagtttgggcttgcaacttggatgaagagatgaagaaaattcgtcaagttatccgaaaatataattacgttgctatggacaccgagtttccaggtgtggttgcaagacccattggagaattcaggagcaatgctgactatcaataccaactattgcggtgtaatgtagacttgttaaagataattcagctaggactgacatttatgaatgagcaaggagaataccctccaggaacttcaacttggcagtttaattttaaatttaatttgacggaggacatgtatgcccaggactctatagagctactaacaacatctggtatccagtttaaaaaacatgaggaggaaggaattgaaacccagtactttgcagaacttcttatgacttctggagtggtcctctgtgaaggggtcaaatggttgtcatttcatagcggttacgactttggctacttaatcaaaatcctaaccaactctaacttgcctgaagaagaacttgacttctttgagatccttcgattgttttttcctgtcatttatgatgtgaagtacctcatgaagagctgcaaaaatctcaaaggtggattacaggaggtggcagaacagttagagctggaacggataggaccacaacatcaggcaggatctgattcattgctcacaggaatggcctttttcaaaatgagagaagtatgaagacatcactgcctttttctcagttggttgttaggttgagaacattaaaaatcttgtggccaaagattttgggcaacaagtacctactaagtaaagatataatgttagagataccatatgagtcacatccaccacacttaaaagtattcaaaaataagtcatcttgaaatgtagttcagaaggaactgggagaacatgttcatcatagaaccaacaattttaaaacataaactacctgagaagtcatgtaggtccaaccatattatttctcaggtgagaaaacaggctaataacttccatgattaaacacattactagtgggagaactccagagttcttttctgactcccattggtgctccttctacnaggcaaggaatctttatattaggtttattctagcatgaccccttttaaggtttaaactggtgataaatatattatttgctcatgtcattcttcagtgctttgaagattttatagagaagaactcaggctcttttactgcattgagtcttaaaaggggggttgaattccgaagggatcaaataaatccaacgtagtagttgcatcagaaaccatattaggaaaaccctccttaaacggcaaaaggcagagatcagttccttgagtataaagtgttagggatggaagaatgaaactaaatgaacccattatctactcctaagtaattaagtgatgtgcacagatacacctagctataggtaaacaggaaaattggttgtgcaaaaaacaagtgaggtttttcttgactataagttttcccttttggaaaaattcgctgtggatttgagtatattttctcttagacattaaattgagactgagaatttaaaactttttgtagcaatgtattgataatagaaagcattaaagctgttttgctaagta

SEQ ID NO: 319054 - DNA, 1269 bp, Homo sapiens
  misc_feature (1144)..(1144): n is a, c, g, or t
  misc_feature (1147)..(1147): n is a, c, g, or t
  misc_feature (1153)..(1153): n is a, c, g, or t
  misc_feature (1159)..(1159): n is a, c, g, or t
  misc_feature (1166)..(1166): n is a, c, g, or t
atctagcgcccccgtcaggacgtgcgaaaagcgacggcgcagcacggtgcggcgcagctcctgctcgcctttcccttcgctgggcgagaggtgtctatggggcacccgctgccgccgccgctaccgccaccgccaccgccaccgccgccgagtgctgtctctatggcgaggaggaggaggaggagcgcgagctcagcgacacaagtacataaataaaggataaaatattttatgaaacaaatcttcaatcaagtataacattttgatgcttggcatctagactcccttgtgccctcactatgccagcggcaactgtagatcatagccaaagaatttgtgaagtttgggcttgcaacttggatgaagagatgaagaaaattcgtcaagttatccgaaaatataattacgttgctatggacaccgagtttccaggtgtggttgcaagacccattggagaattcaggagcaatgctgactatcaataccaactattgcggtgtaatgtagacttgttaaagataattcagctaggactgacatttatgaatgagcaaggagaataccctccaggaacttcaacttggcagtttaattttaaatttaatttgacggaggacatgtatgcccaggactctatagagctactaacaacatctggtatccagtttaaaaaacatgaggaggaaggaattgaaacccagtactttgcagaacttcttatgacttctggagtggtcctctgtgaaggggtcaaatggttgtcatttcatagcggttacgactttggctacttaatcaaaatcctaaccaactctaacttgcctgaagaagaacttgacttctttgagatccttcgattgttttttcctgtcatttatgatgtgaagtacctcatgaagagctgcaaaaatctcaaaggtggattacaggaggtggcagaacagttagagctggaacggataggaccacaacatcaggcaggatctgattcattgctcacaggaatggcctttttcaaaatgagagaaatgttctttgaagatcatattgatgatgccaaatattgtggtcatttgtatggccttggttctggttcatcctatgtacagaatggcacagggaatgcgcgagagggttctcacantcnagacangaaatngtcgtgncagtgctatgtcgggatgacatcacaggtcgagtattgaggattatctctgctttataaatcggacatagactatacttttctgcctccaggtacctaccagt

SEQ ID NO: 319055 - DNA, 2321 bp, Homo sapiens
atctagcgcccccgtcaggacgtgcgaaaagcgacggcgcagcacggtgcggcgcagctcctgctcgcctttcccttcgctgggcgagaggtgtctatggggcacccgctgccgccgccgctaccgccaccgccaccgccaccgccgccgagtgctgtctctatggcgaggaggaggaggaggagcgcgagctcagcgacacaagtacataaataaaggataaaatattttatgaaacaaatcttcaatcaagtataacattttgatgcttggcatctagactcccttgtgccctcactatgccagcggcaactgtagatcatagccaaagaatttgtgaagtttgggcttgcaacttggatgaagagatgaagaaaattcgtcaagttatccgaaaatataattacgttgctatggacaccgagtttccaggtgtggttgcaagacccattggagaattcaggagcaatgctgactatcaataccaactattgcggtgtaatgtagacttgttaaagataattcagctaggactgacatttatgaatgagcaaggagaataccctccaggaacttcaacttggcagtttaattttaaatttaatttgacacgtaagtgggaaataactgtataacccagactttttttttttttctttaatcttaggaattgattttcctcaagtatggtgacatgctaggtgaatttggtgtagttatcctggaaatatataaaacgtaacatttcaaaagcatggttttcttttttactatgggaccaaaaaaaatactttgatgttaaagatgttatatttaaaatatgactgcagctttttttgtatttggaagactgggtattgaaagtacttctgatagaaaaaataatcctacattagttttactttcaaaaattttgtgtgcaatttgaaatatagccttttataatatttatccttcttgtgaagatttttgttgcattcatattccagtttatgagtagattacatgtcaaatgcagtaagacgttttctggaaccttgggtacgttttcctttcaagtcagtattatcattaggttgccacttcagcccacaaaagctctcttaatttacatataggagaagtagtagtatccttgaacctggtgtttatcatatgtcagaatcttcattctaactcaagccctgggtcttcacccagtttccttagttataatatttctgtattattaatagaagtagtcttgatagctaagggaagttttagatgtttttagagaggggcagattatttgcaaactaagttgggtaaataaaataatacattcttattacagcaggacctcaaatgacattttcttcaacattgtttcatggtaaccttcataaaaaataaaattgattcctgacccgggccactacctgagtggagtgtgcacgttctcgtgtatatgtggattttctcccgggtcctctgatttcctcccacatcccaaggctgtgcacgttaggtgaaatggtgtggctaagttgtcccagtgtgagtgagtaggtgtatctgtgtgagtgcactgtgccacggaacgacatgctgaccagggttggttcccacattgtgccctgagctgccagaataggctctggctttcttcacccctcaactgaataatggagcaaataattatcttgtttttattaattgttcttaaatttacatatagctcacatttatttcattgtttaatattagaagtattttggtctttatctagaagtttgatgatttttttgtgaccagaaatatgccgtaggaacttaactcttgtttttatcaattagcctgtggtaaaaattggtttcgttatccatcttttggcttaaagttgcaatttccaagaacttattgataacgttgagtgagtacttaactgtatgttgcaatattgcattgttcttctgtttgacatcctacatttgtgtcatacatcctaatatctggtaggtaaaatagtgaaagaaactgtaggcaattaatggtagtgccaatgtatgaattctttcttcctgttctttgtcagataaacaaagatatttagtatacacaattttacgaaagtagggcttaggaaaagcagagtaatgatgcctgtggtatagtagtgtggcttgtaattacactgtgtttagcctgactctccatttcactcttttgggtttaataatatactctccatttggagaccaaggcaggaggattgcttgaggccaggagttctagaccagcctggtcaacatagactctgtctctacaaaaaaaaaaaa

SEQ ID NO: 319056 - DNA, 2646 bp, Homo sapiens
atctagcgcccccgtcaggacgtgcgaaaagcgacggcgcagcacggtgcggcgcagctcctgctcgcctttcccttcgctgggcgagaggtgtctatggggcacccgctgccgccgccgctaccgccaccgccaccgccaccgccgccgagtgctgtctctatggcgaggaggaggaggaggagcgcgagctcagcgacacaagtacataaataaaggataaaatattttatgaaacaaatcttcaatcaagtataacattttgatgcttggcatctagactcccttgtgccctcactatgccagcggcaactgtagatcatagccaaagaatttgtgaagtttgggcttgcaacttggatgaagagatgaagaaaattcgtcaagttatccgaaaatataattacgttgctatggacaccgagtttccaggtgtggttgcaagacccattggagaattcaggagcaatgctgactatcaataccaactattgcggtgtaatgtagacttgttaaagataattcagctaggactgacatttatgaatgagcaaggagaataccctccaggaacttcaacttggcagtttaattttaaatttaatttgacggaggacatgtatgcccaggactctatagagctactaacaacatctggtatccagtttaaaaaacatgaggaggaaggaattgaaacccagtactttgcagaacttcttatgacttctggagtggtcctctgtgaaggggtcaaatggttgtcatttcatagcggttacgactttggctacttaatcaaaatcctaaccaactctaacttgcctgaagaagaacttgacttctttgagatccttcgattgttttttcctgtcatttatgatgtgaagtacctcatgaagagctgcaaaaatctcaaaggtggattacaggaggtggcagaacagttagagctggaacggataggaccacaacatcaggcaggatctgattcattgctcacaggaatggcctttttcaaaatgagagaaatgttctttgaagatcatattgatgatgccaaatattgtggtcatttgtatggccttggttctggttcatcctatgtacagaatggcacagggaatgcatatgaagaggaagccaacaagcagtcatgacatgaaatagtccttttatttttatttcgagctacacacatgcttgtatataggttttatctctggttgaatccctcgaacaatagacagtacctttcccccccctttcatggcccattttattgtctgcctttcagtactaagtatgaccgttcctatctcagatcttaataaaaagaaaaaaaaaaacgcattcaggttaaatttggccttaatttaatatacttgttagcaagcgtgtgtgacagagagtggggaaagctacatcattgaatattttgataaactttaccgacttgagtttggtttatttttcccttttcctaaattaactagcactgactgtaatttatttccctgtttcacgtctctcccttccattctgcaggagttttagctatttgagatcgtggaccatcagttttgcactttagagagtgtttctgactctaaacctgttttatcagaaaatttgttttttcttgatcttagctggaaaaatctgccaactttacacagtatttacttggttttgacccacagaatatagcacgttgtgcaaactgtcgattcagcgaaacttaaaaaagacaagaaactactgaggagcttagtaactgctgtttctgtacgtagtgtttaatcttccaagcacatctagtgtctgtcagtttctaattggcatgtgtaggctgctctgtgactgaagaattttcaaaccagctttacacccttcaggaaaaatcccttgtgattggatgtttactatctgccaggaaactggtactcaagatgttgaagctacagttattttatgatagcacacttcccttgatctgcttatttttattccatcaccatttaccctttttttttttaaattttgtagccattcttatgatgctcttgatttgttggttacacaaatcaattttattaaaaatccaaagataagtctttaggtatattttgtaccaaattaaattagaagacaaaaattgtgctttcatagttgctacaaaggtaaataatggagagatttggtacaaaacaacaaaatatatatatattctcatatatatatatatagctgataaaattacctgaggagtgtaatgcttatttttttgtgtatatctttgcaatctattttatatatattgacaaaagagactgtgaaatacttagccatgcagaatatgtgaccagaccagagcatgtgtaggaagactttacagtaatcattaactctaccccgaaatgatggactacaagttataatgtgtgttacctacacttcaatcagtaatattagcaaatctccaaatgttagtcacattggtttgtctcccttgtacattctttattcatgatattacagtgctgtaactgggtggtcctttttaaacaaaacattatttgcaaaacagagggtattatttgtttttaaagcttttgtaaataaaggcttcaaaatgttttcttataa

SEQ ID NO: 319057 - DNA, 2586 bp, Homo sapiens
atctagcgcccccgtcaggacgtgcgaaaagcgacggcgcagcacggtgcggcgcagctcctgctcgcctttcccttcgctgggcgagaggtgtctatggggcacccgctgccgccgccgctaccgccaccgccaccgccaccgccgccgagtgctgtctctatggcgaggaggaggaggaggagcgcgagctcagcgacacaagtacataaataaaggataaaatattttatgaaacaaatcttcaatcaagtataacattttgatgcttggcatctagactcccttgtgccctcactatgccagcggcaactgtagatcatagccaaagaatttgtgaagtttgggcttgcaacttggatgaagagatgaagaaaattcgtcaagttatccgaaaatataattacgttgctatggacaccgagtttccaggtgtggttgcaagacccattggagaattcaggagcaatgctgactatcaataccaactattgcggtgtaatgtagacttgttaaagataattcagctaggactgacatttatgaatgagcaaggagaataccctccaggaacttcaacttggcagtttaattttaaatttaatttgacggaggacatgtatgcccaggactctatagagctactaacaacatctggtatccagtttaaaaaacatgaggaggaaggaattgaaacccagtactttgcagaacttcttatgacttctggagtggtcctctgtgaaggggtcaaatggttgtcatttcatagcggttacgactttggctacttaatcaaaatcctaaccaactctaacttgcctgaagaagaacttgacttctttgagatccttcgattgttttttcctgtcatttatgatgtgaagtacctcatgaagagctgcaaaaatctcaaaggtggattacaggaggtggcagaacagttagagctggaacggataggaccacaacatcaggcaggatctgattcattgctcacaggaatggcctttttcaaaatgagagaaatgttctttgaagatcatattgatgatgccaaatattgtggtcatttgtatggccttggttctggttcatcctatgtacagaatggcacagggaatgcatatgaagaggaagccaacaagcagtcatgacatgaaatagtccttttatttttatttcgagctacacacatgcttgtatataggttttatctctggttgaatccctcgaacaatagacagtacctttcccccccctttcatggcccattttattgtctgcctttcagtactaagtatgaccgttcctatctcagatcttaataaaaagaaaaaaaaaaacgcattcaggttaaatttggccttaatttaatatacttgttagcaagcgtgtgtgacagagagtggggaaagctacatcattgaatattttgataaactttaccgacttgagtttggtttatttttcccttttcctaaattaactagcactgactgtaatttatttccctgtttcacgtctctcccttccattctgcaggagttttagctatttgagatcgtggaccatcagttttgcactttagagagtgtttctgactctaaacctgttttatcagaaaatttgttttttcttgatcttagctggaaaaatctgccaactttacacagtatttacttggttttgacccacagaatatagcacgttgtgcaaactgtcgattcagcgaaacttaaaaaagacaagaaactactgaggagcttagtaactgctgtttctgtacgtagtgtttaatcttccaagcacatctagtgtctgtcagtttctaattggcatgtgtaggctgctctgtgactgaagaattttcaaaccagctttacacccttcaggaaaaatcccttgtgattggatgtttactatctgccaggaaactggtactcaagatgttgaagctacagttattttatgatagcacacttcccttgatctgcttatttttattccatcaccatttaccctttttttttttaaattttgtagccattcttatgatgctcttgatttgttggttacacaaatcaattttattaaaaatccaaagataagtctttaggtatattttgtaccaaattaaattagaagacaaaaattgtgctttcatagttgctacaaaggtaaataatggagagatttggtacaaaacaacaaaatatatatatattctcatatatatatatatagctgataaaattacctgaggagtgtaatgcttatttttttgtgtatatctttgcaatctattttatacatgtgtaggaagactttacagtaatcattaactctaccccgaaatgatggactacaagttataatgtgtgttacctacacttcaatcagtaatattagcaaatctccaaatgttagtcacattggtttgtctcccttgtacattctttattcatgatattacagtgctgtaactgggtggtcctttttaaacaaaacattatttgcaaaacagagggtattatttgtttttaaagcttttgtaaataaaggcttcaaaatgttttcttataa

SEQ ID NO: 319058 - DNA, 1601 bp, Homo sapiens
atctagcgcccccgtcaggacgtgcgaaaagcgacggcgcagcacggtgcggcgcagctcctgctcgcctttcccttcgctgggcgagaggtgtctatggggcacccgctgccgccgccgctaccgccaccgccaccgccaccgccgccgagtgctgtctctatggcgaggaggaggaggaggagcgcgagctcagcgacacaagtacataaataaaggataaaatattttatgaaacaaatcttcaatcaagtataacattttgatgcttggcatctagactcccttgtgccctcactatgccagcggcaactgtagatcatagccaaagaatttgtgaagtttgggcttgcaacttggatgaagagatgaagaaaattcgtcaagttatccgaaaatataattacgttgctatggacaccgagtttccaggtgtggttgcaagacccattggagaattcaggagcaatgctgactatcaataccaactattgcggtgtaatgtagacttgttaaagataattcagctaggactgacatttatgaatgagcaaggagaataccctccaggaacttcaacttggcagtttaattttaaatttaatttgacggaggacatgtatgcccaggactctatagagctactaacaacatctggtatccagtttaaaaaacatgaggaggaaggaattgaaacccagtactttgcagaacttcttatgacttctggagtggtcctctgtgaaggggtcaaatggttgtcatttcatagcggttacgactttggctacttaatcaaaatcctaaccaactctaacttgcctgaagaagaacttgacttctttgagatccttcgattgttttttcctgtcatttatgatgtgaagtacctcatgaagagctgcaaaaatctcaaaggtggattacaggaggtggcagaacagttagagctggaacggataggaccacaacatcaggcaggatctgattcattgctcacaggaatggcctttttcaaaatgagagaaatgttctttgaagatcatattgatgatgccaaatattgtggtcatttgtatggccttggttctggttcatcctatgtacagaatggcacagggaatgcatatgaagaggaagccaacaagcagtcatgacatgaaatagtccttttatttttatttcgagctacacacatgcttgtatataggttttatctctggttgaatccctcgaacaatagacagtacctttcccccccctttcatggcccattttattgtctgcctttcagtactaagtatgaccgttcctatctcagatcttaataaaaagaaaaaaggcaaaaaaaaaacaaacgcagcacaacacaagagacagagaccgcaaaacaaagagagcaagggagcccaaactacacacaagagggcccggaaaacacccccgaggacgcagaaaacgccaactaacaaaagagacaccgaaggtaacagaaccagcgacccgcaaacccgcgggggcgaaaaggcagtgaaacaaccgtcgggatagacacaaagagaagcagaataccaagtaggaagcgagtgaagcgagtagag

SEQ ID NO: 319059 - DNA, 2541 bp, Homo sapiens
agaaagggggcggggacgatgaacctgagagggtgcgcgatggcgccagctggagtgcggctggcggaggaaggagcctggcggcgggttgggggctgggtacataaataaaggataaaatattttatgaaacaaatcttcaatcaagtataacattttgatgcttggcatctagactcccttgtgccctcactatgccagcggcaactgtagatcatagccaaagaatttgtgaagtttgggcttgcaacttggatgaagagatgaagaaaattcgtcaagttatccgaaaatataattacgttgctatggacaccgagtttccaggtgtggttgcaagacccattggagaattcaggagcaatgctgactatcaataccaactattgcggtgtaatgtagacttgttaaagataattcagctaggactgacatttatgaatgagcaaggagaataccctccaggaacttcaacttggcagtttaattttaaatttaatttgacggaggacatgtatgcccaggactctatagagctactaacaacatctggtatccagtttaaaaaacatgaggaggaaggaattgaaacccagtactttgcagaacttcttatgacttctggagtggtcctctgtgaaggggtcaaatggttgtcatttcatagcggttacgactttggctacttaatcaaaatcctaaccaactctaacttgcctgaagaagaacttgacttctttgagatccttcgattgttttttcctgtcatttatgatgtgaagtacctcatgaagagctgcaaaaatctcaaaggtggattacaggaggtggcagaacagttagagctggaacggataggaccacaacatcaggcaggatctgattcattgctcacaggaatggcctttttcaaaatgagagaaatgttctttgaagatcatattgatgatgccaaatattgtggtcatttgtatggccttggttctggttcatcctatgtacagaatggcacagggaatgcatatgaagaggaagccaacaagcagtcatgacatgaaatagtccttttatttttatttcgagctacacacatgcttgtatataggttttatctctggttgaatccctcgaacaatagacagtacctttcccccccctttcatggcccattttattgtctgcctttcagtactaagtatgaccgttcctatctcagatcttaataaaaagaaaaaaaaaaacgcattcaggttaaatttggccttaatttaatatacttgttagcaagcgtgtgtgacagagagtggggaaagctacatcattgaatattttgataaactttaccgacttgagtttggtttatttttcccttttcctaaattaactagcactgactgtaatttatttccctgtttcacgtctctcccttccattctgcaggagttttagctatttgagatcgtggaccatcagttttgcactttagagagtgtttctgactctaaacctgttttatcagaaaatttgttttttcttgatcttagctggaaaaatctgccaactttacacagtatttacttggttttgacccacagaatatagcacgttgtgcaaactgtcgattcagcgaaacttaaaaaagacaagaaactactgaggagcttagtaactgctgtttctgtacgtagtgtttaatcttccaagcacatctagtgtctgtcagtttctaattggcatgtgtaggctgctctgtgactgaagaattttcaaaccagctttacacccttcaggaaaaatcccttgtgattggatgtttactatctgccaggaaactggtactcaagatgttgaagctacagttattttatgatagcacacttcccttgatctgcttatttttattccatcaccatttaccctttttttttttaaattttgtagccattcttatgatgctcttgatttgttggttacacaaatcaattttattaaaaatccaaagataagtctttaggtatattttgtaccaaattaaattagaagacaaaaattgtgctttcatagttgctacaaaggtaaataatggagagatttggtacaaaacaacaaaatatatatatattctcatatatatatatatagctgataaaattacctgaggagtgtaatgcttatttttttgtgtatatctttgcaatctattttatatatattgacaaaagagactgtgaaatacttagccatgcagaatatgtgaccagaccagagcatgtgtaggaagactttacagtaatcattaactctaccccgaaatgatggactacaagttataatgtgtgttacctacacttcaatcagtaatattagcaaatctccaaatgttagtcacattggtttgtctcccttgtacattctttattcatgatattacagtgctgtaactgggtggtcctttttaaacaaaacattatttgcaaaacagagggtattatttgtttttaaagcttttgtaaataaaggcttcaaaatgttttcttataa

SEQ ID NO: 319060 - DNA, 2616 bp, Homo sapiens
agaaagggggcggggacgatgaacctgagagggtgcgcgatggcgccagctggagtgcggctggcggaggaaggagcctggcggcgggttgggggctggaaggatttgaaatttccctgcccaagaatcaacaggaactctgtttatagaccagaaatgtgacatctatctttggtacataaataaaggataaaatattttatgaaacaaatcttcaatcaagtataacattttgatgcttggcatctagactcccttgtgccctcactatgccagcggcaactgtagatcatagccaaagaatttgtgaagtttgggcttgcaacttggatgaagagatgaagaaaattcgtcaagttatccgaaaatataattacgttgctatggacaccgagtttccaggtgtggttgcaagacccattggagaattcaggagcaatgctgactatcaataccaactattgcggtgtaatgtagacttgttaaagataattcagctaggactgacatttatgaatgagcaaggagaataccctccaggaacttcaacttggcagtttaattttaaatttaatttgacggaggacatgtatgcccaggactctatagagctactaacaacatctggtatccagtttaaaaaacatgaggaggaaggaattgaaacccagtactttgcagaacttcttatgacttctggagtggtcctctgtgaaggggtcaaatggttgtcatttcatagcggttacgactttggctacttaatcaaaatcctaaccaactctaacttgcctgaagaagaacttgacttctttgagatccttcgattgttttttcctgtcatttatgatgtgaagtacctcatgaagagctgcaaaaatctcaaaggtggattacaggaggtggcagaacagttagagctggaacggataggaccacaacatcaggcaggatctgattcattgctcacaggaatggcctttttcaaaatgagagaaatgttctttgaagatcatattgatgatgccaaatattgtggtcatttgtatggccttggttctggttcatcctatgtacagaatggcacagggaatgcatatgaagaggaagccaacaagcagtcatgacatgaaatagtccttttatttttatttcgagctacacacatgcttgtatataggttttatctctggttgaatccctcgaacaatagacagtacctttcccccccctttcatggcccattttattgtctgcctttcagtactaagtatgaccgttcctatctcagatcttaataaaaagaaaaaaaaaaacgcattcaggttaaatttggccttaatttaatatacttgttagcaagcgtgtgtgacagagagtggggaaagctacatcattgaatattttgataaactttaccgacttgagtttggtttatttttcccttttcctaaattaactagcactgactgtaatttatttccctgtttcacgtctctcccttccattctgcaggagttttagctatttgagatcgtggaccatcagttttgcactttagagagtgtttctgactctaaacctgttttatcagaaaatttgttttttcttgatcttagctggaaaaatctgccaactttacacagtatttacttggttttgacccacagaatatagcacgttgtgcaaactgtcgattcagcgaaacttaaaaaagacaagaaactactgaggagcttagtaactgctgtttctgtacgtagtgtttaatcttccaagcacatctagtgtctgtcagtttctaattggcatgtgtaggctgctctgtgactgaagaattttcaaaccagctttacacccttcaggaaaaatcccttgtgattggatgtttactatctgccaggaaactggtactcaagatgttgaagctacagttattttatgatagcacacttcccttgatctgcttatttttattccatcaccatttaccctttttttttttaaattttgtagccattcttatgatgctcttgatttgttggttacacaaatcaattttattaaaaatccaaagataagtctttaggtatattttgtaccaaattaaattagaagacaaaaattgtgctttcatagttgctacaaaggtaaataatggagagatttggtacaaaacaacaaaatatatatatattctcatatatatatatatagctgataaaattacctgaggagtgtaatgcttatttttttgtgtatatctttgcaatctattttatatatattgacaaaagagactgtgaaatacttagccatgcagaatatgtgaccagaccagagcatgtgtaggaagactttacagtaatcattaactctaccccgaaatgatggactacaagttataatgtgtgttacctacacttcaatcagtaatattagcaaatctccaaatgttagtcacattggtttgtctcccttgtacattctttattcatgatattacagtgctgtaactgggtggtcctttttaaacaaaacattatttgcaaaacagagggtattatttgtttttaaagcttttgtaaataaaggcttcaaaatgttttcttataa

SEQ ID NO: 319061 - DNA, 2827 bp, Homo sapiens
  misc_feature (24)..(24): n is a, c, g, or t
taaggctaggtcgggctgggtgtnaatcggccgacggcgcagcacggtgcggcgcagctcctgctcgcctttcccttcgctgggcgagaggtgtctatggggcacccgctgccgccgccgctaccgccaccgccaccgccaccgccgccgagtgctgtctctatggcgaggaggaggaggaggagcgcgagctcagcgacacaagtacataaataaaggataaaatattttatgaaacaaatcttcaatcaagtataacattttgatgcttggcatctagactcccttgtgccctcactatgccagcggcaactgtagatcatagccaaagaatttgtgaagtttgggcttgcaacttggatgaagagatgaagaaaattcgtcaagttatccgaaaatataattacgttgctatgggttttggtgttgagaaaaaccttgtgtcagagaagcaattggaaagtacagggcgttttcccctcttttgaaccagttcttcaagaaacttggttttagcattggaatactgtgagcatcatttcatgtatcctttgggagacaggaatttatgattttcccccctttcttggttatagagacaccgagtttccaggtgtggttgcaagacccattggagaattcaggagcaatgctgactatcaataccaactattgcggtgtaatgtagacttgttaaagataattcagctaggactgacatttatgaatgagcaaggagaataccctccaggaacttcaacttggcagtttaattttaaatttaatttgacggaggacatgtatgcccaggactctatagagctactaacaacatctggtatccagtttaaaaaacatgaggaggaaggaattgaaacccagtactttgcagaacttcttatgacttctggagtggtcctctgtgaaggggtcaaatggttgtcatttcatagcggttacgactttggctacttaatcaaaatcctaaccaactctaacttgcctgaagaagaacttgacttctttgagatccttcgattgttttttcctgtcatttatgatgtgaagtacctcatgaagagctgcaaaaatctcaaaggtggattacaggaggtggcagaacagttagagctggaacggataggaccacaacatcaggcaggatctgattcattgctcacaggaatggcctttttcaaaatgagagaaatgttctttgaagatcatattgatgatgccaaatattgtggtcatttgtatggccttggttctggttcatcctatgtacagaatggcacagggaatgcatatgaagaggaagccaacaagcagtcatgacatgaaatagtccttttatttttatttcgagctacacacatgcttgtatataggttttatctctggttgaatccctcgaacaatagacagtacctttcccccccctttcatggcccattttattgtctgcctttcagtactaagtatgaccgttcctatctcagatcttaataaaaagaaaaaaaaaaacgcattcaggttaaatttggccttaatttaatatacttgttagcaagcgtgtgtgacagagagtggggaaagctacatcattgaatattttgataaactttaccgacttgagtttggtttatttttcccttttcctaaattaactagcactgactgtaatttatttccctgtttcacgtctctcccttccattctgcaggagttttagctatttgagatcgtggaccatcagttttgcactttagagagtgtttctgactctaaacctgttttatcagaaaatttgttttttcttgatcttagctggaaaaatctgccaactttacacagtatttacttggttttgacccacagaatatagcacgttgtgcaaactgtcgattcagcgaaacttaaaaaagacaagaaactactgaggagcttagtaactgctgtttctgtacgtagtgtttaatcttccaagcacatctagtgtctgtcagtttctaattggcatgtgtaggctgctctgtgactgaagaattttcaaaccagctttacacccttcaggaaaaatcccttgtgattggatgtttactatctgccaggaaactggtactcaagatgttgaagctacagttattttatgatagcacacttcccttgatctgcttatttttattccatcaccatttaccctttttttttttaaattttgtagccattcttatgatgctcttgatttgttggttacacaaatcaattttattaaaaatccaaagataagtctttaggtatattttgtaccaaattaaattagaagacaaaaattgtgctttcatagttgctacaaaggtaaataatggagagatttggtacaaaacaacaaaatatatatatattctcatatatatatatatagctgataaaattacctgaggagtgtaatgcttatttttttgtgtatatctttgcaatctattttatatatattgacaaaagagactgtgaaatacttagccatgcagaatatgtgaccagaccagagcatgtgtaggaagactttacagtaatcattaactctaccccgaaatgatggactacaagttataatgtgtgttacctacacttcaatcagtaatattagcaaatctccaaatgttagtcacattggtttgtctcccttgtacattctttattcatgatattacagtgctgtaactgggtggtcctttttaaacaaaacattatttgcaaaacagagggtattatttgtttttaaagcttttgtaaataaaggcttcaaaatgttttcttataa

SEQ ID NO: 319062 - DNA, 2806 bp, Homo sapiens
ggctttgtacctggggcagcgcagtgggacggaaattgggagtggagggcggtggcctagatcctcacctcttcgtattgtttcacgcggcagtgcttgggagtcagtgtagctccagtcagtgttatcagcaccttcgcactggcgctttgccagggaagagagttatctatggcttgaatacctcggtgccgtcctctcgtttctctgggaaactgcagtacggagatgctatctccagtaatgagaaggcctttggtgtctcttcggggcttctgggactgcagtagagagagaggtacataaataaaggataaaatattttatgaaacaaatcttcaatcaagtataacattttgatgcttggcatctagactcccttgtgccctcactatgccagcggcaactgtagatcatagccaaagaatttgtgaagtttgggcttgcaacttggatgaagagatgaagaaaattcgtcaagttatccgaaaatataattacgttgctatggacaccgagtttccaggtgtggttgcaagacccattggagaattcaggagcaatgctgactatcaataccaactattgcggtgtaatgtagacttgttaaagataattcagctaggactgacatttatgaatgagcaaggagaataccctccaggaacttcaacttggcagtttaattttaaatttaatttgacgctgggcgtggtggctcacgcctgtaatcccagcactttgggaggccgaggcgggcggatcacaacggaggacatgtatgcccaggactctatagagctactaacaacatctggtatccagtttaaaaaacatgaggaggaaggaattgaaacccagtactttgcagaacttcttatgacttctggagtggtcctctgtgaaggggtcaaatggttgtcatttcatagcggttacgactttggctacttaatcaaaatcctaaccaactctaacttgcctgaagaagaacttgacttctttgagatccttcgattgttttttcctgtcatttatgatgtgaagtacctcatgaagagctgcaaaaatctcaaaggtggattacaggaggtggcagaacagttagagctggaacggataggaccacaacatcaggcaggatctgattcattgctcacaggaatggcctttttcaaaatgagagaaatgttctttgaagatcatattgatgatgccaaatattgtggtcatttgtatggccttggttctggttcatcctatgtacagaatggcacagggaatgcatatgaagaggaagccaacaagcagtcatgacatgaaatagtccttttatttttatttcgagctacacacatgcttgtatataggttttatctctggttgaatccctcgaacaatagacagtacctttcccccccctttcatggcccattttattgtctgcctttcagtactaagtatgaccgttcctatctcagatcttaataaaaagaaaaaaaaaaacgcattcaggttaaatttggccttaatttaatatacttgttagcaagcgtgtgtgacagagagtggggaaagctacatcattgaatattttgataaactttaccgacttgagtttggtttatttttcccttttcctaaattaactagcactgactgtaatttatttccctgtttcacgtctctcccttccattctgcaggagttttagctatttgagatcgtggaccatcagttttgcactttagagagtgtttctgactctaaacctgttttatcagaaaatttgttttttcttgatcttagctggaaaaatctgccaactttacacagtatttacttggttttgacccacagaatatagcacgttgtgcaaactgtcgattcagcgaaacttaaaaaagacaagaaactactgaggagcttagtaactgctgtttctgtacgtagtgtttaatcttccaagcacatctagtgtctgtcagtttctaattggcatgtgtaggctgctctgtgactgaagaattttcaaaccagctttacacccttcaggaaaaatcccttgtgattggatgtttactatctgccaggaaactggtactcaagatgttgaagctacagttattttatgatagcacacttcccttgatctgcttatttttattccatcaccatttaccctttttttttttaaattttgtagccattcttatgatgctcttgatttgttggttacacaaatcaattttattaaaaatccaaagataagtctttaggtatattttgtaccaaattaaattagaagacaaaaattgtgctttcatagttgctacaaaggtaaataatggagagatttggtacaaaacaacaaaatatatatatattctcatatatatatatatagctgataaaattacctgaggagtgtaatgcttatttttttgtgtatatctttgcaatctattttatatatattgacaaaagagactgtgaaatacttagccatgcagaatatgtgaccagaccagagcatgtgtaggaagactttacagtaatcattaactctaccccgaaatgatggactacaagttataatgtgtgttacctacacttcaatcagtaatattagcaaatctccaaatgttagtcacattggtttgtctcccttgtacattctttattcatgatattacagtgctgtaactgggtggtcctttttaaacaaaacattatttgcaaaacagagggtattatttgtttttaaagcttttgtaaataaaggcttcaaaatgttttcttataa

SEQ ID NO: 319063 - DNA, 1814 bp, Homo sapiens
attacaggaggtggcagaacagttagagatttttgcagctcttcatgaggtacttcacatcataaatgacaggaaaaatctcaaaggtggattacaggaggtggcagaacagttagagctggaacggataggaccacaacatcaggcaggatctgattcattgctcacaggaatggcctttttcaaaatgagagaaatgttctttgaagatcatattgatgatgccaaatattgtggtcatttgtatggccttggttctggttcatcctatgtacagaatggcacagggaatgcatatgaagaggaagccaacaagcagtcatgacatgaaatagtccttttatttttatttcgagctacacacatgcttgtatataggttttatctctggttgaatccctcgaacaatagacagtacctttcccccccctttcatggcccattttattgtctgcctttcagtactaagtatgaccgttcctatctcagatcttaataaaaagaaaaaaaaaaacgcattcaggttaaatttggccttaatttaatatacttgttagcaagcgtgtgtgacagagagtggggaaagctacatcattgaatattttgataaactttaccgacttgagtttggtttatttttcccttttcctaaattaactagcactgactgtaatttatttccctgtttcacgtctctcccttccattctgcaggagttttagctatttgagatcgtggaccatcagttttgcactttagagagtgtttctgactctaaacctgttttatcagaaaatttgttttttcttgatcttagctggaaaaatctgccaactttacacagtatttacttggttttgacccacagaatatagcacgttgtgcaaactgtcgattcagcgaaacttaaaaaagacaagaaactactgaggagcttagtaactgctgtttctgtacgtagtgtttaatcttccaagcacatctagtgtctgtcagtttctaattggcatgtgtaggctgctctgtgactgaagaattttcaaaccagctttacacccttcaggaaaaatcccttgtgattggatgtttactatctgccaggaaactggtactcaagatgttgaagctacagttattttatgatagcacacttcccttgatctgcttatttttattccatcaccatttaccctttttttttttaaattttgtagccattcttatgatgctcttgatttgttggttacacaaatcaattttattaaaaatccaaagataagtctttaggtatattttgtaccaaattaaattagaagacaaaaattgtgctttcatagttgctacaaaggtaaataatggagagatttggtacaaaacaacaaaatatatatatattctcatatatatatatatagctgataaaattacctgaggagtgtaatgcttatttttttgtgtatatctttgcaatctattttatatatattgacaaaagagactgtgaaatacttagccatgcagaatatgtgaccagaccagagcatgtgtaggaagactttacagtaatcattaactctaccccgaaatgatggactacaagttataatgtgtgttacctacacttcaatcagtaatattagcaaatctccaaatgttagtcacattggtttgtctcccttgtacattctttattcatgatattacagtgctgtaactgggtggtcctttttaaacaaaacattatttgcaaaacagagggtattatttgtttttaaagcttttgtaaataaaggcttcaaaatgttttcttataa

SEQ ID NO: 319064 - DNA, 1039 bp, Homo sapiens
atctagcgcccccgtcaggacgtgcgaaaagcgacggcgcagcacggtgcggcgcagctcctgctcgcctttcccttcgctgggcgagaggtgtctatggggcacccgctgccgccgccgctaccgccaccgccaccgccaccgccgccgagtgctgtctctatggcgaggaggaggaggaggagcgcgagctcagcgacacaagtacataaataaaggataaaatattttatgaaacaaatcttcaatcaagtataacattttgatgcttggcatctagactcccttgtgccctcactatgccagcggcaactgtagatcatagccaaagaatttgtgaagtttgggcttgcaacttggatgaagagatgaagaaaattcgtcaagttatccgaaaatataattacgttgctatggacaccgagtttccaggtgtggttgcaagacccattggagaattcaggagcaatgctgactatcaataccaactattgcggtgtaatgtagacttgttaaagataattcagctaggactgacatttatgaatgagcaaggagaataccctccaggaacttcaacttggcagtttaattttaaatttaatttgacggaggacatgtatgcccaggactctatagagctactaacaacatctggtatccagtttaaaaaacatgaggaggaaggaattgaaacccagtactttgcagaacttcttatgacttctggagtggtcctctgtgaaggggtcaaatggttgtcatttcatagcggttacgactttggctacttaatcaaaatcctaaccaactctaacttgcctgaagaagaacttgacttctttgagatccttcgattgttttttcctgtcatttatgatgtgaagtacctcatgaagagctgcaaaaatctcaaagtaaggcttcggatggcattatctacagcagcacactgttcagaccaagtgactgtcatgagagcctaggctgggatgttgttttaaaccatattttaaagtattacagtgaatgcaattat

SEQ ID NO: 319065 - DNA, 1329 bp, Homo sapiens
  misc_feature (1329)..(1329): n is a, c, g, or t
ggccagccctcggaaacggaagtgagcggcggggtcgactgacggtaacggggcagagaggctgttcgcagagctgcggaagatgaatgccagaggacttggatctgagctaaaggacagtattccagttactgaactttcagcaagtggaccttttgaaagtcatgatcttcttcggaaaggtttttcttgtgtgaaaaatgaacttttgcctagtcatccccttgaattatcagaaaaaaatttccagctcaaccaagataaaatgaatttttccacactgagaaacattcagggtctatttgctccgctaaaattacagatggaattcaaggcagtgcagcaggttcagcgtcttccatttctttcaagctcaaatctttcactggatgttttgaggggtaatgatgagactattggatttgaggatattcttaatgatccatcacaaagcgaagtcatgggagagccacacttgatggtggaatataaacttggtttactgtaatagtgtgctgttcatggaaaccgagggctgcatcttgtttatagtcatctttgtactgtaatttgatgtacacaacattaaaagtactgacacctgagaatttctgctcaagtagtatcagtgatcatttaaaatttggaggggtctttggtttacagccatgtgacaattaaaagcactaaagggagatcatgttaaagctcttaatttatattaaaacagtagcctttgtctttaaaaaagttgttgctcatgaatattataaaatgatctacaggtttcaattcaacctgtttctaggtttttttgtaaatttagttttgattaagcattataagcatttgagtctataaactttatagtagcatctttcagaataaacatttttaattgatttcagtggcaactctcaaattgattacaatatgagatatatcagtgtcgtccattaacactcataagaataatatttactgtgtcagtgctattttaggattatagttattgtttgattatttcaggttgaaaagtagaagttccaaggttttgattttggtctggtctttaagtgaaaaattaaagcaaccagtagatgtaggttaaacttttacttcatagacttaatatgtaattaatatattgccaagcaacactgttaaagaaaagtaaaactcattttttcttgttcttaatttatatattacaagatactgtaaggtattctttatgaagttgatatataaaaatttacatttttagaacattagtgaatggatcatcttttacaattaaaagtatattttgattatcagtttcttagn

SEQ ID NO: 319066 - DNA, 424 bp, Homo sapiens
  misc_feature (5)..(5): n is a, c, g, or t
  misc_feature (55)..(55): n is a, c, g, or t
gaagntgactccggaaggctgtgtgaaatgacgcctagtcatcccttgattatcngaaaaatttccagctcaaccaagataaaatgaatttttccacactgagaaacattcagggtctatttgctccgctaaaattacagatggaattcaaggcagtgcagcaggttcagcgtcttccatttctttcaagctcaaatctttcactggatgttttgaggggtaatgatgagactattggatttgaggatattcttaatgatccatcacaaagcgaagtcatgggagagccacacttgatggtggaatataaacttggtttactgtaatagtgtgctgttcatggaaaccgagggctgcatcttgtttatagtcatctttgtactgtaatttgatgtacacaacattaaaagtactgacacctgag

SEQ ID NO: 319067 - DNA, 772 bp, Homo sapiens
tgggctgcaggaattcggcacgaggggagagaggctgttcgcagagctgcggaagatgaatgccagaggacttggatctgagctaaaggacagtattccagttactgaactttcagcaagtggaccttttgaaagtcatgatcttcttcggaaaggtttttcttgtgtgaaaaatgaacttttgcctagtcatccccttgaattatcagaaaaaaatttccagctcaaccaagataaaatgaatttttccacactgagaaacattcagggtctatttgctccgctaaaattacagatggaattcaaggcagtgcagcaggttcagcgtcttccatttctttcaagctcaaatctttcactggatgttttgaggggtaatgatgagactattggatttgaggatattcttaatgatccatcacaaagcgaagtcatgggagagccacacttgatggtggaatataaacttggtttactgtaatagtgtgctgttcatggaaaccgagggctgcatcttgtttatagtcatctttgtactgtaatttgatgtacacaacattaaaagtactgacacctgagaaaaaaaaaaaaaaaaaaaaataataataaaaaaaccttttttactttttgacctaatcacttttaaatttagcaactttatccatcccgcccaaatttaaactcaattccccatattcccctaatacgaggtcgtttacaatcaattggtcgtcgtttaagtttggactggaccctggtttaccactttgcc

SEQ ID NO: 319068 - DNA, 500 bp, Homo sapiens
cctcaaaatacatgcacaccaggtaggattattgttaatgaaaagtataatttcagtgtctttacaacttagtttgtgtctaaaatatgaactagtgtttttttccacttgttaaattgatcttgtatttggttttgcgaattttcaaacaaagaataaagaacatgaaattagactatatattctgtcattttcccctgagttttttctaatcttgtcccttcatacttttccccaaaggttcagcgtcttccatttctttcaagctcaaatctttcactggatgttttgaggggtaatgatgagactattggatttgaggatattcttaatgatccatcacaaagcgaagtcatgggagagccacacttgatggtggaatataaacttggtttactgtaatagtgtgctgttcatggaaaccgagggctgcatcttgtttatagtcatctttgtactgtaatttgatgtacacaacattaaaagtactgacacctgag

SEQ ID NO: 319069 - DNA, 504 bp, Homo sapiens
aaacttttgtcaatctgttttttctttttaaatccactattttgagatattattgacatacaataaagtacacctatttttaagtgtacagttctgtgggttttaattaacatggaacctggtctcctaaacagaggagtagaatgttttcattgcctcacaaagttcccttggtcccttttcagtcagtcaccccaccccagccccaggcaatcactggtttgttttctataactttaggttagttttgactcttctggattcttatgtaagcagaatcattgaatgtatctcttttttgagagtcttttaaaatgtttgtttttgtttgctttcagatccatcacaaagcgaagtcatgggagagccacacttgatggtggaatataaacttggtttactgtaatagtgtgctgttcatggaaaccgagggctgcatcttgtttatagtcatctttgtactgtaatttgatgtacacaacattaaaagtactgacacctgag

SEQ ID NO: 319070 - DNA, 744 bp, Homo sapiens
aaagtgcaacgttctgtggggtggcgctggcgaccctttccttgacgggtaacctctgggagcccagagctctcagactcctcatctcccccagcccccgcccttgtaactgcctagtaaacagcccacaactataggtcgcatttgtgtaacgcagctttgctctacaaacttttttgagagcttgtagtgtgctagatgttagaggggaaaaaatcagacagttgctattccctgtttgccagtattgttagtatatctcctccctccttctcctccccaccactttctctttctttttaacttagaagttgtggtatttgagaagaacactgagtcaccattgccacagactctgatatcggtactgctggtaggccatccatccaaatctagaaagtttctattggtaaatactgctaatcgttatctaaaaagttttttaggcactctcaaatgtaactagtagttaggttttcgtagatttgcctttctcggctccttcctttattagaaacagcaagtactaatcttgatattttacagaaggaaattgggaaaaatgacaataacagaatccagaagtcagaattcaccttttctttgtgcgttgaaaccttgttactttacaataaagcagtccagaaggaggagaatgttcatatagggaagtaatagaagatacatttggaaagcaacaatcacacatctctgctgaaggtccccaacttctggtggttcaac

SEQ ID NO: 319071 - DNA, 270 bp, Homo sapiens
ggaccgcataactattacagcataaactattacagcataaactattacagcataaactattacagcataaactattacagcatgaactttcagcaagtggaccttttgaaagtcatgatcttcttcggaaaggtttttcttgtgtgaaaaatgaacttttgcctagtcatccccttgaattatcagaaaaaaatttccagctcaaccaagataaaatgaatttttccacactgagaaacctttccgaagaagatcatgactttcaaaagg

SEQ ID NO: 319072 - DNA, 1265 bp, Homo sapiens
ggccagccctcggaaacggaagtgagcggcggggtcgactgacggtaacggggcagagaggctgttcgcagagctgcggaagatgaatgccagaggacttggatctgagctaaaggacagtattccagttactgaactttcagcaagtggaccttttgaaagtcatgatcttcttcggaaaggtttttcttgtgtgaaaaatgaacttttgcctagtcatccccttgaattatcagaaaaaaatttccagctcaaccaagataaaatgaatttttccacactgagaaacattcagggtctatttgctccgctaaaattacagatggaattcaaggcagtgcagcaggttcagcgtcttccatttctttcaagctcaaatctttcactggatgttttgaggggtaatgatgagactattggatttgaggatattcttaatgatccatcacaaagcgaagtcatgggagagccacacttgatggtggaatataaacttggtttactgtaatagtgtgctgttcatggaaaccgagggctgcatcttgtttatagtcatctttgtactgtaatttgatgtacacaacattaaaagtactgacacctgagaatttctgctcaagtagtatcagtgatcatttaaaatttggaggggtctttggtttacagccatgtgacaattaaaagcactaaagggagatcatgttaaagctcttaatttatattaaaacagtagcctttgtctttaaaaaagttgttgctcatgaatattataaaatgatctacaggtttcaattcaacctgtttctaggtttttttgtaaatttagttttgattaagcattataagcatttgagtctataaactttatagtagcatctttcagaataaacatttttaattgatttcagtggcaactctcaaattgattacaatatgagatatatcagtgtcgtccattaacactcataagaataatatttactgtgtcagtgctattttaggattatagttattgtttgattatttcaggttgaaaagtagaagttccaaggttttgattttggtctggtctttaagtgaaaaattaaagcaaccagtagatgtaggttaaacttttacttcatagacttaatatgtaattaatatattgccaagcaacactgttaaagaaaagtaaaactcattttttcttgttcttaatttatatattacaagatactgtaaggtattctttatgaagttgatatataaaaatttacattttt

SEQ ID NO: 319073 - DNA, 942 bp, Homo sapiens
ggccagccctcggaaacggaagtgagcggcggggtcgactgacggtaacggggcagagaggctgttcgcagagctgcggaagatgaatgccagaggacttggatctgagctaaaggacagtattccagttactgaactttcagcaagtggaccttttgaaagtcatgatcttcttcggaaaggtttttcttgtgtgaaaaatgaacttttgcctagtcatccccttgaattatcagaaaaaaatttccagctcaaccaagataaaatgaatttttccacactgagaaacattcagggtctatttgctccgctaaaattacagatggaattcaaggcagtgcagcaggttcagcgtcttccatttctttcaagctcaaatctttcactggatgttttgaggggtaatgatgagactattggatttgaggatattcttaatgatccatcacaaagcgaagtcatgggagagccacacttgatggtggaatataaacttggtttactgtaatagtgtgctgttcatggaaaccgagggctgcatcttgtttatagtcatctttgtactgtaatttgatgtacacaacattaaaagtactgacacctgagaatttctgctcaagtagtatcagtgatcatttaaaatttggaggggtctttggtttacagccatgtgacaattaaaagcactaaagggagatcatgttaaagctcttaatttatattaaaacagtagcctttgtctttaaaaaagttgttgctcatgaatattataaaatgatctacaggtttcaattcaacctgtttctaggtttttttgtaaatttagttttgattaagcattataagcatttgagtctataaactttatagtagcatctttcagaataaacatttttggcacaaaaaaaaaaagggggggggtaaagaatccccgaagggcca

SEQ ID NO: 319074 - DNA, 763 bp, Homo sapiens
ggccagccctcggaaacggaagtgagcggcggggtcgactgacggtaacggggcagagaggctgttcgcagagctgcggaagatgaatgccagaggacttggatctgagctaaaggacagtattccagttactgaactttcagcaagtggaccttttgaaagtcatgatcttcttcggaaaggtttttcttgtgtgaaaaatgaacttttgcctagtcatccccttgaattatcagaaaaaaatttccagctcaaccaagataaaatgaatttttccacactgagaaacattcagggtctatttgctccgctaaaattacagatggaattcaaggcagtgcagcaggttcagcgtcttccatttctttcaagctcaaatctttcactggatgttttgaggggtaatgatgagactattggatttgaggatattcttaatgatccatcacaaagcgaagtcatgggagagccacacttgatggtggaatataaacttggtttactgtaatagtgtgctgttcatggaaaccgagggctgcatcttgtttatagtcatctttgtactgtaatttgatgtacacaacattaaaagtactgacacctgagaatttctgctcaagtagtatcagtgatcatttaaaatttggaggggtctttggtttacagccatgtgacaattaaaagcactaaagggagatcatgttaaagctctcaagctctggcaaggggagctctggcaaggggagctctgccagagcttgag

SEQ ID NO: 319075 - DNA, 1686 bp, Homo sapiens
  misc_feature (1686)..(1686): n is a, c, g, or t
ccgggcgcggtggcgcgtgggggtagtggtcagcttccaaaggcacaggccaagttgtagctttgtcccttgccatcatgcccaacaagaggttctataccttttaatgaattgactttcataaattggttatgttggtgggcaagttctttaagctggaaattgtaaattcctcctggggtgttttttcatgcagttaccatgaactaatactacaataaaggatggtcttgggtgtcggaaaaaaaaaaaaaaaaaaaaaaaaaaaaaacatgtcgcccggagcggcggggtcgactgacggtaacggggcagagaggctgttcgcagagctgcggaagatgttgtggtatttgagaagaacactgagtcaccattgccacagactctgatatcggtactgctggtaggccatccatccaaatctagaaagtttctattgaatgccagaggacttggatctgagctaaaggacagtattccagttactgaactttcagcaagtggaccttttgaaagtcatgatcttcttcggaaaggtttttcttgtgtgaaaaatgaacttttgcctagtcatccccttgaattatcagaaaaaaatttccagctcaaccaagataaaatgaatttttccacactgagaaacattcagggtctatttgctccgctaaaattacagatggaattcaaggcagtgcagcaggttcagcgtcttccatttctttcaagctcaaatctttcactggatgttttgaggggtaatgatgagactattggatttgaggatattcttaatgatccatcacaaagcgaagtcatgggagagccacacttgatggtggaatataaacttggtttactgtaatagtgtgctgttcatggaaaccgagggctgcatcttgtttatagtcatctttgtactgtaatttgatgtacacaacattaaaagtactgacacctgagaatttctgctcaagtagtatcagtgatcatttaaaatttggaggggtctttggtttacagccatgtgacaattaaaagcactaaagggagatcatgttaaagctcttaatttatattaaaacagtagcctttgtctttaaaaaagttgttgctcatgaatattataaaatgatctacaggtttcaattcaacctgtttctaggtttttttgtaaatttagttttgattaagcattataagcatttgagtctataaactttatagtagcatctttcagaataaacatttttaattgatttcagtggcaactctcaaattgattacaatatgagatatatcagtgtcgtccattaacactcataagaataatatttactgtgtcagtgctattttaggattatagttattgtttgattatttcaggttgaaaagtagaagttccaaggttttgattttggtctggtctttaagtgaaaaattaaagcaaccagtagatgtaggttaaacttttacttcatagacttaatatgtaattaatatattgccaagcaacactgttaaagaaaagtaaaactcattttttcttgttcttaatttatatattacaagatactgtaaggtattctttatgaagttgatatataaaaatttacatttttagaacattagtgaatggatcatcttttacaattaaaagtatattttgattatcagtttcttagn

SEQ ID NO: 319076 - DNA, 954 bp, Homo sapiens
ggccagccctcggaaacggaagtgagcggcggggtcgactgacggtaacggggcagagaggctgttcgcagagctgcggaagatgaatgccagaggacttggatctgagctaaaggacagtattccagttactgaactttcagcaagtggaccttttgaaagtcatgatcttcttcggaaaggtttttcttgtgtgaaaaatgaacttttgcctagtcatccccttgaattatcagaaaaaaatttccagctcaaccaagataaaatgaatttttccacactgagaaacattcagggtctatttgctccgctaaaattacagatggaattcaaggcagtgcagcaggttcagcgtcttccatttctttcaagctcaaatctttcactggatgttttgaggggtaatgatgagactattggatttgaggatattcttaatgatccatcacaaagcgaagtcatgggagagccacacttgatggtggaatataaacttggtttactgtaatagtgtgctgttcatggaaaccgagggctgcatcttgtttatagtcatctttgtactgtaatttgatgtacacaacattaaaagtactgacacctgagaaaaaaaaaacaaaaaaaaaaaaaaaaaaaaaaaaaaaaaaaaaaaaaaaaaaaaaaggggggggggggtaaaaaaaccacgagggggggacaacaaatacacgaccaccggttatatttgaaaaaggggcccataaagaagagaataataaacgagcagggggcggtaaaacacgcgcgagcgggaacaagcgccccgcggcacacacgggaggagacaacccaacacggggggggggccaacatggggcaacccccccaagcaaaagcgcccggggcaacacaaaccaaggcgatcacgcgcacaaccccaacatgcgggcaaaaatgccagaggaaactagaatg

SEQ ID NO: 319077 - DNA, 1055 bp, Homo sapiens
ggccagccctcggaaacggaagtgagcggcggggtcgactgacggtaacggggcagagaggctgttcgcagagctgcggaagatgaatgccagaggacttggatctgagctaaaggacagtattccagttactgaactttcagcaagtggaccttttgaaagtcatgatcttcttcggaaaggtttttcttgtgtgaaaaatgaacttttgcctagtcatccccttgaattatcagaaaaaaatttccagctcaaccaagataaaatgaatttttccacactgagaaacattcagggtctatttgctccgctaaaattacagatggaattcaaggcagtgcagcaggttcagcgtcttccatttctttcaagctcaaatctttcactggatgttttgaggggtaatgatgagactattggatttgaggatattcttaatgatccatcacaaagcgaagtcatgggagagccacacttgatggtggaatataaacttggtttactgtaatagtgtgctgttcatggaaaccgagggctgcatcttgtttatagtcatctttgtactgtaatttgatgtacacaacattaaaagtactgacacctgagaaaaaaaaaacaaaaaaaaaaaaaaaaaaaaaatttgggggcgcgcgcgccgcgcggcccccgcgagaaagagcgtttttagaaacccaatgcgcggtgggggcgcgcgcggggccccggagagggtaagagggaaaccgggggcacaaagcgcgggtccccagaggagagaaccgcggggcccacgagaacaagagaggggcgcggggatctctcctctcaccaacatatataaaaaacaggccgcgggggggcaaccaacaccgcgagcggcttctcttgtgagaacacataattctcgcagagagaagggagagaactcgcgagagagggggcacaaaatagcgggggggcacccttaatatccaaagacgggggagctccccaaaaggcgagagcccccgaaaaatcatacaaaatttaagcccccgcgacgagcggggggggat

SEQ ID NO: 319078 - DNA, 1299 bp, Homo sapiens
ccgggcgcggtggcgcgtgggggtagtggtcagcttccaaaggcacaggccaagttgtagctttgtcccttgccatcatgcccaacaagaggttctataccttttaatgaattgactttcataaattggttatgttggtgggcaagttctttaagctggaaattgtaaattcctcctggggtgttttttcatgcagttaccatgaactaatactacaataaaggatggtcttgggtgtcggaaaaaaaaaaaaaaaaaaaaaaaaaaaaaacatgtcgcccggagcggcggggtcgactgacggtaacggggcagagaggctgttcgcagagctgcggaagatgttgtggtatttgagaagaacactgagtcaccattgccacagactctgatatcggtactgctggtaggccatccatccaaatctagaaagtttctattgaatgccagaggacttggatctgagctaaaggacagtattccagttactgaactttcagcaagtggaccttttgaaagtcatgatcttcttcggaaaggtttttcttgtgtgaaaaatgaacttttgcctagtcatccccttgaattatcagaaaaaaatttccagctcaaccaagataaaatgaatttttccacactgagaaacattcagggtctatttgctccgctaaaattacagatggaattcaaggcagtgcagcaggttcagcgtcttccatttctttcaagctcaaatctttcactggatgttttgaggggtaatgatgagactattggatttgaggatattcttaatgatccatcacaaagcgaagtcatgggagagccacacttgatggtggaatataaacttggtttactgtaatagtgtgctgttcatggaaaccgagggctgcatcttgtttatagtcatctttgtactgtaatttgatgtacacaacattaaaagtactgacacctgagaatttctgctcaagtagtatcagtgatcatttaaaatttggaggggtctttggtttacagccatgtgacaattaaaagcactaaagggagatcatgttaaagctcttaatttatattaaaacagtagcctttgtctttaaaaaagttgttgctcatgaatattataaaatgatctacaggtttcaattcaacctgtttctaggtttttttgtaaatttagttttgattaagcattataagcatttgagtctataaactttatagtagcatctttcagaataaacatttttggcacaaaaaaaaaaagggggggggtaaagaatccccgaagggcca

SEQ ID NO: 319079 - DNA, 1223 bp, Homo sapiens
  misc_feature (1223)..(1223): n is a, c, g, or t
cctcaaaatacatgcacaccaggtaggattattgttaatgaaaagtataatttcagtgtctttacaacttagtttgtgtctaaaatatgaactagtgtttttttccacttgttaaattgatcttgtatttggttttgcgaattttcaaacaaagaataaagaacatgaaattagactatatattctgtcattttcccctgagttttttctaatcttgtcccttcatacttttccccaaaggttcagcgtcttccatttctttcaagctcaaatctttcactggatgttttgaggggtaatgatgagactattggatttgaggatattcttaatgatccatcacaaagcgaagtcatgggagagccacacttgatggtggaatataaacttggtttactgtaatagtgtgctgttcatggaaaccgagggctgcatcttgtttatagtcatctttgtactgtaatttgatgtacacaacattaaaagtactgacacctgagaatttctgctcaagtagtatcagtgatcatttaaaatttggaggggtctttggtttacagccatgtgacaattaaaagcactaaagggagatcatgttaaagctcttaatttatattaaaacagtagcctttgtctttaaaaaagttgttgctcatgaatattataaaatgatctacaggtttcaattcaacctgtttctaggtttttttgtaaatttagttttgattaagcattataagcatttgagtctataaactttatagtagcatctttcagaataaacatttttaattgatttcagtggcaactctcaaattgattacaatatgagatatatcagtgtcgtccattaacactcataagaataatatttactgtgtcagtgctattttaggattatagttattgtttgattatttcaggttgaaaagtagaagttccaaggttttgattttggtctggtctttaagtgaaaaattaaagcaaccagtagatgtaggttaaacttttacttcatagacttaatatgtaattaatatattgccaagcaacactgttaaagaaaagtaaaactcattttttcttgttcttaatttatatattacaagatactgtaaggtattctttatgaagttgatatataaaaatttacatttttagaacattagtgaatggatcatcttttacaattaaaagtatattttgattatcagtttcttagn

SEQ ID NO: 319080 - DNA, 1227 bp, Homo sapiens
  misc_feature (1227)..(1227): n is a, c, g, or t
aaacttttgtcaatctgttttttctttttaaatccactattttgagatattattgacatacaataaagtacacctatttttaagtgtacagttctgtgggttttaattaacatggaacctggtctcctaaacagaggagtagaatgttttcattgcctcacaaagttcccttggtcccttttcagtcagtcaccccaccccagccccaggcaatcactggtttgttttctataactttaggttagttttgactcttctggattcttatgtaagcagaatcattgaatgtatctcttttttgagagtcttttaaaatgtttgtttttgtttgctttcagatccatcacaaagcgaagtcatgggagagccacacttgatggtggaatataaacttggtttactgtaatagtgtgctgttcatggaaaccgagggctgcatcttgtttatagtcatctttgtactgtaatttgatgtacacaacattaaaagtactgacacctgagaatttctgctcaagtagtatcagtgatcatttaaaatttggaggggtctttggtttacagccatgtgacaattaaaagcactaaagggagatcatgttaaagctcttaatttatattaaaacagtagcctttgtctttaaaaaagttgttgctcatgaatattataaaatgatctacaggtttcaattcaacctgtttctaggtttttttgtaaatttagttttgattaagcattataagcatttgagtctataaactttatagtagcatctttcagaataaacatttttaattgatttcagtggcaactctcaaattgattacaatatgagatatatcagtgtcgtccattaacactcataagaataatatttactgtgtcagtgctattttaggattatagttattgtttgattatttcaggttgaaaagtagaagttccaaggttttgattttggtctggtctttaagtgaaaaattaaagcaaccagtagatgtaggttaaacttttacttcatagacttaatatgtaattaatatattgccaagcaacactgttaaagaaaagtaaaactcattttttcttgttcttaatttatatattacaagatactgtaaggtattctttatgaagttgatatataaaaatttacatttttagaacattagtgaatggatcatcttttacaattaaaagtatattttgattatcagtttcttagn

SEQ ID NO: 319081 - DNA, 606 bp, Homo sapiens
ggccagccctcggaaacggaagtgagcggcggggtcgactgacggtaacggggcagagaggctgttcgcagagctgcggaagatgaatgccagaggacttggatctgagctaaaggacagtattccagttactgaactttcagcaagtggaccttttgaaagtcatgatcttcttcggaaaggtttttcttgtgtgaaaaatgaacttttgcctagtcatccccttgaattatcagaaaaaaatttccagctcaaccaagataaaatgaatttttccacactgagaaacattcagggtctatttgctccgctaaaattacagatggaattcaaggcagtgcagcaggttcagcgtcttccatttctttcaagctcaaatctttcactggatgttttgaggggtaatgatgagactattggatttgaggatattcttaatgatccatcacaaagcgaagtcatgggagagccacacttgatggtggaatataaacttggtttactgtaatagtgtgctgttcatggaaaccgagggctgcatcttgtttatagtcatctttgtactgtaatttgatgtacacaacattaaaagtactgacacctgag

SEQ ID NO: 319082 - DNA, 579 bp, Homo sapiens
tgggctgcaggaattcggcacgaggggagagaggctgttcgcagagctgcggaagatgaatgccagaggacttggatctgagctaaaggacagtattccagttactgaactttcagcaagtggaccttttgaaagtcatgatcttcttcggaaaggtttttcttgtgtgaaaaatgaacttttgcctagtcatccccttgaattatcagaaaaaaatttccagctcaaccaagataaaatgaatttttccacactgagaaacattcagggtctatttgctccgctaaaattacagatggaattcaaggcagtgcagcaggttcagcgtcttccatttctttcaagctcaaatctttcactggatgttttgaggggtaatgatgagactattggatttgaggatattcttaatgatccatcacaaagcgaagtcatgggagagccacacttgatggtggaatataaacttggtttactgtaatagtgtgctgttcatggaaaccgagggctgcatcttgtttatagtcatctttgtactgtaatttgatgtacacaacattaaaagtactgacacctgag

SEQ ID NO: 319083 - DNA, 1524 bp, Homo sapiens
ccgggcgcggtggcgcgtgggggtagtggtcagcttccaaaggcacaggccaagttgtagctttgtcccttgccatcatgcccaacaagaggttctataccttttaatgaattgactttcataaattggttatgttggtgggcaagttctttaagctggaaattgtaaattcctcctggggtgttttttcatgcagttaccatgaactaatactacaataaaggatggtcttgggtgtcggaaaaaaaaaaaaaaaaaaaaaaaaaaaaaacatgtcgcccggagcggcggggtcgactgacggtaacggggcagagaggctgttcgcagagctgcggaagatgaatgccagaggacttggatctgagctaaaggacagtattccagttactgaactttcagcaagtggaccttttgaaagtcatgatcttcttcggaaaggtttttcttgtgtgaaaaatgaacttttgcctagtcatccccttgaattatcagaaaaaaatttccagctcaaccaagataaaatgaatttttccacactgagaaacattcagggtctatttgctccgctaaaattacagatggaattcaaggcagtgcagcaggttcagcgtcttccatttctttcaagctcaaatctttcactggatgttttgaggggtaatgatgagactattggatttgaggatattcttaatgatccatcacaaagcgaagtcatgggagagccacacttgatggtggaatataaacttggtttactgtaatagtgtgctgttcatggaaaccgagggctgcatcttgtttatagtcatctttgtactgtaatttgatgtacacaacattaaaagtactgacacctgagaatttctgctcaagtagtatcagtgatcatttaaaatttggaggggtctttggtttacagccatgtgacaattaaaagcactaaagggagatcatgttaaagctcttaatttatattaaaacagtagcctttgtctttaaaaaagttgttgctcatgaatattataaaatgatctacaggtttcaattcaacctgtttctaggtttttttgtaaatttagttttgattaagcattataagcatttgagtctataaactttatagtagcatctttcagaataaacatttttaattgatttcagtggcaactctcaaattgattacaatatgagatatatcagtgtcgtccattaacactcataagaataatatttactgtgtcagtgctattttaggattatagttattgtttgattatttcaggttgaaaagtagaagttccaaggttttgattttggtctggtctttaagtgaaaaattaaagcaaccagtagatgtaggttaaacttttacttcatagacttaatatgtaattaatatattgccaagcaacactgttaaagaaaagtaaaactcattttttcttgttcttaatttatatattacaagatactgtaaggtattctttatgaagttgatatataaaaatttacattttt

SEQ ID NO: 319084 - DNA, 788 bp, Homo sapiens
  misc_feature (749)..(749): n is a, c, g, or t
  misc_feature (763)..(763): n is a, c, g, or t
  misc_feature (765)..(765): n is a, c, g, or t
ggccagccctcggaaacggaagtgagcggcggggtcgactgacggtaacggggcagagaggctgttcgcagagctgcggaagatgaatgccagaggacttggatctgagctaaaggacagtattccagttactgaactttcagcaagtggaccttttgaaagtcatgatcttcttcggaaaggtttttcttgtgtgaaaaatgaacttttgcctagtcatccccttgaattatcagaaaaaaatttccagctcaaccaagataaaatgaatttttccacactgagaaacattcagggtctatttgctccgctaaaattacagatggaattcaaggcagtgcagcaggttcagcgtcttccatttctttcaagctcaaatctttcactggatgttttgaggggtaatgatgagactattggatttgaggatattcttaatgatccatcacaaagcgaagtcatgggagagccacacttgatggtggaatataaacttggtttactgtaatagtgtgctgttcatggaaaccgagggctgcatcttgtttatagtcatctttgtactgtaatttgatgtacacaacattaaaagtactgacacctgagaatttctgctcaagtagtatcagtgatcatttaaaatttggaggggtctttggtttacagccatgtgacaattaaaagcactaaagggagatcatgttaaagctcttaatttatattaaaacagtagcctttgtctttaatangttttttggaaatnantttgataagcctattagcattga

SEQ ID NO: 319085 - DNA, 766 bp, Homo sapiens
ggccagccctcggaaacggaagtgagcggcggggtcgactgacggtaacggggcagagaggctgttcgcagagctgcggaagatgaatgccagaggacttggatctgagctaaaggacagtattccagttactgaactttcagcaagtggaccttttgaaagtcatgatcttcttcggaaaggtttttcttgtgtgaaaaatgaacttttgcctagtcatccccttgaattatcagaaaaaaatttccagctcaaccaagataaaatgaatttttccacactgagaaacattcagggtctatttgctccgctaaaattacagatggaattcaaggcagtgcagcaggttcagcgtcttccatttctttcaagctcaaatctttcactggatgttttgaggggtaatgatgagactattggatttgaggatattcttaatgatccatcacaaagcgaagtcatgggagagccacacttgatggtggaatataaacttggtttactgtaatagtgtgctgttcatggaaaccgagggctgcatcttgtttatagtcatctttgtactgtaatttgatgtacacaacattaaaagtactgacacctgagaaaaaaaaaaaaaaaaaaaaaaaaaaaacttgggggttttttttgggggggggaaaaaagggttattgaatgggattgtttttgtttttctggaccgttttttttcaggggtaaatggggtccctaaggggggatattgtagcgttttttttgaagaatg

SEQ ID NO: 319086 - DNA, 478 bp, Homo sapiens
  misc_feature (403)..(403): n is a, c, g, or t
ggccagccctcggaaacggaagtgagcggcggggtcgactgacggtaacggggcagagaggctgttcgcagagctgcggaagatgaatgccagaggacttggatctgagctaaaggacagtattccagttactgaactttcagcaagtggaccttttgaaagtcatgatcttcttcggaaaggtttttcttgtgtgaaaaatgaacttttgcctagtcatccccttgaattatcagaaaaaaatttccagctcaaccaagataaaatgaatttttccacactgagaaacattcagggtctatttgctccgctaaaattacagatggaattcaaggcagtgcagcaggttcagcgtcttccatttctttcaagctcaaatctttcactggatgttttttttggnaaaaaggggggggggcgcgccccgcccttttttttaaaaaaaaaaatttttggggggaatcaatgggagagccat

SEQ ID NO: 319087 - DNA, 594 bp, Homo sapiens
  misc_feature (66)..(66): n is a, c, g, or t
gggggagggtgagcccgagagaggagggggggatggggggggggattgattggggtggggaattanattgggcacgcctggaggctggaggttgatgatgctaagcacctacactactttaagaatttggaactgaaacatgaagaggaagacagaaataagaatttgggaacctgaatagctctgcaaaaaacaccaaaggaccgttttatcgttttctgttgttgctgtggtggagtgatgcagtgggcactgccggtgggccagggggcgggtgcgcatgtggtagaaggtgtgcgctcgtgcctcccccacagaaaggctttgttggtttctaccacatcttggcttgcttttggaacaggctggcccagcatcatttgtcatcaagtccactgtggtgtattctgcgtgtccatggcgggggttctccaatacactcacactgtccatgttctttttattgccagggcccgtgttgaagtgtcaagagagcaatcatcaatgataatgtattgtgtgagacctttgcatcttgtaaattttctcttttttctaaaaataaataataataaaatcctaaatctcaacaaa

SEQ ID NO: 319088 - DNA, 1375 bp, Homo sapiens
tgggtgggctatcgccaggccgagagtgggcgtggccgacgtggggtgggtagcagccgaccgagtcggaccggccagttgggcgcgcttccgggtgtcacctccagagggcgccggctgcggagccgccctcagagtcgcgaggccggacgcagcgcggcgccgccccactcgccccagccgccgccatgaaggccgtggtgcagcgcgtcacccgggccagcgtcacagttggaggagagcagattagtgccattggaaggggcatatgtgtgttgctgggtatttccctggaggatacgcagaaggaactggaacacatggtccgaaagattctaaacctgcgtgtatttgaggatgagagtgggaagcactggtcgaagagtgtgatggacaaacagtacgagattctgtgtgtcagccagtttaccctccagtgtgtcctgaagggaaacaagcctgatttccacctagcaatgcccacggagcaggcagagggcttctacaacagcttcctggagcagctgcgtaaaacatacaggccggagcttatcaaagatggcaagtttggggcctacatgcaggtgcacattcagaatgatgggcctgtgaccatagagctggaatcgccagctcccggcactgctacctctgacccaaagcagctgtcaaagctcgaaaaacagcagcagaggaaagaaaagaccagagctaagggaccttctgaatcaagcaaggaaagaaacactccccgaaaagaagaccgcagtgccagcagcggggctgagggcgacgtgtcctctgaacgggagccgtagctcaggaggcagaattcagtgtgttatcattgggcagaactggatcctgaaaaattcaagatgctaagcacctacactactttaagaatttggaactgaaacatgaagaggaagacagaaataagaatttgggaacctgaatagctctgcaaaaaacaccaaaggaccgttttatcgttttctgttgttgctgtggtggagtgatgcagtgggcactgccggtgggccagggggcgggtgcgcatgtggtagaaggtgtgcgctcgtgcctcccccacagaaaggctttgttggtttctaccacatcttggcttgcttttggaacaggctggcccagcatcatttgtcatcaagtccactgtggtgtattctgcgtgtccatggcgggggttctccaatacactcacactgtccatgttctttttattgccagggcccgtgttgaagtgtcaagagagcaatcatcaatgataatgtattgtgtgagacctttgcatcttgtaaattttctcttttttctaaaaataaataataataaaatcctaaatctcaacaaa

SEQ ID NO: 319089 - DNA, 1407 bp, Homo sapiens
tgggtgggctatcgccaggccgagagtgggcgtggccgacgtggggtgggtagcagccgaccgagtcggaccggccagttgggcgcgcttccgggtgtcacctccagagggcgccggctgcggagccgccctcagagtcgcgaggccggacgcagcgcggcgccgccccactcgccccagccgccgccatgaaggccgtggtgcagcgcgtcacccgggccagcgtcacagttggaggagagcagattagtgccattggaaggggcatatgtgtgttgctgggtatttccctggaggatacgcagaaggaactggaacacatggtccgaaagattctaaacctgcgtgtatttgaggatgagagtgggaagcactggtcgaagagtgtgatggacaaacagtacgagattctgtgtgtcagccagtttaccctccagtgtgtcctgaagggaaacaagcctgatttccacctagcaatgcccacggagcaggcagagggcttctacaacagcttcctggagcagctgcgtaaaacatacaggccggagcttatcaaagatggcaagtttggggcctacatgcaggtgcacattcagaatgatgggcctgtgaccatagagctggaatcgccagctcccggcactgctacctctgacccaaagcagctgtcaaagctcgaaaaacagcagcagaggaaagaaaagaccagagctaagggaccttctgaatcaagcaaggaaagaaacactccccgaaaagaagaccgcagtgccagcagcggggctgagggcgacgtgtcctctgaacgggagccgtagctcaggaggcagaattcagtgtgttatcattgggcagaactggatcctgaaaaattcaagatgctaagcacctacactactttaagaatttggaactgaaacatgaagaggaagacagaaataagaatttgggaacctgaatagctctgcaaaaaacaccaaaggaccgttttatcgttttctgttgttgctgtggtggagtgatgcagtgggcactgccggtgggccagggggcgggtgcgcatgtggtagaaggtgtgcgctcgtgcctcccccacagaaaggctttgttggtttctaccacatcttggcttgcttttggaacaggctggcccagcatcatttgtcatcaagtccactgtggtgtattctgcgtgtccatggcgggggttctccaatacactcacactgtccatgttctttttattgccagggcccgtgttgaagtgtcaagagagcaatcatcaatgataatgtattgtgtgagacctttgcatcttgtaaattttctcttttttctaaaaataaataataataaaatcctaaatctcaacaaaaacaaaccactttattatcaaacaaaaactgc

SEQ ID NO: 319090 - DNA, 1179 bp, Homo sapiens
  misc_feature (994)..(995): n is a, c, g, or t
  misc_feature (998)..(998): n is a, c, g, or t
tgggtgggctatcgccaggccgagagtgggcgtggccgacgtggggtgggtagcagccgaccgagtcggaccggccagttgggcgcgcttccgggtgtcacctccagagggcgccggctgcggagccgccctcagagtcgcgaggccggacgcagcgcggcgccgccccactcgccccagccgccgccatgaaggccgtggtgcagcgcgtcacccgggccagcgtcacagttggaggagagcagattagtgccattggaaggggcatatgtgtgttgctgggtatttccctggaggatacgcagaaggaactggaacacatggtccgaaagattctaaacctgcgtgtatttgaggatgagagtgggaagcactggtcgaagagtgtgatggacaaacagtacgagattctgtgtgtcagccagtttaccctccagtgtgtcctgaagggaaacaagcctgatttccacctagcaatgcccacggagcaggcagagggcttctacaacagcttcctggagcagctgcgtaaaacatacaggccggagcttatcaaagatggcaagtttggggcctacatgcaggtgcacattcagaatgatgggcctgtgaccatagagctggaatcgccagctcccggcactgctacctctgacccaaagcagctgtcaaagctcgaaaaacagcagcagaggaaagaaaagaccagagctaagggaccttctgaatcaagcaaggaaagaaacactccccgaaaagaagaccgcagtgccagcagcggggctgagggcgacgtgtcctctgaacgggagccgtagctcaggaggcagaattcagtgtgttatcattgggcagaactggatcctgaaaaattcaagatgctaagcacctacactactttaagaatttggaactgaaacatgaagaggaagacagaaataagaatttgggaacctgaatagctctgcaaaaaacaccaaaggaccgttatcgnncgngtgcgggtggatgacagggattggccgtggcaggcgggccttgaaaggtcgcggccccaaagttgggttcccacggggttggaaggccacactttaacaagggtatagccggggcaaacaagtttagcggaggagaaaatgggctgtttacccaaagtggccgctttctcctttcgctatt

SEQ ID NO: 319091 - DNA, 1019 bp, Homo sapiens
tgggtgggctatcgccaggccgagagtgggcgtggccgacgtggggtgggtagcagccgaccgagtcggaccggccagttgggcgcgcttccgggtgtcacctccagagggcgccggctgcggagccgccctcagagtcgcgaggccggacgcagcgcggcgccgccccactcgccccagccgccgccatgaaggccgtggtgcagcgcgtcacccgggccagcgtcacagttggaggagagcagattagtgccattggaaggggcatatgtgtgttgctgggtatttccctggaggatacgcagaaggaactggaacacatggtccgaaagattctaaacctgcgtgtatttgaggatgagagtgggaagcactggtcgaagagtgtgatggacaaacagtacgagattctgtgtgtcagccagtttaccctccagtgtgtcctgaagggaaacaagcctgatttccacctagcaatgcccacggagcaggcagagggcttctacaacagcttcctggagcagctgcgtaaaacatacaggccggagcttatcaaagatggcaagtttggggcctacatgcaggtgcacattcagaatgatgggcctgtgaccatagagctggaatcgccagctcccggcactgctacctctgacccaaagcagctgtcaaagctcgaaaaacagcagcagaggaaagaaaagaccagagctaagggaccttctgaatcaagcaaggaaagaaacactccccgaaaagaagaccgcagtgccagcagcggggctgagggcgacgtgtcctctgaacgggagccgtagctcaggaggcagaattcagtgtgttatcattgggcagaactggatcctgaaaaattcaagatgctaagcacctacactactttaagaatttggaactgaaacatgaagaggaagagaccaagaaataaaacctcccactttgtctgtacatactggcctctgtgattacatagatcagccattaaaataaaacaagcctta

SEQ ID NO: 319092 - DNA, 790 bp, Homo sapiens
  misc_feature (80)..(80): n is a, c, g, or t
ctcgattgtcacgatgcttgtctagtatttattaactcctcttctagatagcggtggctgtgctttagctggttaacagnctgtcaaagctcgaaaaacagcagcagaggaaagaaaagaccagagctaagggaccttctgaatcaagcaaggaaagaaacactccccgaaaagaagaccgcagtgccagcagcggggctgagggcgacgtgtcctctgaacgggagccgtagctcaggaggcagaattcagtgtgttatcattgggcagaactggatcctgaaaaattcaagatgctaagcacctacactactttaagaatttggaactgaaacatgaagaggaagacagaaataagaatttgggaacctgaatagctctgcaaaaaacaccaaaggaccgttttatcgttttctgttgttgctgtggtggagtgatgcagtgggcactgccggtgggccagggggcgggtgcgcatgtggtagaaggtgtgcgctcgtgcctcccccacagaaaggctttgttggtttctaccacatcttggcttgcttttggaacaggctggcccagcatcatttgtcatcaagtccactgtggtgtattctgcgtgtccatggcgggggttctccaatacactcacactgtccatgttctttttattgccagggcccgtgttgaagtgtcaagagagcaatcatcaatgataatgtattgtgtgagacctttgcatcttgtaaattttctcttttttctaaaaataaataataataaaatcctaaatctcaacaaa

SEQ ID NO: 319093 - DNA, 1035 bp, Homo sapiens
tgggtgggctatcgccaggccgagagtgggcgtggccgacgtggggtgggtagcagccgaccgagtcggaccggccagttgggcgcgcttccgggtgtcacctccagagggcgccggctgcggagccgccctcagagtcgcgaggccggacgcagcgcggcgccgccccactcgccccagccgccgccatgaaggccgtggtgcagcgcgtcacccgggccagcgtcacagttggaggagagcagattagtgccattggaaggggcatatgtgtgttgctgggtatttccctggaggatacgcagaaggaactggaacacatggtccgaaagattctaaacctgcgtgtatttgaggatgagagtgggaagcactggtcgaagagtgtgatggacaaacagtacgagattctgtgtgtcagccagtttaccctccagtgtgtcctgaagggaaacaagcctgatttccacctagcaatgcccacggagcaggcagagggcttctacaacagcttcctggagcagctgcgtaaaacatacaggccggagcttatcaaagatggcaagtttggggcctacatgcaggtgcacattcagaatgatgggcctgtgaccatagagctggaatcgccagctcccggcactgctacctctgacccaaagcagctgtcaaagctcgaaaaacagcagcagaggaaagaaaagaccagagctaagggaccttctgaatcaagcaaggaaagaaacactccccgaaaagaagaccgcagtgccagcagcggggctgagggcgacgtgtcctctgaacgggagccgtagctcaggaggcagaattcagtgtgttatcattgggcagaactggatcctgaaaaattcaagatgctaagcacctacactactttttattgccagggcccgtgttgaagtgtcaagagagcaatcatcaatgataatgtattgtgtgagacctttgcatcttgtaaattttctcttttttctaaaaataaataataataaaatcctaaatctcaacaaa

SEQ ID NO: 319094 - DNA, 630 bp, Homo sapiens
acccactactggctgacccactactggctgacccactactggctgacccactactgtccaacgggagccgtagctcaggaggcagaattcagtgtgttatcattgggcagaactggatcctgaaaaattcaagatgctaagcacctacactactttaagaatttggaactgaaacatgaagaggaagacagaaataagaatttgggaacctgaatagctctgcaaaaaacaccaaaggaccgttttatcgttttctgttgttgctgtggtggagtgatgcagtgggcactgccggtgggccagggggcgggtgcgcatgtggtagaaggtgtgcgctcgtgcctcccccacagaaaggctttgttggtttctaccacatcttggcttgcttttggaacaggctggcccagcatcatttgtcatcaagtccactgtggtgtattctgcgtgtccatggcgggggttctccaatacactcacactgtccatgttctttttattgccagggcccgtgttgaagtgtcaagagagcaatcatcaatgataatgtattgtgtgagacctttgcatcttgtaaattttctcttttttctaaaaataaataataataaaatcctaaatctcaacaaa

SEQ ID NO: 319095 - DNA, 1039 bp, Homo sapiens
tgggtgggctatcgccaggccgagagtgggcgtggccgacgtggggtgggtagcagccgaccgagtcggaccggccagttgggcgcgcttccgggtgtcacctccagagggcgccggctgcggagccgccctcagagtcgcgaggccggacgcagcgcggcgccgccccactcgccccagccgccgccatgaaggccgtggtgcagcgcgtcacccgggccagcgtcacagttggaggagagcagattagtgccattggaaggggcatatgtgtgttgctgggtatttccctggaggatacgcagaaggaactggaacacatggtccgaaagattctaaacctgcgtgtatttgaggatgagagtgggaagcactggtcgaagagtgtgatggacaaacagtacgagattctgtgtgtcagccagtttaccctccagtgtgtcctgaagggaaacaagcctgatttccacctagcaatgcccacggagcaggcagagggcttctacaacagcttcctggagcagctgcgtaaaacatacaggccggagcttatcaaagatggcaagtttggggcctacatgcaggtgcacattcagaatgatgggcctgtgaccatagagctggaatcgccagctcccggcactgctacctctgacccaaagcagctgtcaaagctcgaaaaacagcagcagaggaaagaaaagaccagagctaagggaccttctgaatcaagcaaggtgtgcgctcgtgcctcccccacagaaaggctttgttggtttctaccacatcttggcttgcttttggaacaggctggcccagcatcatttgtcatcaagtccactgtggtgtattctgcgtgtccatggcgggggttctccaatacactcacactgtccatgttctttttattgccagggcccgtgttgaagtgtcaagagagcaatcatcaatgataatgtattgtgtgagacctttgcatcttgtaaattttctcttttttctaaaaataaataataataaaatcctaaatctcaacaaa

SEQ ID NO: 319096 - DNA, 881 bp, Homo sapiens
ccggctgcctaggaccttcctgttgatgatgccatctttatggagaatatctgttccaaaggcctccaccacaggctggtaggcagggccacctggggcataggcccgatgacccaggtggtcactgtcaatgacaaacgcccccaggcccttcagtcgctgagctattgagctcttcccagagccactgatgccagtcagcccaattacatagagacatgtggggagctctggcctttcatatggaggccgaagcaggttccccagtttaccctccagtgtgtcctgaagggaaacaagcctgatttccacctagcaatgcccacggagcaggcagagggcttctacaacagcttcctggagcagctgcgtaaaacatacaggccggagcttatcaaagatggcaagtttggggcctacatgcaggtgcacattcagaatgatgggcctgtgaccatagagctggaatcgccagctcccggcactgctacctctgacccaaagcagctgtcaaagctcgaaaaacagcagcagaggaaagaaaagaccagagctaagggaccttctgaatcaagcaaggtgtgcgctcgtgcctcccccacagaaaggctttgttggtttctaccacatcttggcttgcttttggaacaggctggcccagcatcatttgtcatcaagtccactgtggtgtattctgcgtgtccatggcgggggttctccaatacactcacactgtccatgttctttttattgccagggcccgtgttgaagtgtcaagagagcaatcatcaatgataatgtattgtgtgagacctttgcatcttgtaaattttctcttttttctaaaaataaataataataaaatcctaaatctcaacaaa

SEQ ID NO: 319097 - DNA, 429 bp, Homo sapiens
gaaatacatcattgttgcaacgttgtatttattttaatacctgccttcccaagagtgcatgtttacggtgcactcctgagtactgtggccggtgggtacagcacttctcccttgcctcgtcctgcctttgaattccagaggacatgtcctgtgcagagccaggttcttcccctgggcttcccttcccttggccaggtgccgtggcgcccacctgcccctgggtggcagcagagcaatggccctggattggccggttcacccattccgaatggttacctgaattgggtttggtcccaggtgtggatagatgtgccccccaaggtttgctgtaaatctccatttttctaaagcagtgtctgacctggatttgctgccaatttgtaagctttcatgaaataaaagttaattaaaatagagaaaggaaatgtg

SEQ ID NO: 319098 - DNA, 2143 bp, Homo sapiens
tgggtgggctatcgccaggccgagagtgggcgtggccgacgtggggtgggtagcagccgaccgagtcggaccggccagttgggcgcgcttccgggtgtcacctccagagggcgccggctgcggagccgccctcagagtcgcgaggccggacgcagcgcggcgccgccccactcgccccagccgccgccatgaaggccgtggtgcagcgcgtcacccgggccagcgtcacaggtcagtcgggcggggccgggcccgggaggagccgcccctgacccccgcgaccggctgtcttgcgtggggggtcttcctgcgccatccttggggccgctgcggcccctccgcgagcctggtccccttcgcgagctcggtccgcgcagccgcgagtccccagggccggcttcggggcagcgcggcggccggagagccccctgcacgtgcccgaccggccccggcgcgcccctggcttccggctctcggcagagggtgcaggaccagcgcgcctcattctcagcacctttgtcctgcgtgcgggatggcggagcctcggagcatctccgtggtccgctcttcagggagtgttgatgaaccacgcttagagcatttccggagcaggcactcctcccttttcactgctgtattttaaatgttcaatttttgcccatttttacgtattccaatttttatggggcttgactcaggatgaaatgcacagatgcggagagttgctccttgggctgagctttgacagttgcgtgcacgtacgtgactggagcctaggctggatgaggggcgccccctgcccaggacgcccctcgccctcgcccgctgaactctgcgcggaggggtcgggatctaaagaattcaagatgaaaacatttctctttttcttgtggaccaagctacccgacccctggtcatcactcagcactttcgtctcggttgggcatcagaggtccagatgattagtgtagataaagtagtcgttttaagaaaaccacgttggaggagagcagattagtgccattggaaggggcatatgtgtgttgctgggtatttccctggaggatacgcagaaggaactggaacacatggtccgaaagattctaaacctgcgtgtatttgaggatgagagtgggaagcactggtcgaagagtgtgatggacaaacagtacgagattctgtgtgtcagccagtttaccctccagtgtgtcctgaagggaaacaagcctgatttccacctagcaatgcccacggagcaggcagagggcttctacaacagcttcctggagcagctgcgtaaaacatacaggccggagcttatcaaagatggcaagtttggggcctacatgcaggtgcacattcagaatgatgggcctgtgaccatagagctggaatcgccagctcccggcactgctacctctgacccaaagcagctgtcaaagctcgaaaaacagcagcagaggaaagaaaagaccagagctaagggaccttctgaatcaagcaaggaaagaaacactccccgaaaagaagaccgcagtgccagcagcggggctgagggcgacgtgtcctctgaacgggagccgtagctcaggaggcagaattcagtgtgttatcattgggcagaactggatcctgaaaaattcaagatgctaagcacctacactactttaagaatttggaactgaaacatgaagaggaagacagaaataagaatttgggaacctgaatagctctgcaaaaaacaccaaaggaccgttttatcgttttctgttgttgctgtggtggagtgatgcagtgggcactgccggtgggccagggggcgggtgcgcatgtggtagaaggtgtgcgctcgtgcctcccccacagaaaggctttgttggtttctaccacatcttggcttgcttttggaacaggctggcccagcatcatttgtcatcaagtccactgtggtgtattctgcgtgtccatggcgggggttctccaatacactcacactgtccatgttctttttattgccagggcccgtgttgaagtgtcaagagagcaatcatcaatgataatgtattgtgtgagacctttgcatcttgtaaattttctcttttttctaaaaataaataataataaaatcctaaatctcaacaaa

SEQ ID NO: 319099 - DNA, 1010 bp, Homo sapiens
gagtagtgtattaaccttggaggagtgaggggacaggctagcggcacaactctgttaatataccaccgctacacaactggctgctgcagcatctgcatgctttccatgcagcatacccatcacattataggctgctgcgtgggtttcatgctatgtcctggcagtgagaagttggaaggagagcattacattcttgctccaaatgacatatttccaaagggaacaggacatggaagcagcagcagaaccaactgactgctgttttgcctggtgcattttttgcaggagaacacgattctgctgtcaaagctcgaaaaacagcagcagaggaaagaaaagaccagagctaagggaccttctgaatcaagcaaggaaagaaacactccccgaaaagaagaccgcagtgccagcagcggggctgagggcgacgtgtcctctgaacgggagccgtagctcaggaggcagaattcagtgtgttatcattgggcagaactggatcctgaaaaattcaagatgctaagcacctacactactttaagaatttggaactgaaacatgaagaggaagacagaaataagaatttgggaacctgaatagctctgcaaaaaacaccaaaggaccgttttatcgttttctgttgttgctgtggtggagtgatgcagtgggcactgccggtgggccagggggcgggtgcgcatgtggtagaaggtgtgcgctcgtgcctcccccacagaaaggctttgttggtttctaccacatcttggcttgcttttggaacaggctggcccagcatcatttgtcatcaagtccactgtggtgtattctgcgtgtccatggcgggggttctccaatacactcacactgtccatgttctttttattgccagggcccgtgttgaagtgtcaagagagcaatcatcaatgataatgtattgtgtgagacctttgcatcttgtaaattttctcttttttctaaaaataaataataataaaatcctaaatctcaacaaa

SEQ ID NO: 319100 - DNA, 1185 bp, Homo sapiens
tgggtgggctatcgccaggccgagagtgggcgtggccgacgtggggtgggtagcagccgaccgagtcggaccggccagttgggcgcgcttccgggtgtcacctccagagggcgccggctgcggagccgccctcagagtcgcgaggccggacgcagcgcggcgccgccccactcgccccagccgccgccatgaaggccgtggtgcagcgcgtcacccgggccagcgtcacagttggaggagagcagattagtgccattggaaggggcatatgtgtgttgctgggtatttccctggaggatacgcagaaggaactggaacacatggtccgaaagattctaaacctgcgtgtatttgaggatgagagtgggaagcactggtcgaagagtgtgatggacaaacagtacgagattctgtgtgtcagccagtttaccctccagtgtgtcctgaagggaaacaagcctgatttccacctagcaatgcccacggagcaggcagagggcttctacaacagcttcctggagcagctgcgtaaaacatacaggccggagcttatcaaagatggcaagtttggggcctacatgcaggtgcacattcagaatgatgggcctgtgaccatagagctggaatcgccagctcccggcactgctacctctgacccaaagcagctgtcaaagctcgaaaaacagcagcagaggaaagaaaagaccagagctaagggaccttctgaatcaagcaaggaaagaaacactccccgaaaagaagaccgcagtgccagcagcggggctgagggcgacgtgtcctctgaacgggagccgtagctcaggaggcagaattcagtgggcactgccggtgggccagggggcgggtgcgcatgtggtagaaggtgtgcgctcgtgcctcccccacagaaaggctttgttggtttctaccacatcttggcttgcttttggaacaggctggcccagcatcatttgtcatcaagtccactgtggtgtattctgcgtgtccatggcgggggttctccaatacactcacactgtccatgttctttttattgccagggcccgtgttgaagtgtcaagagagcaatcatcaatgataatgtattgtgtgagacctttgcatcttgtaaattttctcttttttctaaaaataaataataataaaatcctaaatctcaacaaa

SEQ ID NO: 319101 - DNA, 904 bp, Homo sapiens
tgggtgggctatcgccaggccgagagtgggcgtggccgacgtggggtgggtagcagccgaccgagtcggaccggccagttgggcgcgcttccgggtgtcacctccagagggcgccggctgcggagccgccctcagagtcgcgaggccggacgcagcgcggcgccgccccactcgccccagccgccgccatgaaggccgtggtgcagcgcgtcacccgggccagcgtcacagttggaggagagcagattagtgccattggaaggggcatatgtgtgttgctgggtatttccctggaggatacgcagaaggaactggaacacatggtccgaaagattctaaacctgcgtgtatttgaggatgagagtgggaagcactggtcgaagagtgtgatggacaaacagtacgagattctgtgtgtcagccagtttaccctccagtgtgtcctgaagggaaacaagcctgatttccacctagcaatgcccacggagcaggcagagggcttctacaacagcttcctggagcagctgcgtaaaacatacaggccggagcttatcaaagatggcaagtttggggcctacatgcaggtgcacattcagaatgatgggcctgtgaccatagagctggaatcgccagctcccggcactgctacctctgacccaaagcaggccaggtgccgtggcgcccacctgcccctgggtggcagcagagcaatggccctggattggccggttcacccattccgaatggttacctgaattgggtttggtcccaggtgtggatagatgtgccccccaaggtttgctgtaaatctccatttttctaaagcagtgtctgacctggatttgctgccaatttgtaagctttcatgaaataaaagttaattaaaatagagaaaggaaatgtg

SEQ ID NO: 319102 - DNA, 1533 bp, Homo sapiens
accccagattgctacaaaccgaaggctaaaatagaggtcagcaatcattcatattgtgtaaaatgtcacccttagctagcaatttatttttccatatttgtgtgtttagtgcactgttagaattccttttcctcacttttgttttgttcatggcacttcataattttatcatttcattttattttcagttgatatctggtcagtgggttgcatcatgggagagctggtgaaaggttgtgtgatattccaaggcactgaccgtatccttccccgcgaccttggccccgccatgctttcttaatgcctcaggcagcatgaccacctgcttacacgagcgctcacgaggacaaagtcgtaaaatccactccagactgtgttctaaggggggctttactgtatttgttaattagtgtcacaagccaagtggttcaatttcattctttatttttaacttgactacctgtgatgactttgagacttagagttcagttaaaccgattatattagctcttaattttgccaaaaatagctggacacatagaagaaattatttactctttgataagtatattctgatatttaaatgaaaatactgtattatttagtttattccgttaatttaactaggaaagatgctatctaaatttaataggctagtgtgcttgtgtgctttaattaagtactattttgttagttactggtatgcattgaaatattttcccccaaagtaagaactgaagcacattacaaaggacctaagtgaaagagattaaaatgaaaattttgtgaggaacaatatgttaaactttcttgtttgttactgtgctgacattttgtagaattttttttaaaaatctgtctagtgggttattttgtgacacactggggaagtcaaaataaatgtaaaatgaaagagataaactcatactgtagtcagcaagtcatgttagagatacagcagaaaggagaataactactctaattgttacaatagccttctttcctcatttgccattcttccatcctcagtattttttaccctaacatggttcttcacatcttccctttttcatttgtgttttaaccacttagtttttcattagtctttgactttgttttcgttatgaaagtttaaattggtctccatccttgggcagattgatggttgcttttaaggaaatcaagctccatagtcagtgttttgtatgtatcttaggaaaataatttcagattttaataattttatcaaagtggtctccttataaattcttcacagtgcaaacttaaagtgaaaatatttttatttctctcattttatttacctttctttacattttctatatcatagattatataatatgtcaagttattttatttgttctactaaattttctagcagtttccatagcctcatctcagattcacttgttgcaacctataaataaggacgtctttattttgcaagtaaacttaattaaaaagggaaaagttgaaaaattaaaagactaataatttagaaatatctacttaatg

SEQ ID NO: 319103 - DNA, 720 bp, Homo sapiens
actccgtctccgaaaaaaaaaaaaaaaattttgggttatattcatcttgaacctatcaaacatttctcaaaattaatatatctttgttctatctgtgttgtcatatttagttctttattgtatgattctgtttgtttcatattaacagcattaatttaatatttgttgtcaccctagcaagtcaagccagagatctgttatcaaaaatgttagtgattgatcctgacaagcggatctctgtagacgaagctctgcgtcacccatacatcactgtttggtatgaccccgccgaagcagaagccccaccacctcaaatttatgatgcccagttggaagaaagagaacatgcaattgaagaatggaaagagctaatttacaaagaagtcatggattgggaagaaagaagcaagaatggtgttgtaaaagatcagccttcagccctcttacagggccccttgcccaccccaagtccgtgtctgaaacacggagcgggtgctgcttcaacccgcatttaatgctgtgtaagtagcgataaccacgtacgagtctgtctggttgatttctaatgtgactcctctggtatttcctcctggtaataaatacaagtgtgacctttcagattgcatatctcaaaagtaacattgctaatgttttataataaaatatattatgtgtgttttggttggtgaaaataatacagactacattttaaaagataaa

SEQ ID NO: 319104 - DNA, 522 bp, Homo sapiens
gagttagtacatgctgtagtcttagacaactcactctgctcttcatatgtgcaagtaccttgaatgaaataagcagatttttccttgttacttattaaaaagatgatatattcaatgtatattctggcattgctgtattttccaaaaccgttctaatggattgtgcattatatttcctaattctagtgctgcatttgatacagttcttgggataaatgttgcagtcaagaaactaagccgtccttttcagaaccaaactcatgcaaagagagcttatcgtgaacttgtcctcttaaaatgtgtcaatcataaaaatgtaagttatgtatgtattttgtctgtgtgcttccatattgtcaataatgtggtaatcttcagggttttctggagatacattgagttcagacctaggataagctaaggataaaaatggctattaacattggttttttgttttttgtttttttgtttttttgtcgccattgcactccagcctgggggacaagaatgaaactccatctc

SEQ ID NO: 319105 - DNA, 4158 bp, Homo sapiens
caaactacgtgctgtacagctgcatcagctgctcgtagacatgtccagcagctggtcgaggtccacgccgcggtaggtgaagttgcggaaggtccggcgagggatctgaaacttgcccacccttcgggatattgcaggacgctgcatcatgagcgacagtaaatgtgacagtcagttttatagtgtgcaagtggcagactcaaccttcactgtcctaaaacgttaccagcagctgaaaccaattggctctggggcccaagggattgtttgtgctgcatttgatacagttcttgggataaatgttgcagtcaagaaactaagccgtccttttcagaaccaaactcatgcaaagagagcttatcgtgaacttgtcctcttaaaatgtgtcaatcataaaaatataattagtttgttaaatgtgtttacaccacaaaaaactctagaagaatttcaagatgtgtatttggttatggaattaatggatgctaacttatgtcaggttattcacatggagctggatcatgaaagaatgtcctaccttctttaccagatgctttgtggtattaaacatctgcattcagctggtataattcatagagatttgaagcctagcaacattgttgtgaaatcagactgcaccctgaagatccttgactttggcctggcccggacagcgtgcactaacttcatgatgaccccttacgtggtgacacggtactaccgggcgcccgaagtcatcctgggtatgggctacaaagagaacgttgatatctggtcagtgggttgcatcatgggagagctggtgaaaggttgtgtgatattccaaggcactgaccatattgatcagtggaataaagttattgagcagctgggaacaccatcagcagagttcatgaagaaacttcagccaactgtgaggaattatgtcgaaaacagaccaaagtatcctggaatcaaatttgaagaactctttccagattggatattcccatcagaatctgagcgagacaaaataaaaacaagtcaagccagagatctgttatcaaaaatgttagtgattgatcctgacaagcggatctctgtagacgaagctctgcgtcacccatacatcactgtttggtatgaccccgccgaagcagaagccccaccacctcaaatttatgatgcccagttggaagaaagagaacatgcaattgaagaatggaaagagctaatttacaaagaagtcatggattgggaagaaagaagcaagaatggtgttgtaaaagatcagccttcagatgcagcagtaagtagcaacgccactccttctcagtcttcatcgatcaatgacatttcatccatgtccactgagcagacgctggcctcagacacagacagcagtcttgatgcctcgacgggaccccttgaaggctgtcgatgataggttagaaatagcaaacctgtcagcattgaaggaactctcacctccgtgggcctgaaatgcttgggagttgatggaaccaaatagaaaaactccatgttctgcatgtaagaaacacaatgccttgccctactcagacctgataggattgcctgcttagatgataaaatgaggcagaatatgtctgaagaaaaaaattgcaagccacacttctagagattttgttcaagatcatttcaggtgagcagttagagtaggtgaatttgtttcaaattgtactagtgacagtttctcatcatctgtaactgttgagatgtatgtgcatgtgaccacaaatgcttgcttggacttgcccatctagcactttggaaatcagtatttaaatgccaaataatcttccaggtagtgctgcttctgaagttatctcttaatcctcttaagtaatttggtgtctgtccagaaaaagtcgatttatgtgtattaattggccatcatgatgttatcatatcttattcccttttatgctatgatttattctatcttttgtatttcagaagacatataattaaatctatttaataaataaaaatatatagcttttcttagatttgtgatgtttggggctgagaattatcacggctaaaaccaagacacttatgtgtacatcttgttttctttaaactgtcttgtctgggatgattgtacattcagctttactgcacgatacaattttaagttttgcttagtgctgcttgaaatcctagctaccttatctcttttcttcttggtcttctagacttcttatgaatttaaaatgctacctagaacttcaccttctttattaggtgcgtaacactccatcttaattaaatatgatggcagataggttcctgcatccatggcctaacgttggagtggaattttacaaaatgctcactagagatcactgcagtcatttcctaagtgcttcctttgccacagactggcctgggtcctttatttaccttccctcattcactttccctcggccaataccacgttcttgattttctttcttcactggaagaaagcagataaactcctctttggtctgttttcagaggccaggctgattcagatgcctgttgctattgttgctctccattgttgggaggcattccttttcacaagaatgttctgggaaactcttcagaggacgtgaaggaaataccctgaagagtcatgattaactattgactattttctgattcagaattcatgaagatgctgagtatgttaagtgtcactgcaggaacggagctgtggtgatcacgttttgcctgcctgtgcccatgtctcttcccttgagcttattctgttgctgattcatatcttgtgttcaattattttggaagcttttcagtcgacattctgtagagtgtgttctgaggaggaactgtgataagaaagtttattataaatattatgtaaaatatatggctctctctgcaccagttatatcttattggttggtcatatcactggaaactggaacctttgattagcaaaattaatattgaaataagaaatagttcttttatattgtgtcatttggacactttcaagtacaaaatggtaataataacttggattgaggcggaaacacctattttatggctatctatctaaacatcttaaaatggccttctctgtaatacactttcttttaaaagacttcactaaatctatctttaaaaggaaaaacaaaagggagaggttgaaaatgcgcgactgccctgcactgtgtgatgctccctccccgggagacgtggacgggggacgaggcacccgcagacgcccttctgctcactcgctcctctgtgcattcagcgagccacttgccacagatggagcccgtgacggtgtggagggtttcctggaaaggccatcttccaccaggtagaggcgagcgtgcctaggacaggccacagggctccacagaaatacctcaccccagcttcagggttctctctcctgagcctagatttgccagggtcttggtgccacgcaaatggtttcaaactgatctctatggataaatgctgatgttggttaaagaactgaaaaatgtgctcaactgtttcatcttttctattttatttttgtaatttatattgtacacaacccaggaagtaactattttggacatgtatttttataaaccaggtaatttactattatcctggaatttagactaggtttgtttcatttgttgacttagtttccagccaagaaggaaacgactgtctcccccatgtccaggtctcagtttcaagggcagagtccagagagcagacagagttctgtgagagcaggagagcagtctggaaaccctggctgtgcataccgtgtcagccgtgggcctggagatgggagcaggtgagacgcagagccccagtactgagaggaggaagccctcttacagggccccttgcccaccccaagtccgtgtctgaaacacggagcgggtgctgcttcaacccgcatttaatgctgtgtaagtagcgataaccacgtacgagtctgtctggttgatttctaatgtgactcctctggtatttcctcctggtaataaatacaagtgtgacctttcagattgcatatctcaaaagtaacattgctaatgttttataataaaatatattatgtgtgttttggttggtgaaaataatacagactacattttaaaagataaa

SEQ ID NO: 319106 - DNA, 4459 bp, Homo sapiens
caaactacgtgctgtacagctgcatcagctgctcgtagacatgtccagcagctggtcgaggtccacgccgcggtaggtgaagttgcggaaggtccggcgagggatctgaaacttgcccacccttcgggatattgcaggacgctgcatcatgagcgacagtaaatgtgacagtcagttttatagtgtgcaagtggcagactcaaccttcactgtcctaaaacgttaccagcagctgaaaccaattggctctggggcccaagggattgtttgtgctgcatttgatacagttcttgggataaatgttgcagtcaagaaactaagccgtccttttcagaaccaaactcatgcaaagagagcttatcgtgaacttgtcctcttaaaatgtgtcaatcataaaaatataattagtttgttaaatgtgtttacaccacaaaaaactctagaagaatttcaagatgtgtatttggttatggaattaatggatgctaacttatgtcaggttattcacatggagctggatcatgaaagaatgtcctaccttctttaccagatgctttgtggtattaaacatctgcattcagctggtataattcatagagatttgaagcctagcaacattgttgtgaaatcagactgcaccctgaagatccttgactttggcctggcccggacagcgtgcactaacttcatgatgaccccttacgtggtgacacggtactaccgggcgcccgaagtcatcctgggtatgggctacaaagagaacgttgatatctggtcagtgggttgcatcatgggagagctggtgaaaggttgtgtgatattccaaggcactgaccatattgatcagtggaataaagttattgagcagctgggaacaccatcagcagagttcatgaagaaacttcagccaactgtgaggaattatgtcgaaaacagaccaaagtatcctggaatcaaatttgaagaactctttccagattggatattcccatcagaatctgagcgagacaaaataaaaacaagtcaagccagagatctgttatcaaaaatgttagtgattgatcctgacaagcggatctctgtagacgaagctctgcgtcacccatacatcactgtttggtatgaccccgccgaagcagaagccccaccacctcaaatttatgatgcccagttggaagaaagagaacatgcaattgaagaatggaaagagctaatttacaaagaagtcatggattgggaagaaagaagcaagaatggtgttgtaaaagatcagccttcagatgcagcagtaagtagcaacgccactccttctcagtcttcatcgatcaatgacatttcatccatgtccactgagcagacgctggcctcagacacagacagcagtcttgatgcctcgacgggaccccttgaaggctgtcgatgataggttagaaatagcaaacctgtcagcattgaaggaactctcacctccgtgggcctgaaatgcttgggagttgatggaaccaaatagaaaaactccatgttctgcatgtaagaaacacaatgccttgccctactcagacctgataggattgcctgcttagatgataaaatgaggcagaatatgtctgaagaaaaaaattgcaagccacacttctagagattttgttcaagatcatttcaggtgagcagttagagtaggtgaatttgtttcaaattgtactagtgacagtttctcatcatctgtaactgttgagatgtatgtgcatgtgaccacaaatgcttgcttggacttgcccatctagcactttggaaatcagtatttaaatgccaaataatcttccaggtagtgctgcttctgaagttatctcttaatcctcttaagtaatttggtgtctgtccagaaaaagtcgatttatgtgtattaattggccatcatgatgttatcatatcttattcccttttatgctatgatttattctatcttttgtatttcagaagacatataattaaatctatttaataaataaaaatatatagcttttcttagatttgtgatgtttggggctgagaattatcacggctaaaaccaagacacttatgtgtacatcttgttttctttaaactgtcttgtctgggatgattgtacattcagctttactgcacgatacaattttaagttttgcttagtgctgcttgaaatcctagctaccttatctcttttcttcttggtcttctagacttcttatgaatttaaaatgctacctagaacttcaccttctttattaggtgcgtaacactccatcttaattaaatatgatggcagataggttcctgcatccatggcctaacgttggagtggaattttacaaaatgctcactagagatcactgcagtcatttcctaagtgcttcctttgccacagactggcctgggtcctttatttaccttccctcattcactttccctcggccaataccacgttcttgattttctttcttcactggaagaaagcagataaactcctctttggtctgttttcagaggccaggctgattcagatgcctgttgctattgttgctctccattgttgggaggcattccttttcacaagaatgttctgggaaactcttcagaggacgtgaaggaaataccctgaagagtcatgattaactattgactattttctgatttaaaactgctcacctgaaattgatacttttagactttacgatcagtaaattattcagaattcatgaagatgctgagtatgttaagtgtcactgcaggaacggagctgtggtgatcacgttttgcctgcctgtgcccatgtctcttcccttgagcttattctgttgctgattcatatcttgtgttcaattattttggaagcttttcagtcgacattctgtagagtgtgttctgaggaggaactgtgataagaaagtttattataaatattatgtaaaatatatggctctctctgcaccagttatatcttattggttggtcatatcactggaaactggaacctttgattagcaaaattaatattgaaataagaaatagttcttttatattgtgtcatttggacactttcaagtacaaaatggtaataataacttggattgaggcggaaacacctattttatggctatctatctaaacatcttaaaatggccttctctgtaatacactttcttttaaaagacttcactaaatctatctttaaaaggaaaaacaaaagggagaggttgaaaatgcgcgactgccctgcactgtgtgatgctccctccccgggagacgtggacgggggacgaggcacccgcagacgcccttctgctcactcgctcctctgtgcattcagcgagccacttgccacagatggagcccgtgacggtgtggagggtttcctggaaaggccatcttccaccaggtagaggcgagcgtgcctaggacaggccacagggctccacagaaatacctcaccccagcttcagggttctctctcctgagcctagatttgccagggtcttggtgccacgcaaatggtttcaaactgatctctatggataaatgctgatgttggttaaagaactgaaaaatgtgctcaactgtttcatcttttctattttatttttgtaatttatattgtacacaacccaggaagtaactattttggacatgtatttttataaaccaggtaatttactattatcctggaatttagactaggtttgtttcatttgttgacttagtttccagccaagaaggaaacgactgtctcccccatgtccaggtctcagtttcaagggcagagtccagagagcagacagagttctgtgagagcaggagagcagtctggaaaccctggctgtgcataccgtgtcagccgtgggcctggagatgggagcaggtgagacgcagagccccagtactgagaggaggaagccctcttacagggccccttgcccaccccaagtccgtgtctgaaacacggagcgggtgctgcttcaacccgcatttaatgctgtgtaagtagcgataaccacgtacgagtctgtctggttgatttctaatgtgactcctctggtatttcctcctggtaataaatacaagtgtgacctttcagattgcatatctcaaaagtaacattgctaatgttttataataaaatatattatgtgtgttttggttggtgaaaataatacagactacattttaaaagataaaaataaaaaacaaccgaaactaaatcagcggcagacgaaaagaaagacatacgcaaagcaagggcggcggcgccaaaaaaaatcccacgcggggggcgacacagtgacggacgaccacagcgtctgtgggcaacaaggggccgcatatagagaggcagaaaaaaaccggcacgcgcggcggtaaaaagaggggcggaacacggcccgggaccttgggagcaccaatcctggggcgcacaacgggaaac

SEQ ID NO: 319107 - DNA, 4242 bp, Homo sapiens
tcgtcggggatttcctgcttcaacagtgcttggacggaacccggcgctcgttccccaccccggccggccgcccatagccagaccctccgtcacctcttcacctgcacccggcaggcggagccggggccgagggatctgaaacttgcccacccttcgggatattgcaggacgctgcatcatgagcgacagtaaatgtgacagtcagttttatagtgtgcaagtggcagactcaaccttcactgtcctaaaacgttaccagcagctgaaaccaattggctctggggcccaagggattgtttgtgctgcatttgatacagttcttgggataaatgttgcagtcaagaaactaagccgtccttttcagaaccaaactcatgcaaagagagcttatcgtgaacttgtcctcttaaaatgtgtcaatcataaaaatataattagtttgttaaatgtgtttacaccacaaaaaactctagaagaatttcaagatgtgtatttggttatggaattaatggatgctaacttatgtcaggttattcacatggagctggatcatgaaagaatgtcctaccttctttaccagatgctttgtggtattaaacatctgcattcagctggtataattcatagagatttgaagcctagcaacattgttgtgaaatcagactgcaccctgaagatccttgactttggcctggcccggacagcgtgcactaacttcatgatgaccccttacgtggtgacacggtactaccgggcgcccgaagtcatcctgggtatgggctacaaagagaacgttgatatctggtcagtgggttgcatcatgggagagctggtgaaaggttgtgtgatattccaaggcactgaccatattgatcagtggaataaagttattgagcagctgggaacaccatcagcagagttcatgaagaaacttcagccaactgtgaggaattatgtcgaaaacagaccaaagtatcctggaatcaaatttgaagaactctttccagattggatattcccatcagaatctgagcgagacaaaataaaaacaagtcaagccagagatctgttatcaaaaatgttagtgattgatcctgacaagcggatctctgtagacgaagctctgcgtcacccatacatcactgtttggtatgaccccgccgaagcagaagccccaccacctcaaatttatgatgcccagttggaagaaagagaacatgcaattgaagaatggaaagagctaatttacaaagaagtcatggattgggaagaaagaagcaagaatggtgttgtaaaagatcagccttcagatgcagcagtaagtagcaacgccactccttctcagtcttcatcgatcaatgacatttcatccatgtccactgagcagacgctggcctcagacacagacagcagtcttgatgcctcgacgggaccccttgaaggctgtcgatgataggttagaaatagcaaacctgtcagcattgaaggaactctcacctccgtgggcctgaaatgcttgggagttgatggaaccaaatagaaaaactccatgttctgcatgtaagaaacacaatgccttgccctactcagacctgataggattgcctgcttagatgataaaatgaggcagaatatgtctgaagaaaaaaattgcaagccacacttctagagattttgttcaagatcatttcaggtgagcagttagagtaggtgaatttgtttcaaattgtactagtgacagtttctcatcatctgtaactgttgagatgtatgtgcatgtgaccacaaatgcttgcttggacttgcccatctagcactttggaaatcagtatttaaatgccaaataatcttccaggtagtgctgcttctgaagttatctcttaatcctcttaagtaatttggtgtctgtccagaaaaagtcgatttatgtgtattaattggccatcatgatgttatcatatcttattcccttttatgctatgatttattctatcttttgtatttcagaagacatataattaaatctatttaataaataaaaatatatagcttttcttagatttgtgatgtttggggctgagaattatcacggctaaaaccaagacacttatgtgtacatcttgttttctttaaactgtcttgtctgggatgattgtacattcagctttactgcacgatacaattttaagttttgcttagtgctgcttgaaatcctagctaccttatctcttttcttcttggtcttctagacttcttatgaatttaaaatgctacctagaacttcaccttctttattaggtgcgtaacactccatcttaattaaatatgatggcagataggttcctgcatccatggcctaacgttggagtggaattttacaaaatgctcactagagatcactgcagtcatttcctaagtgcttcctttgccacagactggcctgggtcctttatttaccttccctcattcactttccctcggccaataccacgttcttgattttctttcttcactggaagaaagcagataaactcctctttggtctgttttcagaggccaggctgattcagatgcctgttgctattgttgctctccattgttgggaggcattccttttcacaagaatgttctgggaaactcttcagaggacgtgaaggaaataccctgaagagtcatgattaactattgactattttctgatttaaaactgctcacctgaaattgatacttttagactttacgatcagtaaattattcagaattcatgaagatgctgagtatgttaagtgtcactgcaggaacggagctgtggtgatcacgttttgcctgcctgtgcccatgtctcttcccttgagcttattctgttgctgattcatatcttgtgttcaattattttggaagcttttcagtcgacattctgtagagtgtgttctgaggaggaactgtgataagaaagtttattataaatattatgtaaaatatatggctctctctgcaccagttatatcttattggttggtcatatcactggaaactggaacctttgattagcaaaattaatattgaaataagaaatagttcttttatattgtgtcatttggacactttcaagtacaaaatggtaataataacttggattgaggcggaaacacctattttatggctatctatctaaacatcttaaaatggccttctctgtaatacactttcttttaaaagacttcactaaatctatctttaaaaggaaaaacaaaagggagaggttgaaaatgcgcgactgccctgcactgtgtgatgctccctccccgggagacgtggacgggggacgaggcacccgcagacgcccttctgctcactcgctcctctgtgcattcagcgagccacttgccacagatggagcccgtgacggtgtggagggtttcctggaaaggccatcttccaccaggtagaggcgagcgtgcctaggacaggccacagggctccacagaaatacctcaccccagcttcagggttctctctcctgagcctagatttgccagggtcttggtgccacgcaaatggtttcaaactgatctctatggataaatgctgatgttggttaaagaactgaaaaatgtgctcaactgtttcatcttttctattttatttttgtaatttatattgtacacaacccaggaagtaactattttggacatgtatttttataaaccaggtaatttactattatcctggaatttagactaggtttgtttcatttgttgacttagtttccagccaagaaggaaacgactgtctcccccatgtccaggtctcagtttcaagggcagagtccagagagcagacagagttctgtgagagcaggagagcagtctggaaaccctggctgtgcataccgtgtcagccgtgggcctggagatgggagcaggtgagacgcagagccccagtactgagaggaggaagccctcttacagggccccttgcccaccccaagtccgtgtctgaaacacggagcgggtgctgcttcaacccgcatttaatgctgtgtaagtagcgataaccacgtacgagtctgtctggttgatttctaatgtgactcctctggtatttcctcctggtaataaatacaagtgtgacctttcagattgcatatctcaaaagtaacattgctaatgttttataataaaatatattatgtgtgttttggttggtgaaaataatacagactacattttaaaagataaa

SEQ ID NO: 319108 - DNA, 4023 bp, Homo sapiens
caaactacgtgctgtacagctgcatcagctgctcgtagacatgtccagcagctggtcgaggtccacgccgcggtaggtgaagttgcggaaggtccggcgagggatctgaaacttgcccacccttcgggatattgcaggacgctgcatcatgagcgacagtaaatgtgacagtcagttttatagtgtgcaagtggcagactcaaccttcactgtcctaaaacgttaccagcagctgaaaccaattggctctggggcccaagggattgtttgtgctgcatttgatacagttcttgggataaatgttgcagtcaagaaactaagccgtccttttcagaaccaaactcatgcaaagagagcttatcgtgaacttgtcctcttaaaatgtgtcaatcataaaaatataattagtttgttaaatgtgtttacaccacaaaaaactctagaagaatttcaagatgtgtatttggttatggaattaatggatgctaacttatgtcaggttattcacatggagctggatcatgaaagaatgtcctaccttctttaccagatgctttgtggtattaaacatctgcattcagctggtataattcatagagatttgaagcctagcaacattgttgtgaaatcagactgcaccctgaagatccttgactttggcctggcccggacagcgtgcactaacttcatgatgaccccttacgtggtgacacggtactaccgggcgcccgaagtcatcctgggtatgggctacaaagagaacgttgatatctggtcagtgggttgcatcatgggagagctggtgaaaggttgtgtgatattccaaggcactgaccatattgatcagtggaataaagttattgagcagctgggaacaccatcagcagagttcatgaagaaacttcagccaactgtgaggaattatgtcgaaaacagaccaaagtatcctggaatcaaatttgaagaactctttccagattggatattcccatcagaatctgagcgagacaaaataaaaacaagtcaagccagagatctgttatcaaaaatgttagtgattgatcctgacaagcggatctctgtagacgaagctctgcgtcacccatacatcactgtttggtatgaccccgccgaagcagaagccccaccacctcaaatttatgatgcccagttggaagaaagagaacatgcaattgaagaatggaaagagctaatttacaaagaagtcatggattgggaagaaagaagcaagaatggtgttgtaaaagatcagccttcagatgcagcagtaagtagcaacgccactccttctcagtcttcatcgatcaatgacatttcatccatgtccactgagcagacgctggcctcagacacagacagcagtcttgatgcctcgacgggaccccttgaaggctgtcgatgataggttagaaatagcaaacctgtcagcattgaaggaactctcacctccgtgggcctgaaatgcttgggagttgatggaaccaaatagaaaaactccatgttctgcatgtaagaaacacaatgccttgccctactcagacctgataggattgcctgcttagatgataaaatgaggcagaatatgtctgaagaaaaaaattgcaagccacacttctagagattttgttcaagatcatttcaggtgagcagttagagtaggtgaatttgtttcaaattgtactagtgacagtttctcatcatctgtaactgttgagatgtatgtgcatgtgaccacaaatgcttgcttggacttgcccatctagcactttggaaatcagtatttaaatgccaaataatcttccaggtagtgctgcttctgaagttatctcttaatcctcttaagtaatttggtgtctgtccagaaaaagtcgatttatgtgtattaattggccatcatgatgttatcatatcttattcccttttatgctatgatttattctatcttttgtatttcagaagacatataattaaatctatttaataaataaaaatatatagcttttcttagatttgtgatgtttggggctgagaattatcacggctaaaaccaagacacttatgtgtacatcttgttttctttaaactgtcttgtctgggatgattgtacattcagctttactgcacgatacaattttaagttttgcttagtgctgcttgaaatcctagctaccttatctcttttcttcttggtcttctagacttcttatgaatttaaaatgctacctagaacttcaccttctttattaggtgcgtaacactccatcttaattaaatatgatggcagataggttcctgcatccatggcctaacgttggagtggaattttacaaaatgctcactagagatcactgcagtcatttcctaagtgcttcctttgccacagactggcctgggtcctttatttaccttccctcattcactttccctcggccaataccacgttcttgattttctttcttcactggaagaaagcagataaactcctctttggtctgttttcagaggccaggctgattcagatgcctgttgctattgttgctctccattgttgggaggcattccttttcacaagaatgttctgggaaactcttcagaggacgtgaaggaaataccctgaagagtcatgattaactattgactattttctgatttaaaactgctcacctgaaattgatacttttagactttacgatcagtaaattattcagaattcatgaagatgctgagtatgttaagtgtcactgcaggaacggagctgtggtgatcacgttttgcctgcctgtgcccatgtctcttcccttgagcttattctgttgctgattcatatcttgtgttcaattattttggaagcttttcagtcgacattctgtagagtgtgttctgaggaggaactgtgataagaaagtttattataaatattatgtaaaatatatggctctctctgcaccagttatatcttattggttggtcatatcactggaaactggaacctttgattagcaaaattaatattgaaataagaaatagttcttttatattgtgtcatttggacactttcaagtacaaaatggtaataataacttggattgaggcggaaacacctattttatggctatctatctaaacatcttaaaatggccttctctgtaatacactttcttttaaaagacttcactaaatctatctttaaaaggaaaaacaaaagggagaggttgaaaatgcgcgactgccctgcactgtgtgatgctccctccccgggagacgtggacgggggacgaggcacccgcagacgcccttctgctcactcgctcctctgtgcattcagcgagccacttgccacagatggagcccgtgacggtgtggagggtttcctggaaaggccatcttccaccaggtagaggcgagcgtgcctaggacaggccacagggctccacagaaatacctcaccccagcttcagggttctctctcctgagcctagatttgccagggtcttggtgccacgcaaatggtttcaaactgatctctatggataaatgctgatgttggttaaagaactgaaaaatgtgctcaactgtttcatcttttctattttatttttgtaatttatattgtacacaacccaggaagtaactattttggacatgtatttttataaaccaggtaatttactattatcctggaatttagactaggtttgtttcatttgttgacttagtttccagccaagaaggaaacgactgtctcccccattccgtgtctgaaacacggagcgggtgctgcttcaacccgcatttaatgctgtgtaagtagcgataaccacgtacgagtctgtctggttgatttctaatgtgactcctctggtatttcctcctggtaataaatacaagtgtgacctttcagattgcatatctcaaaagtaacattgctaatgttttataataaaatatattatgtgtgttttggttggtgaaaataatacagactacattttaaaagataaa

SEQ ID NO: 319109 - DNA, 2946 bp, Homo sapiens
caaactacgtgctgtacagctgcatcagctgctcgtagacatgtccagcagctggtcgaggtccacgccgcggtaggtgaagttgcggaaggtccggcgagggatctgaaacttgcccacccttcgggatattgcaggacgctgcatcatgagcgacagtaaatgtgacagtcagttttatagtgtgcaagtggcagactcaaccttcactgtcctaaaacgttaccagcagctgaaaccaattggctctggggcccaagggattgtttgtgctgcatttgatacagttcttgggataaatgttgcagtcaagaaactaagccgtccttttcagaaccaaactcatgcaaagagagcttatcgtgaacttgtcctcttaaaatgtgtcaatcataaaaatataattagtttgttaaatgtgtttacaccacaaaaaactctagaagaatttcaagatgtgtatttggttatggaattaatggatgctaacttatgtcaggttattcacatggagctggatcatgaaagaatgtcctaccttctttaccagatgctttgtggtattaaacatctgcattcagctggtataattcatagagatttgaagcctagcaacattgttgtgaaatcagactgcaccctgaagatccttgactttggcctggcccggacagcgtgcactaacttcatgatgaccccttacgtggtgacacggtactaccgggcgcccgaagtcatcctgggtatgggctacaaagagaacgttgatatctggtcagtgggttgcatcatgggagagctggtgaaaggttgtgtgatattccaaggcactgaccatattgatcagtggaataaagttattgagcagctgggaacaccatcagcagagttcatgaagaaacttcagccaactgtgaggaattatgtcgaaaacagaccaaagtatcctggaatcaaatttgaagaactctttccagattggatattcccatcagaatctgagcgagacaaaataaaaacaagtcaagccagagatctgttatcaaaaatgttagtgattgatcctgacaagcggatctctgtagacgaagctctgcgtcacccatacatcactgtttggtatgaccccgccgaagcagaagccccaccacctcaaatttatgatgcccagttggaagaaagagaacatgcaattgaagaatggaaagagctaatttacaaagaagtcatggattgggaagaaagaagcaagaatggtgttgtaaaagatcagccttcagatgcagcagtaagtagcaacgccactccttctcagtcttcatcgatcaatgacatttcatccatgtccactgagcagacgctggcctcagacacagacagcagtcttgatgcctcgacgggaccccttgaaggctgtcgatgataggttagaaatagcaaacctgtcagcattgaaggaactctcacctccgtgggcctgaaatgcttgggagttgatggaaccaaatagaaaaactccatgttctgcatgtaagaaacacaatgccttgccctactcagacctgataggattgcctgcttagatgataaaatgaggcagaatatgtctgaagaaaaaaattgcaagccacacttctagagattttgttcaagatcatttcaggtgagcagttagagtaggtgaatttgtttcaaattgtactagtgacagtttctcatcatctgtaactgttgagatgtatgtgcatgtgaccacaaatgcttgcttggacttgcccatctagcactttggaaatcagtatttaaatgccaaataatcttccaggtagtgctgcttctgaagttatctcttaatcctcttaagtaatttggtgtctgtccagaaaaagtcgatttatgtgtattaattggccatcatgatgttatcatatcttattcccttttatgctatgatttattctatcttttgtatttcagaagacatataattaaatctatttaataaataaaaatatatagcttttcttagatttgtgatgtttggggctgagaattatcacggctaaaaccaagacacttatgtgtacatcttgttttctttaaactgtcttgtctgggatgattgtacattcagctttactgcacgatacaattttaagttttgcttagtgctgcttgaaatcctagctaccttatctcttttcttcttggtcttctagacttcttatgaatttaaaatgctacctagaacttcaccttctttattaggtgcgtaacactccatcttaattaaatatgatggcagataggttcctgcatccatggcctaacgttggagtggaattttacaaaatgctcactagagatcactgcagtcatttcctaagtgcttcctttgccacagactggcctgggtcctttatttaccttccctcattcactttccctcggccaataccacgttcttgattttctttcttcactggaagaaagcagataaactcctctttggtctgttttcagaggccaggctgattcagatgcctgttgctattgttgctctccattgttgggaggcattccttttcacaagaatgttctgggaaactcttcagaggacgtgaaggaaataccctgaagagtcatgattaactattgactattttctgatttaaaactgctcacctgaaattgatacttttagactttacgatcagtaaattattcagaattcatgaagatgctgagtatgttaagtgtcactgcaggaacggagctgtggtgatcacgttttgcctgcctgtgcccatgtctcttcccttgagcttattctgttgctgattcatatcttgtgttcaattattttggaagcttttcagtcgacattctgtagagtgtgttctgaggaggaactgtgataagaaagtttattataaatattatgta

SEQ ID NO: 319110 - DNA, 3636 bp, Homo sapiens
accccagattgctacaaaccgaaggctaaaatagaggtcagcaatcattcatattgtgtaaaatgtcacccttagctagcaatttatttttccatatttgtgtgtttagtgcactgttagaattccttttcctcacttttgttttgttcatggcacttcataattttatcatttcattttattttcagttgatatctggtcagtgggttgcatcatgggagagctggtgaaaggttgtgtgatattccaaggcactgaccatattgatcagtggaataaagttattgagcagctgggaacaccatcagcagagttcatgaagaaacttcagccaactgtgaggaattatgtcgaaaacagaccaaagtatcctggaatcaaatttgaagaactctttccagattggatattcccatcagaatctgagcgagacaaaataaaaacaagtcaagccagagatctgttatcaaaaatgttagtgattgatcctgacaagcggatctctgtagacgaagctctgcgtcacccatacatcactgtttggtatgaccccgccgaagcagaagccccaccacctcaaatttatgatgcccagttggaagaaagagaacatgcaattgaagaatggaaagagctaatttacaaagaagtcatggattgggaagaaagaagcaagaatggtgttgtaaaagatcagccttcagatgcagcagtaagtagcaacgccactccttctcagtcttcatcgatcaatgacatttcatccatgtccactgagcagacgctggcctcagacacagacagcagtcttgatgcctcgacgggaccccttgaaggctgtcgatgataggttagaaatagcaaacctgtcagcattgaaggaactctcacctccgtgggcctgaaatgcttgggagttgatggaaccaaatagaaaaactccatgttctgcatgtaagaaacacaatgccttgccctactcagacctgataggattgcctgcttagatgataaaatgaggcagaatatgtctgaagaaaaaaattgcaagccacacttctagagattttgttcaagatcatttcaggtgagcagttagagtaggtgaatttgtttcaaattgtactagtgacagtttctcatcatctgtaactgttgagatgtatgtgcatgtgaccacaaatgcttgcttggacttgcccatctagcactttggaaatcagtatttaaatgccaaataatcttccaggtagtgctgcttctgaagttatctcttaatcctcttaagtaatttggtgtctgtccagaaaaagtcgatttatgtgtattaattggccatcatgatgttatcatatcttattcccttttatgctatgatttattctatcttttgtatttcagaagacatataattaaatctatttaataaataaaaatatatagcttttcttagatttgtgatgtttggggctgagaattatcacggctaaaaccaagacacttatgtgtacatcttgttttctttaaactgtcttgtctgggatgattgtacattcagctttactgcacgatacaattttaagttttgcttagtgctgcttgaaatcctagctaccttatctcttttcttcttggtcttctagacttcttatgaatttaaaatgctacctagaacttcaccttctttattaggtgcgtaacactccatcttaattaaatatgatggcagataggttcctgcatccatggcctaacgttggagtggaattttacaaaatgctcactagagatcactgcagtcatttcctaagtgcttcctttgccacagactggcctgggtcctttatttaccttccctcattcactttccctcggccaataccacgttcttgattttctttcttcactggaagaaagcagataaactcctctttggtctgttttcagaggccaggctgattcagatgcctgttgctattgttgctctccattgttgggaggcattccttttcacaagaatgttctgggaaactcttcagaggacgtgaaggaaataccctgaagagtcatgattaactattgactattttctgatttaaaactgctcacctgaaattgatacttttagactttacgatcagtaaattattcagaattcatgaagatgctgagtatgttaagtgtcactgcaggaacggagctgtggtgatcacgttttgcctgcctgtgcccatgtctcttcccttgagcttattctgttgctgattcatatcttgtgttcaattattttggaagcttttcagtcgacattctgtagagtgtgttctgaggaggaactgtgataagaaagtttattataaatattatgtaaaatatatggctctctctgcaccagttatatcttattggttggtcatatcactggaaactggaacctttgattagcaaaattaatattgaaataagaaatagttcttttatattgtgtcatttggacactttcaagtacaaaatggtaataataacttggattgaggcggaaacacctattttatggctatctatctaaacatcttaaaatggccttctctgtaatacactttcttttaaaagacttcactaaatctatctttaaaaggaaaaacaaaagggagaggttgaaaatgcgcgactgccctgcactgtgtgatgctccctccccgggagacgtggacgggggacgaggcacccgcagacgcccttctgctcactcgctcctctgtgcattcagcgagccacttgccacagatggagcccgtgacggtgtggagggtttcctggaaaggccatcttccaccaggtagaggcgagcgtgcctaggacaggccacagggctccacagaaatacctcaccccagcttcagggttctctctcctgagcctagatttgccagggtcttggtgccacgcaaatggtttcaaactgatctctatggataaatgctgatgttggttaaagaactgaaaaatgtgctcaactgtttcatcttttctattttatttttgtaatttatattgtacacaacccaggaagtaactattttggacatgtatttttataaaccaggtaatttactattatcctggaatttagactaggtttgtttcatttgttgacttagtttccagccaagaaggaaacgactgtctcccccatgtccaggtctcagtttcaagggcagagtccagagagcagacagagttctgtgagagcaggagagcagtctggaaaccctggctgtgcataccgtgtcagccgtgggcctggagatgggagcaggtgagacgcagagccccagtactgagaggaggaagccctcttacagggccccttgcccaccccaagtccgtgtctgaaacacggagcgggtgctgcttcaacccgcatttaatgctgtgtaagtagcgataaccacgtacgagtctgtctggttgatttctaatgtgactcctctggtatttcctcctggtaataaatacaagtgtgacctttcagattgcatatctcaaaagtaacattgctaatgttttataataaaatatattatgtgtgttttggttggtgaaaataatacagactacattttaaaagataaa

SEQ ID NO: 319111 - DNA, 3827 bp, Homo sapiens
aacctttccttatgagcatgcctgtgttgggttgacactcgtgccgaattcggcacgagagaatttcaagatgtgtatttggttatggaattaatggatgctaacttatgtcaggttattcacatggagctggatcatgaaagaatgtcctaccttctttaccagatgctttgtggtattaaacatctgcattcagctggtataattcatagagatttgaagcctagcaacattgttgtgaaatcagactgcaccctgaagatccttgactttggcctggcccggacagcgtgcactaacttcatgatgaccccttacgtggtgacacggtactaccgggcgcccgaagtcatcctgggtatgggctacaaagagaacgtggacatctggtctgtcgggtgcatcatggcagaaatggtcctccataaagtcctgttcccgggaagagactatattgatcagtggaataaagttattgagcagctgggaacaccatcagcagagttcatgaagaaacttcagccaactgtgaggaattatgtcgaaaacagaccaaagtatcctggaatcaaatttgaagaactctttccagattggatattcccatcagaatctgagcgagacaaaataaaaacaagtcaagccagagatctgttatcaaaaatgttagtgattgatcctgacaagcggatctctgtagacgaagctctgcgtcacccatacatcactgtttggtatgaccccgccgaagcagaagccccaccacctcaaatttatgatgcccagttggaagaaagagaacatgcaattgaagaatggaaagagctaatttacaaagaagtcatggattgggaagaaagaagcaagaatggtgttgtaaaagatcagccttcagatgcagcagtaagtagcaacgccactccttctcagtcttcatcgatcaatgacatttcatccatgtccactgagcagacgctggcctcagacacagacagcagtcttgatgcctcgacgggaccccttgaaggctgtcgatgataggttagaaatagcaaacctgtcagcattgaaggaactctcacctccgtgggcctgaaatgcttgggagttgatggaaccaaatagaaaaactccatgttctgcatgtaagaaacacaatgccttgccctactcagacctgataggattgcctgcttagatgataaaatgaggcagaatatgtctgaagaaaaaaattgcaagccacacttctagagattttgttcaagatcatttcaggtgagcagttagagtaggtgaatttgtttcaaattgtactagtgacagtttctcatcatctgtaactgttgagatgtatgtgcatgtgaccacaaatgcttgcttggacttgcccatctagcactttggaaatcagtatttaaatgccaaataatcttccaggtagtgctgcttctgaagttatctcttaatcctcttaagtaatttggtgtctgtccagaaaaagtcgatttatgtgtattaattggccatcatgatgttatcatatcttattcccttttatgctatgatttattctatcttttgtatttcagaagacatataattaaatctatttaataaataaaaatatatagcttttcttagatttgtgatgtttggggctgagaattatcacggctaaaaccaagacacttatgtgtacatcttgttttctttaaactgtcttgtctgggatgattgtacattcagctttactgcacgatacaattttaagttttgcttagtgctgcttgaaatcctagctaccttatctcttttcttcttggtcttctagacttcttatgaatttaaaatgctacctagaacttcaccttctttattaggtgcgtaacactccatcttaattaaatatgatggcagataggttcctgcatccatggcctaacgttggagtggaattttacaaaatgctcactagagatcactgcagtcatttcctaagtgcttcctttgccacagactggcctgggtcctttatttaccttccctcattcactttccctcggccaataccacgttcttgattttctttcttcactggaagaaagcagataaactcctctttggtctgttttcagaggccaggctgattcagatgcctgttgctattgttgctctccattgttgggaggcattccttttcacaagaatgttctgggaaactcttcagaggacgtgaaggaaataccctgaagagtcatgattaactattgactattttctgatttaaaactgctcacctgaaattgatacttttagactttacgatcagtaaattattcagaattcatgaagatgctgagtatgttaagtgtcactgcaggaacggagctgtggtgatcacgttttgcctgcctgtgcccatgtctcttcccttgagcttattctgttgctgattcatatcttgtgttcaattattttggaagcttttcagtcgacattctgtagagtgtgttctgaggaggaactgtgataagaaagtttattataaatattatgtaaaatatatggctctctctgcaccagttatatcttattggttggtcatatcactggaaactggaacctttgattagcaaaattaatattgaaataagaaatagttcttttatattgtgtcatttggacactttcaagtacaaaatggtaataataacttggattgaggcggaaacacctattttatggctatctatctaaacatcttaaaatggccttctctgtaatacactttcttttaaaagacttcactaaatctatctttaaaaggaaaaacaaaagggagaggttgaaaatgcgcgactgccctgcactgtgtgatgctccctccccgggagacgtggacgggggacgaggcacccgcagacgcccttctgctcactcgctcctctgtgcattcagcgagccacttgccacagatggagcccgtgacggtgtggagggtttcctggaaaggccatcttccaccaggtagaggcgagcgtgcctaggacaggccacagggctccacagaaatacctcaccccagcttcagggttctctctcctgagcctagatttgccagggtcttggtgccacgcaaatggtttcaaactgatctctatggataaatgctgatgttggttaaagaactgaaaaatgtgctcaactgtttcatcttttctattttatttttgtaatttatattgtacacaacccaggaagtaactattttggacatgtatttttataaaccaggtaatttactattatcctggaatttagactaggtttgtttcatttgttgacttagtttccagccaagaaggaaacgactgtctcccccatgtccaggtctcagtttcaagggcagagtccagagagcagacagagttctgtgagagcaggagagcagtctggaaaccctggctgtgcataccgtgtcagccgtgggcctggagatgggagcaggtgagacgcagagccccagtactgagaggaggaagccctcttacagggccccttgcccaccccaagtccgtgtctgaaacacggagcgggtgctgcttcaacccgcatttaatgctgtgtaagtagcgataaccacgtacgagtctgtctggttgatttctaatgtgactcctctggtatttcctcctggtaataaatacaagtgtgacctttcagattgcatatctcaaaagtaacattgctaatgttttataataaaatatattatgtgtgttttggttggtgaaaataatacagactacattttaaaagataaa

SEQ ID NO: 319112 - DNA, 2718 bp, Homo sapiens
gagcctcggttactccttcgactccatgttctgcatgtaagaaacacaatgccttgccctactcagacctgataggattgcctgcttagatgataaaatgaggcagaatatgtctgaagaaaaaaattgcaagccacacttctagagattttgttcaagatcatttcaggtgagcagttagagtaggtgaatttgtttcaaattgtactagtgacagtttctcatcatctgtaactgttgagatgtatgtgcatgtgaccacaaatgcttgcttggacttgcccatctagcactttggaaatcagtatttaaatgccaaataatcttccaggtagtgctgcttctgaagttatctcttaatcctcttaagtaatttggtgtctgtccagaaaaagtcgatttatgtgtattaattggccatcatgatgttatcatatcttattcccttttatgctatgatttattctatcttttgtatttcagaagacatataattaaatctatttaataaataaaaatatatagcttttcttagatttgtgatgtttggggctgagaattatcacggctaaaaccaagacacttatgtgtacatcttgttttctttaaactgtcttgtctgggatgattgtacattcagctttactgcacgatacaattttaagttttgcttagtgctgcttgaaatcctagctaccttatctcttttcttcttggtcttctagacttcttatgaatttaaaatgctacctagaacttcaccttctttattaggtgcgtaacactccatcttaattaaatatgatggcagataggttcctgcatccatggcctaacgttggagtggaattttacaaaatgctcactagagatcactgcagtcatttcctaagtgcttcctttgccacagactggcctgggtcctttatttaccttccctcattcactttccctcggccaataccacgttcttgattttctttcttcactggaagaaagcagataaactcctctttggtctgttttcagaggccaggctgattcagatgcctgttgctattgttgctctccattgttgggaggcattccttttcacaagaatgttctgggaaactcttcagaggacgtgaaggaaataccctgaagagtcatgattaactattgactattttctgatttaaaactgctcacctgaaattgatacttttagactttacgatcagtaaattattcagaattcatgaagatgctgagtatgttaagtgtcactgcaggaacggagctgtggtgatcacgttttgcctgcctgtgcccatgtctcttcccttgagcttattctgttgctgattcatatcttgtgttcaattattttggaagcttttcagtcgacattctgtagagtgtgttctgaggaggaactgtgataagaaagtttattataaatattatgtaaaatatatggctctctctgcaccagttatatcttattggttggtcatatcactggaaactggaacctttgattagcaaaattaatattgaaataagaaatagttcttttatattgtgtcatttggacactttcaagtacaaaatggtaataataacttggattgaggcggaaacacctattttatggctatctatctaaacatcttaaaatggccttctctgtaatacactttcttttaaaagacttcactaaatctatctttaaaaggaaaaacaaaagggagaggttgaaaatgcgcgactgccctgcactgtgtgatgctccctccccgggagacgtggacgggggacgaggcacccgcagacgcccttctgctcactcgctcctctgtgcattcagcgagccacttgccacagatggagcccgtgacggtgtggagggtttcctggaaaggccatcttccaccaggtagaggcgagcgtgcctaggacaggccacagggctccacagaaatacctcaccccagcttcagggttctctctcctgagcctagatttgccagggtcttggtgccacgcaaatggtttcaaactgatctctatggataaatgctgatgttggttaaagaactgaaaaatgtgctcaactgtttcatcttttctattttatttttgtaatttatattgtacacaacccaggaagtaactattttggacatgtatttttataaaccaggtaatttactattatcctggaatttagactaggtttgtttcatttgttgacttagtttccagccaagaaggaaacgactgtctcccccatgtccaggtctcagtttcaagggcagagtccagagagcagacagagttctgtgagagcaggagagcagtctggaaaccctggctgtgcataccgtgtcagccgtgggcctggagatgggagcaggtgagacgcagagccccagtactgagaggaggaagccctcttacagggccccttgcccaccccaagtccgtgtctgaaacacggagcgggtgctgcttcaacccgcatttaatgctgtgtaagtagcgataaccacgtacgagtctgtctggttgatttctaatgtgactcctctggtatttcctcctggtaataaatacaagtgtgacctttcagattgcatatctcaaaagtaacattgctaatgttttataataaaatatattatgtgtgttttggttggtgaaaataatacagactacattttaaaagataaa

SEQ ID NO: 319113 - DNA, 2420 bp, Homo sapiens
gcacgaggagagagagagagagagagagagagagagaacctgcttctgaagttatctcttaatcctcttaagtaatttggtgtctgtccagaaaaagtcgatttatgtgtattaattggccatcatgatgttatcatatcttattcccttttatgctatgatttattctatcttttgtatttcagaagacatataattaaatctatttaataaataaaaatatatagcttttcttagatttgtgatgtttggggctgagaattatcacggctaaaaccaagacacttatgtgtacatcttgttttctttaaactgtcttgtctgggatgattgtacattcagctttactgcacgatacaattttaagttttgcttagtgctgcttgaaatcctagctaccttatctcttttcttcttggtcttctagacttcttatgaatttaaaatgctacctagaacttcaccttctttattaggtgcgtaacactccatcttaattaaatatgatggcagataggttcctgcatccatggcctaacgttggagtggaattttacaaaatgctcactagagatcactgcagtcatttcctaagtgcttcctttgccacagactggcctgggtcctttatttaccttccctcattcactttccctcggccaataccacgttcttgattttctttcttcactggaagaaagcagataaactcctctttggtctgttttcagaggccaggctgattcagatgcctgttgctattgttgctctccattgttgggaggcattccttttcacaagaatgttctgggaaactcttcagaggacgtgaaggaaataccctgaagagtcatgattaactattgactattttctgatttaaaactgctcacctgaaattgatacttttagactttacgatcagtaaattattcagaattcatgaagatgctgagtatgttaagtgtcactgcaggaacggagctgtggtgatcacgttttgcctgcctgtgcccatgtctcttcccttgagcttattctgttgctgattcatatcttgtgttcaattattttggaagcttttcagtcgacattctgtagagtgtgttctgaggaggaactgtgataagaaagtttattataaatattatgtaaaatatatggctctctctgcaccagttatatcttattggttggtcatatcactggaaactggaacctttgattagcaaaattaatattgaaataagaaatagttcttttatattgtgtcatttggacactttcaagtacaaaatggtaataataacttggattgaggcggaaacacctattttatggctatctatctaaacatcttaaaatggccttctctgtaatacactttcttttaaaagacttcactaaatctatctttaaaaggaaaaacaaaagggagaggttgaaaatgcgcgactgccctgcactgtgtgatgctccctccccgggagacgtggacgggggacgaggcacccgcagacgcccttctgctcactcgctcctctgtgcattcagcgagccacttgccacagatggagcccgtgacggtgtggagggtttcctggaaaggccatcttccaccaggtagaggcgagcgtgcctaggacaggccacagggctccacagaaatacctcaccccagcttcagggttctctctcctgagcctagatttgccagggtcttggtgccacgcaaatggtttcaaactgatctctatggataaatgctgatgttggttaaagaactgaaaaatgtgctcaactgtttcatcttttctattttatttttgtaatttatattgtacacaacccaggaagtaactattttggacatgtatttttataaaccaggtaatttactattatcctggaatttagactaggtttgtttcatttgttgacttagtttccagccaagaaggaaacgactgtctcccccatgtccaggtctcagtttcaagggcagagtccagagagcagacagagttctgtgagagcaggagagcagtctggaaaccctggctgtgcataccgtgtcagccgtgggcctggagatgggagcaggtgagacgcagagccccagtactgagaggaggaagccctcttacagggccccttgcccaccccaagtccgtgtctgaaacacggagcgggtgctgcttcaacccgcatttaatgctgtgtaagtagcgataaccacgtacgagtctgtctggttgatttctaatgtgactcctctggtatttcctcctggtaataaatacaagtgtgacctttcagattgcatatctcaaaagtaacattgctaatgttttataataaaatatattatgtgtgttttggttggtgaaaataatacagactacattttaaaagataaa

SEQ ID NO: 319114 - DNA, 2177 bp, Homo sapiens
cgccgcggcggcggcagcggcggagaagggagcgggaccggaagggtcgcagcgccccggcgcccctcacacccactgcggcggcggcggcggcggcggcggcggggcggagcggagcggggcgggccggcggcggagccggggccgcggagccaggagtgactagcacgcagcgccgccagtccgcccgcccgccctctccccgtggcgcggcgggcggggaggcgagggatctgaaacttgcccacccttcgggatattgcaggacgctgcatcatgagcgacagtaaatgtgacagtcagttttatagtgtgcaagtggcagactcaaccttcactgtcctaaaacgttaccagcagctgaaaccaattggctctggggcccaagggattgtttgtgctgcatttgatacagttcttgggataaatgttgcagtcaagaaactaagccgtccttttcagaaccaaactcatgcaaagagagcttatcgtgaacttgtcctcttaaaatgtgtcaatcataaaaatataattagtttgttaaatgtgtttacaccacaaaaaactctagaagaatttcaagatgtgtatttggttatggaattaatggatgctaacttatgtcaggttattcacatggagctggatcatgaaagaatgtcctaccttctttaccagatgctttgtggtattaaacatctgcattcagctggtataattcatagagatttgaagcctagcaacattgttgtgaaatcagactgcaccctgaagatccttgactttggcctggcccggacagcgtgcactaacttcatgatgaccccttacgtggtgacacggtactaccgggcgcccgaagtcatcctgggtatgggctacaaagagaacgttgatatctggtcagtgggttgcatcatgggagagctggtgaaaggttgtgtgatattccaaggcactgaccatattgatcagtggaataaagttattgagcagctgggaacaccatcagcagagttcatgaagaaacttcagccaactgtgaggaattatgtcgaaaacagaccaaagtatcctggaatcaaatttgaagaactctttccagattggatattcccatcagaatctgagcgagacaaaataaaaacaagtcaagccagagatctgttatcaaaaatgttagtgattgatcctgacaagcggatctctgtagacgaagctctgcgtcacccatacatcactgtttggtatgaccccgccgaagcagaagccccaccacctcaaatttatgatgcccagttggaagaaagagaacatgcaattgaagaatggaaagagctaatttacaaagaagtcatggattgggaagaaagaagcaagaatggtgttgtaaaagatcagccttcaggttagtgattgctttaattgattgtatgatatttttctttccctattcaactttttttttttgagacagagtttcgttctgtcgcccaggctggagagcagcggcgcgatctctgctcactgcaacctccacctcctgggttcaagcaattctcctgcctcagcctcccgagtagctgggactacaggcacgcgccaccatgccctgctaatttttgtatttttagtagagacggggtttcaccatattggccaagctggtctcgatctcctgaccttgtgatctgcccgcctcagcctcccaaagtggtgggattacaggcacgcaccaccatgcctggctaatttttgtatttttagtagagacggggtttcagcatattggccaagctggtctcgatctcctgacctcgtgatccacccgcctcagcctcccaaagtggtggggttacaggcgtgagccaccgcacctggcgtctttcccgattcaacttttataaatggcagcaacatgtgaaatgccagcctggctagcatcagatttaaaaaccgctgtatgaatagccagcctttttggcttgtcatagtggtggtggtggtggatgacattttactgatgtgccaggcactgaactttgttataagcatttctctttcatctttgcaataactgctgtcacctccatttacagatgaagaaattgaatttaaagccttttcaatgttgataaccctttgtactggtcccacccaaaatgccaatctaagta

SEQ ID NO: 319115 - DNA, 1726 bp, Homo sapiens
cgccgcggcggcggcagcggcggagaagggagcgggaccggaagggtcgcagcgccccggcgcccctcacacccactgcggcggcggcggcggcggcggcggcggggcggagcggagcggggcgggccggcggcggagccggggccgcggagccaggagtgactagcacgcagcgccgccagtccgcccgcccgccctctccccgtggcgcggcgggcggggaggcgagggatctgaaacttgcccacccttcgggatattgcaggacgctgcatcatgagcgacagtaaatgtgacagtcagttttatagtgtgcaagtggcagactcaaccttcactgtcctaaaacgttaccagcagctgaaaccaattggctctggggcccaagggattgtttgtgctgcatttgatacagttcttgggataaatgttgcagtcaagaaactaagccgtccttttcagaaccaaactcatgcaaagagagcttatcgtgaacttgtcctcttaaaatgtgtcaatcataaaaatataattagtttgttaaatgtgtttacaccacaaaaaactctagaagaatttcaagatgtgtatttggttatggaattaatggatgctaacttatgtcaggttattcacatggagctggatcatgaaagaatgtcctaccttctttaccagatgctttgtggtattaaacatctgcattcagctggtataattcatagagatttgaagcctagcaacattgttgtgaaatcagactgcaccctgaagatccttgactttggcctggcccggacagcgtgcactaacttcatgatgaccccttacgtggtgacacggtactaccgggcgcccgaagtcatcctgggtatgggctacaaagagaacgttgatatctggtcagtgggttgcatcatgggagagctggtgaaaggttgtgtgatattccaaggcactgaccatattgatcagtggaataaagttattgagcagctgggaacaccatcagcagagttcatgaagaaacttcagccaactgtgaggaattatgtcgaaaacagaccaaagtatcctggaatcaaatttgaagaactctttccagattggatattcccatcagaatctgagcgagacaaaataaaaagtaagatatcctttttttcttatacttgtgttttgtaattcaggtggtgctttcactctttcatgtttgtattctaaaaacctgtgttttgggagagaaagtcattttaggcctgaagtctgaggtacgaaggcactgaggagagaaagcttaaaggtctagaagctttatcctctataagacggcttaattgaagcctttggccaaaataaaaataatcaaatcagtctgaaagaatcttatgttacagttacagcaactggaattcaaaaagttttcaggtaagaagaacacttaatgcagattctagagtcagaagcgatgtgacagttgttcgatgaaaaaggtccttcctccccaccttctcctgcaccctttactacagtgtgattgtttaaggaaaaagaaaagatttgattctgtccgcatgaaggtaaactgtgccttaatcagaaaagccccagtctttgcttattcaggttgtgaactttaattgacaaaacctaggtgagccttatatttaactaagttattgaacttgtttttctttttcctaaataccaatctgtagattaaaaa

SEQ ID NO: 319116 - DNA, 563 bp, Homo sapiens
ctttcagattgcatatctcaaaagtaacattgctaatgttttataataaaatatattatgtgtgttttggttggtgaaaataatacagactacattttaaaagataaatgtatagcatgtccaatttttgtgtgtttttacatggcaattagatatttctccatcaccatctctgatgacagatttaacatgaacacagatagatgataaagtgtcatgcttttgatcaatattagcaagaggtttcacactgagaggcagaaacattgctgtttgttctcttattgaaaatattctgcaaattcctaaatctgtgttttcaaaactaatggcagtaagttttgacttcaccaatatgcaggtccaattcagagtattggtgtaattgttttctcatgaggcgtggccaggagaattcaccagtcagccttagtcatgttacttaacgtcattcatggtgcttgtggctttgtgcctgggatgagccaagttcatctgacgtctgtgtttgaagcacttcaggctgtttagtacttaataccacaggagtggaaggacactca

SEQ ID NO: 319117 - DNA, 4212 bp, Homo sapiens
caaactacgtgctgtacagctgcatcagctgctcgtagacatgtccagcagctggtcgaggtccacgccgcggtaggtgaagttgcggaaggtccggcgagggatctgaaacttgcccacccttcgggatattgcaggacgctgcatcatgagcgacagtaaatgtgacagtcagttttatagtgtgcaagtggcagactcaaccttcactgtcctaaaacgttaccagcagctgaaaccaattggctctggggcccaagggattgtttgtgctgcatttgatacagttcttgggataaatgttgcagtcaagaaactaagccgtccttttcagaaccaaactcatgcaaagagagcttatcgtgaacttgtcctcttaaaatgtgtcaatcataaaaatataattagtttgttaaatgtgtttacaccacaaaaaactctagaagaatttcaagatgtgtatttggttatggaattaatggatgctaacttatgtcaggttattcacatggagctggatcatgaaagaatgtcctaccttctttaccagatgctttgtggtattaaacatctgcattcagctggtataattcatagagatttgaagcctagcaacattgttgtgaaatcagactgcaccctgaagatccttgactttggcctggcccggacagcgtgcactaacttcatgatgaccccttacgtggtgacacggtactaccgggcgcccgaagtcatcctgggtatgggctacaaagagaacgttgatatctggtcagtgggttgcatcatgggagagctggtgaaaggttgtgtgatattccaaggcactgaccatattgatcagtggaataaagttattgagcagctgggaacaccatcagcagagttcatgaagaaacttcagccaactgtgaggaattatgtcgaaaacagaccaaagtatcctggaatcaaatttgaagaactctttccagattggatattcccatcagaatctgagcgagacaaaataaaaacaagtcaagccagagatctgttatcaaaaatgttagtgattgatcctgacaagcggatctctgtagacgaagctctgcgtcacccatacatcactgtttggtatgaccccgccgaagcagaagccccaccacctcaaatttatgatgcccagttggaagaaagagaacatgcaattgaagaatggaaagagctaatttacaaagaagtcatggattgggaagaaagaagcaagaatggtgttgtaaaagatcagccttcagatgcagcagtaagtagcaacgccactccttctcagtcttcatcgatcaatgacatttcatccatgtccactgagcagacgctggcctcagacacagacagcagtcttgatgcctcgacgggaccccttgaaggctgtcgatgataggttagaaatagcaaacctgtcagcattgaaggaactctcacctccgtgggcctgaaatgcttgggagttgatggaaccaaatagaaaaactccatgttctgcatgtaagaaacacaatgccttgccctactcagacctgataggattgcctgcttagatgataaaatgaggcagaatatgtctgaagaaaaaaattgcaagccacacttctagagattttgttcaagatcatttcaggtgagcagttagagtaggtgaatttgtttcaaattgtactagtgacagtttctcatcatctgtaactgttgagatgtatgtgcatgtgaccacaaatgcttgcttggacttgcccatctagcactttggaaatcagtatttaaatgccaaataatcttccaggtagtgctgcttctgaagttatctcttaatcctcttaagtaatttggtgtctgtccagaaaaagtcgatttatgtgtattaattggccatcatgatgttatcatatcttattcccttttatgctatgatttattctatcttttgtatttcagaagacatataattaaatctatttaataaataaaaatatatagcttttcttagatttgtgatgtttggggctgagaattatcacggctaaaaccaagacacttatgtgtacatcttgttttctttaaactgtcttgtctgggatgattgtacattcagctttactgcacgatacaattttaagttttgcttagtgctgcttgaaatcctagctaccttatctcttttcttcttggtcttctagacttcttatgaatttaaaatgctacctagaacttcaccttctttattaggtgcgtaacactccatcttaattaaatatgatggcagataggttcctgcatccatggcctaacgttggagtggaattttacaaaatgctcactagagatcactgcagtcatttcctaagtgcttcctttgccacagactggcctgggtcctttatttaccttccctcattcactttccctcggccaataccacgttcttgattttctttcttcactggaagaaagcagataaactcctctttggtctgttttcagaggccaggctgattcagatgcctgttgctattgttgctctccattgttgggaggcattccttttcacaagaatgttctgggaaactcttcagaggacgtgaaggaaataccctgaagagtcatgattaactattgactattttctgatttaaaactgctcacctgaaattgatacttttagactttacgatcagtaaattattcagaattcatgaagatgctgagtatgttaagtgtcactgcaggaacggagctgtggtgatcacgttttgcctgcctgtgcccatgtctcttcccttgagcttattctgttgctgattcatatcttgtgttcaattattttggaagcttttcagtcgacattctgtagagtgtgttctgaggaggaactgtgataagaaagtttattataaatattatgtaaaatatatggctctctctgcaccagttatatcttattggttggtcatatcactggaaactggaacctttgattagcaaaattaatattgaaataagaaatagttcttttatattgtgtcatttggacactttcaagtacaaaatggtaataataacttggattgaggcggaaacacctattttatggctatctatctaaacatcttaaaatggccttctctgtaatacactttcttttaaaagacttcactaaatctatctttaaaaggaaaaacaaaagggagaggttgaaaatgcgcgactgccctgcactgtgtgatgctccctccccgggagacgtggacgggggacgaggcacccgcagacgcccttctgctcactcgctcctctgtgcattcagcgagccacttgccacagatggagcccgtgacggtgtggagggtttcctggaaaggccatcttccaccaggtagaggcgagcgtgcctaggacaggccacagggctccacagaaatacctcaccccagcttcagggttctctctcctgagcctagatttgccagggtcttggtgccacgcaaatggtttcaaactgatctctatggataaatgctgatgttggttaaagaactgaaaaatgtgctcaactgtttcatcttttctattttatttttgtaatttatattgtacacaacccaggaagtaactattttggacatgtatttttataaaccaggtaatttactattatcctggaatttagactaggtttgtttcatttgttgacttagtttccagccaagaaggaaacgactgtctcccccatgtccaggtctcagtttcaagggcagagtccagagagcagacagagttctgtgagagcaggagagcagtctggaaaccctggctgtgcataccgtgtcagccgtgggcctggagatgggagcaggtgagacgcagagccccagtactgagaggaggaagccctcttacagggccccttgcccaccccaagtccgtgtctgaaacacggagcgggtgctgcttcaacccgcatttaatgctgtgtaagtagcgataaccacgtacgagtctgtctggttgatttctaatgtgactcctctggtatttcctcctggtaataaatacaagtgtgacctttcagattgcatatctcaaaagtaacattgctaatgttttataataaaatatattatgtgtgttttggttggtgaaaataatacagactacattttaaaagataaa

SEQ ID NO: 319118 - DNA, 4340 bp, Homo sapiens
cgccgcggcggcggcagcggcggagaagggagcgggaccggaagggtcgcagcgccccggcgcccctcacacccactgcggcggcggcggcggcggcggcggcggggcggagcggagcggggcgggccggcggcggagccggggccgcggagccaggagtgactagcacgcagcgccgccagtccgcccgcccgccctctccccgtggcgcggcgggcggggaggcgagggatctgaaacttgcccacccttcgggatattgcaggacgctgcatcatgagcgacagtaaatgtgacagtcagttttatagtgtgcaagtggcagactcaaccttcactgtcctaaaacgttaccagcagctgaaaccaattggctctggggcccaagggattgtttgtgctgcatttgatacagttcttgggataaatgttgcagtcaagaaactaagccgtccttttcagaaccaaactcatgcaaagagagcttatcgtgaacttgtcctcttaaaatgtgtcaatcataaaaatataattagtttgttaaatgtgtttacaccacaaaaaactctagaagaatttcaagatgtgtatttggttatggaattaatggatgctaacttatgtcaggttattcacatggagctggatcatgaaagaatgtcctaccttctttaccagatgctttgtggtattaaacatctgcattcagctggtataattcatagagatttgaagcctagcaacattgttgtgaaatcagactgcaccctgaagatccttgactttggcctggcccggacagcgtgcactaacttcatgatgaccccttacgtggtgacacggtactaccgggcgcccgaagtcatcctgggtatgggctacaaagagaacgttgatatctggtcagtgggttgcatcatgggagagctggtgaaaggttgtgtgatattccaaggcactgaccatattgatcagtggaataaagttattgagcagctgggaacaccatcagcagagttcatgaagaaacttcagccaactgtgaggaattatgtcgaaaacagaccaaagtatcctggaatcaaatttgaagaactctttccagattggatattcccatcagaatctgagcgagacaaaataaaaacaagtcaagccagagatctgttatcaaaaatgttagtgattgatcctgacaagcggatctctgtagacgaagctctgcgtcacccatacatcactgtttggtatgaccccgccgaagcagaagccccaccacctcaaatttatgatgcccagttggaagaaagagaacatgcaattgaagaatggaaagagctaatttacaaagaagtcatggattgggaagaaagaagcaagaatggtgttgtaaaagatcagccttcagatgcagcagtaagtagcaacgccactccttctcagtcttcatcgatcaatgacatttcatccatgtccactgagcagacgctggcctcagacacagacagcagtcttgatgcctcgacgggaccccttgaaggctgtcgatgataggttagaaatagcaaacctgtcagcattgaaggaactctcacctccgtgggcctgaaatgcttgggagttgatggaaccaaatagaaaaactccatgttctgcatgtaagaaacacaatgccttgccctactcagacctgataggattgcctgcttagatgataaaatgaggcagaatatgtctgaagaaaaaaattgcaagccacacttctagagattttgttcaagatcatttcaggtgagcagttagagtaggtgaatttgtttcaaattgtactagtgacagtttctcatcatctgtaactgttgagatgtatgtgcatgtgaccacaaatgcttgcttggacttgcccatctagcactttggaaatcagtatttaaatgccaaataatcttccaggtagtgctgcttctgaagttatctcttaatcctcttaagtaatttggtgtctgtccagaaaaagtcgatttatgtgtattaattggccatcatgatgttatcatatcttattcccttttatgctatgatttattctatcttttgtatttcagaagacatataattaaatctatttaataaataaaaatatatagcttttcttagatttgtgatgtttggggctgagaattatcacggctaaaaccaagacacttatgtgtacatcttgttttctttaaactgtcttgtctgggatgattgtacattcagctttactgcacgatacaattttaagttttgcttagtgctgcttgaaatcctagctaccttatctcttttcttcttggtcttctagacttcttatgaatttaaaatgctacctagaacttcaccttctttattaggtgcgtaacactccatcttaattaaatatgatggcagataggttcctgcatccatggcctaacgttggagtggaattttacaaaatgctcactagagatcactgcagtcatttcctaagtgcttcctttgccacagactggcctgggtcctttatttaccttccctcattcactttccctcggccaataccacgttcttgattttctttcttcactggaagaaagcagataaactcctctttggtctgttttcagaggccaggctgattcagatgcctgttgctattgttgctctccattgttgggaggcattccttttcacaagaatgttctgggaaactcttcagaggacgtgaaggaaataccctgaagagtcatgattaactattgactattttctgatttaaaactgctcacctgaaattgatacttttagactttacgatcagtaaattattcagaattcatgaagatgctgagtatgttaagtgtcactgcaggaacggagctgtggtgatcacgttttgcctgcctgtgcccatgtctcttcccttgagcttattctgttgctgattcatatcttgtgttcaattattttggaagcttttcagtcgacattctgtagagtgtgttctgaggaggaactgtgataagaaagtttattataaatattatgtaaaatatatggctctctctgcaccagttatatcttattggttggtcatatcactggaaactggaacctttgattagcaaaattaatattgaaataagaaatagttcttttatattgtgtcatttggacactttcaagtacaaaatggtaataataacttggattgaggcggaaacacctattttatggctatctatctaaacatcttaaaatggccttctctgtaatacactttcttttaaaagacttcactaaatctatctttaaaaggaaaaacaaaagggagaggttgaaaatgcgcgactgccctgcactgtgtgatgctccctccccgggagacgtggacgggggacgaggcacccgcagacgcccttctgctcactcgctcctctgtgcattcagcgagccacttgccacagatggagcccgtgacggtgtggagggtttcctggaaaggccatcttccaccaggtagaggcgagcgtgcctaggacaggccacagggctccacagaaatacctcaccccagcttcagggttctctctcctgagcctagatttgccagggtcttggtgccacgcaaatggtttcaaactgatctctatggataaatgctgatgttggttaaagaactgaaaaatgtgctcaactgtttcatcttttctattttatttttgtaatttatattgtacacaacccaggaagtaactattttggacatgtatttttataaaccaggtaatttactattatcctggaatttagactaggtttgtttcatttgttgacttagtttccagccaagaaggaaacgactgtctcccccatgtccaggtctcagtttcaagggcagagtccagagagcagacagagttctgtgagagcaggagagcagtctggaaaccctggctgtgcataccgtgtcagccgtgggcctggagatgggagcaggtgagacgcagagccccagtactgagaggaggaagccctcttacagggccccttgcccaccccaagtccgtgtctgaaacacggagcgggtgctgcttcaacccgcatttaatgctgtgtaagtagcgataaccacgtacgagtctgtctggttgatttctaatgtgactcctctggtatttcctcctggtaataaatacaagtgtgacctttcagattgcatatctcaaaagtaacattgctaatgttttataataaaatatattatgtgtgttttggttggtgaaaataatacagactacattttaaaagataaa

SEQ ID NO: 319119 - DNA, 4248 bp, Homo sapiens
caaactacgtgctgtacagctgcatcagctgctcgtagacatgtccagcagctggtcgaggtccacgccgcggtaggtgaagttgcggaaggtccggcgagggatctgaaacttgcccacccttcgggatattgcaggacgctgcatcatgagcgacagtaaatgtgacagtcagttttatagtgtgcaagtggcagactcaaccttcactgtcctaaaacgttaccagcagctgaaaccaattggctctggggcccaagggattgtttgtgctgcatttgatacagttcttgggataaatgttgcagtcaagaaactaagccgtccttttcagaaccaaactcatgcaaagagagcttatcgtgaacttgtcctcttaaaatgtgtcaatcataaaaatataattagtttgttaaatgtgtttacaccacaaaaaactctagaagaatttcaagatgtgtatttggttatggaattaatggatgctaacttatgtcaggttattcacatggagctggatcatgaaagaatgtcctaccttctttaccagatgctttgtggtattaaacatctgcattcagctggtataattcatagagatttgaagcctagcaacattgttgtgaaatcagactgcaccctgaagatccttgactttggcctggcccggacagcgtgcactaacttcatgatgaccccttacgtggtgacacggtactaccgggcgcccgaagtcatcctgggtatgggctacaaagagaacgttgatatctggtcagtgggttgcatcatgggagagctggtgaaaggttgtgtgatattccaaggcactgaccatattgatcagtggaataaagttattgagcagctgggaacaccatcagcagagttcatgaagaaacttcagccaactgtgaggaattatgtcgaaaacagaccaaagtatcctggaatcaaatttgaagaactctttccagattggatattcccatcagaatctgagcgagacaaaataaaaacaagtcaagccagagatctgttatcaaaaatgttagtgattgatcctgacaagcggatctctgtagacgaagctctgcgtcacccatacatcactgtttggtatgaccccgccgaagcagaagccccaccacctcaaatttatgatgcccagttggaagaaagagaacatgcaattgaagaatggaaagagctaatttacaaagaagtcatggattgggaagaaagaagcaagaatggtgttgtaaaagatcagccttcagatgcagcagtaagtagcaacgccactccttctcagtcttcatcgatcaatgacatttcatccatgtccactgagcagacgctggcctcagacacagacagcagtcttgatgcctcgacgggaccccttgaaggctgtcgatgataggttagaaatagcaaacctgtcagcattgaaggaactctcacctccgtgggcctgaaatgcttgggagttgatggaaccaaatagaaaaactccatgttctgcatgtaagaaacacaatgccttgccctactcagacctgataggattgcctgcttagatgataaaatgaggcagaatatgtctgaagaaaaaaattgcaagccacacttctagagattttgttcaagatcatttcaggtgagcagttagagtaggtgaatttgtttcaaattgtactagtgacagtttctcatcatctgtaactgttgagatgtatgtgcatgtgaccacaaatgcttgcttggacttgcccatctagcactttggaaatcagtatttaaatgccaaataatcttccaggtagtgctgcttctgaagttatctcttaatcctcttaagtaatttggtgtctgtccagaaaaagtcgatttatgtgtattaattggccatcatgatgttatcatatcttattcccttttatgctatgatttattctatcttttgtatttcagaagacatataattaaatctatttaataaataaaaatatatagcttttcttagatttgtgatgtttggggctgagaattatcacggctaaaaccaagacacttatgtgtacatcttgttttctttaaactgtcttgtctgggatgattgtacattcagctttactgcacgatacaattttaagttttgcttagtgctgcttgaaatcctagctaccttatctcttttcttcttggtcttctagacttcttatgaatttaaaatgctacctagaacttcaccttctttattaggtgcgtaacactccatcttaattaaatatgatggcagataggttcctgcatccatggcctaacgttggagtggaattttacaaaatgctcactagagatcactgcagtcatttcctaagtgcttcctttgccacagactggcctgggtcctttatttaccttccctcattcactttccctcggccaataccacgttcttgattttctttcttcactggaagaaagcagataaactcctctttggtctgttttcagaggccaggctgattcagatgcctgttgctattgttgctctccattgttgggaggcattccttttcacaagaatgttctgggaaactcttcagaggacgtgaaggaaataccctgaagagtcatgattaactattgactattttctgatttaaaactgctcacctgaaattgatacttttagactttacgatcagtaaattattcagaattcatgaagatgctgagtatgttaagtgtcactgcaggaacggagctgtggtgatcacgttttgcctgcctgtgcccatgtctcttcccttgagcttattctgttgctgattcatatcttgtgttcaattattttggaagcttttcagtcgacattctgtagagtgtgttctgaggaggaactgtgataagaaagtttattataaatattatgtaaaatatatggctctctctgcaccagttatatcttattggttggtcatatcactggaaactggaacctttgattagcaaaattaatattgaaataagaaatagttcttttatattgtgtcatttggacactttcaagtacaaaatggtaataataacttggattgaggcggaaacacctattttatggctatctatctaaacatcttaaaatggccttctctgtaatacactttcttttaaaagacttcactaaatctatctttaaaaggaaaaacaaaagggagaggttgaaaatgcgcgactgccctgcactgtgtgatgctccctccccgggagacgtggacgggggacgaggcacccgcagacgcccttctgctcactcgctcctctgtgcattcagcgagccacttgccacagatggagcccgtgacggtgtggagggtttcctggaaaggccatcttccaccaggtagaggcgagcgtgcctaggacaggccacagggctccacagaaatacctcaccccagcttcagggttctctctcctgagcctagatttgccagggtcttggtgccacgcaaatggtttcaaactgatctctatggataaatgctgatgttggttaaagaactgaaaaatgtgctcaactgtttcatcttttctattttatttttgtaatttatattgtacacaacccaggaagtaactattttggacatgtatttttataaaccaggtaatttactattatcctggaatttagactaggtttgtttcatttgttgacttagtttccagccaagaaggaaacgactgtctcccccatgtccaggtctcagtttcaagggcagagtccagagagcagacagagttctgtgagagcaggagagcagtctggaaaccctggctgtgcataccgtgtcagccgtgggcctggagatgggagcaggtgagacgcagagccccagtactgagaggaggaagccctcttacagggccccttgcccaccccaagtccgtgtctgaaacacggagcgggtgctgcttcaacccgcatttaatgctgtgtaagtagcgataaccacgtacgagtctgtctggttgatttctaatgtgactcctctggtatttcctcctggtaataaatacaagtgtgacctttcagattgcatatctcaaaagtaacattgctaatgttttataataaaatatattatgtgtgttttggttggtggaagggagctcccttccaccagcatatcggcgccggctccatgacctcgggctttcgccagaccttca

SEQ ID NO: 319120 - DNA, 2025 bp, Homo sapiens
caaactacgtgctgtacagctgcatcagctgctcgtagacatgtccagcagctggtcgaggtccacgccgcggtaggtgaagttgcggaaggtccggcgagggatctgaaacttgcccacccttcgggatattgcaggacgctgcatcatgagcgacagtaaatgtgacagtcagttttatagtgtgcaagtggcagactcaaccttcactgtcctaaaacgttaccagcagctgaaaccaattggctctggggcccaagggattgtttgtgctgcatttgatacagttcttgggataaatgttgcagtcaagaaactaagccgtccttttcagaaccaaactcatgcaaagagagcttatcgtgaacttgtcctcttaaaatgtgtcaatcataaaaatataattagtttgttaaatgtgtttacaccacaaaaaactctagaagaatttcaagatgtgtatttggttatggaattaatggatgctaacttatgtcaggttattcacatggagctggatcatgaaagaatgtcctaccttctttaccagatgctttgtggtattaaacatctgcattcagctggtataattcatagagatttgaagcctagcaacattgttgtgaaatcagactgcaccctgaagatccttgactttggcctggcccggacagcgtgcactaacttcatgatgaccccttacgtggtgacacggtactaccgggcgcccgaagtcatcctgggtatgggctacaaagagaacgttgatatctggtcagtgggttgcatcatgggagagctggtgaaaggttgtgtgatattccaaggcactgaccatattgatcagtggaataaagttattgagcagctgggaacaccatcagcagagttcatgaagaaacttcagccaactgtgaggaattatgtcgaaaacagaccaaagtatcctggaatcaaatttgaagaactctttccagattggatattcccatcagaatctgagcgagacaaaataaaaacaagtcaagccagagatctgttatcaaaaatgttagtgattgatcctgacaagcggatctctgtagacgaagctctgcgtcacccatacatcactgtttggtatgaccccgccgaagcagaagccccaccacctcaaatttatgatgcccagttggaagaaagagaacatgcaattgaagaatggaaagagctaatttacaaagaagtcatggattgggaagaaagaagcaagaatggtgttgtaaaagatcagccttcagatgcagcagtaagtagcaacgccactccttctcagtcttcatcgatcaatgacatttcatccatgtccactgagcagacgctggcctcagacacagacagcagtcttgatgcctcgacgggaccccttgaaggctgtcgatgataggttagaaatagcaaacctgtcagcattgaaggaactctcacctccgtgggcctgaaatgcttgggagttgatggaaccaaatagaaaaactccatgttctgcatgtaagaaacacaatgccttgccctactcagacctgataggattgcctgcttagatgataaaatgaggcagaatatgtctgaagaaaaaaattgcaagccacacttctagagattttgttcaagatcatttcaggtgagcagttagagtaggtgaatttgtttcaaattgtactagtgacagtttctcatcatctgtaactgttgagatgtatgtgcatgtgaccacaaatgcttgcttggacttgcccatctagcactttggaaatcagtatttaaatgccaaataatcttccaggtagtgctgcttctgaagttatctcttaatcctcttaagtaatttggtgtctgtccagaaaaagtcgatttatgtgtattaattggccatcatgatgttatcatatcttattcccttttatgctatgatttattctatcttttgtatttcagaagacatataattaaatctatttaataaataaaaatatatagcttttc

SEQ ID NO: 319121 - DNA, 4581 bp, Homo sapiens
cgccgcggcggcggcagcggcggagaagggagcgggaccggaagggtcgcagcgccccggcgcccctcacacccactgcggcggcggcggcggcggcggcggcggggcggagcggagcggggcgggccggcggcggagccggggccgcggagccaggagtgactagcacgcagcgccgccagtccgcccgcccgccctctccccgtggcgcggcgggcggggaggcgagggatctgaaacttgcccacccttcgggatattgcaggacgctgcatcatgagcgacagtaaatgtgacagtcagttttatagtgtgcaagtggcagactcaaccttcactgtcctaaaacgttaccagcagctgaaaccaattggctctggggcccaagggattgtttggcgccatcattgcagtgccttgccattcattggcaggatgaggccagtcagtgtcattgtcactccatggattaaccaggaagggatgctgtgtgaggggttgggctggccatctcttccttggtgtctcacttcaactgtgtgtccagcccagaacgtcagaatcgttagtctgaccctgaacgttagtctcttgcatggtaagacggtcagccgccgcagcatcacgggccagctcaagtgctgcatttgatacagttcttgggataaatgttgcagtcaagaaactaagccgtccttttcagaaccaaactcatgcaaagagagcttatcgtgaacttgtcctcttaaaatgtgtcaatcataaaaatataattagtttgttaaatgtgtttacaccacaaaaaactctagaagaatttcaagatgtgtatttggttatggaattaatggatgctaacttatgtcaggttattcacatggagctggatcatgaaagaatgtcctaccttctttaccagatgctttgtggtattaaacatctgcattcagctggtataattcatagagatttgaagcctagcaacattgttgtgaaatcagactgcaccctgaagatccttgactttggcctggcccggacagcgtgcactaacttcatgatgaccccttacgtggtgacacggtactaccgggcgcccgaagtcatcctgggtatgggctacaaagagaacgttgatatctggtcagtgggttgcatcatgggagagctggtgaaaggttgtgtgatattccaaggcactgaccatattgatcagtggaataaagttattgagcagctgggaacaccatcagcagagttcatgaagaaacttcagccaactgtgaggaattatgtcgaaaacagaccaaagtatcctggaatcaaatttgaagaactctttccagattggatattcccatcagaatctgagcgagacaaaataaaaacaagtcaagccagagatctgttatcaaaaatgttagtgattgatcctgacaagcggatctctgtagacgaagctctgcgtcacccatacatcactgtttggtatgaccccgccgaagcagaagccccaccacctcaaatttatgatgcccagttggaagaaagagaacatgcaattgaagaatggaaagagctaatttacaaagaagtcatggattgggaagaaagaagcaagaatggtgttgtaaaagatcagccttcagatgcagcagtaagtagcaacgccactccttctcagtcttcatcgatcaatgacatttcatccatgtccactgagcagacgctggcctcagacacagacagcagtcttgatgcctcgacgggaccccttgaaggctgtcgatgataggttagaaatagcaaacctgtcagcattgaaggaactctcacctccgtgggcctgaaatgcttgggagttgatggaaccaaatagaaaaactccatgttctgcatgtaagaaacacaatgccttgccctactcagacctgataggattgcctgcttagatgataaaatgaggcagaatatgtctgaagaaaaaaattgcaagccacacttctagagattttgttcaagatcatttcaggtgagcagttagagtaggtgaatttgtttcaaattgtactagtgacagtttctcatcatctgtaactgttgagatgtatgtgcatgtgaccacaaatgcttgcttggacttgcccatctagcactttggaaatcagtatttaaatgccaaataatcttccaggtagtgctgcttctgaagttatctcttaatcctcttaagtaatttggtgtctgtccagaaaaagtcgatttatgtgtattaattggccatcatgatgttatcatatcttattcccttttatgctatgatttattctatcttttgtatttcagaagacatataattaaatctatttaataaataaaaatatatagcttttcttagatttgtgatgtttggggctgagaattatcacggctaaaaccaagacacttatgtgtacatcttgttttctttaaactgtcttgtctgggatgattgtacattcagctttactgcacgatacaattttaagttttgcttagtgctgcttgaaatcctagctaccttatctcttttcttcttggtcttctagacttcttatgaatttaaaatgctacctagaacttcaccttctttattaggtgcgtaacactccatcttaattaaatatgatggcagataggttcctgcatccatggcctaacgttggagtggaattttacaaaatgctcactagagatcactgcagtcatttcctaagtgcttcctttgccacagactggcctgggtcctttatttaccttccctcattcactttccctcggccaataccacgttcttgattttctttcttcactggaagaaagcagataaactcctctttggtctgttttcagaggccaggctgattcagatgcctgttgctattgttgctctccattgttgggaggcattccttttcacaagaatgttctgggaaactcttcagaggacgtgaaggaaataccctgaagagtcatgattaactattgactattttctgatttaaaactgctcacctgaaattgatacttttagactttacgatcagtaaattattcagaattcatgaagatgctgagtatgttaagtgtcactgcaggaacggagctgtggtgatcacgttttgcctgcctgtgcccatgtctcttcccttgagcttattctgttgctgattcatatcttgtgttcaattattttggaagcttttcagtcgacattctgtagagtgtgttctgaggaggaactgtgataagaaagtttattataaatattatgtaaaatatatggctctctctgcaccagttatatcttattggttggtcatatcactggaaactggaacctttgattagcaaaattaatattgaaataagaaatagttcttttatattgtgtcatttggacactttcaagtacaaaatggtaataataacttggattgaggcggaaacacctattttatggctatctatctaaacatcttaaaatggccttctctgtaatacactttcttttaaaagacttcactaaatctatctttaaaaggaaaaacaaaagggagaggttgaaaatgcgcgactgccctgcactgtgtgatgctccctccccgggagacgtggacgggggacgaggcacccgcagacgcccttctgctcactcgctcctctgtgcattcagcgagccacttgccacagatggagcccgtgacggtgtggagggtttcctggaaaggccatcttccaccaggtagaggcgagcgtgcctaggacaggccacagggctccacagaaatacctcaccccagcttcagggttctctctcctgagcctagatttgccagggtcttggtgccacgcaaatggtttcaaactgatctctatggataaatgctgatgttggttaaagaactgaaaaatgtgctcaactgtttcatcttttctattttatttttgtaatttatattgtacacaacccaggaagtaactattttggacatgtatttttataaaccaggtaatttactattatcctggaatttagactaggtttgtttcatttgttgacttagtttccagccaagaaggaaacgactgtctcccccatgtccaggtctcagtttcaagggcagagtccagagagcagacagagttctgtgagagcaggagagcagtctggaaaccctggctgtgcataccgtgtcagccgtgggcctggagatgggagcaggtgagacgcagagccccagtactgagaggaggaagccctcttacagggccccttgcccaccccaagtccgtgtctgaaacacggagcgggtgctgcttcaacccgcatttaatgctgtgtaagtagcgataaccacgtacgagtctgtctggttgatttctaatgtgactcctctggtatttcctcctggtaataaatacaagtgtgacctttcagattgcatatctcaaaagtaacattgctaatgttttataataaaatatattatgtgtgttttggttggtgaaaataatacagactacattttaaaagataaa

SEQ ID NO: 319122 - DNA, 3370 bp, Homo sapiens
actccgtctccgaaaaaaaaaaaaaaaattttgggttatattcatcttgaacctatcaaacatttctcaaaattaatatatctttgttctatctgtgttgtcatatttagttctttattgtatgattctgtttgtttcatattaacagcattaatttaatatttgttgtcaccctagcaagtcaagccagagatctgttatcaaaaatgttagtgattgatcctgacaagcggatctctgtagacgaagctctgcgtcacccatacatcactgtttggtatgaccccgccgaagcagaagccccaccacctcaaatttatgatgcccagttggaagaaagagaacatgcaattgaagaatggaaagagctaatttacaaagaagtcatggattgggaagaaagaagcaagaatggtgttgtaaaagatcagccttcagatgcagcagtaagtagcaacgccactccttctcagtcttcatcgatcaatgacatttcatccatgtccactgagcagacgctggcctcagacacagacagcagtcttgatgcctcgacgggaccccttgaaggctgtcgatgataggttagaaatagcaaacctgtcagcattgaaggaactctcacctccgtgggcctgaaatgcttgggagttgatggaaccaaatagaaaaactccatgttctgcatgtaagaaacacaatgccttgccctactcagacctgataggattgcctgcttagatgataaaatgaggcagaatatgtctgaagaaaaaaattgcaagccacacttctagagattttgttcaagatcatttcaggtgagcagttagagtaggtgaatttgtttcaaattgtactagtgacagtttctcatcatctgtaactgttgagatgtatgtgcatgtgaccacaaatgcttgcttggacttgcccatctagcactttggaaatcagtatttaaatgccaaataatcttccaggtagtgctgcttctgaagttatctcttaatcctcttaagtaatttggtgtctgtccagaaaaagtcgatttatgtgtattaattggccatcatgatgttatcatatcttattcccttttatgctatgatttattctatcttttgtatttcagaagacatataattaaatctatttaataaataaaaatatatagcttttcttagatttgtgatgtttggggctgagaattatcacggctaaaaccaagacacttatgtgtacatcttgttttctttaaactgtcttgtctgggatgattgtacattcagctttactgcacgatacaattttaagttttgcttagtgctgcttgaaatcctagctaccttatctcttttcttcttggtcttctagacttcttatgaatttaaaatgctacctagaacttcaccttctttattaggtgcgtaacactccatcttaattaaatatgatggcagataggttcctgcatccatggcctaacgttggagtggaattttacaaaatgctcactagagatcactgcagtcatttcctaagtgcttcctttgccacagactggcctgggtcctttatttaccttccctcattcactttccctcggccaataccacgttcttgattttctttcttcactggaagaaagcagataaactcctctttggtctgttttcagaggccaggctgattcagatgcctgttgctattgttgctctccattgttgggaggcattccttttcacaagaatgttctgggaaactcttcagaggacgtgaaggaaataccctgaagagtcatgattaactattgactattttctgatttaaaactgctcacctgaaattgatacttttagactttacgatcagtaaattattcagaattcatgaagatgctgagtatgttaagtgtcactgcaggaacggagctgtggtgatcacgttttgcctgcctgtgcccatgtctcttcccttgagcttattctgttgctgattcatatcttgtgttcaattattttggaagcttttcagtcgacattctgtagagtgtgttctgaggaggaactgtgataagaaagtttattataaatattatgtaaaatatatggctctctctgcaccagttatatcttattggttggtcatatcactggaaactggaacctttgattagcaaaattaatattgaaataagaaatagttcttttatattgtgtcatttggacactttcaagtacaaaatggtaataataacttggattgaggcggaaacacctattttatggctatctatctaaacatcttaaaatggccttctctgtaatacactttcttttaaaagacttcactaaatctatctttaaaaggaaaaacaaaagggagaggttgaaaatgcgcgactgccctgcactgtgtgatgctccctccccgggagacgtggacgggggacgaggcacccgcagacgcccttctgctcactcgctcctctgtgcattcagcgagccacttgccacagatggagcccgtgacggtgtggagggtttcctggaaaggccatcttccaccaggtagaggcgagcgtgcctaggacaggccacagggctccacagaaatacctcaccccagcttcagggttctctctcctgagcctagatttgccagggtcttggtgccacgcaaatggtttcaaactgatctctatggataaatgctgatgttggttaaagaactgaaaaatgtgctcaactgtttcatcttttctattttatttttgtaatttatattgtacacaacccaggaagtaactattttggacatgtatttttataaaccaggtaatttactattatcctggaatttagactaggtttgtttcatttgttgacttagtttccagccaagaaggaaacgactgtctcccccatgtccaggtctcagtttcaagggcagagtccagagagcagacagagttctgtgagagcaggagagcagtctggaaaccctggctgtgcataccgtgtcagccgtgggcctggagatgggagcaggtgagacgcagagccccagtactgagaggaggaagccctcttacagggccccttgcccaccccaagtccgtgtctgaaacacggagcgggtgctgcttcaacccgcatttaatgctgtgtaagtagcgataaccacgtacgagtctgtctggttgatttctaatgtgactcctctggtatttcctcctggtaataaatacaagtgtgacctttcagattgcatatctcaaaagtaacattgctaatgttttataataaaatatattatgtgtgttttggttggtgaaaataatacagactacattttaaaagataaa

SEQ ID NO: 319123 - DNA, 2237 bp, Homo sapiens
cgccgcggcggcggcagcggcggagaagggagcgggaccggaagggtcgcagcgccccggcgcccctcacacccactgcggcggcggcggcggcggcggcggcggggcggagcggagcggggcgggccggcggcggagccggggccgcggagccaggagtgactagcacgcagcgccgccagtccgcccgcccgccctctccccgtggcgcggcgggcggggaggcgagggatctgaaacttgcccacccttcgggatattgcaggacgctgcatcatgagcgacagtaaatgtgacagtcagttttatagtgtgcaagtggcagactcaaccttcactgtcctaaaacgttaccagcagctgaaaccaattggctctggggcccaagggattgtttgtgctgcatttgatacagttcttgggataaatgttgcagtcaagaaactaagccgtccttttcagaaccaaactcatgcaaagagagcttatcgtgaacttgtcctcttaaaatgtgtcaatcataaaaatataattagtttgttaaatgtgtttacaccacaaaaaactctagaagaatttcaagatgtgtatttggttatggaattaatggatgctaacttatgtcaggttattcacatggagctggatcatgaaagaatgtcctaccttctttaccagatgctttgtggtattaaacatctgcattcagctggtataattcatagagatttgaagcctagcaacattgttgtgaaatcagactgcaccctgaagatccttgactttggcctggcccggacagcgtgcactaacttcatgatgaccccttacgtggtgacacggtactaccgggcgcccgaagtcatcctgggtatgggctacaaagagaacgttgatatctggtcagtgggttgcatcatgggagagctggtgaaaggttgtgtgatattccaaggcactgaccgtatccttccccgcgaccttggccccgccatgctttcttaatgcctcaggcagcatgaccacctgcttacacgagcgctcacgaggacaaagtcgtaaaatccactccagactgtgttctaaggggggctttactgtatttgttaattagtgtcacaagccaagtggttcaatttcattctttatttttaacttgactacctgtgatgactttgagacttagagttcagttaaaccgattatattagctcttaattttgccaaaaatagctggacacatagaagaaattatttactctttgataagtatattctgatatttaaatgaaaatactgtattatttagtttattccgttaatttaactaggaaagatgctatctaaatttaataggctagtgtgcttgtgtgctttaattaagtactattttgttagttactggtatgcattgaaatattttcccccaaagtaagaactgaagcacattacaaaggacctaagtgaaagagattaaaatgaaaattttgtgaggaacaatatgttaaactttcttgtttgttactgtgctgacattttgtagaattttttttaaaaatctgtctagtgggttattttgtgacacactggggaagtcaaaataaatgtaaaatgaaagagataaactcatactgtagtcagcaagtcatgttagagatacagcagaaaggagaataactactctaattgttacaatagccttctttcctcatttgccattcttccatcctcagtattttttaccctaacatggttcttcacatcttccctttttcatttgtgttttaaccacttagtttttcattagtctttgactttgttttcgttatgaaagtttaaattggtctccatccttgggcagattgatggttgcttttaaggaaatcaagctccatagtcagtgttttgtatgtatcttaggaaaataatttcagattttaataattttatcaaagtggtctccttataaattcttcacagtgcaaacttaaagtgaaaatatttttatttctctcattttatttacctttctttacattttctatatcatagattatataatatgtcaagttattttatttgttctactaaattttctagcagtttccatagcctcatctcagattcacttgttgcaacctataaataaggacgtctttattttgcaagtaaacttaattaaaaagggaaaagttgaaaaattaaaagactaataatttagaaatatctacttaatg

SEQ ID NO: 319124 - DNA, 801 bp, Homo sapiens
tcgtcggggatttcctgcttcaacagtgcttggacggaacccggcgctcgttccccaccccggccggccgcccatagccagaccctccgtcacctcttcacctgcacccggcaggcggagccggggccgagggatctgaaacttgcccacccttcgggatattgcaggacgctgcatcatgagcgacagtaaatgtgacagtcagttttatagtgtgcaagtggcagactcaaccttcactgtcctaaaacgttaccagcagctgaaaccaattggctctggggcccaagggattgtttgtgctgcatttgatacagttcttgggataaatgttgcagtcaagaaactaagccgtccttttcagaaccaaactcatgcaaagagagcttatcgtgaacttgtcctcttaaaatgtgtcaatcataaaaatataattagtttgttaaatgtgtttacaccacaaaaaactctagaagaatttcaagatgtgtatttggttatggaattaatggatgctaacttatgtcaggttattcacatggagctggatcatgaaagaatgtcctaccttctttaccagatgctttgtggtattaaacatctgcattcagctggtataattcatagagactgtacatgcggcgcctgtggccctgcacctggaagctgggcatcagtttctctgcgtgaagggccagcaggagtgaggaaggagtggagcctcacttctgggatggagatggggatctgggacatctactacgtacttggactttcaataaaatgaaaacttctccaaaa

SEQ ID NO: 319125 - DNA, 1865 bp, Homo sapiens
ctgacactgaacgccgcttgtcccctccggcttgccgtcctcgcagccatggcggccgccgcgctcccagcatggctgtctctgcagtcgagggcaaggactctgcgtgcattctccactgccgtctactcggccactccggtcccgacacctagcctgccggaaagaacacccggaaatgaaaggccaccaagaagaaaggcactacctcctaggacagagaaaatggctgttgaccaggactggcctagtgtttacccagttgcagcaccatttaaaccctctgcagtacctcttcctgttcgaatgggttatccagtaaaaaagggcgtgcccatggcaaaggagggaaatctagaacttttaaagattcccaattttctgcatttgactcctgtagcaattaaaaagcactgtgaagcccttaaagatttttgcactgagtggccagccgcactggacagtgacgagaaatgtgagaagcattttccaattgaaattgacagcactgattatgtttcatcaggaccatctgttcggaaccccagagcacgagtagtagtcttaagagtaaagctttccagtttgaatttagatgatcacgcaaagaagaaattaattaaacttgtaggagagcgatactgcaagaccacagatgtgcttaccatcaaaacagataggtgccctttaaggaggcagaattacgattatgcagtgtatctactaacagtgttataccatgagtcttggaatactgaagaatgggaaaaaagtaagactgaagcagacatggaagagtatatatgggaaaatagctcatcagaaagaaatatcctggaaacgcttctccagatgaaagctgctgagaaaaatatggaaataaataaagaagagctccttggtactaaagaaattgaagagtacaaaaagtctgttgttagtcttaaaaatgaggaggaaaatgaaaattccatttctcagtacaaagaatccgtgaagagactattaaatgtgacatgaattatggagtagaaaaatctgcttgatttattaattttatgatatatgtgatcagtatctaatttgatataaaattgaaaatgttaaaaaatcattttttttcctcagagttaaaattatttccctcatactaatgcttaatggcaatgattactccagagttttttaatttttacactggggcaatagactaggaggtctctgatttcttcttggtctaaagtgttttgattttatttctacataatagctttggtattcatgtatatacatgcatttaattgtgattttatcacctttcccatttctttccccacaagctggcatttcagtagttgcttttgaataatggttttggttacctgggaaggcaggcccagaacccatttccttgacttgcagttccgggctgtgttcacatgactgctgtctagctgatgcatttttcacatttgtcaactctggttagaaacaggtcctcaggagtattctctaacctgatattttctaaaaagatatgttgattcaactttgtttagcatcctactttctagattgtggggctcattttgccagggccaagctaccagaaaagtagaagtggagattacctggtatgtatctctctgggtgccccagttagagctgccacagctcaggaaaaagatgaggcataacgaccttgaatgtaattggagtaagtgacaaaataagaactaccctgggaaaccctgcattcaatgtagctgtcaattcagtatttttaagtacacctgtcagctgtttcttaccacttcgatggttgtgattaatttaaaatcaaaataaaggaattactgagttta

SEQ ID NO: 319126 - DNA, 1956 bp, Homo sapiens
ctgacactgaacgccgcttgtcccctccggcttgccgtcctcgcagccatggcggccgccgcgctcccagcatggctgtctctgcagtcgagggcaaggactctgcgtgcattctccactgccgtctactcggccactccggtcccgacacctagcctgccggaaagaacacccggaaatgaaaggccaccaagaagaaaggcactacctcctaggacagagaaaatggctgttgaccaggactggcctagtgtttacccagttgcagcaccatttaaaccctctgcagtacctcttcctgttcgaatgggttatccagtaaaaaagggcgtgcccatggcaaaggagggaaatctagaacttttaaagattcccaattttctgcatttgactcctgtagcaattaaaaagcactgtgaagcccttaaagatttttgcactgagtggccagccgcactggacagtgacgagaaatgtgagaagcattttccaattgaaattgacagcactgattatgtttcatcaggaccatctgttcggaaccccagagcacgagtagtagtcttaagagaaatgtaaaaaaatataatcccagcagaatgtgagaaggcctgctttcctgtgctctcaccaacctacatattacctgtcaacttgataggtaaagctttccagtttgaatttagatgatcacgcaaagaagaaattaattaaacttgtaggagagcgatactgcaagaccacagatgtgcttaccatcaaaacagataggtgccctttaaggaggcagaattacgattatgcagtgtatctactaacagtgttataccatgagtcttggaatactgaagaatgggaaaaaagtaagactgaagcagacatggaagagtatatatgggaaaatagctcatcagaaagaaatatcctggaaacgcttctccagatgaaagctgctgagaaaaatatggaaataaataaagaagagctccttggtactaaagaaattgaagagtacaaaaagtctgttgttagtcttaaaaatgaggaggaaaatgaaaattccatttctcagtacaaagaatccgtgaagagactattaaatgtgacatgaattatggagtagaaaaatctgcttgatttattaattttatgatatatgtgatcagtatctaatttgatataaaattgaaaatgttaaaaaatcattttttttcctcagagttaaaattatttccctcatactaatgcttaatggcaatgattactccagagttttttaatttttacactggggcaatagactaggaggtctctgatttcttcttggtctaaagtgttttgattttatttctacataatagctttggtattcatgtatatacatgcatttaattgtgattttatcacctttcccatttctttccccacaagctggcatttcagtagttgcttttgaataatggttttggttacctgggaaggcaggcccagaacccatttccttgacttgcagttccgggctgtgttcacatgactgctgtctagctgatgcatttttcacatttgtcaactctggttagaaacaggtcctcaggagtattctctaacctgatattttctaaaaagatatgttgattcaactttgtttagcatcctactttctagattgtggggctcattttgccagggccaagctaccagaaaagtagaagtggagattacctggtatgtatctctctgggtgccccagttagagctgccacagctcaggaaaaagatgaggcataacgaccttgaatgtaattggagtaagtgacaaaataagaactaccctgggaaaccctgcattcaatgtagctgtcaattcagtatttttaagtacacctgtcagctgtttcttaccacttcgatggttgtgattaatttaaaatcaaaataaaggaattactgagttta

SEQ ID NO: 319127 - DNA, 2232 bp, Homo sapiens
ctgacactgaacgccgcttgtcccctccggcttgccgtcctcgcagccatggcggccgccgcgctcccagcatggctgtctctgcagtcgagggcaaggactctgcgtgcattctccactgccgtctactcggccactccggtcccgacacctagcctgccggaaagaacacccggaaatgaaaggccaccaagaagaaaggcactacctcctaggacagagaaaatggctgttgaccaggactggcctagtgtttacccagttgcagcaccatttaaaccctctgcagtacctcttcctgttcgaatgggttatccagtaaaaaagggcgtgcccatggcaaaggagggaaatctagaacttttaaagattcccaattttctgcatttgactcctgtagcaattaaaaagcactgtgaagcccttaaagatttttgcactgagtggccagccgcactggacagtgacgagaaatgtgagaagcattttccaattgaaattgacagcactgattatgtttcatcaggaccatctgttcggaaccccagagcacgagtagtagtcttaagagtaaagctttccagtttgaatttagatgatcacgcaaagaagaaattaattaaacttgtaggagagcgatactgcaagaccacagatgtgcttaccatcaaaacagataggtgccctttaaggaggcagaattacgattatgcagtgtatctactaacagtgttataccatgagtcttggaatactgaagaatgggaaaaaagtaagactgaagcagacatggaagagtatatatgggaaaatagctcatcagaaagaaatatcctggaaacgcttctccagatgaaagctgctgagaaaaatatggaaataaataaagaagagctccttggtactaaagaaattgaagagtacaaaaagtctgttgttagtcttaaaaatgaggaggaaaatgaaaattccatttctcagtacaaagaatccgtgaagagactattaaatgtgacatgaattatggagtagaaaaatctgcttgatttattaattttatgatatatgtgatcagtatctaatttgatataaaattgaaaatgttaaaaaatcattttttttcctcagagttaaaattatttccctcatactaatgcttaatggcaatgattactccagagttttttaatttttacactggggcaatagactaggaggtctctgatttcttcttggtctaaagtgttttgattttatttctacataatagctttggtattcatgtatatacatgcatttaattgtgattttatcacctttcccatttctttccccacaagctggcatttcagtagttgcttttgaataatggttttggttacctgggaaggcaggcccagaacccatttccttgacttgcagttccgggctgtgttcacatgactgctgtctagctgatgcatttttcacatttgtcaactctggttagaaacaggtcctcaggagtattctctaacctgatattttctaaaaagatatgttgattcaactttgtttagcatcctactttctagattgtggggctcattttgccagggccaagctaccagaaaagtagaagtggagattacctggtatgtatctctctgggtgccccagttagagctgccacagctcaggaaaaagatgaggcataacgaccttgaatgtaattggagtaagtgacaaaataagaactaccctgggaaaccctgcattcaatgtagctgtcaattcagtatttttaagtacacctgtcagctgtttcttaccacttcgatggttgtgattaatttaaaatcaaaataaaggaattactgagtttaaaaaaaaaaaaaaaaaaaaaaaaaaaaaaaaaaaaaaaaaaaaaaaaaaaagggggggaaaagaaaaagaaaaaaaaaaaaaaaagttgggccgcggcgacgcgcaccccgcacaacaaaaaggtttttccgaaaccaccacctgggggggcgggcccggcccccccatcgtgagatgcagcagccatcgagacaacagctaggtctccaacgagagaatcgcgccgggtcacaaccacaagcgggcggaggtccccccccccaaaaaaaaaggcccccgcggaaaacaacgagttggcagcaccacccccgcggcgccagaccaattaggtgtcaccacagaggcccgcacgcggcggtgtaaaac

SEQ ID NO: 319128 - DNA, 1755 bp, Homo sapiens
ctgacactgaacgccgcttgtcccctccggcttgccgtcctcgcagccatggcggccgccgcgctcccagcatggctgtctctgcagtcgagggcaaggactctgcgtgcattctccactgccgtctactcggccactccggtcccgacacctagcctgccggaaagaacacccggaaatgaaaggccaccaagaagaaaggcactacctcctaggacagagaaaatggctgttgaccaggactggcctagtgtttacccagttgcagcaccatttaaaccctctgcagtacctcttcctgttcgaatgggttatccagtaaaaaagggcgtgcccatggcaaaggagggaaatctagaacttttaaagattcccaattttctgcatttgactcctgtagcaattaaaaagcactgtgaagcccttaaagatttttgcactgagtggccagccgcactggacagtgacgagaaatgtgagaagcattttccaattgaaattgacagcactgattatgtttcatcaggaccatctgttcggaaccccagagcacgagtagtagtcttaagagtgccctttaaggaggcagaattacgattatgcagtgtatctactaacagtgttataccatgagtcttggaatactgaagaatgggaaaaaagtaagactgaagcagacatggaagagtatatatgggaaaatagctcatcagaaagaaatatcctggaaacgcttctccagatgaaagctgctgagaaaaatatggaaataaataaagaagagctccttggtactaaagaaattgaagagtacaaaaagtctgttgttagtcttaaaaatgaggaggaaaatgaaaattccatttctcagtacaaagaatccgtgaagagactattaaatgtgacatgaattatggagtagaaaaatctgcttgatttattaattttatgatatatgtgatcagtatctaatttgatataaaattgaaaatgttaaaaaatcattttttttcctcagagttaaaattatttccctcatactaatgcttaatggcaatgattactccagagttttttaatttttacactggggcaatagactaggaggtctctgatttcttcttggtctaaagtgttttgattttatttctacataatagctttggtattcatgtatatacatgcatttaattgtgattttatcacctttcccatttctttccccacaagctggcatttcagtagttgcttttgaataatggttttggttacctgggaaggcaggcccagaacccatttccttgacttgcagttccgggctgtgttcacatgactgctgtctagctgatgcatttttcacatttgtcaactctggttagaaacaggtcctcaggagtattctctaacctgatattttctaaaaagatatgttgattcaactttgtttagcatcctactttctagattgtggggctcattttgccagggccaagctaccagaaaagtagaagtggagattacctggtatgtatctctctgggtgccccagttagagctgccacagctcaggaaaaagatgaggcataacgaccttgaatgtaattggagtaagtgacaaaataagaactaccctgggaaaccctgcattcaatgtagctgtcaattcagtatttttaagtacacctgtcagctgtttcttaccacttcgatggttgtgattaatttaaaatcaaaataaaggaattactgagttta

SEQ ID NO: 319129 - DNA, 1106 bp, Homo sapiens
ctgacactgaacgccgcttgtcccctccggcttgccgtcctcgcagccatggcggccgccgcgctcccagcatggctgtctctgcagtcgagggcaaggactctgcgtgcattctccactgccgtctactcggccactccggtcccgacacctagcctgccggaaagaacacccggaaatgaaaggccaccaagaagaaaggcactacctcctaggacagagaaaatggctgttgaccaggactggcctagtgtttacccagttgcagcaccatttaaaccctctgcagtacctcttcctgttcgaatgggttatccagtaaaaaagggcgtgcccatggcaaaggagggaaatctagaacttttaaagattcccaattttctgcatttgactcctgtagcaattaaaaagcactgtgaagcccttaaagatttttgcactgagtggccagccgcactggacagtgacgagaaatgtgagaagcattttccaattgaaattgacagcactgattatgtttcatcaggaccatctgttcggaaccccagagcacgagtagtagtcttaagagtaaagctttccagtttgaatttagatgatcacgcaaagaagaaattaattaaacttgtaggagagcgatactgcaagaccacagatgtgcttaccatcaaaacagataggtgccctttaaggaggcagaattacgattatgcagtgtatctactaacagtgttataccatgagtcttggaatactgaagaatgggaaaaaagtaagactgaagcagacatggaagagtatatatgggaaaatagctcatcagaaagaaatatcctggaaacgcttctccagatgaaagctgctgagaaaaatatggaaataaataaagaagagctccttggtactaaagaaattgaagagtacaaaaagtctgttgttagtcttaaaaatgaggaggaaaatgaaaattccatttctcagtacaaagaatccgtgaagagactattaaatgtgacatgaattatggagtagaaaaatctgcttgatttattaattttatgatatatgtgatcagtatctaatttgatataaaattgaaaatgtta

SEQ ID NO: 319130 - DNA, 1923 bp, Homo sapiens
ctcaagggagccatcctcaccaccatgctggcattgaactttttcagacactccacagtctcctgtctgtgcatcatggatgctaccgtggagcgttggcagacccatggcggccgccgcgctcccagcatggctgtctctgcagtcgagggcaaggactctgcgtgcattctccactgccgtctactcggccactccggtcccgacacctagcctgccggaaagaacacccggaaatgaaaggccaccaagaagaaaggcactacctcctaggacagagaaaatggctgttgaccaggactggcctagtgtttacccagttgcagcaccatttaaaccctctgcagtacctcttcctgttcgaatgggttatccagtaaaaaagggcgtgcccatggcaaaggagggaaatctagaacttttaaagattcccaattttctgcatttgactcctgtagcaattaaaaagcactgtgaagcccttaaagatttttgcactgagtggccagccgcactggacagtgacgagaaatgtgagaagcattttccaattgaaattgacagcactgattatgtttcatcaggaccatctgttcggaaccccagagcacgagtagtagtcttaagagtaaagctttccagtttgaatttagatgatcacgcaaagaagaaattaattaaacttgtaggagagcgatactgcaagaccacagatgtgcttaccatcaaaacagataggtgccctttaaggaggcagaattacgattatgcagtgtatctactaacagtgttataccatgagtcttggaatactgaagaatgggaaaaaagtaagactgaagcagacatggaagagtatatatgggaaaatagctcatcagaaagaaatatcctggaaacgcttctccagatgaaagctgctgagaaaaatatggaaataaataaagaagagctccttggtactaaagaaattgaagagtacaaaaagtctgttgttagtcttaaaaatgaggaggaaaatgaaaattccatttctcagtacaaagaatccgtgaagagactattaaatgtgacatgaattatggagtagaaaaatctgcttgatttattaattttatgatatatgtgatcagtatctaatttgatataaaattgaaaatgttaaaaaatcattttttttcctcagagttaaaattatttccctcatactaatgcttaatggcaatgattactccagagttttttaatttttacactggggcaatagactaggaggtctctgatttcttcttggtctaaagtgttttgattttatttctacataatagctttggtattcatgtatatacatgcatttaattgtgattttatcacctttcccatttctttccccacaagctggcatttcagtagttgcttttgaataatggttttggttacctgggaaggcaggcccagaacccatttccttgacttgcagttccgggctgtgttcacatgactgctgtctagctgatgcatttttcacatttgtcaactctggttagaaacaggtcctcaggagtattctctaacctgatattttctaaaaagatatgttgattcaactttgtttagcatcctactttctagattgtggggctcattttgccagggccaagctaccagaaaagtagaagtggagattacctggtatgtatctctctgggtgccccagttagagctgccacagctcaggaaaaagatgaggcataacgaccttgaatgtaattggagtaagtgacaaaataagaactaccctgggaaaccctgcattcaatgtagctgtcaattcagtatttttaagtacacctgtcagctgtttcttaccacttcgatggttgtgattaatttaaaatcaaaataaaggaattactgagttta

SEQ ID NO: 319131 - DNA, 1789 bp, Homo sapiens
cggcaagcgatatctgcgtgatgctccacctggtcgtctacggtctgacagtaccggacccgaaatctattgcgtgcgggaaagaacacccggaaatgaaagggccaccatacgaaagagaggaggcactacctcctaggacagagaaaatggctgttgaccaggactggcctagtgtttacccagttgcagcaccatttaaaccctctgcagtacctcttcctgttcgaatgggttatccagtaaaaaagggcgtgcccatggcaaaggagggaaatctagaacttttaaagattcccaattttctgcatttgactcctgtagcaattaaaaagcactgtgaagcccttaaagatttttgcactgagtggccagccgcactggacagtgacgagaaatgtgagaagcattttccaattgaaattgacagcactgattatgtttcatcaggaccatctgttcggaaccccagagcacgagtagtagtcttaagagtaaagctttccagtttgaatttagatgatcacgcaaagaagaaattaattaaacttgtaggagagcgatactgcaagaccacagatgtgcttaccatcaaaacagataggtgccctttaaggaggcagaattacgattatgcagtgtatctactaacagtgttataccatgagtcttggaatactgaagaatgggaaaaaagtaagactgaagcagacatggaagagtatatatgggaaaatagctcatcagaaagaaatatcctggaaacgcttctccagatgaaagctgctgagaaaaatatggaaataaataaagaagagctccttggtactaaagaaattgaagagtacaaaaagtctgttgttagtcttaaaaatgaggaggaaaatgaaaattccatttctcagtacaaagaatccgtgaagagactattaaatgtgacatgaattatggagtagaaaaatctgcttgatttattaattttatgatatatgtgatcagtatctaatttgatataaaattgaaaatgttaaaaaatcattttttttcctcagagttaaaattatttccctcatactaatgcttaatggcaatgattactccagagttttttaatttttacactggggcaatagactaggaggtctctgatttcttcttggtctaaagtgttttgattttatttctacataatagctttggtattcatgtatatacatgcatttaattgtgattttatcacctttcccatttctttccccacaagctggcatttcagtagttgcttttgaataatggttttggttacctgggaaggcaggcccagaacccatttccttgacttgcagttccgggctgtgttcacatgactgctgtctagctgatgcatttttcacatttgtcaactctggttagaaacaggtcctcaggagtattctctaacctgatattttctaaaaagatatgttgattcaactttgtttagcatcctactttctagattgtggggctcattttgccagggccaagctaccagaaaagtagaagtggagattacctggtatgtatctctctgggtgccccagttagagctgccacagctcaggaaaaagatgaggcataacgaccttgaatgtaattggagtaagtgacaaaataagaactaccctgggaaaccctgcattcaatgtagctgtcaattcagtatttttaagtacacctgtcagctgtttcttaccacttcgatggttgtgattaatttaaaatcaaaataaaggaattactgagttta

SEQ ID NO: 319132 - DNA, 2433 bp, Homo sapiens
ctgacactgaacgccgcttgtcccctccggcttgccgtcctcgcagccatggcggccgccgcgctcccagcatggctgtctctgcagtcgagggcaaggactctgcgtgcattctccactgccgtctactcggccactccggtcccgacacctagcctgccggaaagaacacccggaaatgaaaggccaccaagaagaaaggcactacctcctaggacagagaaaatggctgttgaccaggactggcctagtgtttacccagttgcagcaccatttaaaccctctgcagtacctcttcctgttcgaatgggttatccagtaaaaaagggcgtgcccatggcaaaggagggaaatctagaacttttaaagattcccaattttctgcatttgactcctgtagcaattaaaaagcactgtgaagcccttaaagatttttgcactgagtggccagccgcactggacagtgacgagaaatgtgagaagcattttccaattgaaattgacagcactgattatgtttcatcaggaccatctgttcggaaccccagagcacgagtagtagtcttaagagtaaagctttccagtttgaatttagatgatcacgcaaagaagaaattaattaaacttgtaggagagcgatactgcaagaccacagatgtgcttaccatcaaaacagataggtgccctttaaggaggcagaattacgattatgcagtgtatctactaacagtgttataccatgagtcttggaatactgaagaatgggaaaaaagtaagactgaagcagacatggaagagtatatatgggaaaatagctcatcagaaagaaatatcctggaaacgcttctccagatgaaagctgctgagaaaaatatggaaataaataaagaagagctccttggtactaaagaaattgaagagtacaaaaagtctgttgttagtcttaaaaatgaggaggaaaatgaaaattccatttctcagtacaaagaatccgtgaagagactattaaatgtgacatgaattatggagtagaaaaatctgcttgatttattaattttatgatatatgtgatcagtatctaatttgatataaaattgaaaatgttaaaaaatcattttttttcctcagagttaaaattatttccctcatactaatgcttaatggcaatgattactccagagttttttaatttttacactggggcaatagactaggaggtctctgatttcttcttggtctaaagtgttttgattttatttctacataatagctttggtattcatgtatatacatgcatttaattgtgattttatcacctttcccatttctttccccacaagctggcatttcagtagttgcttttgaataatggttttggttacctgggaaggcaggcccagaacccatttccttgacttgcagttccgggctgtgttcacatgactgctgtctagctgatgcatttttcacatttgtcaactctggttagaaacaggtcctcaggagtattctctaacctgatattttctaaaaagatatgttgattcaactttgtttagcatcctactttctagattgtggggctcattttgccagggccaagctaccagaaaagtagaagtggagattacctggtatgtatctctctgggtgccccagttagagctgccacagctcaggaaaaagatgaggcataacgaccttgaatgtaattggagtaagtgacaaaataagaactaccctgggaaaccctgcattcaatgtagctgtcaattcagtatttttaagtacacctgtcagctgtttcttaccacttcgatggttgtgattaatttaaaatcaaaataaaggaattactgagtttatttgcctaatagacttattttgcctagaagaattagagagtataaatgaaagccaaaatggaatttcacaacgatttcctaaaccatttgtgtgaaatgaaggtatgatctggtgtgattgaggccaggagtctgtaggttatgaaggacaatatggccttgagtacaaaaaggagagaaagaggcatgtcgtgccctgctggggcacccttatactacttatcattttaatcctagggctgacttatgaatgaactcaaaaggggctagactgagctgaattggtaagtagtagatgaaaagcagtacagataaaaaccaaaattttagatcatgtttagagcatatttcaagaaacataccagtacatttagagactcattcggagttaagaaaaactcagattcctaacaggattgaagaaggaaacattttgaaaacagtagaagctgagaagagatgatcatttgggaacatgtaaaggagcggtagcttagggtggtttatcctgtgtaataatacagtgcagatgaaagcaaagaggaggatgtgtaataaagaatttgac

SEQ ID NO: 319133 - DNA, 1333 bp, Homo sapiens
ctcaagggagccatcctcaccaccatgctggcattgaactttttcagacactccacagtctcctgtctgtgcatcatggatgctaccgtggagcgttggcagacccatggcggccgccgcgctcccagcatggctgtctctgcagtcgagggcaaggactctgcgtgcattctccactgccgtctactcggccactccggtcccgacacctagcctgcaatactgaagaatgggaaaaaagtaagactgaagcagacatggaagagtatatatgggaaaatagctcatcagaaagaaatatcctggaaacgcttctccagatgaaagctgctgagaaaaatatggaaataaataaagaagagctccttggtactaaagaaattgaagagtacaaaaagtctgttgttagtcttaaaaatgaggaggaaaatgaaaattccatttctcagtacaaagaatccgtgaagagactattaaatgtgacatgaattatggagtagaaaaatctgcttgatttattaattttatgatatatgtgatcagtatctaatttgatataaaattgaaaatgttaaaaaatcattttttttcctcagagttaaaattatttccctcatactaatgcttaatggcaatgattactccagagttttttaatttttacactggggcaatagactaggaggtctctgatttcttcttggtctaaagtgttttgattttatttctacataatagctttggtattcatgtatatacatgcatttaattgtgattttatcacctttcccatttctttccccacaagctggcatttcagtagttgcttttgaataatggttttggttacctgggaaggcaggcccagaacccatttccttgacttgcagttccgggctgtgttcacatgactgctgtctagctgatgcatttttcacatttgtcaactctggttagaaacaggtcctcaggagtattctctaacctgatattttctaaaaagatatgttgattcaactttgtttagcatcctactttctagattgtggggctcattttgccagggccaagctaccagaaaagtagaagtggagattacctggtatgtatctctctgggtgccccagttagagctgccacagctcaggaaaaagatgaggcataacgaccttgaatgtaattggagtaagtgacaaaataagaactaccctgggaaaccctgcattcaatgtagctgtcaattcagtatttttaagtacacctgtcagctgtttcttaccacttcgatggttgtgattaatttaaaatcaaaataaaggaattactgagttta

SEQ ID NO: 319134 - DNA, 744 bp, Homo sapiens
ctgacactgaacgccgcttgtcccctccggcttgccgtcctcgcagccatggcggccgccgcgctcccagcatggctgtctctgcagtcgagggcaaggactctgcgtgcattctccactgccgtctactcggccactccggtcccgacacctagcctgccggaaagaacacccggaaatgaaaggccaccaagaagaaaggcactacctcctaggacagagaaaatggctgttgaccaggactggcctagtgtttacccagttgcagcaccatttaaaccctctgcagtacctcttcctgttcgaatgggttatccagtaaaaaagggcgtgcccatggcaaaggagggaaatctagaacttttaaagattcccaattttctgcatttgactcctgtagcaattaaaaagcactgtgaagcccttaaagatttttgcactgagtggccagccgcactggacagtgacgagaaatgtgagaagcattttccaattgaaattgacagcactgattatgtttcatcaggaccatctgttcggaaccccagagcacgagtagtagtcttaagagtaaagctttccagtttgaatttagatgatcacgcaaagaagaaattaattaaacttgtaggagagcgatactgcaagaccacagatgtgcttaccatcaaaacagatagttcccagatggggccctttacgaggcagaataccattatccgcgttacctacagggtatcccct

SEQ ID NO: 319135 - DNA, 2253 bp, Homo sapiens
ctgagagggcggaagccttggcactagcggcgcccgggcgcggagtgcgcagggcaaggtcctgcgctctgggccagcgctcggccatgcgatccgccgcgcggaggggacgcgccgcgcccgccgccagggactctttgccggtgctactgtttttatgcttgcttctgaagacgtgtgaacctaaaactgcaaatgcctttaaaccaaatatcctactgatcatggcggatgatctaggcactggggatctcggttgctacgggaacaatacactgagaacgccgaatattgaccagcttgcagaggaaggtgtgaggctcactcagcacctggcggccgccccgctctgcaccccaagccgagctgcattcctcacagggagacattccttcagatcaggcatggacgccagcaatggataccgggcccttcagtggaacgcaggctcaggtggactccctgagaacgaaaccacttttgcaagaatcttgcagcagcatggctatgcaaccggcctcataggaaaatggcaccagggtgtgaattgtgcatcccgcggggatcactgccaccaccccctgaaccacggatttgactatttctacggcatgcccttcacgctcacaaacgactgtgacccaggcaggccccccgaagtggacgccgccctgagggcgcagctctggggttacacccagttcctggcgctggggattctcaccctggctgccggccagacctgcggtttcttctctgtctccgcgagagcagtcaccggcatggccggcgtgggctgcctgtttttcatctcttggtactcctccttcgggtttgtgcgacgctggaactgtatcctgatgagaaaccatgacgtcacggagcaacccatggttctggagaaaacagcgagtcttatgctaaaggaagctgtttcctatattgaaagacacaagcatgggccatttctcctcttcctttctttgctgcatgtgcacattccccttgtgaccacgagtgcattcctggggaaaagtcagcatggcttatatggtgataatgtggaggagatggactggctcatagccagtgacttcatgtcatcatcagaagttaccgaaagtgaagcgataaagttaatgttcaggacaatgcagagacgctgtcttccttctatggccttcaagaaaccctggagaggaccagtgaggctgcagattcttaaaagagcatagacattaaaattcttgcagaatctgaatgtgtctcctgagacaagcatcgtgatagagttcacagtcttaaaagtctgcattttcaggtggggcaaggtggctcatgcctttaatcccagcattttgggaggctaaggcagggagatggcttgagaccaggagttcaagaccagcctgggcaacatagtgagacgcccccccccccatctctacaaaaaatttaaaaaattagccatggtggtgtgcacctgtggtcccagctactccagaggctgaggtgggaagatcatttgagcccaggaggctgaggctgcaatgactgataattattgcaccactgaactccagcctgggccacatagcaagaccctgtctccaaaaaaaaaaaaaaaaaaaaaaaggaataaaggacgcagaatagggagaaaaacttctctcatatcatttatttggtccttcagtatttctgaatacttagtctaatttggcacaaaatcaactgtattagtccattcttgcaaagaaatacctgagactgggtattttataaggaaaagaggttggattggctcacgttctgcagctgcacagaagcatggcagcatctgcttctgggagacctcggggagtttttgctcatggtggaaggcgaagggggagcaggcgtcttgcggcaggagaaggaccaagagaggagaggaagagccgcacacttttaaacaaccagatctcgtgagaagctactccctccgcagcaccaagcgggggatggtgctcaaccattcatgagaactctgtccccatcattcagtcacctccccccaggccccaccgccgattctgaggatgacaattccacatgagatttgggcggggacacacatccaaactatattgtcaaccttctacacagccaatgacttaacagcctcattagaagttacagaaactaaagcaataaagttcggacaatgcagagaggtcaccttccttctatggccttgaagaaaccctggag

SEQ ID NO: 319136 - DNA, 432 bp, Homo sapiens
gatgatggatagataagatagataatggatagataagatagatgatggatggatagatgatagataatggatagatgatggatagatatttaagatacatgatggatggataaatatatagatatgtaggatagatgatagataagatacatgattgatggatagataagatagatgatagatatataagatagatgatggatagataagatagatgatagatagatagatagataaaaagtagaatcagttcatggatggatgaatagatggatggacagatagatggatgaaaggtagataaacagagatagatgataggtaggtacctgtggacggctctgcgaataggacagttgcatttcttgggaatcaagtgcatccctaggctggcagtgcagcagaaatactgaataaaatgtgacaaatctc

SEQ ID NO: 319137 - DNA, 5163 bp, Homo sapiens
  misc_feature (2056)..(2056): n is a, c, g, or t
  misc_feature (2061)..(2061): n is a, c, g, or t
  misc_feature (2192)..(2192): n is a, c, g, or t
  misc_feature (2195)..(2195): n is a, c, g, or t
  misc_feature (2264)..(2264): n is a, c, g, or t
ctgagagggcggaagccttggcactagcggcgcccgggcgcggagtgcgcagggcaaggtcctgcgctctgggccagcgctcggccatgcgatccgccgcgcggaggggacgcgccgcgcccgccgccagggactctttgccggtgctactgtttttatgcttgcttctgaagacgtgtgaacctaaaactgcaaatgcctttaaaccaaatatcctactgatcatggcggatgatctaggcactggggatctcggttgctacgggaacaatacactgagaacgccgaatattgaccagcttgcagaggaaggtgtgaggctcactcagcacctggcggccgccccgctctgcaccccaagccgagctgcattcctcacagggagacattccttcagatcaggcatggacgccagcaatggataccgggcccttcagtggaacgcaggctcaggtggactccctgagaacgaaaccacttttgcaagaatcttgcagcagcatggctatgcaaccggcctcataggaaaatggcaccagggtgtgaattgtgcatcccgcggggatcactgccaccaccccctgaaccacggatttgactatttctacggcatgcccttcacgctcacaaacgactgtgacccaggcaggccccccgaagtggacgccgccctgagggcgcagctctggggttacacccagttcctggcgctggggattctcaccctggctgccggccagacctgcggtttcttctctgtctccgcgagagcagtcaccggcatggccggcgtgggctgcctgtttttcatctcttggtactcctccttcgggtttgtgcgacgctggaactgtatcctgatgagaaaccatgacgtcacggagcaacccatggttctggagaaaacagcgagtcttatgctaaaggaagctgtttcctatattgaaagacacaagcatgggccatttctcctcttcctttctttgctgcatgtgcacattccccttgtgaccacgagtgcattcctggggaaaagtcagcatggcttatatggtgataatgtggaggagatggactggctcataggtaaggttcttaatgccatcgaagacaatggtttaaagaactcaacattcacgtatttcacctctgaccatggaggacatttagaggcaagagatggacacagccagttagggggatggaacggaatttacaaaggtgggaagggcatgggaggatgggaaggtgggatccgcgtgcccgggatcttccactggccgggggtgctcccggccggccgagtgattggagagcccacgagcctgatggacgtgttccctactgtggtccagctggtgggtggcgaggtgccccaggacagggtgattgatggccacagcctggtacccttgctgcagggagctgaggcacgctcggcacatgagttcctgtttcattactgtgggcagcatcttcacgcagcacgctggcaccagaaggacagtggaagcgtctggaaggttcattacacgaccccgcagttccaccccgagggagcgggggcctgctacggccgaggcgtctgcccatgctccggggagggcgtgacccatcacagaccccctttgctctttgacctctccagggacccctccgaggcacggcccctgacccccgactccgagcccctgtaccacgccgtgatagcaagggtaggtgccgcggtgtcggagcatcggcagaccctgagtcctgtgccccagcagttttccatgagcaacatcctgtggaagccgtggctgcagccgtgctgcggacatttcccgttctgttcatgccacgaggatggggatggcaccccctgaatgccaggactgtgagagaggatccaggagagcctgactgcgttgcaaacaaaattctccaagcttggttctatcttcagcttccctttttgcaaggaacatgccctggactgagagtgggtccccactttctttctttctttctttcttttttgagacagagtgtcgctctgtccctcaggctggantgcantggcacgatctctgctcactgcaacctccgcctcccgggttcaagcgattttcctgcctcagcctcctgagtacccaggattacaggcaccaggcacctgccaccatgcctagctaatttttgtagttttngtngagacagggtttcaccatgttgcccaggctggtctcgcactcctgacctcaagtcatccacctgcctcngcctcccaaagtgctgggattacaggcacgagccactgcgcccatgtagggtttccctttcctgatttgtgaaataagactgtcccagtaggcacccactgatgcctcctcttcctcttctaaatctcagggttcgtcattgtgccaatgcccgatgttttcacccctccgtcttaaagcattgttgcaatttcatcacctagatgacataacagccttacaaaaggacagggaggagtgtctgttcctactctcacatagcggaggaaagttagagcctctcagtctctgtttatgaggactcattaatctcaaataattgatgcatttttcatacattagggtctctgtccatgtgtcttcctgatattgttatagaaatggcttcaggctgctggtaacagatgctgcggaaaaagaatgccttaaacaaagccaggcacggtgactcacacctgtaatcccagcactttgggaggctggggtgggaggatcacttgagcctaggagttagacacctacccagcctgagcaacacagtgagacctcatctctacaaaaaacaaataattagctagatgtcgtggcgcacagctgtggtctcagctacttaggaggctgaggcgggaggattatttgagcctgggaggtcaaaactgcaatgagctaagattgcactactgcactccgggctgggagacagagtaagaccctgccttaaaaaaaaaaaaaaaaaaatgccttaaagaaaataataagagaagggtgtgttctcttccaagtaatgagccgatcaaggggaagcaacccaaggctagcaggctcttttcaattcccagctctgccactcttagcatggcagagagttggcctcattatgccagtatggctgccacagtgtcagacatcacattccaggcagtggaaaggagaaagaaccaaagggcatccctttctcttgaagcagtccctgtgaggggggattatctggaagccccaacccaatttctgcttccaaccattatccatagaaacaactggaagttgagaagtgcagtcttttaggtgggcacctggctgccctgtatgaaaccagaattaggttggtcagcaggaaaacaagaaaacacttactgtgttgactgaggtttttgacgcatcgctttattgtcaaattaaacaactctatctcattctgcactgaaacacgtactaccattgcctataattggaaaatgatcctcagaggcacagaagatgccctgatggaaagtttgccccttgggcaaagagacagccatgggaaccttcagacatagagagagaaggtggcttttctccctacattcctcaaatagctaagatttggccagtgtgttttctaagtcaattctagtgtgtttcatcctcacctcttccctctgtggctttgatgatggaagtgtagtcctaacctactgcacagctgggaccccctgcccctagatcccaatactggggatgggaggaccttgcactattcccctcagtccatctatcgaggtctttgcaggaagcatactgggaattgaaacgagagcctaaatgacatctaagaaaggcagtgttcaataccaggtattaggtgaggatgggattctaaggacatcagtgggaggcagggagccaccttcagacctcagcatggaagcttccaagatccagaggaagaggcaacagcactgagagtcataggtagaagaatcatcacagccctgctaaccaggcagctgatgcccctctcccctggctccctgtgtccaaatcctacaggggcatctgttggctgaactcaacctgaagccaaagagaagatgagtggagagaggcaacatttatagagctcaggtttctagggctggagagggatctggagggacacacaggagacacctggcataaccaaaaaatgattaaaaaaaaaaaaaaaaagaaacatctatggagcatgggacacggggagtggaggcagctaaaagccatctcatctttcaccgtattcaacaagcccattataacaagtctttcacgctcaaccattcaaacaatcccaacaatcccagcctaagaatttcctggcatttgatgaaaatggctgtgggttttgctatctttaagctccctgggaagcaggatataagcccagggctggcaggctctttctagctacctgctcttgcacatagagtttgcctcatggttgcaagaaggctgccatagctccagatggcacatagacattccaggcagcaggaaaaaggaaggagcacttaaccgaaggaggtcagggagttggttagtctccacctgaagaagagagccatgaaccagcttcagttgactaacgggctcctgtgagtgcatctttggacttttctggaggttgaaatctagatgtggtatgtgtcttaaagcagccaccaactcctcccattaccttccaagtgagcccaactacacgatggagcctcttccctgcccttggatctgggctgagcctctgacttgcgttgaccaacagaatgcagtgaaagtgatgccgatactaccctccctgccctagacttgggatacctggcagctatattcttccattcctcaggacttgcaaaaacgggtctcagcatgccttcccagagccatgaggtgtttctttgcccattcattgatctgagaagtgagtgtaaggagtttaaatcaacctctgttctgtgctagttaaggtaataaagttgctgcagtccagggggtaggtacctgtggacggctctgcgaataggacagttgcatttcttgggaatcaagtgcatccctaggctggcagtgcagcagaaatactgaataaaatgtgacaaatctc

SEQ ID NO: 319138 - DNA, 5024 bp, Homo sapiens
  misc_feature (2056)..(2056): n is a, c, g, or t
  misc_feature (2061)..(2061): n is a, c, g, or t
  misc_feature (2192)..(2192): n is a, c, g, or t
  misc_feature (2195)..(2195): n is a, c, g, or t
  misc_feature (2264)..(2264): n is a, c, g, or t
ctgagagggcggaagccttggcactagcggcgcccgggcgcggagtgcgcagggcaaggtcctgcgctctgggccagcgctcggccatgcgatccgccgcgcggaggggacgcgccgcgcccgccgccagggactctttgccggtgctactgtttttatgcttgcttctgaagacgtgtgaacctaaaactgcaaatgcctttaaaccaaatatcctactgatcatggcggatgatctaggcactggggatctcggttgctacgggaacaatacactgagaacgccgaatattgaccagcttgcagaggaaggtgtgaggctcactcagcacctggcggccgccccgctctgcaccccaagccgagctgcattcctcacagggagacattccttcagatcaggcatggacgccagcaatggataccgggcccttcagtggaacgcaggctcaggtggactccctgagaacgaaaccacttttgcaagaatcttgcagcagcatggctatgcaaccggcctcataggaaaatggcaccagggtgtgaattgtgcatcccgcggggatcactgccaccaccccctgaaccacggatttgactatttctacggcatgcccttcacgctcacaaacgactgtgacccaggcaggccccccgaagtggacgccgccctgagggcgcagctctggggttacacccagttcctggcgctggggattctcaccctggctgccggccagacctgcggtttcttctctgtctccgcgagagcagtcaccggcatggccggcgtgggctgcctgtttttcatctcttggtactcctccttcgggtttgtgcgacgctggaactgtatcctgatgagaaaccatgacgtcacggagcaacccatggttctggagaaaacagcgagtcttatgctaaaggaagctgtttcctatattgaaagacacaagcatgggccatttctcctcttcctttctttgctgcatgtgcacattccccttgtgaccacgagtgcattcctggggaaaagtcagcatggcttatatggtgataatgtggaggagatggactggctcataggtaaggttcttaatgccatcgaagacaatggtttaaagaactcaacattcacgtatttcacctctgaccatggaggacatttagaggcaagagatggacacagccagttagggggatggaacggaatttacaaaggtgggaagggcatgggaggatgggaaggtgggatccgcgtgcccgggatcttccactggccgggggtgctcccggccggccgagtgattggagagcccacgagcctgatggacgtgttccctactgtggtccagctggtgggtggcgaggtgccccaggacagggtgattgatggccacagcctggtacccttgctgcagggagctgaggcacgctcggcacatgagttcctgtttcattactgtgggcagcatcttcacgcagcacgctggcaccagaaggacagtggaagcgtctggaaggttcattacacgaccccgcagttccaccccgagggagcgggggcctgctacggccgaggcgtctgcccatgctccggggagggcgtgacccatcacagaccccctttgctctttgacctctccagggacccctccgaggcacggcccctgacccccgactccgagcccctgtaccacgccgtgatagcaagggtaggtgccgcggtgtcggagcatcggcagaccctgagtcctgtgccccagcagttttccatgagcaacatcctgtggaagccgtggctgcagccgtgctgcggacatttcccgttctgttcatgccacgaggatggggatggcaccccctgaatgccaggactgtgagagaggatccaggagagcctgactgcgttgcaaacaaaattctccaagcttggttctatcttcagcttccctttttgcaaggaacatgccctggactgagagtgggtccccactttctttctttctttctttcttttttgagacagagtgtcgctctgtccctcaggctggantgcantggcacgatctctgctcactgcaacctccgcctcccgggttcaagcgattttcctgcctcagcctcctgagtacccaggattacaggcaccaggcacctgccaccatgcctagctaatttttgtagttttngtngagacagggtttcaccatgttgcccaggctggtctcgcactcctgacctcaagtcatccacctgcctcngcctcccaaagtgctgggattacaggcacgagccactgcgcccatgtagggtttccctttcctgatttgtgaaataagactgtcccagtaggcacccactgatgcctcctcttcctcttctaaatctcagggttcgtcattgtgccaatgcccgatgttttcacccctccgtcttaaagcattgttgcaatttcatcacctagatgacataacagccttacaaaaggacagggaggagtgtctgttcctactctcacatagcggaggaaagttagagcctctcagtctctgtttatgaggactcattaatctcaaataattgatgcatttttcatacattagggtctctgtccatgtgtcttcctgatattgttatagaaatggcttcaggctgctggtaacagatgctgcggaaaaagaatgccttaaacaaagccaggcacggtgactcacacctgtaatcccagcactttgggaggctgaggcgggaggattatttgagcctgggaggtcaaaactgcaatgagctaagattgcactactgcactccgggctgggagacagagtaagaccctgccttaaaaaaaaaaaaaaaaaaatgccttaaagaaaataataagagaagggtgtgttctcttccaagtaatgagccgatcaaggggaagcaacccaaggctagcaggctcttttcaattcccagctctgccactcttagcatggcagagagttggcctcattatgccagtatggctgccacagtgtcagacatcacattccaggcagtggaaaggagaaagaaccaaagggcatccctttctcttgaagcagtccctgtgaggggggattatctggaagccccaacccaatttctgcttccaaccattatccatagaaacaactggaagttgagaagtgcagtcttttaggtgggcacctggctgccctgtatgaaaccagaattaggttggtcagcaggaaaacaagaaaacacttactgtgttgactgaggtttttgacgcatcgctttattgtcaaattaaacaactctatctcattctgcactgaaacacgtactaccattgcctataattggaaaatgatcctcagaggcacagaagatgccctgatggaaagtttgccccttgggcaaagagacagccatgggaaccttcagacatagagagagaaggtggcttttctccctacattcctcaaatagctaagatttggccagtgtgttttctaagtcaattctagtgtgtttcatcctcacctcttccctctgtggctttgatgatggaagtgtagtcctaacctactgcacagctgggaccccctgcccctagatcccaatactggggatgggaggaccttgcactattcccctcagtccatctatcgaggtctttgcaggaagcatactgggaattgaaacgagagcctaaatgacatctaagaaaggcagtgttcaataccaggtattaggtgaggatgggattctaaggacatcagtgggaggcagggagccaccttcagacctcagcatggaagcttccaagatccagaggaagaggcaacagcactgagagtcataggtagaagaatcatcacagccctgctaaccaggcagctgatgcccctctcccctggctccctgtgtccaaatcctacaggggcatctgttggctgaactcaacctgaagccaaagagaagatgagtggagagaggcaacatttatagagctcaggtttctagggctggagagggatctggagggacacacaggagacacctggcataaccaaaaaatgattaaaaaaaaaaaaaaaaagaaacatctatggagcatgggacacggggagtggaggcagctaaaagccatctcatctttcaccgtattcaacaagcccattataacaagtctttcacgctcaaccattcaaacaatcccaacaatcccagcctaagaatttcctggcatttgatgaaaatggctgtgggttttgctatctttaagctccctgggaagcaggatataagcccagggctggcaggctctttctagctacctgctcttgcacatagagtttgcctcatggttgcaagaaggctgccatagctccagatggcacatagacattccaggcagcaggaaaaaggaaggagcacttaaccgaaggaggtcagggagttggttagtctccacctgaagaagagagccatgaaccagcttcagttgactaacgggctcctgtgagtgcatctttggacttttctggaggttgaaatctagatgtggtatgtgtcttaaagcagccaccaactcctcccattaccttccaagtgagcccaactacacgatggagcctcttccctgcccttggatctgggctgagcctctgacttgcgttgaccaacagaatgcagtgaaagtgatgccgatactaccctccctgccctagacttgggatacctggcagctatattcttccattcctcaggacttgcaaaaacgggtctcagcatgccttcccagagccatgaggtgtttctttgcccattcattgatctgagaagtgagtgtaaggagtttaaatcaacctctgttctgtgctagttaaggtaataaagttgctgcagtccagggggtaggtacctgtggacggctctgcgaataggacagttgcatttcttgggaatcaagtgcatccctaggctggcagtgcagcagaaatactgaataaaatgtgacaaatctc

SEQ ID NO: 319139 - DNA, 4226 bp, Homo sapiens
ctgagagggcggaagccttggcactagcggcgcccgggcgcggagtgcgcagggcaaggtcctgcgctctgggccagcgctcggccatgcgatccgccgcgcggaggggacgcgccgcgcccgccgccagggactctttgccggtgctactgtttttatgcttgcttctgaagacgtgtgaacctaaaactgcaaatgcctttaaaccaaatatcctactgatcatggcggatgatctaggcactggggatctcggttgctacgggaacaatacactgagaacgccgaatattgaccagcttgcagaggaaggtgtgaggctcactcagcacctggcggccgccccgctctgcaccccaagccgagctgcattcctcacagggagacattccttcagatcaggcatggacgccagcaatggataccgggcccttcagtggaacgcaggctcaggtggactccctgagaacgaaaccacttttgcaagaatcttgcagcagcatggctatgcaaccggcctcataggaaaatggcaccagggtgtgaattgtgcatcccgcggggatcactgccaccaccccctgaaccacggatttgactatttctacggcatgcccttcacgctcacaaacgactgtgacccaggcaggccccccgaagtggacgccgccctgagggcgcagctctggggttacacccagttcctggcgctggggattctcaccctggctgccggccagacctgcggtttcttctctgtctccgcgagagcagtcaccggcatggccggcgtgggctgcctgtttttcatctcttggtactcctccttcgggtttgtgcgacgctggaactgtatcctgatgagaaaccatgacgtcacggagcaacccatggttctggagaaaacagcgagtcttatgctaaaggaagctgtttcctatattgaaagacacaagcatgggccatttctcctcttcctttctttgctgcatgtgcacattccccttgtgaccacgagtgcattcctggggaaaagtcagcatggcttatatggtgataatgtggaggagatggactggctcataggtaaggttcttaatgccatcgaagacaatggtttaaagaactcaacattcacgtatttcacctctgaccatggaggacatttagaggcaagagatggacacagccagttagggggatggaacggaatttacaaaggtgggaagggcatgggaggatgggaaggtgggatccgcgtgcccgggatcttccactggccgggggtgctcccggccggccgagtgattggagagcccacgagcctgatggacgtgttccctactgtggtccagctggtgggtggcgaggtgccccaggacagggtgattgatggccacagcctggtacccttgctgcagggagctgaggcacgctcggcacatgagttcctgtttcattactgtgggcagcatcttcacgcagcacgctggcaccagaaggacagtggaagcgtctggaaggttcattacacgaccccgcagttccaccccgagggagcgggggcctgctacggccgaggcgtctgcccatgctccggggagggcgtgacccatcacagaccccctttgctctttgacctctccagggacccctccgaggcacggcccctgacccccgactccgagcccctgtaccacgccgtgatagcaagggtaggtgccgcggtgtcggagcatcggcagaccctgagtcctgtgccccagcagttttccatgagcaacatcctgtggaagccgtggctgcagccgtgctgcggacatttcccgttctgttcatgccacgaggatggggatggcaccccctgaatgccaggactgtgagagaggatccaggagagcctgactgcgttgcaaacaaaattctccaagcttggttctatcttcagcttccctttttgcaaggaacatgccctggactgagagtgggtccccactttctttctttctttctttcttttttgagacagaagtaagaccctgccttaaaaaaaaaaaaaaaaaaatgccttaaagaaaataataagagaagggtgtgttctcttccaagtaatgagccgatcaaggggaagcaacccaaggctagcaggctcttttcaattcccagctctgccactcttagcatggcagagagttggcctcattatgccagtatggctgccacagtgtcagacatcacattccaggcagtggaaaggagaaagaaccaaagggcatccctttctcttgaagcagtccctgtgaggggggattatctggaagccccaacccaatttctgcttccaaccattatccatagaaacaactggaagttgagaagtgcagtcttttaggtgggcacctggctgccctgtatgaaaccagaattaggttggtcagcaggaaaacaagaaaacacttactgtgttgactgaggtttttgacgcatcgctttattgtcaaattaaacaactctatctcattctgcactgaaacacgtactaccattgcctataattggaaaatgatcctcagaggcacagaagatgccctgatggaaagtttgccccttgggcaaagagacagccatgggaaccttcagacatagagagagaaggtggcttttctccctacattcctcaaatagctaagatttggccagtgtgttttctaagtcaattctagtgtgtttcatcctcacctcttccctctgtggctttgatgatggaagtgtagtcctaacctactgcacagctgggaccccctgcccctagatcccaatactggggatgggaggaccttgcactattcccctcagtccatctatcgaggtctttgcaggaagcatactgggaattgaaacgagagcctaaatgacatctaagaaaggcagtgttcaataccaggtattaggtgaggatgggattctaaggacatcagtgggaggcagggagccaccttcagacctcagcatggaagcttccaagatccagaggaagaggcaacagcactgagagtcataggtagaagaatcatcacagccctgctaaccaggcagctgatgcccctctcccctggctccctgtgtccaaatcctacaggggcatctgttggctgaactcaacctgaagccaaagagaagatgagtggagagaggcaacatttatagagctcaggtttctagggctggagagggatctggagggacacacaggagacacctggcataaccaaaaaatgattaaaaaaaaaaaaaaaaagaaacatctatggagcatgggacacggggagtggaggcagctaaaagccatctcatctttcaccgtattcaacaagcccattataacaagtctttcacgctcaaccattcaaacaatcccaacaatcccagcctaagaatttcctggcatttgatgaaaatggctgtgggttttgctatctttaagctccctgggaagcaggatataagcccagggctggcaggctctttctagctacctgctcttgcacatagagtttgcctcatggttgcaagaaggctgccatagctccagatggcacatagacattccaggcagcaggaaaaaggaaggagcacttaaccgaaggaggtcagggagttggttagtctccacctgaagaagagagccatgaaccagcttcagttgactaacgggctcctgtgagtgcatctttggacttttctggaggttgaaatctagatgtggtatgtgtcttaaagcagccaccaactcctcccattaccttccaagtgagcccaactacacgatggagcctcttccctgcccttggatctgggctgagcctctgacttgcgttgaccaacagaatgcagtgaaagtgatgccgatactaccctccctgccctagacttgggatacctggcagctatattcttccattcctcaggacttgcaaaaacgggtctcagcatgccttcccagagccatgaggtgtttctttgcccattcattgatctgagaagtgagtgtaaggagtttaaatcaacctctgttctgtgctagttaaggtaataaagttgctgcagtccagggggtaggtacctgtggacggctctgcgaataggacagttgcatttcttgggaatcaagtgcatccctaggctggcagtgcagcagaaatactgaataaaatgtgacaaatctc

SEQ ID NO: 319140 - DNA, 4801 bp, Homo sapiens
  misc_feature (2056)..(2056): n is a, c, g, or t
  misc_feature (2061)..(2061): n is a, c, g, or t
  misc_feature (2192)..(2192): n is a, c, g, or t
  misc_feature (2195)..(2195): n is a, c, g, or t
  misc_feature (2264)..(2264): n is a, c, g, or t
ctgagagggcggaagccttggcactagcggcgcccgggcgcggagtgcgcagggcaaggtcctgcgctctgggccagcgctcggccatgcgatccgccgcgcggaggggacgcgccgcgcccgccgccagggactctttgccggtgctactgtttttatgcttgcttctgaagacgtgtgaacctaaaactgcaaatgcctttaaaccaaatatcctactgatcatggcggatgatctaggcactggggatctcggttgctacgggaacaatacactgagaacgccgaatattgaccagcttgcagaggaaggtgtgaggctcactcagcacctggcggccgccccgctctgcaccccaagccgagctgcattcctcacagggagacattccttcagatcaggcatggacgccagcaatggataccgggcccttcagtggaacgcaggctcaggtggactccctgagaacgaaaccacttttgcaagaatcttgcagcagcatggctatgcaaccggcctcataggaaaatggcaccagggtgtgaattgtgcatcccgcggggatcactgccaccaccccctgaaccacggatttgactatttctacggcatgcccttcacgctcacaaacgactgtgacccaggcaggccccccgaagtggacgccgccctgagggcgcagctctggggttacacccagttcctggcgctggggattctcaccctggctgccggccagacctgcggtttcttctctgtctccgcgagagcagtcaccggcatggccggcgtgggctgcctgtttttcatctcttggtactcctccttcgggtttgtgcgacgctggaactgtatcctgatgagaaaccatgacgtcacggagcaacccatggttctggagaaaacagcgagtcttatgctaaaggaagctgtttcctatattgaaagacacaagcatgggccatttctcctcttcctttctttgctgcatgtgcacattccccttgtgaccacgagtgcattcctggggaaaagtcagcatggcttatatggtgataatgtggaggagatggactggctcataggtaaggttcttaatgccatcgaagacaatggtttaaagaactcaacattcacgtatttcacctctgaccatggaggacatttagaggcaagagatggacacagccagttagggggatggaacggaatttacaaaggtgggaagggcatgggaggatgggaaggtgggatccgcgtgcccgggatcttccactggccgggggtgctcccggccggccgagtgattggagagcccacgagcctgatggacgtgttccctactgtggtccagctggtgggtggcgaggtgccccaggacagggtgattgatggccacagcctggtacccttgctgcagggagctgaggcacgctcggcacatgagttcctgtttcattactgtgggcagcatcttcacgcagcacgctggcaccagaaggacagtggaagcgtctggaaggttcattacacgaccccgcagttccaccccgagggagcgggggcctgctacggccgaggcgtctgcccatgctccggggagggcgtgacccatcacagaccccctttgctctttgacctctccagggacccctccgaggcacggcccctgacccccgactccgagcccctgtaccacgccgtgatagcaagggtaggtgccgcggtgtcggagcatcggcagaccctgagtcctgtgccccagcagttttccatgagcaacatcctgtggaagccgtggctgcagccgtgctgcggacatttcccgttctgttcatgccacgaggatggggatggcaccccctgaatgccaggactgtgagagaggatccaggagagcctgactgcgttgcaaacaaaattctccaagcttggttctatcttcagcttccctttttgcaaggaacatgccctggactgagagtgggtccccactttctttctttctttctttcttttttgagacagagtgtcgctctgtccctcaggctggantgcantggcacgatctctgctcactgcaacctccgcctcccgggttcaagcgattttcctgcctcagcctcctgagtacccaggattacaggcaccaggcacctgccaccatgcctagctaatttttgtagttttngtngagacagggtttcaccatgttgcccaggctggtctcgcactcctgacctcaagtcatccacctgcctcngcctcccaaagtgctgggattacaggcacgagccactgcgcccatgtagggtttccctttcctgatttgtgaaataagactgtcccagtaggcacccactgatgcctcctcttcctcttctaaatctcagggttcgtcattgtgccaatgcccgatgttttcacccctccgtcttaaagcattgttgcaatttcatcacctagatgacataacagccttacaaaaggacagggaggagtgtctgttcctactctcacatagcggaggaaagttagagcctctcagtctctgtttatgaggactcattaatctcaaataattgatgcatttttcatacattagggtctctgtccatgtgtcttcctgatattgttatagaaatggcttcaggctgctggtaacagatgctgcggaaaaagaatgccttaaacaaagccaggcacggtgactcacacctgtaatcccagcactttgggaggctggggtgggaggatcacttgagcctaggagttagacacctacccagcctgagcaacacagtgagacctcatctctacaaaaaacaaataattagctagatgtcgtggcgcacagctgtggtctcagctacttaggaggctgaggcgggaggattatttgagcctgggaggtcaaaactgcaatgagctaagattgcactactgcactccgggctgggagacagagtaagaccctgccttaaaaaaaaaaaaaaaaaaatgccttaaagaaaataataagagaagggtgtgttctcttccaagtaatgagccgatcaaggggaagcaacccaaggctagcaggctcttttcaattcccagctctgccactcttagcatggcagagagttggcctcattatgccagtatggctgccacagtgtcagacatcacattccaggcagtggaaaggagaaagaaccaaagggcatccctttctcttgaagcagtccctgtgaggggggattatctggaagccccaacccaatttctgcttccaaccattatccatagaaacaactggaagttgagaagtgcagtcttttaggtgggcacctggctgccctgtatgaaaccagaattaggttggtcagcaggaaaacaagaaaacacttactgtgttgactgaggtttttgacgcatcgctttattgtcaaattaaacaactctatctcattctgcactgaaacacgtactaccattgcctataattggaaaatgatcctcagaggcacagaagatgccctgatggaaagtttgccccttgggcaaagagacagccatgggaaccttcagacctcagcatggaagcttccaagatccagaggaagaggcaacagcactgagagtcataggtagaagaatcatcacagccctgctaaccaggcagctgatgcccctctcccctggctccctgtgtccaaatcctacaggggcatctgttggctgaactcaacctgaagccaaagagaagatgagtggagagaggcaacatttatagagctcaggtttctagggctggagagggatctggagggacacacaggagacacctggcataaccaaaaaatgattaaaaaaaaaaaaaaaaagaaacatctatggagcatgggacacggggagtggaggcagctaaaagccatctcatctttcaccgtattcaacaagcccattataacaagtctttcacgctcaaccattcaaacaatcccaacaatcccagcctaagaatttcctggcatttgatgaaaatggctgtgggttttgctatctttaagctccctgggaagcaggatataagcccagggctggcaggctctttctagctacctgctcttgcacatagagtttgcctcatggttgcaagaaggctgccatagctccagatggcacatagacattccaggcagcaggaaaaaggaaggagcacttaaccgaaggaggtcagggagttggttagtctccacctgaagaagagagccatgaaccagcttcagttgactaacgggctcctgtgagtgcatctttggacttttctggaggttgaaatctagatgtggtatgtgtcttaaagcagccaccaactcctcccattaccttccaagtgagcccaactacacgatggagcctcttccctgcccttggatctgggctgagcctctgacttgcgttgaccaacagaatgcagtgaaagtgatgccgatactaccctccctgccctagacttgggatacctggcagctatattcttccattcctcaggacttgcaaaaacgggtctcagcatgccttcccagagccatgaggtgtttctttgcccattcattgatctgagaagtgagtgtaaggagtttaaatcaacctctgttctgtgctagttaaggtaataaagttgctgcagtccagggggtaggtacctgtggacggctctgcgaataggacagttgcatttcttgggaatcaagtgcatccctaggctggcagtgcagcagaaatactgaataaaatgtgacaaatctc

SEQ ID NO: 319141 - DNA, 5185 bp, Homo sapiens
  misc_feature (2056)..(2056): n is a, c, g, or t
  misc_feature (2061)..(2061): n is a, c, g, or t
  misc_feature (2192)..(2192): n is a, c, g, or t
  misc_feature (2195)..(2195): n is a, c, g, or t
  misc_feature (2264)..(2264): n is a, c, g, or t
ctgagagggcggaagccttggcactagcggcgcccgggcgcggagtgcgcagggcaaggtcctgcgctctgggccagcgctcggccatgcgatccgccgcgcggaggggacgcgccgcgcccgccgccagggactctttgccggtgctactgtttttatgcttgcttctgaagacgtgtgaacctaaaactgcaaatgcctttaaaccaaatatcctactgatcatggcggatgatctaggcactggggatctcggttgctacgggaacaatacactgagaacgccgaatattgaccagcttgcagaggaaggtgtgaggctcactcagcacctggcggccgccccgctctgcaccccaagccgagctgcattcctcacagggagacattccttcagatcaggcatggacgccagcaatggataccgggcccttcagtggaacgcaggctcaggtggactccctgagaacgaaaccacttttgcaagaatcttgcagcagcatggctatgcaaccggcctcataggaaaatggcaccagggtgtgaattgtgcatcccgcggggatcactgccaccaccccctgaaccacggatttgactatttctacggcatgcccttcacgctcacaaacgactgtgacccaggcaggccccccgaagtggacgccgccctgagggcgcagctctggggttacacccagttcctggcgctggggattctcaccctggctgccggccagacctgcggtttcttctctgtctccgcgagagcagtcaccggcatggccggcgtgggctgcctgtttttcatctcttggtactcctccttcgggtttgtgcgacgctggaactgtatcctgatgagaaaccatgacgtcacggagcaacccatggttctggagaaaacagcgagtcttatgctaaaggaagctgtttcctatattgaaagacacaagcatgggccatttctcctcttcctttctttgctgcatgtgcacattccccttgtgaccacgagtgcattcctggggaaaagtcagcatggcttatatggtgataatgtggaggagatggactggctcataggtaaggttcttaatgccatcgaagacaatggtttaaagaactcaacattcacgtatttcacctctgaccatggaggacatttagaggcaagagatggacacagccagttagggggatggaacggaatttacaaaggtgggaagggcatgggaggatgggaaggtgggatccgcgtgcccgggatcttccactggccgggggtgctcccggccggccgagtgattggagagcccacgagcctgatggacgtgttccctactgtggtccagctggtgggtggcgaggtgccccaggacagggtgattgatggccacagcctggtacccttgctgcagggagctgaggcacgctcggcacatgagttcctgtttcattactgtgggcagcatcttcacgcagcacgctggcaccagaaggacagtggaagcgtctggaaggttcattacacgaccccgcagttccaccccgagggagcgggggcctgctacggccgaggcgtctgcccatgctccggggagggcgtgacccatcacagaccccctttgctctttgacctctccagggacccctccgaggcacggcccctgacccccgactccgagcccctgtaccacgccgtgatagcaagggtaggtgccgcggtgtcggagcatcggcagaccctgagtcctgtgccccagcagttttccatgagcaacatcctgtggaagccgtggctgcagccgtgctgcggacatttcccgttctgttcatgccacgaggatggggatggcaccccctgaatgccaggactgtgagagaggatccaggagagcctgactgcgttgcaaacaaaattctccaagcttggttctatcttcagcttccctttttgcaaggaacatgccctggactgagagtgggtccccactttctttctttctttctttcttttttgagacagagtgtcgctctgtccctcaggctggantgcantggcacgatctctgctcactgcaacctccgcctcccgggttcaagcgattttcctgcctcagcctcctgagtacccaggattacaggcaccaggcacctgccaccatgcctagctaatttttgtagttttngtngagacagggtttcaccatgttgcccaggctggtctcgcactcctgacctcaagtcatccacctgcctcngcctcccaaagtgctgggattacaggcacgagccactgcgcccatgtagggtttccctttcctgatttgtgaaataagactgtcccagtaggcacccactgatgcctcctcttcctcttctaaatctcagggttcgtcattgtgccaatgcccgatgttttcacccctccgtcttaaagcattgttgcaatttcatcacctagatgacataacagccttacaaaaggacagggaggagtgtctgttcctactctcacatagcggaggaaagttagagcctctcagtctctgtttatgaggactcattaatctcaaataattgatgcatttttcatacattagggtctctgtccatgtgtcttcctgatattgttatagaaatggcttcaggctgctggtaacagatgctgcggaaaaagaatgccttaaacaaagccaggcacggtgactcacacctgtaatcccagcactttgggaggctggggtgggaggatcacttgagcctaggagttagacacctacccagcctgagcaacacagtgagacctcatctctacaaaaaacaaataattagctagatgtcgtggcgcacagctgtggtctcagctacttaggaggctgaggcgggaggattatttgagcctgggaggtcaaaactgcaatgagctaagattgcactactgcactccgggctgggagacagagtaagaccctgccttaaaaaaaaaaaaaaaaaaatgccttaaagaaaataataagagaagggtgtgttctcttccaagtaatgagccgatcaaggggaagcaacccaaggctagcaggctcttttcaattcccagctctgccactcttagcatggcagagagttggcctcattatgccagtatggctgccacagtgtcagacatcacattccaggcagtggaaaggagaaagaaccaaagggcatccctttctcttgaagcagtccctgtgaggggggattatctggaagccccaacccaatttctgcttccaaccattatccatagaaacaactggaagttgagaagtgcagtcttttaggtgggcacctggctgccctgtatgaaaccagaattaggttggtcagcaggaaaacaagaaaacacttactgtgttgactgaggtttttgacgcatcgctttattgtcaaattaaacaactctatctcattctgcactgaaacacgtactaccattgcctataattggaaaatgatcctcagaggcacagaagatgccctgatggaaagtttgccccttgggcaaagagacagccatgggaaccttcagacatagagagagaaggtggcttttctccctacattcctcaaatagctaagatttggccagtgtgttttctaagtcaattctagtgtgtttcatcctcacctcttccctctgtggctttgatgatggaagtgtagtcctaacctactgcacagctgggaccccctgcccctagatcccaatactggggatgggaggaccttgcactattcccctcagtccatctatcgaggtctttgcaggaagcatactgggaattgaaacgagagcctaaatgacatctaagaaaggcagtgttcaataccaggtattaggtgaggatgggattctaaggacatcagtgggaggcagggagccaccttcagacctcagcatggaagcttccaagatccagaggaagaggcaacagcactgagagtcataggtagaagaatcatcacagccctgctaaccaggcagctgatgcccctctcccctggctccctgtgtccaaatcctacaggggcatctgttggctgaactcaacctgaagccaaagagaagatgagtggagagaggcaacatttatagagctcaggtttctagggctggagagggatctggagggacacacaggagacacctggcataaccaaaaaatgattaaaaaaaaaaaaaaaaagaaacatctatggagcatgggacacggggagtggaggcagctaaaagccatctcatctttcaccgtattcaacaagcccattataacaagtctttcacgctcaaccattcaaacaatcccaacaatcccagcctaagaatttcctggcatttgatgaaaatggctgtgggttttgctatctttaagctccctgggaagcaggatataagcccagggctggcaggctctttctagctacctgctcttgcacatagagtttgcctcatggttgcaagaaggctgccatagctccagatggcacatagacattccaggcagcaggaaaaaggaaggagcacttaaccgaaggaggtcagggagttggttagtctccacctgaagaagagagccatgaaccagcttcagttgactaacgggctcctgtgagtgcatctttggacttttctggaggttgaaatctagatgtggtatgtgtcttaaagcagccaccaactcctcccattaccttccaagtgagcccaactacacgatggagcctcttccctgcccttggatctgggctgagcctctgacttgcgttgaccaacagaatgcagtgaaagtgatgccgatactaccctccctgccctagacttgggatacctggcagctatattcttccattcctcaggacttgcaaaaacgggtctcagcatgccttcccagagccatgaggtgtttctttgcccattcattgatctgagaagtgagtgtaaggagtttaaatcaacctctgttctgtgctagttaaggtaataaagttgctgcagtccagggggtaggtacctgtggacggctctgcgaataggacagttgcatttcttgggaatcaagtgcatccctaggctggcagtgcagcagaaatactgaataaaatgtgacaaatctcacaaatctccctggaaaaaaaa

SEQ ID NO: 319142 - DNA, 5135 bp, Homo sapiens
  misc_feature (2056)..(2056): n is a, c, g, or t
  misc_feature (2061)..(2061): n is a, c, g, or t
  misc_feature (2192)..(2192): n is a, c, g, or t
  misc_feature (2195)..(2195): n is a, c, g, or t
  misc_feature (2264)..(2264): n is a, c, g, or t
ctgagagggcggaagccttggcactagcggcgcccgggcgcggagtgcgcagggcaaggtcctgcgctctgggccagcgctcggccatgcgatccgccgcgcggaggggacgcgccgcgcccgccgccagggactctttgccggtgctactgtttttatgcttgcttctgaagacgtgtgaacctaaaactgcaaatgcctttaaaccaaatatcctactgatcatggcggatgatctaggcactggggatctcggttgctacgggaacaatacactgagaacgccgaatattgaccagcttgcagaggaaggtgtgaggctcactcagcacctggcggccgccccgctctgcaccccaagccgagctgcattcctcacagggagacattccttcagatcaggcatggacgccagcaatggataccgggcccttcagtggaacgcaggctcaggtggactccctgagaacgaaaccacttttgcaagaatcttgcagcagcatggctatgcaaccggcctcataggaaaatggcaccagggtgtgaattgtgcatcccgcggggatcactgccaccaccccctgaaccacggatttgactatttctacggcatgcccttcacgctcacaaacgactgtgacccaggcaggccccccgaagtggacgccgccctgagggcgcagctctggggttacacccagttcctggcgctggggattctcaccctggctgccggccagacctgcggtttcttctctgtctccgcgagagcagtcaccggcatggccggcgtgggctgcctgtttttcatctcttggtactcctccttcgggtttgtgcgacgctggaactgtatcctgatgagaaaccatgacgtcacggagcaacccatggttctggagaaaacagcgagtcttatgctaaaggaagctgtttcctatattgaaagacacaagcatgggccatttctcctcttcctttctttgctgcatgtgcacattccccttgtgaccacgagtgcattcctggggaaaagtcagcatggcttatatggtgataatgtggaggagatggactggctcataggtaaggttcttaatgccatcgaagacaatggtttaaagaactcaacattcacgtatttcacctctgaccatggaggacatttagaggcaagagatggacacagccagttagggggatggaacggaatttacaaaggtgggaagggcatgggaggatgggaaggtgggatccgcgtgcccgggatcttccactggccgggggtgctcccggccggccgagtgattggagagcccacgagcctgatggacgtgttccctactgtggtccagctggtgggtggcgaggtgccccaggacagggtgattgatggccacagcctggtacccttgctgcagggagctgaggcacgctcggcacatgagttcctgtttcattactgtgggcagcatcttcacgcagcacgctggcaccagaaggacagtggaagcgtctggaaggttcattacacgaccccgcagttccaccccgagggagcgggggcctgctacggccgaggcgtctgcccatgctccggggagggcgtgacccatcacagaccccctttgctctttgacctctccagggacccctccgaggcacggcccctgacccccgactccgagcccctgtaccacgccgtgatagcaagggtaggtgccgcggtgtcggagcatcggcagaccctgagtcctgtgccccagcagttttccatgagcaacatcctgtggaagccgtggctgcagccgtgctgcggacatttcccgttctgttcatgccacgaggatggggatggcaccccctgaatgccaggactgtgagagaggatccaggagagcctgactgcgttgcaaacaaaattctccaagcttggttctatcttcagcttccctttttgcaaggaacatgccctggactgagagtgggtccccactttctttctttctttctttcttttttgagacagagtgtcgctctgtccctcaggctggantgcantggcacgatctctgctcactgcaacctccgcctcccgggttcaagcgattttcctgcctcagcctcctgagtacccaggattacaggcaccaggcacctgccaccatgcctagctaatttttgtagttttngtngagacagggtttcaccatgttgcccaggctggtctcgcactcctgacctcaagtcatccacctgcctcngcctcccaaagtgctgggattacaggcacgagccactgcgcccatgtagggtttccctttcctgatttgtgaaataagactgtcccagtaggcacccactgatgcctcctcttcctcttctaaatctcagggttcgtcattgtgccaatgcccgatgttttcacccctccgtcttaaagcattgttgcaatttcatcacctagatgacataacagccttacaaaaggacagggaggagtgtctgttcctactctcacatagcggaggaaagttagagcctctcagtctctgtttatgaggactcattaatctcaaataattgatgcatttttcatacattagggtctctgtccatgtgtcttcctgatattgttatagaaatggcttcaggctgctggtaacagatgctgcggaaaaagaatgccttaaacaaagccaggcacggtgactcacacctgtaatcccagcactttgggaggctggggtgggaggatcacttgagcctaggagttagacacctacccagcctgagcaacacagtgagacctcatctctacaaaaaacaaataattagctagatgtcgtggcgcacagctgtggtctcagctacttaggaggctgaggcgggaggattatttgagcctgggaggtcaaaactgcaatgagctaagattgcactactgcactccgggctgggagacagagtaagaccctgccttaaaaaaaaaaaaaaaaaaatgccttaaagaaaataataagagaagggtgtgttctcttccaagtaatgagccgatcaaggggaagcaacccaaggctagcaggctcttttcaattcccagctctgccactcttagcatggcagagagttggcctcattatgccagtatggctgccacagtgtcagacatcacattccaggcagtggaaaggagaaagaaccaaagggcatccctttctcttgaagcagtccctgtgaggggggattatctggaagccccaacccaatttctgcttccaaccattatccatagaaacaactggaagttgagaagtgcagtcttttaggtgggcacctggctgccctgtatgaaaccagaattaggttggtcagcaggaaaacaagaaaacacttactgtgttgactgaggtttttgacgcatcgctttattgtcaaattaaacaactctatctcattctgcactgaaacacgtactaccattgcctataattggaaaatgatcctcagaggcacagaagatgccctgatggaaagtttgccccttgggcaaagagacagccatgggaaccttcagacatagagagagaaggtggcttttctccctacattcctcaaatagctaagatttggccagtgtgttttctaagtcaattctagtgtgtttcatcctcacctcttccctctgtggctttgatgatggaagtgtagtcctaacctactgcacagctgggaccccctgcccctagatcccaatactggggatgggaggaccttgcactattcccctcagtccatctatcgaggtctttgcaggaagcatactgggaattgaaacgagagcctaaatgacatctaagaaaggcagtgttcaataccaggtattaggtgaggatgggattctaaggacatcagtgggaggcagggagccaccttcagacctcagcatggaagcttccaagatccagaggaagaggcaacagcactgagagtcataggtagaagaatcatcacagccctgctaaccaggcagctgatgcccctctcccctggctccctgtgtccaaatcctacaggggcatctgttggctgaactcaacctgaagccaaagagaagatgagtggagagaggcaacatttatagagctcaggtttctagggctggagagggatctggagggacacacaggagacacctggcataaccaaaaaatgattaaaaaaaaaaaaaaaaagaaacatctatggagcatgggacacggggagtggaggcagctaaaagccatctcatctttcaccgtattcaacaagcccattataacaagtctttcacgctcaaccattcaaacaatcccaacaatcccagcctaagaatttcctggcatttgatgaaaatggctgtgggttttgctatctttaagctccctgggaagcaggatataagcccagggctggcaggctctttctagctacctgctcttgcacatagagtttgcctcatggttgcaagaaggctgccatagctccagatggcacatagacattccaggcagcaggaaaaaggaaggagcacttaaccgaaggaggtcagggagttggttagtctccacctgaagaagagagccatgaaccagcttcagttgactaacgggctcctgtgagtgcatctttggacttttctggaggttgaaatctagatgtggtatgtgtcttaaagcagccaccaactcctcccattaccttccaagtcctgcccttggatctgggctgagcctctgacttgcgttgaccaacagaatgcagtgaaagtgatgccgatactaccctccctgccctagacttgggatacctggcagctatattcttccattcctcaggacttgcaaaaacgggtctcagcatgccttcccagagccatgaggtgtttctttgcccattcattgatctgagaagtgagtgtaaggagtttaaatcaacctctgttctgtgctagttaaggtaataaagttgctgcagtccagggggtaggtacctgtggacggctctgcgaataggacagttgcatttcttgggaatcaagtgcatccctaggctggcagtgcagcagaaatactgaataaaatgtgacaaatctc

SEQ ID NO: 319143 - DNA, 2802 bp, Homo sapiens
ctgagagggcggaagccttggcactagcggcgcccgggcgcggagtgcgcagggcaaggtcctgcgctctgggccagcgctcggccatgcgatccgccgcgcggaggggacgcgccgcgcccgccgccagggactctttgccggtgctactgtttttatgcttgcttctgaagacgtgtgaacctaaaactgcaaatgcctttaaaccaaatatcctactgatcatggcggatgatctaggcactggggatctcggttgctacgggaacaatacactgagaacgccgaatattgaccagcttgcagaggaaggtgtgaggctcactcagcacctggcggccgccccgctctgcaccccaagccgagctgcattcctcacagggagacattccttcagatcaggcatggacgccagcaatggataccgggcccttcagtggaacgcaggctcaggtggactccctgagaacgaaaccacttttgcaagaatcttgcagcagcatggctatgcaaccggcctcataggaaaatggcaccagggtgtgaattgtgcatcccgcggggatcactgccaccaccccctgaaccacggatttgactatttctacggcatgcccttcacgctcacaaacgactgtgacccaggcaggccccccgaagtggacgccgccctgagggcgcagctctggggttacacccagttcctggcgctggggattctcaccctggctgccggccagacctgcggtttcttctctgtctccgcgagagcagtcaccggcatggccggcgtgggctgcctgtttttcatctcttggtactcctccttcgggtttgtgcgacgctggaactgtatcctgatgagaaaccatgacgtcacggagcaacccatggttctggagaaaacagcgagtcttatgctaaaggaagctgtttcctatattgaaagacacaagcatgggccatttctcctcttcctttctttgctgcatgtgcacattccccttgtgaccacgagtgcattcctggggaaaagtcagcatggcttatatggtgataatgtggaggagatggactggctcataggtaaggttcttaatgccatcgaagacaatggtttaaagaactcaacattcacgtatttcacctctgaccatggaggacatttagaggcaagagatggacacagccagttagggggatggaacggaatttacaaaggtgggaagggcatgggaggatgggaaggtgggatccgcgtgcccgggatcttccactggccgggggtgctcccggccggccgagtgattggagagcccacgagcctgatggacgtgttccctactgtggtccagctggtgggtggcgaggtgccccaggacagggtgattgatggccacagcctggtacccttgctgcagggagctgaggcacgctcggcacatgagttcctgtttcattactgtgggcagcatcttcacgcagcacgctggcaccagaaggacagtggaagcgtctggaaggttcattacacgaccccgcagttccaccccgagggagcgggggcctgctacggccgaggcgtctgcccatgctccggggagggcgtgacccatcacagaccccctttgctctttgacctctccagggacccctccgaggcacggcccctgacccccgactccgagcccctgtaccacgccgtgatagcaagggggcatctgttggctgaactcaacctgaagccaaagagaagatgagtggagagaggcaacatttatagagctcaggtttctagggctggagagggatctggagggacacacaggagacacctggcataaccaaaaaatgattaaaaaaaaaaaaaaaaagaaacatctatggagcatgggacacggggagtggaggcagctaaaagccatctcatctttcaccgtattcaacaagcccattataacaagtctttcacgctcaaccattcaaacaatcccaacaatcccagcctaagaatttcctggcatttgatgaaaatggctgtgggttttgctatctttaagctccctgggaagcaggatataagcccagggctggcaggctctttctagctacctgctcttgcacatagagtttgcctcatggttgcaagaaggctgccatagctccagatggcacatagacattccaggcagcaggaaaaaggaaggagcacttaaccgaaggaggtcagggagttggttagtctccacctgaagaagagagccatgaaccagcttcagttgactaacgggctcctgtgagtgcatctttggacttttctggaggttgaaatctagatgtggtatgtgtcttaaagcagccaccaactcctcccattaccttccaagtgagcccaactacacgatggagcctcttccctgcccttggatctgggctgagcctctgacttgcgttgaccaacagaatgcagtgaaagtgatgccgatactaccctccctgccctagacttgggatacctggcagctatattcttccattcctcaggacttgcaaaaacgggtctcagcatgccttcccagagccatgaggtgtttctttgcccattcattgatctgagaagtgagtgtaaggagtttaaatcaacctctgttctgtgctagttaaggtaataaagttgctgcagtccagggggtaggtacctgtggacggctctgcgaataggacagttgcatttcttgggaatcaagtgcatccctaggctggcagtgcagcagaaatactgaataaaatgtgacaaatctc

SEQ ID NO: 319144 - DNA, 1123 bp, Homo sapiens
cggcacgagggatgcccctgtaggatttggacacaggggcatctgttggctgaactcaacctgaagccaaagagaagatgagtggagagaggcaacatttatagagctcaggtttctagggctggagagggatctggagggacacacaggagacacctggcataaccaaaaaatgattaaaaaaaaaaaaaaaaagaaacatctatggagcatgggacacggggagtggaggcagctaaaagccatctcatctttcaccgtattcaacaagcccattataacaagtctttcacgctcaaccattcaaacaatcccaacaatcccagcctaagaatttcctggcatttgatgaaaatggctgtgggttttgctatctttaagctccctgggaagcaggatataagcccagggctggcaggctctttctagctacctgctcttgcacatagagtttgcctcatggttgcaagaaggctgccatagctccagatggcacatagacattccaggcagcaggaaaaaggaaggagcacttaaccgaaggaggtcagggagttggttagtctccacctgaagaagagagccatgaaccagcttcagttgactaacgggctcctgtgagtgcatctttggacttttctggaggttgaaatctagatgtggtatgtgtcttaaagcagccaccaactcctcccattaccttccaagtgagcccaactacacgatggagcctcttccctgcccttggatctgggctgagcctctgacttgcgttgaccaacagaatgcagtgaaagtgatgccgatactaccctccctgccctagacttgggatacctggcagctatattcttccattcctcaggacttgcaaaaacgggtctcagcatgccttcccagagccatgaggtgtttctttgcccattcattgatctgagaagtgagtgtaaggagtttaaatcaacctctgttctgtgctagttaaggtaataaagttgctgcagtccagggggtaggtacctgtggacggctctgcgaataggacagttgcatttcttgggaatcaagtgcatccctaggctggcagtgcagcagaaatactgaataaaatgtgacaaatctc

SEQ ID NO: 319145 - DNA, 1244 bp, Homo sapiens
  misc_feature (60)..(60): n is a, c, g, or t
tacggcacctacatattagctagctttgctaacctcaaaatcagaccgagtgcgataaangcttctttaaaaggaatatacacatgtatttgtacacacacacacacagtgcagctgatgcccctctcccctggctccctgtgtccaaatcctacaggggcatctgttggctgaactcaacctgaagccaaagagaagatgagtggagagaggcaacatttatagagctcaggtttctagggctggagagggatctggagggacacacaggagacacctggcataaccaaaaaatgattaaaaaaaaaaaaaaaaagaaacatctatggagcatgggacacggggagtggaggcagctaaaagccatctcatctttcaccgtattcaacaagcccattataacaagtctttcacgctcaaccattcaaacaatcccaacaatcccagcctaagaatttcctggcatttgatgaaaatggctgtgggttttgctatctttaagctccctgggaagcaggatataagcccagggctggcaggctctttctagctacctgctcttgcacatagagtttgcctcatggttgcaagaaggctgccatagctccagatggcacatagacattccaggcagcaggaaaaaggaaggagcacttaaccgaaggaggtcagggagttggttagtctccacctgaagaagagagccatgaaccagcttcagttgactaacgggctcctgtgagtgcatctttggacttttctggaggttgaaatctagatgtggtatgtgtcttaaagcagccaccaactcctcccattaccttccaagtgagcccaactacacgatggagcctcttccctgcccttggatctgggctgagcctctgacttgcgttgaccaacagaatgcagtgaaagtgatgccgatactaccctccctgccctagacttgggatacctggcagctatattcttccattcctcaggacttgcaaaaacgggtctcagcatgccttcccagagccatgaggtgtttctttgcccattcattgatctgagaagtgagtgtaaggagtttaaatcaacctctgttctgtgctagttaaggtaataaagttgctgcagtccagggggtaggtacctgtggacggctctgcgaataggacagttgcatttcttgggaatcaagtgcatccctaggctggcagtgcagcagaaatactgaataaaatgtgacaaatctc

SEQ ID NO: 319146 - DNA, 654 bp, Homo sapiens
cttgaaggccactcatactcatagtaagcagaatcttcaataatactagagcttaaatgggagagagtcatacagtagatgcttgaaaatgttcaaataaatgaaggccagggggctggatgcagtgactcacacctgtaatcctagcactttgggaggccaaagtgggaggatctcttgagcccaagagtttgagaccagccctggcaatcaagcttaagcttgattgcccttccaagtgagcccaactacacgatggagcctcttccctgcccttggatctgggctgagcctctgacttgcgttgaccaacagaatgcagtgaaagtgatgccgatactaccctccctgccctagacttgggatacctggcagctatattcttccattcctcaggacttgcaaaaacgggtctcagcatgccttcccagagccatgaggtgtttctttgcccattcattgatctgagaagtgagtgtaaggagtttaaatcaacctctgttctgtgctagttaaggtaataaagttgctgcagtccagggggtaggtacctgtggacggctctgcgaataggacagttgcatttcttgggaatcaagtgcatccctaggctggcagtgcagcagaaatactgaataaaatgtgacaaatctc

SEQ ID NO: 319147 - DNA, 766 bp, Homo sapiens
ctgagagggcggaagccttggcactagcggcgcccgggcgcggagtgcgcagggcaaggtcctgcgctctgggccagcgctcggccatgcgatccgccgcgcggaggggacgcgccgcgcccgccgccagggactctttgccggtgctactgtttttatgcttgcttctgaagacgtgtgaacctaaaactgcaaatgcctttaaaccaaatatcctactgatcatggcggatgatctaggcactggggatctcggttgctacgggaacaatacactgagaacgccgaatattgaccagcttgcagaggaaggtgtgaggctcactcagcacctggcggccgccccgctctgcaccccaagccgagctgcattcctcacagggagacattccttcagatcaggcatggacgccagcaatggataccgggcccttcagtggaacgcaggctcaggtggactccctgagaacgaaaccacttttgcaagaatcttgcagcagcatggctatgcaaccggcctcataggtgtggatatgtgggagcctcacattatacggtggttgggaatattcgtgataaaaaagatcccaggccaggcgtggtggcgcacgcctgtagtcccagctacttaggaggctgaggcaggagaatcgcttgaacccgggaagcggaggttgcagggagccgagatcacaccactgcactccagtctaggtgacaaagcgagactctgtctcaaagaaaaaaaaaacaaaaagatcccgtt

SEQ ID NO: 319148 - DNA, 4224 bp, Homo sapiens
  misc_feature (1117)..(1117): n is a, c, g, or t
  misc_feature (1122)..(1122): n is a, c, g, or t
  misc_feature (1253)..(1253): n is a, c, g, or t
  misc_feature (1256)..(1256): n is a, c, g, or t
  misc_feature (1325)..(1325): n is a, c, g, or t
ctgagagggcggaagccttggcactagcggcgcccgggcgcggagtgcgcagggcaaggtcctgcgctctgggccagcgctcggccatgcgatccgccgcgcggaggggacgcgccgcgcccgccgccagggagctgaggcacgctcggcacatgagttcctgtttcattactgtgggcagcatcttcacgcagcacgctggcaccagaaggacaaaaggtagtagatcgacgctgaacagtttcaacacaggggaaaggggaagaattaaggaacctctatgattctgatttctgaaagcagccacagtgagcgctctgcaatgagtccctttgcctggggcatgcaatgcagagacacaaacggacacacatgggcgcacgcgcgcacacacacatgctctgactttgcaagctgaaggctgtgattgtgtggactgcctcgtgtccctcctccttttcactgaatagggaggttcatgctgataccacagggccgacacctgcgttctgcgttcacacctgcgtggatttctgccaccctgactcccttcttgtctgcatccaggtggaagcgtctggaaggttcattacacgaccccgcagttccaccccgagggagcgggggcctgctacggccgaggcgtctgcccatgctccggggagggcgtgacccatcacagaccccctttgctctttgacctctccagggacccctccgaggcacggcccctgacccccgactccgagcccctgtaccacgccgtgatagcaagggtaggtgccgcggtgtcggagcatcggcagaccctgagtcctgtgccccagcagttttccatgagcaacatcctgtggaagccgtggctgcagccgtgctgcggacatttcccgttctgttcatgccacgaggatggggatggcaccccctgaatgccaggactgtgagagaggatccaggagagcctgactgcgttgcaaacaaaattctccaagcttggttctatcttcagcttccctttttgcaaggaacatgccctggactgagagtgggtccccactttctttctttctttctttcttttttgagacagagtgtcgctctgtccctcaggctggantgcantggcacgatctctgctcactgcaacctccgcctcccgggttcaagcgattttcctgcctcagcctcctgagtacccaggattacaggcaccaggcacctgccaccatgcctagctaatttttgtagttttngtngagacagggtttcaccatgttgcccaggctggtctcgcactcctgacctcaagtcatccacctgcctcngcctcccaaagtgctgggattacaggcacgagccactgcgcccatgtagggtttccctttcctgatttgtgaaataagactgtcccagtaggcacccactgatgcctcctcttcctcttctaaatctcagggttcgtcattgtgccaatgcccgatgttttcacccctccgtcttaaagcattgttgcaatttcatcacctagatgacataacagccttacaaaaggacagggaggagtgtctgttcctactctcacatagcggaggaaagttagagcctctcagtctctgtttatgaggactcattaatctcaaataattgatgcatttttcatacattagggtctctgtccatgtgtcttcctgatattgttatagaaatggcttcaggctgctggtaacagatgctgcggaaaaagaatgccttaaacaaagccaggcacggtgactcacacctgtaatcccagcactttgggaggctggggtgggaggatcacttgagcctaggagttagacacctacccagcctgagcaacacagtgagacctcatctctacaaaaaacaaataattagctagatgtcgtggcgcacagctgtggtctcagctacttaggaggctgaggcgggaggattatttgagcctgggaggtcaaaactgcaatgagctaagattgcactactgcactccgggctgggagacagagtaagaccctgccttaaaaaaaaaaaaaaaaaaatgccttaaagaaaataataagagaagggtgtgttctcttccaagtaatgagccgatcaaggggaagcaacccaaggctagcaggctcttttcaattcccagctctgccactcttagcatggcagagagttggcctcattatgccagtatggctgccacagtgtcagacatcacattccaggcagtggaaaggagaaagaaccaaagggcatccctttctcttgaagcagtccctgtgaggggggattatctggaagccccaacccaatttctgcttccaaccattatccatagaaacaactggaagttgagaagtgcagtcttttaggtgggcacctggctgccctgtatgaaaccagaattaggttggtcagcaggaaaacaagaaaacacttactgtgttgactgaggtttttgacgcatcgctttattgtcaaattaaacaactctatctcattctgcactgaaacacgtactaccattgcctataattggaaaatgatcctcagaggcacagaagatgccctgatggaaagtttgccccttgggcaaagagacagccatgggaaccttcagacatagagagagaaggtggcttttctccctacattcctcaaatagctaagatttggccagtgtgttttctaagtcaattctagtgtgtttcatcctcacctcttccctctgtggctttgatgatggaagtgtagtcctaacctactgcacagctgggaccccctgcccctagatcccaatactggggatgggaggaccttgcactattcccctcagtccatctatcgaggtctttgcaggaagcatactgggaattgaaacgagagcctaaatgacatctaagaaaggcagtgttcaataccaggtattaggtgaggatgggattctaaggacatcagtgggaggcagggagccaccttcagacctcagcatggaagcttccaagatccagaggaagaggcaacagcactgagagtcataggtagaagaatcatcacagccctgctaaccaggcagctgatgcccctctcccctggctccctgtgtccaaatcctacaggggcatctgttggctgaactcaacctgaagccaaagagaagatgagtggagagaggcaacatttatagagctcaggtttctagggctggagagggatctggagggacacacaggagacacctggcataaccaaaaaatgattaaaaaaaaaaaaaaaaagaaacatctatggagcatgggacacggggagtggaggcagctaaaagccatctcatctttcaccgtattcaacaagcccattataacaagtctttcacgctcaaccattcaaacaatcccaacaatcccagcctaagaatttcctggcatttgatgaaaatggctgtgggttttgctatctttaagctccctgggaagcaggatataagcccagggctggcaggctctttctagctacctgctcttgcacatagagtttgcctcatggttgcaagaaggctgccatagctccagatggcacatagacattccaggcagcaggaaaaaggaaggagcacttaaccgaaggaggtcagggagttggttagtctccacctgaagaagagagccatgaaccagcttcagttgactaacgggctcctgtgagtgcatctttggacttttctggaggttgaaatctagatgtggtatgtgtcttaaagcagccaccaactcctcccattaccttccaagtgagcccaactacacgatggagcctcttccctgcccttggatctgggctgagcctctgacttgcgttgaccaacagaatgcagtgaaagtgatgccgatactaccctccctgccctagacttgggatacctggcagctatattcttccattcctcaggacttgcaaaaacgggtctcagcatgccttcccagagccatgaggtgtttctttgcccattcattgatctgagaagtgagtgtaaggagtttaaatcaacctctgttctgtgctagttaaggtaataaagttgctgcagtccagggggtaggtacctgtggacggctctgcgaataggacagttgcatttcttgggaatcaagtgcatccctaggctggcagtgcagcagaaatactgaataaaatgtgacaaatctc

SEQ ID NO: 319149 - DNA, 4959 bp, Homo sapiens
  misc_feature (2056)..(2056): n is a, c, g, or t
  misc_feature (2061)..(2061): n is a, c, g, or t
  misc_feature (2192)..(2192): n is a, c, g, or t
  misc_feature (2195)..(2195): n is a, c, g, or t
  misc_feature (2264)..(2264): n is a, c, g, or t
ctgagagggcggaagccttggcactagcggcgcccgggcgcggagtgcgcagggcaaggtcctgcgctctgggccagcgctcggccatgcgatccgccgcgcggaggggacgcgccgcgcccgccgccagggactctttgccggtgctactgtttttatgcttgcttctgaagacgtgtgaacctaaaactgcaaatgcctttaaaccaaatatcctactgatcatggcggatgatctaggcactggggatctcggttgctacgggaacaatacactgagaacgccgaatattgaccagcttgcagaggaaggtgtgaggctcactcagcacctggcggccgccccgctctgcaccccaagccgagctgcattcctcacagggagacattccttcagatcaggcatggacgccagcaatggataccgggcccttcagtggaacgcaggctcaggtggactccctgagaacgaaaccacttttgcaagaatcttgcagcagcatggctatgcaaccggcctcataggaaaatggcaccagggtgtgaattgtgcatcccgcggggatcactgccaccaccccctgaaccacggatttgactatttctacggcatgcccttcacgctcacaaacgactgtgacccaggcaggccccccgaagtggacgccgccctgagggcgcagctctggggttacacccagttcctggcgctggggattctcaccctggctgccggccagacctgcggtttcttctctgtctccgcgagagcagtcaccggcatggccggcgtgggctgcctgtttttcatctcttggtactcctccttcgggtttgtgcgacgctggaactgtatcctgatgagaaaccatgacgtcacggagcaacccatggttctggagaaaacagcgagtcttatgctaaaggaagctgtttcctatattgaaagacacaagcatgggccatttctcctcttcctttctttgctgcatgtgcacattccccttgtgaccacgagtgcattcctggggaaaagtcagcatggcttatatggtgataatgtggaggagatggactggctcataggtaaggttcttaatgccatcgaagacaatggtttaaagaactcaacattcacgtatttcacctctgaccatggaggacatttagaggcaagagatggacacagccagttagggggatggaacggaatttacaaaggtgggaagggcatgggaggatgggaaggtgggatccgcgtgcccgggatcttccactggccgggggtgctcccggccggccgagtgattggagagcccacgagcctgatggacgtgttccctactgtggtccagctggtgggtggcgaggtgccccaggacagggtgattgatggccacagcctggtacccttgctgcagggagctgaggcacgctcggcacatgagttcctgtttcattactgtgggcagcatcttcacgcagcacgctggcaccagaaggacagtggaagcgtctggaaggttcattacacgaccccgcagttccaccccgagggagcgggggcctgctacggccgaggcgtctgcccatgctccggggagggcgtgacccatcacagaccccctttgctctttgacctctccagggacccctccgaggcacggcccctgacccccgactccgagcccctgtaccacgccgtgatagcaagggtaggtgccgcggtgtcggagcatcggcagaccctgagtcctgtgccccagcagttttccatgagcaacatcctgtggaagccgtggctgcagccgtgctgcggacatttcccgttctgttcatgccacgaggatggggatggcaccccctgaatgccaggactgtgagagaggatccaggagagcctgactgcgttgcaaacaaaattctccaagcttggttctatcttcagcttccctttttgcaaggaacatgccctggactgagagtgggtccccactttctttctttctttctttcttttttgagacagagtgtcgctctgtccctcaggctggantgcantggcacgatctctgctcactgcaacctccgcctcccgggttcaagcgattttcctgcctcagcctcctgagtacccaggattacaggcaccaggcacctgccaccatgcctagctaatttttgtagttttngtngagacagggtttcaccatgttgcccaggctggtctcgcactcctgacctcaagtcatccacctgcctcngcctcccaaagtgctgggattacaggcacgagccactgcgcccatgtagggtttccctttcctgatttgtgaaataagactgtcccagtaggcacccactgatgcctcctcttcctcttctaaatctcagggttcgtcattgtgccaatgcccgatgttttcacccctccgtcttaaagcattgttgcaatttcatcacctagatgacataacagccttacaaaaggacagggaggagtgtctgttcctactctcacatagcggaggaaagttagagcctctcagtctctgtttatgaggactcattaatctcaaataattgatgcatttttcatacattagggtctctgtccatgtgtcttcctgatattgttatagaaatggcttcaggctgctggtaacagatgctgcggaaaaagaatgccttaaacaaagccaggcacggtgactcacacctgtaatcccagcactttgggaggctggggtgggaggatcacttgagcctaggagttagacacctacccagcctgagcaacacagtgagacctcatctctacaaaaaacaaataattagctagatgtcgtggcgcacagctgtggtctcagctacttaggaggctgaggcgggaggattatttgagcctgggaggtcaaaactgcaatgagctaagattgcactactgcactccgggctgggagacagagtaagaccctgccttaaaaaaaaaaaaaaaaaaatgccttaaagaaaataataagagaagggtgtgttctcttccaagtaatgagccgatcaaggggaagcaacccaaggctagcaggctcttttcaattcccagctctgccactcttagcatggcagagagttggcctcattatgccagtatggctgccacagtgtcagacatcacattccaggcagtggaaaggagaaagaaccaaagggcatccctttctcttgaagcagtccctgtgaggggggattatctggaagccccaacccaatttctgcttccaaccattatccatagaaacaactggaagttgagaagtgcagtcttttaggtgggcacctggctgccctgtatgaaaccagaattaggttggtcagcaggaaaacaagaaaacacttactgtgttgactgaggtttttgacgcatcgctttattgtcaaattaaacaactctatctcattctgcactgaaacacgtactaccattgcctataattggaaaatgatcctcagaggcacagaagatgccctgatggaaagtttgccccttgggcaaagagacagccatgggaaccttcagacatagagagagaaggtggcttttctccctacattcctcaaatagctaagatttggccagtgtgttttctaagtcaattctagtgtgtttcatcctcacctcttccctctgtggctttgatgatggaagtgtagtcctaacctactgcacagctgggaccccctgcccctagatcccaatactggggatgggaggaccttgcactattcccctcagtccatctatcgaggtctttgcaggaagcatactgggaattgaaacgagagcctaaatgacatctaagaaaggcagtgttcaataccaggtattaggtgaggatgggattctaaggacatcagtgggaggcagggagccaccttcagacctcagcatggaagcttccaagatccagaggaagaggcaacagcactgagagtcataggtagaagaatcatcacagccctgctaaccaggcagctgatgcccctctcccctggctccctgtgtccaaatcctacaggggcatctgttggctgaactcaacctgaagccaaagagaagatgagtggagagaggcaacatttatagagctcaggtttctagggctggagagggatctggagggacacacaggagacacctggcataaccaaaaaatgattaaaaaaaaaaaaaaaaagaaacatctatggagcatgggacacggggagtggaggcagctaaaagccatctcatctttcaccgtattcaacaagcccattataacaagtctttcacgctcaaccattcaaacaatcccaacaatcccagcctaagaatttcctggcatttgatgaaaatggctgtgggttttgctatctttaagctccctgggaagcaggatataagcccagggctggcaggctctttctagctacctgctcttgcacatagagtttgcctcatggttgcaagaaggctgccatagctccagatggcacatagacattccaggcagcaggaaaaaggaaggagcacttaaccgaaggaggtcagggagttggttagtctccacctgaagaagagagccatgaaccagcttcagttgactaacgggctcctgtgagtgcatctttggacttttctggaggttgaaatctagatgtggtatgtgtcttaaagcagccaccaactcctcccattaccttccaagtgagcccaactacacgatggagcctcttccctgcccttggatctgggctgagcctctgacttgcgttgaccaacagaatgcagtgaaagtgatgccgatactaccctccctgccctagacttgggatacctttatagagctcaggtttctagggctggagagggatctggagggacacacaggagacacctggcataaccaaaaaatgatt

SEQ ID NO: 319150 - DNA, 4300 bp, Homo sapiens
  misc_feature (2056)..(2056): n is a, c, g, or t
  misc_feature (2061)..(2061): n is a, c, g, or t
  misc_feature (2192)..(2192): n is a, c, g, or t
  misc_feature (2195)..(2195): n is a, c, g, or t
  misc_feature (2264)..(2264): n is a, c, g, or t
ctgagagggcggaagccttggcactagcggcgcccgggcgcggagtgcgcagggcaaggtcctgcgctctgggccagcgctcggccatgcgatccgccgcgcggaggggacgcgccgcgcccgccgccagggactctttgccggtgctactgtttttatgcttgcttctgaagacgtgtgaacctaaaactgcaaatgcctttaaaccaaatatcctactgatcatggcggatgatctaggcactggggatctcggttgctacgggaacaatacactgagaacgccgaatattgaccagcttgcagaggaaggtgtgaggctcactcagcacctggcggccgccccgctctgcaccccaagccgagctgcattcctcacagggagacattccttcagatcaggcatggacgccagcaatggataccgggcccttcagtggaacgcaggctcaggtggactccctgagaacgaaaccacttttgcaagaatcttgcagcagcatggctatgcaaccggcctcataggaaaatggcaccagggtgtgaattgtgcatcccgcggggatcactgccaccaccccctgaaccacggatttgactatttctacggcatgcccttcacgctcacaaacgactgtgacccaggcaggccccccgaagtggacgccgccctgagggcgcagctctggggttacacccagttcctggcgctggggattctcaccctggctgccggccagacctgcggtttcttctctgtctccgcgagagcagtcaccggcatggccggcgtgggctgcctgtttttcatctcttggtactcctccttcgggtttgtgcgacgctggaactgtatcctgatgagaaaccatgacgtcacggagcaacccatggttctggagaaaacagcgagtcttatgctaaaggaagctgtttcctatattgaaagacacaagcatgggccatttctcctcttcctttctttgctgcatgtgcacattccccttgtgaccacgagtgcattcctggggaaaagtcagcatggcttatatggtgataatgtggaggagatggactggctcataggtaaggttcttaatgccatcgaagacaatggtttaaagaactcaacattcacgtatttcacctctgaccatggaggacatttagaggcaagagatggacacagccagttagggggatggaacggaatttacaaaggtgggaagggcatgggaggatgggaaggtgggatccgcgtgcccgggatcttccactggccgggggtgctcccggccggccgagtgattggagagcccacgagcctgatggacgtgttccctactgtggtccagctggtgggtggcgaggtgccccaggacagggtgattgatggccacagcctggtacccttgctgcagggagctgaggcacgctcggcacatgagttcctgtttcattactgtgggcagcatcttcacgcagcacgctggcaccagaaggacagtggaagcgtctggaaggttcattacacgaccccgcagttccaccccgagggagcgggggcctgctacggccgaggcgtctgcccatgctccggggagggcgtgacccatcacagaccccctttgctctttgacctctccagggacccctccgaggcacggcccctgacccccgactccgagcccctgtaccacgccgtgatagcaagggtaggtgccgcggtgtcggagcatcggcagaccctgagtcctgtgccccagcagttttccatgagcaacatcctgtggaagccgtggctgcagccgtgctgcggacatttcccgttctgttcatgccacgaggatggggatggcaccccctgaatgccaggactgtgagagaggatccaggagagcctgactgcgttgcaaacaaaattctccaagcttggttctatcttcagcttccctttttgcaaggaacatgccctggactgagagtgggtccccactttctttctttctttctttcttttttgagacagagtgtcgctctgtccctcaggctggantgcantggcacgatctctgctcactgcaacctccgcctcccgggttcaagcgattttcctgcctcagcctcctgagtacccaggattacaggcaccaggcacctgccaccatgcctagctaatttttgtagttttngtngagacagggtttcaccatgttgcccaggctggtctcgcactcctgacctcaagtcatccacctgcctcngcctcccaaagtgctgggattacaggcacgagccactgcgcccatgtagggtttccctttcctgatttgtgaaataagactgtcccagtaggcacccactgatgcctcctcttcctcttctaaatctcagggttcgtcattgtgccaatgcccgatgttttcacccctccgtcttaaagcattgttgcaatttcatcacctagatgacataacagccttacaaaaggacagggaggagtgtctgttcctactctcacatagcggaggaaagttagagcctctcagtctctgtttatgaggactcattaatctcaaataattgatgcatttttcatacattagggtctctgtccatgtgtcttcctgatattgttatagaaatggcttcaggctgctggtaacagatgctgcggaaaaagaatgccttaaacaaagccaggcacggtgactcacacctgtaatcccagcactttgggaggctggggtgggaggatcacttgagcctaggagttagacacctacccagcctgagcaacacagtgagacctcatctctacaaaaaacaaataattagctagatgtcgtggcgcacagctgtggtctcagctacttaggaggctgaggcgggaggattatttgagcctgggaggtcaaaactgcaatgagctaagattgcactactgcactccgggctgggagacagagtaagaccctgccttaaaaaaaaaaaaaaaaaaatgccttaaagaaaataataagagaagggtgtgttctcttccaagtaatgagccgatcaaggggaagcaacccaaggctagcaggctcttttcaattcccagctctgccactcttagcatggcagagagttggcctcattatgccagtatggctgccacagtgtcagacatcacattccaggcagtggaaaggagaaagaaccaaagggcatccctttctcttgaagcagtccctgtgaggggggattatctggaagccccaacccaatttctgcttccaaccattatccatagaaacaactggaagttgagaagtgcagtcttttaggtgggcacctggctgccctgtatgaaaccagaattaggttggtcagcaggaaaacaagaaaacacttactgtgttgactgaggtttttgacgcatcgctttattgtcaaattaaacaactctatctcattctgcactgaaacacgtactaccattgcctataattggaaaatgatcctcagaggcacagaagatgccctgatggaaagtttgccccttgggcaaagagacagccatgggaaccttcagacatagagagagaaggtggcttttctccctacattcctcaaatagctaagatttggccagtgtgttttctaagtcaattctagtgtgtttcatcctcacctcttccctctgtggctttgatgatggaagtgtagtcctaacctactgcacagctgggaccccctgcccctagatcccaatactggggatgggaggaccttgcactattcccctcagtccatctatcgaggtctttgcaggaagcatactgggaattgaaacgagagcctaaatgacatctaagaaaggcagtgttcaataccaggtattaggtgaggatgggattctaaggacatcagtgggaggcagggagccaccttcagacctcagcatggaagcttccaagatccagaggaagaggcaacagcactgagagtcataggtagaagaatcatcacagccctgctaaccaggcagctgatgcccctctcccctggctccctgtgtccaaatcctacaggggcatctgttggctgaactcaacctgaagcccacagggagatgacaggcaagacgcttacaataagacggcccaggcctagagggcatgagaggcagatcgagtggagagacaccgacacaccgggcggaaccacagcaatcgtacttgacatgaaaagacacaataaagacaacatcgtatcgagcagtgaacacagggagtggaggcacattgaaacatct

SEQ ID NO: 319151 - DNA, 2116 bp, Homo sapiens
ctgagagggcggaagccttggcactagcggcgcccgggcgcggagtgcgcagggcaaggtcctgcgctctgggccagcgctcggccatgcgatccgccgcgcggaggggacgcgccgcgcccgccgccagggactctttgccggtgctactgtttttatgcttgcttctgaagacgtgtgaacctaaaactgcaaatgcctttaaaccaaatatcctactgatcatggcggatgatctaggcactggggatctcggttgctacgggaacaatacactgagaacgccgaatattgaccagcttgcagaggaaggtgtgaggctcactcagcacctggcggccgccccgctctgcaccccaagccgagctgcattcctcacagggagacattccttcagatcaggcatggacgccagcaatggataccgggcccttcagtggaacgcaggctcaggtggactccctgagaacgaaaccacttttgcaagaatcttgcagcagcatggctatgcaaccggcctcataggaaaatggcaccagggtgtgaattgtgcatcccgcggggatcactgccaccaccccctgaaccacggatttgactatttctacggcatgcccttcacgctcacaaacgactgtgacccaggcaggccccccgaagtggacgccgccctgagggcgcagctctggggttacacccagttcctggcgctggggattctcaccctggctgccggccagacctgcggtttcttctctgtctccgcgagagcagtcaccggcatggccggcgtgggctgcctgtttttcatctcttggtactcctccttcgggtttgtgcgacgctggaactgtatcctgatgagaaaccatgacgtcacggagcaacccatggttctggagaaaacagcgagtcttatgctaaaggaagctgtttcctatattgaaagccagtgacttcatgtcatcatcagaagttaccgaaagtgaagcgataaagttaatgttcaggacaatgcagagacgctgtcttccttctatggccttcaagaaaccctggagaggaccagtgaggctgcagattcttaaaagagcatagacattaaaattcttgcagaatctgaatgtgtctcctgagacaagcatcgtgatagagttcacagtcttaaaagtctgcattttcaggtggggcaaggtggctcatgcctttaatcccagcattttgggaggctaaggcagggagatggcttgagaccaggagttcaagaccagcctgggcaacatagtgagacgcccccccccccatctctacaaaaaatttaaaaaattagccatggtggtgtgcacctgtggtcccagctactccagaggctgaggtgggaagatcatttgagcccaggaggctgaggctgcaatgactgataattattgcaccactgaactccagcctgggccacatagcaagaccctgtctccaaaaaaaaaaaaaaaaaaaaaaaggaataaaggacgcagaatagggagaaaaacttctctcatatcatttatttggtccttcagtatttctgaatacttagtctaatttggcacaaaatcaactgtattagtccattcttgcaaagaaatacctgagactgggtattttataaggaaaagaggttggattggctcacgttctgcagctgcacagaagcatggcagcatctgcttctgggagacctcggggagtttttgctcatggtggaaggcgaagggggagcaggcgtcttgcggcaggagaaggaccaagagaggagaggaagagccgcacacttttaaacaaccagatctcgtgagaagctactccctccgcagcaccaagcgggggatggtgctcaaccattcatgagaactctgtccccatcattcagtcacctccccccaggccccaccgccgattctgaggatgacaattccacatgagatttgggcggggacacacatccaaactatattgtcaaccttctacacagccaatgacttaacagcctcattagaagttacagaaactaaagcaataaagttcggacaatgcagagaggtcaccttccttctatggccttgaagaaaccctggag

SEQ ID NO: 319152 - DNA, 458 bp, Homo sapiens
tgtaaactagggcatgtactacactaaatgaagatcaccatgaattctacatgatcatctttatttttttctttacagtttagtcatccaacaagaagaaatatgaaattccagcaataagaaatgaacaaaagattggagctgaagacctaaagtgcttgctttttgcccgttgaccagataaatagaactatctgcattatctatgcagcatggggtttttattatttttacctaaagacgtctctttttggtaataacaaacgtgttttttaaaaaagcctggtttttctcaatacgcctttaaaggtttttaaattgtttcatatctggtcaagttgagatttttaagaacttcatttttaatttgtaataaaagtttacaacttgattttttcaaaaaagtcaacaaactgcaagcacctgttaataaaggtcttaaataattgtctttgtgt

SEQ ID NO: 319153 - DNA, 364 bp, Homo sapiens
  misc_feature (8)..(8): n is a, c, g, or t
  misc_feature (113)..(114): n is a, c, g, or t
  misc_feature (333)..(333): n is a, c, g, or t
cggacctnatttccttctttatgccgtcctctctaggctgtctttggcgaggagggccccgcggaatcgtggtctatatccccgatacatattctgcctcactggtctacctnnttctcctgcaccctggttgcagccacctcaacgtcggtaccgccgcaacttcaattaccgacgcagacgcccagaaaaccctaaaccacaagatggcaaagagacaaaagcagccgatccaccagctgagaattcgtccgctcccgaggctgagcagggcggggctgagtaaatgccggcttaccatctctaccatcatccggtttagtcatccataangaaggaaatagagatcctctagaacagctat

SEQ ID NO: 319154 - DNA, 1180 bp, Homo sapiens
  misc_feature (49)..(49): n is a, c, g, or t
ctctatgaggaccccggtcaattgctacacccctaaggaagatgtattngtacaccagactgccataaagaagaataaccccaggaagtaccttcgcagtgtaggagatggagagactgtggagtttgatgttgttgaaggagaaaagggtgcggaggcagcaaatgttacaggtcctggtggtgttccagttcaaggcagtaaatatgcagcagaccgtaaccattatagacgctatccacgtcgtaggggtcctccacgcaattaccagcaaaattaccagaatagtgagagtggggaaaagaacgagggatcggagagtgctcccgaaggccaggcccaacaacgccggccctaccgcaggcgaaggttcccaccttactacatgcggagaccctatgggcgtcgaccacagtattccaaccctcctgtgcagggagaagtgatggagggtgctgacaaccagggtgcaggagaacaaggtagaccagtgaggcagaatatgtatcggggatatagaccacgattccgcaggggccctcctcgccaaagacagcctagagaggacggcaatgaagaagataaagaaaatcaaggagatgagacccaaggtcagcagccacctcaacgtcggtaccgccgcaacttcaattaccgacgcagacgcccagaaaaccctaaaccacaagatggcaaagagacaaaagcagccgatccaccagctgagaattcgtccgctcccgaggctgagcagggcggggctgagtaaatgccggcttaccatctctaccatcatccggtttagtcatccaacaagaagaaatatgaaattccagcaataagaaatgaacaaaagattggagctgaagacctaaagtgcttgctttttgcccgttgaccagataaatagaactatctgcattatctatgcagcatggggtttttattatttttacctaaagacgtctctttttggtaataacaaacgtgttttttaaaaaagcctggtttttctcaatacgcctttaaaggtttttaaattgtttcatatctggtcaagttgagatttttaagaacttcatttttaatttgtaataaaagtttacaacttgattttttcaaaaaagtcaacaaactgcaagcacctgttaataaaggtcttaaataattgtctttgtgt

SEQ ID NO: 319155 - DNA, 1148 bp, Homo sapiens
tttggaatgtgcgatctcgtcactagactgccataaagaagaataaccccaggaagtaccttcgcagtgtaggagatggagagactgtggagtttgatgttgttgaaggagaaaagggtgcggaggcagcaaatgttacaggtcctggtggtgttccagttcaaggcagtaaatatgcagcagaccgtaaccattatagacgctatccacgtcgtaggggtcctccacgcaattaccagcaaaattaccagaatagtgagagtggggaaaagaacgagggatcggagagtgctcccgaaggccaggcccaacaacgccggccctaccgcaggcgaaggttcccaccttactacatgcggagaccctatgggcgtcgaccacagtattccaaccctcctgtgcagggagaagtgatggagggtgctgacaaccagggtgcaggagaacaaggtagaccagtgaggcagaatatgtatcggggatatagaccacgattccgcaggggccctcctcgccaaagacagcctagagaggacggcaatgaagaagataaagaaaatcaaggagatgagacccaaggtcagcagccacctcaacgtcggtaccgccgcaacttcaattaccgacgcagacgcccagaaaaccctaaaccacaagatggcaaagagacaaaagcagccgatccaccagctgagaattcgtccgctcccgaggctgagcagggcggggctgagtaaatgccggcttaccatctctaccatcatccggtttagtcatccaacaagaagaaatatgaaattccagcaataagaaatgaacaaaagattggagctgaagacctaaagtgcttgctttttgcccgttgaccagataaatagaactatctgcattatctatgcagcatggggtttttattatttttacctaaagacgtctctttttggtaataacaaacgtgttttttaaaaaagcctggtttttctcaatacgcctttaaaggtttttaaattgtttcatatctggtcaagttgagatttttaagaacttcatttttaatttgtaataaaagtttacaacttgattttttcaaaaaagtcaacaaactgcaagcacctgttaataaaggtcttaaataattgtctttgtgt

SEQ ID NO: 319156 - DNA, 976 bp, Homo sapiens
tatagctgttctagaggatcccattaggcgcgttctgcgtcgtaggggtcctccacgcaattaccagcaaaattaccagaatagtgagagtggggaaaagaacgagggatcggagagtgctcccgaaggccaggcccaacaacgccggccctaccgcaggcgaaggttcccaccttactacatgcggagaccctatgggcgtcgaccacagtattccaaccctcctgtgcagggagaagtgatggagggtgctgacaaccagggtgcaggagaacaaggtagaccagtgaggcagaatatgtatcggggatatagaccacgattccgcaggggccctcctcgccaaagacagcctagagaggacggcaatgaagaagataaagaaaatcaaggagatgagacccaaggtcagcagccacctcaacgtcggtaccgccgcaacttcaattaccgacgcagacgcccagaaaaccctaaaccacaagatggcaaagagacaaaagcagccgatccaccagctgagaattcgtccgctcccgaggctgagcagggcggggctgagtaaatgccggcttaccatctctaccatcatccggtttagtcatccaacaagaagaaatatgaaattccagcaataagaaatgaacaaaagattggagctgaagacctaaagtgcttgctttttgcccgttgaccagataaatagaactatctgcattatctatgcagcatggggtttttattatttttacctaaagacgtctctttttggtaataacaaacgtgttttttaaaaaagcctggtttttctcaatacgcctttaaaggtttttaaattgtttcatatctggtcaagttgagatttttaagaacttcatttttaatttgtaataaaagtttacaacttgattttttcaaaaaagtcaacaaactgcaagcacctgttaataaaggtcttaaataattgtctttgtgt

SEQ ID NO: 319157 - DNA, 951 bp, Homo sapiens
ccgcggcccgcggctctggcggctcggctggcttgggcaatgcctgcgggcagacggacgggcggacggcacattcggcacggatcggagagtgctcccgaaggccaggcccaacaacgccggccctaccgcaggcgaaggttcccaccttactacatgcggagaccctatgggcgtcgaccacagtattccaaccctcctgtgcagggagaagtgatggagggtgctgacaaccagggtgcaggagaacaaggtagaccagtgaggcagaatatgtatcggggatatagaccacgattccgcaggggccctcctcgccaaagacagcctagagaggacggcaatgaagaagataaagaaaatcaaggagatgagacccaaggtcagcagccacctcaacgtcggtaccgccgcaacttcaattaccgacgcagacgcccagaaaaccctaaaccacaagatggcaaagagacaaaagcagccgatccaccagctgagaattcgtccgctcccgaggctgagcagggcggggctgagtaaatgccggcttaccatctctaccatcatccggtttagtcatccaacaagaagaaatatgaaattccagcaataagaaatgaacaaaagattggagctgaagacctaaagtgcttgctttttgcccgttgaccagataaatagaactatctgcattatctatgcagcatggggtttttattatttttacctaaagacgtctctttttggtaataacaaacgtgttttttaaaaaagcctggtttttctcaatacgcctttaaaggtttttaaattgtttcatatctggtcaagttgagatttttaagaacttcatttttaatttgtaataaaagtttacaacttgattttttcaaaaaagtcaacaaactgcaagcacctgttaataaaggtcttaaataattgtctttgtgt

SEQ ID NO: 319158 - DNA, 1593 bp, Homo sapiens
gtgtcccggcgcttatacggcgtcccccggggacaagaaggtatcgcaacgaaggttttgggaacagtaaatggttcaatgtaaggaacggatatggtttcatcaacaggaatgacaccaaggaagatgtatttgtacaccagactgccataaagaagaataaccccaggaagtaccttcgcagtgtaggagatggagagactgtggagtttgatgttgttgaaggagaaaagggtgcggaggcagcaaatgttacaggtcctggtggtgttccagttcaaggcagtaaatatgcagcagaccgtaaccattatagacgctatccacgtcgtaggggtcctccacgcaattaccagcaaaattaccagaatagtgagagtggggaaaagaacgagggatcggagagtgctcccgaaggccaggcccaacaacgccggccctaccgcaggcgaaggttcccaccttactacatgcggagaccctatgggcgtcgaccacagtattccaaccctcctgtgcagggagaagtgatggagggtgctgacaaccagggtgcaggagaacaaggtagaccagtgaggcagaatatgtatcggggatatagaccacgattccgcaggggccctcctcgccaaagacagcctagagaggacggcaatgaagaagataaagaaaatcaaggagatgagacccaaggtcagcagccacctcaacgtcggtaccgccgcaacttcaattaccgacgcagacgcccagaaaaccctaaaccacaagatggcaaagagacaaaagcagccgatccaccagctgagaattcgtccgctcccgaggctgagcagggcggggctgagtaaatgccggcttaccatctctaccatcatccggtttagtcatccaacaagaagaaatatgaaattccagcaataagaaatgaacaaaagattggagctgaagacctaaagtgcttgctttttgcccgttgaccagataaatagaactatctgcattatctatgcagcatggggtttttattatttttacctaaagacgtctctttttggtaataacaaacgtgttttttaaaaaagcctggtttttctcaatacgcctttaaaggtttttaaattgtttcatatctggtcaagttgagatttttaagaacttcatttttaatttgtaataaaagtttacaacttgattttttcaaaaaagtcaacaaactgcaagcacctgttaataaaggtcttaaataattgtctttgtgtaaaaaaaaaaaaaaaaaaaaaaaaaaaaaaaaaaaaaattttttggggccgcgctctggaccctgaaaaacgtttctccaaccccattcgtgtgttgggcgccgcggggcggccgcatgtagtgagtatgtgcgacacttggtgtagacggtgtgggtccacaagggacaacccgcgggccagaagcctcaggtggctcgggtctctcccccaattgaaaaaacccgcggggggacacccgggtgtttttggaccaatccccagatgggggccgagcgggccataccggggcgctctcaacagggtgccaaggggcgagtataatacc

SEQ ID NO: 319159 - DNA, 1690 bp, Homo sapiens
gtgtcccggcgcttatacggcgtcccccggggacaagaaggtatcgcaacgaaggttttgggaacagtaaatggttcaatgtaaggaacggatatggtttcatcaacaggaatgacaccaaggaagatgtatttgtacaccagactgccataaagaagaataaccccaggaagtaccttcgcagtgtaggagatggagagactgtggagtttgatgttgttgaaggagaaaagggtgcggaggcagcaaatgttacaggtcctggtggtgttccagttcaaggcagtaaatatgcagcagaccgtaaccattatagacgctatccacgtcgtaggggtcctccacgcaattaccagcaaaattaccagaatagtgagagtggggaaaagaacgagggatcggagagtgctcccgaaggccaggcccaacaacgccggccctaccgcaggcgaaggttcccaccttactacatgcggagaccctatgggcgtcgaccacagtattccaaccctcctgtgcagggagaagtgatggagggtgctgacaaccagggtgcaggagaacaaggtagaccagtgaggcagaatatgtatcggggatatagaccacgattccgcaggggccctcctcgccaaagacagcctagagaggacggcaatgaagaagataaagaaaatcaaggagatgagacccaaggtcagcagccacctcaacgtcggtaccgccgcaacttcaattaccgacgcagacgcccagaaaaccctaaaccacaagatggcaaagagacaaaagcagccgatccaccagctgagaattcgtccgctcccgaggctgagcagggcggggctgagtaaatgccggcttaccatctctaccatcatccggtttagtcatccaacaagaagaaatatgaaattccagcaataagaaatgaacaaaagattggagctgaagacctaaagtgcttgctttttgcccgttgaccagataaatagaactatctgcattatctatgcagcatggggtttttattatttttacctaaagacgtctctttttggtaataacaaacgtgttttttaaaaaagcctggtttttctcaatacgcctttaaaggtttttaaattgtttcatatctggtcaagttgagatttttaagaacttcatttttaatttgtaataaaagtttacaacttgattttttcaaaaaagtcaacaaactgcaagcacctgttaataaaggtcttaaataattgtctttgtgtaaaaaaaaaaaaaaaaaaaaaaaaaaaaaaaaaaaaaagagggggggcgcgccccaaaaaattttccccgcggggggccccaagtttagccgtgttccccagttttttttgttaacaagggggcccctatggggggtcgttttaaaagcgcagagggcccggggccgcgtgtgttaaaaacaaggcgccggacagaacggggagacaaccgtggctaaccgccgggggaacccttggggagaaagacgaaccctacccttccgtggggcgggcgagcccctacagtggcggacaaccatacccacacgagagaaattatacacagctctcaaagcgcacacttcatcacaacttcttccagcctggtctctacggggtcggcaacactaacggcgccgaaaatgactcaggcgcgtcacaaaaac

SEQ ID NO: 319160 - DNA, 1340 bp, Homo sapiens
  misc_feature (1278)..(1278): n is a, c, g, or t
  misc_feature (1293)..(1293): n is a, c, g, or t
  misc_feature (1340)..(1340): n is a, c, g, or t
gtgtcccggcgcttatacggcgtcccccggggacaagaaggtatcgcaacgaaggttttgggaacagtaaatggttcaatgtaaggaacggatatggtttcatcaacaggaatgacaccaaggaagatgtatttgtacaccagactgccataaagaagaataaccccaggaagtaccttcgcagtgtaggagatggagagactgtggagtttgatgttgttgaaggagaaaagggtgcggaggcagcaaatgttacaggtcctggtggtgttccagttcaaggcagtaaatatgcagcagaccgtaaccattatagacgctatccacgtcgtaggggtcctccacgcaattaccagcaaaattaccagaatagtgagagtggggaaaagaacgagggatcggagagtgctcccgaaggccaggcccaacaacgccggccctaccgcaggcgaaggttcccaccttactacatgcggagaccctatgggcgtcgaccacagtattccaaccctcctgtgcagggagaagtgatggagggtgctgacaaccagggtgcaggagaacaaggtagaccagtgaggcagaatatgtatcggggatatagaccacgattccgcaggggccctcctcgccaaagacagcctagagaggacggcaatgaagaagataaagaaaatcaaggagatgagacccaaggtcagcagccacctcaacgtcggtaccgccgcaacttcaattaccgacgcagacgcccagaaaaccctaaaccacaagatggcaaagagacaaaagcagccgatccaccagctgagaattcgtccgctcccgaggctgagcagggcggggctgagtaaatgccggcttaccatctctaccatcatccggtttagtcatccaacaagaagaaatatgaaattccagcaataagaaatgaacaaaagattggagctgaagacctaaagtgcttgctttttgcccgttgaccagataaatagaactatctgcattatctatgcagcatggggtttttattatttttacctaaagacgtctctttttggtaataacaaacgtgttttttaaaaaagcctggtttttctcaatacgcctttaaaggtttttaaattgtttcatatctggtcaagttgagatttttaagaacttcatttttaatttgtaataaaagtttacaacttgattttttcaaaaaagtcaacaaactgcaagcacctgttaataaaggtcttaaataattgtctttgtgttataaaaaaaaantcacttgccgcgttnacaacgtcggactggccctgcgtaacccttggccttgagcactcccn

SEQ ID NO: 319161 - DNA, 950 bp, Homo sapiens
gtgtcccggcgcttatacggcgtcccccggggacaagaaggtatcgcaacgaaggttttgggaacagtaaatggttcaatgtaaggaacggatatggtttcatcaacaggaatgacaccaaggaagatgtatttgtacaccagactgccataaagaagaataaccccaggaagtaccttcgcagttattccaaccctcctgtgcagggagaagtgatggagggtgctgacaaccagggtgcaggagaacaaggtagaccagtgaggcagaatatgtatcggggatatagaccacgattccgcaggggccctcctcgccaaagacagcctagagaggacggcaatgaagaagataaagaaaatcaaggagatgagacccaaggtcagcagccacctcaacgtcggtaccgccgcaacttcaattaccgacgcagacgcccagaaaaccctaaaccacaagatggcaaagagacaaaagcagccgatccaccagctgagaattcgtccgctcccgaggctgagcagggcggggctgagtaaatgccggcttaccatctctaccatcatccggtttagtcatccaacaagaagaaatatgaaattccagcaataagaaatgaacaaaagattggagctgaagacctaaagtgcttgctttttgcccgttgaccagataaatagaactatctgcattatctatgcagcatggggtttttattatttttacctaaagacgtctctttttggtaataacaaacgtgttttttaaaaaagcctggtttttctcaatacgcctttaaaggtttttaaattgtttcatatctggtcaagttgagatttttaagaacttcatttttaatttgtaataaaagtttacaacttgattttttcaaaaaagtcaacaaactgcaagcacctgttaataaaggtcttaaataattgtctttgtgt

SEQ ID NO: 319162 - DNA, 833 bp, Homo sapiens
gaagcgtccggggaaactttgccccgtagcagacccgcttgaagcacagtcgccaacaacacccgtagcccagacgccggcaccagacacccactcggcccagccgccatcgcgtaccattttccgcaggtcaaggtagaccagtgaggcagaatatgtatcggggatatagaccacgattccgcaggggccctcctcgccaaagacagcctagagaggacggcaatgaagaagataaagaaaatcaaggagatgagacccaaggtcagcagccacctcaacgtcggtaccgccgcaacttcaattaccgacgcagacgcccagaaaaccctaaaccacaagatggcaaagagacaaaagcagccgatccaccagctgagaattcgtccgctcccgaggctgagcagggcggggctgagtaaatgccggcttaccatctctaccatcatccggtttagtcatccaacaagaagaaatatgaaattccagcaataagaaatgaacaaaagattggagctgaagacctaaagtgcttgctttttgcccgttgaccagataaatagaactatctgcattatctatgcagcatggggtttttattatttttacctaaagacgtctctttttggtaataacaaacgtgttttttaaaaaagcctggtttttctcaatacgcctttaaaggtttttaaattgtttcatatctggtcaagttgagatttttaagaacttcatttttaatttgtaataaaagtttacaacttgattttttcaaaaaagtcaacaaactgcaagcacctgttaataaaggtcttaaataattgtctttgtgt

SEQ ID NO: 319163 - DNA, 1233 bp, Homo sapiens
gtgtcccggcgcttatacggcgtcccccggggacaagaaggtatcgcaacgaaggttttgggaacagtaaatggttcaatgtaaggaacggatatggtttcatcaacaggaatgacaccaaggaagatgtatttgtacaccagactgccataaagaagaataaccccaggaagtaccttcgcagtgtaggagatggagagactgtggagtttgatgttgttgaaggagaaaagggtgcggaggcagcaaatgttacaggtcctggtggtgttccagttcaaggcagtaaatatgcagcagaccgtaaccattatagacgctatccacgtcgtaggggtcctccacgcaattaccagcaaaattaccagaatagtgagagtggggaaaagaacgagggatcggagagtgctcccgaaggccaggcccaacaacgccggccctaccgcaggcgaaggttcccaccttactacatgcggagaccctatgggcgtcgaccacagtattccaaccctcctgtgcagggagaagtgatggagggtgctgacaaccagggtgcaggagaacaaggtagaccagtgaggcagaatatgtatcggggatatagaccacgattccgcaggggccctcctcgccaaagacagcctagagaggacggcaatgaagaagataaagaaaatcaaggagatgagacccaaggtcatcaattaccgacgcagacgcccagaaaaccctaaaccacaagatggcaaagagacaaaagcagccgatccaccagctgagaattcgtccgctcccgaggctgagcagggcggggctgagtaaatgccggcttaccatctctaccatcatccggtttagtcatccaacaagaagaaatatgaaattccagcaataagaaatgaacaaaagattggagctgaagacctaaagtgcttgctttttgcccgttgaccagataaatagaactatctgcattatctatgcagcatggggtttttattatttttacctaaagacgtctctttttggtaataacaaacgtgttttttaaaaaagcctggtttttctcaatacgcctttaaaggtttttaaattgtttcatatctggtcaagttgagatttttaagaacttcatttttaatttgtaataaaagtttacaacttgattttttcaaaaaagtcaacaaactgcaagcacctgttaataaaggtcttaaataattgtctttgtgt

SEQ ID NO: 319164 - DNA, 1210 bp, Homo sapiens
gtgtcccggcgcttatacggcgtcccccggggacaagaaggtatcgcaacgaaggttttgggaacagtaaatggttcaatgtaaggaacggatatggtttcatcaacaggaatgacaccaaggaagatgtatttgtacaccagactgccataaagaagaataaccccaggaagtaccttcgcagtgtaggagatggagagactgtggagtttgatgttgttgaaggagaaaagggtgcggaggcagcaaatgttacaggtcctggtggtgttccagttcaaggcagtaaatatgcagcagaccgtaaccattatagacgctatccacgtcgtaggggtcctccacgcaattaccagcaaaattaccagaatagtgagagtggggaaaagaacgagggatcggagagtgctcccgaaggccaggcccaacaacgccggccctaccgcaggcgaaggttcccaccttactacatgcggagaccctatgggcgtcgaccacagtattccaaccctcctgtgcagggagaagtgatggagggtgctgacaaccagggtgcaggagaacaaggtagaccagtgaggcagaatatgtatcggggatatagaccacgattccgcagaatcaaggagatgagacccaaggtcagcagccacctcaacgtcggtaccgccgcaacttcaattaccgacgcagacgcccagaaaaccctaaaccacaagatggcaaagagacaaaagcagccgatccaccagctgagaattcgtccgctcccgaggctgagcagggcggggctgagtaaatgccggcttaccatctctaccatcatccggtttagtcatccaacaagaagaaatatgaaattccagcaataagaaatgaacaaaagattggagctgaagacctaaagtgcttgctttttgcccgttgaccagataaatagaactatctgcattatctatgcagcatggggtttttattatttttacctaaagacgtctctttttggtaataacaaacgtgttttttaaaaaagcctggtttttctcaatacgcctttaaaggtttttaaattgtttcatatctggtcaagttgagatttttaagaacttcatttttaatttgtaataaaagtttacaacttgattttttcaaaaaagtcaacaaactgcaagcacctgttaataaaggtcttaaataattgtctttgtgt

SEQ ID NO: 319165 - DNA, 1211 bp, Homo sapiens
gtgtcccggcgcttatacggcgtcccccggggacaagaaggtatcgcaacgaaggttttgggaacagtaaatggttcaatgtaaggaacggatatggtttcatcaacaggaatgacaccaaggaagatgtatttgtacaccagactgccataaagaagaataaccccaggaagtaccttcgcagtgtaggagatggagagactgtggagtttgatgttgttgaaggagaaaagggtgcggaggcagcaaatgttacaggtcctggtggtgttccagttcaaggcagtaaatatgcagcagaccgtaaccattatagacgctatccacgtcgtaggggtcctccacgcaattaccagcaaaattaccagaatagtgagagtggggaaaagaacgagggatcggagagtgctcccgaaggccaggcccaacaacgccggccctaccgcaggcgaaggttcccaccttactacatgcggagaccctatgggcgtcgaccacagtattccaaccctcctgtgcagggagaagtgatggagggtgctgacaaccagggtgcaggagaacaaggtagaccagtgaggcagaatatgtatcggggatatagaccacgattccgcaggggccctcctcgccaaagacagcctagagaggacggcaatgaagaagataaagaaaatcaaggagatgagacccaaggtcagcagccacctcaacgtcggtaccgccgcaacttcaattaccgacgcagacgcccagaaaaccctaaaccacaagatggcaaagagacaaaagcagccgatccaccagctgagaattcgtccgctcccgaggctgagcagggcggggctgagtaaatgccggcttaccatctctaccatcatccggtttagtcatccaacaagaagaaatatgaaattccagcaataagaaatgaacaaaagaactatctgcattatctatgcagcatggggtttttattatttttacctaaagacgtctctttttggtaataacaaacgtgttttttaaaaaagcctggtttttctcaatacgcctttaaaggtttttaaattgtttcatatctggtcaagttgagatttttaagaacttcatttttaatttgtaataaaagtttacaacttgattttttcaaaaaagtcaacaaactgcaagcacctgttaataaaggtcttaaataattgtctttgtgt

SEQ ID NO: 319166 - DNA, 701 bp, Homo sapiens
  misc_feature (8)..(8): n is a, c, g, or t
  misc_feature (113)..(114): n is a, c, g, or t
cggacctnatttccttctttatgccgtcctctctaggctgtctttggcgaggagggccccgcggaatcgtggtctatatccccgatacatattctgcctcactggtctacctnnttctcctgcaccctggttcagcaccctccatcacttctccctgcacaggagggttcaattaccgacgcagacgcccagaaaaccctaaaccacaagatggcaaagagacaaaagcagccgatccaccagctgagaattcgtccgctcccgaggctgagcagggcggggctgagtaaatgccggcttaccatctctaccatcatccggtttagtcatccaacaagaagaaatatgaaattccagcaataagaaatgaacaaaagattggagctgaagacctaaagtgcttgctttttgcccgttgaccagataaatagaactatctgcattatctatgcagcatggggtttttattatttttacctaaagacgtctctttttggtaataacaaacgtgttttttaaaaaagcctggtttttctcaatacgcctttaaaggtttttaaattgtttcatatctggtcaagttgagatttttaagaacttcatttttaatttgtaataaaagtttacaacttgattttttcaaaaaagtcaacaaactgcaagcacctgttaataaaggtcttaaataattgtctttgtgt

SEQ ID NO: 319167 - DNA, 759 bp, Homo sapiens
gtgtcccggcgcttatacggcgtcccccggggacaagaaggtatcgcaacgaaggttttgggaacagtaaatggttcaatgtaaggaacggatatggtttcatcaacaggaatgacaccaaggaagatgtatttgtacaccagactgccataaagaagaataaccccaggaagtaccttcgcagtgtaggagatggagagactgtggagtttgatgttgttgaaggagaaaagggtgcggaggcagcaaatgttacaggtcctggtggtgttccagttcaaggcagtaaatatgcagcagaccgtaaccattatagacgctatccacgtcgtaggggtcctccacgcaattaccagcaaaattaccagaatagtgagagtggggaaaagaacgagggatcggagagtgctcccgaaggccaggcccaacaacgccggccctaccgcaggcgaaggttcccaccttactacatgcggagaccctatgggcgtcgaccacagtattccaaccctcctgtgcagggagaagtgatggagggtgctgacaaccagggtgcaggagaacaaggtagaccagtgaggcagaatatgtatcggggatatagaccacgattccgcaggggccctcctcgccaaagacagcctagagaggacggcaatgaagaagataaagaaaatcaaggagatgagacccaaggtcagcagccacctcaacgtcggtaccgccgcaactggtacgcggggggtcctctagagcgac

SEQ ID NO: 319168 - DNA, 810 bp, Homo sapiens
gtgtcccggcgcttatacggcgtcccccggggacaagaaggtatcgcaacgaaggttttgggaacagtaaatggttcaatgtaaggaacggatatggtttcatcaacaggaatgacaccaaggaagatgtatttgtacaccagactgccataaagaagaataaccccaggaagtaccttcgcagtgtaggagatggagagactgtggagtttgatgttgttgaaggagaaaagggtgcggaggcagcaaatgttacaggtcctggtggtgttccagttcaaggcagtaaatatgcagcagaccgtaaccattatagacgctatccacgtcgtaggggtcctccacgcaattaccagcaaaattaccagaatagtgagagtggggaaaagaacgagggatcggagagtgctcccgaaggccaggcccaacaacgccggccctaccgcaggcgaaggttcccaccttactacatgcggagaccctatgggcgtcgaccacagtattccaaccctcctgtgcagggagaagtgatggagggtgctgacaaccagggtgcaggagaacaaggtagaccagtgaggcagaatatgtatcggggatatagaccacgattccgcaggggccctcctcgccaaagacagcctagagaggacggcaatgaagaagataaagaaaaaaaaaaaaaaaaaaaaaaaaaaaaaaaaaaaaaaaagggggggcaagaaaaagaaaaaccccaaggggcgccaaagataagcgaacccaagatacggggacaagggggcccacaaaggggaacgaaaaaaaagc

SEQ ID NO: 319169 - DNA, 837 bp, Homo sapiens
  misc_feature (626)..(626): n is a, c, g, or t
gtgtcccggcgcttatacggcgtcccccggggacaagaaggtatcgcaacgaaggttttgggaacagtaaatggttcaatgtaaggaacggatatggtttcatcaacaggaatgacaccaaggaagatgtatttgtacaccagactgccataaagaagaataaccccaggaagtaccttcgcagtgtaggagatggagagactgtggagtttgatgttgttgaaggagaaaagggtgcggaggcagcaaatgttacaggtcctggtggtgttccagttcaaggcagtaaatatgcagcagaccgtaaccattatagacgctatccacgtcgtaggggtcctccacgcaattaccagcaaaattaccagaatagtgagagtggggaaaagaacgagggatcggagagtgctcccgaaggccaggcccaacaacgccggccctaccgcaggcgaaggttcccaccttactacatgcggagaccctatgggcgtcgaccacagtattccaaccctcctgtgcagggagaagtgatggagggtgctgacaaccagggtgcaggagaacaaggtagaccagtgaggcagaatatgtatcggggatatagaccacgattccgcagggccctnctcgccaaagacagcctagagaggacggcttattttccttctgtattgggtatacagtgaagtctgagtttcaaaagtgatttttttctcccacaaaagtttcaaacttaagctagaactttcagtgttaacttggccctaaaaagttaagacatattctgataatcatcacagtcacatgatttctgatgcagtctggtctgttaacaat

SEQ ID NO: 319170 - DNA, 594 bp, Homo sapiens
gtgtcccggcgcttatacggcgtcccccggggacaagaaggtatcgcaacgaaggttttgggaacagtaaatggttcaatgtaaggaacggatatggtttcatcaacaggaatgacaccaaggaagatgtatttgtacaccagactgccataaagaagaataaccccaggaagtaccttcgcagtgtaggagatggagagactgtggagtttgatgttgttgaaggagaaaagggtgcggaggcagcaaatgttacaggtcctggtggtgttccagttcaaggcagtaaatatgcagcagaccgtaaccattatagacgctatccacgtcgtaggggtcctccacgcaattaccagcaaaattaccagaatagtgagagtggggaaaagaacgagggatcggagagtgctcccgaaggccaggcccaacaacgccggccctaccgcaggcgaaggttcccaccttactacatgcggagaccctatgggcgtcgaccacagtattccaaccctcctgtgcagggagaagtgatggagggtgctgacaaccagggtgcaggagaacaaggcaccgggaggtagaggcacccgcgag

SEQ ID NO: 319171 - DNA, 487 bp, Homo sapiens
gtgtcccggcgcttatacggcgtcccccggggacaagaaggtatcgcaacgaaggttttgggaacagtaaatggttcaatgtaaggaacggatatggtttcatcaacaggaatgacaccaaggaagatgtatttgtacaccagactgccataaagaagaataaccccaggaagtaccttcgcagtgtaggagatggagagactgtggagtttgatgttgttgaaggagaaaagggtgcggaggcagcaaatgttacaggtcctggtggtgttccagttcaaggcagtaaatatgcagcagaccgtaaccattatagacgctatccacgtcgtaggggtcctccacgcaattaccagcaaaattaccagaatagtgagagtggggaaaagaacgagggatcggagagtgctcccgaaggccaggcccaacaacgccggccctaccgcaggcgaaggttcccacttcctggggttattcttctttatgg

SEQ ID NO: 319172 - DNA, 541 bp, Homo sapiens
  misc_feature (198)..(198): n is a, c, g, or t
gagctttcgggggacagcaggccccacactcacgctaaagaaggcgcacgtgcctctggtttttatagtggctggacagaggacaggtgcctccaggatgaaggatccctctcccacaggctggagtttgtgtggtttgaactgcccgtctgcaccaaggaagggagccccatgagctacctcaactttgcagagagncagccttgagtacttactacatgcggagaccctatgggcgtcgaccacagtattccaaccctcctgtgcagggagaagtgatggagggtgctgacaaccagggtgcaggagaacaaggtagaccagtgaggcagaatatgtatcggggatatagaccacgattccgcaggggccctcctcgccaaagacagcctagagaggacggcaatgaagaagataaagaaaatcaaggagatgagacccaaggtcagcagccacctcaacgtcggtaccgccgcaactgtacggagcgcaactgtacgcggggggttcctctagatgtcgccgcaccatcaactgcact

SEQ ID NO: 319173 - DNA, 1265 bp, Homo sapiens
gtgtcccggcgcttatacggcgtcccccggggacaagaaggtatcgcaacgaaggttttgggaacagtaaatggttcaatgtaaggaacggatatggtttcatcaacaggaatgacaccaaggaagatgtatttgtacaccagactgccataaagaagaataaccccaggaagtaccttcgcagtgtaggagatggagagactgtggagtttgatgttgttgaaggagaaaagggtgcggaggcagcaaatgttacaggtcctggtggtgttccagttcaaggcagtaaatatgcagcagaccgtaaccattatagacgctatccacgtcgtaggggtcctccacgcaattaccagcaaaattaccagaatagtgagagtggggaaaagaacgagggatcggagagtgctcccgaaggccaggcccaacaacgccggccctaccgcaggcgaaggttcccaccttactacatgcggagaccctatgggcgtcgaccacagtattccaaccctcctgtgcagggagaagtgatggagggtgctgacaaccagggtgcaggagaacaaggtagaccagtgaggcagaatatgtatcggggatatagaccacgattccgcaggggccctcctcgccaaagacagcctagagaggacggcaatgaagaagataaagaaaatcaaggagatgagacccaaggtcagcagccacctcaacgtcggtaccgccgcaacttcaattaccgacgcagacgcccagaaaaccctaaaccacaagatggcaaagagacaaaagcagccgatccaccagctgagaattcgtccgctcccgaggctgagcagggcggggctgagtaaatgccggcttaccatctctaccatcatccggtttagtcatccaacaagaagaaatatgaaattccagcaataagaaatgaacaaaagattggagctgaagacctaaagtgcttgctttttgcccgttgaccagataaatagaactatctgcattatctatgcagcatggggtttttattatttttacctaaagacgtctctttttggtaataacaaacgtgttttttaaaaaagcctggtttttctcaatacgcctttaaaggtttttaaattgtttcatatctggtcaagttgagatttttaagaacttcatttttaatttgtaataaaagtttacaacttgattttttcaaaaaagtcaacaaactgcaagcacctgttaataaaggtcttaaataattgtctttgtgt

SEQ ID NO: 319174 - DNA, 1242 bp, Homo sapiens
ctgcagttagagggcaatctcttcagaacagtgaggaactgatatttagtcatttctgtgcacccctggtcacgcagttgcgcccccccccttttttttccttaactttgttgttttttgctttgtttgaaaatgttctgatttccttttgaaagtgttgaaagtgttctgatttcctttgtcactatcaatatgtaatggcttttgtagggtgcggaggcagcaaatgttacaggtcctggtggtgttccagttcaaggcagtaaatatgcagcagaccgtaaccattatagacgctatccacgtcgtaggggtcctccacgcaattaccagcaaaattaccagaatagtgagagtggggaaaagaacgagggatcggagagtgctcccgaaggccaggcccaacaacgccggccctaccgcaggcgaaggttcccaccttactacatgcggagaccctatgggcgtcgaccacagtattccaaccctcctgtgcagggagaagtgatggagggtgctgacaaccagggtgcaggagaacaaggtagaccagtgaggcagaatatgtatcggggatatagaccacgattccgcaggggccctcctcgccaaagacagcctagagaggacggcaatgaagaagataaagaaaatcaaggagatgagacccaaggtcagcagccacctcaacgtcggtaccgccgcaacttcaattaccgacgcagacgcccagaaaaccctaaaccacaagatggcaaagagacaaaagcagccgatccaccagctgagaattcgtccgctcccgaggctgagcagggcggggctgagtaaatgccggcttaccatctctaccatcatccggtttagtcatccaacaagaagaaatatgaaattccagcaataagaaatgaacaaaagattggagctgaagacctaaagtgcttgctttttgcccgttgaccagataaatagaactatctgcattatctatgcagcatggggtttttattatttttacctaaagacgtctctttttggtaataacaaacgtgttttttaaaaaagcctggtttttctcaatacgcctttaaaggtttttaaattgtttcatatctggtcaagttgagatttttaagaacttcatttttaatttgtaataaaagtttacaacttgattttttcaaaaaagtcaacaaactgcaagcacctgttaataaaggtcttaaataattgtctttgtgt

SEQ ID NO: 319175 - DNA, 1685 bp, Homo sapiens
gtgtcccggcgcttatacggcgtcccccggggacaagaaggtatcgcaacgaaggttttgggaacagtaaatggttcaatgtaaggaacggatatggtttcatcaacaggaatgacaccaaggaagatgtatttgtacaccagactgccataaagaagaataaccccaggaagtaccttcgcagtgtaggagatggagagactgtggagtttgatgttgttgaaggagaaaagggtgcggaggcagcaaatgttacaggtcctggtggtgttccagttcaaggcagtaaatatgcagcagaccgtaaccattatagacgctatccacgtcgtaggggtcctccacgcaattaccagcaaaattaccagaatagtgagagtggggaaaagaacgagggatcggagagtgctcccgaaggccaggcccaacaacgccggccctaccgcaggcgaaggttcccaccttactacatgcggagaccctatgggcgtcgaccacagtattccaaccctcctgtgcagggagaagtgatggagggtgctgacaaccagggtgcaggagaacaaggtagaccagtgaggcagaatatgtatcggggatatagaccacgattccgcaggggccctcctcgccaaagacagcctagagaggacggcaatgaagaagataaagaaaatcaaggagatgagacccaaggtcagcagccacctcaacgtcggtaccgccgcaacttcaattaccgacgcagacgcccagaaaaccctaaaccacaagatggcaaagagacaaaagcagccgatccaccagctgagaattcgtccgctcccgaggctgagcagggcggggctgagtaaatgccggcttaccatctctaccatcatccggtttagtcatccaacaagaagaaatatgaaattccagcaataagaaatgaacaaaagattggagctgaagacctaaagtgcttgctttttgcccgttgaccagataaatagaactatctgcattatctatgcagcatggggtttttattatttttacctaaagacgtctctttttggtaataacaaacgtgttttttaaaaaagcctggtttttctcaatacgcctttaaaggtttttaaattgtttcatatctggtcaagttgagatttttaagaacttcatttttaatttgtaataaaagtttacaacttgattttttcaaaaaagtcaacaaactgcaagcacctgttaataaaggtcttaaataattgtctttgtgtaaaaaaaaaaaaaaaaaaaaaaaaaaaaaaaaaaaaaaaaaaaaaaggggggcacccataaaaaatatccccagagtgggccaaaaataaaagagtaaccagagattctgtgtacaaagaggggccaaaaaagagagcacattataaacacaagaatgtgcacagcaatatacaacatccggaagtcggcaacaacacgccacacagagagacacctgaggaacagcaaccctatcatcacacgtggagagggcaccaatcgtggcgacaacaaatccacaaagaaggatatgacacgccataagggacacacatcaaacttcaacgggtgatatacgtggtgacacacgcacggaaattatacatggcacatcgacaatttgagcccagcagatacgatttgcaacacttttaccgcgg

SEQ ID NO: 319176 - DNA, 1401 bp, Homo sapiens
gtgtcccggcgcttatacggcgtcccccggggacaagaaggtatcgcaacgaaggttttgggaacagtaaatggttcaatgtaaggaacggatatggtttcatcaacaggaatgacaccaaggaagatgtatttgtacaccagactgccataaagaagaataaccccaggaagtaccttcgcagtgtaggagatggagagactgtggagtttgatgttgttgaaggagaaaagggtgcggaggcagcaaatgttacaggtcctggtggtgttccagttcaaggcagtaaatatgcagcagaccgtaaccattatagacgctatccacgtcgtaggggtcctccacgcaattaccagcaaaattaccagaatagtgagagtggggaaaagaacgagggatcggagagtgctcccgaaggccaggcccaacaacgccggccctaccgcaggcgaaggttcccaccttactacatgcggagaccctatgggcgtcgaccacagtattccaaccctcctgtgcagggagaagtgatggagggtgctgacaaccagggtgcaggagaacaaggtagaccagtgaggcagaatatgtatcggggatatagaccacgattccgcaggggccctcctcgccaaagacagcctagagaggacggcaatgaagaagataaagaaaatcaaggagatgagacccaaggtcagcagccacctcaacgtcggtaccgccgcaacttcaattaccgacgcagacgcccagaaaaccctaaaccacaagatggcaaagagacaaaagcagccgatccaccagctgagaattcgtccgctcccgaggctgagcagggcggggctgagtaaatgccggcttaccatctctaccatcatccggtttagtcatccaacaagaagaaatatgaaattccagcaataagaaatgaacaaaagattggagctgaagacctaaagtgcttgctttttgcccgttgaccagataaatagaactatctgcattatctatgcagcatggggtttttattatttttacctaaagacgtctctttttggtaataacaaacgtgttttttaaaaaagcctggtttttctcaatacgcctttaaaggtttttaaattgtttcatatctggtcaagttgagatttttaagaacttcatttttaatttgtaataaaagtttacaacttgattttttcaaaaaagtcaacaaactgcaagcacctgttaataaaggtcttaaataattgtctttgtgtaaaaaaaaaaaaaaaaaaaaaaaaaaaaaaaaaaaaaagggggggcaagaaaaagaaaaaccccaaggggcgccaaagataagcgaacccaagatacggggacaagggggcccacaaaggggaacgaaaaaaaagc

SEQ ID NO: 319177 - DNA, 1290 bp, Homo sapiens
gtgtcccggcgcttatacggcgtcccccggggacaagaaggtatcgcaacgaaggttttgggaacagtaaatggttcaatgtaaggaacggatatggtttcatcaacaggaatgacaccaaggaagatgtatttgtacaccagactgccataaagaagaataaccccaggaagtaccttcgcagtgtaggagatggagagactgtggagtttgatgttgttgaaggagaaaagggtgcggaggcagcaaatgttacaggtcctggtggtgttccagttcaaggcagtaaatatgcagcagaccgtaaccattatagacgctatccacgtcgtaggggtcctccacgcaattaccagcaaaattaccagaatagtgagagtggggaaaagaacgagggatcggagagtgctcccgaaggccaggcccaacaacgccggccctaccgcaggcgaaggttcccaccttactacatgcggagaccctatgggcgtcgaccacagtattccaaccctcctgtgcagggagaagtgatggagggtgctgacaaccagggtgcaggagaacaaggtagaccagtgaggcagaatatgtatcggggatatagaccacgattccgcaggggccctcctcgccaaagacagcctagagaggacggcaatgaagaagataaagaaaatcaaggagatgagacccaaggtcagcagccacctcaacgtcggtaccgccgcaacttcaattaccgacgcagacgcccagaaaaccctaaaccacaagatggcaaagagacaaaagcagccgatccaccagctgagaattcgtccgctcccgaggctgagcagggcggggctgagtaaatgccggcttaccatctctaccatcatccggtttagtcatccaacaagaagaaatatgaaattccagcaataagaaatgaacaaaagattggagctgaagacctaaagtgcttgctttttgcccgttgaccagataaatagaactatctgcattatctatgcagcatggggtttttattatttttacctaaagacgtctctttttggtaataacaaacgtgttttttaaaaaagcctggtttttctcaatacgcctttaaaggtttttaaattgtttcatatctggtcaagttgagatttttaagaacttcatttttaatttgtaataaaagtttacaacttgattttttcaaaaaagtcaacaaactgcaagcacctgttaataaaggtcttaaataattgtctttgtgtcaacaccacaaacagcacaaaagag

SEQ ID NO: 319178 - DNA, 1318 bp, Homo sapiens
gtgtcccggcgcttatacggcgtcccccggggacaagaaggtatcgcaacgaaggttttgggaacagtaaatggttcaatgtaaggaacggatatggtttcatcaacaggaatgacaccaaggaagatgtatttgtacaccagactgccataaagaagaataaccccaggaagtaccttcgcagtgtaggagatggagagactgtggagtttgatgttgttgaaggagaaaagggtgcggaggcagcaaatgttacaggtcctggtggtgttccagttcaaggcagtaaatatgcagcagaccgtaaccattatagacgctatccacgtcgtaggggtcctccacgcaattaccagcaaaattaccagaatagtgagagtggggaaaagaacgagggatcggagagtgctcccgaaggccaggcccaacaacgccggccctaccgcaggcgaaggttcccaccttactacatgcggagaccctatgggcgtcgaccacagtattccaaccctcctgtgcagggagaagtgatggagggtgctgacaaccagggtgcaggagaacaaggtagaccagtgaggcagaatatgtatcggggatatagaccacgattccgcaggggccctcctcgccaaagacagcctagagaggacggcaatgaagaagataaagaaaatcaaggagatgagacccaaggtcagcagccacctcaacgtcggtaccgccgcaacttcaattaccgacgcagacgcccagaaaaccctaaaccacaagatggcaaagagacaaaagcagccgatccaccagctgagaattcgtccgctcccgaggctgagcagggcggggctgagtaaatgccggcttaccatctctaccatcatccggtttagtcatccaacaagaagaaatatgaaattccagcaataagaaatgaacaaaagattggagctgaagacctaaagtgcttgctttttgcccgttgaccagataaatagaactatctgcattatctatgcagcatggggtttttattatttttacctaaagacgtctctttttggtaataacaaacgtgttttttaaaaaagcctggtttttctcaatacgcctttaaaggtttttaaattgtttcatatctggtcaagttgagatttttaagaacttcatttttaatttgtaataaaagtttacaacttgatttcaaaagtcacaatgcagcctgtataaggtctatataaaaaaaaagggggggctcaaagtccgaggccagtaggtccgtttgcaaggcataggggtaaaagggcggaacggtggaagg

SEQ ID NO: 319179 - DNA, 712 bp, Homo sapiens
  misc_feature (21)..(21): n is a, c, g, or t
  misc_feature (32)..(32): n is a, c, g, or t
  misc_feature (43)..(43): n is a, c, g, or t
  misc_feature (47)..(47): n is a, c, g, or t
aaaaaaaaaaaaaagaaaaanaaaaaggaaanaaaaaaaaaanaaanaaaaaaaaaaaaatttctagggccctcctcgccaaagacagcctagagaggacggcaatgaagaagataaagaaaatcaaggagatgagacccaaggtcagcagccacctcaacgtcggtaccgccgcaacttcaattaccgacgcagacgcccagaaaaccctaaaccacaagatggcaaagagacaaaagcagccgatccaccagctgagaattcgtccgctcccgaggctgagcagggcggggctgagtaaatgccggcttaccatctctaccatcatccggtttagtcatccaacaagaagaaatatgaaattccagcaataagaaatgaacaaaagattggagctgaagacctaaagtgcttgctttttgcccgttgaccagataaatagaactatctgcattatctatgcagcatggggtttttattatttttacctaaagacgtctctttttggtaataacaaacgtgttttttaaaaaagcctggtttttctcaatacgcctttaaaggtttttaaattgtttcatatctggtcaagttgagatttttaagaacttcatttttaatttgtaataaaagtttacaacttgattttttcaaaaaagtcaacaaactgcaagcacctgttaataaaggtcttaaataattgtctttgtgt

SEQ ID NO: 319180 - DNA, 804 bp, Homo sapiens
tctagatcctcgtacgagcgctcgtacgagcgcatcgtaacgagcgctcgtacgagcgtcgacagcgctcgtcgacctcgtaagactacatgtatgcaggtaaggtaattcactgtattcatgttctcccacttagaaacactgaaaatttaacgaaaaaaactataagcacatacatgaaagttggcgctcgttacgcgtacgagcgcaagaaatcaaggagatgagacccaaggtcagcagccacctcaacgtcggtaccgccgcaacttcaattaccgacgcagacgcccagaaaaccctaaaccacaagatggcaaagagacaaaagcagccgatccaccagctgagaattcgtccgctcccgaggctgagcagggcggggctgagtaaatgccggcttaccatctctaccatcatccggtttagtcatccaacaagaagaaatatgaaattccagcaataagaaatgaacaaaagattggagctgaagacctaaagtgcttgctttttgcccgttgaccagataaatagaactatctgcattatctatgcagcatggggtttttattatttttacctaaagacgtctctttttggtaataacaaacgtgttttttaaaaaagcctggtttttctcaatacgcctttaaaggtttttaaattgtttcatatctggtcaagttgagatttttaagaacttcatttttaatttgtaataaaagtttacaacttgattttttcaaaaaagtcaacaaactgcaagcacctgttaataaaggtcttaaataattgtctttgtgt

SEQ ID NO: 319181 - DNA, 1158 bp, Homo sapiens
gtgtcccggcgcttatacggcgtcccccggggacaagaaggtatcgcaacgaaggttttgggaacagtaaatggttcaatgtaaggaacggatatggtttcatcaacaggaatgacaccaaggaagatgtatttgtacaccagactgccataaagaagaataaccccaggaagtaccttcgcagtgtaggagatggagagactgtggagtttgatgttgttgaaggagaaaagggtgcggaggcagcaaatgttacaggtcctggtggtgttccagttcaaggcagtaaatatgcagcagaccgtaaccattatagacgctatccacgtcgtaggggtcctccacgcaattaccagcaaaattaccagaatagtgagagtggggaaaagaacgagggatcggagagtgctcccgaaggccaggcccaacaacgccggccctaccgcaggcgaaggttcccaccttactacatgcggagaccctatgggcgtcgaccacagtattccaaccctcctgtgcagggagaagtgatggagggtgctgacaaccagggtgcaggagaacaaggtagaccagtgaggcagaatatgtatcggggatatagaccacgattccgcaggggccctcctcgccaaagacagcctagagaggacggcaatgaagaagataaagaaaatcaaggagatgagacccaaggtcagcagccacctcaacgtcggtaccgccgcaacttcaattaccgacgcagacgcccagaaaaccctaaaccacaagatggcaaagagacaaaagcagccgatccaccagctgagaattcgtccgctcccgaggctgagcagggcggggctgagtaaatgccggcttaccatctctaccatcatccggtttagtcatccaacaagaagaaatatgaaattccagcaataagaaatgaacaaaagattggagctgaagacctaaagtgcttgttttttaaaaaagcctggtttttctcaatacgcctttaaaggtttttaaattgtttcatatctggtcaagttgagatttttaagaacttcatttttaatttgtaataaaagtttacaacttgattttttcaaaaaagtcaacaaactgcaagcacctgttaataaaggtcttaaataattgtctttgtgt

SEQ ID NO: 319182 - DNA, 832 bp, Homo sapiens
gtgtcccggcgcttatacggcgtcccccggggacaagaaggtatcgcaacgaaggttttgggaacagtaaatggttcaatgtaaggaacggatatggtttcatcaacaggaatgacaccaaggaagatgtatttgtacaccagactgccataaagaagaataaccccaggaagtaccttcgcagtgtaggagatggagagactgtggagtttgatgttgttgaaggagaaaagggtgcggaggcagcaaatgttacaggtcctggtggtgttccagttcaaggcagtaaatatgcagcagaccgtaaccattatagacgctatccacgtcgtaggggtcctccacgcaattaccagcaaaattaccagaatagtgagagtggggaaaagaacgagggatcggagagtgctcccgaaggccaggcccaacaacgccggccctaccgcaggcgaaggttcccaccttactacatgcggagaccctatgggcgtcgaccacagtattccaaccctcctgtgcagggagaagtgatggagggtgctgacaaccagggtgcaggagaacaaggtagaccagtgaggcagaatatgtatcggggatatagaccacgattccgcaggggccctcctcgccaaagacagcctagagaggacggcaatgaagaagataaagaaaatcaaggagatgagacccaaggtcagcagccacctcaacgtcggtaccgccgcaacttcaattaccgacgcagacgcccagaaaaccctaaaccacaagatggcaaagagacaaaagcagccgatccaccagctgatggcgagtgaaattacggcca

SEQ ID NO: 319183 - DNA, 787 bp, Homo sapiens
  misc_feature (626)..(626): n is a, c, g, or t
gtgtcccggcgcttatacggcgtcccccggggacaagaaggtatcgcaacgaaggttttgggaacagtaaatggttcaatgtaaggaacggatatggtttcatcaacaggaatgacaccaaggaagatgtatttgtacaccagactgccataaagaagaataaccccaggaagtaccttcgcagtgtaggagatggagagactgtggagtttgatgttgttgaaggagaaaagggtgcggaggcagcaaatgttacaggtcctggtggtgttccagttcaaggcagtaaatatgcagcagaccgtaaccattatagacgctatccacgtcgtaggggtcctccacgcaattaccagcaaaattaccagaatagtgagagtggggaaaagaacgagggatcggagagtgctcccgaaggccaggcccaacaacgccggccctaccgcaggcgaaggttcccaccttactacatgcggagaccctatgggcgtcgaccacagtattccaaccctcctgtgcagggagaagtgatggagggtgctgacaaccagggtgcaggagaacaaggtagaccagtgaggcagaatatgtatcggggatatagaccacgattccgcagggccctnctcgccaaagacagcctagagagtctcagttcgacggagactctcgacagcacatgaaaaaatctggtaggatgaaatgagtgtcagagcagggaatggaaaggagagtagaaactttatcaatgtgctgtcgagaggtctgaatccacactgattcttga

SEQ ID NO: 319184 - DNA, 572 bp, Homo sapiens
gtgtcccggcgcttatacggcgtcccccggggacaagaaggtatcgcaacgaaggttttgggaacagtaaatggttcaatgtaaggaacggatatggtttcatcaacaggaatgacaccaaggaagatgtatttgtacaccagactgccataaagaagaataaccccaggaagtaccttcgcagtgtaggagatggagagactgtggagtttgatgttgttgaaggagaaaagggtgcggaggcagcaaatgttacaggtcctggtggtgttccagttcaaggcagtaaatatgcagcagaccgtaaccattatagacgctatccacgtcgtaggggtcctccacgcaattaccagcaaaattaccagaatagtgagagtggggaaaagaacgagggatcggagagtgctcccgaaggccaggcccaacaacgccggccctaccgcaggcgaaggttcccaccttactacatgcggagaccctatgggcgtcgaccacagtattccaaccctcctgtgcagggagaagtgatggagggtgctgacaacatatcgcggggacaccacctcttt

SEQ ID NO: 319185 - DNA, 697 bp, Homo sapiens
gtgtcccggcgcttatacggcgtcccccggggacaagaaggtatcgcaacgaaggttttgggaacagtaaatggttcaatgtaaggaacggatatggtttcatcaacaggaatgacaccaaggaagatgtatttgtacaccagactgccataaagaagaataaccccaggaagtaccttcgcagtgtaggagatggagagactgtggagtttgatgttgttgaaggagaaaagggtgcggaggcagcaaatgttacaggtcctggtggtgttccagttcaaggcagtaaatatgcagcagaccgtaaccattatagacgctatccacgtcgtaggggtcctccacgcaattaccagcaaaattaccagaatagtgagagtggggaaaagaacgagggatcggagagtgctcccgaaggccaggcccaacaacgccggccctaccgcaggcgaaggttcccaccttactacatgcggagaccctatgggcgtcgaccacagtattccaaccctcctgtgcagggagaagtgatggagagactgtggagtttgatgttgttgaaggagaaaagggtgcggaggcagcaaatgttacaggtcctggtggtgttccagttcaaggcagtaaatatgcagcagaccgtaaccattatagacgctatccacgtcgtaggggtcctccacggggtaccgagctc

SEQ ID NO: 319186 - DNA, 241 bp, Homo sapiens
aagggtcctgctttccttctgccatgattgtaagtttcctgaagtctccccagccatgcggaactgggagtcaattaaacctttgtttataaattacctagtcttgggtagtatcttcatagcaatgtaaaaaccaattaatacacagggcaaatgtgattttcaattttcctttttattttttatttttgagatggagtcttgctctgtcacccaggctgtagtgcagtggtgtgatctt

SEQ ID NO: 319187 - DNA, 3775 bp, Homo sapiens
atgcgcagtgctcggattttttgcttggctacccggagtgaagcggccgggttgggcgattaacaggccgtggttaggaaggacggagaaggggcgttcgctcctttgggacttttcatgcctcgtttttttttcagatgtggcttggtctgggcgcaaggtcccagcagccagcttaagcttactcttctgtgaaaggggaaagtatcccctgtggaaagcggttaaacttgtggagggggtgcgggacgtgagttcttccccatgccaggcgaatggtgtggccttgagctggtccaggagccggctcgacgtgtctgagggaggccccggagggggcggggaggtggcccacagaacgcgggttctgtaaagagacgttgggaagattcgattccgagaagaggaagaaccggattgaaagagagccaggccgctgagggggagggggctgctaagatggcgtcggcctcctccgggccgtcgtcttcggtcggtttttcatcctttgatcccgcggtcccttcctgtaccttgtcctcagcatctggaatcaagagacccatggcatctgaggtgccttatgcctctggcatgcccatcaagaaaataggccatagaagtgttgattcctcaggagagacaacatataaaaagacaacctcatcagccttgaaaggtgccatccagttaggcattacccacactgtggggagcctgagtaccaaaccagagcgtgatgtcctcatgcaagatttctacgtggttgagagtatcttctttcccagtgaagggagcaacctgacccctgctcatcactacaatgactttcgtttcaagacctatgcacctgttgccttccgctacttccgggagctatttggtatccggcccgatgattacttgtattccctctgcagtgagccgctgattgaactctgtagctctggagctagtggttccctattctatgtgtccagcgacgatgagttcattattaagacagtccaacataaagaggcggaatttctgcagaagctgcttccaggatactacatgaacctcaaccagaaccctcggactttgctgcctaaattctatggactgtactgtgtgcaggcaggtggcaagaacattcggattgtggtgatgaacaatcttttaccaagatcggtaaaaatgcatatcaaatatgacctcaaaggctcaacctacaaacggcgggcttcccagaaagagcgagagaagcctcttcccacatttaaagacctagacttcttacaagacatccctgatggtctttttttggatgctgacatgtacaacgctctctgtaagaccctgcagcgtgactgtttggtgctgcagagcttcaagataatggattacagcctcttgatgtcaatccataatatagatcatgcacaacgagagcccttaagcagtgaaacacagtactcagttgatactcgaagaccggccccccaaaaggctctgtattccacagccatggaatccatccagggagaggctcgacggggtggtaccatggagactgatgaccatatgggtggcatccctgcccggaatagtaaaggggaaaggcttctgctttatattggcatcattgacattctacagtcttacaggtttgttaagaagttggagcactcttggaaagccctggtacatgacggagacactgtctcagtgcatcgcccaggcttctacgctgaacggttccagcgcttcatgtgcaacacagtatttaagaagattcccttgaagccttctccttccaaaaagtttcggtctggctcatctttctctcggcgagcaggctccagtggcaactcctgcattacttaccagccatcggtctctggggaacacaaggcacaagtgacaacaaaggcagaagtggagccaggcgttcaccttggtcgtcctgatgttttacctcagactccacctttggaggaaatcagtgagggctcgcctattcctgaccccagtttctcacctctagttggagagactttgcaaatgctaactacaagtacaaccttggaaaagcttgaagttgcagagtcagagttcacccattaagcgcaaagcctcagaagacctggaacaagattctgccatctctgtgatcccaagatgtcagcccttgccccagcaatgctgaattttcttctacttggtcatcaaaaaaggagtgtaatagaagtgaggggagctgctcctccatcttcttcctgaagaagaaccttctctccttcctcttcctcatgaatgggccttagtgcctcagagagttgaggaccgcagcatcccctccactccagagttgggtggtacggattttcaactggccaaccctttgcctccactattgaatttttttcagacccccattcttcatgctggaaatgggattgctggacttggcagctttctttcccctcgtctttgactaggaaccggactcttaatttcctcaggacagactagctggcacattatccctaccttagttctttctctctgactcctggaagaatactcctgtaatctctgtaaaggtttttgggggataagggtgtttaaccacctcccagctttcttcttctttttttttttctgaaaaaaggaaaaagcacacagcacacaatttcaagccattttcagatcagaactccagaagtgttgacaagatgcctattcgtagagttccctcagaagagccatggtgtttatgaagagaagagtagtgattgctctgccagaagcagctcctctttaaactcctcctctcttgatgaatttcttaaggctgaaggaatgaagagagtgggacatggggtaatctttatcccttttgttaaaacaggaggcagccatgggctgggagatcatagcccttcctaggcagaatcctgttcactgccaggctatagtaattattactattttgcaatttgaaatatattctggttgtttttctaaatgtgaagacttaccaaatgaattttagatcattctccagaggagattttttttgctcttctcatcttttccaacagtgttctcctgtttgtggagctaaggtaaagaggggacacttctgtctgtttaacagacagtccatatctgtgaggccagcaaatattttcttaaactcatggggagacagcagattcttgccttggtgaggtcattgctgtgccatatgtcctacccccctgtcttcatgcagggaagttggaaatgggggctacatatgccctctcctccccgtctacaagagttgtggttttccatctgatccttccactcttgtcaggggaagaagggggcctggtatctcaggcagattgttgaattcctgttctatcccttctctatcccaccctgccttgataatatgttagcccataccccaaataactgtctatattagacacccccagccagtttctggctgcctgtctttgctgccatgttttttacaagaaggaaagaattcttgctatttttttttcataatttactatttatgatgtatttaagtgttttattaaggacagagttctgttaggggtgggagggaatatttgagggagggctgggtcttagggaaaggaatggggaagcaacatttttattaagtgttactatttgcctctactttgtattgttcagaaatggcaaatacaatataaaagtgatatatggttttaatgtaataaactttaatgagttatttaga

SEQ ID NO: 319188 - DNA, 1737 bp, Homo sapiens
atgcgcagtgctcggattttttgcttggctacccggagtgaagcggccgggttgggcgattaacaggccgtggttaggaaggacggagaaggggcgttcgctcctttgggacttttcatgcctcgtttttttttcagatgtggcttggtctgggcgcaaggtcccagcagccagcttaagcttactcttctgtgaaaggggaaagtatcccctgtggaaaatccgtaccacccaactctgctgtctccccatgagtttaagaaaatattttcttaaactcatggggagacagcagattcttgccttggtgaggtcattgctgtgccatatgtcctacccccctgtcttcagcaaatattttcttaaactcatggggagacagcagagttgggtggtacggattttcaactggccaaccctttgcctccactattgaatttttttcagacccccattcttcatgctggaaatgggattgctggacttggcagctttctttcccctcgtctttgactaggaaccggactcttaatttcctcaggacagactagctggcacattatccctaccttagttctttctctctgactcctggaagaatactcctgtaatctctgtaaaggtttttgggggataagggtgtttaaccacctcccagctttcttcttctttttttttttctgaaaaaaggaaaaagcacacagcacacaatttcaagccattttcagatcagaactccagaagtgttgacaagatgcctattcgtagagttccctcagaagagccatggtgtttatgaagagaagagtagtgattgctctgccagaagcagctcctctttaaactcctcctctcttgatgaatttcttaaggctgaaggaatgaagagagtgggacatggggtaatctttatcccttttgttaaaacaggaggcagccatgggctgggagatcatagcccttcctaggcagaatcctgttcactgccaggctatagtaattattactattttgcaatttgaaatatattctggttgtttttctaaatgtgaagacttaccaaatgaattttagatcattctccagaggagattttttttgctcttctcatcttttccaacagtgttctcctgtttgtggagctaaggtaaagaggggacacttctgtctgtttaacagacagtccatatctgtgaggccagcaaatattttcttaaactcatgggaagttggaaatgggggctacatatgccctctcctccccgtctacaagagttgtggttttccatctgatccttccactcttgtcaggggaagaagggggcctggtatctcaggcagattgttgaattcctgttctatcccttctctatcccaccctgccttgataatatgttagcccataccccaaataactgtctatattagacacccccagccagtttctggctgcctgtctttgctgccatgttttttacaagaaggaaagaattcttgctatttttttttcataatttactatttatgatgtatttaagtgttttattaaggacagagttctgttaggggtgggagggaatatttgagggagggctgggtcttagggaaaggaatggggaagcaacatttttattaagtgttactatttgcctctactttgtattgttcagaaatggcaaatacaatataaaagtgatatatggttttaatgtaataaactttaatgagttatttaga

SEQ ID NO: 319189 - DNA, 3811 bp, Homo sapiens
atgcgcagtgctcggattttttgcttggctacccggagtgaagcggccgggttgggcgattaacaggccgtggttaggaaggacggagaaggggcgttcgctcctttgggacttttcatgcctcgtttttttttcagatgtggcttggtctgggcgcaaggtcccagcagccagcttaagcttactcttctgtgaaaggggaaagtatcccctgtggaaagcggttaaacttgtggagggggtgcgggacgtgagttcttccccatgccaggcgaatggtgtggccttgagctggtccaggagccggctcgacgtgtctgagggaggccccggagggggcggggaggtggcccacagaacgcgggttctgtaaagagacgttgggaagattcgattccgagaagaggaagaaccggattgaaagagagccaggccgctgagggggagggggctgctaagatggcgtcggcctcctccgggccgtcgtcttcggtcggtttttcatcctttgatcccgcggtcccttcctgtaccttgtcctcagcatctggaatcaagagacccatggcatctgaggtcttggaagctagacaggattcttacatctcattggtgccttatgcctctggcatgcccatcaagaaaataggccatagaagtgttgattcctcaggagagacaacatataaaaagacaacctcatcagccttgaaaggtgccatccagttaggcattacccacactgtggggagcctgagtaccaaaccagagcgtgatgtcctcatgcaagatttctacgtggttgagagtatcttctttcccagtgaagggagcaacctgacccctgctcatcactacaatgactttcgtttcaagacctatgcacctgttgccttccgctacttccgggagctatttggtatccggcccgatgattacttgtattccctctgcagtgagccgctgattgaactctgtagctctggagctagtggttccctattctatgtgtccagcgacgatgagttcattattaagacagtccaacataaagaggcggaatttctgcagaagctgcttccaggatactacatgaacctcaaccagaaccctcggactttgctgcctaaattctatggactgtactgtgtgcaggcaggtggcaagaacattcggattgtggtgatgaacaatcttttaccaagatcggtaaaaatgcatatcaaatatgacctcaaaggctcaacctacaaacggcgggcttcccagaaagagcgagagaagcctcttcccacatttaaagacctagacttcttacaagacatccctgatggtctttttttggatgctgacatgtacaacgctctctgtaagaccctgcagcgtgactgtttggtgctgcagagcttcaagataatggattacagcctcttgatgtcaatccataatatagatcatgcacaacgagagcccttaagcagtgaaacacagtactcagttgatactcgaagaccggccccccaaaaggctctgtattccacagccatggaatccatccagggagaggctcgacggggtggtaccatggagactgatgaccatatgggtggcatccctgcccggaatagtaaaggggaaaggcttctgctttatattggcatcattgacattctacagtcttacaggtttgttaagaagttggagcactcttggaaagccctggtacatgacggagacactgtctcagtgcatcgcccaggcttctacgctgaacggttccagcgcttcatgtgcaacacagtatttaagaagattcccttgaagccttctccttccaaaaagtttcggtctggctcatctttctctcggcgagcaggctccagtggcaactcctgcattacttaccagccatcggtctctggggaacacaaggcacaagtgacaacaaaggcagaagtggagccaggcgttcaccttggtcgtcctgatgttttacctcagactccacctttggaggaaatcagtgagggctcgcctattcctgaccccagtttctcacctctagttggagagactttgcaaatgctaactacaagtacaaccttggaaaagcttgaagttgcagagtcagagttcacccattaagcgcaaagcctcagaagacctggaacaagattctgccatctctgtgatcccaagatgtcagcccttgccccagcaatgctgaattttcttctacttggtcatcaaaaaaggagtgtaatagaagtgaggggagctgctcctccatcttcttcctgaagaagaaccttctctccttcctcttcctcatgaatgggccttagtgcctcagagagttgaggaccgcagcatcccctccactccagagttgggtggtacggattttcaactggccaaccctttgcctccactattgaatttttttcagacccccattcttcatgctggaaatgggattgctggacttggcagctttctttcccctcgtctttgactaggaaccggactcttaatttcctcaggacagactagctggcacattatccctaccttagttctttctctctgactcctggaagaatactcctgtaatctctgtaaaggtttttgggggataagggtgtttaaccacctcccagctttcttcttctttttttttttctgaaaaaaggaaaaagcacacagcacacaatttcaagccattttcagatcagaactccagaagtgttgacaagatgcctattcgtagagttccctcagaagagccatggtgtttatgaagagaagagtagtgattgctctgccagaagcagctcctctttaaactcctcctctcttgatgaatttcttaaggctgaaggaatgaagagagtgggacatggggtaatctttatcccttttgttaaaacaggaggcagccatgggctgggagatcatagcccttcctaggcagaatcctgttcactgccaggctatagtaattattactattttgcaatttgaaatatattctggttgtttttctaaatgtgaagacttaccaaatgaattttagatcattctccagaggagattttttttgctcttctcatcttttccaacagtgttctcctgtttgtggagctaaggtaaagaggggacacttctgtctgtttaacagacagtccatatctgtgaggccagcaaatattttcttaaactcatggggagacagcagattcttgccttggtgaggtcattgctgtgccatatgtcctacccccctgtcttcatgcagggaagttggaaatgggggctacatatgccctctcctccccgtctacaagagttgtggttttccatctgatccttccactcttgtcaggggaagaagggggcctggtatctcaggcagattgttgaattcctgttctatcccttctctatcccaccctgccttgataatatgttagcccataccccaaataactgtctatattagacacccccagccagtttctggctgcctgtctttgctgccatgttttttacaagaaggaaagaattcttgctatttttttttcataatttactatttatgatgtatttaagtgttttattaaggacagagttctgttaggggtgggagggaatatttgagggagggctgggtcttagggaaaggaatggggaagcaacatttttattaagtgttactatttgcctctactttgtattgttcagaaatggcaaatacaatataaaagtgatatatggttttaatgtaataaactttaatgagttatttaga

SEQ ID NO: 319190 - DNA, 3306 bp, Homo sapiens
gtttcaactttctgtgctgtggggtcagtggtaagagagcatctggaatcaagagacccatggcatctgaggtcttggaagctagacaggattcttacatctcattggtgccttatgcctctggcatgcccatcaagaaaataggccatagaagtgttgattcctcaggagagacaacatataaaaagacaacctcatcagccttgaaaggtgccatccagttaggcattacccacactgtggggagcctgagtaccaaaccagagcgtgatgtcctcatgcaagatttctacgtggttgagagtatcttctttcccagtgaagggagcaacctgacccctgctcatcactacaatgactttcgtttcaagacctatgcacctgttgccttccgctacttccgggagctatttggtatccggcccgatgattacttgtattccctctgcagtgagccgctgattgaactctgtagctctggagctagtggttccctattctatgtgtccagcgacgatgagttcattattaagacagtccaacataaagaggcggaatttctgcagaagctgcttccaggatactacatgaacctcaaccagaaccctcggactttgctgcctaaattctatggactgtactgtgtgcaggcaggtggcaagaacattcggattgtggtgatgaacaatcttttaccaagatcggtaaaaatgcatatcaaatatgacctcaaaggctcaacctacaaacggcgggcttcccagaaagagcgagagaagcctcttcccacatttaaagacctagacttcttacaagacatccctgatggtctttttttggatgctgacatgtacaacgctctctgtaagaccctgcagcgtgactgtttggtgctgcagagcttcaagataatggattacagcctcttgatgtcaatccataatatagatcatgcacaacgagagcccttaagcagtgaaacacagtactcagttgatactcgaagaccggccccccaaaaggctctgtattccacagccatggaatccatccagggagaggctcgacggggtggtaccatggagactgatgaccatatgggtggcatccctgcccggaatagtaaaggggaaaggcttctgctttatattggcatcattgacattctacagtcttacaggtttgttaagaagttggagcactcttggaaagccctggtacatgacggagacactgtctcagtgcatcgcccaggcttctacgctgaacggttccagcgcttcatgtgcaacacagtatttaagaagattcccttgaagccttctccttccaaaaagtttcggtctggctcatctttctctcggcgagcaggctccagtggcaactcctgcattacttaccagccatcggtctctggggaacacaaggcacaagtgacaacaaaggcagaagtggagccaggcgttcaccttggtcgtcctgatgttttacctcagactccacctttggaggaaatcagtgagggctcgcctattcctgaccccagtttctcacctctagttggagagactttgcaaatgctaactacaagtacaaccttggaaaagcttgaagttgcagagtcagagttcacccattaagcgcaaagcctcagaagacctggaacaagattctgccatctctgtgatcccaagatgtcagcccttgccccagcaatgctgaattttcttctacttggtcatcaaaaaaggagtgtaatagaagtgaggggagctgctcctccatcttcttcctgaagaagaaccttctctccttcctcttcctcatgaatgggccttagtgcctcagagagttgaggaccgcagcatcccctccactccagagttgggtggtacggattttcaactggccaaccctttgcctccactattgaatttttttcagacccccattcttcatgctggaaatgggattgctggacttggcagctttctttcccctcgtctttgactaggaaccggactcttaatttcctcaggacagactagctggcacattatccctaccttagttctttctctctgactcctggaagaatactcctgtaatctctgtaaaggtttttgggggataagggtgtttaaccacctcccagctttcttcttctttttttttttctgaaaaaaggaaaaagcacacagcacacaatttcaagccattttcagatcagaactccagaagtgttgacaagatgcctattcgtagagttccctcagaagagccatggtgtttatgaagagaagagtagtgattgctctgccagaagcagctcctctttaaactcctcctctcttgatgaatttcttaaggctgaaggaatgaagagagtgggacatggggtaatctttatcccttttgttaaaacaggaggcagccatgggctgggagatcatagcccttcctaggcagaatcctgttcactgccaggctatagtaattattactattttgcaatttgaaatatattctggttgtttttctaaatgtgaagacttaccaaatgaattttagatcattctccagaggagattttttttgctcttctcatcttttccaacagtgttctcctgtttgtggagctaaggtaaagaggggacacttctgtctgtttaacagacagtccatatctgtgaggccagcaaatattttcttaaactcatggggagacagcagattcttgccttggtgaggtcattgctgtgccatatgtcctacccccctgtcttcatgcagggaagttggaaatgggggctacatatgccctctcctccccgtctacaagagttgtggttttccatctgatccttccactcttgtcaggggaagaagggggcctggtatctcaggcagattgttgaattcctgttctatcccttctctatcccaccctgccttgataatatgttagcccataccccaaataactgtctatattagacacccccagccagtttctggctgcctgtctttgctgccatgttttttacaagaaggaaagaattcttgctatttttttttcataatttactatttatgatgtatttaagtgttttattaaggacagagttctgttaggggtgggagggaatatttgagggagggctgggtcttagggaaaggaatggggaagcaacatttttattaagtgttactatttgcctctactttgtattgttcagaaatggcaaatacaatataaaagtgatatatggttttaatgtaataaactttaatgagttatttaga

SEQ ID NO: 319191 - DNA, 2992 bp, Homo sapiens
tccaaaaaagaacactataatgaatatagaacccgttggttaaacaaagcaggctaggtacagagctacagcgaagtttcacggagaactatcagatacgatccacacagcgatacagatgaggtcttgctatgttacccaggctggtctcaaattcctgagctcaagtgatcctcctgtttggcctcccaaagtgctggggttacaggcatgagccactgcacctggctattttcgtcttctgttcttagttcagcttctagtttggggaatgagaacctcaaccagaaccctcggactttgctgcctaaattctatggactgtactgtgtgcaggcaggtggcaagaacattcggattgtggtgatgaacaatcttttaccaagatcggtaaaaatgcatatcaaatatgacctcaaaggctcaacctacaaacggcgggcttcccagaaagagcgagagaagcctcttcccacatttaaagacctagacttcttacaagacatccctgatggtctttttttggatgctgacatgtacaacgctctctgtaagaccctgcagcgtgactgtttggtgctgcagagcttcaagataatggattacagcctcttgatgtcaatccataatatagatcatgcacaacgagagcccttaagcagtgaaacacagtactcagttgatactcgaagaccggccccccaaaaggctctgtattccacagccatggaatccatccagggagaggctcgacggggtggtaccatggagactgatgaccatatgggtggcatccctgcccggaatagtaaaggggaaaggcttctgctttatattggcatcattgacattctacagtcttacaggtttgttaagaagttggagcactcttggaaagccctggtacatgacggagacactgtctcagtgcatcgcccaggcttctacgctgaacggttccagcgcttcatgtgcaacacagtatttaagaagattcccttgaagccttctccttccaaaaagtttcggtctggctcatctttctctcggcgagcaggctccagtggcaactcctgcattacttaccagccatcggtctctggggaacacaaggcacaagtgacaacaaaggcagaagtggagccaggcgttcaccttggtcgtcctgatgttttacctcagactccacctttggaggaaatcagtgagggctcgcctattcctgaccccagtttctcacctctagttggagagactttgcaaatgctaactacaagtacaaccttggaaaagcttgaagttgcagagtcagagttcacccattaagcgcaaagcctcagaagacctggaacaagattctgccatctctgtgatcccaagatgtcagcccttgccccagcaatgctgaattttcttctacttggtcatcaaaaaaggagtgtaatagaagtgaggggagctgctcctccatcttcttcctgaagaagaaccttctctccttcctcttcctcatgaatgggccttagtgcctcagagagttgaggaccgcagcatcccctccactccagagttgggtggtacggattttcaactggccaaccctttgcctccactattgaatttttttcagacccccattcttcatgctggaaatgggattgctggacttggcagctttctttcccctcgtctttgactaggaaccggactcttaatttcctcaggacagactagctggcacattatccctaccttagttctttctctctgactcctggaagaatactcctgtaatctctgtaaaggtttttgggggataagggtgtttaaccacctcccagctttcttcttctttttttttttctgaaaaaaggaaaaagcacacagcacacaatttcaagccattttcagatcagaactccagaagtgttgacaagatgcctattcgtagagttccctcagaagagccatggtgtttatgaagagaagagtagtgattgctctgccagaagcagctcctctttaaactcctcctctcttgatgaatttcttaaggctgaaggaatgaagagagtgggacatggggtaatctttatcccttttgttaaaacaggaggcagccatgggctgggagatcatagcccttcctaggcagaatcctgttcactgccaggctatagtaattattactattttgcaatttgaaatatattctggttgtttttctaaatgtgaagacttaccaaatgaattttagatcattctccagaggagattttttttgctcttctcatcttttccaacagtgttctcctgtttgtggagctaaggtaaagaggggacacttctgtctgtttaacagacagtccatatctgtgaggccagcaaatattttcttaaactcatggggagacagcagattcttgccttggtgaggtcattgctgtgccatatgtcctacccccctgtcttcatgcagggaagttggaaatgggggctacatatgccctctcctccccgtctacaagagttgtggttttccatctgatccttccactcttgtcaggggaagaagggggcctggtatctcaggcagattgttgaattcctgttctatcccttctctatcccaccctgccttgataatatgttagcccataccccaaataactgtctatattagacacccccagccagtttctggctgcctgtctttgctgccatgttttttacaagaaggaaagaattcttgctatttttttttcataatttactatttatgatgtatttaagtgttttattaaggacagagttctgttaggggtgggagggaatatttgagggagggctgggtcttagggaaaggaatggggaagcaacatttttattaagtgttactatttgcctctactttgtattgttcagaaatggcaaatacaatataaaagtgatatatggttttaatgtaataaactttaatgagttatttaga

SEQ ID NO: 319192 - DNA, 1792 bp, Homo sapiens
aaaaatatttttggtacctcatacttggaggctgaggctgaaatagaaatttcttaacgcttgaattccatttctgcttaatctcatactccacatccttaactttacactctcccttttcagtaagcgcaaagcctcagaagacctggaacaagattctgccatctctgtgatcccaagatgtcagcccttgccccagcaatgctgaattttcttctacttggtcatcaaaaaaggagtgtaatagaagtgaggggagctgctcctccatcttcttcctgaagaagaaccttctctccttcctcttcctcatgaatgggccttagtgcctcagagagttgaggaccgcagcatcccctccactccagagttgggtggtacggattttcaactggccaaccctttgcctccactattgaatttttttcagacccccattcttcatgctggaaatgggattgctggacttggcagctttctttcccctcgtctttgactaggaaccggactcttaatttcctcaggacagactagctggcacattatccctaccttagttctttctctctgactcctggaagaatactcctgtaatctctgtaaaggtttttgggggataagggtgtttaaccacctcccagctttcttcttctttttttttttctgaaaaaaggaaaaagcacacagcacacaatttcaagccattttcagatcagaactccagaagtgttgacaagatgcctattcgtagagttccctcagaagagccatggtgtttatgaagagaagagtagtgattgctctgccagaagcagctcctctttaaactcctcctctcttgatgaatttcttaaggctgaaggaatgaagagagtgggacatggggtaatctttatcccttttgttaaaacaggaggcagccatgggctgggagatcatagcccttcctaggcagaatcctgttcactgccaggctatagtaattattactattttgcaatttgaaatatattctggttgtttttctaaatgtgaagacttaccaaatgaattttagatcattctccagaggagattttttttgctcttctcatcttttccaacagtgttctcctgtttgtggagctaaggtaaagaggggacacttctgtctgtttaacagacagtccatatctgtgaggccagcaaatattttcttaaactcatggggagacagcagattcttgccttggtgaggtcattgctgtgccatatgtcctacccccctgtcttcatgcagggaagttggaaatgggggctacatatgccctctcctccccgtctacaagagttgtggttttccatctgatccttccactcttgtcaggggaagaagggggcctggtatctcaggcagattgttgaattcctgttctatcccttctctatcccaccctgccttgataatatgttagcccataccccaaataactgtctatattagacacccccagccagtttctggctgcctgtctttgctgccatgttttttacaagaaggaaagaattcttgctatttttttttcataatttactatttatgatgtatttaagtgttttattaaggacagagttctgttaggggtgggagggaatatttgagggagggctgggtcttagggaaaggaatggggaagcaacatttttattaagtgttactatttgcctctactttgtattgttcagaaatggcaaatacaatataaaagtgatatatggttttaatgtaataaactttaatgagttatttaga

SEQ ID NO: 319193 - DNA, 1809 bp, Homo sapiens
atgcgcagtgctcggattttttgcttggctacccggagtgaagcggccgggttgggcgattaacaggccgtggttaggaaggacggagaaggggcgttcgctcctttgggacttttcatgcctcgtttttttttcagatgtggcttggtctgggcgcaaggtcccagcagccagcttaagcttactcttctgtgaaaggggaaagtatcccctgtggaaaatccgtaccacccaactctgctgtctccccatgagtttaagaaaatattttcttaaactcatggggagacagcagattcttgccttggtgaggtcattgctgtgccatatgtcctacccccctgtcttcagcaaatattttcttaaactcatggggagacagcagagttgggtggtacggattttcaactggccaaccctttgcctccactattgaatttttttcagacccccattcttcatgctggaaatgggattgctggacttggcagctttctttcccctcgtctttgactaggaaccggactcttaatttcctcaggacagactagctggcacattatccctaccttagttctttctctctgactcctggaagaatactcctgtaatctctgtaaaggtttttgggggataagggtgtttaaccacctcccagctttcttcttctttttttttttctgaaaaaaggaaaaagcacacagcacacaatttcaagccattttcagatcagaactccagaagtgttgacaagatgcctattcgtagagttccctcagaagagccatggtgtttatgaagagaagagtagtgattgctctgccagaagcagctcctctttaaactcctcctctcttgatgaatttcttaaggctgaaggaatgaagagagtgggacatggggtaatctttatcccttttgttaaaacaggaggcagccatgggctgggagatcatagcccttcctaggcagaatcctgttcactgccaggctatagtaattattactattttgcaatttgaaatatattctggttgtttttctaaatgtgaagacttaccaaatgaattttagatcattctccagaggagattttttttgctcttctcatcttttccaacagtgttctcctgtttgtggagctaaggtaaagaggggacacttctgtctgtttaacagacagtccatatctgtgaggccagcaaatattttcttaaactcatggggagacagcagattcttgccttggtgaggtcattgctgtgccatatgtcctacccccctgtcttcatgcagggaagttggaaatgggggctacatatgccctctcctccccgtctacaagagttgtggttttccatctgatccttccactcttgtcaggggaagaagggggcctggtatctcaggcagattgttgaattcctgttctatcccttctctatcccaccctgccttgataatatgttagcccataccccaaataactgtctatattagacacccccagccagtttctggctgcctgtctttgctgccatgttttttacaagaaggaaagaattcttgctatttttttttcataatttactatttatgatgtatttaagtgttttattaaggacagagttctgttaggggtgggagggaatatttgagggagggctgggtcttagggaaaggaatggggaagcaacatttttattaagtgttactatttgcctctactttgtattgttcagaaatggcaaatacaatataaaagtgatatatggttttaatgtaataaactttaatgagttatttaga

SEQ ID NO: 319194 - DNA, 1738 bp, Homo sapiens
aaaaatatttttggtacctcatacttggaggctgaggctgaaatagaaatttcttaacgcttgaattccatttctgcttaatctcatactccacatccttaactttacactctcccttttcagtaagcgcaaagcctcagaagacctggaacaagattctgccatctctgtgatcccaagatgtcagcccttgccccagcaatgctgaattttcttctacttggtcatcaaaaaaggagtgtaatagaagtgaggggagctgctcctccatcttcttcctgaagaagaaccttctctccttcctcttcctcatgaatgggccttagtgcctcagagagttgaggaccgcagcatcccctccactccagagttgggtggtacggattttcaactggccaaccctttgcctccactattgaatttttttcagacccccattcttcatgctggaaatgggattgctggacttggcagctttctttcccctcgtctttgactaggaaccggactcttaatttcctcaggacagactagctggcacattatccctaccttagttctttctctctgactcctggaagaatactcctgtaatctctgtaaaggtttttgggggataagggtgtttaaccacctcccagctttcttcttctttttttttttctgaaaaaagtgttgacaagatgcctattcgtagagttccctcagaagagccatggtgtttatgaagagaagagtagtgattgctctgccagaagcagctcctctttaaactcctcctctcttgatgaatttcttaaggctgaaggaatgaagagagtgggacatggggtaatctttatcccttttgttaaaacaggaggcagccatgggctgggagatcatagcccttcctaggcagaatcctgttcactgccaggctatagtaattattactattttgcaatttgaaatatattctggttgtttttctaaatgtgaagacttaccaaatgaattttagatcattctccagaggagattttttttgctcttctcatcttttccaacagtgttctcctgtttgtggagctaaggtaaagaggggacacttctgtctgtttaacagacagtccatatctgtgaggccagcaaatattttcttaaactcatggggagacagcagattcttgccttggtgaggtcattgctgtgccatatgtcctacccccctgtcttcatgcagggaagttggaaatgggggctacatatgccctctcctccccgtctacaagagttgtggttttccatctgatccttccactcttgtcaggggaagaagggggcctggtatctcaggcagattgttgaattcctgttctatcccttctctatcccaccctgccttgataatatgttagcccataccccaaataactgtctatattagacacccccagccagtttctggctgcctgtctttgctgccatgttttttacaagaaggaaagaattcttgctatttttttttcataatttactatttatgatgtatttaagtgttttattaaggacagagttctgttaggggtgggagggaatatttgagggagggctgggtcttagggaaaggaatggggaagcaacatttttattaagtgttactatttgcctctactttgtattgttcagaaatggcaaatacaatataaaagtgatatatggttttaatgtaataaactttaatgagttatttaga

SEQ ID NO: 319195 - DNA, 958 bp, Homo sapiens
tctctgcccgttgctcacattatcacctgagctctgcctcctgtcagatcagcacagccattagattctcacaggagtgaaatatcctattgtgaactgcacgttcaagggatctaggtcacatgctccttattagactctaatgcctgatgatatgtcattgtctcctttctcttcactcgaaacccgggtttcgagtgaagacttaccaaatgaattttagatcattctccagaggagattttttttgctcttctcatcttttccaacagtgttctcctgtttgtggagctaaggtaaagaggggacacttctgtctgtttaacagacagtccatatctgtgaggccagcaaatattttcttaaactcatggggagacagcagattcttgccttggtgaggtcattgctgtgccatatgtcctacccccctgtcttcatgcagggaagttggaaatgggggctacatatgccctctcctccccgtctacaagagttgtggttttccatctgatccttccactcttgtcaggggaagaagggggcctggtatctcaggcagattgttgaattcctgttctatcccttctctatcccaccctgccttgataatatgttagcccataccccaaataactgtctatattagacacccccagccagtttctggctgcctgtctttgctgccatgttttttacaagaaggaaagaattcttgctatttttttttcataatttactatttatgatgtatttaagtgttttattaaggacagagttctgttaggggtgggagggaatatttgagggagggctgggtcttagggaaaggaatggggaagcaacatttttattaagtgttactatttgcctctactttgtattgttcagaaatggcaaatacaatataaaagtgatatatggttttaatgtaataaactttaatgagttatttaga

SEQ ID NO: 319196 - DNA, 2035 bp, Homo sapiens
atgcgcagtgctcggattttttgcttggctacccggagtgaagcggccgggttgggcgattaacaggccgtggttaggaaggacggagaaggggcgttcgctcctttgggacttttcatgcctcgtttttttttcagatgtggcttggtctgggcgcaaggtcccagcagccagcttaagcttactcttctgtgaaaggggaaagtatcccctgtggaaagcggttaaacttgtggagggggtgcgggacgtgagttcttccccatgccaggcgaatggtgtggccttgagctggtccaggagccggctcgacgtgtctgagggaggccccggagggggcggggaggtggcccacagaacgcgggttctgtaaagagacgttgggaagattcgattccgagaagaggaagaaccggattgaaagagagccaggccgctgagggggagggggctgctaagatggcgtcggcctcctccgggccgtcgtcttcggtcggtttttcatcctttgatcccgcggtcccttcctgtaccttgtcctcagcatctggaatcaagagacccatggcatctgaggtgccttatgcctctggcatgcccatcaagaaaataggccatagaagtgttgattcctcaggagagacaacatataaaaagacaacctcatcagccttgaaaggtgccatccagttaggcattacccacactgtggggagcctgagtaccaaaccagagcgtgatgtcctcatgcaagatttctacgtggttgagagtatcttctttcccagtgaagggagcaacctgacccctgctcatcactacaatgactttcgtttcaagacctatgcacctgttgccttccgctacttccgggagctatttggtatccggcccgatgattacttgtattccctctgcagtgagccgctgattgaactctgtagctctggagctagtggttccctattctatgtgtccagcgacgatgagttcattattaagacagtccaacataaagaggcggaatttctgcagaagctgcttccaggatactacatgaacctcaaccagaaccctcggactttgctgcctaaattctatggactgtactgtgtgcaggcaggtggcaagaacattcggattgtggtgatgaacaatcttttaccaagatcggtaaaaatgcatatcaaatatgacctcaaaggctcaacctacaaacggcgggcttcccagaaagagcgagagaagcctcttcccacatttaaagacctagacttcttacaagacatccctgatggtctttttttggatgctgacatgtacaacgctctctgtaagaccctgcagcgtgactgtttggtgctgcagagcttcaagataatggattacagcctcttgatgtcaatccataatatagatcatgcacaacgagagcccttaagcagtgaaacacagtactcagttgatactcgaagaccggccccccaaaaggctctgtattccacagccatggaatccatccagggagaggctcgacggggtggtaccatggagactgatgaccatatgggtggcatccctgcccggaatagtaaaggggaaaggcttctgctttatattggcatcattgacattctacagtcttacaggtttgttaagaagttggagcactcttggaaagccctggtacatgacggagacactgtctcagtgcatcgcccaggcttctacgctgaacggttccagcgcttcatgtgcaacacagtatttaagaagattccctgtaagtggtttctaccaattgactgcctactcctgcccagtggctcccttaccccaagagaacagagggcaggacacctctggtagggagctgccaatgccagaggcctctccttccacctacatcccatgagagccatttcttgtcctttgtgttagtctgtcatagtcatttccaagttgctgtttcccccttggctcttcctgcatatgtcaatgaggtgaggaccatttctggggaattgggatttgc

SEQ ID NO: 319197 - DNA, 1133 bp, Homo sapiens
atgcgcagtgctcggattttttgcttggctacccggagtgaagcggccgggttgggcgattaacaggccgtggttaggaaggacggagaaggggcgttcgctcctttgggacttttcatgcctcgtttttttttcagatgtggcttggtctgggcgcaaggtcccagcagccagcttaagcttactcttctgtgaaaggggaaagtatcccctgtggaaagcggttaaacttgtggagggggtgcgggacgtgagttcttccccatgccaggcgaatggtgtggccttgagctggtccaggagccggctcgacgtgtctgagggaggccccggagggggcggggaggtggcccacagaacgcgggttctgtaaagagacgttgggaagattcgattccgagaagaggaagaaccggattgaaagagagccaggccgctgagggggagggggctgctaagatggcgtcggcctcctccgggccgtcgtcttcggtcggtttttcatcctttgatcccgcggtcccttcctgtaccttgtcctcagcatctggaatcaagagacccatggcatctgaggtgccttatgcctctggcatgcccatcaagaaaataggccatagaagtgttgattcctcaggagagacaacatataaaaagacaacctcatcagccttgaaaggtgccatccagttaggcattacccacactgtggggagcctgagtaccaaaccagagcgtgatgtcctcatgcaagatttctacgtggttgagagtatcttctttcccagtgaagggagcaacctgacccctgctcatcactacaatgactttcgtttcaagacctatgcacctgttgccttccgctacttccgggagctatttggtatccggcccgatgattacttgtattccctctgcagtgagccgctgattgaactctgtagctctggagctagtggttccctattctatgtgtccagcgacgatgagttcattattaagacagtccaacataaagaggcggaatttctgcagaagctgcttccaggatactacatgagtctcgctttgttgtccaagccgagattgggccactgctctccagtctgggcgagagagtgagaccctgtctc

SEQ ID NO: 319198 - DNA, 1551 bp, Homo sapiens
atgcgcagtgctcggattttttgcttggctacccggagtgaagcggccgggttgggcgattaacaggccgtggttaggaaggacggagaaggggcgttcgctcctttgggacttttcatgcctcgtttttttttcagatgtggcttggtctgggcgcaaggtcccagcagccagcttaagcttactcttctgtgaaaggggaaagtatcccctgtggaaagcggttaaacttgtggagggggtgcgggacgtgagttcttccccatgccaggcgaatggtgtggccttgagctggtccaggagccggctcgacgtgtctgagggaggccccggagggggcggggaggtggcccacagaacgcgggttctgtaaagagacgttgggaagattcgattccgagaagaggaagaaccggattgaaagagagccaggccgctgagggggagggggctgctaagatggcgtcggcctcctccgggccgtcgtcttcggtcggtttttcatcctttgatcccgcggtcccttcctgtaccttgtcctcagcatctggaatcaagagacccatggcatctgaggtgccttatgcctctggcatgcccatcaagaaaataggccatagaagtgttgattcctcaggagagacaacatataaaaagacaacctcatcagccttgaaaggtgccatccagttaggcattacccacactgtggggagcctgagtaccaaaccagagcgtgatgtcctcactcactcactcactcactcactcactcatcactcactcactcactcactcactcactcatcactcactcactcactcactcactcactcatcactcactcactcactcactcactcactcatcactcactcactcactcactcactcactcatcactcactcactcactcactcactcactcatcactcactcactcactcactcactcactcatcactcactcactcactcactcactcactcatcactcactcactcactcactcactcactcatcactcactcactcactcactcactcactcatcactcactcactcactcactcactcactcatcactcactcactcactcactcactcactcatcactcactcactcactcactcactcactcatcactcactcactcactcactcactcactcatcactcactcactcactcactcactcactcatcactcactcactcactcactcactcactcatcactcactcactcactcactcactcactcatcactcactcactcactcactcactcactcatcactcactcactcactcactcactcactcatcactcactcactcactcactcactcactcatcactcactcactcactcactcactcactcatcactcactcactcactcactcactcactcatcactcactcactcactcactcactcactcatcactcactcactcactcactcactcactcatcactcactcactcactcactcactcactcatcactcactcactcactcactcactcactca

SEQ ID NO: 319199 - DNA, 640 bp, Homo sapiens
aagagtgtcttagtgggcataaattaagatagcaaaagtactgaagaagttgagttaattaggagagcattcccaaaattgctgagtagtggcaattttagattctctttggtggaatcagagtggaagaggtaggcaagaagatttggagaaaactagattataatacatactgtagagagttcctggggttagaggaaggatctcattttctcctgtttttttaatgtatttttttctctttttgttttcttgatcacttattatctgaccttctggtttatggaggatgaggcagttatgtgtaggtttcacttccccatcctgatctgactaaactagccaacagattttctcaccctttcctttttgccttttccagtatgggtggcatccctgcccggaatagtaaaggggaaaggcttctgctttatattggcatcattgacattctacagtcttacaggtgaggagcatatggatcccaaattaagagagggtggatacagataatcagtcacgtttctcttttagataggtttgttaccaagttcttccggaagcaagaacagtgagttgcagtctggctacttacttcattagttttcagatggtttatttccttgattttgcctctttc

SEQ ID NO: 319200 - DNA, 652 bp, Homo sapiens
gtttcacttccccatcctgatctgactaaactagccaacagattttctcaccctttcctttttgccttttccagtatgggtggcatccctgcccggaatagtaaaggggaaaggcttctgctttatattggcatcattgacattctacagtcttacaggtgaggagcatatggatcccaaattaagagagggtggatacagataatcagtcacgtttctcttttagataggtttgttaccaagttcttccggaagcaagaacagtgagttgcagtctggctacttacttcattagttttcagatggtttatttccttgattttgcctctttccccggcctttataacccttcctcccccatctccccagacataatgtataccttctgtggaaagctgagtcagtccttggaagcaccagggtagaatatgccatctgtctggctctttgcaaaaacctatgagatgagtcatgttccacatggggatacaactggaaacgttacccttttccaaggaggaaaaacaggagggtcactgtgttctgtaaaatgtattagactgtggaactaagaggcaatggagtgatcatcagggaggagctggaattgttagaccccagttttgttcctgtaaggttttaaatactaatg

SEQ ID NO: 319201 - DNA, 331 bp, Homo sapiens
tcatctgtaggttttacccttctgctaggggctcagtctgggggaagatggcccttggactagagttcctcttgccgggcctcctaactctatagcatttcttctgctctgcaggacactgtctcagtgcatcgcccaggcttctacgctgaacggttccagcgcttcatgtgcaacacagtatttaagaagattccctgtaagtggtttctaccaattgactgcctactcctgcccagtggctcccttaccccaagagaacagagggcaggacacctctggtagggagctgccaatgccagaggcctctccttccacctacatcccatga

SEQ ID NO: 319202 - DNA, 370 bp, Homo sapiens
gcccggcagggcgtgggtagggagctggtgaggaatatgcgatgggaggaagagcgagacctaagagggtacctgtagctgggaatgtcctacgtgttaccggtaagtgggcgcgagctgggctttcaaatagggatttatgagcgggcaggagtttgaggaaaggataagtttgattaagaagttgtcgaaaactttggttgtctttgaggaggacggatggagattgaaggtgggggtagggtggcccggcgcggtggctcacgcctgtaatctcagcactttgggaggccttggcgggcggatcatttgaggtcagaagttcgagacgagcctggccaacatagagaaatctcgtccctactaaaaa

SEQ ID NO: 319203 - DNA, 3628 bp, Homo sapiens
atgcgcagtgctcggattttttgcttggctacccggagtgaagcggccgggttgggcgattaacaggccgtggttaggaaggacggagaaggggcgttcgctcctttgggacttttcatgcctcgtttttttttcagatgtggcttggtctgggcgcaaggtcccagcagccagcttaagcttactcttctgtgaaaggggaaagtatcccctgtggaaagcggttaaacttgtggagggggtgcgggacgtgagttcttccccatgccaggcgaatggtgtggccttgagctggtccaggagccggctcgacgtgtctgagggaggccccggagggggcggggaggtggcccacagaacgcgggttctgtaaagagacgttgggaagattcgattccgagaagaggaagaaccggattgaaagagagccaggccgctgagggggagggggctgctaagatggcgtcggcctcctccgggccgtcgtcttcggtcggtttttcatcctttgatcccgcggtcccttcctgtaccttgtcctcagcatctggaatcaagagacccatggcatctgaggtgccttatgcctctggcatgcccatcaagaaaataggccatagaagtgttgattcctcaggagagacaacatataaaaagacaacctcatcagccttgaaaggtgccatccagttaggcattacccacactgtggggagcctgagtaccaaaccagagcgtgatgtcctcatgcaagatttctacgtggttgagagtatcttctttcccagtgaagggagcaacctgacccctgctcatcactacaatgactttcgtttcaagacctatgcacctgttgccttccgctacttccgggagctatttggtatccggcccgatgattacttgtattccctctgcagtgagccgctgattgaactctgtagctctggagctagtggttccctattctatgtgtccagcgacgatgagttcattattaagacagtccaacataaagaggcggaatttctgcagaagctgcttccaggatactacatgaacctcaaccagaaccctcggactttgctgcctaaattctatggactgtactgtgtgcaggcaggtggcaagaacattcggattgtggtgatgaacaatcttttaccaagatcggtaaaaatgcatatcaaatatgacctcaaaggctcaacctacaaacggcgggcttcccagaaagagcgagagaagcctcttcccacatttaaagacctagacttcttacaagacatccctgatggtctttttttggatgctgacatgtacaacgctctctgtaagaccctgcagcgtgactgtttggtgctgcagagcttcaagataatggattacagcctcttgatgtcaatccataatatagatcatgcacaacgagagcccttaagcagtgaaacacagtactcagttgatactcgaagaccggccccccaaaaggctctgtattccacagccatggaatccatccagggagaggctcgacggggtggtaccatggagactgatgaccatatgggtggcatccctgcccggaatagtaaaggggaaaggcttctgctttatattggcatcattgacattctacagtcttacaggtttgttaagaagttggagcactcttggaaagccctggtacatgacggagacactgtctcagtgcatcgcccaggcttctacgctgaacggttccagcgcttcatgtgcaacacagtatttaagaagattccctgcgttcaccttggtcgtcctgatgttttacctcagactccacctttggaggaaatcagtgagggctcgcctattcctgaccccagtttctcacctctagttggagagactttgcaaatgctaactacaagtacaaccttggaaaagcttgaagttgcagagtcagagttcacccattaagcgcaaagcctcagaagacctggaacaagattctgccatctctgtgatcccaagatgtcagcccttgccccagcaatgctgaattttcttctacttggtcatcaaaaaaggagtgtaatagaagtgaggggagctgctcctccatcttcttcctgaagaagaaccttctctccttcctcttcctcatgaatgggccttagtgcctcagagagttgaggaccgcagcatcccctccactccagagttgggtggtacggattttcaactggccaaccctttgcctccactattgaatttttttcagacccccattcttcatgctggaaatgggattgctggacttggcagctttctttcccctcgtctttgactaggaaccggactcttaatttcctcaggacagactagctggcacattatccctaccttagttctttctctctgactcctggaagaatactcctgtaatctctgtaaaggtttttgggggataagggtgtttaaccacctcccagctttcttcttctttttttttttctgaaaaaaggaaaaagcacacagcacacaatttcaagccattttcagatcagaactccagaagtgttgacaagatgcctattcgtagagttccctcagaagagccatggtgtttatgaagagaagagtagtgattgctctgccagaagcagctcctctttaaactcctcctctcttgatgaatttcttaaggctgaaggaatgaagagagtgggacatggggtaatctttatcccttttgttaaaacaggaggcagccatgggctgggagatcatagcccttcctaggcagaatcctgttcactgccaggctatagtaattattactattttgcaatttgaaatatattctggttgtttttctaaatgtgaagacttaccaaatgaattttagatcattctccagaggagattttttttgctcttctcatcttttccaacagtgttctcctgtttgtggagctaaggtaaagaggggacacttctgtctgtttaacagacagtccatatctgtgaggccagcaaatattttcttaaactcatggggagacagcagattcttgccttggtgaggtcattgctgtgccatatgtcctacccccctgtcttcatgcagggaagttggaaatgggggctacatatgccctctcctccccgtctacaagagttgtggttttccatctgatccttccactcttgtcaggggaagaagggggcctggtatctcaggcagattgttgaattcctgttctatcccttctctatcccaccctgccttgataatatgttagcccataccccaaataactgtctatattagacacccccagccagtttctggctgcctgtctttgctgccatgttttttacaagaaggaaagaattcttgctatttttttttcataatttactatttatgatgtatttaagtgttttattaaggacagagttctgttaggggtgggagggaatatttgagggagggctgggtcttagggaaaggaatggggaagcaacatttttattaagtgttactatttgcctctactttgtattgttcagaaatggcaaatacaatataaaagtgatatatggttttaatgtaataaactttaatgagttatttaga

SEQ ID NO: 319204 - DNA, 3934 bp, Homo sapiens
  misc_feature (6)..(6): n is a, c, g, or t
  misc_feature (18)..(18): n is a, c, g, or t
  misc_feature (46)..(46): n is a, c, g, or t
atgctncccggaaactanaggtaagggagaaaaaaagcactgtccnacctgtgcctgcctaacttctgggcaaggctggggaggctgtccttccagcagggtaaaacagtgtcagcacttctatcttaagagtgtagttcaggcccaggcgcggtggctcatgcttctaatcccagcaccttgggaggccgaggcgggcggatcacgaggtcaggagatcgagaccatcctggctaacacagtgaaaccccgtctctactaaaaatacaaaaaaattagctgggcatggtggcgggtgcctgtagtcccagctactcgggaggctgagacaggagaatggcgtgaacccgggaggcagagcttgcagtgagccgagatcgtgccactgcactccagcctgggcgatagagtgagactccatctcaaaaaaaaaagaaaaagttatatttcccagagaaaatatggatatttgaataagaaaggggtctagaataaaaatggaatatgcacgaggcctatgtgagtatggagaaggagagagggacatacacagttgctatccaaaaggatctggtattactgagcaagaggcaggagtttatacttatgtttagtttgactcaaactctgatggtttcagtatgcttgacagagatgtgagtgtgtgatacactcttatgattgtttttttttcccccctagccatctggaatcaagagacccatggcatctgaggtgccttatgcctctggcatgcccatcaagaaaataggccatagaagtgttgattcctcaggagagacaacatataaaaagacaacctcatcagccttgaaaggtgccatccagttaggcattacccacactgtggggagcctgagtaccaaaccagagcgtgatgtcctcatgcaagatttctacgtggttgagagtatcttctttcccagtgaagggagcaacctgacccctgctcatcactacaatgactttcgtttcaagacctatgcacctgttgccttccgctacttccgggagctatttggtatccggcccgatgattacttgtattccctctgcagtgagccgctgattgaactctgtagctctggagctagtggttccctattctatgtgtccagcgacgatgagttcattattaagacagtccaacataaagaggcggaatttctgcagaagctgcttccaggatactacatgaacctcaaccagaaccctcggactttgctgcctaaattctatggactgtactgtgtgcaggcaggtggcaagaacattcggattgtggtgatgaacaatcttttaccaagatcggtaaaaatgcatatcaaatatgacctcaaaggctcaacctacaaacggcgggcttcccagaaagagcgagagaagcctcttcccacatttaaagacctagacttcttacaagacatccctgatggtctttttttggatgctgacatgtacaacgctctctgtaagaccctgcagcgtgactgtttggtgctgcagagcttcaagataatggattacagcctcttgatgtcaatccataatatagatcatgcacaacgagagcccttaagcagtgaaacacagtactcagttgatactcgaagaccggccccccaaaaggctctgtattccacagccatggaatccatccagggagaggctcgacggggtggtaccatggagactgatgaccatatgggtggcatccctgcccggaatagtaaaggggaaaggcttctgctttatattggcatcattgacattctacagtcttacaggtttgttaagaagttggagcactcttggaaagccctggtacatgacggagacactgtctcagtgcatcgcccaggcttctacgctgaacggttccagcgcttcatgtgcaacacagtatttaagaagattcccttgaagccttctccttccaaaaagtttcggtctggctcatctttctctcggcgagcaggctccagtggcaactcctgcattacttaccagccatcggtctctggggaacacaaggcacaagtgacaacaaaggcagaagtggagccaggcgttcaccttggtcgtcctgatgttttacctcagactccacctttggaggaaatcagtgagggctcgcctattcctgaccccagtttctcacctctagttggagagactttgcaaatgctaactacaagtacaaccttggaaaagcttgaagttgcagagtcagagttcacccattaagcgcaaagcctcagaagacctggaacaagattctgccatctctgtgatcccaagatgtcagcccttgccccagcaatgctgaattttcttctacttggtcatcaaaaaaggagtgtaatagaagtgaggggagctgctcctccatcttcttcctgaagaagaaccttctctccttcctcttcctcatgaatgggccttagtgcctcagagagttgaggaccgcagcatcccctccactccagagttgggtggtacggattttcaactggccaaccctttgcctccactattgaatttttttcagacccccattcttcatgctggaaatgggattgctggacttggcagctttctttcccctcgtctttgactaggaaccggactcttaatttcctcaggacagactagctggcacattatccctaccttagttctttctctctgactcctggaagaatactcctgtaatctctgtaaaggtttttgggggataagggtgtttaaccacctcccagctttcttcttctttttttttttctgaaaaaaggaaaaagcacacagcacacaatttcaagccattttcagatcagaactccagaagtgttgacaagatgcctattcgtagagttccctcagaagagccatggtgtttatgaagagaagagtagtgattgctctgccagaagcagctcctctttaaactcctcctctcttgatgaatttcttaaggctgaaggaatgaagagagtgggacatggggtaatctttatcccttttgttaaaacaggaggcagccatgggctgggagatcatagcccttcctaggcagaatcctgttcactgccaggctatagtaattattactattttgcaatttgaaatatattctggttgtttttctaaatgtgaagacttaccaaatgaattttagatcattctccagaggagattttttttgctcttctcatcttttccaacagtgttctcctgtttgtggagctaaggtaaagaggggacacttctgtctgtttaacagacagtccatatctgtgaggccagcaaatattttcttaaactcatggggagacagcagattcttgccttggtgaggtcattgctgtgccatatgtcctacccccctgtcttcatgcagggaagttggaaatgggggctacatatgccctctcctccccgtctacaagagttgtggttttccatctgatccttccactcttgtcaggggaagaagggggcctggtatctcaggcagattgttgaattcctgttctatcccttctctatcccaccctgccttgataatatgttagcccataccccaaataactgtctatattagacacccccagccagtttctggctgcctgtctttgctgccatgttttttacaagaaggaaagaattcttgctatttttttttcataatttactatttatgatgtatttaagtgttttattaaggacagagttctgttaggggtgggagggaatatttgagggagggctgggtcttagggaaaggaatggggaagcaacatttttattaagtgttactatttgcctctactttgtattgttcagaaatggcaaatacaatataaaagtgatatatggttttaatgtaataaactttaatgagttatttaga

SEQ ID NO: 319205 - DNA, 3228 bp, Homo sapiens
ttgtattataatcttgactcttcttctaggtgccttatgcctctggcatgcccatcaagaaaataggccatagaagtgttgattcctcaggagagacaacatataaaaagacaacctcatcagccttgaaaggtgccatccagttaggcattacccacactgtggggagcctgagtaccaaaccagagcgtgatgtcctcatgcaagatttctacgtggttgagagtatcttctttcccagtgaagggagcaacctgacccctgctcatcactacaatgactttcgtttcaagacctatgcacctgttgccttccgctacttccgggagctatttggtatccggcccgatgattacttgtattccctctgcagtgagccgctgattgaactctgtagctctggagctagtggttccctattctatgtgtccagcgacgatgagttcattattaagacagtccaacataaagaggcggaatttctgcagaagctgcttccaggatactacatgaacctcaaccagaaccctcggactttgctgcctaaattctatggactgtactgtgtgcaggcaggtggcaagaacattcggattgtggtgatgaacaatcttttaccaagatcggtaaaaatgcatatcaaatatgacctcaaaggctcaacctacaaacggcgggcttcccagaaagagcgagagaagcctcttcccacatttaaagacctagacttcttacaagacatccctgatggtctttttttggatgctgacatgtacaacgctctctgtaagaccctgcagcgtgactgtttggtgctgcagagcttcaagataatggattacagcctcttgatgtcaatccataatatagatcatgcacaacgagagcccttaagcagtgaaacacagtactcagttgatactcgaagaccggccccccaaaaggctctgtattccacagccatggaatccatccagggagaggctcgacggggtggtaccatggagactgatgaccatatgggtggcatccctgcccggaatagtaaaggggaaaggcttctgctttatattggcatcattgacattctacagtcttacaggtttgttaagaagttggagcactcttggaaagccctggtacatgacggagacactgtctcagtgcatcgcccaggcttctacgctgaacggttccagcgcttcatgtgcaacacagtatttaagaagattcccttgaagccttctccttccaaaaagtttcggtctggctcatctttctctcggcgagcaggctccagtggcaactcctgcattacttaccagccatcggtctctggggaacacaaggcacaagtgacaacaaaggcagaagtggagccaggcgttcaccttggtcgtcctgatgttttacctcagactccacctttggaggaaatcagtgagggctcgcctattcctgaccccagtttctcacctctagttggagagactttgcaaatgctaactacaagtacaaccttggaaaagcttgaagttgcagagtcagagttcacccattaagcgcaaagcctcagaagacctggaacaagattctgccatctctgtgatcccaagatgtcagcccttgccccagcaatgctgaattttcttctacttggtcatcaaaaaaggagtgtaatagaagtgaggggagctgctcctccatcttcttcctgaagaagaaccttctctccttcctcttcctcatgaatgggccttagtgcctcagagagttgaggaccgcagcatcccctccactccagagttgggtggtacggattttcaactggccaaccctttgcctccactattgaatttttttcagacccccattcttcatgctggaaatgggattgctggacttggcagctttctttcccctcgtctttgactaggaaccggactcttaatttcctcaggacagactagctggcacattatccctaccttagttctttctctctgactcctggaagaatactcctgtaatctctgtaaaggtttttgggggataagggtgtttaaccacctcccagctttcttcttctttttttttttctgaaaaaaggaaaaagcacacagcacacaatttcaagccattttcagatcagaactccagaagtgttgacaagatgcctattcgtagagttccctcagaagagccatggtgtttatgaagagaagagtagtgattgctctgccagaagcagctcctctttaaactcctcctctcttgatgaatttcttaaggctgaaggaatgaagagagtgggacatggggtaatctttatcccttttgttaaaacaggaggcagccatgggctgggagatcatagcccttcctaggcagaatcctgttcactgccaggctatagtaattattactattttgcaatttgaaatatattctggttgtttttctaaatgtgaagacttaccaaatgaattttagatcattctccagaggagattttttttgctcttctcatcttttccaacagtgttctcctgtttgtggagctaaggtaaagaggggacacttctgtctgtttaacagacagtccatatctgtgaggccagcaaatattttcttaaactcatggggagacagcagattcttgccttggtgaggtcattgctgtgccatatgtcctacccccctgtcttcatgcagggaagttggaaatgggggctacatatgccctctcctccccgtctacaagagttgtggttttccatctgatccttccactcttgtcaggggaagaagggggcctggtatctcaggcagattgttgaattcctgttctatcccttctctatcccaccctgccttgataatatgttagcccataccccaaataactgtctatattagacacccccagccagtttctggctgcctgtctttgctgccatgttttttacaagaaggaaagaattcttgctatttttttttcataatttactatttatgatgtatttaagtgttttattaaggacagagttctgttaggggtgggagggaatatttgagggagggctgggtcttagggaaaggaatggggaagcaacatttttattaagtgttactatttgcctctactttgtattgttcagaaatggcaaatacaatataaaagtgatatatggttttaatgtaataaactttaatgagttatttaga

SEQ ID NO: 319206 - DNA, 3647 bp, Homo sapiens
atgcgcagtgctcggattttttgcttggctacccggagtgaagcggccgggttgggcgattaacaggccgtggttaggaaggacggagaaggggcgttcgctcctttgggacttttcatgcctcgtttttttttcagatgtggcttggtctgggcgcaaggtcccagcagccagcttaagcttactcttctgtgaaaggggaaagtatcccctgtggaaagcggttaaacttgtggagggggtgcgggacgtgagttcttccccatgccaggcgaatggtgtggccttgagctggtccaggagccggctcgacgtgtctgagggaggccccggagggggcggggaggtggcccacagaacgcgggttctgtaaagagacgttgggaagattcgattccgagaagaggaagaaccggattgaaagagagccaggccgctgagggggagggggctgctaagatggcgtcggcctcctccgggccgtcgtcttcggtcggtttttcatcctttgatcccgcggtcccttcctgtaccttgtcctcagcatctggaatcaagagacccatggcatctgaggtcttggaagctagacaggattcttacatctcattggtgccttatgcctctggcatgcccatcaagaaaataggccatagaagtgttgattcctcaggagagacaacatataaaaagacaacctcatcagccttgaaaggtgccatccagttaggcattacccacactgtggggagcctgagtaccaaaccagagcgtgatgtcctcatgcaagatttctacgtggttgagagtatcttctttcccagtgaagggagcaacctgacccctgctcatcactacaatgactttcgtttcaagacctatgcacctgttgccttccgctacttccgggagctatttggtatccggcccgatgattacttgtattccctctgcagtgagccgctgattgaactctgtagctctggagctagtggttccctattctatgtgtccagcgacgatgagttcattattaagacagtccaacataaagaggcggaatttctgcagaagctgcttccaggatactacatgaacctcaaccagaaccctcggactttgctgcctaaattctatggactgtactgtgtgcaggcaggtggcaagaacattcggattgtggtgatgaacaatcttttaccaagatcggtaaaaatgcatatcaaatatgacctcaaaggctcaacctacaaacggcgggcttcccagaaagagcgagagaagcctcttcccacatttaaagacctagacttcttacaagacatccctgatggtctttttttggatgctgacatgtacaacgctctctgtaagaccctgcagcgtgactgtttggtgctgcagagcttcaagataatggattacagcctcttgatgtcaatccataatatagatcatgcacaacgagagcccttaagcagtgaaacacagtactcagttgatactcgaagaccggccccccaaaaggctctgtattccacagccatggaatccatccagggagaggctcgacggggtggtaccatggagactgatgaccatatgggtggcatccctgcccggaatagtaaaggggaaaggcttctgctttatattggcatcattgacattctacagtcttacaggtttgttaagaagttggagcactcttggaaagccctggtacatgacggagacactgtctcagtgcatcgcccaggcttctacgctgaacggttccagcgcttcatgtgcaacacagtatttaagaagattcccttgaagccttctccttccaaaaagtttcggtctggctcatctttctctcggcgagcaggctccagtggcaactcctgcattacttaccagccatcggtctctggggaacacaaggcacaagtgacaacaaaggcagaagtggagccaggcgttcaccttggtcgtcctgatgttttacctcagactccacctttggaggaaatcagtgagggctcgcctattcctgaccccagtttctcacctctagttggagagactttgcaaatgctaactacaagtacaaccttggaaaagcttgaagttgcagagtcagagttcacccattaagcgcaaagcctcagaagacctggaacaagattctgccatctctgtgatcccaagatgtcagcccttgccccagcaatgctgaattttcttctacttggtcatcaaaaaaggagtgtaatagaagtgaggggagctgctcctccatcttcttcctgaagaagaaccttctctccttcctcttcctcatgaatgggccttagtgcctcagagagttgaggaccgcagcatcccctccactccagagttgggtggtacggattttcaactggccaaccctttgcctccactattgaatttttttcagacccccattcttcatgctggaaatgggattgctggacttggcagctttctttcccctcgtctttgactaggaaccggactcttaatttcctcaggacagactagctggcacattatccctaccttagttctttctctctgactcctggaagaatactcctgtaatctctgtaaaggtttttgggggataagggtgtttaaccacctcccagctttcttcttctttttttttttctgaaaaaaggaaaaagcacacagcacacaatttcaagccattttcagatcagaactccagaagtgttgacaagatgcctattcgtagagttccctcagaagagccatggtgtttatgaagagaagagtagtgattgctctgccagaagcagctcctctttaaactcctcctctcttgatgaatttcttaaggctgaaggaatgaagagagtgggacatggggtaatctttatcccttttgttaaaacaggaggcagccatgggctgggagatcatagcccttcctaggcagaatcctgttcactgccaggctatagtaattattactattttgcaatttgaaatatattctggttgtttttctaaatgtgaagacttaccaaatgaattttagatcattctccagaggagattttttttgctcttctcatcttttccaacagtgttctcctgtttgtggagctaaggtaaagaggggacacttctgtctgtttaacagacagtccatatctgtgaggccacccaaataactgtctatattagacacccccagccagtttctggctgcctgtctttgctgccatgttttttacaagaaggaaagaattcttgctatttttttttcataatttactatttatgatgtatttaagtgttttattaaggacagagttctgttaggggtgggagggaatatttgagggagggctgggtcttagggaaaggaatggggaagcaacatttttattaagtgttactatttgcctctactttgtattgttcagaaatggcaaatacaatataaaagtgatatatggttttaatgtaataaactttaatgagttatttagaagacctcttattttttctgattctttttcatataccatctgctcaccctcctactccaccacccaggctcagttttgttcatgttgccctaaacaaaggctgcatactttcca

SEQ ID NO: 319207 - DNA, 1568 bp, Homo sapiens
atgcgcagtgctcggattttttgcttggctacccggagtgaagcggccgggttgggcgattaacaggccgtggttaggaaggacggagaaggggcgttcgctcctttgggacttttcatgcctcgtttttttttcagatgtggcttggtctgggcgcaaggtcccagcagccagcttaagcttactcttctgtgaaaggggaaagtatcccctgtggaaagcggttaaacttgtggagggggtgcgggacgtgagttcttccccatgccaggcgaatggtgtggccttgagctggtccaggagccggctcgacgtgtctgagggaggccccggagggggcggggaggtggcccacagaacgcgggttctgtaaagagacgttgggaagattcgattccgagaagaggaagaaccggattgaaagagagccaggccgctgagggggagggggctgctaagatggcgtcggcctcctccgggccgtcgtcttcggtcggtttttcatcctttgatcccgcggtcccttcctgtaccttgtcctcagcatctggaatcaagagacccatggcatctgaggtgccttatgcctctggcatgcccatcaagaaaataggccatagaagtgttgattcctcaggagagacaacatataaaaagacaacctcatcagccttgaaaggtgccatccagttaggcattacccacactgtggggagcctgagtaccaaaccagagcgtgatgtcctcatgcaagatttctacgtggttgagagtatcttctttcccagtgaagggagcaacctgacccctgctcatcactacaatgactttcgtttcaagacctatgcacctgttgccttccgctacttccgggagctatttggtatccggcccgatgattacttgtattccctctgcagtgagccgctgattgaactctgtagctctggagctagtggttccctattctatgtgtccagcgacgatgagttcattattaagacagtccaacataaagaggcggaatttctgcagaagctgcttccaggatactacatgaacctcaaccagaaccctcggactttgctgcctaaattctatggactgtactgtgtgcaggcaggtggcaagaacattcggattgtggtgatgaacaatcttttaccaagatcggtaaaaatgcatatcaaatatgacctcaaaggctcaacctacaaacggcgggcttcccagaaagagcgagagaagcctcttcccacatttaaagacctagacttcttacaagacatccctgatggtctttttttggatgctgacatgtacaacgctctctgtaagaccctgcagcgtgactgtttggtgagtttgttacttagacatcaaaaatctcagttactaaaacagcttgattgttcttaggcattaagtttgtgggagatggaactctgttccttagcactgtatgtcctgggctgtatttaaaataagtcttaattagttcattgccattcctttacatttttactttctccccgtttatcctcccacaatgggatttatttccttct

SEQ ID NO: 319208 - DNA, 1155 bp, Homo sapiens
atgcgcagtgctcggattttttgcttggctacccggagtgaagcggccgggttgggcgattaacaggccgtggttaggaaggacggagaaggggcgttcgctcctttgggacttttcatgcctcgtttttttttcagatgtggcttggtctgggcgcaaggtcccagcagccagcttaagcttactcttctgtgaaaggggaaagtatcccctgtggaaagcggttaaacttgtggagggggtgcgggacgtgagttcttccccatgccaggcgaatggtgtggccttgagctggtccaggagccggctcgacgtgtctgagggaggccccggagggggcggggaggtggcccacagaacgcgggttctgtaaagagacgttgggaagattcgattccgagaagaggaagaaccggattgaaagagagccaggccgctgagggggagggggctgctaagatggcgtcggcctcctccgggccgtcgtcttcggtcggtttttcatcctttgatcccgcggtcccttcctgtaccttgtcctcagcatctggaatcaagagacccatggcatctgaggtgccttatgcctctggcatgcccatcaagaaaataggccatagaagtgttgattcctcaggagagacaacatataaaaagacaacctcatcagccttgaaaggtgccatccagttaggcattacccacactgtggggagcctgagtaccaaaccagagcgtgatgtcctcatgcaagatttctacgtggttgagagtatcttctttcccaggtacagagtttaatgttcaggagcatgtcctggaaatgtggccttttcaaatcagcccagggcagttttaggggttcaggtcggacaatttagacatgtgtccatttcttaacctggttacaatcagggcgatgtgggactagagagttcggagagcagatactgtcctctagatgcttccattagcctctgtcctatggattgacccgtaaaaaacaacctaatgcattggataggaggcagtgtgatttcttcttcttcttatgtcttgctgtccatgctgtgccattgtctcactaactcatctaagaagggctgtgattatcttaggaggaatgtattcccccactccccccaccatgaggtg

SEQ ID NO: 319209 - DNA, 787 bp, Homo sapiens
atgcgcagtgctcggattttttgcttggctacccggagtgaagcggccgggttgggcgattaacaggccgtggttaggaaggacggagaaggggcgttcgctcctttgggacttttcatgcctcgtttttttttcagatgtggcttggtctgggcgcaaggtcccagcagccagcttaagcttactcttctgtgaaaggggaaagtatcccctgtggaaagcggttaaacttgtggagggggtgcgggacgtgagttcttccccatgccaggcgaatggtgtggccttgagctggtccaggagccggctcgacgtgtctgagggaggccccggagggggcggggaggtggcccacagaacgcgggttctgtaaagagacgttgggaagattcgattccgagaagaggaagaaccggattgaaagagagccaggccgctgagggggagggggctgctaagatggcgtcggcctcctccgggccgtcgtcttcggtcggtttttcatcctttgatcccgcggtcccttcctgtaccttgtcctcaggtaagcccggcagggcgtgggtagggagctggtgaggaatatgcgatgggaggaagagcgagacctaagagggtacctgtagctgggaatgtcctacgtgttaccggtaagtgggcgcgagctgggctttcaaatagggatttatgagcgggcaggagtttgaggaaaggataagtttgattaagaagttgtcgaaaactttggttgtctttgagaagtgcgcctagtgcgggatcctctaga

SEQ ID NO: 319210 - DNA, 595 bp, Homo sapiens
gctatctgaatcctaatagaaaaagctgaaaagcaatccactctgcactctagttcctcagaaattggtggcattaaatagaaagagactcagaaattggtggcattaaatagctctagaaatagagataagggctgggcgtggtggctcacgcctgtaaacccaacactttgggaggccaagagttcaagaccagcctgtccaacatggagaaaccccgtctctactaaaaatacaaaattagctgggcatggtggcgcacacctgtaacgcccagctacttgggaggctgaggcaggagaatcgcttgagccaggaggcagaggctgcggtgagctgagatcgtgccattgcactccagcagcctgggcaacaagagcaaaactccgaaaaaaaaaaaaaaaagaaagaggagagagagagagagagataaggtgagactgaaaagaagagcaccaactaaagtcatttaaagaagtgggtatctgggaagtggtaaaaaaataacataagataatataagataaaataaaataaaatagaggttagaaccccatatactgcccctacctatgccagaaccaaaaaaaaaaaa

SEQ ID NO: 319211 - DNA, 583 bp, Homo sapiens
tgacagatagggtcttgctctgttacccaggctggagcgcagtggcactatcatggctcactacaacctcgacctcctggctcatgtgacccttctacttcacactgcagcctcctgagtagctgggactacaggcacatgtcaacccacccagttaattttttaatttttttatagaaatagggtctcaccatgttgcccaggctggtctctactaaaaatacaaaattagctgggcatggtggcgcacacctgtaacgcccagctacttgggaggctgaggcaggagaatcgcttgagccaggaggcagaggctgcggtgagctgagatcgtgccattgcactccagcagcctgggcaacaagagcaaaactccgaaaaaaaaaaaaaaaagaaagaggagagagagagagagagataaggtgagactgaaaagaagagcaccaactaaagtcatttaaagaagtgggtatctgggaagtggtaaaaaaataacataagataatataagataaaataaaataaaatagaggttagaaccccatatactgcccctacctatgccagaaccaaaaaaaaaaaa

SEQ ID NO: 319212 - DNA, 620 bp, Homo sapiens
tgacagatagggtcttgctctgttacccaggctggagcgcagtggcactatcatggctcactacaacctcgacctcctggctcatgtgacccttctacttcacactgcagcctcctgagtagctgggactacaggcacatgtcaacccacccagttaattttttaatttttttatagaaatagggtctcaccatgttgcccaggctggtctcgaacccctgggctcaagtattccacctcagcctcccaaagtgtttggattacagccttgagccactgtgcacagccctatggcagctttttatccttcttataaactactgcttaagaaaaaaaaaagatatacaaagactaaacatagaaaatcttgttactaaagatttatagtgccatgaaaaatttccactagaaaactgaccatgtttttgattttttaccaaatataaatctttcttaatgctattatgatcctaaatactttaagcatgaaaactgacgatgtttttgatttcttaccaaatataaatctctcttaatgctatgatgatcctaaacattttaggctaggataatttttaaaaataaaatccagcattattattcataaaatgattcactgc

SEQ ID NO: 319213 - DNA, 283 bp, Homo sapiens
aagggccaaaggcctctgaatgtccctgtttatgaaatgaggacactctgacgcccacctacctgacacaaggagtcactgtcggtgttcccagagataggacccactgctgcccaaagctgaagcacccactctgggaacctggcgcagggctttacataaccaaatgccccagaaagagagtccgatggctttgcattcagaccaggaggctgagataggttatcaaggcccagctcctttgatgttgacagaggatcagaagccccttcccaggagctga

SEQ ID NO: 319214 - DNA, 1113 bp, Homo sapiens
ccagtatgtaatgtgtcaaaaaaactctaaaaggttagcttcatcgcgcaggaaggggcgtaggaaaatagagtaaagaacaaaggaggaaaacaacagcaagtcactgtaagtactgtgaaaataaactgaaagtagggctagaaaaaaaacagagaatgtccgagtagtctgatggaattgggagtctgagatgagaaggccacccaggtgagaccagggagattgaggccacaatgaatcacgattgcatctctctgctggaccttaatggtactgtaatggacaagagccatgtagctcttagatgtggcaaagtgagagccttctgttcgtccttagacttggcaagctgctggctaagtccagtgcttatggccgatattcgtctcaaaataaataaacaaaaaatacaagagtgaattcttaacaataacaaagaaataataacaatatgaaagatcaataaataagtgggaatgaagaaaggtaaaaggtaataccacaattaagaccttctctctctctctttctttctctctatttgtcacacctaggcttgagtgtgattaaaaaaaaaaaattaaaaggtaaacttcaccgtgcaggaagaagcataggaaaagagagagagaaaagaacaaagaaaaaaaagaatagcaagtctctccaagtactatggaaacaaacagaaagtggaattaggaaaaaagagaggaagaaggtctgagtagtccaagggacacgggaggccagttgggaagaccgcccgggcgagaccaggaagatcaaggccacagtgaatcacgatcccatccctctgctcaacctgaattgtactgctgctggcgagagagatctggtcgaccttagacatggcaaggcgagaggtgaggtccatcaggtcgaccttagtccaacgctcacagccgacatctctctcaaaataaataaacaaatccaacagtaaatatttaacaatgacaaaaaaattaaagaacaatacataaacaggttgcagttaacaaaagtaaaaagtaattaatatcacaattaagatcttctcccctgtctctctgtttgtcacacccaggctggagtgtgtgacaaaat

SEQ ID NO: 319215 - DNA, 212 bp, Homo sapiens
agctgaggcaggtcgtaaggtagtgaagacaggtctgtttgactcacatcaagggtatacaatctcttgctcaaccttaatgaatacaggtatttcaacattgttttacttcacagaaattatttacaactgatgttttatcaatcctaaaaaatagtgcaaatgtcactatgatatttgacaaaataaaggtattttatgaaatctccttt

SEQ ID NO: 319216 - DNA, 3559 bp, Homo sapiens
  misc_feature (824)..(824): n is a, c, g, or t
tgttgggtgggagcacaggcaccgggcaccatggggaaggccgagaactatgagctctactcggtggagctgggtcctggccctggcggggacatggctgccaagatgagcaagaagaagaaggcgggtggcgggggtggcaagaggaaggagaagctggagaacatgaagaaggagatggagattaacgaccaccagctgtcagtggcggagctggaacagaaataccagaccagtgccaccaagggcctctctgcgagcctggctgctgagctgctgctgcgggatgggcccaacgcactgcggccaccacggggcaccccagagtacgtcaagttcgcgaggcagctggccgggggcctgcagtgcctcatgtgggttgccgccgccatctgcctcatcgcctttgccatccaggctagtgagggggacctcaccaccgacgacaatctgtacctggcaatcgctctcattgctgtggttgtcgtcaccggctgctttggctactaccaggaattcaagagcaccaacatcatcgccagctttaagaaccttgtgccacagcaagccactgtcatccgcgatggagacaaattccagatcaacgctgaccaactggtggtgggcgacctggtggagatgaaaggtggggacagagtgcccgccgacatccgcatcctggcggcccagggctgcaaggtggacaactcctcgctgacaggggagtctgagccacagacccgctcacccgagtgcacgcacgagagccctctggagacccgcaacatcgccttcttctccaccatgtgccttgagggcaccgngcagggcctggtggtgaacacgggcgaccgcaccatcattgggcgcatcgcatcgctggcgtcgggggtggaaaacgagaagacacccatcgctatcgagatcgagcattttgtggacatcatcgcgggcctggccattctcttcggtgccacattttttattgtggccatgtgcattggctacaccttcctgcgggccatggtcttcttcatggccatcgtggtggcctatgtgcctgaggggctgctggccactgtcacagtctgcctgtccctgacagccaagcgcctggccagtaagaactgcgtggtcaagaacctggaggcggtggagacattgggctccacttcggtgatctgctcggacaagacagggactctcactcagaaccgcatgactgtgtcccatctgtggtttgacaaccacatccacacagctgacaccacggaagaccagtcagggcagacgtttgaccagtcctcggagacgtggcgggcgctgtgccgggtgctcaccctgtgcaaccgcgccgccttcaagtccggccaggatgcagtgcctgtgcccaagcgcatcgtgattggagacgcatcggagacggcgctgctcaagttctcggagctgacgctgggcaacgccatgggctaccgggaccgcttcccaaaagtctgcgagatacccttcaactccaccaacaagttccagctgtccatccatacgctggaggacccgcgggacccgcgacacttgctggtgatgaagggcgcccccgagcgcgtgctggagcgctgcagctccatccttatcaagggccaggagctgccgctggacgagcagtggcgcgaggccttccagaccgcctacctcagcctgggaggcctgggcgaacgcgtgctcggcttctgccagctctacctgaatgagaaggactacccgcctggctatgccttcgacgtagaggccatgaactttccatctagcggcctctgctttgcgggacttgtatccatgattgacccaccccgggccaccgtccctgatgctgtgctcaagtgtcgcaccgcaggcatccgggtgatcatggtaacgggtgaccaccccatcaccgccaaggccattgcagccagtgtgggcatcatctcggaaggcagcgagacagtggaggacatcgctgcccgcctccgtgtgcccgtagaccaggttaatcgcaaggatgcccgtgcctgtgtgatcaatggcatgcagctgaaggacatggacccatcggaactggtcgaggccctgcgcacccaccccgagatggtgtttgcgcgcaccagcccccagcagaagctggtgatcgtggagagctgccagcggctgggtgcgattgtggccgtcacgggggatggtgtgaatgactccccagctctgaagaaggcagacatcggagtagccatgggcatcgctggctcagatgctgccaaaaatgcagctgacatgatcctgctggatgacaactttgcctccattgtgacaggcgtggagcagggtcgactgatcttcgacaacctgaagaagtctattgcctacacattgaccaagaacatcccagagctgacaccctacctcatctacatcaccgtcagcgtgcccctgcccctcgggtgcatcaccatcctcttcatcgaactctgcactgacattttcccatctgtgtccctggcatatgaaaaggccgagagtgacatcatgcacctgcgtccacgcaacccaaagcgtgacagattggtcaacgagcccctggctgcctactcctacttccagattggtgccattcagtcctttgctggcttcactgactacttcacggcaatggcccaggagggctggttcccactgctgtgcgtggggctgcgggcgcagtgggaggaccaccacctacaagatctgcaggacagctacggccaggagtggacattcgggcagcgcctgtaccagcagtacacctgctacaccgtgttcttcatcagcattgaggtgtgccagatcgccgatgtcctcatccgcaagacgcgccgtctctctgccttccagcaaggcttcttcaggaataagatcctggtgatcgccatcgtgttccaggtctgcatcggctgcttcctgtgctactgccccggcatgcccaacatcttcaacttcatgcccattcggttccagtggtggctggtccccctgccctacggcatcctcatcttcgtctatgatgagatccggaagcttggagttcgctgttgcccagggagctggtgggaccaggaactctactattagagggacgactgccttcaagcatccctgcaactgccacagcaggtgggggcagggctcgtgggaccctctggacagccaccaagatatctgagcaaccaagagtcccagccccaccagtatctgcttctgtagcccacggcaccccaaacttggagggacctgcccactcccctcccccattcccaaggttcgcacctcctggagcagcagcgcctgggcagtcctctgggctggcctcgggaaagccgccacctgtggtggcggtggggctctgacagggagtacagctgaccgcttctggagggtgtttctgttcttaggactccagtccaggctggacggctgcctgagggcccttcgttaaagacacgcttgtgtcctgggcgatggtaataaaaccagctcatgctgactgtgctgt

SEQ ID NO: 319217 - DNA, 2971 bp, Homo sapiens
ctccacatttcccccatcacctccctgcctgtctatctgtccacttagctcccatccattctcctgccttcccatcatccactcattcagcaagtccttcccgaggcaaccctggggcaagtcctgtgccacacattgagggcgcagagatgacgaggccgggtccttaactggaagaggctgatgtcctgtgcaggcagccagcatgtcaccagaccttccacagtcagcacgattgtgtgaagagaattttcagaacctcggctgggacagctcagagaggggcctcgctactgtatctgggcagactggggaaggagtcccaaacaaagcactggctgaacaaaagctggggccaagaaaacacctggtgtttgcagaagcacgttgcacacgcagccccgcggctggggtaaagccttccccgttctttgacgcggggaagaggactggaagccagggtgggtccccagcctgcggtgctcaccccttccccaggtctgcctgtccctgacagccaagcgcctggccagtaagaactgcgtggtcaagaacctggaggcggtggagacattgggctccacttcggtgatctgctcggacaagacagggactctcactcagaaccgcatgactgtgtcccatctgtggtttgacaaccacatccacacagctgacaccacggaagaccagtcagggcagacgtttgaccagtcctcggagacgtggcgggcgctgtgccgggtgctcaccctgtgcaaccgcgccgccttcaagtccggccaggatgcagtgcctgtgcccaagcgcatcgtgattggagacgcatcggagacggcgctgctcaagttctcggagctgacgctgggcaacgccatgggctaccgggaccgcttcccaaaagtctgcgagatacccttcaactccaccaacaagttccagctgtccatccatacgctggaggacccgcgggacccgcgacacttgctggtgatgaagggcgcccccgagcgcgtgctggagcgctgcagctccatccttatcaagggccaggagctgccgctggacgagcagtggcgcgaggccttccagaccgcctacctcagcctgggaggcctgggcgaacgcgtgctcggcttctgccagctctacctgaatgagaaggactacccgcctggctatgccttcgacgtagaggccatgaactttccatctagcggcctctgctttgcgggacttgtatccatgattgacccaccccgggccaccgtccctgatgctgtgctcaagtgtcgcaccgcaggcatccgggtgatcatggtaacgggtgaccaccccatcaccgccaaggccattgcagccagtgtgggcatcatctcggaaggcagcgagacagtggaggacatcgctgcccgcctccgtgtgcccgtagaccaggttaatcgcaaggatgcccgtgcctgtgtgatcaatggcatgcagctgaaggacatggacccatcggaactggtcgaggccctgcgcacccaccccgagatggtgtttgcgcgcaccagcccccagcagaagctggtgatcgtggagagctgccagcggctgggtgcgattgtggccgtcacgggggatggtgtgaatgactccccagctctgaagaaggcagacatcggagtagccatgggcatcgctggctcagatgctgccaaaaatgcagctgacatgatcctgctggatgacaactttgcctccattgtgacaggcgtggagcagggtcgactgatcttcgacaacctgaagaagtctattgcctacacattgaccaagaacatcccagagctgacaccctacctcatctacatcaccgtcagcgtgcccctgcccctcgggtgcatcaccatcctcttcatcgaactctgcactgacattttcccatctgtgtccctggcatatgaaaaggccgagagtgacatcatgcacctgcgtccacgcaacccaaagcgtgacagattggtcaacgagcccctggctgcctactcctacttccagattggtgccattcagtcctttgctggcttcactgactacttcacggcaatggcccaggagggctggttcccactgctgtgcgtggggctgcgggcgcagtgggaggaccaccacctacaagatctgcaggacagctacggccaggagtggacattcgggcagcgcctgtaccagcagtacacctgctacaccgtgttcttcatcagcattgaggtgtgccagatcgccgatgtcctcatccgcaagacgcgccgtctctctgccttccagcaaggcttcttcaggaataagatcctggtgatcgccatcgtgttccaggtctgcatcggctgcttcctgtgctactgccccggcatgcccaacatcttcaacttcatgcccattcggttccagtggtggctggtccccctgccctacggcatcctcatcttcgtctatgatgagatccggaagcttggagttcgctgttgcccagggagctggtgggaccaggaactctactattagagggacgactgccttcaagcatccctgcaactgccacagcaggtgggggcagggctcgtgggaccctctggacagccaccaagatatctgagcaaccaagagtcccagccccaccagtatctgcttctgtagcccacggcaccccaaacttggagggacctgcccactcccctcccccattcccaaggttcgcacctcctggagcagcagcgcctgggcagtcctctgggctggcctcgggaaagccgccacctgtggtggcggtggggctctgacagggagtacagctgaccgcttctggagggtgtttctgttcttaggactccagtccaggctggacggctgcctgagggcccttcgttaaagacacgcttgtgtcctgggcgatggtaataaaaccagctcatgctgactgtgctgt

SEQ ID NO: 319218 - DNA, 1641 bp, Homo sapiens
tttttatttacaatggaaaatgttataattctggtccttttttaagtttgaacagaagggttgatcaaaatgtgttttgtctgttttaggcttgatgattcacgcttctctttaaactgccttaaagtaataaatactatggcattctgtttaatacacgaaaggtttccacttgatatacattgtgttaaaacagaagatagccatattcacatctgtttctgaaaccagactttgttaattaacagttttaaaatattaattagttttgacatcttgtaaattttaggtcaaaaatacagtccagaacttcctcaaagtgctaaccttaagtaacataacagtgtttgcctgtttgcttgcctggtaaattttgctttttatactgacagacattactaatgtttaagttgatttatcaacagtatttttaaaaactcaaatttgtcttgtgaaaaatgagatgattagaggaacagaaagaaagcaacaggtaaagaattcttcaatttacataaattacaaatgatttggtgctaaatttatgcactatgacatttggcttttatgcaatcatttttttttctttaaagatgttaacactacctgatattaatcataatgttccattatgttgattgcttgtaataggaagaaaaggggtgtcttcctgtgcaactgacacagctaggctttgacggcaggcctccacaaggtctacccttttgattccctttaactgaattctgttcatcaattgtttttgtttcatgggcggtgggaggggaaaggggaattcaatgcataaaataagtatttctaagggctcagtagaaatttctaccatagggatcatttcatgcatttattttttcatttagtctttgctgttatctgtccctcatcttcataactcagcagtggatttctcaagtttggagatgtaaggcaaaagtataattctttagaatgtttggattgtagtgatttatcattggctttcagatttgactgtcacttcagatttttgagcaaaaatactaaaaaaaaaaagaaaaaaaattctttgaagagacaggacctctgttgcccaggctggagtgcagtggtgtgattatagctcactgtaacctcaaactcctgggcttaagtgacatttctgcctcaactttctgagtagctagggctacaggtgcgtgtcaccatgcctcgctaacttaccaatttttttatagaagtggggtctccctgtgttgctcaggctgatcttgaactcctggccctcccgccttggcctccccaaaatgttgggattacaggcgagggccactttgcctggccccaaataacattttttcaaaggaatgtaaattttttttgttttagtttcataggcaaagtctttatgtctgggagagattggattttaggatattatagtaacagatgtattcctttgacctaacctgggcaaagcatttattgggctccctgcttcaacccccttggcagaaagatgaaatatgaattgtatcttcatcaagcttatgctacctttatacagttgtagaaaatacaggttagtaaatagtaattttaggtaacagtatcaaataggaagaagtaaataaaaaagaaagg

SEQ ID NO: 319219 - DNA, 155 bp, Homo sapiens
cctttccagctttgcgcagtggcagtatcgtagccaatgaggtttatccgaggcgcgattattgctaattgaaaacttttcccaataccccgccatgacgacttgaaatatagtcggcattggcaatttttgacgtcgacgcggccgcgaattta

SEQ ID NO: 319220 - DNA, 3158 bp, Homo sapiens
ggcagtttcacatacatgctctcatttaaccctcagtgagtgaattgtaatagttactcttattttatatgtgagggaaagaatctcaggaaggtttccatgcatactactcaaaattgaacatgcagtcaaatcacttgaggctgttggtaaaatgcagatcctgggtctgtaagtctaggctggggcctgagagttggcatttccaacaagctcctcagtgaccaatgcccctcctcacagaccacattctgggtggactagaagggcctggataaactacgaagctcacatggctggggagaagcagcctgactcagagcttctgttggctgccacttggcccccagcacaatactgcgcacggcacctttactgaagaggtgttcattgagtggctggtggctttccatggaaacagtttgaaatggattatcaacaaacacattttcagtcattgtcaacacatgtcaaaaccacatcatctgcaacaatttttgactcagtttatttacttttgctgtcaaacaagaaacggaagacgtgtcttcatatcactaagagtcccatttctccatctcctgcaattttggttttccaactctttgattcattgacaggacatttactgcccgcttgccatgtgttgggcattgcactaggcactggagttagaaaaatgaataaatctcagcagctgccctagagaatcatcgtgtctaatgggggagatatatgtgtataagactttcaaacttttttggcaacaacccactataagaatattttgcaatacagctggtgctcacattcctgctgctgtaactgaaacaaaatttcatgagtcaaatttaatagatgtgatatgagtggtattttctgttgtgtcctattaacatgttgttttaaaatattgattgtaacttgcagtttgaaaaaacacagcagatgaatcacaatggtaaatgctgtggtaaagacctaaagtcttcatatcaataaagtcacatttctctgtgggggattccaaagatggggcatcttgctttgtgatgtggaaggtgcaggactacaggcccagatggtgcacaagtagaaggcagaactataaaaggctctggatgattttctcctgaaagcatcagagacccaagaggaacttcatacatctctaggacagtaacatgattaattggagttccaacaaataattttaatcacagactatatcaacagggtatgctggtgatagggagattggttagaatgttcttctgaaattcccgtgccttttctaacacaggtattttctgtaatactgtgctacgaaacatgattttgcacttggtccaacctagattgcagtcctgctgtgttcttgctagttgtttgaacttgggacagtctgtatattggtgggacccgctgttgatgtctttgttttctagatgaaagaactagggcccagagaaggaagtggatttgagcaccatcagcacctagagtgtggtagagctggaaccagagcacaggcttcaaacttctcttccagtgtcctgtgtttgtgtgtgaggttgacagcaaataaccagttagttcaagctcttcgcgaggtagctccttttcatgtataaatgttactgggtttttctcttcttagctgtcaagttcaaaactcttctgttttttaaggaactcccaagttatttgaagcagctgcttttaaacctcaccattgccttgactttgcttaatgcagatcaaagacacagctctccccttctatcaagcgcaagagagaagtcagccctcctggggcccgaacaagaggccagcaaagggtggaggaagcccctgtgaaaaaagcgaagcgataatcctgaccactgctgccctaggcttatggaggaacacggtggagaggaaagagacatgccttggtggccataggcttctctttaaccaggaaaaagatatgcatgtgctgtaagtccctaggtgcaagctttttcttgttatgttttaaacagctttataaactattgttcatagaagatattatgtacatttatttcagataaaggacaataagtttactttgtatctgaactcaaaacaaagtagttgtatattttaacattcaaaattgggatttcccaatgtgacacatcatgaatgcaaacccctccagcccatcagacgccaggctgcctactggtaatctgtgtatagtatataaacatgtaaaaataggttgtattttactctatgtatgatgctaatcaatgaacactttatttattttacagagaaaacttatctgtgaactttactatatatctgtttattttactttattttttttttaaataaaaagggttttaaatgctatgcagtcattagtagaaaattttttaggactctgcctgctctgtaactatcttaatatgatctggcagaaactcgcatgtatccaagtaaagtagtttagctaaagaaaggttcttcattgcttttctgttcacagttgtggctctgttttttaagaatgtaacttgtttttagattatacttgcatctgtgactttactaccagccacgttgacacaaaacaggttctggttcaggtaaagttgcgtcagtcacctgcagcagaaatccctcttcattcctcttctctgtgttcattcctcttctgtgctgttctgaagcttctaccaatactctttccatattgtctttttcagtgaagagaaatgcattcaagattaggtccctcctgtctatccagtttcaggattttatgttgttttatacacagttatttcagtatagaaactggctttattgccaagtgtttttttaaacatgttttaactctcatatgagcaaactgtccaacttcagtttttcataagattaaacttcttacgatcaaatttgtctcttgcaatgatgtgatgagttgccaaataattgagattattttaaaatgttttgttcatattcttgttttataattaaaatttacattcagtgtgtatgggtttttttttttattttgactcttaatgtaaggtggatatttctgtcattttacatggtttcttactgagattttatatataaattataaaatgtttaccaaaaaaaaaaaa

SEQ ID NO: 319221 - DNA, 212 bp, Homo sapiens
cctataccacctttacatcattgattgcatttctatgtgatgattataaactgctgatttaaaatttttttttgtttgtttatttaaacataggtagaacaatctccatctagcagcaaactgaaagtaatgcaaacagatgaatccaataaagaaacagctaacctacaagaaagaagtataagcaatgtaagtgttaaatttcttatcaa

SEQ ID NO: 319222 - DNA, 7145 bp, Homo sapiens
  misc_feature (3895)..(3895): n is a, c, g, or t
gcggttcctcccttcagagaccaaaaaagagtggtgatatgacattgatccctgaacaagagccaatggaaattgattctgagccaggtgttgaaaatgtgtttgaagtatctaaaacccaagacaaccgcaataataattctcagcaagacattgactctgaaaatatgaaacaaaaaacttctgccactgttcaaaaggatgaattgagaacttgcacagcagattcaaaagcaacagctccagcttataagccaggccgtggaacaggagttaatagtaattctgaaaagcatgccgatcatagaagcaccttgaccaagaaaatgcatatacaaagtgctgtgtccaaaatgaaccctggggagaaagaacccattcatagaggaactactgaagtgaatatagattctgaaactgttcatagaatgttactgagtgccccatcagaaaatgatagggtacagaagaatttgaaaaacacagctgctgaagaacatgttgctcaaggagatgccactcttgaacattccacaaatttagactcctcaccatccttaagttcagtgactgttgtgcctctgagggaatcgtatgatccagatgtaattcctctgtttgacaaaagaactgttttggaaggtagcacagccagcacctcccctgcggatcactctgctctccctaaccaaagtctgactgttagggaatcagaagtccttaagacaagtgacagcaaagaaggtggtgaaggtttcacagtagatacaccagcaaaagcaagcatcactagcaaaagacacattccagaagctcaccaggctactttattggatggtaaacaaggaaaggtaatcatgcctcttggaagtaagttaacgggcgtgattgtggaaaatgagaatattaccaaagaaggtggcttagtggacatggccaagaaagaaaatgacttaaatgcagagcccaatttaaagcagacaattaaagcaacagtagagaatggcaagaaggatggcattgctgttgatcatgttgtaggcctgaatacagaaaaatatgctgaaactgtcaaacttaagcataaaagaagcccaggtaaagtaaaagacatatcaattgatgttgaaagaaggaatgaaaacagtgaggtagacaccagtgctggaagtggctctgcaccctctgttttacaccaaaggaacggacaaactgaggatgtggcaactgggcctaggagagcagaaaagacttctgttgccactagtactgaagggaaggacaaagatgtcaccttaagtccagtgaaggctgggcctgccacaaccacttcttcagaaacaagacaaagtgaggtggctttgccttgcaccagcattgaggcagatgaaggcctcataataggaacacattccagaaataatcctcttcatgttggtgcagaagccagtgaatgcactgtttttgctgcagctgaagaaggtggggctgttgtcacagagggatttgctgaaagtgaaaccttcctcacaagcactaaggaaggggaaagtggggagtgtgctgtggctgaatctgaggacagagcagcagacctactggctgtgcatgcagttaaaatcgaagccaatgtaaatagcgttgtgacagaggaaaaggatgatgctgtaaccagtgcaggctctgaagaaaaatgtgatggttctttaagtagagactcagaaatagttgaaggaactattacttttattagtgaagttgaaagtgatggagcagttacaagtgctggaacagagataagagcaggatctataagcagtgaagaggtggatggctcccagggaaatatgatgagaatgggtcccaaaaaagaaacagagggcactgtgacatgtacaggagcagaaggcagaagtgataactttgtgatctgctcagtaactggagcagggccccgggaggaacgcatggttacaggtgcaggtgttgtcctgggagataatgatgcaccaccaggaacaagtgccagccaagaaggagatggttctgtgaatgatggtacagaaggtgagagtgcagtcaccagcacggggataacagaagatggagaggggccagcaagttgcacaggttcagaagatagcagcgaaggctttgctataagttctgaatcggaagaaaatggagagagtgcaatggacagcacagtggccaaagaaggcactaatgtaccattagttgctgctggtccttgtgatgatgaaggcattgtgactagcacaggcgcaaaagaggaagacgaggaaggggaggatgttgtgactagtactggaagaggaaatgaaattgggcatgcttcaacttgtacagggttaggagaagaaagtgaaggggtcttgatttgtgaaagtgcagaaggggacagtcagattggtactgtggtagagcatgtggaagctgaggctggagctgccatcatgaatgcaaatgaaaataatgttgacagcatgagtggcacagagaaaggaagtaaagacacagatatctgctccagtgcaaaagggattgtagaaagcagtgtgaccagtgcagtctcaggaaaggatgaagtgacaccagttccaggaggttgtgagggtcctatgactagtgctgcatctgatcaaagtgacagtcagctcgaaaaagttgaagataccactatttccactggcctggtcgggggtagttacgatgttcttgtatctggtgaagtcccagaatgtgaagttgctcacacatcaccaagtgaaaaagaagatgaggacatcatcacctctgtagaaaatgaagagtgtgatggtctcatggcaactacagccagtggtgatattaccaaccagaatagcttagcagggggtaaaaatcaaggcaaagttttgattatttccaccagtaccacaaatgattacacccctcaggtaagcgcaattacagatgtggaaggaggtctctcagatgctctgagaactgaagaaaatatggaaggtaccagagtaaccacagaagaatttgaggcccccatgcccagtgcagtctcaggagatgacagccaactcactgccagcagaagtgaagagaaagatgagtgtgccatgatttccacaagcataggggaagaattcgaattgcctatctccagtgcaacaaccatcaagtgtgctgaaagtcttcagccggttgctgcagcagtggaagaaagggctacaggtccagtcttgataagcaccgccgactttgaggggcctatgcccagtgcgcccccagaagctgaaagtcctcttgcctcaaccagcaaggaggagaaggatgaatgtgctctcatttccactagcatagcagaagaatgtgaggcttctgtttccggtgtagttgttgaaagtgaaaatgagcgagctggcacagtcatggaagaaaaagacgggagtggcatcatctctacgagctcggtggaagactgtgagggcccagtgtccagtgctgtccctcaagaggaaggcgacccctcagtcacaccagcggaagagatgggtgacaccgccatgatttccacaagcacctctgaagggtgtgaagcagtcatgattggtgctgtcctccaggatgaagatcggctcaccatcacaagagtagaagacttgagcgatgctgccatcatctccaccagcacagcagaatgtatgccaatttccgccagcattgacagacatgaagagaatcagctgactgcagacaacccagaagggaacggtgacctgtcagccacagaagtgagcaagcacaaggtccccatgcccagcctaattgctgagaataactgtcggtgtcctgggccagtcaggggaggcaaagaacngggtcccgtgttggcagtgagcaccgaggaggggcacaacgggccatcagtccacaagccctctgcagggcaaggccatccaagtgctgtttgtgcggaaaaagaagagaagcatggcaaggagtgccccgaaataggaccatttgcaggaagaggacagaaagagagcactttacacctcataaatgcagaagagaagaatgtattgttgaactcccttcagaaagaagataagagcccagagacagggacagcagggggcagtagcacagcaagttattcagcaggaaggggcttagaggggaatgctaactcacctgcccacctgagaggaccagaacagacgtctgggcagacggctaaggatccctctgtcagcattcgctatttggcagcagtaaacaccggtgctataaaagctgatgacatgccacctgttcaagggaccgtggctgagcattcctttcttcctgctgagcagcaggggtctgaagacaacttgaaaaccagtaccaccaaatgtattactggccaagaatcaaaaattgctccttcccacacaatgatccctccagctacttacagtgtagctctgttggctcctaaatgtgagcaggacttgactataaagaatgattatagtggcaaatggactgatcaagcatctgctgagaaaacaggagatgataacagcacaaggaaatcattccctgaggaaggagacataatggttactgtgtcttctgaagaaaatgtgtgtgacataggcaatgaagagtctccattgaatgttttgggaggattgaaactgaaagccaacttgaaaatggaggcttatgtgccttcagaggaagagaaaaatggtgaaattctggcaccaccagaaagtctgtgtgggggaaagccaagtggaatagctgaactccagagggagcctttgttggtgaatgaatcactaaatgttgaaaattcaggcttcagaacaaatgaagaaattcatagcgaatcttataacaaaggagagatatccagtggtagaaaagacaacgcagaagccataagcggtcacagtgttgaagcagatcctaaagaggttgaagaggaagaaaggcatatgcctaaaagaaaaagaaagcagcattatctctcttcagaagatgaaccagatgataatccagatgtcctggattccagaatagaaacagcacaaaggcagtgtcctgaaacggagccacatgacacaaaggaagagaactccagagatttggaagaattacctaaaaccagttctgagacaaatagcactacctcaagggtcatggaagaaaaagatgaatatagcagcagtgaaactactggtgaaaagccagagcagaacgatgatgacaccataaaatctcaggaggaagatcagccaataattattaaaaggaaaagaggaagacctcgcaaataccctgtagaaacaacgttaaaaatgaaagacgactccaaaacagatactggcattgtcactgtagaacaatctccatctagcagcaaactgaaagtaatgcaaacagatgaatccaataaagaaacagctaacctacaagaaagaagtataagcaatgatgatggtgaagaaaaaatagtaacaagtgtgcgtcggagaggaagaaaacccaaacgttctctcactgtatcagatgatgctgaatcctcagagccagaaagaaaacgccagaaatcagtttctgatccagtggaggacaagaaagagcaggagtctgatgaggaagaggaagaagaggaagaggacgagccttcaggagccaccacaagatccaccaccagatcagaggctcagagatcaaagacacagctctccccttctatcaagcgcaagagagaagtcagccctcctggggcccgaacaagaggccagcaaagggtggaggaagcccctgtgaaaaaagcgaagcgataatcctgaccactgctgccctaggcttatggaggaacacggtggagaggaaagagacatgccttggtggccataggcttctctttaaccaggaaaaagatatgcatgtgctgtaagtccctaggtgcaagctttttcttgttatgttttaaacagctttataaactattgttcatagaagatattatgtacatttatttcagataaaggacaataagtttactttgtatctgaactcaaaacaaagtagttgtatattttaacattcaaaattgggatttcccaatgtgacacatcatgaatgcaaacccctccagcccatcagacgccaggctgcctactggtaatctgtgtatagtatataaacatgtaaaaataggttgtattttactctatgtatgatgctaatcaatgaacactttatttattttacagagaaaacttatctgtgaactttactatatatctgtttattttactttattttttttttaaataaaaagggttttaaatgctatgcagtcattagtagaaaattttttaggactctgcctgctctgtaactatcttaatatgatctggcagaaactcgcatgtatccaagtaaagtagtttagctaaagaaaggttcttcattgcttttctgttcacagttgtggctctgttttttaagaatgtaacttgtttttagattatacttgcatctgtgactttactaccagccacgttgacacaaaacaggttctggttcaggtaaagttgcgtcagtcacctgcagcagaaatccctcttcattcctcttctctgtgttcattcctcttctgtgctgttctgaagcttctaccaatactctttccatattgtctttttcagtgaagagaaatgcattcaagattaggtccctcctgtctatccagtttcaggattttatgttgttttatacacagttatttcagtatagaaactggctttattgccaagtgtttttttaaacatgttttaactctcatatgagcaaactgtccaacttcagtttttcataagattaaacttcttacgatcaaatttgtctcttgcaatgatgtgatgagttgccaaataattgagattattttaaaatgttttgttcatattcttgttttataattaaaatttacattcagtgtgtatgggtttttttttttattttgactcttaatgtaaggtggatatttctgtcattttacatggtttcttactgagattttatatataaattataaaatgtttaccaaaaaaaaaaaa

SEQ ID NO: 319223 - DNA, 6484 bp, Homo sapiens
  misc_feature (3234)..(3234): n is a, c, g, or t
gcggttcctcccttcagagaccaaaaaagagtggtgatatgacattgatccctgaacaagagccaatggaaattgattctgagccaggtgttgaaaatgtgtttgaagtatctaaaacccaagacaaccgcaataataattctcagcaagacattgactctgaaaatatgaaacaaaaaacttctgccactgttcaaaaggatgaattgagaacttgcacagcagattcaaaagcaacagctccagcttataagccaggccgtggaacaggagttaatagtaattctgaaaagcatgccgatcatagaagcaccttgaccaagaaaatgcatatacaaagtgctgtgtccaaaatgaaccctggggagaaagaacccattcatagaggaactactgaagtgaatatagattctgaaactgttcatagaatgttactgagtgccccatcagaaaatgatagggtacagaagaatttgaaaaacacagctgctgaagaacatgttgctcaaggagatgccactcttgaacattccacaaatttagactcctcaccatccttaagttcagtgactgttgtgcctctgagggaatcgtatgatccagatgtaattcctctgtttgacaaaagaactgttttggaaggtagcacagccagcacctcccctgcggatcactctgctctccctaaccaaagtctgactgttagggaatcagaagtccttaagacaagtgacagcaaagaaggtggtgaaggtttcacagtagatacaccagcaaaagcaagcatcactagcaaaagacacattccagaagctcaccaggctactttattggatggtaaacaaggaaaggtaatcatgcctcttggaagtaagttaacgggcgtgattgtggaaaatgagaatattaccaaagaaggtggcttagtggacatggccaagaaagaaaatgacttaaatgcagagcccaatttaaagcagacaattaaagcaacagtagagaatggcaagaaggatggcattgctgttgatcatgttgtaggcctgaatacagaaaaatatgctgaaactgtcaaacttaagcataaaagaagcccaggtaaagtaaaagacatatcaattgatgttgaaagaaggaatgaaaacagtgaggtagacaccagtgctggaagtggctctgcaccctctgttttacaccaaaggaacggacaaactgaggatgtggcaactgggcctaggagacagaaggcagaagtgataactttgtgatctgctcagtaactggagcagggccccgggaggaacgcatggttacaggtgcaggtgttgtcctgggagataatgatgcaccaccaggaacaagtgccagccaagaaggagatggttctgtgaatgatggtacagaaggtgagagtgcagtcaccagcacggggataacagaagatggagaggggccagcaagttgcacaggttcagaagatagcagcgaaggctttgctataagttctgaatcggaagaaaatggagagagtgcaatggacagcacagtggccaaagaaggcactaatgtaccattagttgctgctggtccttgtgatgatgaaggcattgtgactagcacaggcgcaaaagaggaagacgaggaaggggaggatgttgtgactagtactggaagaggaaatgaaattgggcatgcttcaacttgtacagggttaggagaagaaagtgaaggggtcttgatttgtgaaagtgcagaaggggacagtcagattggtactgtggtagagcatgtggaagctgaggctggagctgccatcatgaatgcaaatgaaaataatgttgacagcatgagtggcacagagaaaggaagtaaagacacagatatctgctccagtgcaaaagggattgtagaaagcagtgtgaccagtgcagtctcaggaaaggatgaagtgacaccagttccaggaggttgtgagggtcctatgactagtgctgcatctgatcaaagtgacagtcagctcgaaaaagttgaagataccactatttccactggcctggtcgggggtagttacgatgttcttgtatctggtgaagtcccagaatgtgaagttgctcacacatcaccaagtgaaaaagaagatgaggacatcatcacctctgtagaaaatgaagagtgtgatggtctcatggcaactacagccagtggtgatattaccaaccagaatagcttagcagggggtaaaaatcaaggcaaagttttgattatttccaccagtaccacaaatgattacacccctcaggtaagcgcaattacagatgtggaaggaggtctctcagatgctctgagaactgaagaaaatatggaaggtaccagagtaaccacagaagaatttgaggcccccatgcccagtgcagtctcaggagatgacagccaactcactgccagcagaagtgaagagaaagatgagtgtgccatgatttccacaagcataggggaagaattcgaattgcctatctccagtgcaacaaccatcaagtgtgctgaaagtcttcagccggttgctgcagcagtggaagaaagggctacaggtccagtcttgataagcaccgccgactttgaggggcctatgcccagtgcgcccccagaagctgaaagtcctcttgcctcaaccagcaaggaggagaaggatgaatgtgctctcatttccactagcatagcagaagaatgtgaggcttctgtttccggtgtagttgttgaaagtgaaaatgagcgagctggcacagtcatggaagaaaaagacgggagtggcatcatctctacgagctcggtggaagactgtgagggcccagtgtccagtgctgtccctcaagaggaaggcgacccctcagtcacaccagcggaagagatgggtgacaccgccatgatttccacaagcacctctgaagggtgtgaagcagtcatgattggtgctgtcctccaggatgaagatcggctcaccatcacaagagtagaagacttgagcgatgctgccatcatctccaccagcacagcagaatgtatgccaatttccgccagcattgacagacatgaagagaatcagctgactgcagacaacccagaagggaacggtgacctgtcagccacagaagtgagcaagcacaaggtccccatgcccagcctaattgctgagaataactgtcggtgtcctgggccagtcaggggaggcaaagaacngggtcccgtgttggcagtgagcaccgaggaggggcacaacgggccatcagtccacaagccctctgcagggcaaggccatccaagtgctgtttgtgcggaaaaagaagagaagcatggcaaggagtgccccgaaataggaccatttgcaggaagaggacagaaagagagcactttacacctcataaatgcagaagagaagaatgtattgttgaactcccttcagaaagaagataagagcccagagacagggacagcagggggcagtagcacagcaagttattcagcaggaaggggcttagaggggaatgctaactcacctgcccacctgagaggaccagaacagacgtctgggcagacggctaaggatccctctgtcagcattcgctatttggcagcagtaaacaccggtgctataaaagctgatgacatgccacctgttcaagggaccgtggctgagcattcctttcttcctgctgagcagcaggggtctgaagacaacttgaaaaccagtaccaccaaatgtattactggccaagaatcaaaaattgctccttcccacacaatgatccctccagctacttacagtgtagctctgttggctcctaaatgtgagcaggacttgactataaagaatgattatagtggcaaatggactgatcaagcatctgctgagaaaacaggagatgataacagcacaaggaaatcattccctgaggaaggagacataatggttactgtgtcttctgaagaaaatgtgtgtgacataggcaatgaagagtctccattgaatgttttgggaggattgaaactgaaagccaacttgaaaatggaggcttatgtgccttcagaggaagagaaaaatggtgaaattctggcaccaccagaaagtctgtgtgggggaaagccaagtggaatagctgaactccagagggagcctttgttggtgaatgaatcactaaatgttgaaaattcaggcttcagaacaaatgaagaaattcatagcgaatcttataacaaaggagagatatccagtggtagaaaagacaacgcagaagccataagcggtcacagtgttgaagcagatcctaaagaggttgaagaggaagaaaggcatatgcctaaaagaaaaagaaagcagcattatctctcttcagaagatgaaccagatgataatccagatgtcctggattccagaatagaaacagcacaaaggcagtgtcctgaaacggagccacatgacacaaaggaagagaactccagagatttggaagaattacctaaaaccagttctgagacaaatagcactacctcaagggtcatggaagaaaaagatgaatatagcagcagtgaaactactggtgaaaagccagagcagaacgatgatgacaccataaaatctcaggaggaagatcagccaataattattaaaaggaaaagaggaagacctcgcaaataccctgtagaaacaacgttaaaaatgaaagacgactccaaaacagatactggcattgtcactgtagaacaatctccatctagcagcaaactgaaagtaatgcaaacagatgaatccaataaagaaacagctaacctacaagaaagaagtataagcaatgatgatggtgaagaaaaaatagtaacaagtgtgcgtcggagaggaagaaaacccaaacgttctctcactgtatcagatgatgctgaatcctcagagccagaaagaaaacgccagaaatcagtttctgatccagtggaggacaagaaagagcaggagtctgatgaggaagaggaagaagaggaagaggacgagccttcaggagccaccacaagatccaccaccagatcagaggctcagagatcaaagacacagctctccccttctatcaagcgcaagagagaagtcagccctcctggggcccgaacaagaggccagcaaagggtggaggaagcccctgtgaaaaaagcgaagcgataatcctgaccactgctgccctaggcttatggaggaacacggtggagaggaaagagacatgccttggtggccataggcttctctttaaccaggaaaaagatatgcatgtgctgtaagtccctaggtgcaagctttttcttgttatgttttaaacagctttataaactattgttcatagaagatattatgtacatttatttcagataaaggacaataagtttactttgtatctgaactcaaaacaaagtagttgtatattttaacattcaaaattgggatttcccaatgtgacacatcatgaatgcaaacccctccagcccatcagacgccaggctgcctactggtaatctgtgtatagtatataaacatgtaaaaataggttgtattttactctatgtatgatgctaatcaatgaacactttatttattttacagagaaaacttatctgtgaactttactatatatctgtttattttactttattttttttttaaataaaaagggttttaaatgctatgcagtcattagtagaaaattttttaggactctgcctgctctgtaactatcttaatatgatctggcagaaactcgcatgtatccaagtaaagtagtttagctaaagaaaggttcttcattgcttttctgttcacagttgtggctctgttttttaagaatgtaacttgtttttagattatacttgcatctgtgactttactaccagccacgttgacacaaaacaggttctggttcaggtaaagttgcgtcagtcacctgcagcagaaatccctcttcattcctcttctctgtgttcattcctcttctgtgctgttctgaagcttctaccaatactctttccatattgtctttttcagtgaagagaaatgcattcaagattaggtccctcctgtctatccagtttcaggattttatgttgttttatacacagttatttcagtatagaaactggctttattgccaagtgtttttttaaacatgttttaactctcatatgagcaaactgtccaacttcagtttttcataagattaaacttcttacgatcaaatttgtctcttgcaatgatgtgatgagttgccaaataattgagattattttaaaatgttttgttcatattcttgttttataattaaaatttacattcagtgtgtatgggtttttttttttattttgactcttaatgtaaggtggatatttctgtcattttacatggtttcttactgagattttatatataaattataaaatgtttaccaaaaaaaaaaaa

SEQ ID NO: 319224 - DNA, 2508 bp, Homo sapiens
tacaacatggattgattgtgggaaataactggtcagatttttataatttatgaaagcagctaagccacttggtgacataggataggttccctatcctaaaaatcttcaaatttgtttctctgcatttcagaaacaatattcagtttctttacatctcatttttatttttgaacagctgaactccagagggagcctttgttggtgaatgaatcactaaatgttgaaaattcaggcttcagaacaaatgaagaaattcatagcgaatcttataacaaaggagagatatccagtggtagaaaagacaacgcagaagccataagcggtcacagtgttgaagcagatcctaaagaggttgaagaggaagaaaggcatatgcctaaaagaaaaagaaagcagcattatctctcttcagaagatgaaccagatgataatccagatgtcctggattccagaatagaaacagcacaaaggcagtgtcctgaaacggagccacatgacacaaaggaagagaactccagagatttggaagaattacctaaaaccagttctgagacaaatagcactacctcaagggtcatggaagaaaaagatgaatatagcagcagtgaaactactggtgaaaagccagagcagaacgatgatgacaccataaaatctcaggaggaagatcagccaataattattaaaaggaaaagaggaagacctcgcaaataccctgtagaaacaacgttaaaaatgaaagacgactccaaaacagatactggcattgtcactgtagaacaatctccatctagcagcaaactgaaagtaatgcaaacagatgaatccaataaagaaacagctaacctacaagaaagaagtataagcaatgatgatggtgaagaaaaaatagtaacaagtgtgcgtcggagaggaagaaaacccaaacgttctctcactgtatcagatgatgctgaatcctcagagccagaaagaaaacgccagaaatcagtttctgatccagtggaggacaagaaagagcaggagtctgatgaggaagaggaagaagaggaagaggacgagccttcaggagccaccacaagatccaccaccagatcagaggctcagagatcaaagacacagctctccccttctatcaagcgcaagagagaagtcagccctcctggggcccgaacaagaggccagcaaagggtggaggaagcccctgtgaaaaaagcgaagcgataatcctgaccactgctgccctaggcttatggaggaacacggtggagaggaaagagacatgccttggtggccataggcttctctttaaccaggaaaaagatatgcatgtgctgtaagtccctaggtgcaagctttttcttgttatgttttaaacagctttataaactattgttcatagaagatattatgtacatttatttcagataaaggacaataagtttactttgtatctgaactcaaaacaaagtagttgtatattttaacattcaaaattgggatttcccaatgtgacacatcatgaatgcaaacccctccagcccatcagacgccaggctgcctactggtaatctgtgtatagtatataaacatgtaaaaataggttgtattttactctatgtatgatgctaatcaatgaacactttatttattttacagagaaaacttatctgtgaactttactatatatctgtttattttactttattttttttttaaataaaaagggttttaaatgctatgcagtcattagtagaaaattttttaggactctgcctgctctgtaactatcttaatatgatctggcagaaactcgcatgtatccaagtaaagtagtttagctaaagaaaggttcttcattgcttttctgttcacagttgtggctctgttttttaagaatgtaacttgtttttagattatacttgcatctgtgactttactaccagccacgttgacacaaaacaggttctggttcaggtaaagttgcgtcagtcacctgcagcagaaatccctcttcattcctcttctctgtgttcattcctcttctgtgctgttctgaagcttctaccaatactctttccatattgtctttttcagtgaagagaaatgcattcaagattaggtccctcctgtctatccagtttcaggattttatgttgttttatacacagttatttcagtatagaaactggctttattgccaagtgtttttttaaacatgttttaactctcatatgagcaaactgtccaacttcagtttttcataagattaaacttcttacgatcaaatttgtctcttgcaatgatgtgatgagttgccaaataattgagattattttaaaatgttttgttcatattcttgttttataattaaaatttacattcagtgtgtatgggtttttttttttattttgactcttaatgtaaggtggatatttctgtcattttacatggtttcttactgagattttatatataaattataaaatgtttaccaaaaaaaaaaaa

SEQ ID NO: 319225 - DNA, 2581 bp, Homo sapiens
aagttttggattctagaacattttaaattttggatcatcagattagggatgctccgcctgtatatcattccaacttgcagttactggtacatattgtgggctccttatatgcccccttttttcttcttttttggggtcagaacatttaagctgaaagggaataagagtagtctaacccagccgggcgtggtggctcacacctgtaatcccagcactttgggaagccaaggcaggcagatcacctgaggtcaggagttcaagagtagcctggccaacatggtgaaaccccgtctctactaaaaatacaaaaaattagctggacatggtggtgggcacctgtaatctcagctactcaaggaggctgaggcaggagaattgcttgaacccaggaggcggaggttgcattgagccaagatcacgccactgcactccagcctgaatgactgagtgaaactctgtcttagaaaaaaaaaaaaagtagtctaatccaacttcttattttgcagctgaaaaaactgagggtcagcaaatttaaataaaatctgaaatgaaaacttatgtttcgtgactcacaatccaatgtgatctctgctaggtattctgattctatctttgcttgactgatacaagataatgatgaaatgtataacaatgtattaatactgatacattgacagacaagccaggctgattgttgaaatttaaatttacagtaataaaatattaatgcagagatttcccttttcttaaagatgaatccaataaagaaacagctaacctacaagaaagaagtataagcaatgatgatggtgaagaaaaaatagtaacaagtgtgcgtcggagaggaagaaaacccaaacgttctctcactgtatcagatgatgctgaatcctcagagccagaaagaaaacgccagaaatcagtttctgatccagtggaggacaagaaagagcaggagtctgatgaggaagaggaagaagaggaagaggacgagccttcaggagccaccacaagatccaccaccagatcagaggctcagagaaagcaacatagcaagccatctgcacgtgcaacatccaaacttggcagcccagacacagtttctcctagaaatcgccaaaaattagcaaaagagaagttacctaccagcgaaaaagttagtaactctcccccattaggaagatcaaagacacagctctccccttctatcaagcgcaagagagaagtcagccctcctggggcccgaacaagaggccagcaaagggtggaggaagcccctgtgaaaaaagcgaagcgataatcctgaccactgctgccctaggcttatggaggaacacggtggagaggaaagagacatgccttggtggccataggcttctctttaaccaggaaaaagatatgcatgtgctgtaagtccctaggtgcaagctttttcttgttatgttttaaacagctttataaactattgttcatagaagatattatgtacatttatttcagataaaggacaataagtttactttgtatctgaactcaaaacaaagtagttgtatattttaacattcaaaattgggatttcccaatgtgacacatcatgaatgcaaacccctccagcccatcagacgccaggctgcctactggtaatctgtgtatagtatataaacatgtaaaaataggttgtattttactctatgtatgatgctaatcaatgaacactttatttattttacagagaaaacttatctgtgaactttactatatatctgtttattttactttattttttttttaaataaaaagggttttaaatgctatgcagtcattagtagaaaattttttaggactctgcctgctctgtaactatcttaatatgatctggcagaaactcgcatgtatccaagtaaagtagtttagctaaagaaaggttcttcattgcttttctgttcacagttgtggctctgttttttaagaatgtaacttgtttttagattatacttgcatctgtgactttactaccagccacgttgacacaaaacaggttctggttcaggtaaagttgcgtcagtcacctgcagcagaaatccctcttcattcctcttctctgtgttcattcctcttctgtgctgttctgaagcttctaccaatactctttccatattgtctttttcagtgaagagaaatgcattcaagattaggtccctcctgtctatccagtttcaggattttatgttgttttatacacagttatttcagtatagaaactggctttattgccaagtgtttttttaaacatgttttaactctcatatgagcaaactgtccaacttcagtttttcataagattaaacttcttacgatcaaatttgtctcttgcaatgatgtgatgagttgccaaataattgagattattttaaaatgttttgttcatattcttgttttataattaaaatttacattcagtgtgtatgggtttttttttttattttgactcttaatgtaaggtggatatttctgtcattttacatggtttcttactgagattttatatataaattataaaatgtttaccaaaaaaaaaaaa

SEQ ID NO: 319226 - DNA, 7286 bp, Homo sapiens
  misc_feature (3895)..(3895): n is a, c, g, or t
gcggttcctcccttcagagaccaaaaaagagtggtgatatgacattgatccctgaacaagagccaatggaaattgattctgagccaggtgttgaaaatgtgtttgaagtatctaaaacccaagacaaccgcaataataattctcagcaagacattgactctgaaaatatgaaacaaaaaacttctgccactgttcaaaaggatgaattgagaacttgcacagcagattcaaaagcaacagctccagcttataagccaggccgtggaacaggagttaatagtaattctgaaaagcatgccgatcatagaagcaccttgaccaagaaaatgcatatacaaagtgctgtgtccaaaatgaaccctggggagaaagaacccattcatagaggaactactgaagtgaatatagattctgaaactgttcatagaatgttactgagtgccccatcagaaaatgatagggtacagaagaatttgaaaaacacagctgctgaagaacatgttgctcaaggagatgccactcttgaacattccacaaatttagactcctcaccatccttaagttcagtgactgttgtgcctctgagggaatcgtatgatccagatgtaattcctctgtttgacaaaagaactgttttggaaggtagcacagccagcacctcccctgcggatcactctgctctccctaaccaaagtctgactgttagggaatcagaagtccttaagacaagtgacagcaaagaaggtggtgaaggtttcacagtagatacaccagcaaaagcaagcatcactagcaaaagacacattccagaagctcaccaggctactttattggatggtaaacaaggaaaggtaatcatgcctcttggaagtaagttaacgggcgtgattgtggaaaatgagaatattaccaaagaaggtggcttagtggacatggccaagaaagaaaatgacttaaatgcagagcccaatttaaagcagacaattaaagcaacagtagagaatggcaagaaggatggcattgctgttgatcatgttgtaggcctgaatacagaaaaatatgctgaaactgtcaaacttaagcataaaagaagcccaggtaaagtaaaagacatatcaattgatgttgaaagaaggaatgaaaacagtgaggtagacaccagtgctggaagtggctctgcaccctctgttttacaccaaaggaacggacaaactgaggatgtggcaactgggcctaggagagcagaaaagacttctgttgccactagtactgaagggaaggacaaagatgtcaccttaagtccagtgaaggctgggcctgccacaaccacttcttcagaaacaagacaaagtgaggtggctttgccttgcaccagcattgaggcagatgaaggcctcataataggaacacattccagaaataatcctcttcatgttggtgcagaagccagtgaatgcactgtttttgctgcagctgaagaaggtggggctgttgtcacagagggatttgctgaaagtgaaaccttcctcacaagcactaaggaaggggaaagtggggagtgtgctgtggctgaatctgaggacagagcagcagacctactggctgtgcatgcagttaaaatcgaagccaatgtaaatagcgttgtgacagaggaaaaggatgatgctgtaaccagtgcaggctctgaagaaaaatgtgatggttctttaagtagagactcagaaatagttgaaggaactattacttttattagtgaagttgaaagtgatggagcagttacaagtgctggaacagagataagagcaggatctataagcagtgaagaggtggatggctcccagggaaatatgatgagaatgggtcccaaaaaagaaacagagggcactgtgacatgtacaggagcagaaggcagaagtgataactttgtgatctgctcagtaactggagcagggccccgggaggaacgcatggttacaggtgcaggtgttgtcctgggagataatgatgcaccaccaggaacaagtgccagccaagaaggagatggttctgtgaatgatggtacagaaggtgagagtgcagtcaccagcacggggataacagaagatggagaggggccagcaagttgcacaggttcagaagatagcagcgaaggctttgctataagttctgaatcggaagaaaatggagagagtgcaatggacagcacagtggccaaagaaggcactaatgtaccattagttgctgctggtccttgtgatgatgaaggcattgtgactagcacaggcgcaaaagaggaagacgaggaaggggaggatgttgtgactagtactggaagaggaaatgaaattgggcatgcttcaacttgtacagggttaggagaagaaagtgaaggggtcttgatttgtgaaagtgcagaaggggacagtcagattggtactgtggtagagcatgtggaagctgaggctggagctgccatcatgaatgcaaatgaaaataatgttgacagcatgagtggcacagagaaaggaagtaaagacacagatatctgctccagtgcaaaagggattgtagaaagcagtgtgaccagtgcagtctcaggaaaggatgaagtgacaccagttccaggaggttgtgagggtcctatgactagtgctgcatctgatcaaagtgacagtcagctcgaaaaagttgaagataccactatttccactggcctggtcgggggtagttacgatgttcttgtatctggtgaagtcccagaatgtgaagttgctcacacatcaccaagtgaaaaagaagatgaggacatcatcacctctgtagaaaatgaagagtgtgatggtctcatggcaactacagccagtggtgatattaccaaccagaatagcttagcagggggtaaaaatcaaggcaaagttttgattatttccaccagtaccacaaatgattacacccctcaggtaagcgcaattacagatgtggaaggaggtctctcagatgctctgagaactgaagaaaatatggaaggtaccagagtaaccacagaagaatttgaggcccccatgcccagtgcagtctcaggagatgacagccaactcactgccagcagaagtgaagagaaagatgagtgtgccatgatttccacaagcataggggaagaattcgaattgcctatctccagtgcaacaaccatcaagtgtgctgaaagtcttcagccggttgctgcagcagtggaagaaagggctacaggtccagtcttgataagcaccgccgactttgaggggcctatgcccagtgcgcccccagaagctgaaagtcctcttgcctcaaccagcaaggaggagaaggatgaatgtgctctcatttccactagcatagcagaagaatgtgaggcttctgtttccggtgtagttgttgaaagtgaaaatgagcgagctggcacagtcatggaagaaaaagacgggagtggcatcatctctacgagctcggtggaagactgtgagggcccagtgtccagtgctgtccctcaagaggaaggcgacccctcagtcacaccagcggaagagatgggtgacaccgccatgatttccacaagcacctctgaagggtgtgaagcagtcatgattggtgctgtcctccaggatgaagatcggctcaccatcacaagagtagaagacttgagcgatgctgccatcatctccaccagcacagcagaatgtatgccaatttccgccagcattgacagacatgaagagaatcagctgactgcagacaacccagaagggaacggtgacctgtcagccacagaagtgagcaagcacaaggtccccatgcccagcctaattgctgagaataactgtcggtgtcctgggccagtcaggggaggcaaagaacngggtcccgtgttggcagtgagcaccgaggaggggcacaacgggccatcagtccacaagccctctgcagggcaaggccatccaagtgctgtttgtgcggaaaaagaagagaagcatggcaaggagtgccccgaaataggaccatttgcaggaagaggacagaaagagagcactttacacctcataaatgcagaagagaagaatgtattgttgaactcccttcagaaagaagataagagcccagagacagggacagcagggggcagtagcacagcaagttattcagcaggaaggggcttagaggggaatgctaactcacctgcccacctgagaggaccagaacagacgtctgggcagacggctaaggatccctctgtcagcattcgctatttggcagcagtaaacaccggtgctataaaagctgatgacatgccacctgttcaagggaccgtggctgagcattcctttcttcctgctgagcagcaggggtctgaagacaacttgaaaaccagtaccaccaaatgtattactggccaagaatcaaaaattgctccttcccacacaatgatccctccagctacttacagtgtagctctgttggctcctaaatgtgagcaggacttgactataaagaatgattatagtggcaaatggactgatcaagcatctgctgagaaaacaggagatgataacagcacaaggaaatcattccctgaggaaggagacataatggttactgtgtcttctgaagaaaatgtgtgtgacataggcaatgaagagtctccattgaatgttttgggaggattgaaactgaaagccaacttgaaaatggaggcttatgtgccttcagaggaagagaaaaatggtgaaattctggcaccaccagaaagtctgtgtgggggaaagccaagtggaatagctgaactccagagggagcctttgttggtgaatgaatcactaaatgttgaaaattcaggcttcagaacaaatgaagaaattcatagcgaatcttataacaaaggagagatatccagtggtagaaaagacaacgcagaagccataagcggtcacagtgttgaagcagatcctaaagaggttgaagaggaagaaaggcatatgcctaaaagaaaaagaaagcagcattatctctcttcagaagatgaaccagatgataatccagatgtcctggattccagaatagaaacagcacaaaggcagtgtcctgaaacggagccacatgacacaaaggaagagaactccagagatttggaagaattacctaaaaccagttctgagacaaatagcactacctcaagggtcatggaagaaaaagatgaatatagcagcagtgaaactactggtgaaaagccagagcagaacgatgatgacaccataaaatctcaggaggaagatcagccaataattattaaaaggaaaagaggaagacctcgcaaataccctgtagaaacaacgttaaaaatgaaagacgactccaaaacagatactggcattgtcactgtagaacaatctccatctagcagcaaactgaaagtaatgcaaacagatgaatccaataaagaaacagctaacctacaagaaagaagtataagcaatgatgatggtgaagaaaaaatagtaacaagtgtgcgtcggagaggaagaaaacccaaacgttctctcactgtatcagatgatgctgaatcctcagagccagaaagaaaacgccagaaatcagtttctgatccagtggaggacaagaaagagcaggagtctgatgaggaagaggaagaagaggaagaggacgagccttcaggagccaccacaagatccaccaccagatcagaggctcagagaaagcaacatagcaagccatctgcacgtgcaacatccaaacttggcagcccagacacagtttctcctagaaatcgccaaaaattagcaaaagagaagttacctaccagcgaaaaagttagtaactctcccccattaggaagatcaaagacacagctctccccttctatcaagcgcaagagagaagtcagccctcctggggcccgaacaagaggccagcaaagggtggaggaagcccctgtgaaaaaagcgaagcgataatcctgaccactgctgccctaggcttatggaggaacacggtggagaggaaagagacatgccttggtggccataggcttctctttaaccaggaaaaagatatgcatgtgctgtaagtccctaggtgcaagctttttcttgttatgttttaaacagctttataaactattgttcatagaagatattatgtacatttatttcagataaaggacaataagtttactttgtatctgaactcaaaacaaagtagttgtatattttaacattcaaaattgggatttcccaatgtgacacatcatgaatgcaaacccctccagcccatcagacgccaggctgcctactggtaatctgtgtatagtatataaacatgtaaaaataggttgtattttactctatgtatgatgctaatcaatgaacactttatttattttacagagaaaacttatctgtgaactttactatatatctgtttattttactttattttttttttaaataaaaagggttttaaatgctatgcagtcattagtagaaaattttttaggactctgcctgctctgtaactatcttaatatgatctggcagaaactcgcatgtatccaagtaaagtagtttagctaaagaaaggttcttcattgcttttctgttcacagttgtggctctgttttttaagaatgtaacttgtttttagattatacttgcatctgtgactttactaccagccacgttgacacaaaacaggttctggttcaggtaaagttgcgtcagtcacctgcagcagaaatccctcttcattcctcttctctgtgttcattcctcttctgtgctgttctgaagcttctaccaatactctttccatattgtctttttcagtgaagagaaatgcattcaagattaggtccctcctgtctatccagtttcaggattttatgttgttttatacacagttatttcagtatagaaactggctttattgccaagtgtttttttaaacatgttttaactctcatatgagcaaactgtccaacttcagtttttcataagattaaacttcttacgatcaaatttgtctcttgcaatgatgtgatgagttgccaaataattgagattattttaaaatgttttgttcatattcttgttttataattaaaatttacattcagtgtgtatgggtttttttttttattttgactcttaatgtaaggtggatatttctgtcattttacatggtttcttactgagattttatatataaattataaaatgtttaccaaaaaaaaaaaa

SEQ ID NO: 319227 - DNA, 600 bp, Homo sapiens
  misc_feature (594)..(595): n is a, c, g, or t
  misc_feature (597)..(600): n is a, c, g, or t
ccatgatggctccgtctcattctgtcacagatcgtctttataagccagacatgtcagtgctataaactgatgagacacccacagaatttaacagaaatcgaaggtgtggaaaggatctcagacaagcgaatccatcactgttactgtacagataagaaatggaggccaaataggattagcaacttgctcaggactccacagaaagagcagcaactggatggcacagaatgagttctgacgtttacatcagaagatggccctgaaccggagccaaagctggccgaggagctgggggagattctgagactcacactttcatttgtgaagtgagatgctgactctattgttggttttgtttgggggtttgatgctgaaataaagcaatacacacgaggaaatttactggcattgtattaaaaaacaaagttaatgtatgatgatgccgtagagtgattcatgaatggcattatgaatattttaaaaacacaaaaggaattaaaagagtatacttggatgttaatgaaaataaaatttcattgagaacaagaatcttggtaaacatcagttgatattaaaaatttattgcttttaaannannnn

SEQ ID NO: 319228 - DNA, 547 bp, Homo sapiens
ccatgatggctccgtctcattctgtcacagatcgtctttataagccagacatgtcagtgctataaactgatgagacacccacagaatttaacagaaatcgaaggtgtggaaaggatctcagacaagcgaatccatcactgttactgtacagataagaaatggaggccaaataggattagcaacttgctcaggactccacagaaagagcagcaactggatggcacagaatgagttctgacgtttacatcagaagatggccctgaaccggagccaaagctggccgaggagctgggggagattctgagactcacactttcatttgtgaagtgagatgctgactctattgttggttttgtttgggggtttgatgctgaaataaagcaatacacacgaggaaatttactggcattgtattaaaaaacaaagttaatgtatgatgatgccgtagagtgattcatgaatggcattatgaatattttaaaaacacaaaaggaattaaaagagtatacttggatgttaatgaaaataaaatttcattgagaacaag

SEQ ID NO: 319229 - DNA, 702 bp, Homo sapiens
  misc_feature (702)..(702): n is a, c, g, or t
agactcaacaagagctccagcaaagactttcactgtagcttgacttgacctgagattaactagggaatcttgagaataaagatgagctctgaaaattgtttcgtagcagagaacagctctttgcatccggagagtggacaagaaaatgatgccaccagtccccatttctcaacacgtcatgaagggtccttccaagttcctgtcctgtgtgctgtaatgaatgtggtcttcatcaccattttaatcatagctctcattgccttatcagtgggccaatacaattgtccaggccaatacacattctcaatgccatcagacagccatgtttcttcatgctctgaggactgggttggctaccagaggaaatgctactttatttctactgtgaagaggagctggacttcagcccaaaatgcttgttctgaacatggtgctactcttgctgtcattgattctgaaaaggacatgaactttctaaaacgatacgcaggtagagaggaacactgggttggactgaaaaaggaacctggtcacccatggaagtggtcaaatggcaaagaatttaacaactggttcaacgttacagggtctgacaagtgtgtctttctgaacccttacaatataaggaaccggttacttattggctatattgagggaactaaggaaaccgggccagcgatgctgctctgggccgaaacctcn

SEQ ID NO: 319230 - DNA, 1354 bp, Homo sapiens
agactcaacaagagctccagcaaagactttcactgtagcttgacttgacctgagattaactagggaatcttgagaataaagatgagctctgaaaattgtttcgtagcagagaacagctctttgcatccggagagtggacaagaaaaactttctaaaacgatacgcaggtagagaggaacactgggttggactgaaaaaggaacctggtcacccatggaagtggtcaaatggcaaagaatttaacaactggttcaacgttacagggtctgacaagtgtgtttttctgaaaaacacagaggtcagcagcatggaatgtgagaagaatttatactggatatgtaacaaaccttacaaataataaggaaacgtgttcacttattgactattatagaatggaactcaaggaaatctgtgtcagtggatgctgctctgtggtccgaagtcttccatagagactttgtgaaaaaaaattttatagtgtcttgggaattttcttccaaacagaactatggaaaaaaaggaagaaattccaggaaaatctgcactgtgggcttttattgccatgagctagaagcatcacaggttgaccaataaccatgcccaagaatgagaagaatgactatgcaacctttggatgcactttatattattttgaatccagaaataatgaaataactaggcgtggacttactatttattgctgaatgactaccaacagtgagagcccttcatgcatttgcactactggaaggagttagatgttggtactagatactgaatgtaaacaaaggaattatggctggtaacataggtttttagtctaattgaatcccttaaactcagggagcatttataaatggacaaatgcttatgaaattaagatttgtaatatttctctctttttagagaaatttgccaatttactttgttatttttccccaaaaagaatgggatgatcgtgtatttatttttttacttcctcagctgtagacaggtccttttcgatggtacatatttctttgcctttataatcttttatacagtgtcttacagagaaaagacataagcaaagactatgaggaatatttgcaagacatagaatagtgttggaaaatgtgcaatatgtgatgtggcaaatctctattaggaaatattctgtaatcttcagacctagaataatactagtcttataataggtttgtgactttcctaaatcaattctattacgtgcaatacttcaatacttcatttaaaatatttttatgtgcaataaaatgtatttgtttgtattttgtgttcagtacaattataagctgtttttatatatgtgaaataaaagtagaataaacacaat

SEQ ID NO: 319231 - DNA, 481 bp, Homo sapiens
attttcagaattgttctatatttctgtcattttctgacattatgaccaaaagtacatcccctcatcctcatatctccatccaatgatgattaggcacaatggaagatcagatatggtcctgagaactttctttcttcatacccttttcagaattctactttttagcttttatcctttactttatcaccacctagcacaacatagcatcctaaggctagttttgcatgctgtgggtatttggtttcttttgttactaaaacaaagcatttttctgttcacagtgggccaatacaattgtccaggccaatacacattctcaatgccatcagacagccatgtttcttcatgctctgaggactgggttggctaccagaggaaatgctactttatttctactgtgaagaggagctggacttcagcccaaaatgcttgttctgaacatggtgctactcttgctgtcattgattctgaaaaggacatg

SEQ ID NO: 319232 - DNA, 433 bp, Homo sapiens
cagaaatgaccaagaatcacttatctggtgccatgccaaccaaatgaatggcgtgctttcctcttacttccatattttttctccacatcctatttttttttcaattcttgtccattgtctctacagattagtctatgattatttgacttgtgtatcccactaagaatttaaaagaagcagaggtcaccatctccgagttcattctcatgtaactgaatgaaaacaatgagctgaaaataattctaagtttttttattgtttgacaggttcaacgttacagggtctgacaagtgtgtttttctgaaaaacacagaggtcagcagcatggaatgtgagaagaatttatactggatatgtaacaaaccttacaaataataaggaaacgtgttcacttattgactattatagaatggaactcaaggaaatctgtgtc

SEQ ID NO: 319233 - DNA, 440 bp, Homo sapiens
atttgccaatttactttgttatttttccccaaaaagaatgggatgatcgtgtatttatttttttacttcctcagctgtagacaggtccttttcgatggtacatatttctttgcctttataatcttttatacagtgtcttacagagaaaagacataagcaaagactatgaggaatatttgcaagacatagaatagtgttggaaaatgtgcaatatgtgatgtggcaaatctctattaggaaatattctgtaatcttcagacctagaataatactagtcttataataggtttgtgactttcctaaatcaattctattacgtgcaatacttcaatacttcatttaaaatatttttatgtgcaataaaatgtatttgtttgtattttgtgttcagtacaattataagctgtttttatatatgtgaaataaaagtagaataaaca

SEQ ID NO: 319234 - DNA, 1677 bp, Homo sapiens
agactcaacaagagctccagcaaagactttcactgtagcttgacttgacctgagattaactagggaatcttgagaataaagatgagctctgaaaattgtttcgtagcagagaacagctctttgcatccggagagtggacaagaaaatgatgccaccagtccccatttctcaacacgtcatgaagggtccttccaagttcctgtcctgtgtgctgtaatgaatgtggtcttcatcaccattttaatcatagctctcattgccttatcagtgggccaatacaattgtccaggccaatacacattctcaatgccatcagacagccatgtttcttcatgctctgaggactgggttggctaccagaggaaatgctactttatttctactgtgaagaggagctggacttcagcccaaaatgcttgttctgaacatggtgctactcttgctgtcattgattctgaaaaggacatgaactttctaaaacgatacgcaggtagagaggaacactgggttggactgaaaaaggaacctggtcacccatggaagtggtcaaatggcaaagaatttaacaactggttcaacgttacagggtctgacaagtgtgtttttctgaaaaacacagaggtcagcagcatggaatgtgagaagaatttatactggatatgtaacaaaccttacaaataataaggaaacgtgttcacttattgactattatagaatggaactcaaggaaatctgtgtcagtggatgctgctctgtggtccgaagtcttccatagagactttgtgaaaaaaaattttatagtgtcttgggaattttcttccaaacagaactatggaaaaaaaggaagaaattccaggaaaatctgcactgtgggcttttattgccatgagctagaagcatcacaggttgaccaataaccatgcccaagaatgagaagaatgactatgcaacctttggatgcactttatattattttgaatccagaaataatgaaataactaggcgtggacttactatttattgctgaatgactaccaacagtgagagcccttcatgcatttgcactactggaaggagttagatgttggtactagatactgaatgtaaacaaaggaattatggctggtaacataggtttttagtctaattgaatcccttaaactcagggagcatttataaatggacaaatgcttatgaaattaagatttgtaatatttctctctttttagagaaatttgccaatttactttgttatttttccccaaaaagaatgggatgatcgtgtatttatttttttacttcctcagctgtagacaggtccttttcgatggtacatatttctttgcctttataatcttttatacagtgtcttacagagaaaagacataagcaaagactatgaggaatatttgcaagacatagaatagtgttggaaaatgtgcaatatgtgatgtggcaaatctctattaggaaatattctgtaatcttcagacctagaataatactagtcttataataggtttgtgactttcctaaatcaattctattacgtgcaatacttcaatacttcatttaaaatatttttatgtgcaataaaatgtatttgtttgtattttgtgttcagtacaattataagctgtttttatatatgtgaaataaaagtagaataaacacaat

SEQ ID NO: 319235 - DNA, 2048 bp, Homo sapiens
agactcaacaagagctccagcaaagactttcactgtagcttgacttgacctgagattaactagggaatcttgagaataaagatgagctctgaaaattgtttcgtagcagagaacagctctttgcatccggagagtggacaagaaaatgatgccaccagtccccatttctcaacacgtcatgaagggtccttccaagttcctgtcctgtgtgctgtaatgaatgtggtcttcatcaccattttaatcatagctctcattgccttatcagtgggccaatacaattgtccaggccaatacacattctcaatgccatcagacagccatgtttcttcatgctctgaggactgggttggctaccagaggaaatgctactttatttctactgtgaagaggagctggacttcagcccaaaatgcttgttctgaacatggtgctactcttgctgtcattgattctgaaaaggacatggtaagaataaaaaaaagataaaatactactattttaattcatatggctaatcagtgctttccttccgtttctaagtggagaaaacaaacaaacaaacaaacattgtacctatttcagatgtaggaaaatgtcatcccagagaaccatatgatcagcctgaggtcaaaatgagatttaatttaatcttttaaatttgatttgattgcttagcttcaaagaccagaaatccaaatatgctgatcctatatagaatgagtacatggtcagataagctgtcatgcctcaagttgcagcttttgagaaacaggatttactatctacttccccagaagggtgtttaatgtaacaaactcctttgtgctttctttaagaactttctaaaacgatacgcaggtagagaggaacactgggttggactgaaaaaggaacctggtcacccatggaagtggtcaaatggcaaagaatttaacaactggttcaacgttacagggtctgacaagtgtgtttttctgaaaaacacagaggtcagcagcatggaatgtgagaagaatttatactggatatgtaacaaaccttacaaataataaggaaacgtgttcacttattgactattatagaatggaactcaaggaaatctgtgtcagtggatgctgctctgtggtccgaagtcttccatagagactttgtgaaaaaaaattttatagtgtcttgggaattttcttccaaacagaactatggaaaaaaaggaagaaattccaggaaaatctgcactgtgggcttttattgccatgagctagaagcatcacaggttgaccaataaccatgcccaagaatgagaagaatgactatgcaacctttggatgcactttatattattttgaatccagaaataatgaaataactaggcgtggacttactatttattgctgaatgactaccaacagtgagagcccttcatgcatttgcactactggaaggagttagatgttggtactagatactgaatgtaaacaaaggaattatggctggtaacataggtttttagtctaattgaatcccttaaactcagggagcatttataaatggacaaatgcttatgaaattaagatttgtaatatttctctctttttagagaaatttgccaatttactttgttatttttccccaaaaagaatgggatgatcgtgtatttatttttttacttcctcagctgtagacaggtccttttcgatggtacatatttctttgcctttataatcttttatacagtgtcttacagagaaaagacataagcaaagactatgaggaatatttgcaagacatagaatagtgttggaaaatgtgcaatatgtgatgtggcaaatctctattaggaaatattctgtaatcttcagacctagaataatactagtcttataataggtttgtgactttcctaaatcaattctattacgtgcaatacttcaatacttcatttaaaatatttttatgtgcaataaaatgtatttgtttgtattttgtgttcagtacaattataagctgtttttatatatgtgaaataaaagtagaataaacacaat

SEQ ID NO: 319236 - DNA, 2935 bp, Homo sapiens
aggcgcctgcgctttagctgctaactcgctctagtagctgtggtcggggctcgggaccggctgccatcttagtctagggactgaggagtcgccgccgccccgagtcccggtaccatgcatttcacggtggccttgtggagacaacgccttaacccaaggaagtgactcaaactgtgagaacttcaggttttccaacctattggtggtatgtctgacagtggatcacaacttggttcaatgggtagcctcaccatgaaatcacagcttcagatcactgtcatctcagcaaaacttaaggaaaataagaagaattggtttggaccaagtccttacgtagaggtcacagtagatggacagtcaaagaagacagaaaaatgcaacaacacaaacagtcccaagtggaagcaaccccttacagttatcgttacccctgtgagtaaattacattttcgtgtgtggagtcaccagacactgaaatctgatgttttgttgggaactgctgcattagatatttatgaaacattaaagtcaaacaatatgaaacttgaagaagtagttgtgactttgcagcttggaggtgacaaagagccaacagagacaataggagacttgtcaatttgtcttgatgggctacagttagagtctgaagttgttaccaatggtgaaactacatgttcagaaagtgcttctcagaatgatgatggctccagatccaaggatgaaacaagagtgagcacaaatggatcagatgaccctgaagatgcaggagctggtgaaaataggagagtcagtgggaataattctccatcactctcaaatggtggttttaaaccttctagacctccaagaccttcacgaccaccaccacccaccccacgtagaccagcatctgtcaatggttcaccatctgccacttctgaaagtgatgggtctagtacaggctctctgccgccgacaaatacaaatacaaatacatctgaaggagcaacatctggattaataattcctcttactatatctggaggctcaggccctaggccattaaatcctgtaactcaagctcccttgccacctggttgggagcagagagtggaccagcacgggcgagtttactatgtagatcatgttgagaaaagaacaacatgggatagaccagaacctctacctcctggctgggaacggcgggttgacaacatgggacgtatttattatgttgaccatttcacaagaacaacaacgtggcagaggccaacactggaatccgtccggaactatgaacaatggcagctacagcgtagtcagcttcaaggagcaatgcagcagtttaaccagagattcatttatgggaatcaagatttatttgctacatcacaaagtaaagaatttgatcctcttggtccattgccacctggatgggagaagagaacagacagcaatggcagagtatatttcgtcaaccacaacacacgaattacacaatgggaagaccccagaagtcaaggtcaattaaatgaaaagcccttacctgaaggttgggaaatgagattcacagtggatggaattccatattttgtggaccacaatagaagaactaccacctatatagatccccgcacaggaaaatctgccctagacaatggacctcagatagcctatgttcgggacttcaaagcaaaggttcagtatttccggttctggtgtcagcaactggccatgccacagcacataaagattacagtgacaagaaaaacattgtttgaggattcctttcaacagataatgagcttcagtccccaagatctgcgaagacgtttgtgggtgatttttccaggagaagaaggtttagattatggaggtgtagcaagagaatggttctttcttttgtcacatgaagtgttgaacccaatgtattgcctgtttgaatatgcagggaaggataactactgcttgcagataaaccccgcttcttacatcaatccagatcacctgaaatattttcgttttattggcagatttattgccatggctctgttccatgggaaattcatagacacgggtttttctttaccattctataagcgtatcttgaacaaaccagttggactcaaggatttagaatctattgatccagaattttacaattctctcatctgggttaaggaaaacaatattgaggaatgtgatttggaaatgtacttctccgttgacaaagaaattctaggtgaaattaagagtcatgatctgaaacctaatggtggcaatattcttgtaacagaagaaaataaagaggaatacatcagaatggtagctgagtggaggttgtctcgaggtgttgaagaacagacacaagctttctttgaaggctttaatgaaattcttccccagcaatatttgcaatactttgatgcaaaggaattagaggtccttttatgtggaatgcaagagattgatttgaatgactggcaaagacatgccatctaccgtcattatgcaaggaccagcaaacaaatcatgtggttttggcagtttgttaaagaaattgataatgagaagagaatgagacttctgcagtttgttactggaacctgccgattgccagtaggaggatttgctgatctcatggggagcaatggaccacagaaattctgcattgaaaaagttgggaaagaaaattggctacccagaagtcatacctgttttaatcgcctggacctgccaccatacaagagctatgagcaactgaaggaaaagctgttgtttgccatagaagaaacagaaggatttggacaagagtaacttctgagaacttgcaccatgaatgggcaagaacttatttgcaatgtttgtccttctctgcctgttgcacatcttgtaaaattggacaatggctctttagagagttatctgagtgtaagtaaattaatgttctcattta

SEQ ID NO: 319237 - DNA, 958 bp, Homo sapiens
cacaatgaaacaatgggaagacccagaaagtcaggtcaattaaatgaaaagcccttacctgaaggttgggaaatgagattcacagtggatggaattccatattttgtggaccacaatagaagaactaccacctatatagatccccgcacaggaaaatctgccctgtaagttttctaaacattgtagattaagagtaaaatactagtccttcagattttgatataaagatttgtattagcaaggagtggaagtcttagtatttcttgagttagcttgacaataggtttctgttcattaagtattttgcatttccatctccctcttggatattttatcctagagattttcatatttgttaccatttgttcacacagcactaaatgaaactatttagaatttataggtattgtactgcttaccaattagtctctgatttctgattttcagcttctttcattcccttaactttttgacgttaaaaaagctctcattacttatcccccaccccatttctgagaaagtaaccttttgatttgcttatgtgctttatgacttcttttgtgggaaaatatataacctaaagtttcttgttttatgtgtacagttcagtggcattaagcacattcatattgtggcataatcattaccaccatccatctccagaatgttttcatcattccacactgaaacactgtaccctttaaacaataactttagcagacctggtaaccagccttctactgtctttctctatgaatttgactagtcgaagtacctcatattattggagtcatacaatatttatgcttatgtttctggattatttcactaaggtcatatcttcaagatttatccgtgttgtaatatgtatcaacattttcattccttattgaagctgaataatattccagtgtatgtatatatcacattttgtttattcacagatattgcattgttt

SEQ ID NO: 319238 - DNA, 728 bp, Homo sapiens
ccacctttgcctctcaaagtactgggataacagacatgagccaccacacctaacccagagtttctgaattagtaagatgatgtgtggggcctgaggatttatggttctaacaagttccctcatgatgctgatgcttgttggattggggaacacagtttgagatccactatactaacaaactgtttatgatttcattatgttttagggagcaatggaccacagaaattctgcattgaaaaagttgggaaagaaaattggctacccagaagtcatacctggtaagtacaatcagaatggatagagaaaacagcttttgtccagttatctgtagctatttaaagccagctagaaattaaaaatgatatttagtagatttacagaatagcacagccatcatagcaatccagtttaagagcattttgttcacccctgtatgattccttacaactatttgcaatcaattccttttttcacatctgaattttttttctaatgtgggatttagagttattttaacttttctctgagggcagccaaagaaagttaggagacctactttctaacatcatgaccaccaatattctcatttgaaatctaattacatttctaaaaatgtagaaaactaaatctaatcctaatctgacagcaaatatattaatattttggaattcaacctaatgtcaacaatatttgcccgtcgtgcgcgtggggtcctctaggacgccgca

SEQ ID NO: 319239 - DNA, 6381 bp, Homo sapiens
aggcgcctgcgctttagctgctaactcgctctagtagctgtggtcggggctcgggaccggctgccatcttagtctagggactgaggagtcgccgccgccccgagtcccggtaccatgcatttcacggtggccttgtggagacaacgccttaacccaaggaagttttccaacctattggtggtatgtctgacagtggatcacaacttggttcaatgggtagcctcaccatgaaatcacagcttcagatcactgtcatctcagcaaaacttaaggaaaataagaagaattggtttggaccaagtccttacgtagaggtcacagtagatggacagtcaaagaagacagaaaaatgcaacaacacaaacagtcccaagtggaagcaaccccttacagttatcgttacccctgtgagtaaattacattttcgtgtgtggagtcaccagacactgaaatctgatgttttgttgggaactgctgcattagatatttatgaaacattaaagtcaaacaatatgaaacttgaagaagtagttgtgactttgcagcttggaggtgacaaagagccaacagagacaataggagacttgtcaatttgtcttgatgggctacagttagagtctgaagttgttaccaatggtgaaactacatgttcagaaagtgcttctcagaatgatgatggctccagatccaaggatgaaacaagagtgagcacaaatggatcagatgaccctgaagatgcaggagctggtgaaaataggagagtcagtgggaataattctccatcactctcaaatggtggttttaaaccttctagacctccaagaccttcacgaccaccaccacccaccccacgtagaccagcatctgtcaatggttcaccatctgccacttctgaaagtgatgggtctagtacaggctctctgccgccgacaaatacaaatacaaatacatctgaaggagcaacatctggattaataattcctcttactatatctggaggctcaggccctaggccattaaatcctgtaactcaagctcccttgccacctggttgggagcagagagtggaccagcacgggcgagtttactatgtagatcatgttgagaaaagaacaacatgggatagaccagaacctctacctcctggctgggaacggcgggttgacaacatgggacgtatttattatgttgaccatttcacaagaacaacaacgtggcagaggccaacactggaatccgtccggaactatgaacaatggcagctacagcgtagtcagcttcaaggagcaatgcagcagtttaaccagagattcatttatgggaatcaagatttatttgctacatcacaaagtaaagaatttgatcctcttggtccattgccacctggatgggagaagagaacagacagcaatggcagagtatatttcgtcaaccacaacacacgaattacacaatgggaagaccccagaagtcaaggtcaattaaatgaaaagcccttacctgaaggttgggaaatgagattcacagtggatggaattccatattttgtggaccacaatagaagaactaccacctatatagatccccgcacaggaaaatctgccctagacaatggacctcagatagcctatgttcgggacttcaaagcaaaggttcagtatttccggttctggtgtcagcaactggccatgccacagcacataaagattacagtgacaagaaaaacattgtttgaggattcctttcaacagataatgagcttcagtccccaagatctgcgaagacgtttgtgggtgatttttccaggagaagaaggtttagattatggaggtgtagcaagagaatggttctttcttttgtcacatgaagtgttgaacccaatgtattgcctgtttgaatatgcagggaaggataactactgcttgcagataaaccccgcttcttacatcaatccagatcacctgaaatattttcgttttattggcagatttattgccatggctctgttccatgggaaattcatagacacgggtttttctttaccattctataagcgtatcttgaacaaaccagttggactcaaggatttagaatctattgatccagaattttacaattctctcatctgggttaaggaaaacaatattgaggaatgtgatttggaaatgtacttctccgttgacaaagaaattctaggtgaaattaagagtcatgatctgaaacctaatggtggcaatattcttgtaacagaagaaaataaagaggaatacatcagaatggtagctgagtggaggttgtctcgaggtgttgaagaacagacacaagctttctttgaaggctttaatgaaattcttccccagcaatatttgcaatactttgatgcaaaggaattagaggtccttttatgtggaatgcaagagattgatttgaatgactggcaaagacatgccatctaccgtcattatgcaaggaccagcaaacaaatcatgtggttttggcagtttgttaaagaaattgataatgagaagagaatgagacttctgcagtttgttactggaacctgccgattgccagtaggaggatttgctgatctcatggggagcaatggaccacagaaattctgcattgaaaaagttgggaaagaaaattggctacccagaagtcatacctgttttaatcgcctggacctgccaccatacaagagctatgagcaactgaaggaaaagctgttgtttgccatagaagaaacagaaggatttggacaagagtaacttctgagaacttgcaccatgaatgggcaagaacttatttgcaatgtttgtccttctctgcctgttgcacatcttgtaaaattggacaatggctctttagagagttatctgagtgtaagtaaattaatgttctcatttagatttatctcccagtgatttctactcagcgtttccagaaatcaggtctgcaaatgactagtcagaaccttgcttaacatgagattttaacacaacaatgaaatttgccttgtcttattccactagtttattcctttaacaacaatattttatatgtgtcaaaagtctcacttgggagtagtgtttttttcttttagacattctgcagacatgcagggaagtcctttggtaactgcaatatacaagattttcctattaagcctcttggtaagaggcatttgttaaaagtgcaagcttactcctgcttctggggatgtgagcaaaattcgggcttgtgttctccctctcattttagtctgacttgactattgtttttcctttctggcgcatgaatccatacatcattcctggaagtgaggcaagactcttgcatctctacaaagtagttttgtcaatttgaattcagggaaaagttggtcacagcctgcaaatgacttcatttggaagtctgattgtttcagttgcctgacaaatactacactttacaaacaatgttaacactgtgattccttcattgttttaagaagttaacctagggccgggcatggtggctcatacctgtaatcctagcactctgggaggccgaggcaggaggatccctttagcccaggagttaaagaccagcctgggcaacatagggagaccctgtcttttttttgggcagcgtggtgggggataaataaataaaaggaaaaaaaacttagcctagaattagaattaatttaattgaattcatctaaagatgtctctggtgatttttatatgttccgctatataattgatgctttatagttttatcataatccaacaacttcagttatatttaattattgttaaggagtttaagactagaaagactagagtgctttctagtccaaatagaggtcagtgaaacagcttttgacatcagattttcatttgagagggagagctgtggtactggctaaaaagaaaggaagataacatccagtaaccacaggaatatattctctgtgaattaaaagtcttcaaagttatcatttctctgacatatgttggagtagtcatttccattctttacattgtcatgaactggattgataaccctcatctgcaatattttcacccctaaaatttttaacagggtttcctttttttctcacgactatttaagtttagattgctccattattaactgattaatgcactttgaagttctctggaattaattattttaacttggcctagcttcgactgtcaaggtggctgttataaatttgacttcattggcagtggatgaagcctaagccagctgagtctctatcatagctgaaccctgaggacagcctcatagctcatgtatcagggacttttgccacatttcagaggcatagcatgaacaagtaatattaagccaagaataagcagcagaaccctgttccatatggaaaaaagaaaaacaattttttgtccctaatgttcttccttttacatcctggaacaacaataaaaacatttttttaaacttgtctactgtaagatactgccatcataaagcagagacttacatgagtgaaagggttgcctcatcaagcagctcagtgtaaatggggaggctaggctctccccagccctatggtttttttatttcatgtaccccaggaaatactgtgtggtttctaaaagccctggttgttaaaagtagggactctgcctttttgttggtagggagaaaaaacgctattgctttgtcttacagagcgaatgtctgccaactacccgttcattatataagtctgaacttggtaatatatggctaatgaagattaagccctctataaagacttcctgttgaggtgaattctcatactgaaatgtagttacctacaatatttactagagatttatgaaattaaattaagagataatgtaagaaaatacatttttttggttctatataatgcttcatgattcatttagggacctagaaatattgtgtgaaaatatataaatatcacccaaaaggctttctgccctatatttttaaaatacagaatagttatatttgaagtagccctggccctagttctatagggcttggctatttaatatttttatggaagaagtgtttagttctggaaaaggtaaatgcttgtatatatttttgcagcctgggatctccctactccattttttcctttaatttaagtggccacatgtatatgtcttccctgctgtgttaggaaaatgggggctggatatcccaagaatcagaggttatataaaaatactgcaaatagaccgcagacataaatatctaccaaatgctatcttaaattttggtccaaactgaacatatggaaatagatttattgtaagtatttacttagagctttttcttaaatctgaactaacttgcttttagaagtctttttctttgtaagcattgtaaatgctaataaatcctgttaatttttttttttttttttttttttttttactgcatgttacattgaaataaaaacaaagtaaaatgagcaattgccttattgttctgctcttttgcagggggtgggggttggggaagacagcattccacagcctggtcaggagggaaggacctcacttgtttcatcaaatggagtggtttaaaactgatcaagcagctcataataatgaattcctgctctgtcttttattatcttatgtcagagtgcagcaaaatctcatttcataagacttacaataactctatttaaaattcaggtattgtactcgggaggctgaggtgggaggatcccaggagttcaaatcctgcctgggcaacatagcaagaccctgtctcttaaaaaaacaaaaagacatattcaggtactgatttttcatcaagagattgacataccaatgatcagaaattttagtgaaacttgactcaactatacacaaagttctcatcctaaatgaactatttcagtcaagcccactctaccactttttacttatctggttaataatccgaaatgttaccggggttgactcacggaattaaatttttcctctatttttatatcctttcctgttgtggatgtaacttacctttctaaactcctttagagttaacgacttctatttagtattgttggtatctccagcccccctcctttttttgtttttcttttagttatttactttgtttgtataatttgctttcattaactaaaaatggaattggcagcactggattgtatattactgtattaagagtacctttgttttcttgatctgttacttttaatactcaggtaatgctacaaatattacagggagtcaaatgcttttataaagttccttcagtggttgcctcacttgcgttttcctacaagatgtaagactgtttataattaaacttttttggtccttcaaaaaaatgctt

SEQ ID NO: 319240 - DNA, 6529 bp, Homo sapiens
aggcgcctgcgctttagctgctaactcgctctagtagctgtggtcggggctcgggaccggctgccatcttagtctagggactgaggagtcgccgccgccccgagtcccggtaccatgcatttcacggtggccttgtggagacaacgccttaacccaaggaagtgactcaaactgtgagaacttcaggttttccaacctattggtggtatgtctgacagtggatcacaacttggttcaatgggtagcctcaccatgaaatcacagcttcagatcactgtcatctcagcaaaacttaaggaaaataagaagaattggtttggaccaagtccttacgtagaggtcacagtagatggacagtcaaagaagacagaaaaatgcaacaacacaaacagtcccaagtggaagcaaccccttacagttatcgttacccctgtgagtaaattacattttcgtgtgtggagtcaccagacactgaaatctgatgttttgttgggaactgctgcattagatatttatgaaacattaaagtcaaacaatatgaaacttgaagaagtagttgtgactttgcagcttggaggtgacaaagagccaacagagacaataggagacttgtcaatttgtcttgatgggctacagttagagtctgaagttgttaccaatggtgaaactacatgttcagaaaatggggtttcgctctgtttgcccaggctggagtgcaatagtgcgatctcggctcactgcaacctctgcctcccgggtttaagtgattctcctatctcagcctcccgagtagctgggtttacaggtgcttctcagaatgatgatggctccagatccaaggatgaaacaagagtgagcacaaatggatcagatgaccctgaagatgcaggagctggtgaaaataggagagtcagtgggaataattctccatcactctcaaatggtggttttaaaccttctagacctccaagaccttcacgaccaccaccacccaccccacgtagaccagcatctgtcaatggttcaccatctgccacttctgaaagtgatgggtctagtacaggctctctgccgccgacaaatacaaatacaaatacatctgaaggagcaacatctggattaataattcctcttactatatctggaggctcaggccctaggccattaaatcctgtaactcaagctcccttgccacctggttgggagcagagagtggaccagcacgggcgagtttactatgtagatcatgttgagaaaagaacaacatgggatagaccagaacctctacctcctggctgggaacggcgggttgacaacatgggacgtatttattatgttgaccatttcacaagaacaacaacgtggcagaggccaacactggaatccgtccggaactatgaacaatggcagctacagcgtagtcagcttcaaggagcaatgcagcagtttaaccagagattcatttatgggaatcaagatttatttgctacatcacaaagtaaagaatttgatcctcttggtccattgccacctggatgggagaagagaacagacagcaatggcagagtatatttcgtcaaccacaacacacgaattacacaatgggaagaccccagaagtcaaggtcaattaaatgaaaagcccttacctgaaggttgggaaatgagattcacagtggatggaattccatattttgtggaccacaatagaagaactaccacctatatagatccccgcacaggaaaatctgccctagacaatggacctcagatagcctatgttcgggacttcaaagcaaaggttcagtatttccggttctggtgtcagcaactggccatgccacagcacataaagattacagtgacaagaaaaacattgtttgaggattcctttcaacagataatgagcttcagtccccaagatctgcgaagacgtttgtgggtgatttttccaggagaagaaggtttagattatggaggtgtagcaagagaatggttctttcttttgtcacatgaagtgttgaacccaatgtattgcctgtttgaatatgcagggaaggataactactgcttgcagataaaccccgcttcttacatcaatccagatcacctgaaatattttcgttttattggcagatttattgccatggctctgttccatgggaaattcatagacacgggtttttctttaccattctataagcgtatcttgaacaaaccagttggactcaaggatttagaatctattgatccagaattttacaattctctcatctgggttaaggaaaacaatattgaggaatgtgatttggaaatgtacttctccgttgacaaagaaattctaggtgaaattaagagtcatgatctgaaacctaatggtggcaatattcttgtaacagaagaaaataaagaggaatacatcagaatggtagctgagtggaggttgtctcgaggtgttgaagaacagacacaagctttctttgaaggctttaatgaaattcttccccagcaatatttgcaatactttgatgcaaaggaattagaggtccttttatgtggaatgcaagagattgatttgaatgactggcaaagacatgccatctaccgtcattatgcaaggaccagcaaacaaatcatgtggttttggcagtttgttaaagaaattgataatgagaagagaatgagacttctgcagtttgttactggaacctgccgattgccagtaggaggatttgctgatctcatggggagcaatggaccacagaaattctgcattgaaaaagttgggaaagaaaattggctacccagaagtcatacctgttttaatcgcctggacctgccaccatacaagagctatgagcaactgaaggaaaagctgttgtttgccatagaagaaacagaaggatttggacaagagtaacttctgagaacttgcaccatgaatgggcaagaacttatttgcaatgtttgtccttctctgcctgttgcacatcttgtaaaattggacaatggctctttagagagttatctgagtgtaagtaaattaatgttctcatttagatttatctcccagtgatttctactcagcgtttccagaaatcaggtctgcaaatgactagtcagaaccttgcttaacatgagattttaacacaacaatgaaatttgccttgtcttattccactagtttattcctttaacaacaatattttatatgtgtcaaaagtctcacttgggagtagtgtttttttcttttagacattctgcagacatgcagggaagtcctttggtaactgcaatatacaagattttcctattaagcctcttggtaagaggcatttgttaaaagtgcaagcttactcctgcttctggggatgtgagcaaaattcgggcttgtgttctccctctcattttagtctgacttgactattgtttttcctttctggcgcatgaatccatacatcattcctggaagtgaggcaagactcttgcatctctacaaagtagttttgtcaatttgaattcagggaaaagttggtcacagcctgcaaatgacttcatttggaagtctgattgtttcagttgcctgacaaatactacactttacaaacaatgttaacactgtgattccttcattgttttaagaagttaacctagggccgggcatggtggctcatacctgtaatcctagcactctgggaggccgaggcaggaggatccctttagcccaggagttaaagaccagcctgggcaacatagggagaccctgtcttttttttgggcagcgtggtgggggataaataaataaaaggaaaaaaaacttagcctagaattagaattaatttaattgaattcatctaaagatgtctctggtgatttttatatgttccgctatataattgatgctttatagttttatcataatccaacaacttcagttatatttaattattgttaaggagtttaagactagaaagactagagtgctttctagtccaaatagaggtcagtgaaacagcttttgacatcagattttcatttgagagggagagctgtggtactggctaaaaagaaaggaagataacatccagtaaccacaggaatatattctctgtgaattaaaagtcttcaaagttatcatttctctgacatatgttggagtagtcatttccattctttacattgtcatgaactggattgataaccctcatctgcaatattttcacccctaaaatttttaacagggtttcctttttttctcacgactatttaagtttagattgctccattattaactgattaatgcactttgaagttctctggaattaattattttaacttggcctagcttcgactgtcaaggtggctgttataaatttgacttcattggcagtggatgaagcctaagccagctgagtctctatcatagctgaaccctgaggacagcctcatagctcatgtatcagggacttttgccacatttcagaggcatagcatgaacaagtaatattaagccaagaataagcagcagaaccctgttccatatggaaaaaagaaaaacaattttttgtccctaatgttcttccttttacatcctggaacaacaataaaaacatttttttaaacttgtctactgtaagatactgccatcataaagcagagacttacatgagtgaaagggttgcctcatcaagcagctcagtgtaaatggggaggctaggctctccccagccctatggtttttttatttcatgtaccccaggaaatactgtgtggtttctaaaagccctggttgttaaaagtagggactctgcctttttgttggtagggagaaaaaacgctattgctttgtcttacagagcgaatgtctgccaactacccgttcattatataagtctgaacttggtaatatatggctaatgaagattaagccctctataaagacttcctgttgaggtgaattctcatactgaaatgtagttacctacaatatttactagagatttatgaaattaaattaagagataatgtaagaaaatacatttttttggttctatataatgcttcatgattcatttagggacctagaaatattgtgtgaaaatatataaatatcacccaaaaggctttctgccctatatttttaaaatacagaatagttatatttgaagtagccctggccctagttctatagggcttggctatttaatatttttatggaagaagtgtttagttctggaaaaggtaaatgcttgtatatatttttgcagcctgggatctccctactccattttttcctttaatttaagtggccacatgtatatgtcttccctgctgtgttaggaaaatgggggctggatatcccaagaatcagaggttatataaaaatactgcaaatagaccgcagacataaatatctaccaaatgctatcttaaattttggtccaaactgaacatatggaaatagatttattgtaagtatttacttagagctttttcttaaatctgaactaacttgcttttagaagtctttttctttgtaagcattgtaaatgctaataaatcctgttaatttttttttttttttttttttttttttactgcatgttacattgaaataaaaacaaagtaaaatgagcaattgccttattgttctgctcttttgcagggggtgggggttggggaagacagcattccacagcctggtcaggagggaaggacctcacttgtttcatcaaatggagtggtttaaaactgatcaagcagctcataataatgaattcctgctctgtcttttattatcttatgtcagagtgcagcaaaatctcatttcataagacttacaataactctatttaaaattcaggtattgtactcgggaggctgaggtgggaggatcccaggagttcaaatcctgcctgggcaacatagcaagaccctgtctcttaaaaaaacaaaaagacatattcaggtactgatttttcatcaagagattgacataccaatgatcagaaattttagtgaaacttgactcaactatacacaaagttctcatcctaaatgaactatttcagtcaagcccactctaccactttttacttatctggttaataatccgaaatgttaccggggttgactcacggaattaaatttttcctctatttttatatcctttcctgttgtggatgtaacttacctttctaaactcctttagagttaacgacttctatttagtattgttggtatctccagcccccctcctttttttgtttttcttttagttatttactttgtttgtataatttgctttcattaactaaaaatggaattggcagcactggattgtatattactgtattaagagtacctttgttttcttgatctgttacttttaatactcaggtaatgctacaaatattacagggagtcaaatgcttttataaagttccttcagtggttgcctcacttgcgttttcctacaagatgtaagactgtttataattaaacttttttggtccttcaaaaaaatgctt

SEQ ID NO: 319241 - DNA, 6453 bp, Homo sapiens
aggcgcctgcgctttagctgctaactcgctctagtagctgtggtcggggctcgggaccggctgccatcttagtctagggactgaggagtcgccgccgccccgagtcccggtaccatgcatttcacggtggccttgtggagacaacgccttaacccaaggaagtgactcaaactgtgagaacttcaggttttccaacctattggtggtatgtctgacagtggatcacaacttggttcaatgggtagcctcaccatgaaatcacagcttcagatcactgtcatctcagcaaaacttaaggaaaataagaagaattggtttggaccaagtccttacgtagaggtcacagtagatggacagtcaaagaagacagaaaaatgcaacaacacaaacagtcccaagtggaagcaaccccttacagttatcgttacccctgtgagtaaattacattttcgtgtgtggagtcaccagacactgaaatctgatgttttgttgggaactgctgcattagatatttatgaaacattaaagtcaaacaatatgaaacttgaagaagtagttgtgactttgcagcttggaggtgacaaagagccaacagagacaataggagacttgtcaatttgtcttgatgggctacagttagagtctgaagttgttaccaatggtgaaactacatgttcagaaagtgcttctcagaatgatgatggctccagatccaaggatgaaacaagagtgagcacaaatggatcagatgaccctgaagatgcaggagctggtgaaaataggagagtcagtgggaataattctccatcactctcaaatggtggttttaaaccttctagacctccaagaccttcacgaccaccaccacccaccccacgtagaccagcatctgtcaatggttcaccatctgccacttctgaaagtgatgggtctagtacaggctctctgccgccgacaaatacaaatacaaatacatctgaaggagcaacatctggattaataattcctcttactatatctggaggctcaggccctaggccattaaatcctgtaactcaagctcccttgccacctggttgggagcagagagtggaccagcacgggcgagtttactatgtagatcatgttgagaaaagaacaacatgggatagaccagaacctctacctcctggctgggaacggcgggttgacaacatgggacgtatttattatgttgaccatttcacaagaacaacaacgtggcagaggccaacactggaatccgtccggaactatgaacaatggcagctacagcgtagtcagcttcaaggagcaatgcagcagtttaaccagagattcatttatgggaatcaagatttatttgctacatcacaaagtaaagaatttgatcctcttggtccattgccacctggatgggagaagagaacagacagcaatggcagagtatatttcgtcaaccacaacacacgaattacacaatgggaagaccccagaagtcaaggtcaattaaatgaaaagcccttacctgaaggttgggaaatgagattcacagtggatggaattccatattttgtggaccacaatagaagaactaccacctatatagatccccgcacaggaaaatctgccctagacaatggacctcagatagcctatgttcgggacttcaaagcaaaggttcagtatttccggttctggtgtcagcaactggccatgccacagcacataaagattacagtgacaagaaaaacattgtttgaggattcctttcaacagataatgagcttcagtccccaagatctgcgaagacgtttgtgggtgatttttccaggagaagaaggtttagattatggaggtgtagcaagggtagtgataatatgaatactcagaacttagttcctttcctccaaagagaatggttctttcttttgtcacatgaagtgttgaacccaatgtattgcctgtttgaatatgcagggaaggataactactgcttgcagataaaccccgcttcttacatcaatccagatcacctgaaatattttcgttttattggcagatttattgccatggctctgttccatgggaaattcatagacacgggtttttctttaccattctataagcgtatcttgaacaaaccagttggactcaaggatttagaatctattgatccagaattttacaattctctcatctgggttaaggaaaacaatattgaggaatgtgatttggaaatgtacttctccgttgacaaagaaattctaggtgaaattaagagtcatgatctgaaacctaatggtggcaatattcttgtaacagaagaaaataaagaggaatacatcagaatggtagctgagtggaggttgtctcgaggtgttgaagaacagacacaagctttctttgaaggctttaatgaaattcttccccagcaatatttgcaatactttgatgcaaaggaattagaggtccttttatgtggaatgcaagagattgatttgaatgactggcaaagacatgccatctaccgtcattatgcaaggaccagcaaacaaatcatgtggttttggcagtttgttaaagaaattgataatgagaagagaatgagacttctgcagtttgttactggaacctgccgattgccagtaggaggatttgctgatctcatggggagcaatggaccacagaaattctgcattgaaaaagttgggaaagaaaattggctacccagaagtcatacctgttttaatcgcctggacctgccaccatacaagagctatgagcaactgaaggaaaagctgttgtttgccatagaagaaacagaaggatttggacaagagtaacttctgagaacttgcaccatgaatgggcaagaacttatttgcaatgtttgtccttctctgcctgttgcacatcttgtaaaattggacaatggctctttagagagttatctgagtgtaagtaaattaatgttctcatttagatttatctcccagtgatttctactcagcgtttccagaaatcaggtctgcaaatgactagtcagaaccttgcttaacatgagattttaacacaacaatgaaatttgccttgtcttattccactagtttattcctttaacaacaatattttatatgtgtcaaaagtctcacttgggagtagtgtttttttcttttagacattctgcagacatgcagggaagtcctttggtaactgcaatatacaagattttcctattaagcctcttggtaagaggcatttgttaaaagtgcaagcttactcctgcttctggggatgtgagcaaaattcgggcttgtgttctccctctcattttagtctgacttgactattgtttttcctttctggcgcatgaatccatacatcattcctggaagtgaggcaagactcttgcatctctacaaagtagttttgtcaatttgaattcagggaaaagttggtcacagcctgcaaatgacttcatttggaagtctgattgtttcagttgcctgacaaatactacactttacaaacaatgttaacactgtgattccttcattgttttaagaagttaacctagggccgggcatggtggctcatacctgtaatcctagcactctgggaggccgaggcaggaggatccctttagcccaggagttaaagaccagcctgggcaacatagggagaccctgtcttttttttgggcagcgtggtgggggataaataaataaaaggaaaaaaaacttagcctagaattagaattaatttaattgaattcatctaaagatgtctctggtgatttttatatgttccgctatataattgatgctttatagttttatcataatccaacaacttcagttatatttaattattgttaaggagtttaagactagaaagactagagtgctttctagtccaaatagaggtcagtgaaacagcttttgacatcagattttcatttgagagggagagctgtggtactggctaaaaagaaaggaagataacatccagtaaccacaggaatatattctctgtgaattaaaagtcttcaaagttatcatttctctgacatatgttggagtagtcatttccattctttacattgtcatgaactggattgataaccctcatctgcaatattttcacccctaaaatttttaacagggtttcctttttttctcacgactatttaagtttagattgctccattattaactgattaatgcactttgaagttctctggaattaattattttaacttggcctagcttcgactgtcaaggtggctgttataaatttgacttcattggcagtggatgaagcctaagccagctgagtctctatcatagctgaaccctgaggacagcctcatagctcatgtatcagggacttttgccacatttcagaggcatagcatgaacaagtaatattaagccaagaataagcagcagaaccctgttccatatggaaaaaagaaaaacaattttttgtccctaatgttcttccttttacatcctggaacaacaataaaaacatttttttaaacttgtctactgtaagatactgccatcataaagcagagacttacatgagtgaaagggttgcctcatcaagcagctcagtgtaaatggggaggctaggctctccccagccctatggtttttttatttcatgtaccccaggaaatactgtgtggtttctaaaagccctggttgttaaaagtagggactctgcctttttgttggtagggagaaaaaacgctattgctttgtcttacagagcgaatgtctgccaactacccgttcattatataagtctgaacttggtaatatatggctaatgaagattaagccctctataaagacttcctgttgaggtgaattctcatactgaaatgtagttacctacaatatttactagagatttatgaaattaaattaagagataatgtaagaaaatacatttttttggttctatataatgcttcatgattcatttagggacctagaaatattgtgtgaaaatatataaatatcacccaaaaggctttctgccctatatttttaaaatacagaatagttatatttgaagtagccctggccctagttctatagggcttggctatttaatatttttatggaagaagtgtttagttctggaaaaggtaaatgcttgtatatatttttgcagcctgggatctccctactccattttttcctttaatttaagtggccacatgtatatgtcttccctgctgtgttaggaaaatgggggctggatatcccaagaatcagaggttatataaaaatactgcaaatagaccgcagacataaatatctaccaaatgctatcttaaattttggtccaaactgaacatatggaaatagatttattgtaagtatttacttagagctttttcttaaatctgaactaacttgcttttagaagtctttttctttgtaagcattgtaaatgctaataaatcctgttaatttttttttttttttttttttttttttactgcatgttacattgaaataaaaacaaagtaaaatgagcaattgccttattgttctgctcttttgcagggggtgggggttggggaagacagcattccacagcctggtcaggagggaaggacctcacttgtttcatcaaatggagtggtttaaaactgatcaagcagctcataataatgaattcctgctctgtcttttattatcttatgtcagagtgcagcaaaatctcatttcataagacttacaataactctatttaaaattcaggtattgtactcgggaggctgaggtgggaggatcccaggagttcaaatcctgcctgggcaacatagcaagaccctgtctcttaaaaaaacaaaaagacatattcaggtactgatttttcatcaagagattgacataccaatgatcagaaattttagtgaaacttgactcaactatacacaaagttctcatcctaaatgaactatttcagtcaagcccactctaccactttttacttatctggttaataatccgaaatgttaccggggttgactcacggaattaaatttttcctctatttttatatcctttcctgttgtggatgtaacttacctttctaaactcctttagagttaacgacttctatttagtattgttggtatctccagcccccctcctttttttgtttttcttttagttatttactttgtttgtataatttgctttcattaactaaaaatggaattggcagcactggattgtatattactgtattaagagtacctttgttttcttgatctgttacttttaatactcaggtaatgctacaaatattacagggagtcaaatgcttttataaagttccttcagtggttgcctcacttgcgttttcctacaagatgtaagactgtttataattaaacttttttggtccttcaaaaaaatgctt

SEQ ID NO: 319242 - DNA, 4864 bp, Homo sapiens
tactcacagatgcattggtaaacattattgaatataaatttatattcatagtctacttgtttctgtaaggaaagataaaagtaaataaaactttccccttttgatttttttgataggctattttaatgatgagagttgacttaagtcattcttctatttcagcaactggccatgccacagcacataaagattacagtgacaagaaaaacattgtttgaggattcctttcaacagataatgagcttcagtccccaagatctgcgaagacgtttgtgggtgatttttccaggagaagaaggtttagattatggaggtgtagcaagagaatggttctttcttttgtcacatgaagtgttgaacccaatgtattgcctgtttgaatatgcagggaaggataactactgcttgcagataaaccccgcttcttacatcaatccagatcacctgaaatattttcgttttattggcagatttattgccatggctctgttccatgggaaattcatagacacgggtttttctttaccattctataagcgtatcttgaacaaaccagttggactcaaggatttagaatctattgatccagaattttacaattctctcatctgggttaaggaaaacaatattgaggaatgtgatttggaaatgtacttctccgttgacaaagaaattctaggtgaaattaagagtcatgatctgaaacctaatggtggcaatattcttgtaacagaagaaaataaagaggaatacatcagaatggtagctgagtggaggttgtctcgaggtgttgaagaacagacacaagctttctttgaaggctttaatgaaattcttccccagcaatatttgcaatactttgatgcaaaggaattagaggtccttttatgtggaatgcaagagattgatttgaatgactggcaaagacatgccatctaccgtcattatgcaaggaccagcaaacaaatcatgtggttttggcagtttgttaaagaaattgataatgagaagagaatgagacttctgcagtttgttactggaacctgccgattgccagtaggaggatttgctgatctcatggggagcaatggaccacagaaattctgcattgaaaaagttgggaaagaaaattggctacccagaagtcatacctgttttaatcgcctggacctgccaccatacaagagctatgagcaactgaaggaaaagctgttgtttgccatagaagaaacagaaggatttggacaagagtaacttctgagaacttgcaccatgaatgggcaagaacttatttgcaatgtttgtccttctctgcctgttgcacatcttgtaaaattggacaatggctctttagagagttatctgagtgtaagtaaattaatgttctcatttagatttatctcccagtgatttctactcagcgtttccagaaatcaggtctgcaaatgactagtcagaaccttgcttaacatgagattttaacacaacaatgaaatttgccttgtcttattccactagtttattcctttaacaacaatattttatatgtgtcaaaagtctcacttgggagtagtgtttttttcttttagacattctgcagacatgcagggaagtcctttggtaactgcaatatacaagattttcctattaagcctcttggtaagaggcatttgttaaaagtgcaagcttactcctgcttctggggatgtgagcaaaattcgggcttgtgttctccctctcattttagtctgacttgactattgtttttcctttctggcgcatgaatccatacatcattcctggaagtgaggcaagactcttgcatctctacaaagtagttttgtcaatttgaattcagggaaaagttggtcacagcctgcaaatgacttcatttggaagtctgattgtttcagttgcctgacaaatactacactttacaaacaatgttaacactgtgattccttcattgttttaagaagttaacctagggccgggcatggtggctcatacctgtaatcctagcactctgggaggccgaggcaggaggatccctttagcccaggagttaaagaccagcctgggcaacatagggagaccctgtcttttttttgggcagcgtggtgggggataaataaataaaaggaaaaaaaacttagcctagaattagaattaatttaattgaattcatctaaagatgtctctggtgatttttatatgttccgctatataattgatgctttatagttttatcataatccaacaacttcagttatatttaattattgttaaggagtttaagactagaaagactagagtgctttctagtccaaatagaggtcagtgaaacagcttttgacatcagattttcatttgagagggagagctgtggtactggctaaaaagaaaggaagataacatccagtaaccacaggaatatattctctgtgaattaaaagtcttcaaagttatcatttctctgacatatgttggagtagtcatttccattctttacattgtcatgaactggattgataaccctcatctgcaatattttcacccctaaaatttttaacagggtttcctttttttctcacgactatttaagtttagattgctccattattaactgattaatgcactttgaagttctctggaattaattattttaacttggcctagcttcgactgtcaaggtggctgttataaatttgacttcattggcagtggatgaagcctaagccagctgagtctctatcatagctgaaccctgaggacagcctcatagctcatgtatcagggacttttgccacatttcagaggcatagcatgaacaagtaatattaagccaagaataagcagcagaaccctgttccatatggaaaaaagaaaaacaattttttgtccctaatgttcttccttttacatcctggaacaacaataaaaacatttttttaaacttgtctactgtaagatactgccatcataaagcagagacttacatgagtgaaagggttgcctcatcaagcagctcagtgtaaatggggaggctaggctctccccagccctatggtttttttatttcatgtaccccaggaaatactgtgtggtttctaaaagccctggttgttaaaagtagggactctgcctttttgttggtagggagaaaaaacgctattgctttgtcttacagagcgaatgtctgccaactacccgttcattatataagtctgaacttggtaatatatggctaatgaagattaagccctctataaagacttcctgttgaggtgaattctcatactgaaatgtagttacctacaatatttactagagatttatgaaattaaattaagagataatgtaagaaaatacatttttttggttctatataatgcttcatgattcatttagggacctagaaatattgtgtgaaaatatataaatatcacccaaaaggctttctgccctatatttttaaaatacagaatagttatatttgaagtagccctggccctagttctatagggcttggctatttaatatttttatggaagaagtgtttagttctggaaaaggtaaatgcttgtatatatttttgcagcctgggatctccctactccattttttcctttaatttaagtggccacatgtatatgtcttccctgctgtgttaggaaaatgggggctggatatcccaagaatcagaggttatataaaaatactgcaaatagaccgcagacataaatatctaccaaatgctatcttaaattttggtccaaactgaacatatggaaatagatttattgtaagtatttacttagagctttttcttaaatctgaactaacttgcttttagaagtctttttctttgtaagcattgtaaatgctaataaatcctgttaatttttttttttttttttttttttttttactgcatgttacattgaaataaaaacaaagtaaaatgagcaattgccttattgttctgctcttttgcagggggtgggggttggggaagacagcattccacagcctggtcaggagggaaggacctcacttgtttcatcaaatggagtggtttaaaactgatcaagcagctcataataatgaattcctgctctgtcttttattatcttatgtcagagtgcagcaaaatctcatttcataagacttacaataactctatttaaaattcaggtattgtactcgggaggctgaggtgggaggatcccaggagttcaaatcctgcctgggcaacatagcaagaccctgtctcttaaaaaaacaaaaagacatattcaggtactgatttttcatcaagagattgacataccaatgatcagaaattttagtgaaacttgactcaactatacacaaagttctcatcctaaatgaactatttcagtcaagcccactctaccactttttacttatctggttaataatccgaaatgttaccggggttgactcacggaattaaatttttcctctatttttatatcctttcctgttgtggatgtaacttacctttctaaactcctttagagttaacgacttctatttagtattgttggtatctccagcccccctcctttttttgtttttcttttagttatttactttgtttgtataatttgctttcattaactaaaaatggaattggcagcactggattgtatattactgtattaagagtacctttgttttcttgatctgttacttttaatactcaggtaatgctacaaatattacagggagtcaaatgcttttataaagttccttcagtggttgcctcacttgcgttttcctacaagatgtaagactgtttataattaaacttttttggtccttcaaaaaaatgctt

SEQ ID NO: 319243 - DNA, 4777 bp, Homo sapiens
aggtatataaaaatatagatgtatataataaaatattattaaacgttactataatgtattttctgtatgtgtggttttgactagaccatgaacacctttctgtgtcatgggagatttcagttacctataacgaaggagatgtcaaacctagaagtggtagacagtgtttcaatagcttttttcaccaattattttactttatttttttttagataatgagcttcagtccccaagatctgcgaagacgtttgtgggtgatttttccaggagaagaaggtttagattatggaggtgtagcaagggaaggataactactgcttgcagataaaccccgcttcttacatcaatccagatcacctgaaatattttcgttttattggcagatttattgccatggctctgttccatgggaaattcatagacacgggtttttctttaccattctataagcgtatcttgaacaaaccagttggactcaaggatttagaatctattgatccagaattttacaattctctcatctgggttaaggaaaacaatattgaggaatgtgatttggaaatgtacttctccgttgacaaagaaattctaggtgaaattaagagtcatgatctgaaacctaatggtggcaatattcttgtaacagaagaaaataaagaggaatacatcagaatggtagctgagtggaggttgtctcgaggtgttgaagaacagacacaagctttctttgaaggctttaatgaaattcttccccagcaatatttgcaatactttgatgcaaaggaattagaggtccttttatgtggaatgcaagagattgatttgaatgactggcaaagacatgccatctaccgtcattatgcaaggaccagcaaacaaatcatgtggttttggcagtttgttaaagaaattgataatgagaagagaatgagacttctgcagtttgttactggaacctgccgattgccagtaggaggatttgctgatctcatggggagcaatggaccacagaaattctgcattgaaaaagttgggaaagaaaattggctacccagaagtcatacctgttttaatcgcctggacctgccaccatacaagagctatgagcaactgaaggaaaagctgttgtttgccatagaagaaacagaaggatttggacaagagtaacttctgagaacttgcaccatgaatgggcaagaacttatttgcaatgtttgtccttctctgcctgttgcacatcttgtaaaattggacaatggctctttagagagttatctgagtgtaagtaaattaatgttctcatttagatttatctcccagtgatttctactcagcgtttccagaaatcaggtctgcaaatgactagtcagaaccttgcttaacatgagattttaacacaacaatgaaatttgccttgtcttattccactagtttattcctttaacaacaatattttatatgtgtcaaaagtctcacttgggagtagtgtttttttcttttagacattctgcagacatgcagggaagtcctttggtaactgcaatatacaagattttcctattaagcctcttggtaagaggcatttgttaaaagtgcaagcttactcctgcttctggggatgtgagcaaaattcgggcttgtgttctccctctcattttagtctgacttgactattgtttttcctttctggcgcatgaatccatacatcattcctggaagtgaggcaagactcttgcatctctacaaagtagttttgtcaatttgaattcagggaaaagttggtcacagcctgcaaatgacttcatttggaagtctgattgtttcagttgcctgacaaatactacactttacaaacaatgttaacactgtgattccttcattgttttaagaagttaacctagggccgggcatggtggctcatacctgtaatcctagcactctgggaggccgaggcaggaggatccctttagcccaggagttaaagaccagcctgggcaacatagggagaccctgtcttttttttgggcagcgtggtgggggataaataaataaaaggaaaaaaaacttagcctagaattagaattaatttaattgaattcatctaaagatgtctctggtgatttttatatgttccgctatataattgatgctttatagttttatcataatccaacaacttcagttatatttaattattgttaaggagtttaagactagaaagactagagtgctttctagtccaaatagaggtcagtgaaacagcttttgacatcagattttcatttgagagggagagctgtggtactggctaaaaagaaaggaagataacatccagtaaccacaggaatatattctctgtgaattaaaagtcttcaaagttatcatttctctgacatatgttggagtagtcatttccattctttacattgtcatgaactggattgataaccctcatctgcaatattttcacccctaaaatttttaacagggtttcctttttttctcacgactatttaagtttagattgctccattattaactgattaatgcactttgaagttctctggaattaattattttaacttggcctagcttcgactgtcaaggtggctgttataaatttgacttcattggcagtggatgaagcctaagccagctgagtctctatcatagctgaaccctgaggacagcctcatagctcatgtatcagggacttttgccacatttcagaggcatagcatgaacaagtaatattaagccaagaataagcagcagaaccctgttccatatggaaaaaagaaaaacaattttttgtccctaatgttcttccttttacatcctggaacaacaataaaaacatttttttaaacttgtctactgtaagatactgccatcataaagcagagacttacatgagtgaaagggttgcctcatcaagcagctcagtgtaaatggggaggctaggctctccccagccctatggtttttttatttcatgtaccccaggaaatactgtgtggtttctaaaagccctggttgttaaaagtagggactctgcctttttgttggtagggagaaaaaacgctattgctttgtcttacagagcgaatgtctgccaactacccgttcattatataagtctgaacttggtaatatatggctaatgaagattaagccctctataaagacttcctgttgaggtgaattctcatactgaaatgtagttacctacaatatttactagagatttatgaaattaaattaagagataatgtaagaaaatacatttttttggttctatataatgcttcatgattcatttagggacctagaaatattgtgtgaaaatatataaatatcacccaaaaggctttctgccctatatttttaaaatacagaatagttatatttgaagtagccctggccctagttctatagggcttggctatttaatatttttatggaagaagtgtttagttctggaaaaggtaaatgcttgtatatatttttgcagcctgggatctccctactccattttttcctttaatttaagtggccacatgtatatgtcttccctgctgtgttaggaaaatgggggctggatatcccaagaatcagaggttatataaaaatactgcaaatagaccgcagacataaatatctaccaaatgctatcttaaattttggtccaaactgaacatatggaaatagatttattgtaagtatttacttagagctttttcttaaatctgaactaacttgcttttagaagtctttttctttgtaagcattgtaaatgctaataaatcctgttaatttttttttttttttttttttttttttactgcatgttacattgaaataaaaacaaagtaaaatgagcaattgccttattgttctgctcttttgcagggggtgggggttggggaagacagcattccacagcctggtcaggagggaaggacctcacttgtttcatcaaatggagtggtttaaaactgatcaagcagctcataataatgaattcctgctctgtcttttattatcttatgtcagagtgcagcaaaatctcatttcataagacttacaataactctatttaaaattcaggtattgtactcgggaggctgaggtgggaggatcccaggagttcaaatcctgcctgggcaacatagcaagaccctgtctcttaaaaaaacaaaaagacatattcaggtactgatttttcatcaagagattgacataccaatgatcagaaattttagtgaaacttgactcaactatacacaaagttctcatcctaaatgaactatttcagtcaagcccactctaccactttttacttatctggttaataatccgaaatgttaccggggttgactcacggaattaaatttttcctctatttttatatcctttcctgttgtggatgtaacttacctttctaaactcctttagagttaacgacttctatttagtattgttggtatctccagcccccctcctttttttgtttttcttttagttatttactttgtttgtataatttgctttcattaactaaaaatggaattggcagcactggattgtatattactgtattaagagtacctttgttttcttgatctgttacttttaatactcaggtaatgctacaaatattacagggagtcaaatgcttttataaagttccttcagtggttgcctcacttgcgttttcctacaagatgtaagactgtttataattaaacttttttggtccttcaaaaaaatgctt

SEQ ID NO: 319244 - DNA, 3577 bp, Homo sapiens
aggcgcctgcgctttagctgctaactcgctctagtagctgtggtcggggctcgggaccggctgccatcttagtctagggactgaggagtcgccgccgccccgagtcccggtaccatgcatttcacggtggccttgtggagacaacgccttaacccaaggaagtgactcaaactgtgagaacttcaggttttccaacctattggtggtatgtctgacagtggatcacaacttggttcaatgggtagcctcaccatgaaatcacagcttcagatcactgtcatctcagcaaaacttaaggaaaataagaagaattggtttggaccaagtccttacgtagaggtcacagtagatggacagtcaaagaagacagaaaaatgcaacaacacaaacagtcccaagtggaagcaaccccttacagttatcgttacccctgtgagtaaattacattttcgtgtgtggagtcaccagacactgaaatctgatgttttgttgggaactgctgcattagatatttatgaaacattaaagtcaaacaatatgaaacttgaagaagtagttgtgactttgcagcttggaggtgacaaagagccaacagagacaataggagacttgtcaatttgtcttgatgggctacagttagagtctgaagttgttaccaatggtgaaactacatgttcagaaagtgcttctcagaatgatgatggctccagatccaaggatgaaacaagagtgagcacaaatggatcagatgaccctgaagatgcaggagctggtgaaaataggagagtcagtgggaataattctccatcactctcaaatggtggttttaaaccttctagacctccaagaccttcacgaccaccaccacccaccccacgtagaccagcatctgtcaatggttcaccatctgccacttctgaaagtgatgggtctagtacaggctctctgccgccgacaaatacaaatacaaatacatctgaaggagcaacatctggattaataattcctcttactatatctggaggctcaggccctaggccattaaatcctgtaactcaagctcccttgccacctggttgggagcagagagtggaccagcacgggcgagtttactatgtagatcatgttgagaaaagaacaacatgggatagaccagaacctctacctcctggctgggaacggcgggttgacaacatgggacgtatttattatgttgaccatttcacaagaacaacaacgtggcagaggccaacactggaatccgtccggaactatgaacaatggcagctacagcgtagtcagcttcaaggagcaatgcagcagtttaaccagagattcatttatgggaatcaagatttatttgctacatcacaaagtaaagaatttgatcctcttggtccattgccacctggatgggagaagagaacagacagcaatggcagagtatatttcgtcaaccacaacacacgaattacacaatgggaagaccccagaagtcaaggtcaattaaatgaaaagcccttacctgaaggttgggaaatgagattcacagtggatggaattccatattttgtggaccacaatagaagaactaccacctatatagatccccgcacaggaaaatctgccctagacaatggacctcagatagcctatgttcgggacttcaaagcaaaggttcagtatttccggttctggtgtcagcaactggccatgccacagcacataaagattacagtgacaagaaaaacattgtttgaggattcctttcaacagataatgagcttcagtccccaagatctgcgaagacgtttgtgggtgatttttccaggagaagaaggtttagattatggaggtgtagcaagagaatggttctttcttttgtcacatgaagtgttgaacccaatgtattgcctgtttgaatatgcagggaaggataactactgcttgcagataaaccccgcttcttacatcaatccagatcacctgaaatattttcgttttattggcagatttattgccatggctctgttccatgggaaattcatagacacgggtttttctttaccattctataagcgtatcttgaacaaaccagttggactcaaggatttagaatctattgatccagaattttacaattctctcatctgggttaaggaaaacaatattgaggaatgtgatttggaaatgtacttctccgttgacaaagaaattctaggtgaaattaagagtcatgatctgaaacctaatggtggcaatattcttgtaacagaagaaaataaagaggaatacatcagaatggtagctgagtggaggttgtctcgaggtgttgaagaacagacacaagctttctttgaaggctttaatgaaattcttccccagcaatatttgcaatactttgatgcaaaggaattagaggtccttttatgtggaatgcaagagattgatttgaatgactggcaaagacatgccatctaccgtcattatgcaaggaccagcaaacaaatcatgtggttttggcagtttgttaaagaaattgataatgagaagagaatgagacttctgcagtttgttactggaacctgccgattgccagtaggaggatttgctgatctcatggggagcaatggaccacagaaattctgcattgaaaaagttgggaaagaaaattggctacccagaagtcatacctgttttaatcgcctggacctgccaccatacaagagctatgagcaactgaaggaaaagctgttgtttgccatagaagaaacagaaggatttggacaagagtaacttctgagaacttgcaccatgaatgggcaagaacttatttgcaatgtttgtccttctctgcctgttgcacatcttgtaaaattggacaatggctctttagagagttatctgagtgtattgtactcgggaggctgaggtgggaggatcccaggagttcaaatcctgcctgggcaacatagcaagaccctgtctcttaaaaaaacaaaaagacatattcaggtactgatttttcatcaagagattgacataccaatgatcagaaattttagtgaaacttgactcaactatacacaaagttctcatcctaaatgaactatttcagtcaagcccactctaccactttttacttatctggttaataatccgaaatgttaccggggttgactcacggaattaaatttttcctctatttttatatcctttcctgttgtggatgtaacttacctttctaaactcctttagagttaacgacttctatttagtattgttggtatctccagcccccctcctttttttgtttttcttttagttatttactttgtttgtataatttgctttcattaactaaaaatggaattggcagcactggattgtatattactgtattaagagtacctttgttttcttgatctgttacttttaatactcaggtaatgctacaaatattacagggagtcaaatgcttttataaagttccttcagtggttgcctcacttgcgttttcctacaagatgtaagactgtttataattaaacttttttggtccttcaaaaaaatgctt

SEQ ID NO: 319245 - DNA, 3146 bp, Homo sapiens
aggcgcctgcgctttagctgctaactcgctctagtagctgtggtcggggctcgggaccggctgccatcttagtctagggactgaggagtcgccgccgccccgagtcccggtaccatgcatttcacggtggccttgtggagacaacgccttaacccaaggaagtgactcaaactgtgagaacttcaggttttccaacctattggtggtatgtctgacagtggatcacaacttggttcaatgggtagcctcaccatgaaatcacagcttcagatcactgtcatctcagcaaaacttaaggaaaataagaagaattggtttggaccaagtccttacgtagaggtcacagtagatggacagtcaaagaagacagaaaaatgcaacaacacaaacagtcccaagtggaagcaaccccttacagttatcgttacccctgtgagtaaattacattttcgtgtgtggagtcaccagacactgaaatctgatgttttgttgggaactgctgcattagatatttatgaaacattaaagtcaaacaatatgaaacttgaagaagtagttgtgactttgcagcttggaggtgacaaagagccaacagagacaataggagacttgtcaatttgtcttgatgggctacagttagagtctgaagttgttaccaatggtgaaactacatgttcagaaagtgcttctcagaatgatgatggctccagatccaaggatgaaacaagagtgagcacaaatggatcagatgaccctgaagatgcaggagctggtgaaaataggagagtcagtgggaataattctccatcactctcaaatggtggttttaaaccttctagacctccaagaccttcacgaccaccaccacccaccccacgtagaccagcatctgtcaatggttcaccatctgccacttctgaaagtgatgggtctagtacaggctctctgccgccgacaaatacaaatacaaatacatctgaaggagcaacatctggattaataattcctcttactatatctggaggctcaggccctaggccattaaatcctgtaactcaagctcccttgccacctggttgggagcagagagtggaccagcacgggcgagtttactatgtagatcatgttgagaaaagaacaacatgggatagaccagaacctctacctcctggctgggaacggcgggttgacaacatgggacgtatttattatgttgaccatttcacaagaacaacaacgtggcagaggccaacactggaatccgtccggaactatgaacaatggcagctacagcgtagtcagcttcaaggagcaatgcagcagtttaaccagagattcatttatgggaatcaagatttatttgctacatcacaaagtaaagaatttgatcctcttggtccattgccacctggatgggagaagagaacagacagcaatggcagagtatatttcgtcaaccacaacacacgaattacacaatgggaagaccccagaagtcaaggtcaattaaatgaaaagcccttacctgaaggttgggaaatgagattcacagtggatggaattccatattttgtggaccacaatagaagaactaccacctatatagatccccgcacaggaaaatctgccctagacaatggacctcagatagcctatgttcgggacttcaaagcaaaggttcagtatttccggttctggtgtcagcaactggccatgccacagcacataaagattacagtgacaagaaaaacattgtttgaggattcctttcaacagataatgagcttcagtccccaagatctgcgaagacgtttgtgggtgatttttccaggagaagaaggtttagattatggaggtgtagcaagagaatggttctttcttttgtcacatgaagtgttgaacccaatgtattgcctgtttgaatatgcagggaaggataactactgcttgcagataaaccccgcttcttacatcaatccagatcacctgaaatattttcgttttattggcagatttattgccatggctctgttccatgggaaattcatagacacgggtttttctttaccattctataagcgtatcttgaacaaaccagttggactcaaggatttagaatctattgatccagaattttacaattctctcatctgggttaaggaaaacaatattgaggaatgtgatttggaaatgtacttctccgttgacaaagaaattctaggtgaaattaagagtcatgatctgaaacctaatggtggcaatattcttgtaacagaagaaaataaagaggaatacatcagaatggtagctgagtggaggttgtctcgaggtgttgaagaacagacacaagctttctttgaaggctttaatgaaattcttccccagcaatatttgcaatactttgatgcaaaggaattagaggtccttttatgtggaatgcaagagattgatttgaatgactggcaaagacatgccatctaccgtcattatgcaaggaccagcaaacaaatcatgtggttttggcagtttgttaaagaaattgataatgagaagagaatgagacttctgcagtttgttactggaacctgccgattgccagtaggaggatttgctgatctcatggggagcaatggaccacagaaattctgcattgaaaaagttgggaaagaaaattggctacccagaagtcatacctggtaagtacaatcagaatggatagagaaaacagcttttgtccagttatctgtagctatttaaagccagctagaaattaaaaatgatatttagtagatttacagaatagcacagccatcatagcaatccagtttaagagcattttgttcacccctgtatgattccttacaactatttgcaatcaattccttttttcacatctgaattttttttctaatgtgggatttagagttattttaacttttctctgagggcagccaaagaaagttaggagacctactttctaacatcatgaccaccaatattctcatttgaaatctaattacatttctaaaaatgtagaaaactaaatctaatcctaatctgacagcaaatatattaatattttggaattcaacctaatgtcaacaatatttgcccgtcgtgcgcgtggggtcctctaggacgccgca

SEQ ID NO: 319246 - DNA, 3644 bp, Homo sapiens
attagcaaaggcaacttttggtgttaatcatgcagtttatggaatcgtttctgctgtacagcataaacttatttgcaatgtttgtccttctctgcctgttgcacatcttgtaaaattggacaatggctctttagagagttatctgagtgtaagtaaattaatgttctcatttagatttatctcccagtgatttctactcagcgtttccagaaatcaggtctgcaaatgactagtcagaaccttgcttaacatgagattttaacacaacaatgaaatttgccttgtcttattccactagtttattcctttaacaacaatattttatatgtgtcaaaagtctcacttgggagtagtgtttttttcttttagacattctgcagacatgcagggaagtcctttggtaactgcaatatacaagattttcctattaagcctcttggtaagaggcatttgttaaaagtgcaagcttactcctgcttctggggatgtgagcaaaattcgggcttgtgttctccctctcattttagtctgacttgactattgtttttcctttctggcgcatgaatccatacatcattcctggaagtgaggcaagactcttgcatctctacaaagtagttttgtcaatttgaattcagggaaaagttggtcacagcctgcaaatgacttcatttggaagtctgattgtttcagttgcctgacaaatactacactttacaaacaatgttaacactgtgattccttcattgttttaagaagttaacctagggccgggcatggtggctcatacctgtaatcctagcactctgggaggccgaggcaggaggatccctttagcccaggagttaaagaccagcctgggcaacatagggagaccctgtcttttttttgggcagcgtggtgggggataaataaataaaaggaaaaaaaacttagcctagaattagaattaatttaattgaattcatctaaagatgtctctggtgatttttatatgttccgctatataattgatgctttatagttttatcataatccaacaacttcagttatatttaattattgttaaggagtttaagactagaaagactagagtgctttctagtccaaatagaggtcagtgaaacagcttttgacatcagattttcatttgagagggagagctgtggtactggctaaaaagaaaggaagataacatccagtaaccacaggaatatattctctgtgaattaaaagtcttcaaagttatcatttctctgacatatgttggagtagtcatttccattctttacattgtcatgaactggattgataaccctcatctgcaatattttcacccctaaaatttttaacagggtttcctttttttctcacgactatttaagtttagattgctccattattaactgattaatgcactttgaagttctctggaattaattattttaacttggcctagcttcgactgtcaaggtggctgttataaatttgacttcattggcagtggatgaagcctaagccagctgagtctctatcatagctgaaccctgaggacagcctcatagctcatgtatcagggacttttgccacatttcagaggcatagcatgaacaagtaatattaagccaagaataagcagcagaaccctgttccatatggaaaaaagaaaaacaattttttgtccctaatgttcttccttttacatcctggaacaacaataaaaacatttttttaaacttgtctactgtaagatactgccatcataaagcagagacttacatgagtgaaagggttgcctcatcaagcagctcagtgtaaatggggaggctaggctctccccagccctatggtttttttatttcatgtaccccaggaaatactgtgtggtttctaaaagccctggttgttaaaagtagggactctgcctttttgttggtagggagaaaaaacgctattgctttgtcttacagagcgaatgtctgccaactacccgttcattatataagtctgaacttggtaatatatggctaatgaagattaagccctctataaagacttcctgttgaggtgaattctcatactgaaatgtagttacctacaatatttactagagatttatgaaattaaattaagagataatgtaagaaaatacatttttttggttctatataatgcttcatgattcatttagggacctagaaatattgtgtgaaaatatataaatatcacccaaaaggctttctgccctatatttttaaaatacagaatagttatatttgaagtagccctggccctagttctatagggcttggctatttaatatttttatggaagaagtgtttagttctggaaaaggtaaatgcttgtatatatttttgcagcctgggatctccctactccattttttcctttaatttaagtggccacatgtatatgtcttccctgctgtgttaggaaaatgggggctggatatcccaagaatcagaggttatataaaaatactgcaaatagaccgcagacataaatatctaccaaatgctatcttaaattttggtccaaactgaacatatggaaatagatttattgtaagtatttacttagagctttttcttaaatctgaactaacttgcttttagaagtctttttctttgtaagcattgtaaatgctaataaatcctgttaatttttttttttttttttttttttttttactgcatgttacattgaaataaaaacaaagtaaaatgagcaattgccttattgttctgctcttttgcagggggtgggggttggggaagacagcattccacagcctggtcaggagggaaggacctcacttgtttcatcaaatggagtggtttaaaactgatcaagcagctcataataatgaattcctgctctgtcttttattatcttatgtcagagtgcagcaaaatctcatttcataagacttacaataactctatttaaaattcaggtattgtactcgggaggctgaggtgggaggatcccaggagttcaaatcctgcctgggcaacatagcaagaccctgtctcttaaaaaaacaaaaagacatattcaggtactgatttttcatcaagagattgacataccaatgatcagaaattttagtgaaacttgactcaactatacacaaagttctcatcctaaatgaactatttcagtcaagcccactctaccactttttacttatctggttaataatccgaaatgttaccggggttgactcacggaattaaatttttcctctatttttatatcctttcctgttgtggatgtaacttacctttctaaactcctttagagttaacgacttctatttagtattgttggtatctccagcccccctcctttttttgtttttcttttagttatttactttgtttgtataatttgctttcattaactaaaaatggaattggcagcactggattgtatattactgtattaagagtacctttgttttcttgatctgttacttttaatactcaggtaatgctacaaatattacagggagtcaaatgcttttataaagttccttcagtggttgcctcacttgcgttttcctacaagatgtaagactgtttataattaaacttttttggtccttcaaaaaaatgctt

SEQ ID NO: 319247 - DNA, 3449 bp, Homo sapiens
  misc_feature (130)..(130): n is a, c, g, or t
  misc_feature (134)..(134): n is a, c, g, or t
  misc_feature (138)..(138): n is a, c, g, or t
  misc_feature (157)..(158): n is a, c, g, or t
  misc_feature (165)..(165): n is a, c, g, or t
  misc_feature (173)..(174): n is a, c, g, or t
  misc_feature (178)..(178): n is a, c, g, or t
  misc_feature (206)..(206): n is a, c, g, or t
  misc_feature (251)..(251): n is a, c, g, or t
  misc_feature (253)..(253): n is a, c, g, or t
  misc_feature (272)..(272): n is a, c, g, or t
  misc_feature (290)..(290): n is a, c, g, or t
tgccaaatcccattgaatttggtctggtcttttcaaaaagattaaaaaatttttgaacaatacatttttatcaaaaccaaccaaatcatagttaaactgtggtttggggtacttttaaattcccaattanccangcanttaaaaggggagcaagtannacatcanaaaacatnnaagngctcaaattgcaaataaactgcaacttnctattgaacatagaattcaaaacaaaaggctttggccataactgnanacaaaaaaatggtgggagnaaatcagtatttcaaaanaaaacggcaggaacctcgtgccgaattcggcacgagttttagtctgacttgactattgtttttcctttctggcgcatgaatccatacatcattcctggaagtgaggcaagactcttgcatctctacaaagtagttttgtcaatttgaattcagggaaaagttggtcacagcctgcaaatgacttcatttggaagtctgattgtttcagttgcctgacaaatactacactttacaaacaatgttaacactgtgattccttcattgttttaagaagttaacctagggccgggcatggtggctcatacctgtaatcctagcactctgggaggccgaggcaggaggatccctttagcccaggagttaaagaccagcctgggcaacatagggagaccctgtcttttttttgggcagcgtggtgggggataaataaataaaaggaaaaaaaacttagcctagaattagaattaatttaattgaattcatctaaagatgtctctggtgatttttatatgttccgctatataattgatgctttatagttttatcataatccaacaacttcagttatatttaattattgttaaggagtttaagactagaaagactagagtgctttctagtccaaatagaggtcagtgaaacagcttttgacatcagattttcatttgagagggagagctgtggtactggctaaaaagaaaggaagataacatccagtaaccacaggaatatattctctgtgaattaaaagtcttcaaagttatcatttctctgacatatgttggagtagtcatttccattctttacattgtcatgaactggattgataaccctcatctgcaatattttcacccctaaaatttttaacagggtttcctttttttctcacgactatttaagtttagattgctccattattaactgattaatgcactttgaagttctctggaattaattattttaacttggcctagcttcgactgtcaaggtggctgttataaatttgacttcattggcagtggatgaagcctaagccagctgagtctctatcatagctgaaccctgaggacagcctcatagctcatgtatcagggacttttgccacatttcagaggcatagcatgaacaagtaatattaagccaagaataagcagcagaaccctgttccatatggaaaaaagaaaaacaattttttgtccctaatgttcttccttttacatcctggaacaacaataaaaacatttttttaaacttgtctactgtaagatactgccatcataaagcagagacttacatgagtgaaagggttgcctcatcaagcagctcagtgtaaatggggaggctaggctctccccagccctatggtttttttatttcatgtaccccaggaaatactgtgtggtttctaaaagccctggttgttaaaagtagggactctgcctttttgttggtagggagaaaaaacgctattgctttgtcttacagagcgaatgtctgccaactacccgttcattatataagtctgaacttggtaatatatggctaatgaagattaagccctctataaagacttcctgttgaggtgaattctcatactgaaatgtagttacctacaatatttactagagatttatgaaattaaattaagagataatgtaagaaaatacatttttttggttctatataatgcttcatgattcatttagggacctagaaatattgtgtgaaaatatataaatatcacccaaaaggctttctgccctatatttttaaaatacagaatagttatatttgaagtagccctggccctagttctatagggcttggctatttaatatttttatggaagaagtgtttagttctggaaaaggtaaatgcttgtatatatttttgcagcctgggatctccctactccattttttcctttaatttaagtggccacatgtatatgtcttccctgctgtgttaggaaaatgggggctggatatcccaagaatcagaggttatataaaaatactgcaaatagaccgcagacataaatatctaccaaatgctatcttaaattttggtccaaactgaacatatggaaatagatttattgtaagtatttacttagagctttttcttaaatctgaactaacttgcttttagaagtctttttctttgtaagcattgtaaatgctaataaatcctgttaatttttttttttttttttttttttttttactgcatgttacattgaaataaaaacaaagtaaaatgagcaattgccttattgttctgctcttttgcagggggtgggggttggggaagacagcattccacagcctggtcaggagggaaggacctcacttgtttcatcaaatggagtggtttaaaactgatcaagcagctcataataatgaattcctgctctgtcttttattatcttatgtcagagtgcagcaaaatctcatttcataagacttacaataactctatttaaaattcaggtattgtactcgggaggctgaggtgggaggatcccaggagttcaaatcctgcctgggcaacatagcaagaccctgtctcttaaaaaaacaaaaagacatattcaggtactgatttttcatcaagagattgacataccaatgatcagaaattttagtgaaacttgactcaactatacacaaagttctcatcctaaatgaactatttcagtcaagcccactctaccactttttacttatctggttaataatccgaaatgttaccggggttgactcacggaattaaatttttcctctatttttatatcctttcctgttgtggatgtaacttacctttctaaactcctttagagttaacgacttctatttagtattgttggtatctccagcccccctcctttttttgtttttcttttagttatttactttgtttgtataatttgctttcattaactaaaaatggaattggcagcactggattgtatattactgtattaagagtacctttgttttcttgatctgttacttttaatactcaggtaatgctacaaatattacagggagtcaaatgcttttataaagttccttcagtggttgcctcacttgcgttttcctacaagatgtaagactgtttataattaaacttttttggtccttcaaaaaaatgctt

SEQ ID NO: 319248 - DNA, 2425 bp, Homo sapiens
aggcgcctgcgctttagctgctaactcgctctagtagctgtggtcggggctcgggaccggctgccatcttagtctagggactgaggagtcgccgccgccccgagtcccggtaccatgcatttcacggtggccttgtggagacaacgccttaacccaaggaagtgactcaaactgtgagaacttcaggttttccaacctattggtggtatgtctgacagtggatcacaacttggttcaatgggtagcctcaccatgaaatcacagcttcagatcactgtcatctcagcaaaacttaaggaaaataagaagaattggtttggaccaagtccttacgtagaggtcacagtagatggacagtcaaagaagacagaaaaatgcaacaacacaaacagtcccaagtggaagcaaccccttacagttatcgttacccctgtgagtaaattacattttcgtgtgtggagtcaccagacactgaaatctgatgttttgttgggaactgctgcattagatatttatgaaacattaaagtcaaacaatatgaaacttgaagaagtagttgtgactttgcagcttggaggtgacaaagagccaacagagacaataggagacttgtcaatttgtcttgatgggctacagttagagtctgaagttgttaccaatggtgaaactacatgttcagaaagtgcttctcagaatgatgatggctccagatccaaggatgaaacaagagtgagcacaaatggatcagatgaccctgaagatgcaggagctggtgaaaataggagagtcagtgggaataattctccatcactctcaaatggtggttttaaaccttctagacctccaagaccttcacgaccaccaccacccaccccacgtagaccagcatctgtcaatggttcaccatctgccacttctgaaagtgatgggtctagtacaggctctctgccgccgacaaatacaaatacaaatacatctgaaggagcaacatctggattaataattcctcttactatatctggaggctcaggccctaggccattaaatcctgtaactcaagctcccttgccacctggttgggagcagagagtggaccagcacgggcgagtttactatgtagatcatgttgagaaaagaacaacatgggatagaccagaacctctacctcctggctgggaacggcgggttgacaacatgggacgtatttattatgttgaccatttcacaagaacaacaacgtggcagaggccaacactggaatccgtccggaactatgaacaatggcagctacagcgtagtcagcttcaaggagcaatgcagcagtttaaccagagattcatttatgggaatcaagatttatttgctacatcacaaagtaaagaatttgatcctcttggtccattgccacctggatgggagaagagaacagacagcaatggcagagtatatttcgtcaaccacaacacacgaattacacaatgggaagaccccagaagtcaaggtcaattaaatgaaaagcccttacctgaaggttgggaaatgagattcacagtggatggaattccatattttgtggaccacaatagaagaactaccacctatatagatccccgcacaggaaaatctgccctgtaagttttctaaacattgtagattaagagtaaaatactagtccttcagattttgatataaagatttgtattagcaaggagtggaagtcttagtatttcttgagttagcttgacaataggtttctgttcattaagtattttgcatttccatctccctcttggatattttatcctagagattttcatatttgttaccatttgttcacacagcactaaatgaaactatttagaatttataggtattgtactgcttaccaattagtctctgatttctgattttcagcttctttcattcccttaactttttgacgttaaaaaagctctcattacttatcccccaccccatttctgagaaagtaaccttttgatttgcttatgtgctttatgacttcttttgtgggaaaatatataacctaaagtttcttgttttatgtgtacagttcagtggcattaagcacattcatattgtggcataatcattaccaccatccatctccagaatgttttcatcattccacactgaaacactgtaccctttaaacaataactttagcagacctggtaaccagccttctactgtctttctctatgaatttgactagtcgaagtacctcatattattggagtcatacaatatttatgcttatgtttctggattatttcactaaggtcatatcttcaagatttatccgtgttgtaatatgtatcaacattttcattccttattgaagctgaataatattccagtgtatgtatatatcacattttgtttattcacagatattgcattgttt

SEQ ID NO: 319249 - DNA, 2032 bp, Homo sapiens
aggcgcctgcgctttagctgctaactcgctctagtagctgtggtcggggctcgggaccggctgccatcttagtctagggactgaggagtcgccgccgccccgagtcccggtaccatgcatttcacggtggccttgtggagacaacgccttaacccaaggaagtgactcaaactgtgagaacttcaggttttccaacctattggtggtatgtctgacagtggatcacaacttggttcaatgggtagcctcaccatgaaatcacagcttcagatcactgtcatctcagcaaaacttaaggaaaataagaagaattggtttggaccaagtccttacgtagaggtcacagtagatggacagtcaaagaagacagaaaaatgcaacaacacaaacagtcccaagtggaagcaaccccttacagttatcgttacccctgtgagtaaattacattttcgtgtgtggagtcaccagacactgaaatctgatgttttgttgggaactgctgcattagatatttatgaaacattaaagtcaaacaatatgaaacttgaagaagtagttgtgactttgcagcttggaggtgacaaagagccaacagagacaataggagacttgtcaatttgtcttgatgggctacagttagagtctgaagttgttaccaatggtgaaactacatgttcagaaagtgcttctcagaatgatgatggctccagatccaaggatgaaacaagagtgagcacaaatggatcagatgaccctgaagatgcaggagctggtgaaaataggagagtcagtgggaataattctccatcactctcaaatggtggttttaaaccttctagacctccaagaccttcacgaccaccaccacccaccccacgtagaccagcatctgtcaatggttcaccatctgccacttctgaaagtgatgggtctagtacaggctctctgccgccgacaaatacaaatacaaatacatctgaaggagcaacatctggattaataattcctcttactatatctggaggctcaggccctaggccattaaatcctgtaactcaagctcccttgccacctggttgggagcagagagtggaccagcacgggcgagtttactatgtagatcatgttgagaaaagaacaacatgggatagaccagaacctctacctcctggctgggaacggcgggttgacaacatgggacgtatttattatgttgaccatttcacaagaacaacaacgtggcagaggccaacactggaatccgtccggaactatgaacaatggcagctacagcgtagtcagcttcaaggagcaatgcagcagtttaaccagagattcatttatgggaatcaagatttatttgctacatcacaaagtaaagaatttgatcctcttggtccattgccacctggatgggagaagagaacagacagcaatggcagagtatatttcgtcaaccacaacacacgaattacacaatgggaagaccccagaagtcaaggtcaattaaatgaaaagcccttacctgaaggttgggaaatgagattcacagtggatggaattccatattttgtggaccacaatagaagaactaccacctatatagatccccgcacaggaaaatctgccctgtaagttttctaaacattgtagattaagagtaaaatactagtccttcagattttgatataaagatttgtattagcaaggagtggaagtcttagtatttcttgagttagcttgacaataggtttctgttcattaagtattttgcatttccatctccctcttggatattttatcctagagattttcatatttgttaccatttgttcacacagcactaaatgaaactatttagaatttataggtattgtactgctcagccaggatgtctcctcagtcactagacgttcgatgcatcgtcgatccacgaccacatgttttgacgtttgcagtctgattataagagatccccctcctcatgtaacggcgatgtatactatgtgcgtcttcataaacgggccgagct

SEQ ID NO: 319250 - DNA, 293 bp, Homo sapiens
gtaagtcacatgagtttcttcatggagttctgtcatttcatttttgttctcttccaattgtgtcattttaaaacagatatttatgtctgatactgtgctcttgcttgagtgaatgtctgggaagtttttttttaatatatatatcagtttaattcacaaataggcattaaattccccaaacattaagtggactctttataaacttttattgacgctcataattattttactcttctacagtttaaagatactgatcacccagcaataaaaaaggaatgggctattgatacacc

SEQ ID NO: 319251 - DNA, 387 bp, Homo sapiens
tttcgtgtgtggagtcaccagacactgaaatctgatgttttgttgggaactgctgcattagatatttatgaaacattaaagtcaaacaatatgaaacgtatgtatgtaagactaatagaaattgcacttagctgtttgtttttctggaagaaatttatatgtcaaacatgcataatgactcatgttctctcatacttttaagttttacttggttataggatgaacagatagaagaattttacactattgaaagtattctgagtaaccttggtttgaccattcattttggattcagtatttttagtaaatatttatttacttagtaaatagatattagtaaagtaatacatatttaattgtggaaaaactaaaatatagagcagagat

SEQ ID NO: 319252 - DNA, 310 bp, Homo sapiens
tgcaggataagcagttttacttttgttgacaatatgtgtatgaatttacttctgtagttcaactgcaagtgaaaatgaccatgtaagcatgtagcattcagataattttcataagattactgaacataggccaatattgattgtatagtaaactgtaaggggtgcagtgagaagactttagactttaaaactgaattgtaatttatttaggatctcattgtgatattcaataaaaataatattttttccctcttttttcacttttagtatcgttacccctgtgagtaaattacattttcgtgtgtggagt

SEQ ID NO: 319253 - DNA, 348 bp, Homo sapiens
aaactcattttctgtttaaactttgatgttaaaggtgcttctcagaatgatgatggctccagatccaaggatgaaacaaggtaagcattcactgattgcttaccacagaatgcggagagatagatttcctaaatattcattttagtgtaaacttcaggttcatgatataagaataaatgagtgtcagaaagaattcagaactcaagaagggaaatatttgcaaaagattgaagactcttagcttatcggattagagctatctggagtgggctagggataaccaaattgttgatacttcttcagcttgtagaaaataaatatactggcaccttttcagaggcagggtgt

SEQ ID NO: 319254 - DNA, 662 bp, Homo sapiens
gcattgaaaaagttgggaaagaaaattggctacccagaagtcatacctggtaagtacaatcagaatggatagagaaaacagcttttgtccagttatctgtagctatttaaagccagctagaaattaaaaatgatatttagtagatttacagaatagcacagccatcatagcaatccagtttaagagcattttgttcacccctgtatgattccttacaactatttgcaatcaattccttttttcacatctgaattttttttctaatgtgggatttagagttattttaacttttctctgagggcagccaaagaaagttaggagacctactttctaacatcatgaccaccaatattctcatttgaaatctaattacatttctaaaaatgtagaaaactaaatctaatcctaatctgacagcaaatatattaatattttggaattcaacctaatgtcaacaatatttgaaccttattttgtgggatatattttagtggtcacatatggtccttcctggatatctgacctctttactgttttactaatgtctattcctttttgtttttatacataatgttttgtacatgcatgtagtgtttaagtaacaattttattgatatataatttacagattataaaactcaccttcttaaattatgcagttc

SEQ ID NO: 319255 - DNA, 6406 bp, Homo sapiens
aggcgcctgcgctttagctgctaactcgctctagtagctgtggtcggggctcgggaccggctgccatcttagtctagggactgaggagtcgccgccgccccgagtcccggtaccatgcatttcacggtggccttgtggagacaacgccttaacccaaggaagtgactcaaactgtgagaacttcaggttttccaacctattggtggtatgtctgacagtggatcacaacttggttcaatgggtagcctcaccatgaaatcacagcttcagatcactgtcatctcagcaaaacttaaggaaaataagaagaattggtttggaccaagtccttacgtagaggtcacagtagatggacagtcaaagaagacagaaaaatgcaacaacacaaacagtcccaagtggaagcaaccccttacagttatcgttacccctgtgagtaaattacattttcgtgtgtggagtcaccagacactgaaatctgatgttttgttgggaactgctgcattagatatttatgaaacattaaagtcaaacaatatgaaacttgaagaagtagttgtgactttgcagcttggaggtgacaaagagccaacagagacaataggagacttgtcaatttgtcttgatgggctacagttagagtctgaagttgttaccaatggtgaaactacatgttcagaaagtgcttctcagaatgatgatggctccagatccaaggatgaaacaagagtgagcacaaatggatcagatgaccctgaagatgcaggagctggtgaaaataggagagtcagtgggaataattctccatcactctcaaatggtggttttaaaccttctagacctccaagaccttcacgaccaccaccacccaccccacgtagaccagcatctgtcaatggttcaccatctgccacttctgaaagtgatgggtctagtacaggctctctgccgccgacaaatacaaatacaaatacatctgaaggagcaacatctggattaataattcctcttactatatctggaggctcaggccctaggccattaaatcctgtaactcaagctcccttgccacctggttgggagcagagagtggaccagcacgggcgagtttactatgtagatcatgttgagaaaagaacaacatgggatagaccagaacctctacctcctggctgggaacggcgggttgacaacatgggacgtatttattatgttgaccatttcacaagaacaacaacgtggcagaggccaacactggaatccgtccggaactatgaacaatggcagctacagcgtagtcagcttcaaggagcaatgcagcagtttaaccagagattcatttatgggaatcaagatttatttgctacatcacaaagtaaagaatttgatcctcttggtccattgccacctggatgggagaagagaacagacagcaatggcagagtatatttcgtcaaccacaacacacgaattacacaatgggaagaccccagaagtcaaggtcaattaaatgaaaagcccttacctgaaggttgggaaatgagattcacagtggatggaattccatattttgtggaccacaatagaagaactaccacctatatagatccccgcacaggaaaatctgccctagacaatggacctcagatagcctatgttcgggacttcaaagcaaaggttcagtatttccggttctggtgtcagcaactggccatgccacagcacataaagattacagtgacaagaaaaacattgtttgaggattcctttcaacagataatgagcttcagtccccaagatctgcgaagacgtttgtgggtgatttttccaggagaagaaggtttagattatggaggtgtagcaagagaatggttctttcttttgtcacatgaagtgttgaacccaatgtattgcctgtttgaatatgcagggaaggataactactgcttgcagataaaccccgcttcttacatcaatccagatcacctgaaatattttcgttttattggcagatttattgccatggctctgttccatgggaaattcatagacacgggtttttctttaccattctataagcgtatcttgaacaaaccagttggactcaaggatttagaatctattgatccagaattttacaattctctcatctgggttaaggaaaacaatattgaggaatgtgatttggaaatgtacttctccgttgacaaagaaattctaggtgaaattaagagtcatgatctgaaacctaatggtggcaatattcttgtaacagaagaaaataaagaggaatacatcagaatggtagctgagtggaggttgtctcgaggtgttgaagaacagacacaagctttctttgaaggctttaatgaaattcttccccagcaatatttgcaatactttgatgcaaaggaattagaggtccttttatgtggaatgcaagagattgatttgaatgactggcaaagacatgccatctaccgtcattatgcaaggaccagcaaacaaatcatgtggttttggcagtttgttaaagaaattgataatgagaagagaatgagacttctgcagtttgttactggaacctgccgattgccagtaggaggatttgctgatctcatggggagcaatggaccacagaaattctgcattgaaaaagttgggaaagaaaattggctacccagaagtcatacctgttttaatcgcctggacctgccaccatacaagagctatgagcaactgaaggaaaagctgttgtttgccatagaagaaacagaaggatttggacaagagtaacttctgagaacttgcaccatgaatgggcaagaacttatttgcaatgtttgtccttctctgcctgttgcacatcttgtaaaattggacaatggctctttagagagttatctgagtgtaagtaaattaatgttctcatttagatttatctcccagtgatttctactcagcgtttccagaaatcaggtctgcaaatgactagtcagaaccttgcttaacatgagattttaacacaacaatgaaatttgccttgtcttattccactagtttattcctttaacaacaatattttatatgtgtcaaaagtctcacttgggagtagtgtttttttcttttagacattctgcagacatgcagggaagtcctttggtaactgcaatatacaagattttcctattaagcctcttggtaagaggcatttgttaaaagtgcaagcttactcctgcttctggggatgtgagcaaaattcgggcttgtgttctccctctcattttagtctgacttgactattgtttttcctttctggcgcatgaatccatacatcattcctggaagtgaggcaagactcttgcatctctacaaagtagttttgtcaatttgaattcagggaaaagttggtcacagcctgcaaatgacttcatttggaagtctgattgtttcagttgcctgacaaatactacactttacaaacaatgttaacactgtgattccttcattgttttaagaagttaacctagggccgggcatggtggctcatacctgtaatcctagcactctgggaggccgaggcaggaggatccctttagcccaggagttaaagaccagcctgggcaacatagggagaccctgtcttttttttgggcagcgtggtgggggataaataaataaaaggaaaaaaaacttagcctagaattagaattaatttaattgaattcatctaaagatgtctctggtgatttttatatgttccgctatataattgatgctttatagttttatcataatccaacaacttcagttatatttaattattgttaaggagtttaagactagaaagactagagtgctttctagtccaaatagaggtcagtgaaacagcttttgacatcagattttcatttgagagggagagctgtggtactggctaaaaagaaaggaagataacatccagtaaccacaggaatatattctctgtgaattaaaagtcttcaaagttatcatttctctgacatatgttggagtagtcatttccattctttacattgtcatgaactggattgataaccctcatctgcaatattttcacccctaaaatttttaacagggtttcctttttttctcacgactatttaagtttagattgctccattattaactgattaatgcactttgaagttctctggaattaattattttaacttggcctagcttcgactgtcaaggtggctgttataaatttgacttcattggcagtggatgaagcctaagccagctgagtctctatcatagctgaaccctgaggacagcctcatagctcatgtatcagggacttttgccacatttcagaggcatagcatgaacaagtaatattaagccaagaataagcagcagaaccctgttccatatggaaaaaagaaaaacaattttttgtccctaatgttcttccttttacatcctggaacaacaataaaaacatttttttaaacttgtctactgtaagatactgccatcataaagcagagacttacatgagtgaaagggttgcctcatcaagcagctcagtgtaaatggggaggctaggctctccccagccctatggtttttttatttcatgtaccccaggaaatactgtgtggtttctaaaagccctggttgttaaaagtagggactctgcctttttgttggtagggagaaaaaacgctattgctttgtcttacagagcgaatgtctgccaactacccgttcattatataagtctgaacttggtaatatatggctaatgaagattaagccctctataaagacttcctgttgaggtgaattctcatactgaaatgtagttacctacaatatttactagagatttatgaaattaaattaagagataatgtaagaaaatacatttttttggttctatataatgcttcatgattcatttagggacctagaaatattgtgtgaaaatatataaatatcacccaaaaggctttctgccctatatttttaaaatacagaatagttatatttgaagtagccctggccctagttctatagggcttggctatttaatatttttatggaagaagtgtttagttctggaaaaggtaaatgcttgtatatatttttgcagcctgggatctccctactccattttttcctttaatttaagtggccacatgtatatgtcttccctgctgtgttaggaaaatgggggctggatatcccaagaatcagaggttatataaaaatactgcaaatagaccgcagacataaatatctaccaaatgctatcttaaattttggtccaaactgaacatatggaaatagatttattgtaagtatttacttagagctttttcttaaatctgaactaacttgcttttagaagtctttttctttgtaagcattgtaaatgctaataaatcctgttaatttttttttttttttttttttttttttactgcatgttacattgaaataaaaacaaagtaaaatgagcaattgccttattgttctgctcttttgcagggggtgggggttggggaagacagcattccacagcctggtcaggagggaaggacctcacttgtttcatcaaatggagtggtttaaaactgatcaagcagctcataataatgaattcctgctctgtcttttattatcttatgtcagagtgcagcaaaatctcatttcataagacttacaataactctatttaaaattcaggtattgtactcgggaggctgaggtgggaggatcccaggagttcaaatcctgcctgggcaacatagcaagaccctgtctcttaaaaaaacaaaaagacatattcaggtactgatttttcatcaagagattgacataccaatgatcagaaattttagtgaaacttgactcaactatacacaaagttctcatcctaaatgaactatttcagtcaagcccactctaccactttttacttatctggttaataatccgaaatgttaccggggttgactcacggaattaaatttttcctctatttttatatcctttcctgttgtggatgtaacttacctttctaaactcctttagagttaacgacttctatttagtattgttggtatctccagcccccctcctttttttgtttttcttttagttatttactttgtttgtataatttgctttcattaactaaaaatggaattggcagcactggattgtatattactgtattaagagtacctttgttttcttgatctgttacttttaatactcaggtaatgctacaaatattacagggagtcaaatgcttttataaagttccttcagtggttgcctcacttgcgttttcctacaagatgtaagactgtttataattaaacttttttggtccttcaaaaaaatgctt

SEQ ID NO: 319256 - DNA, 4304 bp, Homo sapiens
aggcgcctgcgctttagctgctaactcgctctagtagctgtggtcggggctcgggaccggctgccatcttagtctagggactgaggagtcgccgccgccccgagtcccggtaccatgcatttcacggtggccttgtggagacaacgccttaacccaaggaagtgactcaaactgtgagaacttcaggttttccaacctattggtggtatgtctgacagtggatcacaacttggttcaatgggtagcctcaccatgaaatcacagcttcagatcactgtcatctcagcaaaacttaaggaaaataagaagaattggtttggaccaagtccttacgtagaggtcacagtagatggacagtcaaagaagacagaaaaatgcaacaacacaaacagtcccaagtggaagcaaccccttacagttatcgttacccctgtgagtaaattacattttcgtgtgtggagtcaccagacactgaaatctgatgttttgttgggaactgctgcattagatatttatgaaacattaaagtcaaacaatatgaaacttgaagaagtagttgtgactttgcagcttggaggtgacaaagagccaacagagacaataggagacttgtcaatttgtcttgatgggctacagttagagtctgaagttgttaccaatggtgaaactacatgttcagaaagtgcttctcagaatgatgatggctccagatccaaggatgaaacaagagtgagcacaaatggatcagatgaccctgaagatgcaggagctggtgaaaataggagagtcagtgggaataattctccatcactctcaaatggtggttttaaaccttctagacctccaagaccttcacgaccaccaccacccaccccacgtagaccagcatctgtcaatggttcaccatctgccacttctgaaagtgatgggtctagtacaggctctctgccgccgacaaatacaaatacaaatacatctgaaggagcaacatctggattaataattcctcttactatatctggaggctcaggccctaggccattaaatcctgtaactcaagctcccttgccacctggttgggagcagagagtggaccagcacgggcgagtttactatgtagatcatgttgagaaaagaacaacatgggatagaccagaacctctacctcctggctgggaacggcgggttgacaacatgggacgtatttattatgttgaccatttcacaagaacaacaacgtggcagaggccaacactggaatccgtccggaactatgaacaatggcagctacagcgtagtcagcttcaaggagcaatgcagcagtttaaccagagattcatttatgggaatcaagatttatttgctacatcacaaagtaaagaatttgatcctcttggtccattgccacctggatgggagaagagaacagacagcaatggcagagtatatttcgtcaaccacaacacacgaattacacaatgggaagaccccagaagtcaaggtcaattaaatgaaaagcccttacctgaaggttgggaaatgagattcacagtggatggaattccatattttgtggaccacaatagaagaactaccacctatatagatccccgcacaggaaaatctgccctagacaatggacctcagatagcctatgttcgggacttcaaagcaaaggttcagtatttccggttctggtgtcagcaactggccatgccacagcacataaagattacagtgacaagaaaaacattgtttgaggattcctttcaacagataatgagcttcagtccccaagatctgcgaagacgtttgtgggtgatttttccaggagaagaaggtttagattatggaggtgtagcaagagaatggttctttcttttgtcacatgaagtgttgaacccaatgtattgcctgtttgaatatgcagggaaggataactactgcttgcagataaaccccgcttcttacatcaatccagatcacctgaaatattttcgttttattggcagatttattgccatggctctgttccatgggaaattcatagacacgggtttttctttaccattctataagcgtatcttgaacaaaccagttggactcaaggatttagaatctattgatccagaattttacaattctctcatctgggttaaggaaaacaatattgaggaatgtgatttggaaatgtacttctccgttgacaaagaaattctaggtgaaattaagagtcatgatctgaaacctaatggtggcaatattcttgtaacagaagaaaataaagaggaatacatcagaatggtagctgagtggaggttgtctcgaggtgttgaagaacagacacaagctttctttgaaggctttaatgaaattcttccccagcaatatttgcaatactttgatgcaaaggaattagaggtccttttatgtggaatgcaagagattgatttgaatgactggcaaagacatgccatctaccgtcattatgcaaggaccagcaaacaaatcatgtggttttggcagtttgttaaagaaattgataatgagaagagaatgagacttctgcagtttgttactggaacctgccgattgccagtaggaggatttgctgatctcatggggagcaatggaccacagaaattctgcattgaaaaagttgggaaagaaaattggctacccagaagtcatacctgttttaatcgcctggacctgccaccatacaagagctatgagcaactgaaggaaaagctgttgtttgccatagaagaaacagaaggatttggacaagagtaacttctgagaacttgcaccatgaatgggcaagaacttatttgcaatgtttgtccttctctgcctgttgcacatcttgtaaaattggacaatggctctttagagagttatctgagtgtaagtaaattaatgttctcatttagatttatctcccagtgatttctactcagcgtttccagaaatcaggtctgcaaatgactagtcagaaccttgcttaacatgagattttaacacaacaatgaaatttgccttgtcttattccactagtttattcctttaacaacaatattttatatgtgtcaaaagtctcacttgggagtagtgtttttttcttttagacattctgcagacatgcagggaagtcctttggtaactgcaatatacaagattttcctattaagcctcttggtaagaggcatttgttaaaagtgcaagcttactcctgcttctggggatgtgagcaaaattcgggcttgtgttctccctctcattttagtctgacttgactattgtttttcctttctggcgcatgaatccatacatcattcctggaagtgaggcaagactcttgcatctctacaaagtagttttgtcaatttgaattcagggaaaagttggtcacagcctgcaaatgacttcatttggaagtctgattgtttcagttgcctgacaaatactacactttacaaacaatgttaacactgtgattccttcattgttttaagaagttaacctagggccgggcatggtggctcatacctgtaatcctagcactctgggaggccgaggcaggaggatccctttagcccaggagttaaagaccagcctgggcaacatagggagaccctgtcttttttttgggcagcgtggtgggggataaataaataaaaggaaaaaaaacttagcctagaattagaattaatttaattgaattcatctaaagatgtctctggtgatttttatatgttccgctatataattgatgctttatagttttatcataatccaacaacttcagttatatttaattattgttaaggagtttaagactagaaagactagagtgctttctagtccaaatagaggtcagtgaaacagcttttgacatcagattttcatttgagagggagagctgtggtactggctaaaaagaaaggaagataacatccagtaaccacaggaatatattctctgtgaattaaaagtcttcaaagttatcatttctctgacatatgttggagtagtcatttccattctttacattgtcatgaactggattgataaccctcatctgcaatattttcacccctaaaatttttaacagggtttcctttttttctcacgactatttaagtttagattgctccattattaactgattaatgcactttgaagttctctggaattaattattttaacttggcctagcttcgactgtcaaggtggctgttataaattttgcctttccaaattttttttgggggggcccccaaaagtggcttttttggggt

SEQ ID NO: 319257 - DNA, 6333 bp, Homo sapiens
aggcgcctgcgctttagctgctaactcgctctagtagctgtggtcggggctcgggaccggctgccatcttagtctagggactgaggagtcgccgccgccccgagtcccggtaccatgcatttcacggtggccttgtggagacaacgccttaacccaaggaagtgactcaaactgtgagaacttcaggttttccaacctattggtggtatgtctgacagtggatcacaacttggttcaatgggtagcctcaccatgaaatcacagcttcagatcactgtcatctcagcaaaacttaaggaaaataagaagaattggtttggaccaagtccttacgtagaggtcacagtagatggacagtcaaagaagacagaaaaatgcaacaacacaaacagtcccaagtggaagcaaccccttacagttatcgttacccctgtgagtaaattacattttcgtgtgtggagtcaccagacactgaaatctgatgttttgttgggaactgctgcattagatatttatgaaacattaaagtcaaacaatatgaaacttgaagaagtagttgtgactttgcagcttggaggtgacaaagagccaacagagacaataggagacttgtcaatttgtcttgatgggctacagttagagtctgaagttgttaccaatggtgaaactacatgttcagaaagtgcttctcagaatgatgatggctccagatccaaggatgaaacaagagtgagcacaaatggatcagatgaccctgaagatgcaggagctggtgaaaataggagagtcagtgggaataattctccatcactctcaaatggtggttttaaaccttctagacctccaagaccttcacgaccaccaccacccaccccacgtagaccagcatctgtcaatggttcaccatctgccacttctgaaagtgatgggtctagtacaggctctctgccgccgacaaatacaaatacaaatacatctgaaggagcaacatctggattaataattcctcttactatatctggaggctcaggccctaggccattaaatcctgtaactcaagctcccttgccacctggttgggagcagagagtggaccagcacgggcgagtttactatgtagatcatgttgagaaaagaacaacatgggatagaccagaacctctacctcctggctgggaacggcgggttgacaacatgggacgtatttattatgttgaccatttcacaagaacaacaacgtggcagaggccaacactggaatccgtccggaactatgaacaatggcagctacagcgtagtcagcttcaaggagcaatgcagcagtttaaccagagattcatttatgggaatcaagatttatttgctacatcacaaagtaaagaatttgatcctcttggtccattgccacctggatgggagaagagaacagacagcaatggcagagtatatttcgtcaaccacaacacacgaattacacaatgggaagaccccagaagtcaaggtcaattaaatgaaaagcccttacctgaaggttgggaaatgagattcacagtggatggaattccatattttgtggaccacaatagaagaactaccacctatatagatccccgcacaggaaaatctgccctagacaatggacctcagatagcctatgttcgggacttcaaagcaaaggttcagtatttccggttctggtgtcagcaactggccatgccacagcacataaagattacagtgacaagaaaaacattgtttgaggattcctttcaacagataatgagcttcagtccccaagatctgcgaagacgtttgtgggtgatttttccaggagaagaaggtttagattatggaggtgtagcaagagaatggttctttcttttgtcacatgaagtgttgaacccaatgtattgcctgtttgaatatgcagggaaggataactactgcttgcagataaaccccgcttcttacatcaatccagatcacctgaaatattttcgttttattggcagatttattgccatggctctgttccatgggaaattcatagacacgggtttttctttaccattctataagcgtatcttgaacaaaccagttggactcaaggatttagaatctattgatccagaattttacaattctctcatctgggttaaggaaaacaatattgaggaatgtgatttggaaatgtacttctccgttgacaaagaaattctaggtgaaattaagagtcatgatctgaaacctaatggtggcaatattcttgtaacagaagaaaataaagaggaatacatcagaatggtagctgagtggaggttgtctcgaggtgttgaagaacagacacaagctttctttgaaggctttaatgaaattcttccccagcaatatttgcaatactttgatgcaaaggaattagaggtccttttatgtggaatgcaagagattgatttgaatgactggcaaagacatgccatctaccgtcattatgcaaggaccagcaaacaaatcatgtggttttggcagtttgttaaagaaattgataatgagaagagaatgagacttctgcagtttgttactggaacctgccgattgccagtaggaggatttgctgatctcatggttttaatcgcctggacctgccaccatacaagagctatgagcaactgaaggaaaagctgttgtttgccatagaagaaacagaaggatttggacaagagtaacttctgagaacttgcaccatgaatgggcaagaacttatttgcaatgtttgtccttctctgcctgttgcacatcttgtaaaattggacaatggctctttagagagttatctgagtgtaagtaaattaatgttctcatttagatttatctcccagtgatttctactcagcgtttccagaaatcaggtctgcaaatgactagtcagaaccttgcttaacatgagattttaacacaacaatgaaatttgccttgtcttattccactagtttattcctttaacaacaatattttatatgtgtcaaaagtctcacttgggagtagtgtttttttcttttagacattctgcagacatgcagggaagtcctttggtaactgcaatatacaagattttcctattaagcctcttggtaagaggcatttgttaaaagtgcaagcttactcctgcttctggggatgtgagcaaaattcgggcttgtgttctccctctcattttagtctgacttgactattgtttttcctttctggcgcatgaatccatacatcattcctggaagtgaggcaagactcttgcatctctacaaagtagttttgtcaatttgaattcagggaaaagttggtcacagcctgcaaatgacttcatttggaagtctgattgtttcagttgcctgacaaatactacactttacaaacaatgttaacactgtgattccttcattgttttaagaagttaacctagggccgggcatggtggctcatacctgtaatcctagcactctgggaggccgaggcaggaggatccctttagcccaggagttaaagaccagcctgggcaacatagggagaccctgtcttttttttgggcagcgtggtgggggataaataaataaaaggaaaaaaaacttagcctagaattagaattaatttaattgaattcatctaaagatgtctctggtgatttttatatgttccgctatataattgatgctttatagttttatcataatccaacaacttcagttatatttaattattgttaaggagtttaagactagaaagactagagtgctttctagtccaaatagaggtcagtgaaacagcttttgacatcagattttcatttgagagggagagctgtggtactggctaaaaagaaaggaagataacatccagtaaccacaggaatatattctctgtgaattaaaagtcttcaaagttatcatttctctgacatatgttggagtagtcatttccattctttacattgtcatgaactggattgataaccctcatctgcaatattttcacccctaaaatttttaacagggtttcctttttttctcacgactatttaagtttagattgctccattattaactgattaatgcactttgaagttctctggaattaattattttaacttggcctagcttcgactgtcaaggtggctgttataaatttgacttcattggcagtggatgaagcctaagccagctgagtctctatcatagctgaaccctgaggacagcctcatagctcatgtatcagggacttttgccacatttcagaggcatagcatgaacaagtaatattaagccaagaataagcagcagaaccctgttccatatggaaaaaagaaaaacaattttttgtccctaatgttcttccttttacatcctggaacaacaataaaaacatttttttaaacttgtctactgtaagatactgccatcataaagcagagacttacatgagtgaaagggttgcctcatcaagcagctcagtgtaaatggggaggctaggctctccccagccctatggtttttttatttcatgtaccccaggaaatactgtgtggtttctaaaagccctggttgttaaaagtagggactctgcctttttgttggtagggagaaaaaacgctattgctttgtcttacagagcgaatgtctgccaactacccgttcattatataagtctgaacttggtaatatatggctaatgaagattaagccctctataaagacttcctgttgaggtgaattctcatactgaaatgtagttacctacaatatttactagagatttatgaaattaaattaagagataatgtaagaaaatacatttttttggttctatataatgcttcatgattcatttagggacctagaaatattgtgtgaaaatatataaatatcacccaaaaggctttctgccctatatttttaaaatacagaatagttatatttgaagtagccctggccctagttctatagggcttggctatttaatatttttatggaagaagtgtttagttctggaaaaggtaaatgcttgtatatatttttgcagcctgggatctccctactccattttttcctttaatttaagtggccacatgtatatgtcttccctgctgtgttaggaaaatgggggctggatatcccaagaatcagaggttatataaaaatactgcaaatagaccgcagacataaatatctaccaaatgctatcttaaattttggtccaaactgaacatatggaaatagatttattgtaagtatttacttagagctttttcttaaatctgaactaacttgcttttagaagtctttttctttgtaagcattgtaaatgctaataaatcctgttaatttttttttttttttttttttttttttactgcatgttacattgaaataaaaacaaagtaaaatgagcaattgccttattgttctgctcttttgcagggggtgggggttggggaagacagcattccacagcctggtcaggagggaaggacctcacttgtttcatcaaatggagtggtttaaaactgatcaagcagctcataataatgaattcctgctctgtcttttattatcttatgtcagagtgcagcaaaatctcatttcataagacttacaataactctatttaaaattcaggtattgtactcgggaggctgaggtgggaggatcccaggagttcaaatcctgcctgggcaacatagcaagaccctgtctcttaaaaaaacaaaaagacatattcaggtactgatttttcatcaagagattgacataccaatgatcagaaattttagtgaaacttgactcaactatacacaaagttctcatcctaaatgaactatttcagtcaagcccactctaccactttttacttatctggttaataatccgaaatgttaccggggttgactcacggaattaaatttttcctctatttttatatcctttcctgttgtggatgtaacttacctttctaaactcctttagagttaacgacttctatttagtattgttggtatctccagcccccctcctttttttgtttttcttttagttatttactttgtttgtataatttgctttcattaactaaaaatggaattggcagcactggattgtatattactgtattaagagtacctttgttttcttgatctgttacttttaatactcaggtaatgctacaaatattacagggagtcaaatgcttttataaagttccttcagtggttgcctcacttgcgttttcctacaagatgtaagactgtttataattaaacttttttggtccttcaaaaaaatgctt

SEQ ID NO: 319258 - DNA, 4686 bp, Homo sapiens
  misc_feature (46)..(46): n is a, c, g, or t
tcccttgtaatccaagcagtcgaagaaaaacattgtttgaggattnctttcaacagataatgagcttcagtccccaagatctgcgaagacgtttgtgggtgatttttccaggagaagaaggtttagattatggaggtgtagcaagagaatggttctttcttttgtcacatgaagtgttgaacccaatgtattgcctgtttgaatatgcagggaaggataactactgcttgcagataaaccccgcttcttacatcaatccagatcacctgaaatattttcgttttattggcagatttattgccatggctctgttccatgggaaattcatagacacgggtttttctttaccattctataagcgtatcttgaacaaaccagttggactcaaggatttagaatctattgatccagaattttacaattctctcatctgggttaaggaaaacaatattgaggaatgtgatttggaaatgtacttctccgttgacaaagaaattctaggtgaaattaagagtcatgatctgaaacctaatggtggcaatattcttgtaacagaagaaaataaagaggaatacatcagaatggtagctgagtggaggttgtctcgaggtgttgaagaacagacacaagctttctttgaaggctttaatgaaattcttccccagcaatatttgcaatactttgatgcaaaggaattagaggtccttttatgtggaatgcaagagattgatttgaatgactggcaaagacatgccatctaccgtcattatgcaaggaccagcaaacaaatcatgtggttttggcagtttgttaaagaaattgataatgagaagagaatgagacttctgcagtttgttactggaacctgccgattgccagtaggaggatttgctgatctcatggggagcaatggaccacagaaattctgcattgaaaaagttgggaaagaaaattggctacccagaagtcatacctgttttaatcgcctggacctgccaccatacaagagctatgagcaactgaaggaaaagctgttgtttgccatagaagaaacagaaggatttggacaagagtaacttctgagaacttgcaccatgaatgggcaagaacttatttgcaatgtttgtccttctctgcctgttgcacatcttgtaaaattggacaatggctctttagagagttatctgagtgtaagtaaattaatgttctcatttagatttatctcccagtgatttctactcagcgtttccagaaatcaggtctgcaaatgactagtcagaaccttgcttaacatgagattttaacacaacaatgaaatttgccttgtcttattccactagtttattcctttaacaacaatattttatatgtgtcaaaagtctcacttgggagtagtgtttttttcttttagacattctgcagacatgcagggaagtcctttggtaactgcaatatacaagattttcctattaagcctcttggtaagaggcatttgttaaaagtgcaagcttactcctgcttctggggatgtgagcaaaattcgggcttgtgttctccctctcattttagtctgacttgactattgtttttcctttctggcgcatgaatccatacatcattcctggaagtgaggcaagactcttgcatctctacaaagtagttttgtcaatttgaattcagggaaaagttggtcacagcctgcaaatgacttcatttggaagtctgattgtttcagttgcctgacaaatactacactttacaaacaatgttaacactgtgattccttcattgttttaagaagttaacctagggccgggcatggtggctcatacctgtaatcctagcactctgggaggccgaggcaggaggatccctttagcccaggagttaaagaccagcctgggcaacatagggagaccctgtcttttttttgggcagcgtggtgggggataaataaataaaaggaaaaaaaacttagcctagaattagaattaatttaattgaattcatctaaagatgtctctggtgatttttatatgttccgctatataattgatgctttatagttttatcataatccaacaacttcagttatatttaattattgttaaggagtttaagactagaaagactagagtgctttctagtccaaatagaggtcagtgaaacagcttttgacatcagattttcatttgagagggagagctgtggtactggctaaaaagaaaggaagataacatccagtaaccacaggaatatattctctgtgaattaaaagtcttcaaagttatcatttctctgacatatgttggagtagtcatttccattctttacattgtcatgaactggattgataaccctcatctgcaatattttcacccctaaaatttttaacagggtttcctttttttctcacgactatttaagtttagattgctccattattaactgattaatgcactttgaagttctctggaattaattattttaacttggcctagcttcgactgtcaaggtggctgttataaatttgacttcattggcagtggatgaagcctaagccagctgagtctctatcatagctgaaccctgaggacagcctcatagctcatgtatcagggacttttgccacatttcagaggcatagcatgaacaagtaatattaagccaagaataagcagcagaaccctgttccatatggaaaaaagaaaaacaattttttgtccctaatgttcttccttttacatcctggaacaacaataaaaacatttttttaaacttgtctactgtaagatactgccatcataaagcagagacttacatgagtgaaagggttgcctcatcaagcagctcagtgtaaatggggaggctaggctctccccagccctatggtttttttatttcatgtaccccaggaaatactgtgtggtttctaaaagccctggttgttaaaagtagggactctgcctttttgttggtagggagaaaaaacgctattgctttgtcttacagagcgaatgtctgccaactacccgttcattatataagtctgaacttggtaatatatggctaatgaagattaagccctctataaagacttcctgttgaggtgaattctcatactgaaatgtagttacctacaatatttactagagatttatgaaattaaattaagagataatgtaagaaaatacatttttttggttctatataatgcttcatgattcatttagggacctagaaatattgtgtgaaaatatataaatatcacccaaaaggctttctgccctatatttttaaaatacagaatagttatatttgaagtagccctggccctagttctatagggcttggctatttaatatttttatggaagaagtgtttagttctggaaaaggtaaatgcttgtatatatttttgcagcctgggatctccctactccattttttcctttaatttaagtggccacatgtatatgtcttccctgctgtgttaggaaaatgggggctggatatcccaagaatcagaggttatataaaaatactgcaaatagaccgcagacataaatatctaccaaatgctatcttaaattttggtccaaactgaacatatggaaatagatttattgtaagtatttacttagagctttttcttaaatctgaactaacttgcttttagaagtctttttctttgtaagcattgtaaatgctaataaatcctgttaatttttttttttttttttttttttttttactgcatgttacattgaaataaaaacaaagtaaaatgagcaattgccttattgttctgctcttttgcagggggtgggggttggggaagacagcattccacagcctggtcaggagggaaggacctcacttgtttcatcaaatggagtggtttaaaactgatcaagcagctcataataatgaattcctgctctgtcttttattatcttatgtcagagtgcagcaaaatctcatttcataagacttacaataactctatttaaaattcaggtattgtactcgggaggctgaggtgggaggatcccaggagttcaaatcctgcctgggcaacatagcaagaccctgtctcttaaaaaaacaaaaagacatattcaggtactgatttttcatcaagagattgacataccaatgatcagaaattttagtgaaacttgactcaactatacacaaagttctcatcctaaatgaactatttcagtcaagcccactctaccactttttacttatctggttaataatccgaaatgttaccggggttgactcacggaattaaatttttcctctatttttatatcctttcctgttgtggatgtaacttacctttctaaactcctttagagttaacgacttctatttagtattgttggtatctccagcccccctcctttttttgtttttcttttagttatttactttgtttgtataatttgctttcattaactaaaaatggaattggcagcactggattgtatattactgtattaagagtacctttgttttcttgatctgttacttttaatactcaggtaatgctacaaatattacagggagtcaaatgcttttataaagttccttcagtggttgcctcacttgcgttttcctacaagatgtaagactgtttataattaaacttttttggtccttcaaaaaaatgctt

SEQ ID NO: 319259 - DNA, 4201 bp, Homo sapiens
aagttttttataattttttaaaatttatttttatactcagaatttaaagataagatctaaacttcctgataggttttttcatatttgtttgccagaatggtagctgagtggaggttgtctcgaggtgttgaagaacagacacaagctttctttgaaggctttaatgaaattcttccccagcaatatttgcaatactttgatgcaaaggaattagaggtccttttatgtggaatgcaagagattgatttgaatgactggcaaagacatgccatctaccgtcattatgcaaggaccagcaaacaaatcatgtggttttggcagtttgttaaagaaattgataatgagaagagaatgagacttctgcagtttgttactggaacctgccgattgccagtaggaggatttgctgatctcatggggagcaatggaccacagaaattctgcattgaaaaagttgggaaagaaaattggctacccagaagtcatacctgttttaatcgcctggacctgccaccatacaagagctatgagcaactgaaggaaaagctgttgtttgccatagaagaaacagaaggatttggacaagagtaacttctgagaacttgcaccatgaatgggcaagaacttatttgcaatgtttgtccttctctgcctgttgcacatcttgtaaaattggacaatggctctttagagagttatctgagtgtaagtaaattaatgttctcatttagatttatctcccagtgatttctactcagcgtttccagaaatcaggtctgcaaatgactagtcagaaccttgcttaacatgagattttaacacaacaatgaaatttgccttgtcttattccactagtttattcctttaacaacaatattttatatgtgtcaaaagtctcacttgggagtagtgtttttttcttttagacattctgcagacatgcagggaagtcctttggtaactgcaatatacaagattttcctattaagcctcttggtaagaggcatttgttaaaagtgcaagcttactcctgcttctggggatgtgagcaaaattcgggcttgtgttctccctctcattttagtctgacttgactattgtttttcctttctggcgcatgaatccatacatcattcctggaagtgaggcaagactcttgcatctctacaaagtagttttgtcaatttgaattcagggaaaagttggtcacagcctgcaaatgacttcatttggaagtctgattgtttcagttgcctgacaaatactacactttacaaacaatgttaacactgtgattccttcattgttttaagaagttaacctagggccgggcatggtggctcatacctgtaatcctagcactctgggaggccgaggcaggaggatccctttagcccaggagttaaagaccagcctgggcaacatagggagaccctgtcttttttttgggcagcgtggtgggggataaataaataaaaggaaaaaaaacttagcctagaattagaattaatttaattgaattcatctaaagatgtctctggtgatttttatatgttccgctatataattgatgctttatagttttatcataatccaacaacttcagttatatttaattattgttaaggagtttaagactagaaagactagagtgctttctagtccaaatagaggtcagtgaaacagcttttgacatcagattttcatttgagagggagagctgtggtactggctaaaaagaaaggaagataacatccagtaaccacaggaatatattctctgtgaattaaaagtcttcaaagttatcatttctctgacatatgttggagtagtcatttccattctttacattgtcatgaactggattgataaccctcatctgcaatattttcacccctaaaatttttaacagggtttcctttttttctcacgactatttaagtttagattgctccattattaactgattaatgcactttgaagttctctggaattaattattttaacttggcctagcttcgactgtcaaggtggctgttataaatttgacttcattggcagtggatgaagcctaagccagctgagtctctatcatagctgaaccctgaggacagcctcatagctcatgtatcagggacttttgccacatttcagaggcatagcatgaacaagtaatattaagccaagaataagcagcagaaccctgttccatatggaaaaaagaaaaacaattttttgtccctaatgttcttccttttacatcctggaacaacaataaaaacatttttttaaacttgtctactgtaagatactgccatcataaagcagagacttacatgagtgaaagggttgcctcatcaagcagctcagtgtaaatggggaggctaggctctccccagccctatggtttttttatttcatgtaccccaggaaatactgtgtggtttctaaaagccctggttgttaaaagtagggactctgcctttttgttggtagggagaaaaaacgctattgctttgtcttacagagcgaatgtctgccaactacccgttcattatataagtctgaacttggtaatatatggctaatgaagattaagccctctataaagacttcctgttgaggtgaattctcatactgaaatgtagttacctacaatatttactagagatttatgaaattaaattaagagataatgtaagaaaatacatttttttggttctatataatgcttcatgattcatttagggacctagaaatattgtgtgaaaatatataaatatcacccaaaaggctttctgccctatatttttaaaatacagaatagttatatttgaagtagccctggccctagttctatagggcttggctatttaatatttttatggaagaagtgtttagttctggaaaaggtaaatgcttgtatatatttttgcagcctgggatctccctactccattttttcctttaatttaagtggccacatgtatatgtcttccctgctgtgttaggaaaatgggggctggatatcccaagaatcagaggttatataaaaatactgcaaatagaccgcagacataaatatctaccaaatgctatcttaaattttggtccaaactgaacatatggaaatagatttattgtaagtatttacttagagctttttcttaaatctgaactaacttgcttttagaagtctttttctttgtaagcattgtaaatgctaataaatcctgttaatttttttttttttttttttttttttttactgcatgttacattgaaataaaaacaaagtaaaatgagcaattgccttattgttctgctcttttgcagggggtgggggttggggaagacagcattccacagcctggtcaggagggaaggacctcacttgtttcatcaaatggagtggtttaaaactgatcaagcagctcataataatgaattcctgctctgtcttttattatcttatgtcagagtgcagcaaaatctcatttcataagacttacaataactctatttaaaattcaggtattgtactcgggaggctgaggtgggaggatcccaggagttcaaatcctgcctgggcaacatagcaagaccctgtctcttaaaaaaacaaaaagacatattcaggtactgatttttcatcaagagattgacataccaatgatcagaaattttagtgaaacttgactcaactatacacaaagttctcatcctaaatgaactatttcagtcaagcccactctaccactttttacttatctggttaataatccgaaatgttaccggggttgactcacggaattaaatttttcctctatttttatatcctttcctgttgtggatgtaacttacctttctaaactcctttagagttaacgacttctatttagtattgttggtatctccagcccccctcctttttttgtttttcttttagttatttactttgtttgtataatttgctttcattaactaaaaatggaattggcagcactggattgtatattactgtattaagagtacctttgttttcttgatctgttacttttaatactcaggtaatgctacaaatattacagggagtcaaatgcttttataaagttccttcagtggttgcctcacttgcgttttcctacaagatgtaagactgtttataattaaacttttttggtccttcaaaaaaatgctt

SEQ ID NO: 319260 - DNA, 2833 bp, Homo sapiens
aggcgcctgcgctttagctgctaactcgctctagtagctgtggtcggggctcgggaccggctgccatcttagtctagggactgaggagtcgccgccgccccgagtcccggtaccatgcatttcacggtggccttgtggagacaacgccttaacccaaggaagtgactcaaactgtgagaacttcaggttttccaacctattggtggtatgtctgacagtggatcacaacttggttcaatgggtagcctcaccatgaaatcacagcttcagatcactgtcatctcagcaaaacttaaggaaaataagaagaattggtttggaccaagtccttacgtagaggtcacagtagatggacagtcaaagaagacagaaaaatgcaacaacacaaacagtcccaagtggaagcaaccccttacagttatcgttacccctgtgagtaaattacattttcgtgtgtggagtcaccagacactgaaatctgatgttttgttgggaactgctgcattagatatttatgaaacattaaagtcaaacaatatgaaacttgaagaagtagttgtgactttgcagcttggaggtgacaaagagccaacagagacaataggagacttgtcaatttgtcttgatgggctacagttagagtctgaagttgttaccaatggtgaaactacatgttcagaaagtgcttctcagaatgatgatggctccagatccaaggatgaaacaagagtgagcacaaatggatcagatgaccctgaagatgcaggagctggtgaaaataggagagtcagtgggaataattctccatcactctcaaatggtggttttaaaccttctagacctccaagaccttcacgaccaccaccacccaccccacgtagaccagcatctgtcaatggttcaccatctgccacttctgaaagtgatgggtctagtacaggctctctgccgccgacaaatacaaatacaaatacatctgaaggagcaacatctggattaataattcctcttactatatctggaggctcaggccctaggccattaaatcctgtaactcaagctcccttgccacctggttgggagcagagagtggaccagcacgggcgagtttactatgtagatcatgttgagaaaagaacaacatgggatagaccagaacctctacctcctggctgggaacggcgggttgacaacatgggacgtatttattatgttgaccatttcacaagaacaacaacgtggcagaggccaacactggaatccgtccggaactatgaacaatggcagctacagcgtagtcagcttcaaggagcaatgcagcagtttaaccagagattcatttatgggaatcaagatttatttgctacatcacaaagtaaagaatttgatcctcttggtccattgccacctggatgggagaagagaacagacagcaatggcagagtatatttcgtcaaccacaacacacgaattacacaatgggaagaccccagaagtcaaggtcaattaaatgaaaagcccttacctgaaggttgggaaatgagattcacagtggatggaattccatattttgtggaccacaatagaagaactaccacctatatagatccccgcacaggaaaatctgccctagacaatggacctcagatagcctatgttcgggacttcaaagcaaaggttcagtatttccggttctggtgtcagcaactggccatgccacagcacataaagattacagtgacaagaaaaacattgtttgaggattcctttcaacagataatgagcttcagtccccaagatctgcgaagacgtttgtgggtgatttttccaggagaagaaggtttagattatggaggtgtagcaagagaatggttctttcttttgtcacatgaagtgttgaacccaatgtattgcctgtttgaatatgcagggaaggataactactgcttgcagataaaccccgcttcttacatcaatccagatcacctgaaatattttcgttttattggcagatttattgccatggctctgttccatgggaaattcatagacacgggtttttctttaccattctataagcgtatcttgaacaaaccagttggactcaaggatttagaatctattgatccagaattttacaattctctcatctgggttaaggaaaacaatattgaggaatgtgatttggaaatgtacttctccgttgacaaagaaattctaggtgaaattaagagtcatgatctgaaacctaatggtggcaatattcttgtaacagaagaaaataaagaggaatacatcaggtgagagtgctccttttcacatttcactttttgtttgactacagcacattgataattgcttactaatactaatggagagtatctccaaaaatagtatttgtctctgtactaatcaatatcctatgtaggcagtcatttttcatttctaaaaagtttttttttaagtgtttttaaaagagttttaaggataaaagtcatgcaggatcactcttttaaacatcaactctgtaatcactatgctgtataacatgtcattaaaaagaatctcaaatatatatgcagatattttcatggggaatattgtaaggtgtattaatccactttcctgctgctgataaagacatatccaagactgggcaatttataaaaaaaagaggtttaatggacttacagttccacgagggtggggaggcctcaccctcatggtggaaggcaaggaggggcaagtcacatcttacatggatggcagcaggcaaagagagagcttgtacagggaaaactcctgtttttaaaacctcatcatcggccaggca

SEQ ID NO: 319261 - DNA, 1911 bp, Homo sapiens
  misc_feature (1866)..(1866): n is a, c, g, or t
  misc_feature (1871)..(1871): n is a, c, g, or t
  misc_feature (1874)..(1874): n is a, c, g, or t
  misc_feature (1886)..(1886): n is a, c, g, or t
  misc_feature (1902)..(1902): n is a, c, g, or t
aggcgcctgcgctttagctgctaactcgctctagtagctgtggtcggggctcgggaccggctgccatcttagtctagggactgaggagtcgccgccgccccgagtcccggtaccatgcatttcacggtggccttgtggagacaacgccttaacccaaggaagtgactcaaactgtgagaacttcaggttttccaacctattggtggtatgtctgacagtggatcacaacttggttcaatgggtagcctcaccatgaaatcacagcttcagatcactgtcatctcagcaaaacttaaggaaaataagaagaattggtttggaccaagtccttacgtagaggtcacagtagatggacagtcaaagaagacagaaaaatgcaacaacacaaacagtcccaagtggaagcaaccccttacagttatcgttacccctgtgagtaaattacattttcgtgtgtggagtcaccagacactgaaatctgatgttttgttgggaactgctgcattagatatttatgaaacattaaagtcaaacaatatgaaacttgaagaagtagttgtgactttgcagcttggaggtgacaaagagccaacagagacaataggagacttgtcaatttgtcttgatgggctacagttagagtctgaagttgttaccaatggtgaaactacatgttcagaaagtgcttctcagaatgatgatggctccagatccaaggatgaaacaagagtgagcacaaatggatcagatgaccctgaagatgcaggagctggtgaaaataggagagtcagtgggaataattctccatcactctcaaatggtggttttaaaccttctagacctccaagaccttcacgaccaccaccacccaccccacgtagaccagcatctgtcaatggttcaccatctgccacttctgaaagtgatgggtctagtacaggctctctgccgccgacaaatacaaatacaaatacatctgaaggagcaacatctggattaataattcctcttactatatctggaggctcaggccctaggccattaaatcctgtaactcaagctcccttgccacctggttgggagcagagagtggaccagcacgggcgagtttactatgtagatcatgttgagaaaagaacaacatgggatagaccagaacctctacctcctggctgggaacggcgggttgacaacatgggacgtatttattatgttgaccatttcacaagaacaacaacgtggcagaggccaacactggaatccgtccggaactatgaacaatggcagctacagcgtagtcagcttcaaggagcaatgcagcagtttaaccagagattcatttatgggaatcaagatttatttgctacatcacaaagtaaagaatttgatcctcttggtccattgccacctggatgggagaagagaacagacagcaatggcagagtatatttcgtcaaccacaacacacgaattacacaatgggaagaccccagaagtcaaggtcaattaaatgaaaagcccttacctgaaggttgggaaatgagattcacagtggatggaattccatattttgtggaccacaatagaagaactaccacctatatagatccccgcacaggaaaatctgccctagacaatggacctcagatagcctatgttcgggacttcaaagcaaaggttcagtatttccggttctggtgtcagcaactggccatgccacagcacataaagattacagtgacaagaaaaacattgtttgaggattcctttcaacagataatgagcttcagtccccaagatctgcgaagacgtttgtgggtgatttttccaggagaagaaggtttagattatggaggtgtagcaagnatganaanggttctctcggntgtcacatgatagctnagtgtaacc

SEQ ID NO: 319262 - DNA, 644 bp, Homo sapiens
ggaaaggcaggatcctggtttcaaaatctcagaagtgttcctggactctgtgcttcctcccccacctctgaagctgctgggtctcctcccatcggggcaggcccactggggctccgcgagtcatcttagtggaagccctgggctcctaagctttcttcttcccaagtgtgtcccagcttcagcgctgattcttccctactgcctggtgtctgagcctctgtcttgacaggctgcctcggctcctgcccatcctgctttcatccccaggactgagctctgattgctggtgtccaacccacagagaggctgtgccacagctcgcccggtgctatgttggggctgaattgtgccttccccctgccaaccccccaaccccatttacatgttgtagtcctaacccctgcccagtacctcagaatgtgactggatctggagatagggtcgttaaagagctatttcagatatagtgaggtcatcagggtgagccctgatccaatctgactggtgtccttataagaagaggagatgaggacacccacagaggccctgtgaggacacagggagaagatgccatccacaagccaaggagagaggctcagaggaaacttgatcttggacttccagcctccagaatcttgagaaaa

SEQ ID NO: 319263 - DNA, 1326 bp, Homo sapiens
tattgtgctggtaaaaatgtttcatgggacagtgaattctgaatttcagtttagggtaccagaaatatatctgttcctgttatggtagtaatgagggatcccctttcttaaacctgcaaaaaagtagaacattttggttgggcgtggtggctcacacctgtaatcccagcactttgggaagccgaggcaggcggatcacctggggtcaggagtttgagaccagcctggccaacatggtgaaaccccgtctctactaaaaatacaaaaatagccaggcatgttggtgcacacctgtattcccagctacttaggaggctgaagcaggagaatcgcttgaacccgggaggtagaagttgcagtgagccgaattgagccactgcactctagcctgggtgacagagcgagactctgtctcaaaaaaaaaaaaaaaaattaaaaagagagggagaacattctaaacaactgatggaggttcttgtggccaggcaagtttcagtagagctgaggtagatggagttgcttgggaataaggaccatagagactaaaagaaaggtctaaggagcatattttgcagaggcccaagtccataataaactggaataacccttctttgccccaggttatttccatttccagatccggcactctagatactccttttattttctgggcctctaggatttatctcctgctttctttttcaatgctgtcacctattatttctgactaaggtttttctctttataaatccactctgagatggaattcttttttccctaaatcccttttgaaatatttctaacagatgacactaaatatgggaaagcatattgggaccaaaaatataccattctttgttcttctttcttcctttaaaaagttagttgccatgtttaaaaagaaaagtggacatgtgctcttctcctttctggtcctatcccttcctccccatcatatcctactgtagactggctctggggcagataaaaatcaaggaaagcaaggggaagtgaatttttgtagtattgggtgggctttcaagtataagggccttatatatgaaagttaagttagggtctactatgtatatgtgttcagtttttaaaattttagttaatttttttaaaaatttaggtttatgtctgggaaagaaataaagaagaagaagcatttgtttgggttgcgaattcgtgttcctcctgtgccaccaaatgtggctttcaaagcagagaaagaaccagagagagaagacagcacctacattggaggacagcaagaatattgctggagtgtggcgtgcagaaggggatgtgtgaaggagaatt

SEQ ID NO: 319264 - DNA, 604 bp, Homo sapiens
aacttttatagtaaatattaaaataattctaatgtattatttccctaggttaaagaatttttgaaaaatttaataactaataatacagtcccatttttgtggtgttttacagtttgtagttccttcataaacatatcgttggattaatgtaatgaacaagtaactagtgtaggatttaaacttcattttttataagtgagaaaataagccttgagaggttaaatggccctaggtcacataatagtcagtgaggacttggaattagaacttagatcttctgactaccaatcagttcacttttcctctgcatcacattgcctctatctagcacctgtatattactaattgatgaaattgtagtgcgttaaattgtttcttgatacttcacagctggcagacacaccaaaatctgaaagatatgagcatgttctggaggcattaaatgattacaagaccatgtaagttgatttattttatgtatccctatgagggagacatttagtaagtataaggaataatggcattgtttaagaattgtgggattgatgtacagaagaagtctataccattttaaactttataatgtcctattctattttagtta

SEQ ID NO: 319265 - DNA, 650 bp, Homo sapiens
aacttttatagtaaatattaaaataattctaatgtattatttccctaggttaaagaatttttgaaaaatttaataactaataatacagtcccatttttgtggtgttttacagtttgtagttccttcataaacatatcgttggattaatgtaatgaacaagtaactagtgtaggatttaaacttcattttttataagtgagaaaataagccttgagaggttaaatggccctaggtcacataatagtcagtgaggacttggaattagaacttagatcttctgactaccaatcagttcacttttcctctgcatcacattgcctctatctagcacctgtatattactaattgatgaaattgtagtgcgttaaattgtttcttgatacttcacagctggcagacacaccaaaatctgaaagatatgagcatgttctggaggcattaaatgattacaagaccatgtttatgtctgggaaagaaataaagaagaagaagcatttgtttgggttgcgaattcgtgttcctcctgtgccaccaaatgtggctttcaaagcagagaaagaacctgaaggaacatctcatgaatttaaaattaaaggcagaaaggcatccaaacctatatctgattcaagggaagtaagcaatggcatagt

SEQ ID NO: 319266 - DNA, 3847 bp, Homo sapiens
gcaccgacggagtccgcgggaaaccaaaatggcgaggggctgtattgaagtgggctgtgtttgaggccggtgtaagaacgctcattctacccccaacccttgtctccaaggacctcggtttgtgcgtgcatatgtgccgggtacccggtggggcgggtgcccagtaagtgctcggactcgcaggggaagcgcccacggggacggattggttgttttttcctgtatgaagcggttggcaccactgaagtgaccgaatgagagactctacaggggcaggtaattcactggtccacaagcggtctcctttacgtcgaaaccaaaagaccccaacatccttgaccaagctgtctttacaggatggacataaagccaaaaagccagcatgtaaatttgaagagggtcaggatgtcctagctagatggtcagatggcttgttttatcttggcactatcaaaaagataaacatattgaaacagagctgcttcatcatatttgaagacagttctaaatcctgggttctctggaaggacattcaaacaggagccactggaagtggggaaatggtctgtacaatatgtcaagaagagtattcagaagctcccaatgaaatggttatatgtgacaagtgtggccaaggatatcatcagttgtgtcacacacctcatattgattccagtgtgattgattcagatgaaaaatggctctgtcggcagtgtgtttttgcaacaacaacaaagaggggtggtgcacttaagaaaggaccaaatgccaaagcattgcaagtcatgaagcagacattaccctatagtgtggcagaccttgaatgggatgcaggtcataaaaccaatgtccagcagtgttactgctattgtggaggccctggagactggtatttgaagatgctacagtgctgcaaatgtaagcagtggtttcatgaggcttgtgtgcaatgccttcaaaagccaatgctatttggagacagattttatacgtttatatgctctgtctgcagttctggaccagaatacctcaaacgtctaccattacagtgggtagatatagcacacctatgcctttacaacctaagtgttattcataagaagaaatactttgattctgaacttgagcttatgacatacattaatgaaaactgggatagattgcaccctggagagggaagtaagcaatggcatagaaaaaaaaggaaagaaaaaatctgtaggtcgtccacctggcccatatacaagaaaaatgattcaaaaaactgctgagccacttttggataaggaatcaatttcagagaatcctactttggatttaccttgttctatagggagaactgagggaactgcacattcatccaatacctcagatgtggatttcacgggtgcttccagtgcaaaagaaactacctcgtctagcatttccaggcattatggattatctgactccagaaaaagaacgcgtacaggaagatcttggcctgctgcaataccacatttgcggagaagaagaggtcgtcttccaagaagagcactccagactcagaactcagaaattgtaaaagatgatgaaggcaaagaagattatcagtttgatgaactcaacacagagattctgaataacttagcagatcaggagttacaactcaatcatctaaagaactccattaccagttattttggtgctgcaggtagaatagcatgtggcgaaaaataccgagttttggcacgtcgggtgacacttgatggaaaggtgcagtatcttgtggaatgggaaggagcaactgcatcctgactgtaggactgaacattatgttcactgcactctgattttctgtaggtacagttcaaagccctaaaggagtctggcttttactatctttcttaaaaaaaaaaaaaagtcaaaaaaattcaaaaaaggggatgatactagccttaacatgtacctgtcaatgttatggatattgtcataaaaaggtatcttttaaaaatcagaacagagacttaattttttaaatcttaagatttgtagaatgtttctaggataggatattaaaaatgattgaaacccatgcatggtgttagacaatttttctaattattccattgagtcagttttttgtgattagtgattatcagagcaaacatcatgtagatagcacaagtatttggagaaacgttgtttgttttgttaccaaaatgttggaaaaatttatttcaataccttttagatttcataaagtgcagtgtatataatgcctactgaaagactgtaaaatattgaaattttctttcaagcaaagtgtaaaaaaatatattgagcctgtaaattgctctgtgactagacttcattgtcgtcttaatatattcttgcatgtgcatatatatacacacatgtgtatatatatgtgtgtgattatgtgacctatgcaatacaaattatgggaatgggcagctttggagtatatatcccataattcttttttcaggaatagttgcagtatttacacagcagcatttcttctcaggcttttattgggtgctgttgcttgctatgtatgaagagaaatgtgtcagacaagtttagtgtgttctgaagaagggtgtgaacaacagtgttcatgggcttttagaatgcttttcacttttagtccttgtaactcagctgttcagtacctaaaacaaattcaaataatatgaacattatctcctactagaagtaacgttttcaagttttcatggcacattatgattgtaaatgtctctcatttttaacagtaagtctataggagtcccgtgaagattcctgaaatgtctgtagtaactgttagtcatgtttgaataagtgtagtatgaacaaagtattttattgcacagggttaacaaacagtatgttgccagctgaggctactgctgttttattacaacattacctcttgtttttataaagtgtaccaagatttaaattgataactttattttacttgtaaaaaaaaagtttcttttatcaccagtgttacagttgtcttctgtttcttttgtttgttttatttgttttcctttttagccaaagagtgaacagaagattttcttattttggtggctattcattttacttttaaaagtgattggtggattttagactaattatgggggaatttgccaccaaaataaaaaatatgtaaagtgtagtgattacagagtggttaaaatgtgggttagtacttatttattccattaattgattatttgactgtttataaagaaagttgctttatttctttaaacatcttcaaaagatgatcctttcttgtcacattatagccaaaagaagcagagaacttcattgtctgcatttggttcctggttggccaggtataaatgagctttacaaaagtgcaaattaaaaactgttacttctgtttacctccaccaaaacttgattttcccctagctattaatttaaggttgcctttcctgcagctgcaatattttgaataacacacagagtttgtgttgatttttgaatgtttgtttatatctaggggtaatgaaaaatgtaaatcccgtgtatccttattcactccacctgtatcatattatttcattttccccaaagtcctttaattctaactgaacaccagcagtatttttagaaatttttctttaacatacttggaagatgatttatccagctgaactgtctttagacgtaattattgtgaatgtctgttttattttctcatggtggttcacatggctctgatgttcagtttgtatttttggaattgctttacttagaaattaaaacagaccaacattaaatgtgtgtatttttaaagagc

SEQ ID NO: 319267 - DNA, 3978 bp, Homo sapiens
tattgtgctggtaaaaatgtttcatgggacagtgaattctgaatttcagtttagggtaccagaaatatatctgttcctgttatggtagtaatgagggatcccctttcttaaacctgcaaaaaagtagaacattttggttgggcgtggtggctcacacctgtaatcccagcactttgggaagccgaggcaggcggatcacctggggtcaggagtttgagaccagcctggccaacatggtgaaaccccgtctctactaaaaatacaaaaatagccaggcatgttggtgcacacctgtattcccagctacttaggaggctgaagcaggagaatcgcttgaacccgggaggtagaagttgcagtgagccgaattgagccactgcactctagcctgggtgacagagcgagactctgtctcaaaaaaaaaaaaaaaaattaaaaagagagggagaacattctaaacaactgatggaggttcttgtggccaggcaagtttcagtagagctgaggtagatggagttgcttgggaataaggaccatagagactaaaagaaaggtctaaggagcatattttgcagaggcccaagtccataataaactggaataacccttctttgccccaggttatttccatttccagatccggcactctagatactccttttattttctgggcctctaggatttatctcctgctttctttttcaatgctgtcacctattatttctgactaaggtttttctctttataaatccactctgagatggaattcttttttccctaaatcccttttgaaatatttctaacagatgacactaaatatgggaaagcatattgggaccaaaaatataccattctttgttcttctttcttcctttaaaaagttagttgccatgtttaaaaagaaaagtggacatgtgctcttctcctttctggtcctatcccttcctccccatcatatcctactgtagactggctctggggcagataaaaatcaaggaaagcaaggggaagtgaatttttgtagtattgggtgggctttcaagtataagggccttatatatgaaagttaagttagggtctactatgtatatgtgttcagtttttaaaattttagttaatttttttaaaaatttaggtttatgtctgggaaagaaataaagaagaagaagcatttgtttgggttgcgaattcgtgttcctcctgtgccaccaaatgtggctttcaaagcagagaaagaacctgaaggaacatctcatgaatttaaaattaaaggcagaaaggcatccaaacctatatctgattcaagggaagtaagcaatggcatagaaaaaaaaggaaagaaaaaatctgtaggtcgtccacctggcccatatacaagaaaaatgattcaaaaaactgctgagccacttttggataaggaatcaatttcagagaatcctactttggatttaccttgttctatagggagaactgagggaactgcacattcatccaatacctcagatgtggatttcacgggtgcttccagtgcaaaagaaactacctcgtctagcatttccaggcattatggattatctgactccagaaaaagaacgcgtacaggaagatcttggcctgctgcaataccacatttgcggagaagaagaggtcgtcttccaagaagagcactccagactcagaactcagaaattgtaaaagatgatgaaggcaaagaagattatcagtttgatgaactcaacacagagattctgaataacttagcagatcaggagttacaactcaatcatctaaagaactccattaccagttattttggtgctgcaggtagaatagcatgtggcgaaaaataccgagttttggcacgtcgggtgacacttgatggaaaggtgcagtatcttgtggaatgggaaggagcaactgcatcctgactgtaggactgaacattatgttcactgcactctgattttctgtaggtacagttcaaagccctaaaggagtctggcttttactatctttcttaaaaaaaaaaaaaagtcaaaaaaattcaaaaaaggggatgatactagccttaacatgtacctgtcaatgttatggatattgtcataaaaaggtatcttttaaaaatcagaacagagacttaattttttaaatcttaagatttgtagaatgtttctaggataggatattaaaaatgattgaaacccatgcatggtgttagacaatttttctaattattccattgagtcagttttttgtgattagtgattatcagagcaaacatcatgtagatagcacaagtatttggagaaacgttgtttgttttgttaccaaaatgttggaaaaatttatttcaataccttttagatttcataaagtgcagtgtatataatgcctactgaaagactgtaaaatattgaaattttctttcaagcaaagtgtaaaaaaatatattgagcctgtaaattgctctgtgactagacttcattgtcgtcttaatatattcttgcatgtgcatatatatacacacatgtgtatatatatgtgtgtgattatgtgacctatgcaatacaaattatgggaatgggcagctttggagtatatatcccataattcttttttcaggaatagttgcagtatttacacagcagcatttcttctcaggcttttattgggtgctgttgcttgctatgtatgaagagaaatgtgtcagacaagtttagtgtgttctgaagaagggtgtgaacaacagtgttcatgggcttttagaatgcttttcacttttagtccttgtaactcagctgttcagtacctaaaacaaattcaaataatatgaacattatctcctactagaagtaacgttttcaagttttcatggcacattatgattgtaaatgtctctcatttttaacagtaagtctataggagtcccgtgaagattcctgaaatgtctgtagtaactgttagtcatgtttgaataagtgtagtatgaacaaagtattttattgcacagggttaacaaacagtatgttgccagctgaggctactgctgttttattacaacattacctcttgtttttataaagtgtaccaagatttaaattgataactttattttacttgtaaaaaaaaagtttcttttatcaccagtgttacagttgtcttctgtttcttttgtttgttttatttgttttcctttttagccaaagagtgaacagaagattttcttattttggtggctattcattttacttttaaaagtgattggtggattttagactaattatgggggaatttgccaccaaaataaaaaatatgtaaagtgtagtgattacagagtggttaaaatgtgggttagtacttatttattccattaattgattatttgactgtttataaagaaagttgctttatttctttaaacatcttcaaaagatgatcctttcttgtcacattatagccaaaagaagcagagaacttcattgtctgcatttggttcctggttggccaggtataaatgagctttacaaaagtgcaaattaaaaactgttacttctgtttacctccaccaaaacttgattttcccctagctattaatttaaggttgcctttcctgcagctgcaatattttgaataacacacagagtttgtgttgatttttgaatgtttgtttatatctaggggtaatgaaaaatgtaaatcccgtgtatccttattcactccacctgtatcatattatttcattttccccaaagtcctttaattctaactgaacaccagcagtatttttagaaatttttctttaacatacttggaagatgatttatccagctgaactgtctttagacgtaattattgtgaatgtctgttttattttctcatggtggttcacatggctctgatgttcagtttgtatttttggaattgctttacttagaaattaaaacagaccaacattaaatgtgtgtatttttaaagagc

SEQ ID NO: 319268 - DNA, 3436 bp, Homo sapiens
gcaccgacggagtccgcgggaaaccaaaatggcgaggggctgtattgaagtgggctgtgtttgaggccggtgtaagaacgctcattctacccccaacccttgtctccaaggacctcggtttgtgcgtgcatatgtgccgggtacccggtggggcgggtgcccagtaagtgctcggactcgcaggggaagcgcccacggggacggattggttgttttttcctgtatgaagcggttggcaccactgaagtgaccgaatgagagactctacaggggcaggtaattcactggtccacaagcggtctcctttacgtcgaaaccaaaagaccccaacatccttgaccaagctgtctttacaggatggacataaagccaaaaagccagcatgtaaatttgaagagggtcaggatgtcctagctagatggtcagatggcttgttttatcttggcactatcaaaaagataaacatattgaaacagagctgcttcatcatatttgaagacagttctaaatcctgggttctctggaaggacattcaaacagagccactggaagtggggaaatggtctgtaggcattaaatgattacaagaccatgtttatgtctgggaaagaaataaagaagaagaagcatttgtttgggttgcgaattcgtgttcctcctgtgccaccaaatgtggctttcaaagcagagaaagaacctgaaggaacatctcatgaatttaaaattaaaggcagaaaggcatccaaacctatatctgattcaagggaagtaagcaatggcatagaaaaaaaaggaaagaaaaaatctgtaggtcgtccacctggcccatatacaagaaaaatgattcaaaaaactgctgagccacttttggataaggaatcaatttcagagaatcctactttggatttaccttgttctatagggagaactgagggaactgcacattcatccaatacctcagatgtggatttcacgggtgcttccagtgcaaaagaaactacctcgtctagcatttccaggcattatggattatctgactccagaaaaagaacgcgtacaggaagatcttggcctgctgcaataccacatttgcggagaagaagaggtcgtcttccaagaagagcactccagactcagaactcagaaattgtaaaagatgatgaaggcaaagaagattatcagtttgatgaactcaacacagagattctgaataacttagcagatcaggagttacaactcaatcatctaaagaactccattaccagttattttggtgctgcaggtagaatagcatgtggcgaaaaataccgagttttggcacgtcgggtgacacttgatggaaaggtgcagtatcttgtggaatgggaaggagcaactgcatcctgactgtaggactgaacattatgttcactgcactctgattttctgtaggtacagttcaaagccctaaaggagtctggcttttactatctttcttaaaaaaaaaaaaaagtcaaaaaaattcaaaaaaggggatgatactagccttaacatgtacctgtcaatgttatggatattgtcataaaaaggtatcttttaaaaatcagaacagagacttaattttttaaatcttaagatttgtagaatgtttctaggataggatattaaaaatgattgaaacccatgcatggtgttagacaatttttctaattattccattgagtcagttttttgtgattagtgattatcagagcaaacatcatgtagatagcacaagtatttggagaaacgttgtttgttttgttaccaaaatgttggaaaaatttatttcaataccttttagatttcataaagtgcagtgtatataatgcctactgaaagactgtaaaatattgaaattttctttcaagcaaagtgtaaaaaaatatattgagcctgtaaattgctctgtgactagacttcattgtcgtcttaatatattcttgcatgtgcatatatatacacacatgtgtatatatatgtgtgtgattatgtgacctatgcaatacaaattatgggaatgggcagctttggagtatatatcccataattcttttttcaggaatagttgcagtatttacacagcagcatttcttctcaggcttttattgggtgctgttgcttgctatgtatgaagagaaatgtgtcagacaagtttagtgtgttctgaagaagggtgtgaacaacagtgttcatgggcttttagaatgcttttcacttttagtccttgtaactcagctgttcagtacctaaaacaaattcaaataatatgaacattatctcctactagaagtaacgttttcaagttttcatggcacattatgattgtaaatgtctctcatttttaacagtaagtctataggagtcccgtgaagattcctgaaatgtctgtagtaactgttagtcatgtttgaataagtgtagtatgaacaaagtattttattgcacagggttaacaaacagtatgttgccagctgaggctactgctgttttattacaacattacctcttgtttttataaagtgtaccaagatttaaattgataactttattttacttgtaaaaaaaaagtttcttttatcaccagtgttacagttgtcttctgtttcttttgtttgttttatttgttttcctttttagccaaagagtgaacagaagattttcttattttggtggctattcattttacttttaaaagtgattggtggattttagactaattatgggggaatttgccaccaaaataaaaaatatgtaaagtgtagtgattacagagtggttaaaatgtgggttagtacttatttattccattaattgattatttgactgtttataaagaaagttgctttatttctttaaacatcttcaaaagatgatcctttcttgtcacattatagccaaaagaagcagagaacttcattgtctgcatttggttcctggttggccaggtataaatgagctttacaaaagtgcaaattaaaaactgttacttctgtttacctccaccaaaacttgattttcccctagctattaatttaaggttgcctttcctgcagctgcaatattttgaataacacacagagtttgtgttgatttttgaatgtttgtttatatctaggggtaatgaaaaatgtaaatcccgtgtatccttattcactccacctgtatcatattatttcattttccccaaagtcctttaattctaactgaacaccagcagtatttttagaaatttttctttaacatacttggaagatgatttatccagctgaactgtctttagacgtaattattgtgaatgtctgttttattttctcatggtggttcacatggctctgatgttcagtttgtatttttggaattgctttacttagaaattaaaacagaccaacattaaatgtgtgtatttttaaagagc

SEQ ID NO: 319269 - DNA, 2804 bp, Homo sapiens
gcaccgacggagtccgcgggaaaccaaaatggcgaggggctgtattgaagtgggctgtgtttgaggccggtgtaagaacgctcattctacccccaacccttgtctccaaggacctcggtttgtgcgtgcatatgtgccgggtacccggtggggcgggtgcccagtaagtgctcggactcgcaggggaagcgcccacggggacggattggttgttttttcctgtatgaagcggttggcaccactgaagtgaccgaatgagagactctacaggggcaggtaattcactggtccacaagcggtctcctttacgtcgaaaccaaaagaccccaacatccttgaccaagctgtctttacaggatggacataaagccaaaaagccagcatgtaaatttgaagagggtcaggatgtcctagctagatggtcagatggcttgttttatcttggcactatcaaaaagataaacatattgaaacagagctgcttcatcatatttgaagacagttctaaatcctgggttctctggaaggacattcaaacaggagccactggaagtggggaaatggtctgtacaatatgtcaagaagagtattcagaagctcccaatgaaatggttatatgtgacaagtgtggccaaggatatcatcagttgtgtcacacacctcatattgattccagtgtgattgattcagatgaaaaatggctctgtcggcagtgtgtttttgcaacaacaacaaagaggggtggtgcacttaagaaaggaccaaatgccaaagcattgcaagtcatgaagcagacattaccctatagtgtggcagaccttgaatgggatgcaggtcataaaaccaatgtccagcagtgttactgctattgtggaggccctggagactggtatttgaagatgctacagtgctgcaaatgtaagcagtggtttcatgaggcttgtgtgcaatgccttcaaaagccaatgctatttggagacagattttatacgtttatatgctctgtctgcagttctggaccagaatacctcaaacgtctaccattacagtgggtagatatagcacacctatgcctttacaacctaagtgttattcataagaagaaatactttgattctgaacttgagcttatgacatacattaatgaaaactgggatagattgcaccctggagagctggcagacacaccaaaatctgaaagatatgagcatgttctggaggcattaaatgattacaagaccatgtttatgtctgggaaagaaataaagaagaagaagcatttgtttgggttgcgaattcgtgttcctcctgtgccaccaaatgtggctttcaaagcagagaaagaacctgaaggaacatctcatgaatttaaaattaaaggcagaaaggcatccaaacctatatctgattcaagggaagtaagcaatggcatagaaaaaaaaggaaagaaaaaatctgtaggtcgtccacctggcccatatacaagaaaaatgattcaaaaaactgctgagccacttttggataaggaatcaatttcagagaatcctactttggatttaccttgttctatagggagaactgagggaactgcacattcatccaatacctcagatgtggatttcacgggtgcttccagtgcaaaagaaactacctcgtctagcatttccaggcattatgggtagatattttacattcttattttttttactttttttactctagatttcttttctttgtaaagtgttgattgaataattttttagcaattgaaagtgatgtaagttgtgtctatcagctttttgagaggtaatccatatgtagatcccaatagttgttaatattcatttgaaatatttttgctttctagagtacaaatgtatttttcatgtttgtgtggaaatttgctgtgtacacagagaaaaagtataccattgtttagaagctgtgctcgttaggctttttaatgcctctgctacacaagtgttctttgctttaggaagatatgatttttttttttctttttaagagacagattctcactctgttgcccaggctggagtgcggtggcacaatcatggctcattgcagcctcaaactcctggcttcaaacaatcctcccatgtcggcctctctagtggctgggactacagattgtgccaccacacctaagtaatgcttttttattttttgtagagatggttttgctaatttgcccaggctggtcttgaactcccgatctcaagtgatcctcctgtgttggccttctcaagtgctgggattacacgcctgagccactacagctggccaagatttgattaaaaaaaaaaaaaaaatcagacacctaaatccttttgtccataaaatgattttaaacttaagattttcatcaatagcagactcccctctgatatcttatttaatccagcccttcagaaggacaacgtttttgtttattgtttatttttttttgagatggagtctcgctctgtcacccaggctggagtacagtggcatgatatcgactcactgcaacctccgcctcctggattcaagcaattctggcacctcagcctctcatgtagctgggatttacaggcgtgcgccaccatgcccagctaactttttgtatttttaatagagatggggtttcaccatgttggccaggcaggtcttgaactcctaatctcaagtgatccacctgcctcggcctcccaaagtgccgggattacaggcgtgagccactttgcctggccaggacaacttttctctaaagcacatcatgtcaggtatgaaaaggttaatct

SEQ ID NO: 319270 - DNA, 2412 bp, Homo sapiens
gcagtataccggaaacagctatacaggaaacaggtatgactaggcagagtgtatgaccaggataagacggtataagaagaggtcgtcttccaagaagagcactccagactcagaactcagaaattgtaaaagatgatgaaggcaaagaagattatcagtttgatgaactcaacacagagattctgaataacttagcagatcaggagttacaactcaatcatctaaagaactccattaccagttattttggtgctgcaggtagaatagcatgtggcgaaaaataccgagttttggcacgtcgggtgacacttgatggaaaggtgcagtatcttgtggaatgggaaggagcaactgcatcctgactgtaggactgaacattatgttcactgcactctgattttctgtaggtacagttcaaagccctaaaggagtctggcttttactatctttcttaaaaaaaaaaaaaagtcaaaaaaattcaaaaaaggggatgatactagccttaacatgtacctgtcaatgttatggatattgtcataaaaaggtatcttttaaaaatcagaacagagacttaattttttaaatcttaagatttgtagaatgtttctaggataggatattaaaaatgattgaaacccatgcatggtgttagacaatttttctaattattccattgagtcagttttttgtgattagtgattatcagagcaaacatcatgtagatagcacaagtatttggagaaacgttgtttgttttgttaccaaaatgttggaaaaatttatttcaataccttttagatttcataaagtgcagtgtatataatgcctactgaaagactgtaaaatattgaaattttctttcaagcaaagtgtaaaaaaatatattgagcctgtaaattgctctgtgactagacttcattgtcgtcttaatatattcttgcatgtgcatatatatacacacatgtgtatatatatgtgtgtgattatgtgacctatgcaatacaaattatgggaatgggcagctttggagtatatatcccataattcttttttcaggaatagttgcagtatttacacagcagcatttcttctcaggcttttattgggtgctgttgcttgctatgtatgaagagaaatgtgtcagacaagtttagtgtgttctgaagaagggtgtgaacaacagtgttcatgggcttttagaatgcttttcacttttagtccttgtaactcagctgttcagtacctaaaacaaattcaaataatatgaacattatctcctactagaagtaacgttttcaagttttcatggcacattatgattgtaaatgtctctcatttttaacagtaagtctataggagtcccgtgaagattcctgaaatgtctgtagtaactgttagtcatgtttgaataagtgtagtatgaacaaagtattttattgcacagggttaacaaacagtatgttgccagctgaggctactgctgttttattacaacattacctcttgtttttataaagtgtaccaagatttaaattgataactttattttacttgtaaaaaaaaagtttcttttatcaccagtgttacagttgtcttctgtttcttttgtttgttttatttgttttcctttttagccaaagagtgaacagaagattttcttattttggtggctattcattttacttttaaaagtgattggtggattttagactaattatgggggaatttgccaccaaaataaaaaatatgtaaagtgtagtgattacagagtggttaaaatgtgggttagtacttatttattccattaattgattatttgactgtttataaagaaagttgctttatttctttaaacatcttcaaaagatgatcctttcttgtcacattatagccaaaagaagcagagaacttcattgtctgcatttggttcctggttggccaggtataaatgagctttacaaaagtgcaaattaaaaactgttacttctgtttacctccaccaaaacttgattttcccctagctattaatttaaggttgcctttcctgcagctgcaatattttgaataacacacagagtttgtgttgatttttgaatgtttgtttatatctaggggtaatgaaaaatgtaaatcccgtgtatccttattcactccacctgtatcatattatttcattttccccaaagtcctttaattctaactgaacaccagcagtatttttagaaatttttctttaacatacttggaagatgatttatccagctgaactgtctttagacgtaattattgtgaatgtctgttttattttctcatggtggttcacatggctctgatgttcagtttgtatttttggaattgctttacttagaaattaaaacagaccaacattaaatgtgtgtatttttaaagagc

SEQ ID NO: 319271 - DNA, 1924 bp, Homo sapiens
gcaccgacggagtccgcgggaaaccaaaatggcgaggggctgtattgaagtgggctgtgtttgaggccggtgtaagaacgctcattctacccccaacccttgtctccaaggacctcggtttgtgcgtgcatatgtgccgggtacccggtggggcgggtgcccagtaagtgctcggactcgcaggggaagcgcccacggggacggattggttgttttttcctgtatgaagcggttggcaccactgaagtgaccgaatgagagactctacaggggcaggtaattcactggtccacaagcggtctcctttacgtcgaaaccaaaagaccccaacatccttgaccaagctgtctttacaggatggacataaagccaaaaagccagcatgtaaatttgaagagggtcaggatgtcctagctagatggtcagatggcttgttttatcttggcactatcaaaaagataaacatattgaaacagagctgcttcatcatatttgaagacagttctaaatcctgggttctctggaaggacattcaaacaggagccactggaagtggggaaatggtctgtacaatatgtcaagaagagtattcagaagctcccaatgaaatggttatatgtgacaagtgtggccaaggatatcatcagttgtgtcacacacctcatattgattccagtgtgattgattcagatgaaaaatggctctgtcggcagtgtgtttttgcaacaacaacaaagaggggtggtgcacttaagaaaggaccaaatgccaaagcattgcaagtcatgaagcagacattaccctatagtgtggcagaccttgaatgggatgcaggtcataaaaccaatgtccagcagtgttactgctattgtggaggccctggagactggtatttgaagatgctacagtgctgcaaatgtaagcagtggtttcatgaggcttgtgtgcaatgccttcaaaagccaatgctatttggagacagattttatacgtttatatgctctgtctgcagttctggaccagaatacctcaaacgtctaccattacagtggtaagtgtggacctttctgttaaaagaaagaaaagccattttcttaaacctacaagttgaaactttctatatacatttacttggcttaagtaaaaataggttatttatgcttggctttatttcttttatttatcctcatgcctgatgtcatcttcactaagtaacatccacttgtattgctaaattaataaggctgttcagtgttgaatgttataaatgaaactttcagatatcctttagacctaaattcttactcatatttctagttcttttgaacattcagaataccatacagtagaagagagataggtataacaaatatgctaatttctgcttcaatgtagtaattcttgtgtgttggaagtgtgatgaattttagaggtttactaataaaatgcttacagtaagtacttacaaatctttgttgtattttacatattttatcaacagataggatttaacccatgaatcaaatagtttggttaagtatggtatattctgtagcttatatccggaagtgaaaacacaaaaatcttgattttaagttatatttttttaaagccagaccctctttgaatgcacttgaagaagtaatttgtggccaggtgcggtggctttcgcctgtaatcccagcactttgggaggccgaggtgggtggatctcctgaggtctggagtttaagaccagcctggccaacacggtgaaaccacgtttctactaaaaatacaaaaaaatttagcctagcgtggtggtgggcgcctgtaatcccagctactcgggaggctgagggaggctgaggcaggagaatcgcttgaacccacggggcggaagttgcagtgagctgacgttgtgccattgtactactccagcctg

SEQ ID NO: 319272 - DNA, 1311 bp, Homo sapiens
gcaccgacggagtccgcgggaaaccaaaatggcgaggggctgtattgaagtgggctgtgtttgaggccggtgtaagaacgctcattctacccccaacccttgtctccaaggacctcggtttgtgcgtgcatatgtgccgggtacccggtggggcgggtgcccagtaagtgctcggactcgcaggggaagcgcccacggggacggattggttgttttttcctgtatgaagcggttggcaccactgaagtgaccgaatgagagactctacaggggcaggtaattcactggtccacaagcggtctcctttacgtcgaaaccaaaagaccccaacatccttgaccaagctgtctttacaggatggacataaagccaaaaagccagcatgtaaatttgaagagggtcaggatgtcctagctagatggtcagatggcttgttttatcttggcactatcaaaaagataaacatattgaaacagagctgcttcatcatatttgaagacagttctaaatcctgggttctctggaaggacattcaaacaggagccactggaagtggggaaatggtctgtacaatatgtcaagaagagtattcagaagctcccaatgaaatggttatatgtgacaagtgtggccaaggatatcatcagttgtgtcacacacctcatattgattccagtgtgattgattcagatgaaaaatggctctgtcggcagtgtgtttttgcaacaacaacaaagaggggtggtgcacttaagaaaggaccaaatgccaaagcattgcaagtcatgaagcagacattaccctatagtgtggcagaccttgaatgggatgcaggtcataaaaccaatgtccagcagtgttactgctattgtggaggccctggagactggtatttgaagatgctacagtgctgcaaatgtaagcagtggtttcatgaggcttgtgtgcaatgccttcaaaagccaatgctatttggagacagattttatacgtttatatgctctgtctgcagttctggaccagaatacctcaaacgtctaccattacagtgctggcagacacaccaaaatctgaaagatatgagcatgttctggaggcattaaatgattacaagaccatgtttatgtctgggaaagaaataaagaagaagaagcatttgtttgggttgcgaattcgtgttcctcctgtgccaccaaatgtggctttcaaagcagagaaagaacctgaaggaacatctcatgaatttaaaattaaaggcagaaaggcatccaaacctatatctgattcaagggaagtaagcaatggcatagt

SEQ ID NO: 319273 - DNA, 4086 bp, Homo sapiens
gcaccgacggagtccgcgggaaaccaaaatggcgaggggctgtattgaagtgggctgtgtttgaggccggtgtaagaacgctcattctacccccaacccttgtctccaaggacctcggtttgtgcgtgcatatgtgccgggtacccggtggggcgggtgcccagtaagtgctcggactcgcaggggaagcgcccacggggacggattggttgttttttcctgtatgaagcggttggcaccactgaagtgaccgaatgagagactctacaggggcaggtaattcactggtccacaagcggtctcctttacgtcgaaaccaaaagaccccaacatccttgaccaagctgtctttacaggatggacataaagccaaaaagccagcatgtaaatttgaagagggtcaggatgtcctagctagatggtcagatggcttgttttatcttggcactatcaaaaagataaacatattgaaacagagctgcttcatcatatttgaagacagttctaaatcctgggttctctggaaggacattcaaacaggagccactggaagtggggaaatggtctgtacaatatgtcaagaagagtattcagaagctcccaatgaaatggttatatgtgacaagtgtggccaaggatatcatcagttgtgtcacacacctcatattgattccagtgtgattgattcagatgaaaaatggctctgtcggcagtgtgtttttgcaacaacaacaaagaggggtggtgcacttaagaaaggaccaaatgccaaagcattgcaagtcatgaagcagacattaccctatagtgtggcagaccttgaatgggatgcaggtcataaaaccaatgtccagcagtgttactgctattgtggaggccctggagactggtatttgaagatgctacagtgctgcaaatgtaagcagtggtttcatgaggcttgtgtgcaatgccttcaaaagccaatgctatttggagacagattttatacgtttatatgctctgtctgcagttctggaccagaatacctcaaacgtctaccattacagtgggtagatatagcacacctatgcctttacaacctaagtgttattcataagaagaaatactttgattctgaacttgagcttatgacatacattaatgaaaactgggatagattgcaccctggagagctggcagacacaccaaaatctgaaagatatgagcatgttctggaggcattaaatgattacaagaccatgtttatgtctgggaaagaaataaagaagaagaagcatttgtttgggttgcgaattcgtgttcctcctgtgccaccaaatgtggctttcaaagcagagaaagaacctgaaggaacatctcatgaatttaaaattaaaggcagaaaggcatccaaacctatatctgattcaagggaagtaagcaatggcatagaaaaaaaaggaaagaaaaaatctgtaggtcgtccacctggcccatatacaagaaaaatgattcaaaaaactgctgagccacttttggataaggaatcaatttcagagaatcctactttggatttaccttgttctatagggagaactgagggaactgcacattcatccaatacctcagatgtggatttcacgggtgcttccagtgcaaaagaaactacctcgtctagcatttccaggcattatggattatctgactccagaaaaagaacgcgtacaggaagatcttggcctgctgcaataccacatttgcggagaagaagaggtcgtcttccaagaagagcactccagactcagaactcagaaattgtaaaagatgatgaaggcaaagaagattatcagtttgatgaactcaacacagagattctgaataacttagcagatcaggagttacaactcaatcatctaaagaactccattaccagttattttggtgctgcaggtagaatagcatgtggcgaaaaataccgagttttggcacgtcgggtgacacttgatggaaaggtgcagtatcttgtggaatgggaaggagcaactgcatcctgactgtaggactgaacattatgttcactgcactctgattttctgtaggtacagttcaaagccctaaaggagtctggcttttactatctttcttaaaaaaaaaaaaaagtcaaaaaaattcaaaaaaggggatgatactagccttaacatgtacctgtcaatgttatggatattgtcataaaaaggtatcttttaaaaatcagaacagagacttaattttttaaatcttaagatttgtagaatgtttctaggataggatattaaaaatgattgaaacccatgcatggtgttagacaatttttctaattattccattgagtcagttttttgtgattagtgattatcagagcaaacatcatgtagatagcacaagtatttggagaaacgttgtttgttttgttaccaaaatgttggaaaaatttatttcaataccttttagatttcataaagtgcagtgtatataatgcctactgaaagactgtaaaatattgaaattttctttcaagcaaagtgtaaaaaaatatattgagcctgtaaattgctctgtgactagacttcattgtcgtcttaatatattcttgcatgtgcatatatatacacacatgtgtatatatatgtgtgtgattatgtgacctatgcaatacaaattatgggaatgggcagctttggagtatatatcccataattcttttttcaggaatagttgcagtatttacacagcagcatttcttctcaggcttttattgggtgctgttgcttgctatgtatgaagagaaatgtgtcagacaagtttagtgtgttctgaagaagggtgtgaacaacagtgttcatgggcttttagaatgcttttcacttttagtccttgtaactcagctgttcagtacctaaaacaaattcaaataatatgaacattatctcctactagaagtaacgttttcaagttttcatggcacattatgattgtaaatgtctctcatttttaacagtaagtctataggagtcccgtgaagattcctgaaatgtctgtagtaactgttagtcatgtttgaataagtgtagtatgaacaaagtattttattgcacagggttaacaaacagtatgttgccagctgaggctactgctgttttattacaacattacctcttgtttttataaagtgtaccaagatttaaattgataactttattttacttgtaaaaaaaaagtttcttttatcaccagtgttacagttgtcttctgtttcttttgtttgttttatttgttttcctttttagccaaagagtgaacagaagattttcttattttggtggctattcattttacttttaaaagtgattggtggattttagactaattatgggggaatttgccaccaaaataaaaaatatgtaaagtgtagtgattacagagtggttaaaatgtgggttagtacttatttattccattaattgattatttgactgtttataaagaaagttgctttatttctttaaacatcttcaaaagatgatcctttcttgtcacattatagccaaaagaagcagagaacttcattgtctgcatttggttcctggttggccaggtataaatgagctttacaaaagtgcaaattaaaaactgttacttctgtttacctccaccaaaacttgattttcccctagctattaatttaaggttgcctttcctgcagctgcaatattttgaataacacacagagtttgtgttgatttttgaatgtttgtttatatctaggggtaatgaaaaatgtaaatcccgtgtatccttattcactccacctgtatcatattatttcattttccccaaagtcctttaattctaactgaacaccagcagtatttttagaaatttttctttaacatacttggaagatgatttatccagctgaactgtctttagacgtaattattgtgaatgtctgttttattttctcatggtggttcacatggctctgatgttcagtttgtatttttggaattgctttacttagaaattaaaacagaccaacattaaatgtgtgtatttttaaagagc

SEQ ID NO: 319274 - DNA, 3915 bp, Homo sapiens
gcaccgacggagtccgcgggaaaccaaaatggcgaggggctgtattgaagtgggctgtgtttgaggccggtgtaagaacgctcattctacccccaacccttgtctccaaggacctcggtttgtgcgtgcatatgtgccgggtacccggtggggcgggtgcccagtaagtgctcggactcgcaggggaagcgcccacggggacggattggttgttttttcctgtatgaagcggttggcaccactgaagtgaccgaatgagagactctacaggggcaggtaattcactggtccacaagcggtctcctttacgtcgaaaccaaaagaccccaacatccttgaccaagctgtctttacaggatggacataaagccaaaaagccagcatgtaaatttgaagagggtcaggatgtcctagctagatggtcagatggcttgttttatcttggcactatcaaaaagataaacatattgaaacagagctgcttcatcatatttgaagacagttctaaatcctgggttctctggaaggacattcaaacaggagccactggaagtggggaaatggtctgtacaatatgtcaagaagagtattcagaagctcccaatgaaatggttatatgtgacaagtgtggccaaggatatcatcagttgtgtcacacacctcatattgattccagtgtgattgattcagatgaaaaatggctctgtcggcagtgtgtttttgcaacaacaacaaagaggggtggtgcacttaagaaaggaccaaatgccaaagcattgcaagtcatgaagcagacattaccctatagtgtggcagaccttgaatgggatgcaggtcataaaaccaatgtccagcagtgttactgctattgtggaggccctggagactggtatttgaagatgctacagtgctgcaaatgtaagcagtggtttcatgaggcttgtgtgcaatgccttcaaaagccaatgctatttggagacagattttatacgtttatatgctctgtctgcagttctggaccagaatacctcaaacgtctaccattacagtgggtagatatagcacacctatgcctttacaacctaagtgttattcataagaagaaatactttgattctgaacttgagcttatgacatacattaatgaaaactgggatagattgcaccctggagagctggcagacacaccaaaatctgaaagatatgagcatgttctggaggcattaaatgattacaagaccatggaagtaagcaatggcatagaaaaaaaaggaaagaaaaaatctgtaggtcgtccacctggcccatatacaagaaaaatgattcaaaaaactgctgagccacttttggataaggaatcaatttcagagaatcctactttggatttaccttgttctatagggagaactgagggaactgcacattcatccaatacctcagatgtggatttcacgggtgcttccagtgcaaaagaaactacctcgtctagcatttccaggcattatggattatctgactccagaaaaagaacgcgtacaggaagatcttggcctgctgcaataccacatttgcggagaagaagaggtcgtcttccaagaagagcactccagactcagaactcagaaattgtaaaagatgatgaaggcaaagaagattatcagtttgatgaactcaacacagagattctgaataacttagcagatcaggagttacaactcaatcatctaaagaactccattaccagttattttggtgctgcaggtagaatagcatgtggcgaaaaataccgagttttggcacgtcgggtgacacttgatggaaaggtgcagtatcttgtggaatgggaaggagcaactgcatcctgactgtaggactgaacattatgttcactgcactctgattttctgtaggtacagttcaaagccctaaaggagtctggcttttactatctttcttaaaaaaaaaaaaaagtcaaaaaaattcaaaaaaggggatgatactagccttaacatgtacctgtcaatgttatggatattgtcataaaaaggtatcttttaaaaatcagaacagagacttaattttttaaatcttaagatttgtagaatgtttctaggataggatattaaaaatgattgaaacccatgcatggtgttagacaatttttctaattattccattgagtcagttttttgtgattagtgattatcagagcaaacatcatgtagatagcacaagtatttggagaaacgttgtttgttttgttaccaaaatgttggaaaaatttatttcaataccttttagatttcataaagtgcagtgtatataatgcctactgaaagactgtaaaatattgaaattttctttcaagcaaagtgtaaaaaaatatattgagcctgtaaattgctctgtgactagacttcattgtcgtcttaatatattcttgcatgtgcatatatatacacacatgtgtatatatatgtgtgtgattatgtgacctatgcaatacaaattatgggaatgggcagctttggagtatatatcccataattcttttttcaggaatagttgcagtatttacacagcagcatttcttctcaggcttttattgggtgctgttgcttgctatgtatgaagagaaatgtgtcagacaagtttagtgtgttctgaagaagggtgtgaacaacagtgttcatgggcttttagaatgcttttcacttttagtccttgtaactcagctgttcagtacctaaaacaaattcaaataatatgaacattatctcctactagaagtaacgttttcaagttttcatggcacattatgattgtaaatgtctctcatttttaacagtaagtctataggagtcccgtgaagattcctgaaatgtctgtagtaactgttagtcatgtttgaataagtgtagtatgaacaaagtattttattgcacagggttaacaaacagtatgttgccagctgaggctactgctgttttattacaacattacctcttgtttttataaagtgtaccaagatttaaattgataactttattttacttgtaaaaaaaaagtttcttttatcaccagtgttacagttgtcttctgtttcttttgtttgttttatttgttttcctttttagccaaagagtgaacagaagattttcttattttggtggctattcattttacttttaaaagtgattggtggattttagactaattatgggggaatttgccaccaaaataaaaaatatgtaaagtgtagtgattacagagtggttaaaatgtgggttagtacttatttattccattaattgattatttgactgtttataaagaaagttgctttatttctttaaacatcttcaaaagatgatcctttcttgtcacattatagccaaaagaagcagagaacttcattgtctgcatttggttcctggttggccaggtataaatgagctttacaaaagtgcaaattaaaaactgttacttctgtttacctccaccaaaacttgattttcccctagctattaatttaaggttgcctttcctgcagctgcaatattttgaataacacacagagtttgtgttgatttttgaatgtttgtttatatctaggggtaatgaaaaatgtaaatcccgtgtatccttattcactccacctgtatcatattatttcattttccccaaagtcctttaattctaactgaacaccagcagtatttttagaaatttttctttaacatacttggaagatgatttatccagctgaactgtctttagacgtaattattgtgaatgtctgttttattttctcatggtggttcacatggctctgatgttcagtttgtatttttggaattgctttacttagaaattaaaacagaccaacattaaatgtgtgtatttttaaagagc

SEQ ID NO: 319275 - DNA, 4184 bp, Homo sapiens
gcaccgacggagtccgcgggaaaccaaaatggcgaggggctgtattgaagtgggctgtgtttgaggccggtgtaagaacgctcattctacccccaacccttgtctccaaggacctcggtttgtgcgtgcatatgtgccgggtacccggtggggcgggtgcccagtaagtgctcggactcgcaggggaagcgcccacggggacggattggttgttttttcctgtatgaagcggttggcaccactgaagtgaccgaatgagagactctacaggggcaggtaattcactggtccacaagcggtctcctttacgtcgaaaccaaaagaccccaacatccttgaccaagctgtctttacaggatggacataaagccaaaaagccagcatgtaaatttgaagagggtcaggatgtcctagctagatggtcagatggcttgttttatcttggcactatcaaaaagataaacatattgaaacagagctgcttcatcatatttgaagacagttctaaatcctgggttctctggaaggacattcaaacaggagccactggaagtggggaaatggtctgtacaatatgtcaagaagagtattcagaagctcccaatgaaatggttatatgtgacaagtgtggccaaggatatcatcagttgtgtcacacacctcatattgattccagtgtgattgattcagatgaaaaatggctctgtcggcagtgtgtttttgcaacaacaacaaagaggggtggtgcacttaagaaaggaccaaatgccaaagcattgcaagtcatgaagcagacattaccctatagtgtggcagaccttgaatgggatgcaggtcataaaaccaatgtccagcagtgttactgctattgtggaggccctggagactggtatttgaagatgctacagtgctgcaaatgtaagcagtggtttcatgaggcttgtgtgcaatgccttcaaaagccaatgctatttggagacagattttatacgtttatatgctctgtctgcagttctggaccagaatacctcaaacgtctaccattacagtgggtagatatagcacacctatgcctttacaacctaagtgttattcataagaagaaatactttgattctgaacttgagcttatgacatacattaatgaaaactgggatagattgcaccctggagagttctggggacaaataagtttggtatggatatcaggaccagccttctcatcctcctgtgtgttgttgcctgttgactctggaaattgtagaaggaggagctggcagacacaccaaaatctgaaagatatgagcatgttctggaggcattaaatgattacaagaccatgtttatgtctgggaaagaaataaagaagaagaagcatttgtttgggttgcgaattcgtgttcctcctgtgccaccaaatgtggctttcaaagcagagaaagaacctgaaggaacatctcatgaatttaaaattaaaggcagaaaggcatccaaacctatatctgattcaagggaagtaagcaatggcatagaaaaaaaaggaaagaaaaaatctgtaggtcgtccacctggcccatatacaagaaaaatgattcaaaaaactgctgagccacttttggataaggaatcaatttcagagaatcctactttggatttaccttgttctatagggagaactgagggaactgcacattcatccaatacctcagatgtggatttcacgggtgcttccagtgcaaaagaaactacctcgtctagcatttccaggcattatggattatctgactccagaaaaagaacgcgtacaggaagatcttggcctgctgcaataccacatttgcggagaagaagaggtcgtcttccaagaagagcactccagactcagaactcagaaattgtaaaagatgatgaaggcaaagaagattatcagtttgatgaactcaacacagagattctgaataacttagcagatcaggagttacaactcaatcatctaaagaactccattaccagttattttggtgctgcaggtagaatagcatgtggcgaaaaataccgagttttggcacgtcgggtgacacttgatggaaaggtgcagtatcttgtggaatgggaaggagcaactgcatcctgactgtaggactgaacattatgttcactgcactctgattttctgtaggtacagttcaaagccctaaaggagtctggcttttactatctttcttaaaaaaaaaaaaaagtcaaaaaaattcaaaaaaggggatgatactagccttaacatgtacctgtcaatgttatggatattgtcataaaaaggtatcttttaaaaatcagaacagagacttaattttttaaatcttaagatttgtagaatgtttctaggataggatattaaaaatgattgaaacccatgcatggtgttagacaatttttctaattattccattgagtcagttttttgtgattagtgattatcagagcaaacatcatgtagatagcacaagtatttggagaaacgttgtttgttttgttaccaaaatgttggaaaaatttatttcaataccttttagatttcataaagtgcagtgtatataatgcctactgaaagactgtaaaatattgaaattttctttcaagcaaagtgtaaaaaaatatattgagcctgtaaattgctctgtgactagacttcattgtcgtcttaatatattcttgcatgtgcatatatatacacacatgtgtatatatatgtgtgtgattatgtgacctatgcaatacaaattatgggaatgggcagctttggagtatatatcccataattcttttttcaggaatagttgcagtatttacacagcagcatttcttctcaggcttttattgggtgctgttgcttgctatgtatgaagagaaatgtgtcagacaagtttagtgtgttctgaagaagggtgtgaacaacagtgttcatgggcttttagaatgcttttcacttttagtccttgtaactcagctgttcagtacctaaaacaaattcaaataatatgaacattatctcctactagaagtaacgttttcaagttttcatggcacattatgattgtaaatgtctctcatttttaacagtaagtctataggagtcccgtgaagattcctgaaatgtctgtagtaactgttagtcatgtttgaataagtgtagtatgaacaaagtattttattgcacagggttaacaaacagtatgttgccagctgaggctactgctgttttattacaacattacctcttgtttttataaagtgtaccaagatttaaattgataactttattttacttgtaaaaaaaaagtttcttttatcaccagtgttacagttgtcttctgtttcttttgtttgttttatttgttttcctttttagccaaagagtgaacagaagattttcttattttggtggctattcattttacttttaaaagtgattggtggattttagactaattatgggggaatttgccaccaaaataaaaaatatgtaaagtgtagtgattacagagtggttaaaatgtgggttagtacttatttattccattaattgattatttgactgtttataaagaaagttgctttatttctttaaacatcttcaaaagatgatcctttcttgtcacattatagccaaaagaagcagagaacttcattgtctgcatttggttcctggttggccaggtataaatgagctttacaaaagtgcaaattaaaaactgttacttctgtttacctccaccaaaacttgattttcccctagctattaatttaaggttgcctttcctgcagctgcaatattttgaataacacacagagtttgtgttgatttttgaatgtttgtttatatctaggggtaatgaaaaatgtaaatcccgtgtatccttattcactccacctgtatcatattatttcattttccccaaagtcctttaattctaactgaacaccagcagtatttttagaaatttttctttaacatacttggaagatgatttatccagctgaactgtctttagacgtaattattgtgaatgtctgttttattttctcatggtggttcacatggctctgatgttcagtttgtatttttggaattgctttacttagaaattaaaacagaccaacattaaatgtgtgtatttttaaagagc

SEQ ID NO: 319276 - DNA, 3991 bp, Homo sapiens
gcaccgacggagtccgcgggaaaccaaaatggcgaggggctgtattgaagtgggctgtgtttgaggccggtgtaagaacgctcattctacccccaacccttgtctccaaggacctcggtttgtgcgtgcatatgtgccgggtacccggtggggcgggtgcccagtaagtgctcggactcgcaggggaagcgcccacggggacggattggttgttttttcctgtatgaagcggttggcaccactgaagtgaccgaatgagaggatggacataaagccaaaaagccagcatgtaaatttgaagagggtcaggatgtcctagctagatggtcagatggcttgttttatcttggcactatcaaaaagataaacatattgaaacagagctgcttcatcatatttgaagacagttctaaatcctgggttctctggaaggacattcaaacaggagccactggaagtggggaaatggtctgtacaatatgtcaagaagagtattcagaagctcccaatgaaatggttatatgtgacaagtgtggccaaggatatcatcagttgtgtcacacacctcatattgattccagtgtgattgattcagatgaaaaatggctctgtcggcagtgtgtttttgcaacaacaacaaagaggggtggtgcacttaagaaaggaccaaatgccaaagcattgcaagtcatgaagcagacattaccctatagtgtggcagaccttgaatgggatgcaggtcataaaaccaatgtccagcagtgttactgctattgtggaggccctggagactggtatttgaagatgctacagtgctgcaaatgtaagcagtggtttcatgaggcttgtgtgcaatgccttcaaaagccaatgctatttggagacagattttatacgtttatatgctctgtctgcagttctggaccagaatacctcaaacgtctaccattacagtgggtagatatagcacacctatgcctttacaacctaagtgttattcataagaagaaatactttgattctgaacttgagcttatgacatacattaatgaaaactgggatagattgcaccctggagagctggcagacacaccaaaatctgaaagatatgagcatgttctggaggcattaaatgattacaagaccatgtttatgtctgggaaagaaataaagaagaagaagcatttgtttgggttgcgaattcgtgttcctcctgtgccaccaaatgtggctttcaaagcagagaaagaacctgaaggaacatctcatgaatttaaaattaaaggcagaaaggcatccaaacctatatctgattcaagggaagtaagcaatggcatagaaaaaaaaggaaagaaaaaatctgtaggtcgtccacctggcccatatacaagaaaaatgattcaaaaaactgctgagccacttttggataaggaatcaatttcagagaatcctactttggatttaccttgttctatagggagaactgagggaactgcacattcatccaatacctcagatgtggatttcacgggtgcttccagtgcaaaagaaactacctcgtctagcatttccaggcattatggattatctgactccagaaaaagaacgcgtacaggaagatcttggcctgctgcaataccacatttgcggagaagaagaggtcgtcttccaagaagagcactccagactcagaactcagaaattgtaaaagatgatgaaggcaaagaagattatcagtttgatgaactcaacacagagattctgaataacttagcagatcaggagttacaactcaatcatctaaagaactccattaccagttattttggtgctgcaggtagaatagcatgtggcgaaaaataccgagttttggcacgtcgggtgacacttgatggaaaggtgcagtatcttgtggaatgggaaggagcaactgcatcctgactgtaggactgaacattatgttcactgcactctgattttctgtaggtacagttcaaagccctaaaggagtctggcttttactatctttcttaaaaaaaaaaaaaagtcaaaaaaattcaaaaaaggggatgatactagccttaacatgtacctgtcaatgttatggatattgtcataaaaaggtatcttttaaaaatcagaacagagacttaattttttaaatcttaagatttgtagaatgtttctaggataggatattaaaaatgattgaaacccatgcatggtgttagacaatttttctaattattccattgagtcagttttttgtgattagtgattatcagagcaaacatcatgtagatagcacaagtatttggagaaacgttgtttgttttgttaccaaaatgttggaaaaatttatttcaataccttttagatttcataaagtgcagtgtatataatgcctactgaaagactgtaaaatattgaaattttctttcaagcaaagtgtaaaaaaatatattgagcctgtaaattgctctgtgactagacttcattgtcgtcttaatatattcttgcatgtgcatatatatacacacatgtgtatatatatgtgtgtgattatgtgacctatgcaatacaaattatgggaatgggcagctttggagtatatatcccataattcttttttcaggaatagttgcagtatttacacagcagcatttcttctcaggcttttattgggtgctgttgcttgctatgtatgaagagaaatgtgtcagacaagtttagtgtgttctgaagaagggtgtgaacaacagtgttcatgggcttttagaatgcttttcacttttagtccttgtaactcagctgttcagtacctaaaacaaattcaaataatatgaacattatctcctactagaagtaacgttttcaagttttcatggcacattatgattgtaaatgtctctcatttttaacagtaagtctataggagtcccgtgaagattcctgaaatgtctgtagtaactgttagtcatgtttgaataagtgtagtatgaacaaagtattttattgcacagggttaacaaacagtatgttgccagctgaggctactgctgttttattacaacattacctcttgtttttataaagtgtaccaagatttaaattgataactttattttacttgtaaaaaaaaagtttcttttatcaccagtgttacagttgtcttctgtttcttttgtttgttttatttgttttcctttttagccaaagagtgaacagaagattttcttattttggtggctattcattttacttttaaaagtgattggtggattttagactaattatgggggaatttgccaccaaaataaaaaatatgtaaagtgtagtgattacagagtggttaaaatgtgggttagtacttatttattccattaattgattatttgactgtttataaagaaagttgctttatttctttaaacatcttcaaaagatgatcctttcttgtcacattatagccaaaagaagcagagaacttcattgtctgcatttggttcctggttggccaggtataaatgagctttacaaaagtgcaaattaaaaactgttacttctgtttacctccaccaaaacttgattttcccctagctattaatttaaggttgcctttcctgcagctgcaatattttgaataacacacagagtttgtgttgatttttgaatgtttgtttatatctaggggtaatgaaaaatgtaaatcccgtgtatccttattcactccacctgtatcatattatttcattttccccaaagtcctttaattctaactgaacaccagcagtatttttagaaatttttctttaacatacttggaagatgatttatccagctgaactgtctttagacgtaattattgtgaatgtctgttttattttctcatggtggttcacatggctctgatgttcagtttgtatttttggaattgctttacttagaaattaaaacagaccaacattaaatgtgtgtatttttaaagagc

SEQ ID NO: 319277 - DNA, 3805 bp, Homo sapiens
gcaccgacggagtccgcgggaaaccaaaatggcgaggggctgtattgaagtgggctgtgtttgaggccggtgtaagaacgctcattctacccccaacccttgtctccaaggacctcggtttgtgcgtgcatatgtgccgggtacccggtggggcgggtgcccagtaagtgctcggactcgcaggggaagcgcccacggggacggattggttgttttttcctgtatgaagcggttggcaccactgaagtgaccgaatgaggagccactggaagtggggaaatggtctgtacaatatgtcaagaagagtattcagaagctcccaatgaaatggttatatgtgacaagtgtggccaaggatatcatcagttgtgtcacacacctcatattgattccagtgtgattgattcagatgaaaaatggctctgtcggcagtgtgtttttgcaacaacaacaaagaggggtggtgcacttaagaaaggaccaaatgccaaagcattgcaagtcatgaagcagacattaccctatagtgtggcagaccttgaatgggatgcaggtcataaaaccaatgtccagcagtgttactgctattgtggaggccctggagactggtatttgaagatgctacagtgctgcaaatgtaagcagtggtttcatgaggcttgtgtgcaatgccttcaaaagccaatgctatttggagacagattttatacgtttatatgctctgtctgcagttctggaccagaatacctcaaacgtctaccattacagtgggtagatatagcacacctatgcctttacaacctaagtgttattcataagaagaaatactttgattctgaacttgagcttatgacatacattaatgaaaactgggatagattgcaccctggagagctggcagacacaccaaaatctgaaagatatgagcatgttctggaggcattaaatgattacaagaccatgtttatgtctgggaaagaaataaagaagaagaagcatttgtttgggttgcgaattcgtgttcctcctgtgccaccaaatgtggctttcaaagcagagaaagaacctgaaggaacatctcatgaatttaaaattaaaggcagaaaggcatccaaacctatatctgattcaagggaagtaagcaatggcatagaaaaaaaaggaaagaaaaaatctgtaggtcgtccacctggcccatatacaagaaaaatgattcaaaaaactgctgagccacttttggataaggaatcaatttcagagaatcctactttggatttaccttgttctatagggagaactgagggaactgcacattcatccaatacctcagatgtggatttcacgggtgcttccagtgcaaaagaaactacctcgtctagcatttccaggcattatggattatctgactccagaaaaagaacgcgtacaggaagatcttggcctgctgcaataccacatttgcggagaagaagaggtcgtcttccaagaagagcactccagactcagaactcagaaattgtaaaagatgatgaaggcaaagaagattatcagtttgatgaactcaacacagagattctgaataacttagcagatcaggagttacaactcaatcatctaaagaactccattaccagttattttggtgctgcaggtagaatagcatgtggcgaaaaataccgagttttggcacgtcgggtgacacttgatggaaaggtgcagtatcttgtggaatgggaaggagcaactgcatcctgactgtaggactgaacattatgttcactgcactctgattttctgtaggtacagttcaaagccctaaaggagtctggcttttactatctttcttaaaaaaaaaaaaaagtcaaaaaaattcaaaaaaggggatgatactagccttaacatgtacctgtcaatgttatggatattgtcataaaaaggtatcttttaaaaatcagaacagagacttaattttttaaatcttaagatttgtagaatgtttctaggataggatattaaaaatgattgaaacccatgcatggtgttagacaatttttctaattattccattgagtcagttttttgtgattagtgattatcagagcaaacatcatgtagatagcacaagtatttggagaaacgttgtttgttttgttaccaaaatgttggaaaaatttatttcaataccttttagatttcataaagtgcagtgtatataatgcctactgaaagactgtaaaatattgaaattttctttcaagcaaagtgtaaaaaaatatattgagcctgtaaattgctctgtgactagacttcattgtcgtcttaatatattcttgcatgtgcatatatatacacacatgtgtatatatatgtgtgtgattatgtgacctatgcaatacaaattatgggaatgggcagctttggagtatatatcccataattcttttttcaggaatagttgcagtatttacacagcagcatttcttctcaggcttttattgggtgctgttgcttgctatgtatgaagagaaatgtgtcagacaagtttagtgtgttctgaagaagggtgtgaacaacagtgttcatgggcttttagaatgcttttcacttttagtccttgtaactcagctgttcagtacctaaaacaaattcaaataatatgaacattatctcctactagaagtaacgttttcaagttttcatggcacattatgattgtaaatgtctctcatttttaacagtaagtctataggagtcccgtgaagattcctgaaatgtctgtagtaactgttagtcatgtttgaataagtgtagtatgaacaaagtattttattgcacagggttaacaaacagtatgttgccagctgaggctactgctgttttattacaacattacctcttgtttttataaagtgtaccaagatttaaattgataactttattttacttgtaaaaaaaaagtttcttttatcaccagtgttacagttgtcttctgtttcttttgtttgttttatttgttttcctttttagccaaagagtgaacagaagattttcttattttggtggctattcattttacttttaaaagtgattggtggattttagactaattatgggggaatttgccaccaaaataaaaaatatgtaaagtgtagtgattacagagtggttaaaatgtgggttagtacttatttattccattaattgattatttgactgtttataaagaaagttgctttatttctttaaacatcttcaaaagatgatcctttcttgtcacattatagccaaaagaagcagagaacttcattgtctgcatttggttcctggttggccaggtataaatgagctttacaaaagtgcaaattaaaaactgttacttctgtttacctccaccaaaacttgattttcccctagctattaatttaaggttgcctttcctgcagctgcaatattttgaataacacacagagtttgtgttgatttttgaatgtttgtttatatctaggggtaatgaaaaatgtaaatcccgtgtatccttattcactccacctgtatcatattatttcattttccccaaagtcctttaattctaactgaacaccagcagtatttttagaaatttttctttaacatacttggaagatgatttatccagctgaactgtctttagacgtaattattgtgaatgtctgttttattttctcatggtggttcacatggctctgatgttcagtttgtatttttggaattgctttacttagaaattaaaacagaccaacattaaatgtgtgtatttttaaagagc

SEQ ID NO: 319278 - DNA, 3126 bp, Homo sapiens
ttcttttttttttttttcttagattttatacgtttatatgctctgtctgcagttctggaccagaatacctcaaacgtctaccattacagtgggtagatatagcacacctatgcctttacaacctaagtgttattcataagaagaaatactttgattctgaacttgagcttatgacatacattaatgaaaactgggatagattgcaccctggagagctggcagacacaccaaaatctgaaagatatgagcatgttctggaggcattaaatgattacaagaccatgtttatgtctgggaaagaaataaagaagaagaagcatttgtttgggttgcgaattcgtgttcctcctgtgccaccaaatgtggctttcaaagcagagaaagaacctgaaggaacatctcatgaatttaaaattaaaggcagaaaggcatccaaacctatatctgattcaagggaagtaagcaatggcatagaaaaaaaaggaaagaaaaaatctgtaggtcgtccacctggcccatatacaagaaaaatgattcaaaaaactgctgagccacttttggataaggaatcaatttcagagaatcctactttggatttaccttgttctatagggagaactgagggaactgcacattcatccaatacctcagatgtggatttcacgggtgcttccagtgcaaaagaaactacctcgtctagcatttccaggcattatggattatctgactccagaaaaagaacgcgtacaggaagatcttggcctgctgcaataccacatttgcggagaagaagaggtcgtcttccaagaagagcactccagactcagaactcagaaattgtaaaagatgatgaaggcaaagaagattatcagtttgatgaactcaacacagagattctgaataacttagcagatcaggagttacaactcaatcatctaaagaactccattaccagttattttggtgctgcaggtagaatagcatgtggcgaaaaataccgagttttggcacgtcgggtgacacttgatggaaaggtgcagtatcttgtggaatgggaaggagcaactgcatcctgactgtaggactgaacattatgttcactgcactctgattttctgtaggtacagttcaaagccctaaaggagtctggcttttactatctttcttaaaaaaaaaaaaaagtcaaaaaaattcaaaaaaggggatgatactagccttaacatgtacctgtcaatgttatggatattgtcataaaaaggtatcttttaaaaatcagaacagagacttaattttttaaatcttaagatttgtagaatgtttctaggataggatattaaaaatgattgaaacccatgcatggtgttagacaatttttctaattattccattgagtcagttttttgtgattagtgattatcagagcaaacatcatgtagatagcacaagtatttggagaaacgttgtttgttttgttaccaaaatgttggaaaaatttatttcaataccttttagatttcataaagtgcagtgtatataatgcctactgaaagactgtaaaatattgaaattttctttcaagcaaagtgtaaaaaaatatattgagcctgtaaattgctctgtgactagacttcattgtcgtcttaatatattcttgcatgtgcatatatatacacacatgtgtatatatatgtgtgtgattatgtgacctatgcaatacaaattatgggaatgggcagctttggagtatatatcccataattcttttttcaggaatagttgcagtatttacacagcagcatttcttctcaggcttttattgggtgctgttgcttgctatgtatgaagagaaatgtgtcagacaagtttagtgtgttctgaagaagggtgtgaacaacagtgttcatgggcttttagaatgcttttcacttttagtccttgtaactcagctgttcagtacctaaaacaaattcaaataatatgaacattatctcctactagaagtaacgttttcaagttttcatggcacattatgattgtaaatgtctctcatttttaacagtaagtctataggagtcccgtgaagattcctgaaatgtctgtagtaactgttagtcatgtttgaataagtgtagtatgaacaaagtattttattgcacagggttaacaaacagtatgttgccagctgaggctactgctgttttattacaacattacctcttgtttttataaagtgtaccaagatttaaattgataactttattttacttgtaaaaaaaaagtttcttttatcaccagtgttacagttgtcttctgtttcttttgtttgttttatttgttttcctttttagccaaagagtgaacagaagattttcttattttggtggctattcattttacttttaaaagtgattggtggattttagactaattatgggggaatttgccaccaaaataaaaaatatgtaaagtgtagtgattacagagtggttaaaatgtgggttagtacttatttattccattaattgattatttgactgtttataaagaaagttgctttatttctttaaacatcttcaaaagatgatcctttcttgtcacattatagccaaaagaagcagagaacttcattgtctgcatttggttcctggttggccaggtataaatgagctttacaaaagtgcaaattaaaaactgttacttctgtttacctccaccaaaacttgattttcccctagctattaatttaaggttgcctttcctgcagctgcaatattttgaataacacacagagtttgtgttgatttttgaatgtttgtttatatctaggggtaatgaaaaatgtaaatcccgtgtatccttattcactccacctgtatcatattatttcattttccccaaagtcctttaattctaactgaacaccagcagtatttttagaaatttttctttaacatacttggaagatgatttatccagctgaactgtctttagacgtaattattgtgaatgtctgttttattttctcatggtggttcacatggctctgatgttcagtttgtatttttggaattgctttacttagaaattaaaacagaccaacattaaatgtgtgtatttttaaagagc

SEQ ID NO: 319279 - DNA, 2902 bp, Homo sapiens
gcaccgacggagtccgcgggaaaccaaaatggcgaggggctgtattgaagtgggctgtgtttgaggccggtgtaagaacgctcattctacccccaacccttgtctccaaggacctcggtttgtgcgtgcatatgtgccgggtacccggtggggcgggtgcccagtaagtgctcggactcgcaggggaagcgcccacggggacggattggttgttttttcctgtatgaagcggttggcaccactgaagtgaccgaatgagagactctacaggggcaggtaattcactggtccacaagcggtctcctttacgtcgaaaccaaaagaccccaacatccttgaccaagctgtctttacaggatggacataaagccaaaaagccagcatgtaaatttgaagagggtcaggatgtcctagctagatggtcagatggcttgttttatcttggcactatcaaaaagataaacatattgaaacagagctgcttcatcatatttgaagacagttctaaatcctgggttctctggaaggacattcaaacaggagccactggaagtggggaaatggtctgtacaatatgtcaagaagagtattcagaagctcccaatgaaatggttatatgtgacaagtgtggccaaggatatcatcagttgtgtcacacacctcatattgattccagtgtgattgattcagatgaaaaatggctctgtcggcagtgtgtttttgcaacaacaacaaagaggggtggtgcacttaagaaaggaccaaatgccaaagcattgcaagtcatgaagcagacattaccctatagtgtggcagaccttgaatgggatgcaggtcataaaaccaatgtccagcagtgttactgctattgtggaggccctggagactggtatttgaagatgctacagtgctgcaaatgtaagcagtggtttcatgaggcttgtgtgcaatgccttcaaaagccaatgctatttggagacagattttatacgtttatatgctctgtctgcagttctggaccagaatacctcaaacgtctaccattacagtgggtagatatagcacacctatgcctttacaacctaagtgttattcataagaagaaatactttgattctgaacttgagcttatgacatacattaatgaaaactgggatagattgcaccctggagagttctggggacaaataagtttggtatggatatcaggaccagccttctcatcctcctgtgtgttgttgcctgttgactctggaaattgtagaaggaggagctggcagacacaccaaaatctgaaagatatgagcatgttctggaggcattaaatgattacaagaccatgtttatgtctgggaaagaaataaagaagaagaagcatttgtttgggttgcgaattcgtgttcctcctgtgccaccaaatgtggctttcaaagcagagaaagaacctgaaggaacatctcatgaatttaaaattaaaggcagaaaggcatccaaacctatatctgattcaagggaagtaagcaatggcatagaaaaaaaaggaaagaaaaaatctgtaggtcgtccacctggcccatatacaagaaaaatgattcaaaaaactgctgagccacttttggataaggaatcaatttcagagaatcctactttggatttaccttgttctatagggagaactgagggaactgcacattcatccaatacctcagatgtggatttcacgggtgcttccagtgcaaaagaaactacctcgtctagcatttccaggcattatgggtagatattttacattcttattttttttactttttttactctagatttcttttctttgtaaagtgttgattgaataattttttagcaattgaaagtgatgtaagttgtgtctatcagctttttgagaggtaatccatatgtagatcccaatagttgttaatattcatttgaaatatttttgctttctagagtacaaatgtatttttcatgtttgtgtggaaatttgctgtgtacacagagaaaaagtataccattgtttagaagctgtgctcgttaggctttttaatgcctctgctacacaagtgttctttgctttaggaagatatgatttttttttttctttttaagagacagattctcactctgttgcccaggctggagtgcggtggcacaatcatggctcattgcagcctcaaactcctggcttcaaacaatcctcccatgtcggcctctctagtggctgggactacagattgtgccaccacacctaagtaatgcttttttattttttgtagagatggttttgctaatttgcccaggctggtcttgaactcccgatctcaagtgatcctcctgtgttggccttctcaagtgctgggattacacgcctgagccactacagctggccaagatttgattaaaaaaaaaaaaaaaatcagacacctaaatccttttgtccataaaatgattttaaacttaagattttcatcaatagcagactcccctctgatatcttatttaatccagcccttcagaaggacaacgtttttgtttattgtttatttttttttgagatggagtctcgctctgtcacccaggctggagtacagtggcatgatatcgactcactgcaacctccgcctcctggattcaagcaattctggcacctcagcctctcatgtagctgggatttacaggcgtgcgccaccatgcccagctaactttttgtatttttaatagagatggggtttcaccatgttggccaggcaggtcttgaactcctaatctcaagtgatccacctgcctcggcctcccaaagtgccgggattacaggcgtgagccactttgcctggccaggacaacttttctctaaagcacatcatgtcaggtatgaaaaggttaatct

SEQ ID NO: 319280 - DNA, 1785 bp, Homo sapiens
gataagcttgatatcgacttcgtgttcctgggtttccttggcgctgcggccgccgctccctctgcgacctgtatgaggaggaggaggaggaggatgtgaagatggcggagctgcagatgctgctggaagaggaaatcccggggggccgccgggccctcttcgacagctacacaaatctggaacgggtggccgattactgcgagaacaactacatacagtcagcagataagcagagagccctagaagaaaccaaagcctacaccacccaatccttagcaagtgttgcctatctgataaacaccttggccaacaatgtcctgcagatgctggatatccaggcatcccagctacgaaggatggaatcttcaatcaatcatatttcacaaacagttgatattcataaagagaaagttgcaagaagagaaattggtattttgactaccaataaaaacacttcaaggacacataagattattgctccagccaaccttgaacgaccagttcgttatattagaaaacctattgactatacaattctagatgatattggacatggagtaaaggtgagtacccagaacatgaagatgggtgggctgccgcgtacaacacctccaactcagaagccccctagtccccctatgtcagggaaagggacacttgggcggcactccccctatcgcacactggagccagtgcgtcctccagtggtaccaaatgattacgtacctagcccaacccgtaatatggctccctcgcagcagagccctgtgaggacagcttctgtgaatcaaagaaatcgaacttacagcagcagtgggagtagtggagggagccacccaagtagtcggagcagcagtcgagagaacagtggaagtggtagtgtgggggttcctattgctgttcctactccatctcctcccagtgtctttccaggtcatcctgtacagttctacagcatgaataggcctgcctctcgccatactcccccaacaatagggggctcgttgccctatagacgccctccttccattacttcacaaacaagccttcagaatcagatgaatggaggacctttttatagccagaatccagtatctcttgctcctcctcctccctccatcctacaggtaactcctcagttacctttaatgggatttgtggccagagtccaagaaaatatttcagatacaccacctccaccgccacctgtggaagaaccagtctttgatgagtctcccccacctcctcctcctccagaagattacgaagaggaggaagctgctgtggttgagtatagtgatccttatgctgaagaggacccaccgtgggctccacgttcttacttggaaaaggttgtggcaatttatgactatacaaaagacaaggaagatgagctgtcctttcaggaaggagccattatttatgtcatcaagaagaatgacgatggttggtatgagggagttatgaatggagtgactgggctttttcctgggaattacgttgagtctatcatgcattattctgagtaaagctcagcagggctgtgcttgcctcacaggaatagtcaggtcttcccagattatctgaaggccctggggattccactccagtaaagtagaatgaaggatacaaatgataaaaattacacttttttttttggtttattccccagtattaaaaacaaagcaagctgagtctgaacaaatggatctttctgccatcatttgtacaatgctgagctgtctggattgaaataaaatgaccatttttatgtatgtcaaaggt

SEQ ID NO: 319281 - DNA, 399 bp, Homo sapiens
ctgtgaggcaagcacagccctgatgagctttactcagaataatgcatgatagactcaacgtaattcccaggaaaaagcccagtcactccattcataactccctcataccaaccatcgtcattgtggcaatttatgactatacaaaagacaaggaagatgagctgtcctttcaggaaggagccattatttatgtcatcaagaagaatgacgatggttggtatgagggagttatgaatggagtgacataaataatggctccttcctgaaaggaatcttccttgtcttttgtatagtcataaattgccacaaccttttccaagtaagaacgtggagcccacggtgggtcctcttcagcataaggatcactatactcaaccacagcagcttcctcctcttcgt

SEQ ID NO: 319282 - DNA, 2710 bp, Homo sapiens
  misc_feature (28)..(28): n is a, c, g, or t
gagcgcgcgtgcgcgcgcccggccggcngtcgccgcggtgaccgtcctcggagtccgtcggctcgcgccccgcccccgtcgccccctcccctgtcgcgcgctggggctgtttctcgctccttccgagttaccgccgccgtcgccgccgctcctcctctcccggtcctgggtttccttggcgctgcggccgccgctccctctgcgacctgtatgaggaggaggaggaggaggatgtgaagatggcggagctgcagatgctgctggaagaggaaatcccggggggccgccgggccctcttcgacagctacacaaatctggaacgggtggccgattactgcgagaacaactacatacagtcagcagataagcagagagccctagaagaaaccaaagcctacaccacccaatccttagcaagtgttgcctatctgataaacaccttggccaacaatgtcctgcagatgctggatatccaggcatcccagctacgaaggatggaatcttcaatcaatcatatttcacaaacagttgatattcataaagagaaagttgcaagaagagaaattggtattttgactaccaataaaaacacttcaaggacacataagattattgctccagccaaccttgaacgaccagttcgttatattagaaaacctattgactatacaattctagatgatattggacatggagtaaaggtgagtacccagaacatgaagatgggtgggctgccgcgtacaacacctccaactcagaagccccctagtccccctatgtcagggaaagggacacttgggcggcactccccctatcgcacactggagccagtgcgtcctccagtggtaccaaatgattacgtacctagcccaacccgtaatatggctccctcgcagcagagccctgtgaggacagcttctgtgaatcaaagaaatcgaacttacagcagcagtgggagtagtggagggagccacccaagtagtcggagcagcagtcgagagaacagtggaagtggtagtgtgggggttcctattgctgttcctactccatctcctcccagtgtctttccaggtcatcctgtacagttctacagcatgaataggcctgcctctcgccatactcccccaacaatagggggctcgttgccctatagacgccctccttccattacttcacaaacaagccttcagaatcagatgaatggaggacctttttatagccagaatccagagagggcaagaacaaatattagacaccatggctattgtggacatgtttcagatacaccacctccaccgccacctgtggaagaaccagtctttgatgagtctcccccacctcctcctcctccagaagattacgaagaggaggaagctgctgtggttgagtatagtgatccttatgctgaagaggacccaccgtgggctccacgttcttacttggaaaaggttgtggcaatttatgactatacaaaagacaaggaagatgagctgtcctttcaggaaggagccattatttatgtcatcaagaagaatgacgatcatgacatgtcctgaaggtcacctttgcctttgaaaaaggtttgatggaggaattcacaggtgactgacaagtctttgaaaagaatgggatctgctcacttctggtctttttggccgggaactcctgattggtgttaaggtggtaatttcccccatataagatttagaatcactgagtttgagctagatgaaatttttaaaatttctggttgtctcattagactgatgaggtgagttttcttcttcatatgaacagctagttaataacagcagagttctcactcagtgctcagtacttaattttccactgcaccacaactgtcttaactaaatgtgctgtatttttctttaaaagttaagagttctatttggtgttttcaggaatatacgtgaaaagacatgccatgttttggtaaataccatcagagttgtgtaaaggcgtgtactaagtgcaatcttaatttgtggaaataatcttcatttacccctcctaaaactacactcagtataaacactttcccataaggtgtgtgcagtaaaaatgttatattactccaacactggcaggagcacagcacagcagccttattggagagagccttataaaagtgattaaatggaggcattgagctcattacctttaagtttactttgtgctgacctttgttcctgttttgagaatctcatataattattaaaaaaaaaaaacaattaaaacgaaacggcggggcctagctgtgtataaatgatccttgctgaatatcttaaggttttttgtaagaaaaaagaaaaaccaacaaaaaaagcttattttcacattaaaatgaaacctcttttgcaacttaagaattctatggaaaagcagtttttatcatattttgtgtccatgcaccatttttcttaaaatggcttacaaaaaagaatgtaaacaatttgtgatctggccagttgtacttttagctcccagagggagagttggtggtattatgagttgagtaaaaaccatccaggggaacttgagggagcagtctgttgccagtaatgttccttgtgtgccattaaaccacctccagatgagtggaggaacatcactttttaattttttaattgtatttggaattgttgccgtgtactaagaacttgacctaaataaaatcccacaaagtata

SEQ ID NO: 319283 - DNA, 2752 bp, Homo sapiens
  misc_feature (28)..(28): n is a, c, g, or t
gagcgcgcgtgcgcgcgcccggccggcngtcgccgcggtgaccgtcctcggagtccgtcggctcgcgccccgcccccgtcgccccctcccctgtcgcgcgctggggctgtttctcgctccttccgagttaccgccgccgtcgccgccgctcctcctctcccggtcctgggtttccttggcgctgcggccgccgctccctctgcgacctgtatgaggaggaggaggaggaggatgtgaagatggcggagctgcagatgctgctggaagaggaaatcccggggggccgccgggccctcttcgacagctacacaaatctggaacgggtggccgattactgcgagaacaactacatacagtcagcagataagcagagagccctagaagaaaccaaagcctacaccacccaatccttagcaagtgttgcctatctgataaacaccttggccaacaatgtcctgcagatgctggatatccaggcatcccagctacgaaggatggaatcttcaatcaatcatatttcacaaacagttgatattcataaagagaaagttgcaagaagagaaattggtattttgactaccaataaaaacacttcaaggacacataagattattgctccagccaaccttgaacgaccagttcgttatattagaaaacctattgactatacaattctagatgatattggacatggagtaaaggtgagtacccagaacatgaagatgggtgggctgccgcgtacaacacctccaactcagaagccccctagtccccctatgtcagggaaagggacacttgggcggcactccccctatcgcacactggagccagtgcgtcctccagtggtaccaaatgattacgtacctagcccaacccgtaatatggctccctcgcagcagagccctgtgaggacagcttctgtgaatcaaagaaatcgaacttacagcagcagtgggagtagtggagggagccacccaagtagtcggagcagcagtcgagagaacagtggaagtggtagtgtgggggttcctattgctgttcctactccatctcctcccagtgtctttccaggtcatcctgtacagttctacagcatgaataggcctgcctctcgccatactcccccaacaatagggggctcgttgccctatagacgccctccttccattacttcacaaacaagccttcagaatcagatgaatggaggacctttttatagccagaatccagtatctcttgctcctcctcctccctccatcctacaggtaactcctcagttacctttaatgggatttgtggccagagtccaagaaaatatttcagatacaccacctccaccgccacctgtggaagaaccagtctttgatgagtctcccccacctcctcctcctccagaagattacgaagaggaggaagctgctgtggttgagtatagtgatccttatgctgaagaggacccaccgtgggctccacgttcttacttggaaaaggttgtggcaatttatgactatacaaaagacaaggaagatgagctgtcctttcaggaaggagccattatttatgtcatcaagaagaatgacgatcatgacatgtcctgaaggtcacctttgcctttgaaaaaggtttgatggaggaattcacaggtgactgacaagtctttgaaaagaatgggatctgctcacttctggtctttttggccgggaactcctgattggtgttaaggtggtaatttcccccatataagatttagaatcactgagtttgagctagatgaaatttttaaaatttctggttgtctcattagactgatgaggtgagttttcttcttcatatgaacagctagttaataacagcagagttctcactcagtgctcagtacttaattttccactgcaccacaactgtcttaactaaatgtgctgtatttttctttaaaagttaagagttctatttggtgttttcaggaatatacgtgaaaagacatgccatgttttggtaaataccatcagagttgtgtaaaggcgtgtactaagtgcaatcttaatttgtggaaataatcttcatttacccctcctaaaactacactcagtataaacactttcccataaggtgtgtgcagtaaaaatgttatattactccaacactggcaggagcacagcacagcagccttattggagagagccttataaaagtgattaaatggaggcattgagctcattacctttaagtttactttgtgctgacctttgttcctgttttgagaatctcatataattattaaaaaaaaaaaacaattaaaacgaaacggcggggcctagctgtgtataaatgatccttgctgaatatcttaaggttttttgtaagaaaaaagaaaaaccaacaaaaaaagcttattttcacattaaaatgaaacctcttttgcaacttaagaattctatggaaaagcagtttttatcatattttgtgtccatgcaccatttttcttaaaatggcttacaaaaaagaatgtaaacaatttgtgatctggccagttgtacttttagctcccagagggagagttggtggtattatgagttgagtaaaaaccatccaggggaacttgagggagcagtctgttgccagtaatgttccttgtgtgccattaaaccacctccagatgagtggaggaacatcactttttaattttttaattgtatttggaattgttgccgtgtactaagaacttgacctaaataaaatcccacaaagtata

SEQ ID NO: 319284 - DNA, 2848 bp, Homo sapiens
  misc_feature (28)..(28): n is a, c, g, or t
gagcgcgcgtgcgcgcgcccggccggcngtcgccgcggtgaccgtcctcggagtccgtcggctcgcgccccgcccccgtcgccccctcccctgtcgcgcgctggggctgtttctcgctccttccgagttaccgccgccgtcgccgccgctcctcctctcccggtcctgggtttccttggcgctgcggccgccgctccctctgcgacctgtatgaggaggaggaggaggaggatgtgaagatggcggagctgcagatgctgctggaagaggaaatcccggggggccgccgggccctcttcgacagctacacaaatctggaacgggtggccgattactgcgagaacaactacatacagtcagcagataagcagagagccctagaagaaaccaaagcctacaccacccaatccttagcaagtgttgcctatctgataaacaccttggccaacaatgtcctgcagatgctggatatccaggcatcccagctacgaaggatggaatcttcaatcaatcatatttcacaaacagttgatattcataaagagaaagttgcaagaagagaaattggtattttgactaccaataaaaacacttcaaggacacataagattattgctccagccaaccttgaacgaccagttcgttatattagaaaacctattgactatacaattctagatgatattggacatggagtaaaggtgagtacccagaacatgaagatgggtgggctgccgcgtacaacacctccaactcagaagccccctagtccccctatgtcagggaaagggacacttgggcggcactccccctatcgcacactggagccagtgcgtcctccagtggtaccaaatgattacgtacctagcccaacccgtaatatggctccctcgcagcagagccctgtgaggacagcttctgtgaatcaaagaaatcgaacttacagcagcagtgggagtagtggagggagccacccaagtagtcggagcagcagtcgagagaacagtggaagtggtagtgtgggggttcctattgctgttcctactccatctcctcccagtgtctttccagcccctgctggctctgctggcactcctccccttcctgctacttctgcatctgcccctgctcctcttgttcctgctactgtcccttcctccactgccccagacgctgctgctgggggtgcccagacccttgctgatggcttcacttctccaactccccctgttgtttcttccactccccctacaggtcatcctgtacagttctacagcatgaataggcctgcctctcgccatactcccccaacaatagggggctcgttgccctatagacgccctccttccattacttcacaaacaagccttcagaatcagatgaatggaggacctttttatagccagaatccagtttcagatacaccacctccaccgccacctgtggaagaaccagtctttgatgagtctcccccacctcctcctcctccagaagattacgaagaggaggaagctgctgtggttgagtatagtgatccttatgctgaagaggacccaccgtgggctccacgttcttacttggaaaaggttgtggcaatttatgactatacaaaagacaaggaagatgagctgtcctttcaggaaggagccattatttatgtcatcaagaagaatgacgatcatgacatgtcctgaaggtcacctttgcctttgaaaaaggtttgatggaggaattcacaggtgactgacaagtctttgaaaagaatgggatctgctcacttctggtctttttggccgggaactcctgattggtgttaaggtggtaatttcccccatataagatttagaatcactgagtttgagctagatgaaatttttaaaatttctggttgtctcattagactgatgaggtgagttttcttcttcatatgaacagctagttaataacagcagagttctcactcagtgctcagtacttaattttccactgcaccacaactgtcttaactaaatgtgctgtatttttctttaaaagttaagagttctatttggtgttttcaggaatatacgtgaaaagacatgccatgttttggtaaataccatcagagttgtgtaaaggcgtgtactaagtgcaatcttaatttgtggaaataatcttcatttacccctcctaaaactacactcagtataaacactttcccataaggtgtgtgcagtaaaaatgttatattactccaacactggcaggagcacagcacagcagccttattggagagagccttataaaagtgattaaatggaggcattgagctcattacctttaagtttactttgtgctgacctttgttcctgttttgagaatctcatataattattaaaaaaaaaaaacaattaaaacgaaacggcggggcctagctgtgtataaatgatccttgctgaatatcttaaggttttttgtaagaaaaaagaaaaaccaacaaaaaaagcttattttcacattaaaatgaaacctcttttgcaacttaagaattctatggaaaagcagtttttatcatattttgtgtccatgcaccatttttcttaaaatggcttacaaaaaagaatgtaaacaatttgtgatctggccagttgtacttttagctcccagagggagagttggtggtattatgagttgagtaaaaaccatccaggggaacttgagggagcagtctgttgccagtaatgttccttgtgtgccattaaaccacctccagatgagtggaggaacatcactttttaattttttaattgtatttggaattgttgccgtgtactaagaacttgacctaaataaaatcccacaaagtata

SEQ ID NO: 319285 - DNA, 2623 bp, Homo sapiens
  misc_feature (28)..(28): n is a, c, g, or t
gagcgcgcgtgcgcgcgcccggccggcngtcgccgcggtgaccgtcctcggagtccgtcggctcgcgccccgcccccgtcgccccctcccctgtcgcgcgctggggctgtttctcgctccttccgagttaccgccgccgtcgccgccgctcctcctctcccggtcctgggtttccttggcgctgcggccgccgctccctctgcgacctgtatgaggaggaggaggaggaggatgtgaagatggcggagctgcagatgctgctggaagaggaaatcccggggggccgccgggccctcttcgacagctacacaaatctggaacgggtggccgattactgcgagaacaactacatacagtcagcagataagcagagagccctagaagaaaccaaagcctacaccacccaatccttagcaagtgttgcctatctgataaacaccttggccaacaatgtcctgcagatgctggatatccaggcatcccagctacgaaggatggaatcttcaatcaatcatatttcacaaacagttgatattcataaagagaaagttgcaagaagagaaattggtattttgactaccaataaaaacacttcaaggacacataagattattgctccagccaaccttgaacgaccagttcgttatattagaaaacctattgactatacaattctagatgatattggacatggagtaaagtggttgcttagatttaaggtgagtacccagaacatgaagatgggtgggctgccgcgtacaacacctccaactcagaagccccctagtccccctatgtcagggaaagggacacttggcagcagtgggagtagtggagggagccacccaagtagtcggagcagcagtcgagagaacagtggaagtggtagtgtgggggttcctattgctgttcctactccatctcctcccagtgtctttccaggtcatcctgtacagttctacagcatgaataggcctgcctctcgccatactcccccaacaatagggggctcgttgccctatagacgccctccttccattacttcacaaacaagccttcagaatcagatgaatggaggacctttttatagccagaatccagtatctcttgctcctcctcctccctccatcctacaggtaactcctcagttacctttaatgggatttgtggccagagtccaagaaaatatttcagatacaccacctccaccgccacctgtggaagaaccagtctttgatgagtctcccccacctcctcctcctccagaagattacgaagaggaggaagctgctgtggttgagtatagtgatccttatgctgaagaggacccaccgtgggctccacgttcttacttggaaaaggttgtggcaatttatgactatacaaaagacaaggaagatgagctgtcctttcaggaaggagccattatttatgtcatcaagaagaatgacgatcatgacatgtcctgaaggtcacctttgcctttgaaaaaggtttgatggaggaattcacaggtgactgacaagtctttgaaaagaatgggatctgctcacttctggtctttttggccgggaactcctgattggtgttaaggtggtaatttcccccatataagatttagaatcactgagtttgagctagatgaaatttttaaaatttctggttgtctcattagactgatgaggtgagttttcttcttcatatgaacagctagttaataacagcagagttctcactcagtgctcagtacttaattttccactgcaccacaactgtcttaactaaatgtgctgtatttttctttaaaagttaagagttctatttggtgttttcaggaatatacgtgaaaagacatgccatgttttggtaaataccatcagagttgtgtaaaggcgtgtactaagtgcaatcttaatttgtggaaataatcttcatttacccctcctaaaactacactcagtataaacactttcccataaggtgtgtgcagtaaaaatgttatattactccaacactggcaggagcacagcacagcagccttattggagagagccttataaaagtgattaaatggaggcattgagctcattacctttaagtttactttgtgctgacctttgttcctgttttgagaatctcatataattattaaaaaaaaaaaacaattaaaacgaaacggcggggcctagctgtgtataaatgatccttgctgaatatcttaaggttttttgtaagaaaaaagaaaaaccaacaaaaaaagcttattttcacattaaaatgaaacctcttttgcaacttaagaattctatggaaaagcagtttttatcatattttgtgtccatgcaccatttttcttaaaatggcttacaaaaaagaatgtaaacaatttgtgatctggccagttgtacttttagctcccagagggagagttggtggtattatgagttgagtaaaaaccatccaggggaacttgagggagcagtctgttgccagtaatgttccttgtgtgccattaaaccacctccagatgagtggaggaacatcactttttaattttttaattgtatttggaattgttgccgtgtactaagaacttgacctaaataaaatcccacaaagtata

SEQ ID NO: 319286 - DNA, 4021 bp, Homo sapiens
  misc_feature (28)..(28): n is a, c, g, or t
gagcgcgcgtgcgcgcgcccggccggcngtcgccgcggtgaccgtcctcggagtccgtcggctcgcgccccgcccccgtcgccccctcccctgtcgcgcgctggggctgtttctcgctccttccgagttaccgccgccgtcgccgccgctcctcctctcccggtcctgggtttccttggcgctgcggccgccgctccctctgcgacctgtatgaggaggaggaggaggaggatgtgaagatggcggagctgcagatgctgctggaagaggaaatcccggggggccgccgggccctcttcgacagctacacaaatctggaacgggtggccgattactgcgagaacaactacatacagtcagcagataagcagagagccctagaagaaaccaaagcctacaccacccaatccttagcaagtgttgcctatctgataaacaccttggccaacaatgtcctgcagatgctggatatccaggcatcccagctacgaaggatggaatcttcaatcaatcatatttcacaaacagttgatattcataaagagaaagttgcaagaagagaaattggtattttgactaccaataaaaacacttcaaggacacataagattattgctccagccaaccttgaacgaccagttcgttatattagaaaacctattgactatacaattctagatgatattggacatggagtaaaggtgagtacccagaacatgaagatgggtgggctgccgcgtacaacacctccaactcagaagccccctagtccccctatgtcagggaaagggacacttgggcggcactccccctatcgcacactggagccagtgcgtcctccagtggtaccaaatgattacgtacctagcccaacccgtaatatggctccctcgcagcagagccctgtgaggacagcttctgtgaatcaaagaaatcgaacttacagcagcagtgggagtagtggagggagccacccaagtagtcggagcagcagtcgagagaacagtggaagtggtagtgtgggggttcctattgctgttcctactccatctcctcccagtgtctttccaggtcatcctgtacagttctacagcatgaataggcctgcctctcgccatactcccccaacaatagggggctcgttgccctatagacgccctccttccattacttcacaaacaagccttcagaatcagatgaatggaggacctttttatagccagaatccagtatctcttgctcctcctcctccctccatcctacaggtaactcctcagttacctttaatgggatttgtggccagagtccaagaaaatatttcagatacaccacctccaccgccacctgtggaagaaccagtctttgatgagtctcccccacctcctcctcctccagaagattacgaagaggaggaagctgctgtggttgagtatagtgatccttatgctgaagaggacccaccgtgggctccacgttcttacttggaaaaggttgtggcaatttatgactatacaaaagacaaggaagatgagctgtcctttcaggaaggagccattatttatgtcatcaagaagaatgacgatggttggtatgagggagttatgaatggagtgactgggctttttcctgggaattacgttgagtctatcatgcattattctgagtaaagctcagcagggctgtgcttgcctcacaggaatagtcaggtcttcccagattatctgaaggccctggggattccactccagtaaagtagaatgaaggatacaaatgataaaaattacacttttttttttggtttattccccagtattaaaaacaaagcaagctgagtctgaacaaatggatctttctgccatcatttgtacaatgctgagctgtctggattgaaataaaatgaccatttttatgtatgtcaaaggtataacagcataactgtgtagccaaaacaaaatcagattaagactgattcagacagaatctgtggcattggatgttcttcattgcctgtgctaaggggttaacctcatggcccagtgggtaccctagccccttcttttcttccacttgtatgaagaggagggaaccaacatttaaataccacacttaaccatttttacaattatttcagatggcttttttcctctgtgacactgtaaattctgcattctctcagcacttgagtgcaccaaacgagtgaatgctgaactcacttgcatcccttcatgtttctgtttgtggattataaggatgatgaaatgtgaaagtctcccaacactctgagggtggtgaacgattgccacccgtttgattttaatgtgctgctgcatgagactgcattgttgctaatggccagtgtacccagatgtgaagtgtggtaggctggttcatatgtggaggtgggtgtgtgaagctagacacgaaggtccctaaggttctgaagagacttgaactgtggaaatgctcttagcaggcatcccgaacccctgcttcggtgctgttttgaggagtaggatcttggagttcagaccaactatgactatcatttccttcactatctagaaaaacgctattctactttggaagagaatagtagttattttcaagtctcctgacagtcactgggagtacaaggtttgctaatgtgctctctggacgttattaatggccagtattagttgctgctgtattactgactcgcttagctgtagaaagggtaatactctcctgattttgtatgattggactcttaagtagctgctgttagtcagaattaaaacccatctcagactaagaatataatgaataagattaataggccaaaatatgtatctaatcacattgataaaaattaatataactgacacaataaaacacatttcccccatctgtacaataaatacagcttcaaattcagtggagtctgtagggcagataactttaatcatcactactgtagtcagtataagaaatgctgaaaaaaatccaggagggcttgtctctttgtgggtggtcactgtgatgttgggccagctcctgttcaggtccagagctgctaacgtgggttctactcagtcccagtgacttggccagaatagagctttgccaggtaactgccctgtgctaggtgaaaggggaaaagcagtagctggatatatttcaaatgaggttttgaacaagttcagaaagtggaacttgattgaaaagtgaacaagtgtagtagtgtgtgagaaaattcagatggtgtcggatgcagaagttaatattccacttaatgttatctgagcattaaaaatcatcagcatttaactgagaccccactatagagtttccttatcaagactttttggttttaaagttgtttttaatgcattgcaagttacaatagctattttgcttttagatttttcccagcactttgtatttattagctttcattaacttgcctccagtatacattccacttcgtgcttttcttaggtcatttctacatcccttattccttgttttcctgcagtgtaatggccctgaatgtcctctgagccttcagctccattatggacccaaactagactatacttggataagttaagctcttcttcgtgtactggtctataattagaaaaactgttttaaattagatgttcccattatttatttaaacagctttttgctgagaaagcttagtggattaatgaggcagagggtgttttgaaatccaataaatagttcccacaggctgggtgtggtggcttatgcctgtaatcccagcactttcggaggccgaggtgggtggatcatgaggtcaataaattgagaccatcctggccaacatggtgaaaccccatctctactaaaaacacaaaaattagctgggcgtggtggcgcacacctgtagtcccagctacttgggaggctgaggcaggagaatcactggaacctgggaggcggaggttgcagtgagccgagattgtgccactgcactccagcctggtgacagagcgagactccatcaaaaaaa

SEQ ID NO: 319287 - DNA, 2269 bp, Homo sapiens
aagtcctttatactgaagacctgtggttgggagcaggggtagtccatgggtctgctgattttttttccctatttagtactaatgtgtgtgtgatctttgttttacaaacagtaccttttgggttttctgcatattttataatttttgtacagttttgaattctatagattgtcttggaaggatactgtgtgatgggtcaggcacacagtaattggagacttttaatgtatgtaatatttcatagattgcatgctattaatcatctgtgagggtagtattttttgttttattgtaagtttccctctttttttataaattaaaagatggttggtattaggaatttcaaatgaatgcagaaaatcttacatgctgtgtactattaatattataacagacgatccaagtccaaaatctgaccaataaagcaaccattttatcaagatagagggattctaatgggagaggggattcttccctcctgaagtttgtgtgtccagtccccttaaaaaaaatgaatagttgtcttttcttgtcatattaatactcgaaagtccatggtggtattaatgaaagtacactttattgttgcctttgaacttacggccaaggcaataaatcagaaacaaaaatagtgccaatgtgtcaaaatcgacatctgagagattcagcctcccatttggaataaatatgaatcttctaagctatcttgtttaatattttccatcatttagctacttcctatctccctcagaggcgcctgctgttcccattttagagttgacagtggcctgctaattttgctatgttcctaaaagttactgggtgtgagacattttcatcccctcctttttcctactgctggtgtttattatccagctagacaatattttatgcatatttaccgtgatgtctggaccgtacctgtgctccttggcagtttatgttgaagataactaaagatttttctctttgggaggcatcaaaatgatggtagtttgcttttatctttttatgttcattttcttttagtaggtgacctttctgcattaagaactgtttttatcttttactaccttttcttttctcctttgtggagacagcatgacatgtcctgaaggtcacctttgcctttgaaaaaggtttgatggaggaattcacaggtgactgacaagtctttgaaaagaatgggatctgctcacttctggtctttttggccgggaactcctgattggtgttaaggtggtaatttcccccatataagatttagaatcactgagtttgagctagatgaaatttttaaaatttctggttgtctcattagactgatgaggtgagttttcttcttcatatgaacagctagttaataacagcagagttctcactcagtgctcagtacttaattttccactgcaccacaactgtcttaactaaatgtgctgtatttttctttaaaagttaagagttctatttggtgttttcaggaatatacgtgaaaagacatgccatgttttggtaaataccatcagagttgtgtaaaggcgtgtactaagtgcaatcttaatttgtggaaataatcttcatttacccctcctaaaactacactcagtataaacactttcccataaggtgtgtgcagtaaaaatgttatattactccaacactggcaggagcacagcacagcagccttattggagagagccttataaaagtgattaaatggaggcattgagctcattacctttaagtttactttgtgctgacctttgttcctgttttgagaatctcatataattattaaaaaaaaaaaacaattaaaacgaaacggcggggcctagctgtgtataaatgatccttgctgaatatcttaaggttttttgtaagaaaaaagaaaaaccaacaaaaaaagcttattttcacattaaaatgaaacctcttttgcaacttaagaattctatggaaaagcagtttttatcatattttgtgtccatgcaccatttttcttaaaatggcttacaaaaaagaatgtaaacaatttgtgatctggccagttgtacttttagctcccagagggagagttggtggtattatgagttgagtaaaaaccatccaggggaacttgagggagcagtctgttgccagtaatgttccttgtgtgccattaaaccacctccagatgagtggaggaacatcactttttaattttttaattgtatttggaattgttgccgtgtactaagaacttgacctaaataaaatcccacaaagtata

SEQ ID NO: 319288 - DNA, 4021 bp, Homo sapiens
  misc_feature (28)..(28): n is a, c, g, or t
gagcgcgcgtgcgcgcgcccggccggcngtcgccgcggtgaccgtcctcggagtccgtcggctcgcgccccgcccccgtcgccccctcccctgtcgcgcgctggggctgtttctcgctccttccgagttaccgccgccgtcgccgccgctcctcctctcccggtcctgggtttccttggcgctgcggccgccgctccctctgcgacctgtatgaggaggaggaggaggaggatgtgaagatggcggagctgcagatgctgctggaagaggaaatcccggggggccgccgggccctcttcgacagctacacaaatctggaacgggtggccgattactgcgagaacaactacatacagtcagcagataagcagagagccctagaagaaaccaaagcctacaccacccaatccttagcaagtgttgcctatctgataaacaccttggccaacaatgtcctgcagatgctggatatccaggcatcccagctacgaaggatggaatcttcaatcaatcatatttcacaaacagttgatattcataaagagaaagttgcaagaagagaaattggtattttgactaccaataaaaacacttcaaggacacataagattattgctccagccaaccttgaacgaccagttcgttatattagaaaacctattgactatacaattctagatgatattggacatggagtaaaggtgagtacccagaacatgaagatgggtgggctgccgcgtacaacacctccaactcagaagccccctagtccccctatgtcagggaaagggacacttgggcggcactccccctatcgcacactggagccagtgcgtcctccagtggtaccaaatgattacgtacctagcccaacccgtaatatggctccctcgcagcagagccctgtgaggacagcttctgtgaatcaaagaaatcgaacttacagcagcagtgggagtagtggagggagccacccaagtagtcggagcagcagtcgagagaacagtggaagtggtagtgtgggggttcctattgctgttcctactccatctcctcccagtgtctttccaggtcatcctgtacagttctacagcatgaataggcctgcctctcgccatactcccccaacaatagggggctcgttgccctatagacgccctccttccattacttcacaaacaagccttcagaatcagatgaatggaggacctttttatagccagaatccagtatctcttgctcctcctcctccctccatcctacaggtaactcctcagttacctttaatgggatttgtggccagagtccaagaaaatatttcagatacaccacctccaccgccacctgtggaagaaccagtctttgatgagtctcccccacctcctcctcctccagaagattacgaagaggaggaagctgctgtggttgagtatagtgatccttatgctgaagaggacccaccgtgggctccacgttcttacttggaaaaggttgtggcaatttatgactatacaaaagacaaggaagatgagctgtcctttcaggaaggagccattatttatgtcatcaagaagaatgacgatggttggtatgagggagttatgaatggagtgactgggctttttcctgggaattacgttgagtctatcatgcattattctgagtaaagctcagcagggctgtgcttgcctcacaggaatagtcaggtcttcccagattatctgaaggccctggggattccactccagtaaagtagaatgaaggatacaaatgataaaaattacacttttttttttggtttattccccagtattaaaaacaaagcaagctgagtctgaacaaatggatctttctgccatcatttgtacaatgctgagctgtctggattgaaataaaatgaccatttttatgtatgtcaaaggtataacagcataactgtgtagccaaaacaaaatcagattaagactgattcagaaaaatctgggatctttctcaggaatactgtatacccttgggatttctcctcctgcagaatctgtggcattggatgttcttcattgcctgtgctaaggggttaacctcatggcccagtgggtaccctagccccttcttttcttccacttgtatgaagaggagggaaccaacatttaaataccacacttaaccatttttacaattatttcagatggcttttttcctctgtgacactgtaaattctgcattctctcagcacttgagtgcaccaaacgagtgaatgctgaactcacttgcatcccttcatgtttctgtttgtggattataaggatgatgaaatgtgaaagtctcccaacactctgagggtggtgaacgattgccacccgtttgattttaatgtgctgctgcatgagactgcattgttgctaatggccagtgtacccagatgtgaagtgtggtaggctggttcatatgtggaggtgggtgtgtgaagctagacacgaaggtccctaaggttctgaagagacttgaactgtggaaatgctcttagcaggcatcccgaacccctgcttcggtgctgttttgaggagtaggatcttggagttcagaccaactatgactatcatttccttcactatctagaaaaacgctattctactttggaagagaatagtagttattttcaagtctcctgacagtcactgggagtacaaggtttgctaatgtgctctctggacgttattaatggccagtattagttgctgctgtattactgactcgcttagctgtagaaagggtaatactctcctgattttgtatgattggactcttaagtagctgctgttagtcagaattaaaacccatctcagactaagaatataatgaataagattaataggccaaaatatgtatctaatcacattgataaaaattaatataactgacacaataaaacacatttcccccatctgtacaataaatacagcttcaaattcagtggagtctgtagggcagataactttaatcatcactactgtagtcagtataagaaatgctgaaaaaaatccaggagggcttgtctctttgtgggtggtcactgtgatgttgggccagctcctgttcaggtccagagctgctaacgtgggttctactcagtcccagtgacttggccagaatagagctttgccaggtaactgccctgtgctaggtgaaaggggaaaagcagtagctggatatatttcaaatgaggttttgaacaagttcagaaagtggaacttgattgaaaagtgaacaagtgtagtagtgtgtgagaaaattcagatggtgtcggatgcagaagttaatattccacttaatgttatctgagcattttttggttttaaagttgtttttaatgcattgcaagttacaatagctattttgcttttagatttttcccagcactttgtatttattagctttcattaacttgcctccagtatacattccacttcgtgcttttcttaggtcatttctacatcccttattccttgttttcctgcagtgtaatggccctgaatgtcctctgagccttcagctccattatggacccaaactagactatacttggataagttaagctcttcttcgtgtactggtctataattagaaaaactgttttaaattagatgttcccattatttatttaaacagctttttgctgagaaagcttagtggattaatgaggcagagggtgttttgaaatccaataaatagttcccacaggctgggtgtggtggcttatgcctgtaatcccagcactttcggaggccgaggtgggtggatcatgaggtcaataaattgagaccatcctggccaacatggtgaaaccccatctctactaaaaacacaaaaattagctgggcgtggtggcgcacacctgtagtcccagctacttgggaggctgaggcaggagaatcactggaacctgggaggcggaggttgcagtgagccgagattgtgccactgcactccagcctggtgacagagcgagactccatcaaaaaaa

SEQ ID NO: 319289 - DNA, 2617 bp, Homo sapiens
  misc_feature (236)..(236): n is a, c, g, or t
gataagcttgatatcgacttcgtgttcctgggtttccttggcgctgcggccgccgctccctctgcgacctgtatgaggaggaggaggaggaggatgtgaagatggcggagctgcagatgctgctggaagaggaaatcccggggggccgccgggccctcttcgacagctacacaaatctggaacgggtggccgattactgcgagaacaactacatacagtcagcagataagcagagngccctagaagaaaccaaagcctacaccaatctggaacgggtggccgattactgcgagaacaactacatacagtcagcagataagcagagagccctagaagaaaccaaagcctacaccacccaatccttagcaagtgttgcctatctgataaacaccttggccaacaatgtcctgcagatgctggatatccaggcatcccagctacgaaggatggaatcttcaatcaatcatatttcacaaacagttgatattcataaagagaaagttgcaagaagagaaattggtattttgactaccaataaaaacacttcaaggacacataagattattgctccagccaaccttgaacgaccagttcgttatattagaaaacctattgactatacaattctagatgatattggacatggagtaaaggtgagtacccagaacatgaagatgggtgggctgccgcgtacaacacctccaactcagaagccccctagtccccctatgtcagggaaagggacacttgggcggcactccccctatcgcacactggagccagtgcgtcctccagtggtaccaaatgattacgtacctagcccaacccgtaatatggctccctcgcagcagagccctgtgaggacagcttctgtgaatcaaagaaatcgaacttacagcagcagtgggagtagtggagggagccacccaagtagtcggagcagcagtcgagagaacagtggaagtggtagtgtgggggttcctattgctgttcctactccatctcctcccagtgtctttccaggtcatcctgtacagttctacagcatgaataggcctgcctctcgccatactcccccaacaatagggggctcgttgccctatagacgccctccttccattacttcacaaacaagccttcagaatcagatgaatggaggacctttttatagccagaatccagtttcagatacaccacctccaccgccacctgtggaagaaccagtctttgatgagtctcccccacctcctcctcctccagaagattacgaagaggaggaagctgctgtggttgagtatagtgatccttatgctgaagaggacccaccgtgggctccacgttcttacttggaaaaggttgtggcaatttatgactatacaaaagacaaggaagatgagctgtcctttcaggaaggagccattatttatgtcatcaagaagaatgacgatcatgacatgtcctgaaggtcacctttgcctttgaaaaaggtttgatggaggaattcacaggtgactgacaagtctttgaaaagaatgggatctgctcacttctggtctttttggccgggaactcctgattggtgttaaggtggtaatttcccccatataagatttagaatcactgagtttgagctagatgaaatttttaaaatttctggttgtctcattagactgatgaggtgagttttcttcttcatatgaacagctagttaataacagcagagttctcactcagtgctcagtacttaattttccactgcaccacaactgtcttaactaaatgtgctgtatttttctttaaaagttaagagttctatttggtgttttcaggaatatacgtgaaaagacatgccatgttttggtaaataccatcagagttgtgtaaaggcgtgtactaagtgcaatcttaatttgtggaaataatcttcatttacccctcctaaaactacactcagtataaacactttcccataaggtgtgtgcagtaaaaatgttatattactccaacactggcaggagcacagcacagcagccttattggagagagccttataaaagtgattaaatggaggcattgagctcattacctttaagtttactttgtgctgacctttgttcctgttttgagaatctcatataattattaaaaaaaaaaaacaattaaaacgaaacggcggggcctagctgtgtataaatgatccttgctgaatatcttaaggttttttgtaagaaaaaagaaaaaccaacaaaaaaagcttattttcacattaaaatgaaacctcttttgcaacttaagaattctatggaaaagcagtttttatcatattttgtgtccatgcaccatttttcttaaaatggcttacaaaaaagaatgtaaacaatttgtgatctggccagttgtacttttagctcccagagggagagttggtggtattatgagttgagtaaaaaccatccaggggaacttgagggagcagtctgttgccagtaatgttccttgtgtgccattaaaccacctccagatgagtggaggaacatcactttttaattttttaattgtatttggaattgttgccgtgtactaagaacttgacctaaataaaatcccacaaagtata

SEQ ID NO: 319290 - DNA, 2497 bp, Homo sapiens
  misc_feature (28)..(28): n is a, c, g, or t
gagcgcgcgtgcgcgcgcccggccggcngtcgccgcggtgaccgtcctcggagtccgtcggctcgcgccccgcccccgtcgccccctcccctgtcgcgcgctggggctgtttctcgctccttccgagttaccgccgccgtcgccgccgctcctcctctcccggtcctgggtttccttggcgctgcggccgccgctccctctgcgacctgtatgaggaggaggaggaggaggatgtgaagatggcggagctgcagatgctgctggaagaggaaatcccggggggccgccgggccctcttcgacagctacacaaatctggaacgggtggccgattactgcgagaacaactacatacagacagttgatattcataaagagaaagttgcaagaagagaaattggtattttgactaccaataaaaacacttcaaggacacataagattattgctccagccaaccttgaacgaccagttcgttatattagaaaacctattgactatacaattctagatgatattggacatggagtaaaggtgagtacccagaacatgaagatgggtgggctgccgcgtacaacacctccaactcagaagccccctagtccccctatgtcagggaaagggacacttgggcggcactccccctatcgcacactggagccagtgcgtcctccagtggtaccaaatgattacgtacctagcccaacccgtaatatggctccctcgcagcagagccctgtgaggacagcttctgtgaatcaaagaaatcgaacttacagcagcagtgggagtagtggagggagccacccaagtagtcggagcagcagtcgagagaacagtggaagtggtagtgtgggggttcctattgctgttcctactccatctcctcccagtgtctttccaggtcatcctgtacagttctacagcatgaataggcctgcctctcgccatactcccccaacaatagggggctcgttgccctatagacgccctccttccattacttcacaaacaagccttcagaatcagatgaatggaggacctttttatagccagaatccagtttcagatacaccacctccaccgccacctgtggaagaaccagtctttgatgagtctcccccacctcctcctcctccagaagattacgaagaggaggaagctgctgtggttgagtatagtgatccttatgctgaagaggacccaccgtgggctccacgttcttacttggaaaaggttgtggcaatttatgactatacaaaagacaaggaagatgagctgtcctttcaggaaggagccattatttatgtcatcaagaagaatgacgatcatgacatgtcctgaaggtcacctttgcctttgaaaaaggtttgatggaggaattcacaggtgactgacaagtctttgaaaagaatgggatctgctcacttctggtctttttggccgggaactcctgattggtgttaaggtggtaatttcccccatataagatttagaatcactgagtttgagctagatgaaatttttaaaatttctggttgtctcattagactgatgaggtgagttttcttcttcatatgaacagctagttaataacagcagagttctcactcagtgctcagtacttaattttccactgcaccacaactgtcttaactaaatgtgctgtatttttctttaaaagttaagagttctatttggtgttttcaggaatatacgtgaaaagacatgccatgttttggtaaataccatcagagttgtgtaaaggcgtgtactaagtgcaatcttaatttgtggaaataatcttcatttacccctcctaaaactacactcagtataaacactttcccataaggtgtgtgcagtaaaaatgttatattactccaacactggcaggagcacagcacagcagccttattggagagagccttataaaagtgattaaatggaggcattgagctcattacctttaagtttactttgtgctgacctttgttcctgttttgagaatctcatataattattaaaaaaaaaaaacaattaaaacgaaacggcggggcctagctgtgtataaatgatccttgctgaatatcttaaggttttttgtaagaaaaaagaaaaaccaacaaaaaaagcttattttcacattaaaatgaaacctcttttgcaacttaagaattctatggaaaagcagtttttatcatattttgtgtccatgcaccatttttcttaaaatggcttacaaaaaagaatgtaaacaatttgtgatctggccagttgtacttttagctcccagagggagagttggtggtattatgagttgagtaaaaaccatccaggggaacttgagggagcagtctgttgccagtaatgttccttgtgtgccattaaaccacctccagatgagtggaggaacatcactttttaattttttaattgtatttggaattgttgccgtgtactaagaacttgacctaaataaaatcccacaaagtata

SEQ ID NO: 319291 - DNA, 2804 bp, Homo sapiens
gataagcttgatatcgacttcgtgttcctgggtttccttggcgctgcggccgccgctccctctgcgacctgtatgaggaggaggaggaggaggatgtgaagatggcggagctgcagatgctgctggaagaggaaatcccggggggccgccgggccctcttcgacagctacacaaatctggaacgggtggccgattactgcgagaacaactacatacagtcagcagataagcagagagccctagaagaaaccaaagcctacaccacccaatccttagcaagtgttgcctatctgataaacaccttggccaacaatgtcctgcagatgctggatatccaggcatcccagctacgaaggatggaatcttcaatcaatcatatttcacaagcaaattagaggcgttgatcttgagtcgacttttgtgaccaaatttggaaacaattgcagtttgagattgaatgagacagttgatattcataaagagaaagttgcaagaagagaaattggtattttgactaccaataaaaacacttcaaggacacataagattattgctccagccaaccttgaacgaccagttcgttatattagaaaacctattgactatacaattctagatgatattggacatggagtaaagtggttgcttagatttaaggtgagtacccagaacatgaagatgggtgggctgccgcgtacaacacctccaactcagaagccccctagtccccctatgtcagggaaagggacacttgggcggcactccccctatcgcacactggagccagtgcgtcctccagtggtaccaaatgattacgtacctagcccaacccgtaatatggctccctcgcagcagagccctgtgaggacagcttctgtgaatcaaagaaatcgaacttacagcagcagtgggagtagtggagggagccacccaagtagtcggagcagcagtcgagagaacagtggaagtggtagtgtgggggttcctattgctgttcctactccatctcctcccagtgtctttccagcccctgctggctctgctggcactcctccccttcctgctacttctgcatctgcccctgctcctcttgttcctgctactgtcccttcctccactgccccagacgctgctgctgggggtgcccagacccttgctgatggcttcacttctccaactccccctgttgtttcttccactccccctacaggtcatcctgtacagttctacagcatgaataggcctgcctctcgccatactcccccaacaatagggggctcgttgccctatagacgccctccttccattacttcacaaacaagccttcagaatcagatgaatggaggacctttttatagccagaatccagtttcagatacaccacctccaccgccacctgtggaagaaccagtctttgatgagtctcccccacctcctcctcctccagaagattacgaagaggaggaagctgctgtggttgagtatagtgatccttatgctgaagaggacccaccgtgggctccacgttcttacttggaaaaggttgtggcaatttatgactatacaaaagacaaggaagatgagctgtcctttcaggaaggagccattatttatgtcatcaagaagaatgacgatcatgacatgtcctgaaggtcacctttgcctttgaaaaaggtttgatggaggaattcacaggtgactgacaagtctttgaaaagaatgggatctgctcacttctggtctttttggccgggaactcctgattggtgttaaggtggtaatttcccccatataagatttagaatcactgagtttgagctagatgaaatttttaaaatttctggttgtctcattagactgatgaggtgagttttcttcttcatatgaacagctagttaataacagcagagttctcactcagtgctcagtacttaattttccactgcaccacaactgtcttaactaaatgtgctgtatttttctttaaaagttaagagttctatttggtgttttcaggaatatacgtgaaaagacatgccatgttttggtaaataccatcagagttgtgtaaaggcgtgtactaagtgcaatcttaatttgtggaaataatcttcatttacccctcctaaaactacactcagtataaacactttcccataaggtgtgtgcagtaaaaatgttatattactccaacactggcaggagcacagcacagcagccttattggagagagccttataaaagtgattaaatggaggcattgagctcattacctttaagtttactttgtgctgacctttgttcctgttttgagaatctcatataattattaaaaaaaaaaaacaattaaaacgaaacggcggggcctagctgtgtataaatgatccttgctgaatatcttaaggttttttgtaagaaaaaagaaaaaccaacaaaaaaagcttattttcacattaaaatgaaacctcttttgcaacttaagaattctatggaaaagcagtttttatcatattttgtgtccatgcaccatttttcttaaaatggcttacaaaaaagaatgtaaacaatttgtgatctggccagttgtacttttagctcccagagggagagttggtggtattatgagttgagtaaaaaccatccaggggaacttgagggagcagtctgttgccagtaatgttccttgtgtgccattaaaccacctccagatgagtggaggaacatcactttttaattttttaattgtatttggaattgttgccgtgtactaagaacttgacctaaataaaatcccacaaagtata

SEQ ID NO: 319292 - DNA, 3926 bp, Homo sapiens
gataagcttgatatcgacttcgtgttcctgggtttccttggcgctgcggccgccgctccctctgcgacctgtatgaggaggaggaggaggaggatgtgaagatggcggagctgcagatgctgctggaagaggaaatcccggggggccgccgggccctcttcgacagctacacaaatctggaacgggtggccgattactgcgagaacaactacatacagtcagcagataagcagagagccctagaagaaaccaaagcctacaccacccaatccttagcaagtgttgcctatctgataaacaccttggccaacaatgtcctgcagatgctggatatccaggcatcccagctacgaaggatggaatcttcaatcaatcatatttcacaagcaaattagaggcgttgatcttgagtcgacttttgtgaccaaatttggaaacaattgcagtttgagattgaatgagacagttgatattcataaagagaaagttgcaagaagagaaattggtattttgactaccaataaaaacacttcaaggacacataagattattgctccagccaaccttgaacgaccagttcgttatattagaaaacctattgactatacaattctagatgatattggacatggagtaaaggtgagtacccagaacatgaagatgggtgggctgccgcgtacaacacctccaactcagaagccccctagtccccctatgtcagggaaagggacacttgggcggcactccccctatcgcacactggagccagtgcgtcctccagtggtaccaaatgattacgtacctagcccaacccgtaatatggctccctcgcagcagagccctgtgaggacagcttctgtgaatcaaagaaatcgaacttacagcagcagtgggagtagtggagggagccacccaagtagtcggagcagcagtcgagagaacagtggaagtggtagtgtgggggttcctattgctgttcctactccatctcctcccagtgtctttccaggtcatcctgtacagttctacagcatgaataggcctgcctctcgccatactcccccaacaatagggggctcgttgccctatagacgccctccttccattacttcacaaacaagccttcagaatcagatgaatggaggacctttttatagccagaatccagtttcagatacaccacctccaccgccacctgtggaagaaccagtctttgatgagtctcccccacctcctcctcctccagaagattacgaagaggaggaagctgctgtggttgagtatagtgatccttatgctgaagaggacccaccgtgggctccacgttcttacttggaaaaggttgtggcaatttatgactatacaaaagacaaggaagatgagctgtcctttcaggaaggagccattatttatgtcatcaagaagaatgacgatggttggtatgagggagttatgaatggagtgactgggctttttcctgggaattacgttgagtctatcatgcattattctgagtaaagctcagcagggctgtgcttgcctcacaggaatagtcaggtcttcccagattatctgaaggccctggggattccactccagtaaagtagaatgaaggatacaaatgataaaaattacacttttttttttggtttattccccagtattaaaaacaaagcaagctgagtctgaacaaatggatctttctgccatcatttgtacaatgctgagctgtctggattgaaataaaatgaccatttttatgtatgtcaaaggtataacagcataactgtgtagccaaaacaaaatcagattaagactgattcagaaaaatctgggatctttctcaggaatactgtatacccttgggatttctcctcctgcagaatctgtggcattggatgttcttcattgcctgtgctaaggggttaacctcatggcccagtgggtaccctagccccttcttttcttccacttgtatgaagaggagggaaccaacatttaaataccacacttaaccatttttacaattatttcagatggcttttttcctctgtgacactgtaaattctgcattctctcagcacttgagtgcaccaaacgagtgaatgctgaactcacttgcatcccttcatgtttctgtttgtggattataaggatgatgaaatgtgaaagtctcccaacactctgagggtggtgaacgattgccacccgtttgattttaatgtgctgctgcatgagactgcattgttgctaatggccagtgtacccagatgtgaagtgtggtaggctggttcatatgtggaggtgggtgtgtgaagctagacacgaaggtccctaaggttctgaagagacttgaactgtggaaatgctcttagcaggcatcccgaacccctgcttcggtgctgttttgaggagtaggatcttggagttcagaccaactatgactatcatttccttcactatctagaaaaacgctattctactttggaagagaatagtagttattttcaagtctcctgacagtcactgggagtacaaggtttgctaatgtgctctctggacgttattaatggccagtattagttgctgctgtattactgactcgcttagctgtagaaagggtaatactctcctgattttgtatgattggactcttaagtagctgctgttagtcagaattaaaacccatctcagactaagaatataatgaataagattaataggccaaaatatgtatctaatcacattgataaaaattaatataactgacacaataaaacacatttcccccatctgtacaataaatacagcttcaaattcagtggagtctgtagggcagataactttaatcatcactactgtagtcagtataagaaatgctgaaaaaaatccaggagggcttgtctctttgtgggtggtcactgtgatgttgggccagctcctgttcaggtccagagctgctaacgtgggttctactcagtcccagtgacttggccagaatagagctttgccaggtaactgccctgtgctaggtgaaaggggaaaagcagtagctggatatatttcaaatgaggttttgaacaagttcagaaagtggaacttgattgaaaagtgaacaagtgtagtagtgtgtgagaaaattcagatggtgtcggatgcagaagttaatattccacttaatgttatctgagcattaaaaatcatcagcatttaactgagaccccactatagagtttccttatcaagactttttggttttaaagttgtttttaatgcattgcaagttacaatagctattttgcttttagatttttcccagcactttgtatttattagctttcattaacttgcctccagtatacattccacttcgtgcttttcttaggtcatttctacatcccttattccttgttttcctgcagtgtaatggccctgaatgtcctctgagccttcagctccattatggacccaaactagactatacttggataagttaagctcttcttcgtgtactggtctataattagaaaaactgttttaaattagatgttcccattatttatttaaacagctttttgctgagaaagcttagtggattaatgaggcagagggtgttttgaaatccaataaatagttcccacaggctgggtgtggtggcttatgcctgtaatcccagcactttcggaggccgaggtgggtggatcatgaggtcaataaattgagaccatcctggccaacatggtgaaaccccatctctactaaaaacacaaaaattagctgggcgtggtggcgcacacctgtagtcccagctacttgggaggctgaggcaggagaatcactggaacctgggaggcggaggttgcagtgagccgagattgtgccactgcactccagcctggtgacagagcgagactccatcaaaaaaa

SEQ ID NO: 319293 - DNA, 1696 bp, Homo sapiens
  misc_feature (28)..(28): n is a, c, g, or t
gagcgcgcgtgcgcgcgcccggccggcngtcgccgcggtgaccgtcctcggagtccgtcggctcgcgccccgcccccgtcgccccctcccctgtcgcgcgctggggctgtttctcgctccttccgagttaccgccgccgtcgccgccgctcctcctctcccggtcctgggtttccttggcgctgcggccgccgctccctctgcgacctgtatgaggaggaggaggaggaggatgtgaagatggcggagctgcagatgctgctggaagaggaaatcccggggggccgccgggccctcttcgacagctacacaaatctggaacgggtggccgattactgcgagaacaactacatacagtcagcagataagcagagagccctagaagaaaccaaagcctacaccacccaatccttagcaagtgttgcctatctgataaacaccttggccaacaatgtcctgcagatgctggatatccaggcatcccagctacgaaggatggaatcttcaatcaatcatatttcacaaacagttgatattcataaagagaaagttgcaagaagagaaattggtattttgactaccaataaaaacacttcaaggacacataagattattgctccagccaaccttgaacgaccagttcgttatattagaaaacctattgactatacaattctagatgatattggacatggagtaaaggtgagtacccagaacatgaagatgggtgggctgccgcgtacaacacctccaactcagaagccccctagtccccctatgtcagggaaagggacacttgggcggcactccccctatcgcacactggagccagtgcgtcctccagtggtaccaaatgattacgtacctagcccaacccgtaatatggctccctcgcagcagagccctgtgaggacagcttctgtgaatcaaagaaatcgaacttacagcagcagtgggagtagtggagggagccacccaagtagtcggagcagcagtcgagagaacagtggaagtggtagtgtgggggttcctattgctgttcctactccatctcctcccagtgtctttccaggtcatcctgtacagttctacagcatgaataggcctgcctctcgccatactcccccaacaatagggggctcgttgccctatagacgccctccttccattacttcacaaacaagccttcagaatcagatgaatggaggacctttttatagccagaatccagtatctcttgctcctcctcctccctccatcctacaggtaactcctcagttacctttaatgggatttgtggccagagtccaagaaaatatttcagatacaccacctccaccgccacctgtggaagaaccagtctttgatgagtctcccccacctcctcctcctccagaagattacgaagaggaggaagctgctgtggttgagtatagtgatccttatgctgaagaggacccaccgtgggctccacgttcttacttggaaaaggttgtggcaatttatgactatacaaaagacaaggaagatgagctgtcctttcaggaaggagccattatttatgtcatcaagaagaatgacgattattaaaaacaaagcaagctgagtctgaacaaatggatctttctgccatcatttgtacaatgctgagctgtctggattgaaataaaatgaccatttttatgtatgtcaaaggt

SEQ ID NO: 319294 - DNA, 1590 bp, Homo sapiens
  misc_feature (28)..(28): n is a, c, g, or t
gagcgcgcgtgcgcgcgcccggccggcngtcgccgcggtgaccgtcctcggagtccgtcggctcgcgccccgcccccgtcgccccctcccctgtcgcgcgctggggctgtttctcgctccttccgagttaccgccgccgtcgccgccgctcctcctctcccggtcctgggtttccttggcgctgcggccgccgctccctctgcgacctgtatgaggaggaggaggaggaggatgtgaagatggcggagctgcagatgctgctggaagaggaaatcccggggggccgccgggccctcttcgacagctacacaaatctggaacgggtggccgattactgcgagaacaactacatacagtcagcagataagcagagagccctagaagaaaccaaagcctacaccacccaatccttagcaagtgttgcctatctgataaacaccttggccaacaatgtcctgcagatgctggatatccaggcatcccagctacgaaggatggaatcttcaatcaatcatatttcacaaacagttgatattcataaagagaaagttgcaagaagagaaattggtattttgactaccaataaaaacacttcaaggacacataagattattgctccagccaaccttgaacgaccagttcgttatattagaaaacctattgactatacaattctagatgatattggacatggagtaaaggtgagtacccagaacatgaagatgggtgggctgccgcgtacaacacctccaactcagaagccccctagtccccctatgtcagggaaagggacacttgggcggcactccccctatcgcacactggagccagtgcgtcctccagtggtaccaaatgattacgtacctagcccaacccgtaatatggctccctcgcagcagagccctgtgaggacagcttctgtgaatcaaagaaatcgaacttacagcagcagtgggagtagtggagggagccacccaagtagtcggagcagcagtcgagagaacagtggaagtggtagtgtgggggttcctattgctgttcctactccatctcctcccagtgtctttccaggtcatcctgtacagttctacagcatgaataggcctgcctctcgccatactcccccaacaatagggggctcgttgccctatagacgccctccttccattacttcacaaacaagccttcagaatcagatgaatggaggacctttttatagccagaatccagttcagatacacaaactcacggcactgttgaagaaccagctttgatgagttacgcaaatactcatctcagaagataggaaaggaggaagtgatgggtgagcataagaactatgcataacaggaccacgagggacacagtctaacgggaaagcttgtgcaattatgactagaaaaaaaaggagaaaaaagacattaagaagggaaaatgatgaaaagaaaaaaaaaggtgtacagagataaaggagaagaggaacggaaagaagataaggtaagaaaaaagagaggataaaagaacaaaataaggagaaaaaatgaaaaagtagctagaaagaagatatgtgtttttagactggaggacaag

SEQ ID NO: 319295 - DNA, 2297 bp, Homo sapiens
  misc_feature (28)..(28): n is a, c, g, or t
gagcgcgcgtgcgcgcgcccggccggcngtcgccgcggtgaccgtcctcggagtccgtcggctcgcgccccgcccccgtcgccccctcccctgtcgcgcgctggggctgtttctcgctccttccgagttaccgccgccgtcgccgccgctcctcctctcccggtcctgggtttccttggcgctgcggccgccgctccctctgcgacctgtatgaggaggaggaggaggaggatgtgaagatggcggagctgcagaatctgtggcattggatgttcttcattgcctgtgctaaggggttaacctcatggcccagtgggtaccctagccccttcttttcttccacttgtatgaagaggagggaaccaacatttaaataccacacttaaccatttttacaattatttcagatggcttttttcctctgtgacactgtaaattctgcattctctcagcacttgagtgcaccaaacgagtgaatgctgaactcacttgcatcccttcatgtttctgtttgtggattataaggatgatgaaatgtgaaagtctcccaacactctgagggtggtgaacgattgccacccgtttgattttaatgtgctgctgcatgagactgcattgttgctaatggccagtgtacccagatgtgaagtgtggtaggctggttcatatgtggaggtgggtgtgtgaagctagacacgaaggtccctaaggttctgaagagacttgaactgtggaaatgctcttagcaggcatcccgaacccctgcttcggtgctgttttgaggagtaggatcttggagttcagaccaactatgactatcatttccttcactatctagaaaaacgctattctactttggaagagaatagtagttattttcaagtctcctgacagtcactgggagtacaaggtttgctaatgtgctctctggacgttattaatggccagtattagttgctgctgtattactgactcgcttagctgtagaaagggtaatactctcctgattttgtatgattggactcttaagtagctgctgttagtcagaattaaaacccatctcagactaagaatataatgaataagattaataggccaaaatatgtatctaatcacattgataaaaattaatataactgacacaataaaacacatttcccccatctgtacaataaatacagcttcaaattcagtggagtctgtagggcagataactttaatcatcactactgtagtcagtataagaaatgctgaaaaaaatccaggagggcttgtctctttgtgggtggtcactgtgatgttgggccagctcctgttcaggtccagagctgctaacgtgggttctactcagtcccagtgacttggccagaatagagctttgccaggtaactgccctgtgctaggtgaaaggggaaaagcagtagctggatatatttcaaatgaggttttgaacaagttcagaaagtggaacttgattgaaaagtgaacaagtgtagtagtgtgtgagaaaattcagatggtgtcggatgcagaagttaatattccacttaatgttatctgagcattaaaaatcatcagcatttaactgagaccccactatagagtttccttatcaagactttttggttttaaagttgtttttaatgcattgcaagttacaatagctattttgcttttagatttttcccagcactttgtatttattagctttcattaacttgcctccagtatacattccacttcgtgcttttcttaggtcatttctacatcccttattccttgttttcctgcagtgtaatggccctgaatgtcctctgagccttcagctccattatggacccaaactagactatacttggataagttaagctcttcttcgtgtactggtctataattagaaaaactgttttaaattagatgttcccattatttatttaaacagctttttgctgagaaagcttagtggattaatgaggcagagggtgttttgaaatccaataaatagttcccacaggctgggtgtggtggcttatgcctgtaatcccagcactttcggaggccgaggtgggtggatcatgaggtcaataaattgagaccatcctggccaacatggtgaaaccccatctctactaaaaacacaaaaattagctgggcgtggtggcgcacacctgtagtcccagctacttgggaggctgaggcaggagaatcactggaacctgggaggcggaggttgcagtgagccgagattgtgccactgcactccagcctggtgacagagcgagactccatcaaaaaaa

SEQ ID NO: 319296 - DNA, 919 bp, Homo sapiens
aagtcctttatactgaagacctgtggttgggagcaggggtagtccatgggtctgctgattttttttccctatttagtactaatgtgtgtgtgatctttgttttacaaacagtaccttttgggttttctgcatattttataatttttgtacagttttgaattctatagattgtcttggaaggatactgtgtgatgggtcaggcacacagtaattggagacttttaatgtatgtaatatttcatagattgcatgctattaatcatctgtgagggtagtattttttgttttattgtaagtttccctctttttttataaattaaaagatggttggtattaggaatttcaaatgaatgcagaaaatcttacatgctgtgtactattaatattataacagacgatccaagtccaaaatctgaccaataaagcaaccattttatcaagatagagggattctaatgggagaggggattcttccctcctgaagtttgtgtgtccagtccccttaaaaaaaatgaatagttgtcttttcttgtcatattaatactcgaaagtccatggtggtattaatgaaagtacactttattgttgcctttgaacttacggccaaggcaataaatcagaaacaaaaatagtgccaatgtgtcaaaatcgacatctgagagattcagcctcccatttggaataaatatgaatcttctaagctatcttgtttaatattttccatcatttagctacttcctatctccctcagaggcgcctgctgttcccattttagagttgacagtggcctgctaattttgctatgttcctaaaagttactgggtgtgagacattttcatcccctcctttttcctactgctggtgtttattatccagctaggtcgacgcggccgcgaatttagtagtagtaggcggccgc

SEQ ID NO: 319297 - DNA, 500 bp, Homo sapiens
tttcaattctttaaaaaaaaatcagtatgtgatttccacgtaaagtcatacaacttagtttttctgagcagaatttttttgaatattttagtggttatttgctttttaaaataacattgtggtgaatggtatttcctttttatttaatcagacatccttacttttaaataacaaataatgaaagttgtgtgcacatgaacagaatttagaagtggcaaaggaaaagagaacatttttgaagctactttgtgctagggaattatactagcttatacaattctcataccaaacccatggtggaaaaactaggaattgggtaaattgaatcagatataataattacactaaataatcggttgtatcatgcatgcagaataactaatctggaacatatttaataattattattttgtttactccccagagagggcaagaacaaatattagacaccatggctattgtggacatggtatgtcaacttactgcttttttctgtattt

SEQ ID NO: 319298 - DNA, 445 bp, Homo sapiens
ataattttttcaaaatgtggtcaaaacaagcttattgaactcagttttcccctcaactttattaataagtaaatatatatatatatatacacacacacacacacacacacacacacacacacacatttttttttaacctgtcactgacttggagctcaaggaaattttattttgaagtggtacgcttttgaattacctttattgtagctacattcatctcagaaaatgtcgggaagtgctgatgatctcttactgtttataaatactcatgttttggtggctcttatttctttagcagcagtgggagtagtggagggagccacccaagtagtcggagcagcagtcgagagaacagtggaagtggtagtgtgggggttcctattgctgttcctactccatctcctcccagtgtctttccaggtaaaacattcatggtgcctcgtct

SEQ ID NO: 319299 - DNA, 2374 bp, Homo sapiens
cgggccccattgtgttgtggtaaatatgtagagggagtatagggctgtgactagtatgttgagtcctgtaagtaggagagtgatatttgatcaggagaacgtggttgcttagatttaaggtgagtacccagaacatgaagatgggtgggctgccgcgtacaacacctccaactcagaagccccctagtccccctatgtcagggaaagggacacttggcagcagtgggagtagtggagggagccacccaagtagtcggagcagcagtcgagagaacagtggaagtggtagtgtgggggttcctattgctgttcctactccatctcctcccagtgtctttccagcccctgctggctctgctggcactcctccccttcctgctacttctgcatctgcccctgctcctcttgttcctgctactgtcccttcctccactgccccagacgctgctgctgggggtgcccagacccttgctgatggcttcacttctccaactccccctgttgtttcttccactccccctacaggtcatcctgtacagttctacagcatgaataggcctgcctctcgccatactcccccaacaatagggggctcgttgccctatagacgccctccttccattacttcacaaacaagccttcagaatcagatgaatggaggacctttttatagccagaatccagtttcagatacaccacctccaccgccacctgtggaagaaccagtctttgatgagtctcccccacctcctcctcctccagaagattacgaagaggaggaagctgctgtggttgagtatagtgatccttatgctgaagaggacccaccgtgggctccacgttcttacttggaaaaggttgtggcaatttatgactatacaaaagacaaggaagatgagctgtcctttcaggaaggagccattatttatgtcatcaagaagaatgacgatggttggtatgagggagttatgaatggagtgactgggctttttcctgggaattacgttgagtctatcatgcattattctgagtaaagctcagcagggctgtgcttgcctcacaggaatagtcaggtcttcccagattatctgaaggccctggggattccactccagtaaagtagaatgaaggatacaaatgataaaaattacacttttttttttggtttattccccagtattaaaaacaaagcaagctgagtctgaacaaatggatctttctgccatcatttgtacaatgctgagctgtctggattgaaataaaatgaccatttttatgtatgtcaaaggtataacagcataactgtgtagccaaaacaaaatcagattaagactgattcagaaaaatctgggatctttctcaggaatactgtatacccttgggatttctcctcctgcagaatctgtggcattggatgttcttcattgcctgtgctaaggggttaacctcatggcccagtgggtaccctagccccttcttttcttccacttgtatgaagaggagggaaccaacatttaaataccacacttaaccatttttacaattatttcagatggcttttttcctctgtgacactgtaaattctgcattctctcagcacttgagtgcaccaaacgagtgaatgctgaactcacttgcatcccttcatgtttctgtttgtggattataaggatgatgaaatgtgaaagtctcccaacactctgagggtggtgaacgattgccacccgtttgattttaatgtgctgctgcatgagactgcattgttgctaatggccagtgtacccagatgtgaagtgtggtaggctggttcatatgtggaggtgggtgtgtgaagctagacacgaaggtccctaaggttctgaagagacttgaactgtggaaatgctcttagcaggcatcccgaacccctgcttcggtgctgttttgaggagtaggatcttggagttcagaccaactatgactatcatttccttcactatctagaaaaacgctattctactttggaagagaatagtagttattttcaagtctcctgacagtcactgggagtacaaggtttgctaatgtgctctctggacgttattaatggccagtattagttgctgctgtattactgactcgcttagctgtagaaagggtaatactctcctgattttgtatgattggactcttaagtagctgctgttagtcagaattaaaacccatctcagactaagaatataatgaataagattaataggccaaaatatgtatctaatcacattgataaaaattaatataactgacacaattatcaacataaaaccccctgccataacccaataccaaacgcccctcttcgtctgatccgtcctaatcacagcagtcctacccg

SEQ ID NO: 319300 - DNA, 2665 bp, Homo sapiens
  misc_feature (28)..(28): n is a, c, g, or t
gagcgcgcgtgcgcgcgcccggccggcngtcgccgcggtgaccgtcctcggagtccgtcggctcgcgccccgcccccgtcgccccctcccctgtcgcgcgctggggctgtttctcgctccttccgagttaccgccgccgtcgccgccgctcctcctctcccggtcctgggtttccttggcgctgcggccgccgctccctctgcgacctgtatgaggaggaggaggaggaggatgtgaagatggcggagctgcagatgctgctggaagaggaaatcccggggggccgccgggccctcttcgacagctacacaaatctggaacgggtggccgattactgcgagaacaactacatacagtcagcagataagcagagagccctagaagaaaccaaagcctacaccacccaatccttagcaagtgttgcctatctgataaacaccttggccaacaatgtcctgcagatgctggatatccaggcatcccagctacgaaggatggaatcttcaatcaatcatatttcacaaacagttgatattcataaagagaaagttgcaagaagagaaattggtattttgactaccaataaaaacacttcaaggacacataagattattgctccagccaaccttgaacgaccagttcgttatattagaaaacctattgactatacaattctagatgatattggacatggagtaaaggtgagtacccagaacatgaagatgggtgggctgccgcgtacaacacctccaactcagaagccccctagtccccctatgtcagggaaagggacacttgggcggcactccccctatcgcacactggagccagtgcgtcctccagtggtaccaaatgattacgtacctagcccaacccgtaatatggctccctcgcagcagagccctgtgaggacagcttctgtgaatcaaagaaatcgaacttacagcagcagtgggagtagtggagggagccacccaagtagtcggagcagcagtcgagagaacagtggaagtggtagtgtgggggttcctattgctgttcctactccatctcctcccagtgtctttccaggtcatcctgtacagttctacagcatgaataggcctgcctctcgccatactcccccaacaatagggggctcgttgccctatagacgccctccttccattacttcacaaacaagccttcagaatcagatgaatggaggacctttttatagccagaatccagtttcagatacaccacctccaccgccacctgtggaagaaccagtctttgatgagtctcccccacctcctcctcctccagaagattacgaagaggaggaagctgctgtggttgagtatagtgatccttatgctgaagaggacccaccgtgggctccacgttcttacttggaaaaggttgtggcaatttatgactatacaaaagacaaggaagatgagctgtcctttcaggaaggagccattatttatgtcatcaagaagaatgacgatcatgacatgtcctgaaggtcacctttgcctttgaaaaaggtttgatggaggaattcacaggtgactgacaagtctttgaaaagaatgggatctgctcacttctggtctttttggccgggaactcctgattggtgttaaggtggtaatttcccccatataagatttagaatcactgagtttgagctagatgaaatttttaaaatttctggttgtctcattagactgatgaggtgagttttcttcttcatatgaacagctagttaataacagcagagttctcactcagtgctcagtacttaattttccactgcaccacaactgtcttaactaaatgtgctgtatttttctttaaaagttaagagttctatttggtgttttcaggaatatacgtgaaaagacatgccatgttttggtaaataccatcagagttgtgtaaaggcgtgtactaagtgcaatcttaatttgtggaaataatcttcatttacccctcctaaaactacactcagtataaacactttcccataaggtgtgtgcagtaaaaatgttatattactccaacactggcaggagcacagcacagcagccttattggagagagccttataaaagtgattaaatggaggcattgagctcattacctttaagtttactttgtgctgacctttgttcctgttttgagaatctcatataattattaaaaaaaaaaaacaattaaaacgaaacggcggggcctagctgtgtataaatgatccttgctgaatatcttaaggttttttgtaagaaaaaagaaaaaccaacaaaaaaagcttattttcacattaaaatgaaacctcttttgcaacttaagaattctatggaaaagcagtttttatcatattttgtgtccatgcaccatttttcttaaaatggcttacaaaaaagaatgtaaacaatttgtgatctggccagttgtacttttagctcccagagggagagttggtggtattatgagttgagtaaaaaccatccaggggaacttgagggagcagtctgttgccagtaatgttccttgtgtgccattaaaccacctccagatgagtggaggaacatcactttttaattttttaattgtatttggaattgttgccgtgtactaagaacttgacctaaataaaatcccacaaagtata

SEQ ID NO: 319301 - DNA, 2942 bp, Homo sapiens
  misc_feature (28)..(28): n is a, c, g, or t
gagcgcgcgtgcgcgcgcccggccggcngtcgccgcggtgaccgtcctcggagtccgtcggctcgcgccccgcccccgtcgccccctcccctgtcgcgcgctggggctgtttctcgctccttccgagttaccgccgccgtcgccgccgctcctcctctcccggtcctgggtttccttggcgctgcggccgccgctccctctgcgacctgtatgaggaggaggaggaggaggatgtgaagatggcggagctgcagatgctgctggaagaggaaatcccggggggccgccgggccctcttcgacagctacacaaatctggaacgggtggccgattactgcgagaacaactacatacagtcagcagataagcagagagccctagaagaaaccaaagcctacaccacccaatccttagcaagtgttgcctatctgataaacaccttggccaacaatgtcctgcagatgctggatatccaggcatcccagctacgaaggatggaatcttcaatcaatcatatttcacaaacagttgatattcataaagagaaagttgcaagaagagaaattggtattttgactaccaataaaaacacttcaaggacacataagattattgctccagccaaccttgaacgaccagttcgttatattagaaaacctattgactatacaattctagatgatattggacatggagtaaaggtgagtacccagaacatgaagatgggtgggctgccgcgtacaacacctccaactcagaagccccctagtccccctatgtcagggaaagggacacttgggcggcactccccctatcgcacactggagccagtgcgtcctccagtggtaccaaatgattacgtacctagcccaacccgtaatatggctccctcgcagcagagccctgtgaggacagcttctgtgaatcaaagaaatcgaacttacagcagcagtgggagtagtggagggagccacccaagtagtcggagcagcagtcgagagaacagtggaagtggtagtgtgggggttcctattgctgttcctactccatctcctcccagtgtctttccaggtcatcctgtacagttctacagcatgaataggcctgcctctcgccatactcccccaacaatagggggctcgttgccctatagacgccctccttccattacttcacaaacaagccttcagaatcagatgaatggaggacctttttatagccagaatccagtttcagatacaccacctccaccgccacctgtggaagaaccagtctttgatgagtctcccccacctcctcctcctccagaagattacgaagaggaggaagctgctgtggttgagtatagtgatccttatgctgaagaggacccaccgtgggctccacgttcttacttggaaaaggttgtggcaatttatgactatacaaaagacaaggaagatgagctgtcctttcaggaaggagccattatttatgtcatcaagaagaatgacgatcatgacatgtcctgaaggtcacctttgcctttgaaaaaggtttgatggaggaattcacaggtgactgacaagtctttgaaaagaatgggatctgctcacttctggtctttttggccgggaactcctgattggtgttaaggtggtaatttcccccatataagatttagaatcactgagtttgagctagatgaaatttttaaaatttctggttgtctcattagactgatgaggtgagttttcttcttcatatgaacagctagttaataacagcagagttctcactcagtgctcagtacttaattttccactgcaccacaactgtcttaactaaatgtgctgtatttttctttaaaagttaagagttctatttggtgttttcaggaatatacgtgaaaagacatgccatgttttggtaaataccatcagagttgtgtaaaggcgtgtactaagtgcaatcttaatttgtggaaataatcttcatttacccctcctaaaactacactcagtataaacactttcccataaggtgtgtgcagtaaaaatgttatattactccaacactggcaggagcacagcacagcagccttattggagagagccttataaaagtgattaaatggaggcattgagctcattacctttaagtttactttgtgctgacctttgttcctgttttgagaatctcatataattattaaaaaaaaaaaacaattaaaacgaaacggcggggcctagctgtgtataaatgatccttgctgaatatcttaaggttttttgtaagaaaaaagaaaaaccaacaaaaaaagcttattttcacattaaaatgaaacctcttttgcaacttaagaattctatggaaaagcagtttttatcatattttgtgtccatgcaccatttttcttaaaatggcttacaaaaaagaatgtaaacaatttgtgatctggccagttgtacttttagctcccagagggagagttggtggtattatgagttgagtaaaaaccatccaggggaacttgagggagcagtctgttgccagtaatgttccttgtgtgccattaaaccacctccagatgagtggaggaacatcactttttaattttttaattgtatttggaattgttgccgtgtactaagaacttgacctaaataaaatcccacaaagtataaaaaaaaaaaaaaaaaaaaaaaaaaaaaaaaaaaaaaaaaaaaaaaagcaaaaaagaaaaaacaaaaagaaagagaaacaacaacacaacaaacgagacagaacacaccagacagcagcaccacaagcgcgcagaggcgagacagcacgagcagagcgaagcaaccatgcgagggcgcacagcgagtacgcgacgcagaagccagggggtcagccacagccgcagcccagtggtaaacgcgacacccgccgcacgcgcgttcgaccgacgcccaggc

SEQ ID NO: 319302 - DNA, 2605 bp, Homo sapiens
  misc_feature (28)..(28): n is a, c, g, or t
gagcgcgcgtgcgcgcgcccggccggcngtcgccgcggtgaccgtcctcggagtccgtcggctcgcgccccgcccccgtcgccccctcccctgtcgcgcgctggggctgtttctcgctccttccgagttaccgccgccgtcgccgccgctcctcctctcccggtcctgggtttccttggcgctgcggccgccgctccctctgcgacctgtatgaggaggaggaggaggaggatgtgaagatggcggagctgcagatgctgctggaagaggaaatcccggggggccgccgggccctcttcgacagctacacaaatctggaacgggtggccgattactgcgagaacaactacatacagtcagcagataagcagagagccctagaagaaaccaaagcctacaccacccaatccttagcaagtgttgcctatctgataaacaccttggccaacaatgtcctgcagatgctggatatccaggcatcccagctacgaaggatggaatcttcaatcaatcatatttcacaaacagttgatattcataaagagaaagttgcaagaagagaaattggtattttgactaccaataaaaacacttcaaggacacataagattattgctccagccaaccttgaacgaccagttcgttatattagaaaacctattgactatacaattctagatgatattggacatggagtaaaggtgagtacccagaacatgaagatgggtgggctgccgcgtacaacacctccaactcagaagccccctagtccccctatgtcagggaaagggacacttggcagcagtgggagtagtggagggagccacccaagtagtcggagcagcagtcgagagaacagtggaagtggtagtgtgggggttcctattgctgttcctactccatctcctcccagtgtctttccaggtcatcctgtacagttctacagcatgaataggcctgcctctcgccatactcccccaacaatagggggctcgttgccctatagacgccctccttccattacttcacaaacaagccttcagaatcagatgaatggaggacctttttatagccagaatccagtatctcttgctcctcctcctccctccatcctacaggtaactcctcagttacctttaatgggatttgtggccagagtccaagaaaatatttcagatacaccacctccaccgccacctgtggaagaaccagtctttgatgagtctcccccacctcctcctcctccagaagattacgaagaggaggaagctgctgtggttgagtatagtgatccttatgctgaagaggacccaccgtgggctccacgttcttacttggaaaaggttgtggcaatttatgactatacaaaagacaaggaagatgagctgtcctttcaggaaggagccattatttatgtcatcaagaagaatgacgatcatgacatgtcctgaaggtcacctttgcctttgaaaaaggtttgatggaggaattcacaggtgactgacaagtctttgaaaagaatgggatctgctcacttctggtctttttggccgggaactcctgattggtgttaaggtggtaatttcccccatataagatttagaatcactgagtttgagctagatgaaatttttaaaatttctggttgtctcattagactgatgaggtgagttttcttcttcatatgaacagctagttaataacagcagagttctcactcagtgctcagtacttaattttccactgcaccacaactgtcttaactaaatgtgctgtatttttctttaaaagttaagagttctatttggtgttttcaggaatatacgtgaaaagacatgccatgttttggtaaataccatcagagttgtgtaaaggcgtgtactaagtgcaatcttaatttgtggaaataatcttcatttacccctcctaaaactacactcagtataaacactttcccataaggtgtgtgcagtaaaaatgttatattactccaacactggcaggagcacagcacagcagccttattggagagagccttataaaagtgattaaatggaggcattgagctcattacctttaagtttactttgtgctgacctttgttcctgttttgagaatctcatataattattaaaaaaaaaaaacaattaaaacgaaacggcggggcctagctgtgtataaatgatccttgctgaatatcttaaggttttttgtaagaaaaaagaaaaaccaacaaaaaaagcttattttcacattaaaatgaaacctcttttgcaacttaagaattctatggaaaagcagtttttatcatattttgtgtccatgcaccatttttcttaaaatggcttacaaaaaagaatgtaaacaatttgtgatctggccagttgtacttttagctcccagagggagagttggtggtattatgagttgagtaaaaaccatccaggggaacttgagggagcagtctgttgccagtaatgttccttgtgtgccattaaaccacctccagatgagtggaggaacatcactttttaattttttaattgtatttggaattgttgccgtgtactaagaacttgacctaaataaaatcccacaaagtata

SEQ ID NO: 319303 - DNA, 4075 bp, Homo sapiens
  misc_feature (28)..(28): n is a, c, g, or t
gagcgcgcgtgcgcgcgcccggccggcngtcgccgcggtgaccgtcctcggagtccgtcggctcgcgccccgcccccgtcgccccctcccctgtcgcgcgctggggctgtttctcgctccttccgagttaccgccgccgtcgccgccgctcctcctctcccggtcctgggtttccttggcgctgcggccgccgctccctctgcgacctgtatgaggaggaggaggaggaggatgtgaagatggcggagctgcagatgctgctggaagaggaaatcccggggggccgccgggccctcttcgacagctacacaaatctggaacgggtggccgattactgcgagaacaactacatacagtcagcagataagcagagagccctagaagaaaccaaagcctacaccacccaatccttagcaagtgttgcctatctgataaacaccttggccaacaatgtcctgcagatgctggatatccaggcatcccagctacgaaggatggaatcttcaatcaatcatatttcacaaacagttgatattcataaagagaaagttgcaagaagagaaattggtattttgactaccaataaaaacacttcaaggacacataagattattgctccagccaaccttgaacgaccagttcgttatattagaaaacctattgactatacaattctagatgatattggacatggagtaaaggtgagtacccagaacatgaagatgggtgggctgccgcgtacaacacctccaactcagaagccccctagtccccctatgtcagggaaagggacacttgggcggcactccccctatcgcacactggagccagtgcgtcctccagtggtaccaaatgattacgtacctagcccaacccgtaatatggctccctcgcagcagagccctgtgaggacagcttctgtgaatcaaagaaatcgaacttacagcagcagtgggagtagtggagggagccacccaagtagtcggagcagcagtcgagagaacagtggaagtggtagtgtgggggttcctattgctgttcctactccatctcctcccagtgtctttccaggtcatcctgtacagttctacagcatgaataggcctgcctctcgccatactcccccaacaatagggggctcgttgccctatagacgccctccttccattacttcacaaacaagccttcagaatcagatgaatggaggacctttttatagccagaatccagtatctcttgctcctcctcctccctccatcctacaggtaactcctcagttacctttaatgggatttgtggccagagtccaagaaaatatttcagatacaccacctccaccgccacctgtggaagaaccagtctttgatgagtctcccccacctcctcctcctccagaagattacgaagaggaggaagctgctgtggttgagtatagtgatccttatgctgaagaggacccaccgtgggctccacgttcttacttggaaaaggttgtggcaatttatgactatacaaaagacaaggaagatgagctgtcctttcaggaaggagccattatttatgtcatcaagaagaatgacgatggttggtatgagggagttatgaatggagtgactgggctttttcctgggaattacgttgagtctatcatgcattattctgagtaaagctcagcagggctgtgcttgcctcacaggaatagtcaggtcttcccagattatctgaaggccctggggattccactccagtaaagtagaatgaaggatacaaatgataaaaattacacttttttttttggtttattccccagtattaaaaacaaagcaagctgagtctgaacaaatggatctttctgccatcatttgtacaatgctgagctgtctggattgaaataaaatgaccatttttatgtatgtcaaaggtataacagcataactgtgtagccaaaacaaaatcagattaagactgattcagaaaaatctgggatctttctcaggaatactgtatacccttgggatttctcctcctgcagaatctgtggcattggatgttcttcattgcctgtgctaaggggttaacctcatggcccagtgggtaccctagccccttcttttcttccacttgtatgaagaggagggaaccaacatttaaataccacacttaaccatttttacaattatttcagatggcttttttcctctgtgacactgtaaattctgcattctctcagcacttgagtgcaccaaacgagtgaatgctgaactcacttgcatcccttcatgtttctgtttgtggattataaggatgatgaaatgtgaaagtctcccaacactctgagggtggtgaacgattgccacccgtttgattttaatgtgctgctgcatgagactgcattgttgctaatggccagtgtacccagatgtgaagtgtggtaggctggttcatatgtggaggtgggtgtgtgaagctagacacgaaggtccctaaggttctgaagagacttgaactgtggaaatgctcttagcaggcatcccgaacccctgcttcggtgctgttttgaggagtaggatcttggagttcagaccaactatgactatcatttccttcactatctagaaaaacgctattctactttggaagagaatagtagttattttcaagtctcctgacagtcactgggagtacaaggtttgctaatgtgctctctggacgttattaatggccagtattagttgctgctgtattactgactcgcttagctgtagaaagggtaatactctcctgattttgtatgattggactcttaagtagctgctgttagtcagaattaaaacccatctcagactaagaatataatgaataagattaataggccaaaatatgtatctaatcacattgataaaaattaatataactgacacaataaaacacatttcccccatctgtacaataaatacagcttcaaattcagtggagtctgtagggcagataactttaatcatcactactgtagtcagtataagaaatgctgaaaaaaatccaggagggcttgtctctttgtgggtggtcactgtgatgttgggccagctcctgttcaggtccagagctgctaacgtgggttctactcagtcccagtgacttggccagaatagagctttgccaggtaactgccctgtgctaggtgaaaggggaaaagcagtagctggatatatttcaaatgaggttttgaacaagttcagaaagtggaacttgattgaaaagtgaacaagtgtagtagtgtgtgagaaaattcagatggtgtcggatgcagaagttaatattccacttaatgttatctgagcattaaaaatcatcagcatttaactgagaccccactatagagtttccttatcaagactttttggttttaaagttgtttttaatgcattgcaagttacaatagctattttgcttttagatttttcccagcactttgtatttattagctttcattaacttgcctccagtatacattccacttcgtgcttttcttaggtcatttctacatcccttattccttgttttcctgcagtgtaatggccctgaatgtcctctgagccttcagctccattatggacccaaactagactatacttggataagttaagctcttcttcgtgtactggtctataattagaaaaactgttttaaattagatgttcccattatttatttaaacagctttttgctgagaaagcttagtggattaatgaggcagagggtgttttgaaatccaataaatagttcccacaggctgggtgtggtggcttatgcctgtaatcccagcactttcggaggccgaggtgggtggatcatgaggtcaataaattgagaccatcctggccaacatggtgaaaccccatctctactaaaaacacaaaaattagctgggcgtggtggcgcacacctgtagtcccagctacttgggaggctgaggcaggagaatcactggaacctgggaggcggaggttgcagtgagccgagattgtgccactgcactccagcctggtgacagagcgagactccatcaaaaaaa

SEQ ID NO: 319304 - DNA, 3827 bp, Homo sapiens
  misc_feature (28)..(28): n is a, c, g, or t
gagcgcgcgtgcgcgcgcccggccggcngtcgccgcggtgaccgtcctcggagtccgtcggctcgcgccccgcccccgtcgccccctcccctgtcgcgcgctggggctgtttctcgctccttccgagttaccgccgccgtcgccgccgctcctcctctcccggtcctgggtttccttggcgctgcggccgccgctccctctgcgacctgtatgaggaggaggaggaggaggatgtgaagatggcggagctgcagatgctgctggaagaggaaatcccggggggccgccgggccctcttcgacagctacacaaatctggaacgggtggccgattactgcgagaacaactacatacagtcagcagataagcagagagccctagaagaaaccaaagcctacaccacccaatccttagcaagtgttgcctatctgataaacaccttggccaacaatgtcctgcagatgctggatatccaggcatcccagctacgaaggatggaatcttcaatcaatcatatttcacaaacagttgatattcataaagagaaagttgcaagaagagaaattggtattttgactaccaataaaaacacttcaaggacacataagattattgctccagccaaccttgaacgaccagttcgttatattagaaaacctattgactatacaattctagatgatattggacatggagtaaaggtgagtacccagaacatgaagatgggtgggctgccgcgtacaacacctccaactcagaagccccctagtccccctatgtcagggaaagggacacttgggcggcactccccctatcgcacactggagccagtgcgtcctccagtggtaccaaatgattacgtacctagcccaacccgtaatatggctccctcgcagcagagccctgtgaggacagcttctgtgaatcaaagaaatcgaacttacagcagcagtgggagtagtggagggagccacccaagtagtcggagcagcagtcgagagaacagtggaagtggtagtgtgggggttcctattgctgttcctactccatctcctcccagtgtctttccaggtcatcctgtacagttctacagcatgaataggcctgcctctcgccatactcccccaacaatagggggctcgttgccctatagacgccctccttccattacttcacaaacaagccttcagaatcagatgaatggaggacctttttatagccagaatccagtatctcttgctcctcctcctccctccatcctacaggtaactcctcagttacctttaatgggatttgtggccagagtccaagaaaatatttcagatacaccacctccaccgccacctgtggaagaaccagtctttgatgagtctcccccacctcctcctcctccagaagattacgaagaggaggaagctgctgtggttgagtatagtgatccttatgctgaagaggacccaccgtgggctccacgttcttacttggaaaaggttgtggcaatttatgactatacaaaagacaaggaagatgagctgtcctttcaggaaggagccattatttatgtcatcaagaagaatgacgatggttggtatgagggagttatgaatggagtgactgggctttttcctgggaattacgttgagtctatcatgcattattctgagtaaagctcagcagggctgtgcttgcctcacaggaatagtcaggtcttcccagattatctgaaggccctggggattccactccagtaaagtagaatgaaggatacaaatgataaaaattacacttttttttttggtttattccccagtattaaaaacaaagcaagctgagtctgaacaaatggatctttctgccatcatttgtacaatgctgagctgtctggattgaaataaaatgaccatttttatgtatgtcaaaggtataacagcataactgtgtagccaaaacaaaatcagattaagactgattcagaaaaatctgggatctttctcaggaatactgtatacccttgggatttctcctcctgcagaatctgtggcattggatgttcttcattgcctgtgctaaggggttaacctcatggcccagtgggtaccctagccccttcttttcttccacttgtatgaagaggagggaaccaacatttaaataccacacttaaccatttttacaattatttcagatggcttttttcctctgtgacactgtaaattctgcattctctcagcacttgagtgcaccaaacgagtgaatgctgaactcacttgcatcccttcatgtttctgtttgtggattataaggatgatgaaatgtgaaagtctcccaacactctgagggtggtgaacgattgccacccgtttgattttaatgtgctgctgcatgagactgcattgttgctaatggccagtgtacccagatgtgaagtgtggtaggctggttcatatgtggaggtgggtgtgtgaagctagacacgaaggtccctaaggttctgaagagacttgaactgtggaaatgctcttagcaggcatcccgaacccctgcttcggtgctgttttgaggagtaggatcttggagttcagaccaactatgactatcatttccttcactatctagaaaaacgctattctactttggaagagaatagtagttattttcaagtctcctgacagtcactgggagtacaaggtttgctaatgtgctctctggacgttattaatggccagtattagttgctgctgtattactgactcgcttagctgtagaaagggtaatactctcctgattttgtatgattggactcttaagtagctgctgttagtcagaattaaaacccatctcagactaagaatataatgaataagattaataggccaaaatatgtatctaatcacattgataaaaattaatataactgacacaataaaacacatttcccccatctgtacaataaatacagcttcaaattcagtggagtctgtagggcagataactttaatcatcactactgtagtcagtataagaaatgctgaaaaaaatccaggagggcttgtctctttgtgggtggtcactgtgatgttgggccagctcctgttcaggtccagagctgctaacgtgggttctactcagtcccagtgacttggccagaatagagctttgccaggtaactgccctgtgctaggtgaaaggggaaaagcagtagctggatatatttcaaatgaggttttgaacaagttcagaaagtggaacttgattgaaaagtgaacaagtgtagtagtgtgtgagaaaattcagatggtgtcggatgcagaagttaatattccacttaatgttatctgagcattaaaaatcatcagcatttaactgagaccccactatagagtttccttatcaagactttttggttttaaagttgtttttaatgcattgcaagttacaatagctattttgcttttagatttttcccagcactttgtatttattagctttcattaacttgcctccagtatacattccacttcgtgcttttcttaggtcatttctacatcccttattccttgttttcctgcagtgtaatggccctgaatgtcctctgagccttcagctccattatggacccaaactagactatacttggataagttaagctcttcttcgtgtactggtctataattagaaaaactgttttaaattagatgttcccattatttatttaaacagctttttgctgagaaagcttagtggattaatgaggcggaggttgcagtgagccgagattgtgccactgcactccagcctggtgacagagcgagactccatcaaaaaaa

SEQ ID NO: 319305 - DNA, 2016 bp, Homo sapiens
cggtaccggtgttatcgagtgccaccccgccctagtccctatgtcagtgaaagggacacttgggcggcactccccctatcgcacactggagccagtgcgtcctccagtggtaccaaatgattacgtacctagcccaacccgtaatatggctccctcgcagcagagccctgtgaggacagcttctgtgaatcaaagaaatcgaacttacagcagcagtgggagtagtggagggagccacccaagtagtcggagcagcagtcgagagaacagtggaagtggtagtgtgggggttcctattgctgttcctactccatctcctcccagtgtctttccaggtcatcctgtacagttctacagcatgaataggcctgcctctcgccatactcccccaacaatagggggctcgttgccctatagacgccctccttccattacttcacaaacaagccttcagaatcagatgaatggaggacctttttatagccagaatccagtatctcttgctcctcctcctccctccatcctacaggtaactcctcagttacctttaatgggatttgtggccagagtccaagaaaatatttcagatacaccacctccaccgccacctgtggaagaaccagtctttgatgagtctcccccacctcctcctcctccagaagattacgaagaggaggaagctgctgtggttgagtatagtgatccttatgctgaagaggacccaccgtgggctccacgttcttacttggaaaaggttgtggcaatttatgactatacaaaagacaaggaagatgagctgtcctttcaggaaggagccattatttatgtcatcaagaagaatgacgatcatgacatgtcctgaaggtcacctttgcctttgaaaaaggtttgatggaggaattcacaggtgactgacaagtctttgaaaagaatgggatctgctcacttctggtctttttggccgggaactcctgattggtgttaaggtggtaatttcccccatataagatttagaatcactgagtttgagctagatgaaatttttaaaatttctggttgtctcattagactgatgaggtgagttttcttcttcatatgaacagctagttaataacagcagagttctcactcagtgctcagtacttaattttccactgcaccacaactgtcttaactaaatgtgctgtatttttctttaaaagttaagagttctatttggtgttttcaggaatatacgtgaaaagacatgccatgttttggtaaataccatcagagttgtgtaaaggcgtgtactaagtgcaatcttaatttgtggaaataatcttcatttacccctcctaaaactacactcagtataaacactttcccataaggtgtgtgcagtaaaaatgttatattactccaacactggcaggagcacagcacagcagccttattggagagagccttataaaagtgattaaatggaggcattgagctcattacctttaagtttactttgtgctgacctttgttcctgttttgagaatctcatataattattaaaaaaaaaaaacaattaaaacgaaacggcggggcctagctgtgtataaatgatccttgctgaatatcttaaggttttttgtaagaaaaaagaaaaaccaacaaaaaaagcttattttcacattaaaatgaaacctcttttgcaacttaagaattctatggaaaagcagtttttatcatattttgtgtccatgcaccatttttcttaaaatggcttacaaaaaagaatgtaaacaatttgtgatctggccagttgtacttttagctcccagagggagagttggtggtattatgagttgagtaaaaaccatccaggggaacttgagggagcagtctgttgccagtaatgttccttgtgtgccattaaaccacctccagatgagtggaggaacatcactttttaattttttaattgtatttggaattgttgccgtgtactaagaacttgacctaaataaaatcccacaaagtata

SEQ ID NO: 319306 - DNA, 4189 bp, Homo sapiens
  misc_feature (28)..(28): n is a, c, g, or t
gagcgcgcgtgcgcgcgcccggccggcngtcgccgcggtgaccgtcctcggagtccgtcggctcgcgccccgcccccgtcgccccctcccctgtcgcgcgctggggctgtttctcgctccttccgagttaccgccgccgtcgccgccgctcctcctctcccggtcctgggtttccttggcgctgcggccgccgctccctctgcgacctgtatgaggaggaggaggaggaggatgtgaagatggcggagctgcagatgctgctggaagaggaaatcccggggggccgccgggccctcttcgacagctacacaaatctggaacgggtggccgattactgcgagaacaactacatacagtcagcagataagcagagagccctagaagaaaccaaagcctacaccacccaatccttagcaagtgttgcctatctgataaacaccttggccaacaatgtcctgcagatgctggatatccaggcatcccagctacgaaggatggaatcttcaatcaatcatatttcacaaacagttgatattcataaagagaaagttgcaagaagagaaattggtattttgactaccaataaaaacacttcaaggacacataagattattgctccagccaaccttgaacgaccagttcgttatattagaaaacctattgactatacaattctagatgatattggacatggagtaaagtggttgcttagatttaaggtgagtacccagaacatgaagatgggtgggctgccgcgtacaacacctccaactcagaagccccctagtccccctatgtcagggaaagggacacttgggcggcactccccctatcgcacactggagccagtgcgtcctccagtggtaccaaatgattacgtacctagcccaacccgtaatatggctccctcgcagcagagccctgtgaggacagcttctgtgaatcaaagaaatcgaacttacagcagcagtgggagtagtggagggagccacccaagtagtcggagcagcagtcgagagaacagtggaagtggtagtgtgggggttcctattgctgttcctactccatctcctcccagtgtctttccagcccctgctggctctgctggcactcctccccttcctgctacttctgcatctgcccctgctcctcttgttcctgctactgtcccttcctccactgccccagacgctgctgctgggggtgcccagacccttgctgatggcttcacttctccaactccccctgttgtttcttccactccccctacaggtcatcctgtacagttctacagcatgaataggcctgcctctcgccatactcccccaacaatagggggctcgttgccctatagacgccctccttccattacttcacaaacaagccttcagaatcagatgaatggaggacctttttatagccagaatccagtttcagatacaccacctccaccgccacctgtggaagaaccagtctttgatgagtctcccccacctcctcctcctccagaagattacgaagaggaggaagctgctgtggttgagtatagtgatccttatgctgaagaggacccaccgtgggctccacgttcttacttggaaaaggttgtggcaatttatgactatacaaaagacaaggaagatgagctgtcctttcaggaaggagccattatttatgtcatcaagaagaatgacgatggttggtatgagggagttatgaatggagtgactgggctttttcctgggaattacgttgagtctatcatgcattattctgagtaaagctcagcagggctgtgcttgcctcacaggaatagtcaggtcttcccagattatctgaaggccctggggattccactccagtaaagtagaatgaaggatacaaatgataaaaattacacttttttttttggtttattccccagtattaaaaacaaagcaagctgagtctgaacaaatggatctttctgccatcatttgtacaatgctgagctgtctggattgaaataaaatgaccatttttatgtatgtcaaaggtataacagcataactgtgtagccaaaacaaaatcagattaagactgattcagaaaaatctgggatctttctcaggaatactgtatacccttgggatttctcctcctgcagaatctgtggcattggatgttcttcattgcctgtgctaaggggttaacctcatggcccagtgggtaccctagccccttcttttcttccacttgtatgaagaggagggaaccaacatttaaataccacacttaaccatttttacaattatttcagatggcttttttcctctgtgacactgtaaattctgcattctctcagcacttgagtgcaccaaacgagtgaatgctgaactcacttgcatcccttcatgtttctgtttgtggattataaggatgatgaaatgtgaaagtctcccaacactctgagggtggtgaacgattgccacccgtttgattttaatgtgctgctgcatgagactgcattgttgctaatggccagtgtacccagatgtgaagtgtggtaggctggttcatatgtggaggtgggtgtgtgaagctagacacgaaggtccctaaggttctgaagagacttgaactgtggaaatgctcttagcaggcatcccgaacccctgcttcggtgctgttttgaggagtaggatcttggagttcagaccaactatgactatcatttccttcactatctagaaaaacgctattctactttggaagagaatagtagttattttcaagtctcctgacagtcactgggagtacaaggtttgctaatgtgctctctggacgttattaatggccagtattagttgctgctgtattactgactcgcttagctgtagaaagggtaatactctcctgattttgtatgattggactcttaagtagctgctgttagtcagaattaaaacccatctcagactaagaatataatgaataagattaataggccaaaatatgtatctaatcacattgataaaaattaatataactgacacaataaaacacatttcccccatctgtacaataaatacagcttcaaattcagtggagtctgtagggcagataactttaatcatcactactgtagtcagtataagaaatgctgaaaaaaatccaggagggcttgtctctttgtgggtggtcactgtgatgttgggccagctcctgttcaggtccagagctgctaacgtgggttctactcagtcccagtgacttggccagaatagagctttgccaggtaactgccctgtgctaggtgaaaggggaaaagcagtagctggatatatttcaaatgaggttttgaacaagttcagaaagtggaacttgattgaaaagtgaacaagtgtagtagtgtgtgagaaaattcagatggtgtcggatgcagaagttaatattccacttaatgttatctgagcattaaaaatcatcagcatttaactgagaccccactatagagtttccttatcaagactttttggttttaaagttgtttttaatgcattgcaagttacaatagctattttgcttttagatttttcccagcactttgtatttattagctttcattaacttgcctccagtatacattccacttcgtgcttttcttaggtcatttctacatcccttattccttgttttcctgcagtgtaatggccctgaatgtcctctgagccttcagctccattatggacccaaactagactatacttggataagttaagctcttcttcgtgtactggtctataattagaaaaactgttttaaattagatgttcccattatttatttaaacagctttttgctgagaaagcttagtggattaatgaggcagagggtgttttgaaatccaataaatagttcccacaggctgggtgtggtggcttatgcctgtaatcccagcactttcggaggccgaggtgggtggatcatgaggtcaataaattgagaccatcctggccaacatggtgaaaccccatctctactaaaaacacaaaaattagctgggcgtggtggcgcacacctgtagtcccagctacttgggaggctgaggcaggagaatcactggaacctgggaggcggaggttgcagtgagccgagattgtgccactgcactccagcctggtgacagagcgagactccatcaaaaaaa

SEQ ID NO: 319307 - DNA, 1377 bp, Homo sapiens
  misc_feature (28)..(28): n is a, c, g, or t
  misc_feature (1350)..(1350): n is a, c, g, or t
gagcgcgcgtgcgcgcgcccggccggcngtcgccgcggtgaccgtcctcggagtccgtcggctcgcgccccgcccccgtcgccccctcccctgtcgcgcgctggggctgtttctcgctccttccgagttaccgccgccgtcgccgccgctcctcctctcccggtcctgggtttccttggcgctgcggccgccgctccctctgcgacctgtatgaggaggaggaggaggaggatgtgaagatggcggagctgcagatgctgctggaagaggaaatcccggggggccgccgggccctcttcgacagctacacaaatctggaacgggtggccgattactgcgagaacaactacatacagtcagcagataagcagagagccctagaagaaaccaaagcctacaccacccaatccttagcaagtgttgcctatctgataaacaccttggccaacaatgtcctgcagatgctggatatccaggcatcccagctacgaaggatggaatcttcaatcaatcatatttcacaaacagttgatattcataaagagaaagttgcaagaagagaaattggtattttgactaccaataaaaacacttcaaggacacataagattattgctccagccaaccttgaacgaccagttcgttatattagaaaacctattgactatacaattctagatgatattggacatggagtaaaggtgagtacccagaacatgaagatgggtgggctgccgcgtacaacacctccaactcagaagccccctagtccccctatgtcagggaaagggacacttggcagcagtgggagtagtggagggagccacccaagtagtcggagcagcagtcgagagaacagtggaagtggtagtgtgggggttcctattgctgttcctactccatctcctcccagtgtctttccaggtcatcctgtacagttctacagcatgaataggcctgcctctcgccatactcccccaacaatagggggctcgttgccctatagacgccctccttccattacttcacaaacaagccttcagaatcagatgaatggaggacctttttatagccagaatccagtttcagatacaccacctccaccgccacctgtggaagaaccagtctttgatgagtctcccccacctcctcctcctccagaagattacgaagaggaggaagctgctgtggttgagtatagtgatccttatgctgaagaggacccaccgtgggctccacgttcttacttggaaaaggttgtggcaatttatgactatacaaaagacaaggaagatgagctgtcctttcaggaaggagccattatttatgtcatcaagaagaatgacgatncaagagtgaaacaatgaatcaaaaaag

SEQ ID NO: 319308 - DNA, 762 bp, Homo sapiens
gataagcttgatatcgacttcgtgttcctgggtttccttggcgctgcggccgccgctccctctgcgacctgtatgaggaggaggaggaggaggatgtgaagatggcggagctgcagatgctgctggaagaggaaatcccggggggccgccgggccctcttcgacagctacacaaatctggaacgggtggccgattactgcgagaacaactacatacagtcagcagataagcagagagccctagaagaaaccaaagcctacaccacccaatccttagcaagtgttgcctatctgataaacaccttggccaacaatgtcctgcagatgctggatatccaggcatcccagctacgaaggatggaatcttcaatcaatcatatttcacaagtgagaccacaatattttcctatttgcctatgaggaacccttaataataaacacaggctatctgtaatgctggcagcttttattatgtaagttaactcacatgtacgatttggaaaatagcaacttaatattaggttgtttttagattctgtctttttgtgggatggttatcttctctgtgattttgataggaaagtaaatcgtaatgaattttattaaaactcagttgtcatggtaacataatcagccctataatgaaacttcatccattcccccgcctttttttttttttaaaacaaatttcatacttctttatcaatttaaaaagataaacttgatagattggtggcttgttcaaaaatttttttttcttttg

SEQ ID NO: 319309 - DNA, 865 bp, Homo sapiens
ggagagcgcgcggcggacgcgcccgggacgcgcggcggcaccgggaggccgggccgagcgaaatgtggtctcgctgtgttgcccagtactggcctcaagcgagcctcctacctcagccttccaaagtgttgggattataggcgtgagccactgcacctggcacagtcttaaaacattttggaaaaagttgaagctctccttttctaccctcctgattctgtgcttctgttggagtgcatatcacttgatggcttctaagacaaatgctaaattcttgtcagattacgcagttttgagagattacctgaagttgcactcaaaagcaagatatactactaactttgaaatggaataaggccctccctatcctgaagacattagctgagagtctggcaccttttaaaggtctgatcatcaattgtctctctgggcggccacctatgagacttcatctgtgtgctttataaatagcagtccagggcaacagtacttgataaaaaggttataccttattggtgtggacgttgtctaaatttcggtagccatggcacaagaatatagatgtggagaaagtttgggacctcaagagaaagagtggatgtctacagctgcacaaggaagggcaaaccagcagagctcctgggacctgctgaaggaggaaagatgcccgagagctgggcagaggaaaatccctcctgctttcaacaactatgcatttccaaatgtcgaaagagagattgcagagctcaacaacatgaatattttctggcttacctgccaatggtttttttctccccctaaaatgaaacaatatccattatctctagcgacatgtctattttaactttgtcactgttaacagtgg

SEQ ID NO: 319310 - DNA, 604 bp, Homo sapiens
ttttttttttttgagacggagtctcgctcttttgctcaggccggactgcagtggcgctatctctgctcactgcaacctccgcctcctgggttcacgccattctcctgcctcagcctcccgaatggctgggactacaggcgcctgccactgcacccggctaattttttgtatttttagtagagatgaggtttcgccatgttggctaggcttgtcttgagctcttgacctcagatgatcggcctgcctcggcttcccaaagtgttagaattacaggcgtgagccaccatgcccggatgtattaatggtattttaataataactcttggttgataaacttaaacatgacagttttgagcaggcaccttaagttctgtatactaccgtgaggccaggcacttgtttagcttctgtgtcatacagctaccccttgtattttgttctttttttttttagtataataaatctatagttttattaacacagaaactgatagtgtggtatgaggtttacgtttaaacaaagttttcacagaaatctaacacatgcctaaaaagattttacaatctagctctagatgcaagtccagacaatatcaagaactgat

SEQ ID NO: 319311 - DNA, 424 bp, Homo sapiens
catgattggcatgagaaccagaggatccctattttgcctgtggaaatcaccacaggtttggagtgagccgtagatccccagcctccattgacaggcagaacacccagtcagatattggtggcagcggaaaatccacgcctagctggcaaagaagtgaggatagcattgctgaccagatggcttacagttatagaggacctcaggatttcaattcttttgtcctcgagcagcatgaatatacaggtaaaatatttccaaagtgtcatggtaagtaacacgtgattgcatccatgcctgtctaggtaatgtagaccaagctaggttagccacacttggcaatgaatgaatttcataaatttaattcatataatctaaatttttcccccaaaccaaaagttgattctgaactttgctgcgttgttca

SEQ ID NO: 319312 - DNA, 6518 bp, Homo sapiens
ggagagcgcgcggcggacgcgcccgggacgcgcggcggcaccgggaggccgggccgagcgaaatgtggtctcgctgtgttgcccagtactggcctcaagcgagcctcctacctcagccttccaaagtgttgggattataggcgtgagccactgcacctggcacagtcttaaaacattttggaaaaagttgaagctctccttttctaccctcctgattctgtgcttctgttggagtgcatatcacttgatggcttctaagacaaatgctaaattcttgtcagattacgcagttttgagagattacctgaagttgcactcaaaagcaagatatactactaactttgaaatggaataaggccctccctatcctgaagacattagctgagagtctggcaccttttaaaggtctgatcatcaattgtctctctgggcggccacctatgagacttcatctgtgtgctttataaatagcagtccagggcaacagtacttgataaaaaggttataccttattggtgtggacgttgtctaaatttcggtagccatggcacaagaatataagaaagcatgggattatggcaaccacagaatctcagtagtacaagttccattcagttttttctgaaagaaagccctctgttaaagtgaagcaaagaaactgttgtggattataacgtttagaagttccaatttttcagtgctttacaaataaagcatcatttaaccttttaaatgaaaaagattaagatctcatgcaactgttgtattttctggaagccattctccaaaagggaagtgcacatttaaaacacagatatgatggtccttgctgcagggatttaagtctacttgcttttacatcatgaccagcttgaaacggtcacagacagaaaggcctcttgccactgacagggcctctgttgttggcacagacggcacccccaaagtccacactgatgatttctacatgcggcgcttccggtcccaaaatggcagcttaggatcatcagttatggctcctgtaggacccccccgaagtgaaggttctcaccatataacctcaacccccggagtcccaaaaatgggggtaagggcaaggattgcagattggcccccaagaaaggaaaacataaaagaatctagccgttcaagccaggaaatagaaacctcaagttgccttgatagcctgtcctccaaaagcagtcctgtgagtcagggaagttctgttagcctcaattccaatgactcagccatgctgaaaagcatacagaacacgctgaaaaacaagacaagaccgtcggagaacatggactccagatttctcatgcctgaagcctaccccagctcccccagaaaagctcttcgcagaatacgccagcgaagcaacagtgatatcaccataagtgaacttgatgtggatagctttgatgaatgtatctcacctacatacaagactggaccatcactgcacagggaatatggtagcacatcttcaattgataaacagggaacatctggagaaagcttttttgatttgttaaagggctacaaagatgacaaatctgatcgaggtccaactccaaccaagctcagtgactttctcattactggtggtggcaagggttctggtttctctttggatgtaatagacgggcctatctcacagagagagaacctcaggctttttaaggaaagggaaaaaccactcaagcgacgttcaaaatctgaaactggagactcctctatttttcgtaaattgcgcaatgccaaaggtgaagaacttgggaagtcatcagatcttgaagataaccgatcagaagactctgtcaggccctggacatgtccaaagtgctttgcccactatgatgtccagagtatattatttgatttgaatgaggcaattatgaacaggcacaatgttattaagaggagaaacaccaccactggagcttccgcagctgccgtggcatccttggtctctggacctctgtctcattcagccagttttagctccccaatgggcagcacagaggacctgaattccaaaggaagcctcagcatggaccagggagatgataaaagcaatgagcttgtaatgagctgtccatattttcggaatgagataggtggagaaggggagaggaaaatcagcctttcaaaatcaaattctggctcctttagtggatgtgaaagtgcctcctttgagtctacccttagttcccattgcacaaatgcaggagtggcagtacttgaagtgcccaaggagaacttggtgttgcacctagatagagtgaaaagatacatcgtggaacacgtagatctgggtgcatactattatagaaaatttttctaccagaaggaacactggaactattttggggctgatgagaatcttggtccagtggctgtgagcattcgaagggaaaaaccagatgaaatgaaagaaaatggatctccgtacaactaccgaataatttttagaactagtgagctcatgacactgagaggttcggtcctggaggacgccattccgtcgacagccaagcactcgacagccagaggcctgcctctcaaagaagtgctggagcacgtggttcctgagctcaatgtccagtgcctgcggttggccttcaacacacccaaggtcacagagcagctcatgaaactggatgaacaagggctgaactaccagcagaaagtaggcatcatgtactgcaaagctggacagagcactgaagaagagatgtacaacaatgagtcagctggcccagcctttgaagaattccttcaactattgggagagcgagttcggctcaaaggatttgagaagtatcgagcacagcttgataccaaaactgactccactggaacccattctctgtacacaacatacaaagattatgaaattatgttccatgtttctaccatgctgccatacacacccaacaacaaacaacagctcctgaggaagcggcacattggaaatgatatcgtaacaattgttttccaagagcctggagcacagccattcagcccaaaaaacatccgatcccacttccagcacgttttcgtcatcgtcagggtgcacaatccgtgctctgacagtgtctgttatagtgtggctgttaccaggtccagagatgtgccttcctttgggcctcccattcctaaaggggtcactttccctaagtcaaatgtgttcagggacttccttttggcgaaagtgattaatgcagaaaatgctgctcataaatcggagaagtttcgggccatggcaactcggacccgccaggaatacctgaaagatctggcagaaaagaatgtcaccaacacccctatcgacccttctggcaagtttccgttcatctctctggcttccaagaagaaggaaaagtctaagccatatccaggagccgagctcagcagcatgggggccattgtatgggcagtccgggctgaagactacaacaaggccatggaactagactgccttttagggatctccaatgagttcattgtgctcattgaacaggaaacaaagagcgtggtcttcaattgttcctgtagagatgtgatagggtggacttcaactgacaccagcctcaaaatcttctatgaacgaggagaatgtgtttcagtgggtagttttattaacattgaggagatcaaagagattgtcaaaaggttgcagtttgtttcaaaaggctgtgaatcggtggagatgactctgcgaagaaatgggctaggacagcttggcttccatgtcaactatgagggcattgtggcggatgtggagccctacggttatgcctggcaggcagggctgaggcagggcagtcgcctggtggagatctgcaaggtggcggtagccactctgagccatgagcagatgatcgacctcctgagaacatctgtcacggtgaaggttgtcatcattcccccgcatgatgactgcaccccgcggaggagttgctctgaaacctaccgcatgccagtgatggagtacaaaatgaatgaaggtgtttcatacgaattcaagtttcccttccgaaataataacaagtggcagaggaacgccagcaaggggcctcattcacctcaagtcccgtcccaggtgcagagtcccatgacctcgcggctgaatgctggaaaaggagatgggaagatgcctcctccagaaagagccgccaacatccctcgaagcatctccagtgacgggcgcccactagagaggcggctgtctcctggttcggacatctatgtgacggtctcatccatggctttagcaagatcccagtgtcggaactctcctagcaacttgtcttcatccagtgatactggttctgtggggggcacttacaggcagaagtccatgcccgaagggtttggagtgagccgtagatccccagcctccattgacaggcagaacacccagtcagatattggtggcagcggaaaatccacgcctagctggcaaagaagtgaggatagcattgctgaccagatggcttacagttatagaggacctcaggatttcaattcttttgtcctcgagcagcatgaatatacagagccaacatgccatctcccagcagtatcaaaggtactgccagctttccgagagagccccagtgggagattaatgcggcaggatccagtggttcatttgtctccaaacaaacaagggcattctgatagccactactcgagccactccagtagcaatactctctccagcaatgcgtcaagtgcccatagtgatgagaagtggtacgatggggaccgcacagaatccgaactcaacagctataactatctgcaaggcacctctgctgacagtggcattgacaccacctcttatggccccagccacggcagcacagcctcgctgggggctgccacatcgtcacctcgctcagggccaggcaaggagaaagtggcacccctatggcacagctccagtgaagtaatctccatggcagatcggactttggagacagagagccacggcctggaccggaaaacagagtcttccctgagcttagacatacacagcaagagccaagccggctcgacccctctgacaagggagaacagcaccttcagtataaacgatgctgcttcccacacaagtaccatgagctcccgacactctgccagcccagtggttttcaccagtgcccggagttcacctaaagaagagcttcatccagctgccccctcacagctcgcaccatccttctcctcctcttcctcctcctcctctggtcctaggagtttttaccctcgccagggcgctactagcaagtacctgattggatggaaaaaacccgaaggaaccataaactccgtgggatttatggacacgagaaagcgtcatcagagcgatggcaatgaaatagcccacaccaggctgcgtgcctcaaccagagacctccgggcatctcctaagccaacctccaagtccaccattgaagaagatctaaagaaactaattgatcttgaaagcccaactcctgaatcacagaagagttttaagttccacgcactctcctctcctcagtctcctttccccagcacccccacctcacggcgggccttgcacagaacactgtcggacgagagcatttacaatagccagagggagcactttttcacctccagggcgtcacttctggaccaagccctgcccaacgacgtcctcttcagtagcacgtacccttctctccccaagtcgctcccgttgaggaggccttcttacaccttaggaatgaaatcgctgcatggagagttctcagcctcggacagctccctcactgacatccaggagacccgcaggcagcctatgcccgaccctggcctgatgcccctgcctgacactgctgcagacttggattggtccaacctggtagatgctgccaaagcctatgaggtccagagagcctcattttttgctgctagtgatgaaaaccatcgccccttgagtgctgcatccaacagtgatcagctggaggaccaggctctggcccagatgaagccttacagcagcagtaaagactcctctcccactctggcttctaaagtggaccagctggaaggtatgctgaagatgcttcgggaagatttgaagaaggaaaaagaagacaaagctcaccttcaggcggaggtgcagcacctgcgagaggacaacctgaggctacaggaggagtcccagaacgcctcggacaagctgaagaagttcacagaatgggtcttcaacaccatagacatgagctagggaaggctgaggaggacaggagaagggcccagacactccctccagtgagtgtcctgcagcccttattccctccatagaaagcatcctcagagcaccttccctggcttcctactctgccccctttcggggagtgcacaacacaatagttgcagatcaacaatcatcacctgccttttgtagaaaagaaaaacaaaaaaagtaaataaaaattttaaacagtaaaataaaagtttaactgcta

SEQ ID NO: 319313 - DNA, 6455 bp, Homo sapiens
ggagagcgcgcggcggacgcgcccgggacgcgcggcggcaccgggaggccgggccgagcgaaatgtggtctcgctgtgttgcccagtactggcctcaagcgagcctcctacctcagccttccaaagtgttgggattataggcgtgagccactgcacctggcacagtcttaaaacattttggaaaaagttgaagctctccttttctaccctcctgattctgtgcttctgttggagtgcatatcacttgatggcttctaagacaaatgctaaattcttgtcagattacgcagttttgagagattacctgaagttgcactcaaaagcaagatatactactaactttgaaatggaataaggccctccctatcctgaagacattagctgagagtctggcaccttttaaaggtctgatcatcaattgtctctctgggcggccacctatgagacttcatctgtgtgctttataaatagcagtccagggcaacagtacttgataaaaaggttataccttattggtgtggacgttgtctaaatttcggtagccatggcacaagaatataagaaagcatgggattatggcaaccacagaatctcagtagtacaagttccattcagttttttctgaaagaaagccctctgttaaagtgaagcaaagaaactgttgtggattataacgtttagaagttccaatttttcagtgctttacaaataaagcatcatttaaccttttaaatgaaaaagattaagatctcatgcaactgttgtattttctggaagccattctccaaaagggaagtgcacatttaaaacacagatatgatggtccttgctgcagggatttaagtctacttgcttttacatcatgaccagcttgaaacggtcacagacagaaaggcctcttgccactgacagggcctctgttgttggcacagacggcacccccaaagtccacactgatgatttctacatgcggcgcttccggtcccaaaatggcagcttaggatcatcagttatggctcctgtaggacccccccgaagtgaaggttctcaccatataacctcaacccccggagtcccaaaaatgggggtaagggcaaggattgcagattggcccccaagaaaggaaaacataaaagaatctagccgttcaagccaggaaatagaaacctcaagttgccttgatagcctgtcctccaaaagcagtcctgtgagtcagggaagttctgttagcctcaattccaatgactcagccatgctgaaaagcatacagaacacgctgaaaaacaagacaagaccgtcggagaacatggactccagatttctcatgcctgaagcctaccccagctcccccagaaaagctcttcgcagaatacgccagcgaagcaacagtgatatcaccataagtgaacttgatgtggatagctttgatgaatgtatctcacctacatacaagactggaccatcactgcacagggaatatggtagcacatcttcaattgataaacagggaacatctggagaaagcttttttgatttgttaaagggctacaaagatgacaaatctgatcgaggtccaactccaaccaagctcagtgactttctcattactggtggtggcaagggttctggtttctctttggatgtaatagacgggcctatctcacagagagagaacctcaggctttttaaggaaagggaaaaaccactcaagcgacgttcaaaatctgaaactggagactcctctatttttcgtaaattgcgcaatgccaaaggtgaagaacttgggaagtcatcagatcttgaagataaccgatcagaagactctgtcaggccctggacatgtccaaagtgctttgcccactatgatgtccagagtatattatttgatttgaatgaggcaattatgaacaggcacaatgttattaagaggagaaacaccaccactggagcttccgcagctgccgtggcatccttggtctctggacctctgtctcattcagccagttttagctccccaatgggcagcacagaggacctgaattccaaaggaagcctcagcatggaccagggagatgataaaagcaatgagcttgtaatgagctgtccatattttcggaatgagataggtggagaaggggagaggaaaatcagcctttcaaaatcaaattctggctcctttagtggatgtgaaagtgcctcctttgagtctacccttagttcccattgcacaaatgcaggagtggcagtacttgaagtgcccaaggagaacttggtgttgcacctagatagagtgaaaagatacatcgtggaacacgtagatctgggtgcatactattatagaaaatttttctaccagaaggaacactggaactattttggggctgatgagaatcttggtccagtggctgtgagcattcgaagggaaaaaccagatgaaatgaaagaaaatggatctccgtacaactaccgaataatttttagaactagtgagctcatgacactgagaggttcggtcctggaggacgccattccgtcgacagccaagcactcgacagccagaggcctgcctctcaaagaagtgctggagcacgtggttcctgagctcaatgtccagtgcctgcggttggccttcaacacacccaaggtcacagagcagctcatgaaactggatgaacaagggctgaactaccagcagaaagtaggcatcatgtactgcaaagctggacagagcactgaagaagagatgtacaacaatgagtcagctggcccagcctttgaagaattccttcaactattgggagagcgagttcggctcaaaggatttgagaagtatcgagcacagcttgataccaaaactgactccactggaacccattctctgtacacaacatacaaagattatgaaattatgttccatgtttctaccatgctgccatacacacccaacaacaaacaacagctcctgaggaagcggcacattggaaatgatatcgtaacaattgttttccaagagcctggagcacagccattcagcccaaaaaacatccgatcccacttccagcacgttttcgtcatcgtcagggtgcacaatccgtgctctgacagtgtctgttatagtgtggctgttaccaggtccagagatgtgccttcctttgggcctcccattcctaaaggggtcactttccctaagtcaaatgtgttcagggacttccttttggcgaaagtgattaatgcagaaaatgctgctcataaatcggagaagtttcgggccatggcaactcggacccgccaggaatacctgaaagatctggcagaaaagaatgtcaccaacacccctatcgacccttctggcaagtttccgttcatctctctggcttccaagaagaaggaaaagtctaagccatatccaggagccgagctcagcagcatgggggccattgtatgggcagtccgggctgaagactacaacaaggccatggaactagactgccttttagggatctccaatgagttcattgtgctcattgaacaggaaacaaagagcgtggtcttcaattgttcctgtagagatgtgatagggtggacttcaactgacaccagcctcaaaatcttctatgaacgaggagaatgtgtttcagtgggtagttttattaacattgaggagatcaaagagattgtcaaaaggttgcagtttgtttcaaaaggctgtgaatcggtggagatgactctgcgaagaaatgggctaggacagcttggcttccatgtcaactatgagggcattgtggcggatgtggagccctacggttatgcctggcaggcagggctgaggcagggcagtcgcctggtggagatctgcaaggtggcggtagccactctgagccatgagcagatgatcgacctcctgagaacatctgtcacggtgaaggttgtcatcattcccccgcatgatgactgcaccccgcggaggagttgctctgaaacctaccgcatgccagtgatggagtacaaaatgaatgaaggtgtttcatacgaattcaagtttcccttccgaaataataacaagtggcagaggaacgccagcaaggggcctcattcacctcaagtcccgtcccaggtgcagagtcccatgacctcgcggctgaatgctggaaaaggagatgggaagatgcctcctccagaaagagccgccaacatccctcgaagcatctccagtgacgggcgcccactagagaggcggctgtctcctggttcggacatctatgtgacggtctcatccatggctttagcaagatcccagtgtcggaactctcctagcaacttgtcttcatccagtgatactggttctgtggggggcacttacaggcagaagtccatgcccgaagggtttggagtgagccgtagatccccagcctccattgacaggcagaacacccagtcagatattggtggcagcggaaaatccacgcctagctggcaaagaagtgaggatagcattgctgaccagatggagccaacatgccatctcccagcagtatcaaaggtactgccagctttccgagagagccccagtgggagattaatgcggcaggatccagtggttcatttgtctccaaacaaacaagggcattctgatagccactactcgagccactccagtagcaatactctctccagcaatgcgtcaagtgcccatagtgatgagaagtggtacgatggggaccgcacagaatccgaactcaacagctataactatctgcaaggcacctctgctgacagtggcattgacaccacctcttatggccccagccacggcagcacagcctcgctgggggctgccacatcgtcacctcgctcagggccaggcaaggagaaagtggcacccctatggcacagctccagtgaagtaatctccatggcagatcggactttggagacagagagccacggcctggaccggaaaacagagtcttccctgagcttagacatacacagcaagagccaagccggctcgacccctctgacaagggagaacagcaccttcagtataaacgatgctgcttcccacacaagtaccatgagctcccgacactctgccagcccagtggttttcaccagtgcccggagttcacctaaagaagagcttcatccagctgccccctcacagctcgcaccatccttctcctcctcttcctcctcctcctctggtcctaggagtttttaccctcgccagggcgctactagcaagtacctgattggatggaaaaaacccgaaggaaccataaactccgtgggatttatggacacgagaaagcgtcatcagagcgatggcaatgaaatagcccacaccaggctgcgtgcctcaaccagagacctccgggcatctcctaagccaacctccaagtccaccattgaagaagatctaaagaaactaattgatcttgaaagcccaactcctgaatcacagaagagttttaagttccacgcactctcctctcctcagtctcctttccccagcacccccacctcacggcgggccttgcacagaacactgtcggacgagagcatttacaatagccagagggagcactttttcacctccagggcgtcacttctggaccaagccctgcccaacgacgtcctcttcagtagcacgtacccttctctccccaagtcgctcccgttgaggaggccttcttacaccttaggaatgaaatcgctgcatggagagttctcagcctcggacagctccctcactgacatccaggagacccgcaggcagcctatgcccgaccctggcctgatgcccctgcctgacactgctgcagacttggattggtccaacctggtagatgctgccaaagcctatgaggtccagagagcctcattttttgctgctagtgatgaaaaccatcgccccttgagtgctgcatccaacagtgatcagctggaggaccaggctctggcccagatgaagccttacagcagcagtaaagactcctctcccactctggcttctaaagtggaccagctggaaggtatgctgaagatgcttcgggaagatttgaagaaggaaaaagaagacaaagctcaccttcaggcggaggtgcagcacctgcgagaggacaacctgaggctacaggaggagtcccagaacgcctcggacaagctgaagaagttcacagaatgggtcttcaacaccatagacatgagctagggaaggctgaggaggacaggagaagggcccagacactccctccagtgagtgtcctgcagcccttattccctccatagaaagcatcctcagagcaccttccctggcttcctactctgccccctttcggggagtgcacaacacaatagttgcagatcaacaatcatcacctgccttttgtagaaaagaaaaacaaaaaaagtaaataaaaattttaaacagtaaaataaaagtttaactgcta

SEQ ID NO: 319314 - DNA, 8264 bp, Homo sapiens
ggagagcgcgcggcggacgcgcccgggacgcgcggcggcaccgggaggccgggccgagcgaaatgtggtctcgctgtgttgcccagtactggcctcaagcgagcctcctacctcagccttccaaagtgttgggattataggcgtgagccactgcacctggcacagtcttaaaacattttggaaaaagttgaagctctccttttctaccctcctgattctgtgcttctgttggagtgcatatcacttgatggcttctaagacaaatgctaaattcttgtcagattacgcagttttgagagattacctgaagttgcactcaaaagcaagatatactactaactttgaaatggaataaggccctccctatcctgaagacattagctgagagtctggcaccttttaaaggtctgatcatcaattgtctctctgggcggccacctatgagacttcatctgtgtgctttataaatagcagtccagggcaacagtacttgataaaaaggttataccttattggtgtggacgttgtctaaatttcggtagccatggcacaagaatataagaaagcatgggattatggcaaccacagaatctcagtagtacaagttccattcagttttttctgaaagaaagccctctgttaaagtgaagcaaagaaactgttgtggattataacgtttagaagttccaatttttcagtgctttacaaataaagcatcatttaaccttttaaatgaaaaagattaagatctcatgcaactgttgtattttctggaagccattctccaaaagggaagtgcacatttaaaacacagatatgatggtccttgctgcagggatttaagtctacttgcttttacatcatgaccagcttgaaacggtcacagacagaaaggcctcttgccactgacagggcctctgttgttggcacagacggcacccccaaagtccacactgatgatttctacatgcggcgcttccggtcccaaaatggcagcttaggatcatcagttatggctcctgtaggacccccccgaagtgaaggttctcaccatataacctcaacccccggagtcccaaaaatgggggtaagggcaaggattgcagattggcccccaagaaaggaaaacataaaagaatctagccgttcaagccaggaaatagaaacctcaagttgccttgatagcctgtcctccaaaagcagtcctgtgagtcagggaagttctgttagcctcaattccaatgactcagccatgctgaaaagcatacagaacacgctgaaaaacaagacaagaccgtcggagaacatggactccagatttctcatgcctgaagcctaccccagctcccccagaaaagctcttcgcagaatacgccagcgaagcaacagtgatatcaccataagtgaacttgatgtggatagctttgatgaatgtatctcacctacatacaagactggaccatcactgcacagggaatatggtagcacatcttcaattgataaacagggaacatctggagaaagcttttttgatttgttaaagggctacaaagatgacaaatctgatcgaggtccaactccaaccaagctcagtgactttctcattactggtggtggcaagggttctggtttctctttggatgtaatagacgggcctatctcacagagagagaacctcaggctttttaaggaaagggaaaaaccactcaagcgacgttcaaaatctgaaactggagactcctctatttttcgtaaattgcgcaatgccaaaggtgaagaacttgggaagtcatcagatcttgaagataaccgatcagaagactctgtcaggccctggacatgtccaaagtgctttgcccactatgatgtccagagtatattatttgatttgaatgaggcaattatgaacaggcacaatgttattaagaggagaaacaccaccactggagcttccgcagctgccgtggcatccttggtctctggacctctgtctcattcagccagttttagctccccaatgggcagcacagaggacctgaattccaaaggaagcctcagcatggaccagggagatgataaaagcaatgagcttgtaatgagctgtccatattttcggaatgagataggtggagaaggggagaggaaaatcagcctttcaaaatcaaattctggctcctttagtggatgtgaaagtgcctcctttgagtctacccttagttcccattgcacaaatgcaggagtggcagtacttgaagtgcccaaggagaacttggtgttgcacctagatagagtgaaaagatacatcgtggaacacgtagatctgggtgcatactattatagaaaatttttctaccagaaggaacactggaactattttggggctgatgagaatcttggtccagtggctgtgagcattcgaagggaaaaaccagatgaaatgaaagaaaatggatctccgtacaactaccgaataatttttagaactagtgagctcatgacactgagaggttcggtcctggaggacgccattccgtcgacagccaagcactcgacagccagaggcctgcctctcaaagaagtgctggagcacgtggttcctgagctcaatgtccagtgcctgcggttggccttcaacacacccaaggtcacagagcagctcatgaaactggatgaacaagggctgaactaccagcagaaagtaggcatcatgtactgcaaagctggacagagcactgaagaagagatgtacaacaatgagtcagctggcccagcctttgaagaattccttcaactattgggagagcgagttcggctcaaaggatttgagaagtatcgagcacagcttgataccaaaactgactccactggaacccattctctgtacacaacatacaaagattatgaaattatgttccatgtttctaccatgctgccatacacacccaacaacaaacaacagctcctgaggaagcggcacattggaaatgatatcgtaacaattgttttccaagagcctggagcacagccattcagcccaaaaaacatccgatcccacttccagcacgttttcgtcatcgtcagggtgcacaatccgtgctctgacagtgtctgttatagtgtggctgttaccaggtccagagatgtgccttcctttgggcctcccattcctaaaggggtcactttccctaagtcaaatgtgttcagggacttccttttggcgaaagtgattaatgcagaaaatgctgctcataaatcggagaagtttcgggccatggcaactcggacccgccaggaatacctgaaagatctggcagaaaagaatgtcaccaacacccctatcgacccttctggcaagtttccgttcatctctctggcttccaagaagaaggaaaagtctaagccatatccaggagccgagctcagcagcatgggggccattgtatgggcagtccgggctgaagactacaacaaggccatggaactagactgccttttagggatctccaatgagttcattgtgctcattgaacaggaaacaaagagcgtggtcttcaattgttcctgtagagatgtgatagggtggacttcaactgacaccagcctcaaaatcttctatgaacgaggagaatgtgtttcagtgggtagttttattaacattgaggagatcaaagagattgtcaaaaggttgcagtttgtttcaaaaggctgtgaatcggtggagatgactctgcgaagaaatgggctaggacagcttggcttccatgtcaactatgagggcattgtggcggatgtggagccctacggttatgcctggcaggcagggctgaggcagggcagtcgcctggtggagatctgcaaggtggcggtagccactctgagccatgagcagatgatcgacctcctgagaacatctgtcacggtgaaggttgtcatcattcccccgcatgatgactgcaccccgcggaggagttgctctgaaacctaccgcatgccagtgatggagtacaaaatgaatgaaggtgtttcatacgaattcaagtttcccttccgaaataataacaagtggcagaggaacgccagcaaggggcctcattcacctcaagtcccgtcccaggtgcagagtcccatgacctcgcggctgaatgctggaaaaggagatgggaagatgcctcctccagaaagagccgccaacatccctcgaagcatctccagtgacgggcgcccactagagaggcggctgtctcctggttcggacatctatgtgacggtctcatccatggctttagcaagatcccagtgtcggaactctcctagcaacttgtcttcatccagtgatactggttctgtggggggcacttacaggcagaagtccatgcccgaagggtttggagtgagccgtagatccccagcctccattgacaggcagaacacccagtcagatattggtggcagcggaaaatccacgcctagctggcaaagaagtgaggatagcattgctgaccagatggagccaacatgccatctcccagcagtatcaaaggtactgccagctttccgagagagccccagtgggagattaatgcggcaggatccagtggttcatttgtctccaaacaaacaagggcattctgatagccactactcgagccactccagtagcaatactctctccagcaatgcgtcaagtgcccatagtgatgagaagtggtacgatggggaccgcacagaatccgaactcaacagctataactatctgcaaggcacctctgctgacagtggcattgacaccacctcttatggccccagccacggcagcacagcctcgctgggggctgccacatcgtcacctcgctcagggccaggcaaggagaaagtggcacccctatggcacagctccagtgaagtaatctccatggcagatcggactttggagacagagagccacggcctggaccggaaaacagagtcttccctgagcttagacatacacagcaagagccaagccggctcgacccctctgacaagggagaacagcaccttcagtataaacgatgctgcttcccacacaagtaccatgagctcccgacactctgccagcccagtggttttcaccagtgcccggagttcacctaaagaagagcttcatccagctgccccctcacagctcgcaccatccttctcctcctcttcctcctcctcctctggtcctaggagtttttaccctcgccagggcgctactagcaagtacctgattggatggaaaaaacccgaaggaaccataaactccgtgggatttatggacacgagaaagcgtcatcagagcgatggcaatgaaatagcccacaccaggctgcgtgcctcaaccagagacctccgggcatctcctaagccaacctccaagtccaccattgaagaagatctaaagaaactaattgatcttgaaagcccaactcctgaatcacagaagagttttaagttccacgcactctcctctcctcagtctcctttccccagcacccccacctcacggcgggccttgcacagaacactgtcggacgagagcatttacaatagccagagggagcactttttcacctccagggcgtcacttctggaccaagccctgcccaacgacgtcctcttcagtagcacgtacccttctctccccaagtcgctcccgttgaggaggccttcttacaccttaggaatgaaatcgctgcatggagagttctcagcctcggacagctccctcactgacatccaggagacccgcaggcagcctatgcccgaccctggcctgatgcccctgcctgacactgctgcagacttggattggtccaacctggtagatgctgccaaagcctatgaggtccagagagcctcattttttgctgctagtgatgaaaaccatcgccccttgagtgctgcatccaacagtgatcagctggaggaccaggctctggcccagatgaagccttacagcagcagtaaagactcctctcccactctggcttctaaagtggaccagctggaaggtatgctgaagatgcttcgggaagatttgaagaaggaaaaagaagacaaagctcaccttcaggcggaggtgcagcacctgcgagaggacaacctgaggctacaggaggagtcccagaacgcctcggacaagctgaagaagttcacagaatgggtcttcaacaccatagacatgagctagggaaggctgaggaggacaggagaagggcccagacactccctccagtgagtgtcctgcagcccttattccctccatagaaagcatcctcagagcaccttccctggcttcctactctgccccctttcggggagtgcacaacacaatagttgcagatcaacaatcatcacctgccttttgtagaaaagaaaaacaaaaaaagtaaataaaaattttaaacagtaaaataaaagtttaactgctaaaatgtgaatgtctttatttttttgcacaatatctatctgttatgtatttaagaagaaactgggccttggaccagggcgccccctggcccatccgcctctattcccatcagctttcttatcaacttcaggtaacccaagctttcccttgttattctaacaaatatcattattcctagaaaaagaatgtttttataacttgtttggggagtagagagggatatttccttaccttcttccctaaaatgcctggagagggagttgctttgagaaaatgcctacctcccttgaatgactcgtgcatgagctagtgctgtctgtacctgtcctccagagatcagcaggaccggagttaaatatttaacagcaagtctgtaaaccagagcagctctgacagtgcctgcaggccacaccccttctcagtcctgcattgtgaggtcatttcctgcttctccctttccccaggaagatggtcccacttgtgctgcaagactcttttttgtttggcttaattgagccccactaaattggaatcaatctctcttacagcttcctggctccaaacattaattgatttcagaattcccccaaactaaaaccttatctgtctgcattttgaatgcattttggtcaaaagtatacgttttaaagatttttaaagataaaaatgtggcacaactggtttttttagcttgctgaaaatgaccatatctctaaattaatctttctctccagagcaagacttcaccagtatttgtaactaggagaagctaacagtgaatgtttaattgtgaattttaatcattgcttgttaggaataatgactgtgatactagaatgggcttttgaaacctgcatgtcccagtgtgaaatttcagcacggcattttctgcatcctttcatgggccatccaaagggattccgctgcagaaattattgatgtgctatttttgctgtcttgtgatgcaggctgctttgggcccctgggtcactcttccaaggctgctgtagagcacagagacatggggctggccagtgttgactgacctgaggagacccctttgtttgttgccttcataactgtcactaaaccgacccctctgccctttcagtggcaactctggtctaagggaacattcagcactctagcggcatctgattggaagttccctcacccaagtaatctcaattccttcctctctccatccctgaaagaaacaggatggattttcctctcttctccctgctacattcactaccagatttttatgctacagtttcattcttgattgtgatttctccatggaattttttttttctggtgacatttctatcatggaaataggaagatttcggagtgctttgtgaagatttcaattgtctgtctctttctctctttgacttgtatgaaggagattgtacattgcctgatatctctttgtaaatgagaaatattgctaacatccaagcattctgaagtcttgcttatccttctgagtttagttctcattttgttttacattttgtttggggacttggggcaagctatttattagagttttgcaacagagttcttgtttgaagcctctaaagactacctgtaaaattcaaagaataaaattcattttaaacgctcttttaaaacactttggtattattgcttgaggtttgcttatttgaaagaccacccaataactcattgaccctccttgcatccgaattttttcatcaagctttgttaacactaatgatgattcttgaaaatttctgtccttctcagaatgttaataaacttttttactctgtccaca

SEQ ID NO: 319315 - DNA, 8215 bp, Homo sapiens
ggagagcgcgcggcggacgcgcccgggacgcgcggcggcaccgggaggccgggccgagcgaaatgtggtctcgctgtgttgcccagtactggcctcaagcgagcctcctacctcagccttccaaagtgttgggattataggcgtgagccactgcacctggcacagtcttaaaacattttggaaaaagttgaagctctccttttctaccctcctgattctgtgcttctgttggagtgcatatcacttgatggcttctaagacaaatgctaaattcttgtcagattacgcagttttgagagattacctgaagttgcactcaaaagcaagatatactactaactttgaaatggaataaggccctccctatcctgaagacattagctgagagtctggcaccttttaaaggtctgatcatcaattgtctctctgggcggccacctatgagacttcatctgtgtgctttataaatagcagtccagggcaacagtacttgataaaaaggttataccttattggtgtggacgttgtctaaatttcggtagccatggcacaagaatataagaaagcatgggattatggcaaccacagaatctcagtagtacaagttccattcagttttttctgaaagaaagccctctgttaaagtgaagcaaagaaactgttgtggattataacgtttagaagttccaatttttcagtgctttacaaataaagcatcatttaaccttttaaatgaaaaagattaagatctcatgcaactgttgtattttctggaagccattctccaaaagggaagtgcacatttaaaacacagatatgatggtccttgctgcagggatttaagtctacttgcttttacatcatgaccagcttgaaacggtcacagacagaaaggcctcttgccactgacagggcctctgttgttggcacagacggcacccccaaagtccacactgatgatttctacatgcggcgcttccggtcccaaaatggcagcttaggatcatcagttatggctcctgtaggacccccccgaagtgaaggttctcaccatataacctcaacccccggagtcccaaaaatgggggtaagggcaaggattgcagattggcccccaagaaaggaaaacataaaagaatctagccgttcaagccaggaaatagaaacctcaagttgccttgatagcctgtcctccaaaagcagtcctgtgagtcagggaagttctgttagcctcaattccaatgactcagccatgctgaaaagcatacagaacacgctgaaaaacaagacaagaccgtcggagaacatggactccagatttctcatgcctgaagcctaccccagctcccccagaaaagctcttcgcagaatacgccagcgaagcaacagtgatatcaccataagtgaacttgatgtggatagctttgatgaatgtatctcacctacatacaagactggaccatcactgcacagggaatatggtagcacatcttcaattgataaacagggaacatctggagaaagcttttttgatttgttaaagggctacaaagatgacaaatctgatcgaggtccaactccaaccaagctcagtgactttctcattactggtggtggcaagggttctggtttctctttggatgtaatagacgggcctatctcacagagagagaacctcaggctttttaaggaaagggaaaaaccactcaagcgacgttcaaaatctgaaactggagactcctctatttttcgtaaattgcgcaatgccaaaggtgaagaacttgggaagtcatcagatcttgaagataaccgatcagaagactctgtcaggccctggacatgtccaaagtgctttgcccactatgatgtccagagtatattatttgatttgaatgaggcaattatgaacaggcacaatgttattaagaggagaaacaccaccactggagcttccgcagctgccgtggcatccttggtctctggacctctgtctcattcagccagttttagctccccaatgggcagcacagaggacctgaattccaaaggaagcctcagcatggaccagggagatgataaaagcaatgagcttgtaatgagctgtccatattttcggaatgagataggtggagaaggggagaggaaaatcagcctttcaaaatcaaattctggctcctttagtggatgtgaaagtgcctcctttgagtctacccttagttcccattgcacaaatgcaggagtggcagtacttgaagtgcccaaggagaacttggtgttgcacctagatagagtgaaaagatacatcgtggaacacgtagatctgggtgcatactattatagaaaatttttctaccagaaggaacactggaactattttggggctgatgagaatcttggtccagtggctgtgagcattcgaagggaaaaaccagatgaaatgaaagaaaatggatctccgtacaactaccgaataatttttagaactagtgagctcatgacactgagaggttcggtcctggaggacgccattccgtcgacagccaagcactcgacagccagaggcctgcctctcaaagaagtgctggagcacgtggttcctgagctcaatgtccagtgcctgcggttggccttcaacacacccaaggtcacagagcagctcatgaaactggatgaacaagggctgaactaccagcagaaagtaggcatcatgtactgcaaagctggacagagcactgaagaagagatgtacaacaatgagtcagctggcccagcctttgaagaattccttcaactattgggagagcgagttcggctcaaaggatttgagaagtatcgagcacagcttgataccaaaactgactccactggaacccattctctgtacacaacatacaaagattatgaaattatgttccatgtttctaccatgctgccatacacacccaacaacaaacaacagctcctgaggaagcggcacattggaaatgatatcgtaacaattgttttccaagagcctggagcacagccattcagcccaaaaaacatccgatcccacttccagcacgttttcgtcatcgtcagggtgcacaatccgtgctctgacagtgtctgttatagtgtggctgttaccaggtccagagatgtgccttcctttgggcctcccattcctaaaggggtcactttccctaagtcaaatgtgttcagggacttccttttggcgaaagtgattaatgcagaaaatgctgctcataaatcggagaagtttcgggccatggcaactcggacccgccaggaatacctgaaagatctggcagaaaagaatgtcaccaacacccctatcgacccttctggcaagtttccgttcatctctctggcttccaagaagaaggaaaagtctaagccatatccaggagccgagctcagcagcatgggggccattgtatgggcagtccgggctgaagactacaacaaggccatggaactagactgccttttagggatctccaatgagttcattgtgctcattgaacaggaaacaaagagcgtggtcttcaattgttcctgtagagatgtgatagggtggacttcaactgacaccagcctcaaaatcttctatgaacgaggagaatgtgtttcagtgggtagttttattaacattgaggagatcaaagagattgtcaaaaggttgcagtttgtttcaaaaggctgtgaatcggtggagatgactctgcgaagaaatgggctaggacagcttggcttccatgtcaactatgagggcattgtggcggatgtggagccctacggttatgcctggcaggcagggctgaggcagggcagtcgcctggtggagatctgcaaggtggcggtagccactctgagccatgagcagatgatcgacctcctgagaacatctgtcacggtgaaggttgtcatcattcccccgcatgatgactgcaccccgcggaggagttgctctgaaacctaccgcatgccagtgatggagtacaaaatgaatgaaggtgtttcatacgaattcaagtttcccttccgaaataataacaagtggcagaggaacgccagcaaggggcctcattcacctcaagtcccgtcccaggtgcagagtcccatgacctcgcggctgaatgctggaaaaggagatgggaagatgcctcctccagaaagagccgccaacatccctcgaagcatctccagtgacgggcgcccactagagaggcggctgtctcctggttcggacatctatgtgacggtctcatccatggctttagcaagatcccagtgtcggaactctcctagcaacttgtcttcatccagtgatactggttctgtggggggcacttacaggcagaagtccatgcccgaagggtttggagtgagccgtagatccccagcctccattgacaggcagaacacccagtcagatattggtggcagcggaaaatccacgcctagctggcaaagaagtgaggatagcattgctgaccagatggagccaacatgccatctcccagcagtatcaaaggtactgccagctttccgagagagccccagtgggagattaatgcggcaggatccagtggttcatttgtctccaaacaaacaagggcattctgatagccactactcgagccactccagtagcaatactctctccagcaatgcgtcaagtgcccatagtgatgagaagtggtacgatggggaccgcacagaatccgaactcaacagctataactatctgcaaggcacctctgctgacagtggcattgacaccacctcttatggccccagccacggcagcacagcctcgctgggggctgccacatcgtcacctcgctcagggccaggcaaggagaaagtggcacccctatggcacagctccagtgaagtaatctccatggcagatcggactttggagacagagagccacggcctggaccggaaaacagagtcttccctgagcttagacatacacagcaagagccaagccggctcgacccctctgacaagggagaacagcaccttcagtataaacgatgctgcttcccacacaagtaccatgagctcccgacactctgccagcccagtggttttcaccagtgcccggagttcacctaaagaagagcttcatccagctgccccctcacagctcgcaccatccttctcctcctcttcctcctcctcctctggtcctaggagtttttaccctcgccagggcgctactagcaagtacctgattggatggagcgtcatcagagcgatggcaatgaaatagcccacaccaggctgcgtgcctcaaccagagacctccgggcatctcctaagccaacctccaagtccaccattgaagaagatctaaagaaactaattgatcttgaaagcccaactcctgaatcacagaagagttttaagttccacgcactctcctctcctcagtctcctttccccagcacccccacctcacggcgggccttgcacagaacactgtcggacgagagcatttacaatagccagagggagcactttttcacctccagggcgtcacttctggaccaagccctgcccaacgacgtcctcttcagtagcacgtacccttctctccccaagtcgctcccgttgaggaggccttcttacaccttaggaatgaaatcgctgcatggagagttctcagcctcggacagctccctcactgacatccaggagacccgcaggcagcctatgcccgaccctggcctgatgcccctgcctgacactgctgcagacttggattggtccaacctggtagatgctgccaaagcctatgaggtccagagagcctcattttttgctgctagtgatgaaaaccatcgccccttgagtgctgcatccaacagtgatcagctggaggaccaggctctggcccagatgaagccttacagcagcagtaaagactcctctcccactctggcttctaaagtggaccagctggaaggtatgctgaagatgcttcgggaagatttgaagaaggaaaaagaagacaaagctcaccttcaggcggaggtgcagcacctgcgagaggacaacctgaggctacaggaggagtcccagaacgcctcggacaagctgaagaagttcacagaatgggtcttcaacaccatagacatgagctagggaaggctgaggaggacaggagaagggcccagacactccctccagtgagtgtcctgcagcccttattccctccatagaaagcatcctcagagcaccttccctggcttcctactctgccccctttcggggagtgcacaacacaatagttgcagatcaacaatcatcacctgccttttgtagaaaagaaaaacaaaaaaagtaaataaaaattttaaacagtaaaataaaagtttaactgctaaaatgtgaatgtctttatttttttgcacaatatctatctgttatgtatttaagaagaaactgggccttggaccagggcgccccctggcccatccgcctctattcccatcagctttcttatcaacttcaggtaacccaagctttcccttgttattctaacaaatatcattattcctagaaaaagaatgtttttataacttgtttggggagtagagagggatatttccttaccttcttccctaaaatgcctggagagggagttgctttgagaaaatgcctacctcccttgaatgactcgtgcatgagctagtgctgtctgtacctgtcctccagagatcagcaggaccggagttaaatatttaacagcaagtctgtaaaccagagcagctctgacagtgcctgcaggccacaccccttctcagtcctgcattgtgaggtcatttcctgcttctccctttccccaggaagatggtcccacttgtgctgcaagactcttttttgtttggcttaattgagccccactaaattggaatcaatctctcttacagcttcctggctccaaacattaattgatttcagaattcccccaaactaaaaccttatctgtctgcattttgaatgcattttggtcaaaagtatacgttttaaagatttttaaagataaaaatgtggcacaactggtttttttagcttgctgaaaatgaccatatctctaaattaatctttctctccagagcaagacttcaccagtatttgtaactaggagaagctaacagtgaatgtttaattgtgaattttaatcattgcttgttaggaataatgactgtgatactagaatgggcttttgaaacctgcatgtcccagtgtgaaatttcagcacggcattttctgcatcctttcatgggccatccaaagggattccgctgcagaaattattgatgtgctatttttgctgtcttgtgatgcaggctgctttgggcccctgggtcactcttccaaggctgctgtagagcacagagacatggggctggccagtgttgactgacctgaggagacccctttgtttgttgccttcataactgtcactaaaccgacccctctgccctttcagtggcaactctggtctaagggaacattcagcactctagcggcatctgattggaagttccctcacccaagtaatctcaattccttcctctctccatccctgaaagaaacaggatggattttcctctcttctccctgctacattcactaccagatttttatgctacagtttcattcttgattgtgatttctccatggaattttttttttctggtgacatttctatcatggaaataggaagatttcggagtgctttgtgaagatttcaattgtctgtctctttctctctttgacttgtatgaaggagattgtacattgcctgatatctctttgtaaatgagaaatattgctaacatccaagcattctgaagtcttgcttatccttctgagtttagttctcattttgttttacattttgtttggggacttggggcaagctatttattagagttttgcaacagagttcttgtttgaagcctctaaagactacctgtaaaattcaaagaataaaattcattttaaacgctcttttaaaacactttggtattattgcttgaggtttgcttatttgaaagaccacccaataactcattgaccctccttgcatccgaattttttcatcaagctttgttaacactaatgatgattcttgaaaatttctgtccttctcagaatgttaataaacttttttactctgtccaca

SEQ ID NO: 319316 - DNA, 3216 bp, Homo sapiens
agcgagctgcttcccacacaagtaccatgagctcccgacactctgccagcccagtggttttcaccagtgcccggagttcacctaaagaagagcttcatccagctgccccctcacagctcgcaccatccttctcctcctcttcctcctcctcctctggtcctaggagtttttaccctcgccagggcgctactagcaagtacctgattggatggaaaaaacccgaaggaaccataaactccgtgggatttatggacacgagaaagcgtcatcagagcgatggcaatgaaatagcccacaccaggctgcgtgcctcaaccagagacctccgggcatctcctaagccaacctccaagtccaccattgaagaagatctaaagaaactaattgatcttgaaagcccaactcctgaatcacagaagagttttaagttccacgcactctcctctcctcagtctcctttccccagcacccccacctcacggcgggccttgcacagaacactgtcggacgagagcatttacaatagccagagggagcactttttcacctccagggcgtcacttctggaccaagccctgcccaacgacgtcctcttcagtagcacgtacccttctctccccaagtcgctcccgttgaggaggccttcttacaccttaggaatgaaatcgctgcatggagagttctcagcctcggacagctccctcactgacatccaggagacccgcaggcagcctatgcccgaccctggcctgatgcccctgcctgacactgctgcagacttggattggtccaacctggtagatgctgccaaagcctatgaggtccagagagcctcattttttgctgctagtgatgaaaaccatcgccccttgagtgctgcatccaacagtgatcagctggaggaccaggctctggcccagatgaagccttacagcagcagtaaagactcctctcccactctggcttctaaagtggaccagctggaaggtatgctgaagatgcttcgggaagatttgaagaaggaaaaagaagacaaagctcaccttcaggcggaggtgcagcacctgcgagaggacaacctgaggctacaggaggagtcccagaacgcctcggacaagctgaagaagttcacagaatgggtcttcaacaccatagacatgagctagggaaggctgaggaggacaggagaagggcccagacactccctccagtgagtgtcctgcagcccttattccctccatagaaagcatcctcagagcaccttccctggcttcctactctgccccctttcggggagtgcacaacacaatagttgcagatcaacaatcatcacctgccttttgtagaaaagaaaaacaaaaaaagtaaataaaaattttaaacagtaaaataaaagtttaactgctaaaatgtgaatgtctttatttttttgcacaatatctatctgttatgtatttaagaagaaactgggccttggaccagggcgccccctggcccatccgcctctattcccatcagctttcttatcaacttcaggtaacccaagctttcccttgttattctaacaaatatcattattcctagaaaaagaatgtttttataacttgtttggggagtagagagggatatttccttaccttcttccctaaaatgcctggagagggagttgctttgagaaaatgcctacctcccttgaatgactcgtgcatgagctagtgctgtctgtacctgtcctccagagatcagcaggaccggagttaaatatttaacagcaagtctgtaaaccagagcagctctgacagtgcctgcaggccacaccccttctcagtcctgcattgtgaggtcatttcctgcttctccctttccccaggaagatggtcccacttgtgctgcaagactcttttttgtttggcttaattgagccccactaaattggaatcaatctctcttacagcttcctggctccaaacattaattgatttcagaattcccccaaactaaaaccttatctgtctgcattttgaatgcattttggtcaaaagtatacgttttaaagatttttaaagataaaaatgtggcacaactggtttttttagcttgctgaaaatgaccatatctctaaattaatctttctctccagagcaagacttcaccagtatttgtaactaggagaagctaacagtgaatgtttaattgtgaattttaatcattgcttgttaggaataatgactgtgatactagaatgggcttttgaaacctgcatgtcccagtgtgaaatttcagcacggcattttctgcatcctttcatgggccatccaaagggattccgctgcagaaattattgatgtgctatttttgctgtcttgtgatgcaggctgctttgggcccctgggtcactcttccaaggctgctgtagagcacagagacatggggctggccagtgttgactgacctgaggagacccctttgtttgttgccttcataactgtcactaaaccgacccctctgccctttcagtggcaactctggtctaagggaacattcagcactctagcggcatctgattggaagttccctcacccaagtaatctcaattccttcctctctccatccctgaaagaaacaggatggattttcctctcttctccctgctacattcactaccagatttttatgctacagtttcattcttgattgtgatttctccatggaattttttttttctggtgacatttctatcatggaaataggaagatttcggagtgctttgtgaagatttcaattgtctgtctctttctctctttgacttgtatgaaggagattgtacattgcctgatatctctttgtaaatgagaaatattgctaacatccaagcattctgaagtcttgcttatccttctgagtttagttctcattttgttttacattttgtttggggacttggggcaagctatttattagagttttgcaacagagttcttgtttgaagcctctaaagactacctgtaaaattcaaagaataaaattcattttaaacgctcttttaaaacactttggtattattgcttgaggtttgcttatttgaaagaccacccaataactcattgaccctccttgcatccgaattttttcatcaagctttgttaacactaatgatgattcttgaaaatttctgtccttctcagaatgttaataaacttttttactctgtccaca

SEQ ID NO: 319317 - DNA, 6187 bp, Homo sapiens
ggagagcgcgcggcggacgcgcccgggacgcgcggcggcaccgggaggccgggccgagcgaaatgtggtctcgctgtgttgcccagtactggcctcaagcgagcctcctacctcagccttccaaagtgttgggattataggcgtgagccactgcacctggcacagtcttaaaacattttggaaaaagttgaagctctccttttctaccctcctgattctgtgcttctgttggagtgcatatcacttgatggcttctaagacaaatgctaaattcttgtcagattacgcagttttgagagattacctgaagttgcactcaaaagcaagatatactactaactttgaaatggaataaggccctccctatcctgaagacattagctgagagtctggcaccttttaaaggtctgatcatcaattgtctctctgggcggccacctatgagacttcatctgtgtgctttataaatagcagtccagggcaacagtacttgataaaaaggttataccttattggtgtggacgttgtctaaatttcggtagccatggcacaagaatataagaaagcatgggattatggcaaccacagaatctcagtagtacaagttccattcagttttttctgaaagaaagccctctgttaaagtgaagcaaagaaactgttgtggattataacgtttagaagttccaatttttcagtgctttacaaataaagcatcatttaaccttttaaatgaaaaagattaagatctcatgcaactgttgtattttctggaagccattctccaaaagggaagtgcacatttaaaacacagatatgatggtccttgctgcagggatttaagtctacttgcttttacatcatgaccagcttgaaacggtcacagacagaaaggcctcttgccactgacagggcctctgttgttggcacagacggcacccccaaagtccacactgatgatttctacatgcggcgcttccggtcccaaaatggcagcttaggatcatcagttatggctcctgtaggacccccccgaagtgaaggttctcaccatataacctcaacccccggagtcccaaaaatgggggtaagggcaaggattgcagattggcccccaagaaaggaaaacataaaagaatctagccgttcaagccaggaaatagaaacctcaagttgccttgatagcctgtcctccaaaagcagtcctgtgagtcagggaagttctgttagcctcaattccaatgactcagccatgctgaaaagcatacagaacacgctgaaaaacaagacaagaccgtcggagaacatggactccagatttctcatgcctgaagcctaccccagctcccccagaaaagctcttcgcagaatacgccagcgaagcaacagtgatatcaccataagtgaacttgatgtggatagctttgatgaatgtatctcacctacatacaagactggaccatcactgcacagggaatatggtagcacatcttcaattgataaacagggaacatctggagaaagcttttttgatttgttaaagggctacaaagatgacaaatctgatcgaggtccaactccaaccaagctcagtgactttctcattactggtggtggcaagggttctggtttctctttggatgtaatagacgggcctatctcacagagagagaacctcaggctttttaaggaaagggaaaaaccactcaagcgacgttcaaaatctgaaactggagactcctctatttttcgtaaattgcgcaatgccaaaggtgaagaacttgggaagtcatcagatcttgaagataaccgatcagaagactctgtcaggccctggacatgtccaaagtgctttgcccactatgatgtccagagtatattatttgatttgaatgaggcaattatgaacaggcacaatgttattaagaggagaaacaccaccactggagcttccgcagctgccgtggcatccttggtctctggacctctgtctcattcagccagttttagctccccaatgggcagcacagaggacctgaattccaaaggaagcctcagcatggaccagggagatgataaaagcaatgagcttgtaatgagctgtccatattttcggaatgagataggtggagaaggggagaggaaaatcagcctttcaaaatcaaattctggctcctttagtggatgtgaaagtgcctcctttgagtctacccttagttcccattgcacaaatgcaggagtggcagtacttgaagtgcccaaggagaacttggtgttgcacctagatagagtgaaaagatacatcgtggaacacgtagatctgggtgcatactattatagaaaatttttctaccagaaggaacactggaactattttggggctgatgagaatcttggtccagtggctgtgagcattcgaagggaaaaaccagatgaaatgaaagaaaatggatctccgtacaactaccgaataatttttagaactagtgagctcatgacactgagaggttcggtcctggaggacgccattccgtcgacagccaagcactcgacagccagaggcctgcctctcaaagaagtgctggagcacgtggttcctgagctcaatgtccagtgcctgcggttggccttcaacacacccaaggtcacagagcagctcatgaaactggatgaacaagggctgaactaccagcagaaagtaggcatcatgtactgcaaagctggacagagcactgaagaagagatgtacaacaatgagtcagctggcccagcctttgaagaattccttcaactattgggagagcgagttcggctcaaaggatttgagaagtatcgagcacagcttgataccaaaactgactccactggaacccattctctgtacacaacatacaaagattatgaaattatgttccatgtttctaccatgctgccatacacacccaacaacaaacaacagctcctgaggaagcggcacattggaaatgatatcgtaacaattgttttccaagagcctggagcacagccattcagcccaaaaaacatccgatcccacttccagcacgttttcgtcatcgtcagggtgcacaatccgtgctctgacagtgtctgttatagtgtggctgttaccaggtccagagatgtgccttcctttgggcctcccattcctaaaggggtcactttccctaagtcaaatgtgttcagggacttccttttggcgaaagtgattaatgcagaaaatgctgctcataaatcggagaagtttcgggccatggcaactcggacccgccaggaatacctgaaagatctggcagaaaagaatgtcaccaacacccctatcgacccttctggcaagtttccgttcatctctctggcttccaagaagaaggaaaagtctaagccatatccaggagccgagctcagcagcatgggggccattgtatgggcagtccgggctgaagactacaacaaggccatggaactagactgccttttagggatctccaatgagttcattgtgctcattgaacaggaaacaaagagcgtggtcttcaattgttcctgtagagatgtgatagggtggacttcaactgacaccagcctcaaaatcttctatgaacgaggagaatgtgtttcagtgggtagttttattaacattgaggagatcaaagagattgtcaaaaggttgcagtttgtttcaaaaggctgtgaatcggtggagatgactctgcgaagaaatgggctaggacagcttggcttccatgtcaactatgagggcattgtggcggatgtggagccctacggttatgcctggcaggcagggctgaggcagggcagtcgcctggtggagatctgcaaggtggcggtagccactctgagccatgagcagatgatcgacctcctgagaacatctgtcacggtgaaggttgtcatcattcccccgcatgatgactgcaccccgcggaggagttgctctgaaacctaccgcatgccagtgatggagtacaaaatgaatgaaggtgtttcatacgaattcaagtttcccttccgaaataataacaagtggcagaggaacgccagcaaggggcctcattcacctcaagtcccgtcccaggtgcagagtcccatgacctcgcggctgaatgctggaaaaggagatgggaagatgcctcctccagaaagagccgccaacatccctcgaagcatctccagtgacgggcgcccactagagaggcggctgtctcctggttcggacatctatgtgacggtctcatccatggctttagcaagatcccagtgtcggaactctcctagcaacttgtcttcatccagtgatactggttctgtggggggcacttacaggcagaagtccatgcccgaagggtttggagtgagccgtagatccccagcctccattgacaggcagaacacccagtcagatattggtggcagcggaaaatccacgcctagctggcaaagaagtgaggatagcattgctgaccagatggagccaacatgccatctcccagcagtatcaaaggtactgccagctttccgagagagccccagtgggagattaatgcggcaggatccagtggttcatttgtctccaaacaaacaagggcattctgatagccactactcgagccactccagtagcaatactctctccagcaatgcgtcaagtgcccatagtgatgagaagtggtacgatggggaccgcacagaatccgaactcaacagctataactatctgcaaggcacctctgctgacagtggcattgacaccacctcttatggccccagccacggcagcacagcctcgctgggggctgccacatcgtcacctcgctcagggccaggcaaggagaaagtggcacccctatggcacagctccagtgaagtaatctccatggcagatcggactttggagacagagagccacggcctggaccggaaaacagagtcttccctgagcttagacatacacagcaagagccaagccggctcgacccctctgacaagggagaacagcaccttcagtataaacgatgctgcttcccacacaagtaccatgagctcccgacactctgccagcccagtggttttcaccagtgcccggagttcacctaaagaagagcttcatccagctgccccctcacagctcgcaccatccttctcctcctcttcctcctcctcctctggtcctaggagtttttaccctcgccagggcgctactagcaagtacctgattggatggaaaaaacccgaaggaaccataaactccgtgggatttatggacacgagaaagcgtcatcagagcgatggcaatgaaatagcccacaccaggctgcgtgcctcaaccagagacctccgggcatctcctaagccaacctccaagtccaccattgaagaagatctaaagaaactaattgatcttgaaagcccaactcctgaatcacagaagagttttaagttccacgcactctcctctcctcagtctcctttccccagcacccccacctcacggcgggccttgcacagaacactgtcggacgagagcatttacaatagccagagggagcactttttcacctccagggcgtcacttctggaccaagccctgcccaacgacgtcctcttcagtagcacgtacccttctctccccaagtcgctcccgttgaggaggccttcttacaccttaggaatgaaatcgctgcatggagagttctcagcctcggacagctccctcactgacatccaggagacccgcaggcagcctatgcccgaccctggcctgatgcccctgcctgacactgctgcagacttggattggtccaacctggtagatgctgccaaagcctatgaggtccagagagcctcattttttgctgctagtgatgaaaaccatcgccccttgagtgctgcatccaacagtgatcagctggaggaccaggctctggcccagatgaagccttacagcaggttggtcccagtgcaagggcagtactctgcaccttgtgtcacatctgccactgactgcatctgtggggagaagagatggaagccacacggagtagctgagtgaagctgatcactgcagggctagacactttacattttagtcagaacgctttgtaactgaatactgtagacataattaaactattcttgatgacttatatgg

SEQ ID NO: 319318 - DNA, 5673 bp, Homo sapiens
ggagagcgcgcggcggacgcgcccgggacgcgcggcggcaccgggaggccgggccgagcgaaatgtggtctcgctgtgttgcccagtactggcctcaagcgagcctcctacctcagccttccaaagtgttgggattataggcgtgagccactgcacctggcacagtcttaaaacattttggaaaaagttgaagctctccttttctaccctcctgattctgtgcttctgttggagtgcatatcacttgatggcttctaagacaaatgctaaattcttgtcagattacgcagttttgagagattacctgaagttgcactcaaaagcaagatatactactaactttgaaatggaataaggccctccctatcctgaagacattagctgagagtctggcaccttttaaaggtctgatcatcaattgtctctctgggcggccacctatgagacttcatctgtgtgctttataaatagcagtccagggcaacagtacttgataaaaaggttataccttattggtgtggacgttgtctaaatttcggtagccatggcacaagaatataagaaagcatgggattatggcaaccacagaatctcagtagtacaagttccattcagttttttctgaaagaaagccctctgttaaagtgaagcaaagaaactgttgtggattataacgtttagaagttccaatttttcagtgctttacaaataaagcatcatttaaccttttaaatgaaaaagattaagatctcatgcaactgttgtattttctggaagccattctccaaaagggaagtgcacatttaaaacacagatatgatggtccttgctgcagggatttaagtctacttgcttttacatcatgaccagcttgaaacggtcacagacagaaaggcctcttgccactgacagggcctctgttgttggcacagacggcacccccaaagtccacactgatgatttctacatgcggcgcttccggtcccaaaatggcagcttaggatcatcagttatggctcctgtaggacccccccgaagtgaaggttctcaccatataacctcaacccccggagtcccaaaaatgggggtaagggcaaggattgcagattggcccccaagaaaggaaaacataaaagaatctagccgttcaagccaggaaatagaaacctcaagttgccttgatagcctgtcctccaaaagcagtcctgtgagtcagggaagttctgttagcctcaattccaatgactcagccatgctgaaaagcatacagaacacgctgaaaaacaagacaagaccgtcggagaacatggactccagatttctcatgcctgaagcctaccccagctcccccagaaaagctcttcgcagaatacgccagcgaagcaacagtgatatcaccataagtgaacttgatgtggatagctttgatgaatgtatctcacctacatacaagactggaccatcactgcacagggaatatggtagcacatcttcaattgataaacagggaacatctggagaaagcttttttgatttgttaaagggctacaaagatgacaaatctgatcgaggtccaactccaaccaagctcagtgactttctcattactggtggtggcaagggttctggtttctctttggatgtaatagacgggcctatctcacagagagagaacctcaggctttttaaggaaagggaaaaaccactcaagcgacgttcaaaatctgaaactggagactcctctatttttcgtaaattgcgcaatgccaaaggtgaagaacttgggaagtcatcagatcttgaagataaccgatcagaagactctgtcaggccctggacatgtccaaagtgctttgcccactatgatgtccagagtatattatttgatttgaatgaggcaattatgaacaggcacaatgttattaagaggagaaacaccaccactggagcttccgcagctgccgtggcatccttggtctctggacctctgtctcattcagccagttttagctccccaatgggcagcacagaggacctgaattccaaaggaagcctcagcatggaccagggagatgataaaagcaatgagcttgtaatgagctgtccatattttcggaatgagataggtggagaaggggagaggaaaatcagcctttcaaaatcaaattctggctcctttagtggatgtgaaagtgcctcctttgagtctacccttagttcccattgcacaaatgcaggagtggcagtacttgaagtgcccaaggagaacttggtgttgcacctagatagagtgaaaagatacatcgtggaacacgtagatctgggtgcatactattatagaaaatttttctaccagaaggaacactggaactattttggggctgatgagaatcttggtccagtggctgtgagcattcgaagggaaaaaccagatgaaatgaaagaaaatggatctccgtacaactaccgaataatttttagaactagtgagctcatgacactgagaggttcggtcctggaggacgccattccgtcgacagccaagcactcgacagccagaggcctgcctctcaaagaagtgctggagcacgtggttcctgagctcaatgtccagtgcctgcggttggccttcaacacacccaaggtcacagagcagctcatgaaactggatgaacaagggctgaactaccagcagaaagtaggcatcatgtactgcaaagctggacagagcactgaagaagagatgtacaacaatgagtcagctggcccagcctttgaagaattccttcaactattgggagagcgagttcggctcaaaggatttgagaagtatcgagcacagcttgataccaaaactgactccactggaacccattctctgtacacaacatacaaagattatgaaattatgttccatgtttctaccatgctgccatacacacccaacaacaaacaacagctcctgaggaagcggcacattggaaatgatatcgtaacaattgttttccaagagcctggagcacagccattcagcccaaaaaacatccgatcccacttccagcacgttttcgtcatcgtcagggtgcacaatccgtgctctgacagtgtctgttatagtgtggctgttaccaggtccagagatgtgccttcctttgggcctcccattcctaaaggggtcactttccctaagtcaaatgtgttcagggacttccttttggcgaaagtgattaatgcagaaaatgctgctcataaatcggagaagtttcgggccatggcaactcggacccgccaggaatacctgaaagatctggcagaaaagaatgtcaccaacacccctatcgacccttctggcaagtttccgttcatctctctggcttccaagaagaaggaaaagtctaagccatatccaggagccgagctcagcagcatgggggccattgtatgggcagtccgggctgaagactacaacaaggccatggaactagactgccttttagggatctccaatgagttcattgtgctcattgaacaggaaacaaagagcgtggtcttcaattgttcctgtagagatgtgatagggtggacttcaactgacaccagcctcaaaatcttctatgaacgaggagaatgtgtttcagtgggtagttttattaacattgaggagatcaaagagattgtcaaaaggttgcagtttgtttcaaaaggctgtgaatcggtggagatgactctgcgaagaaatgggctaggacagcttggcttccatgtcaactatgagggcattgtggcggatgtggagccctacggttatgcctggcaggcagggctgaggcagggcagtcgcctggtggagatctgcaaggtggcggtagccactctgagccatgagcagatgatcgacctcctgagaacatctgtcacggtgaaggttgtcatcattcccccgcatgatgactgcaccccgcggaggagttgctctgaaacctaccgcatgccagtgatggagtacaaaatgaatgaaggtgtttcatacgaattcaagtttcccttccgaaataataacaagtggcagaggaacgccagcaaggggcctcattcacctcaagtcccgtcccaggtgcagagtcccatgacctcgcggctgaatgctggaaaaggagatgggaagatgcctcctccagaaagagccgccaacatccctcgaagcatctccagtgacgggcgcccactagagaggcggctgtctcctggttcggacatctatgtgacggtctcatccatggctttagcaagatcccagtgtcggaactctcctagcaacttgtcttcatccagtgatactggttctgtggggggcacttacaggcagaagtccatgcccgaagggtttggagtgagccgtagatccccagcctccattgacaggcagaacacccagtcagatattggtggcagcggaaaatccacgcctagctggcaaagaagtgaggatagcattgctgaccagatggagccaacatgccatctcccagcagtatcaaaggtactgccagctttccgagagagccccagtgggagattaatgcggcaggatccagtggttcatttgtctccaaacaaacaagggcattctgatagccactactcgagccactccagtagcaatactctctccagcaatgcgtcaagtgcccatagtgatgagaagtggtacgatggggaccgcacagaatccgaactcaacagctataactatctgcaaggcacctctgctgacagtggcattgacaccacctcttatggccccagccacggcagcacagcctcgctgggggctgccacatcgtcacctcgctcagggccaggcaaggagaaagtggcacccctatggcacagctccagtgaagtaatctccatggcagatcggactttggagacagagagccacggcctggaccggaaaacagagtcttccctgagcttagacatacacagcaagagccaagccggctcgacccctctgacaagggagaacagcaccttcagtataaacgatgctgcttcccacacaagtaccatgagctcccgacactctgccagcccagtggttttcaccagtgcccggagttcacctaaagaagagcttcatccagctgccccctcacagctcgcaccatccttctcctcctcttcctcctcctcctctggtcctaggagtttttaccctcgccagggcgctactagcaagtacctgattggatggaaaaaacccgaaggaaccataaactccgtgggatttatggacacgagaaagcgtcatcagagcgatggcaatgaaatagcccacaccaggctgcgtgcctcaaccagagacctccgggcatctcctaagccaacctccaagtccaccattgaagaagatctaaagaaactaattgatcttgaaagcccaactcctgaatcacagaagagttttaagttccacgcactctcctctcccagttccctaattttcctcctgggctcctttagaactcgaagtgggaagcttccaacccctgtaatgacatctaacttgtcttcaaaaggcagtttgcacattaaaagtctccctgataacttcaaaagggactgaagtatcgataattcatccctttctccccgggatgcaggggt

SEQ ID NO: 319319 - DNA, 3501 bp, Homo sapiens
ggagagcgcgcggcggacgcgcccgggacgcgcggcggcaccgggaggccgggccgagcgaaatgtggtctcgctgtgttgcccagtactggcctcaagcgagcctcctacctcagccttccaaagtgttgggattataggcgtgagccactgcacctggcacagtcttaaaacattttggaaaaagttgaagctctccttttctaccctcctgattctgtgcttctgttggagtgcatatcacttgatggcttctaagacaaatgctaaattcttgtcagattacgcagttttgagagattacctgaagttgcactcaaaagcaagatatactactaactttgaaatggaataaggccctccctatcctgaagacattagctgagagtctggcaccttttaaaggtctgatcatcaattgtctctctgggcggccacctatgagacttcatctgtgtgctttataaatagcagtccagggcaacagtacttgataaaaaggttataccttattggtgtggacgttgtctaaatttcggtagccatggcacaagaatataagaaagcatgggattatggcaaccacagaatctcagtagtacaagttccattcagttttttctgaaagaaagccctctgttaaagtgaagcaaagaaactgttgtggattataacgtttagaagttccaatttttcagtgctttacaaataaagcatcatttaaccttttaaatgaaaaagattaagatctcatgcaactgttgtattttctggaagccattctccaaaagggaagtgcacatttaaaacacagatatgatggtccttgctgcagggatttaagtctacttgcttttacatcatgaccagcttgaaacggtcacagacagaaaggcctcttgccactgacagggcctctgttgttggcacagacggcacccccaaagtccacactgatgatttctacatgcggcgcttccggtcccaaaatggcagcttaggatcatcagttatggctcctgtaggacccccccgaagtgaaggttctcaccatataacctcaacccccggagtcccaaaaatgggggtaagggcaaggattgcagattggcccccaagaaaggaaaacataaaagaatctagccgttcaagccaggaaatagaaacctcaagttgccttgatagcctgtcctccaaaagcagtcctgtgagtcagggaagttctgttagcctcaattccaatgactcagccatgctgaaaagcatacagaacacgctgaaaaacaagacaagaccgtcggagaacatggactccagatttctcatgcctgaagcctaccccagctcccccagaaaagctcttcgcagaatacgccagcgaagcaacagtgatatcaccataagtgaacttgatgtggatagctttgatgaatgtatctcacctacatacaagactggaccatcactgcacagggaatatggtagcacatcttcaattgataaacagggaacatctggagaaagcttttttgatttgttaaagggctacaaagatgacaaatctgatcgaggtccaactccaaccaagctcagtgactttctcattactggtggtggcaagggttctggtttctctttggatgtaatagacgggcctatctcacagagagagaacctcaggctttttaaggaaagggaaaaaccactcaagcgacgttcaaaatctgaaactggagactcctctatttttcgtaaattgcgcaatgccaaaggtgaagaacttgggaagtcatcagatcttgaagataaccgatcagaagactctgtcaggccctggacatgtccaaagtgctttgcccactatgatgtccagagtatattatttgatttgaatgaggcaattatgaacaggcacaatgttattaagaggagaaacaccaccactggagcttccgcagctgccgtggcatccttggtctctggacctctgtctcattcagccagttttagctccccaatgggcagcacagaggacctgaattccaaaggaagcctcagcatggaccagggagatgataaaagcaatgagcttgtaatgagctgtccatattttcggaatgagataggtggagaaggggagaggaaaatcagcctttcaaaatcaaattctggctcctttagtggatgtgaaagtgcctcctttgagtctacccttagttcccattgcacaaatgcaggagtggcagtacttgaagtgcccaaggagaacttggtgttgcacctagatagagtgaaaagatacatcgtggaacacgtagatctgggtgcatactattatagaaaatttttctaccagaaggaacactggaactattttggggctgatgagaatcttggtccagtggctgtgagcattcgaagggaaaaaccagatgaaatgaaagaaaatggatctccgtacaactaccgaataatttttagaactagtgagctcatgacactgagaggttcggtcctggaggacgccattccgtcgacagccaagcactcgacagccagaggcctgcctctcaaagaagtgctggagcacgtggttcctgagctcaatgtccagtgcctgcggttggccttcaacacacccaaggtcacagagcagctcatgaaactggatgaacaagggctgaactaccagcagaaagtaggcatcatgtactgcaaagctggacagagcactgaagaagagatgtacaacaatgagtcagctggcccagcctttgaagaattccttcaactattgggagagcgagttcggctcaaaggatttgagaagtatcgagcacagcttgataccaaaactgactccactggaacccattctctgtacacaacatacaaagattatgaaattatgttccatgtttctaccatgctgccatacacacccaacaacaaacaacagctcctgaggaagcggcacattggaaatgatatcgtaacaattgttttccaagagcctggagcacagccattcagcccaaaaaacatccgatcccacttccagcacgttttcgtcatcgtcagggtgcacaatccgtgctctgacagtgtctgttatagtgaccttaattatctgatcccagttgatagagaagattagaagcaaaaaaaagaagaaggagctgttaatagcgagtatatactggaaacaaatacttgtttattgatagaagagatgctgaaaaactattcacatcaaagatatgaattcaataagcatagcaatctggggccatttgattttggggcaaacagccaaatatagtagttcctccttatctgttggggatatattccaagacccccagaggatgcccgaaaccatggatagtgcctacccctatatatactatgtttgttcctatatgataacgtttaatttctaaattaggcacagtaatatattaacagtaattaataaaatataacagttataacaatata

SEQ ID NO: 319320 - DNA, 135 bp, Homo sapiens
ccttaggaatgaaatcgctgcatggtaagtggtctttcagctgcagcctggatggccctgttgatgatggtcagtgtccccagacgtggctgccactcatgtgctcagagaggggtcctgtatccatgctcagat

SEQ ID NO: 319321 - DNA, 468 bp, Homo sapiens
tgctagctctcgaacgcatttatttcattgctgagtggaaagccttggtctggaaatttggcacaaggactgtttccagagaaacatttcatagaatgctacagtgatgagcagggaagaggggggactagaaattgactcacaaatgtttcttaaagggaaattacatggctacaatcctcttatagctaaaacagtcatatttttccctgtgagggttgggaaataagatttccagtgcatcctgcactggaaatactagacatgactgccaactagaccacttgttgactttgatagatagggccagggatgtggttccaaaatactaagtggtttcttctctcctttccagtccagagagcctcattttttgctgctagtgatgaaaaccatcgccccttgagtgctgcatccaacagtgatcagctggaggaccaggctctggcccagatgaagccttacagc

SEQ ID NO: 319322 - DNA, 341 bp, Homo sapiens
caagtcccgtcccaggtgcagagtcccatgacctcgcggctgaatgctggaaaaggagatgggaagatgcctcctccagaaagagccgccaacatccctcgaagcatctccagtgacgggcgcccactagagaggcggtaagtgtgccttcaaaggtttgctctatctctctctgccccaaatgtaagtaacacagacccataagcactagttttaggccttctcatattttactagaaacaaagaattaaactgaggtgcataccgtagtgactttcaaagcatggtagtgttccaaagccataaggatcaacagagattgattctagcaaagccttcag

SEQ ID NO: 319323 - DNA, 562 bp, Homo sapiens
ctgctccctgagcttagagtgtcttagcacctgataccagtccgtttagacaggtgtttggaggaacgaagaatagaaatggacaaaagatcaaaacgggtccatagctattactcagaagagctgggcaaggtggggccaacacctcttagcttttctacttcactctgcctcccaggaaaaagaagacaaagctcaccttcaggcggaggtgcagcacctgcgagaggacaacctgaggctacaggaggagtcccagaacgcctcggacaagctgaagaagttcacagaatgggtcttcaacaccatagacatgagctagggaaggctgaggaggacaggagaagggcccagacactccctccagtgagtgtcctgcagcccttattccctccatagaaagcatcctcagagcaccttccctggcttcctactctgccccctttcggggagtgcacaacacaatagttgcagatcaacaatcatcacctgccttttgtagaaaagaaaaacaaaaaaagtaaataaaaattttaaacagtaaaataaaagtttaactgct

SEQ ID NO: 319324 - DNA, 482 bp, Homo sapiens
ctcttcagctggcaataaggtattcagaactaaccctgcttgcaatgattttccagttccatgtccaccacttaataccctattgctttaaaccacagtatcttttatttccttgtctagtttgtttcaaaaggctgtgaatcggtggagatgactctgcgaagaaatgggctaggacagcttggcttccatgtcaactatgagggcattgtggcggatgtggagccctacggttatgcctggcaggcagggctgaggcagggcagtcgcctggtggagatctgcaaggtggcggtagccactctgagccatgagcagatgatcgacctcctgagaacatctgtcacggtgaaggttgtcatcattcccccgcatgatgactgcaccccgcggaggtaggtctgaggagacagctgtgggcctgagactcgagtgcagggtttgtgtaccatgtagaacatctcttagcaggtagtggagta

SEQ ID NO: 319325 - DNA, 240 bp, Homo sapiens
tcactgggatgaatggattagatggatttgatggattggatggatggatgggatggatggatggatggacaggatggatgggtggatgaatgctggaaaaggagatgggaagatgcctcctccagaaagagccgccaacatccctcgaagcatctccagtgacgggcgcccactagagaggcggacgtctcctggttcggacatctaagtgacgttcctcatcccagtgacgttcctcat

SEQ ID NO: 319326 - DNA, 8157 bp, Homo sapiens
ggagagcgcgcggcggacgcgcccgggacgcgcggcggcaccgggaggccgggccgagcgaaatgtggtctcgctgtgttgcccagtactggcctcaagcgagcctcctacctcagccttccaaagtgttgggattataggcgtgagccactgcacctggcacagtcttaaaacattttggaaaaagttgaagctctccttttctaccctcctgattctgtgcttctgttggagtgcatatcacttgatggcttctaagacaaatgctaaattcttgtcagattacgcagttttgagagattacctgaagttgcactcaaaagcaagatatactactaactttgaaatggaataaggccctccctatcctgaagacattagctgagagtctggcaccttttaaaggtctgatcatcaattgtctctctgggcggccacctatgagacttcatctgtgtgctttataaatagcagtccagggcaacagtacttgataaaaaggttataccttattggtgtggacgttgtctaaatttcggtagccatggcacaagaatataagaaagcatgggattatggcaaccacagaatctcagtagtacaagttccattcagttttttctgaaagaaagccctctgttaaagtgaagcaaagaaactgttgtggattataacgtttagaagttccaatttttcagtgctttacaaataaagcatcatttaaccttttaaatgaaaaagattaagatctcatgcaactgttgtattttctggaagccattctccaaaagggaagtgcacatttaaaacacagatatgatggtccttgctgcagggatttaagtctacttgcttttacatcatgaccagcttgaaacggtcacagacagaaaggcctcttgccactgacagggcctctgttgttggcacagacggcacccccaaagtccacactgatgatttctacatgcggcgcttccggtcccaaaatggcagcttaggatcatcagttatggctcctgtaggacccccccgaagtgaaggttctcaccatataacctcaacccccggagtcccaaaaatgggggtaagggcaaggattgcagattggcccccaagaaaggaaaacataaaagaatctagccgttcaagccaggaaatagaaacctcaagttgccttgatagcctgtcctccaaaagcagtcctgtgagtcagggaagttctgttagcctcaattccaatgactcagccatgctgaaaagcatacagaacacgctgaaaaacaagacaagaccgtcggagaacatggactccagatttctcatgcctgaagcctaccccagctcccccagaaaagctcttcgcagaatacgccagcgaagcaacagtgatatcaccataagtgaacttgatgtggatagctttgatgaatgtatctcacctacatacaagactggaccatcactgcacagggaatatggtagcacatcttcaattgataaacagggaacatctggagaaagcttttttgatttgttaaagggctacaaagatgacaaatctgatcgaggtccaactccaaccaagctcagtgactttctcattactggtggtggcaagggttctggtttctctttggatgtaatagacgggcctatctcacagagagagaacctcaggctttttaaggaaagggaaaaaccactcaagcgacgttcaaaatctgaaactggagactcctctatttttcgtaaattgcgcaatgccaaaggtgaagaacttgggaagtcatcagatcttgaagataaccgatcagaagactctgtcaggccctggacatgtccaaagtgctttgcccactatgatgtccagagtatattatttgatttgaatgaggcaattatgaacaggcacaatgttattaagaggagaaacaccaccactggagcttccgcagctgccgtggcatccttggtctctggacctctgtctcattcagccagttttagctccccaatgggcagcacagaggacctgaattccaaaggaagcctcagcatggaccagggagatgataaaagcaatgagcttgtaatgagctgtccatattttcggaatgagataggtggagaaggggagaggaaaatcagcctttcaaaatcaaattctggctcctttagtggatgtgaaagtgcctcctttgagtctacccttagttcccattgcacaaatgcaggagtggcagtacttgaagtgcccaaggagaacttggtgttgcacctagatagagtgaaaagatacatcgtggaacacgtagatctgggtgcatactattatagaaaatttttctaccagaaggaacactggaactattttggggctgatgagaatcttggtccagtggctgtgagcattcgaagggaaaaaccagatgaaatgaaagaaaatggatctccgtacaactaccgaataatttttagaactagtgagctcatgacactgagaggttcggtcctggaggacgccattccgtcgacagccaagcactcgacagccagaggcctgcctctcaaagaagtgctggagcacgtggttcctgagctcaatgtccagtgcctgcggttggccttcaacacacccaaggtcacagagcagctcatgaaactggatgaacaagggctgaactaccagcagaaagtaggcatcatgtactgcaaagctggacagagcactgaagaagagatgtacaacaatgagtcagctggcccagcctttgaagaattccttcaactattgggagagcgagttcggctcaaaggatttgagaagtatcgagcacagcttgataccaaaactgactccactggaacccattctctgtacacaacatacaaagattatgaaattatgttccatgtttctaccatgctgccatacacacccaacaacaaacaacagctcctgaggaagcggcacattggaaatgatatcgtaacaattgttttccaagagcctggagcacagccattcagcccaaaaaacatccgatcccacttccagcacgttttcgtcatcgtcagggtgcacaatccgtgctctgacagtgtctgttatagtgtggctgttaccaggtccagagatgtgccttcctttgggcctcccattcctaaaggggtcactttccctaagtcaaatgtgttcagggacttccttttggcgaaagtgattaatgcagaaaatgctgctcataaatcggagaagtttcgggccatggcaactcggacccgccaggaatacctgaaagatctggcagaaaagaatgtcaccaacacccctatcgacccttctggcaagtttccgttcatctctctggcttccaagaagaaggaaaagtctaagccatatccaggagccgagctcagcagcatgggggccattgtatgggcagtccgggctgaagactacaacaaggccatggaactagactgccttttagggatctccaatgagttcattgtgctcattgaacaggaaacaaagagcgtggtcttcaattgttcctgtagagatgtgatagggtggacttcaactgacaccagcctcaaaatcttctatgaacgaggagaatgtgtttcagtgggtagttttattaacattgaggagatcaaagagattgtcaaaaggttgcagtttgtttcaaaaggctgtgaatcggtggagatgactctgcgaagaaatgggctaggacagcttggcttccatgtcaactatgagggcattgtggcggatgtggagccctacggttatgcctggcaggcagggctgaggcagggcagtcgcctggtggagatctgcaaggtggcggtagccactctgagccatgagcagatgatcgacctcctgagaacatctgtcacggtgaaggttgtcatcattcccccgcatgatgactgcaccccgcggaggagttgctctgaaacctaccgcatgccagtgatggagtacaaaatgaatgaaggtgtttcatacgaattcaagtttcccttccgaaataataacaagtggcagaggaacgccagcaaggggcctcattcacctcaagtcccgtcccaggtgcagagtcccatgacctcgcggctgaatgctggaaaaggagatgggaagatgcctcctccagaaagagccgccaacatccctcgaagcatctccagtgacgggcgcccactagagaggcggctgtctcctggttcggacatctatgtgacggtctcatccatggctttagcaagatcccagtgtcggaactctcctagcaacttgtcttcatccagtgatactggttctgtggggggcacttacaggcagaagtccatgcccgaagggtttggagtgagccgtagatccccagcctccattgacaggcagaacacccagtcagatattggtggcagcggaaaatccacgcctagctggcaaagaagtgaggatagcattgctgaccagatggcttacagttatagaggacctcaggatttcaattcttttgtcctcgagcagcatgaatatacagagccaacatgccatctcccagcagtatcaaaggtactgccagctttccgagagagccccagtgggagattaatgcggcaggatccagtggttcatttgtctccaaacaaacaagggcattctgatagccactactcgagccactccagtagcaatactctctccagcaatgcgtcaagtgcccatagtgatgagaagtggtacgatggggaccgcacagaatccgaactcaacagctataactatctgcaaggcacctctgctgacagtggcattgacaccacctcttatggccccagccacggcagcacagcctcgctgggggctgccacatcgtcacctcgctcagggccaggcaaggagaaagtggcacccctatggcacagctccagtgaagtaatctccatggcagatcggactttggagacagagagccacggcctggaccggaaaacagagtcttccctgagcttagacatacacagcaagagccaagccggctcgacccctctgacaagggagaacagcaccttcagtataaacgatgctgcttcccacacaagtaccatgagctcccgacactctgccagcccagtggttttcaccagtgcccggagttcacctaaagaagagcttcatccagctgccccctcacagctcgcaccatccttctcctcctcttcctcctcctcctctggtcctaggagtttttaccctcgccagggcgctactagcaagtacctgattggatggaaaaaacccgaaggaaccataaactccgtgggatttatggacacgagaaagcgtcatcagagcgatggcaatgaaatagcccacaccaggctgcgtgcctcaaccagagacctccgggcatctcctaagccaacctccaagtccaccattgaagaagatctaaagaaactaattgatcttgaaagcccaactcctgaatcacagaagagttttaagttccacgcactctcctctcctcagtctcctttccccagcacccccacctcacggcgggccttgcacagaacactgtcggacgagagcatttacaatagccagagggagcactttttcacctccagggcgtcacttctggaccaagccctgcccaacgacgtcctcttcagtagcacgtacccttctctccccaagtcgctcccgttgaggaggccttcttacaccttaggaatgaaatcgctgcatggagagttctcagcctcggacagctccctcactgacatccaggagacccgcaggcagcctatgcccgaccctggcctgatgcccctgcctgacactgctgcagacttggattggtccaacctggtagatgctgccaaagcctatgaggtccagagagcctcattttttgctgctagtgatgaaaaccatcgccccttgagtgctgcatccaacagtgatcagctggaggaccaggctctggcccagatgaagccttacagcagcagtaaagactcctctcccactctggcttctaaagtggaccagctggaaggtatgctgaagatgcttcgggaagatttgaagaaggaaaaagaagacaaagctcaccttcaggcggaggtgcagcacctgcgagaggacaacctgaggctacaggaggagtcccagaacgcctcggacaagctgaagaagttcacagaatgggtcttcaacaccatagacatgagctagggaaggctgaggaggacaggagaagggcccagacactccctccagtgagtgtcctgcagcccttattccctccatagaaagcatcctcagagcaccttccctggcttcctactctgccccctttcggggagtgcacaacacaatagttgcagatcaacaatcatcacctgccttttgtagaaaagaaaaacaaaaaaagtaaataaaaattttaaacagtaaaataaaagtttaactgctaaaatgtgaatgtctttatttttttgcacaatatctatctgttatgtatttaagaagaaactgggccttggaccagggcgccccctggcccatccgcctctattcccatcagctttcttatcaacttcaggtaacccaagctttcccttgttattctaacaaatatcattattcctagaaaaagaatgtttttataacttgtttggggagtagagagggatatttccttaccttcttccctaaaatgcctggagagggagttgctttgagaaaatgcctacctcccttgaatgactcgtgcatgagctagtgctgtctgtacctgtcctccagagatcagcaggaccggagttaaatatttaacagcaagtctgtaaaccagagcagctctgacagtgcctgcaggccacaccccttctcagtcctgcattgtgaggtcatttcctgcttctccctttccccaggaagatggtcccacttgtgctgcaagactcttttttgtttggcttaattgagccccactaaattggaatcaatctctcttacagcttcctggctccaaacattaattgatttcagaattcccccaaactaaaaccttatctgtctgcattttgaatgcattttggtcaaaagtatacgttttaaagatttttaaagataaaaatgtggcacaactggtttttttagcttgctgaaaatgaccatatctctaaattaatctttctctccagagcaagacttcaccagtatttgtaactaggagaagctaacagtgaatgtttaattgtgaattttaatcattgcttgttaggaataatgactgtgatactagaatgggcttttgaaacctgcatgtcccagtgtgaaatttcagcacggcattttctgcatcctttcatgggccatccaaagggattccgctgcagaaattattgatgtgctatttttgctgtcttgtgatgcaggctgctttgggcccctgggtcactcttccaaggctgctgtagagcacagagacatggggctggccagtgttgactgacctgaggagacccctttgtttgttgccttcataactgtcactaaaccgacccctctgccctttcagtggcaactctggtctaagggaacattcagcactctagcggcatctgattggaagttccctcacccaagtaatctcaattccttcctctctccatccctgaaagaaacaggatggattttcctctcttctccctgctacattcactaccagatttttatgctacagtttcattcttgattgtgatttctccatggaattttttttttctggtgacatttctatcatggaaataggaagatttcggagtgctttgtgaagatttcaattgtctgtctctttctctctttgacttgtatgaaggagattgtacattgcctgatatctctttgtaaatgagaaatattgctaacatccaagcattctgaagtcttgcttatccttctgagtttagttctcattttgttttacattttgtttggggacttggggcaagctatttattagagttttgcaacagagttcttgtttgaagcctctaaagactacctgtaaaattcaaagaataaaattcattttaaacgctctttta

SEQ ID NO: 319327 - DNA, 8210 bp, Homo sapiens
ggagagcgcgcggcggacgcgcccgggacgcgcggcggcaccgggaggccgggccgagcgaaatgtggtctcgctgtgttgcccagtactggcctcaagcgagcctcctacctcagccttccaaagtgttgggattataggcgtgagccactgcacctggcacagtcttaaaacattttggaaaaagttgaagctctccttttctaccctcctgattctgtgcttctgttggagtgcatatcacttgatggcttctaagacaaatgctaaattcttgtcagattacgcagttttgagagattacctgaagttgcactcaaaagcaagatatactactaactttgaaatggaataaggccctccctatcctgaagacattagctgagagtctggcaccttttaaaggtctgatcatcaattgtctctctgggcggccacctatgagacttcatctgtgtgctttataaatagcagtccagggcaacagtacttgataaaaaggttataccttattggtgtggacgttgtctaaatttcggtagccatggcacaagaatataagaaagcatgggattatggcaaccacagaatctcagtagtacaagttccattcagttttttctgaaagaaagccctctgttaaagtgaagcaaagaaactgttgtggattataacgtttagaagttccaatttttcagtgctttacaaataaagcatcatttaaccttttaaatgaaaaagattaagatctcatgcaactgttgtattttctggaagccattctccaaaagggaagtgcacatttaaaacacagatatgatggtccttgctgcagggatttaagtctacttgcttttacatcatgaccagcttgaaacggtcacagacagaaaggcctcttgccactgacagggcctctgttgttggcacagacggcacccccaaagtccacactgatgatttctacatgcggcgcttccggtcccaaaatggcagcttaggatcatcagttatggctcctgtaggacccccccgaagtgaaggttctcaccatataacctcaacccccggagtcccaaaaatgggggtaagggcaaggattgcagattggcccccaagaaaggaaaacataaaagaatctagccgttcaagccaggaaatagaaacctcaagttgccttgatagcctgtcctccaaaagcagtcctgtgagtcagggaagttctgttagcctcaattccaatgactcagccatgctgaaaagcatacagaacacgctgaaaaacaagacaagaccgtcggagaacatggactccagatttctcatgcctgaagcctaccccagctcccccagaaaagctcttcgcagaatacgccagcgaagcaacagtgatatcaccataagtgaacttgatgtggatagctttgatgaatgtatctcacctacatacaagactggaccatcactgcacagggaatatggtagcacatcttcaattgataaacagggaacatctggagaaagcttttttgatttgttaaagggctacaaagatgacaaatctgatcgaggtccaactccaaccaagctcagtgactttctcattactggtggtggcaagggttctggtttctctttggatgtaatagacgggcctatctcacagagagagaacctcaggctttttaaggaaagggaaaaaccactcaagcgacgttcaaaatctgaaactggagactcctctatttttcgtaaattgcgcaatgccaaaggtgaagaacttgggaagtcatcagatcttgaagataaccgatcagaagactctgtcaggccctggacatgtccaaagtgctttgcccactatgatgtccagagtatattatttgatttgaatgaggcaattatgaacaggcacaatgttattaagaggagaaacaccaccactggagcttccgcagctgccgtggcatccttggtctctggacctctgtctcattcagccagttttagctccccaatgggcagcacagaggacctgaattccaaaggaagcctcagcatggaccagggagatgataaaagcaatgagcttgtaatgagctgtccatattttcggaatgagataggtggagaaggggagaggaaaatcagcctttcaaaatcaaattctggctcctttagtggatgtgaaagtgcctcctttgagtctacccttagttcccattgcacaaatgcaggagtggcagtacttgaagtgcccaaggagaacttggtgttgcacctagatagagtgaaaagatacatcgtggaacacgtagatctgggtgcatactattatagaaaatttttctaccagaaggaacactggaactattttggggctgatgagaatcttggtccagtggctgtgagcattcgaagggaaaaaccagatgaaatgaaagaaaatggatctccgtacaactaccgaataatttttagaactagtgagctcatgacactgagaggttcggtcctggaggacgccattccgtcgacagccaagcactcgacagccagaggcctgcctctcaaagaagtgctggagcacgtggttcctgagctcaatgtccagtgcctgcggttggccttcaacacacccaaggtcacagagcagctcatgaaactggatgaacaagggctgaactaccagcagaaagtaggcatcatgtactgcaaagctggacagagcactgaagaagagatgtacaacaatgagtcagctggcccagcctttgaagaattccttcaactattgggagagcgagttcggctcaaaggatttgagaagtatcgagcacagcttgataccaaaactgactccactggaacccattctctgtacacaacatacaaagattatgaaattatgttccatgtttctaccatgctgccatacacacccaacaacaaacaacagctcctgaggaagcggcacattggaaatgatatcgtaacaattgttttccaagagcctggagcacagccattcagcccaaaaaacatccgatcccacttccagcacgttttcgtcatcgtcagggtgcacaatccgtgctctgacagtgtctgttatagtgtggctgttaccaggtccagagatgtgccttcctttgggcctcccattcctaaaggggtcactttccctaagtcaaatgtgttcagggacttccttttggcgaaagtgattaatgcagaaaatgctgctcataaatcggagaagtttcgggccatggcaactcggacccgccaggaatacctgaaagatctggcagaaaagaatgtcaccaacacccctatcgacccttctggcaagtttccgttcatctctctggcttccaagaagaaggaaaagtctaagccatatccaggagccgagctcagcagcatgggggccattgtatgggcagtccgggctgaagactacaacaaggccatggaactagactgccttttagggatctccaatgagttcattgtgctcattgaacaggaaacaaagagcgtggtcttcaattgttcctgtagagatgtgatagggtggacttcaactgacaccagcctcaaaatcttctatgaacgaggagaatgtgtttcagtgggtagttttattaacattgaggagatcaaagagattgtcaaaaggttgcagtttgtttcaaaaggctgtgaatcggtggagatgactctgcgaagaaatgggctaggacagcttggcttccatgtcaactatgagggcattgtggcggatgtggagccctacggttatgcctggcaggcagggctgaggcagggcagtcgcctggtggagatctgcaaggtggcggtagccactctgagccatgagcagatgatcgacctcctgagaacatctgtcacggtgaaggttgtcatcattcccccgcatgatgactgcaccccgcggaggagttgctctgaaacctaccgcatgccagtgatggagtacaaaatgaatgaaggtgtttcatacgaattcaagtttcccttccgaaataataacaagtggcagaggaacgccagcaaggggcctcattcacctcaagtcccgtcccaggtgcagagtcccatgacctcgcggctgaatgctggaaaaggagatgggaagatgcctcctccagaaagagccgccaacatccctcgaagcatctccagtgacgggcgcccactagagaggcggctgtctcctggttcggacatctatgtgacggtctcatccatggctttagcaagatcccagtgtcggaactctcctagcaacttgtcttcatccagtgatactggttctgtggggggcacttacaggcagaagtccatgcccgaagggtttggagtgagccgtagatccccagcctccattgacaggcagaacacccagtcagatattggtggcagcggaaaatccacgcctagctggcaaagaagtgaggatagcattgctgaccagatggagccaacatgccatctcccagcagtatcaaaggtactgccagctttccgagagagccccagtgggagattaatgcggcaggatccagtggttcatttgtctccaaacaaacaagggcattctgatagccactactcgagccactccagtagcaatactctctccagcaatgcgtcaagtgcccatagtgatgagaagtggtacgatggggaccgcacagaatccgaactcaacagctataactatctgcaaggcacctctgctgacagtggcattgacaccacctcttatggccccagccacggcagcacagcctcgctgggggctgccacatcgtcacctcgctcagggccaggcaaggagaaagtggcacccctatggcacagctccagtgaagtaatctccatggcagatcggactttggagacagagagccacggcctggaccggaaccctctgacaagggagaacagcaccttcagtataaacgatgctgcttcccacacaagtaccatgagctcccgacactctgccagcccagtggttttcaccagtgcccggagttcacctaaagaagagcttcatccagctgccccctcacagctcgcaccatccttctcctcctcttcctcctcctcctctggtcctaggagtttttaccctcgccagggcgctactagcaagtacctgattggatggaaaaaacccgaaggaaccataaactccgtgggatttatggacacgagaaagcgtcatcagagcgatggcaatgaaatagcccacaccaggctgcgtgcctcaaccagagacctccgggcatctcctaagccaacctccaagtccaccattgaagaagatctaaagaaactaattgatcttgaaagcccaactcctgaatcacagaagagttttaagttccacgcactctcctctcctcagtctcctttccccagcacccccacctcacggcgggccttgcacagaacactgtcggacgagagcatttacaatagccagagggagcactttttcacctccagggcgtcacttctggaccaagccctgcccaacgacgtcctcttcagtagcacgtacccttctctccccaagtcgctcccgttgaggaggccttcttacaccttaggaatgaaatcgctgcatggagagttctcagcctcggacagctccctcactgacatccaggagacccgcaggcagcctatgcccgaccctggcctgatgcccctgcctgacactgctgcagacttggattggtccaacctggtagatgctgccaaagcctatgaggtccagagagcctcattttttgctgctagtgatgaaaaccatcgccccttgagtgctgcatccaacagtgatcagctggaggaccaggctctggcccagatgaagccttacagcagcagtaaagactcctctcccactctggcttctaaagtggaccagctggaaggtatgctgaagatgcttcgggaagatttgaagaaggaaaaagaagacaaagctcaccttcaggcggaggtgcagcacctgcgagaggacaacctgaggctacaggaggagtcccagaacgcctcggacaagctgaagaagttcacagaatgggtcttcaacaccatagacatgagctagggaaggctgaggaggacaggagaagggcccagacactccctccagtgagtgtcctgcagcccttattccctccatagaaagcatcctcagagcaccttccctggcttcctactctgccccctttcggggagtgcacaacacaatagttgcagatcaacaatcatcacctgccttttgtagaaaagaaaaacaaaaaaagtaaataaaaattttaaacagtaaaataaaagtttaactgctaaaatgtgaatgtctttatttttttgcacaatatctatctgttatgtatttaagaagaaactgggccttggaccagggcgccccctggcccatccgcctctattcccatcagctttcttatcaacttcaggtaacccaagctttcccttgttattctaacaaatatcattattcctagaaaaagaatgtttttataacttgtttggggagtagagagggatatttccttaccttcttccctaaaatgcctggagagggagttgctttgagaaaatgcctacctcccttgaatgactcgtgcatgagctagtgctgtctgtacctgtcctccagagatcagcaggaccggagttaaatatttaacagcaagtctgtaaaccagagcagctctgacagtgcctgcaggccacaccccttctcagtcctgcattgtgaggtcatttcctgcttctccctttccccaggaagatggtcccacttgtgctgcaagactcttttttgtttggcttaattgagccccactaaattggaatcaatctctcttacagcttcctggctccaaacattaattgatttcagaattcccccaaactaaaaccttatctgtctgcattttgaatgcattttggtcaaaagtatacgttttaaagatttttaaagataaaaatgtggcacaactggtttttttagcttgctgaaaatgaccatatctctaaattaatctttctctccagagcaagacttcaccagtatttgtaactaggagaagctaacagtgaatgtttaattgtgaattttaatcattgcttgttaggaataatgactgtgatactagaatgggcttttgaaacctgcatgtcccagtgtgaaatttcagcacggcattttctgcatcctttcatgggccatccaaagggattccgctgcagaaattattgatgtgctatttttgctgtcttgtgatgcaggctgctttgggcccctgggtcactcttccaaggctgctgtagagcacagagacatggggctggccagtgttgactgacctgaggagacccctttgtttgttgccttcataactgtcactaaaccgacccctctgccctttcagtggcaactctggtctaagggaacattcagcactctagcggcatctgattggaagttccctcacccaagtaatctcaattccttcctctctccatccctgaaagaaacaggatggattttcctctcttctccctgctacattcactaccagatttttatgctacagtttcattcttgattgtgatttctccatggaattttttttttctggtgacatttctatcatggaaataggaagatttcggagtgctttgtgaagatttcaattgtctgtctctttctctctttgacttgtatgaaggagattgtacattgcctgatatctctttgtaaatgagaaatattgctaacatccaagcattctgaagtcttgcttatccttctgagtttagttctcattttgttttacattttgtttggggacttggggcaagctatttattagagttttgcaacagagttcttgtttgaagcctctaaagactacctgtaaaattcaaagaataaaattcattttaaacgctcttttaaaacactttggtattattgcttgaggtttgcttatttgaaagaccacccaataactcattgaccctccttgcatccgaattttttcatcaagctttgttaacactaatgatgattcttgaaaatttctgtccttctcagaatgttaataaacttttttactctgtccaca

SEQ ID NO: 319328 - DNA, 4006 bp, Homo sapiens
tggtttggtggtacttggctatgctaatgtgtatgacgtgacaagttgtcaccagctgcaagctttatccatcagccacttaagtttctgacctgctgtctatcaaatagactcttaacaagcttactgctgaaatgcagagtttgctggtcagtgaactgaaagatgcaatggcaagccatcttcatttgtcaccatgtgcttgtttctgcttagtgcctgcaccataatgtcctatgctgtattccagagccaacatgccatctcccagcagtatcaaaggtactgccagctttccgagagagccccagtgggagattaatgcggcaggatccagtggttcatttgtctccaaacaaacaagggcattctgatagccactactcgagccactccagtagcaatactctctccagcaatgcgtcaagtgcccatagtgatgagaagtggtacgatggggaccgcacagaatccgaactcaacagctataactatctgcaaggcacctctgctgacagtggcattgacaccacctcttatggccccagccacggcagcacagcctcgctgggggctgccacatcgtcacctcgctcagggccaggcaaggagaaagtggcacccctatggcacagctccagtgaagtaatctccatggcagatcggactttggagacagagagccacggcctggaccggaaaacagagtcttccctgagcttagacatacacagcaagagccaagccggctcgacccctctgacaagggagaacagcaccttcagtataaacgatgctgcttcccacacaagtaccatgagctcccgacactctgccagcccagtggttttcaccagtgcccggagttcacctaaagaagagcttcatccagctgccccctcacagctcgcaccatccttctcctcctcttcctcctcctcctctggtcctaggagtttttaccctcgccagggcgctactagcaagtacctgattggatggaaaaaacccgaaggaaccataaactccgtgggatttatggacacgagaaagcgtcatcagagcgatggcaatgaaatagcccacaccaggctgcgtgcctcaaccagagacctccgggcatctcctaagccaacctccaagtccaccattgaagaagatctaaagaaactaattgatcttgaaagcccaactcctgaatcacagaagagttttaagttccacgcactctcctctcctcagtctcctttccccagcacccccacctcacggcgggccttgcacagaacactgtcggacgagagcatttacaatagccagagggagcactttttcacctccagggcgtcacttctggaccaagccctgcccaacgacgtcctcttcagtagcacgtacccttctctccccaagtcgctcccgttgaggaggccttcttacaccttaggaatgaaatcgctgcatggagagttctcagcctcggacagctccctcactgacatccaggagacccgcaggcagcctatgcccgaccctggcctgatgcccctgcctgacactgctgcagacttggattggtccaacctggtagatgctgccaaagcctatgaggtccagagagcctcattttttgctgctagtgatgaaaaccatcgccccttgagtgctgcatccaacagtgatcagctggaggaccaggctctggcccagatgaagccttacagcagcagtaaagactcctctcccactctggcttctaaagtggaccagctggaaggtatgctgaagatgcttcgggaagatttgaagaaggaaaaagaagacaaagctcaccttcaggcggaggtgcagcacctgcgagaggacaacctgaggctacaggaggagtcccagaacgcctcggacaagctgaagaagttcacagaatgggtcttcaacaccatagacatgagctagggaaggctgaggaggacaggagaagggcccagacactccctccagtgagtgtcctgcagcccttattccctccatagaaagcatcctcagagcaccttccctggcttcctactctgccccctttcggggagtgcacaacacaatagttgcagatcaacaatcatcacctgccttttgtagaaaagaaaaacaaaaaaagtaaataaaaattttaaacagtaaaataaaagtttaactgctaaaatgtgaatgtctttatttttttgcacaatatctatctgttatgtatttaagaagaaactgggccttggaccagggcgccccctggcccatccgcctctattcccatcagctttcttatcaacttcaggtaacccaagctttcccttgttattctaacaaatatcattattcctagaaaaagaatgtttttataacttgtttggggagtagagagggatatttccttaccttcttccctaaaatgcctggagagggagttgctttgagaaaatgcctacctcccttgaatgactcgtgcatgagctagtgctgtctgtacctgtcctccagagatcagcaggaccggagttaaatatttaacagcaagtctgtaaaccagagcagctctgacagtgcctgcaggccacaccccttctcagtcctgcattgtgaggtcatttcctgcttctccctttccccaggaagatggtcccacttgtgctgcaagactcttttttgtttggcttaattgagccccactaaattggaatcaatctctcttacagcttcctggctccaaacattaattgatttcagaattcccccaaactaaaaccttatctgtctgcattttgaatgcattttggtcaaaagtatacgttttaaagatttttaaagataaaaatgtggcacaactggtttttttagcttgctgaaaatgaccatatctctaaattaatctttctctccagagcaagacttcaccagtatttgtaactaggagaagctaacagtgaatgtttaattgtgaattttaatcattgcttgttaggaataatgactgtgatactagaatgggcttttgaaacctgcatgtcccagtgtgaaatttcagcacggcattttctgcatcctttcatgggccatccaaagggattccgctgcagaaattattgatgtgctatttttgctgtcttgtgatgcaggctgctttgggcccctgggtcactcttccaaggctgctgtagagcacagagacatggggctggccagtgttgactgacctgaggagacccctttgtttgttgccttcataactgtcactaaaccgacccctctgccctttcagtggcaactctggtctaagggaacattcagcactctagcggcatctgattggaagttccctcacccaagtaatctcaattccttcctctctccatccctgaaagaaacaggatggattttcctctcttctccctgctacattcactaccagatttttatgctacagtttcattcttgattgtgatttctccatggaattttttttttctggtgacatttctatcatggaaataggaagatttcggagtgctttgtgaagatttcaattgtctgtctctttctctctttgacttgtatgaaggagattgtacattgcctgatatctctttgtaaatgagaaatattgctaacatccaagcattctgaagtcttgcttatccttctgagtttagttctcattttgttttacattttgtttggggacttggggcaagctatttattagagttttgcaacagagttcttgtttgaagcctctaaagactacctgtaaaattcaaagaataaaattcattttaaacgctcttttaaaacactttggtattattgcttgaggtttgcttatttgaaagaccacccaataactcattgaccctccttgcatccgaattttttcatcaagctttgttaacactaatgatgattcttgaaaatttctgtccttctcagaatgttaataaacttttttactctgtccaca

SEQ ID NO: 319329 - DNA, 2216 bp, Homo sapiens
ggagagcgcgcggcggacgcgcccgggacgcgcggcggcaccgggaggccgggccgagcgaaatgtggtctcgctgtgttgcccagtactggcctcaagcgagcctcctacctcagccttccaaagtgttgggattataggcgtgagccactgcacctggcacagtcttaaaacattttggaaaaagttgaagctctccttttctaccctcctgattctgtgcttctgttggagtgcatatcacttgatggcttctaagacaaatgctaaattcttgtcagattacgcagttttgagagattacctgaagttgcactcaaaagcaagatatactactaactttgaaatggaataaggccctccctatcctgaagacattagctgagagtctggcaccttttaaaggtctgatcatcaattgtctctctgggcggccacctatgagacttcatctgtgtgctttataaatagcagtccagggcaacagtacttgataaaaaggttataccttattggtgtggacgttgtctaaatttcggtagccatggcacaagaatataagaaagcatgggattatggcaaccacagaatctcagtagtacaagttccattcagttttttctgaaagaaagccctctgttaaagtgaagcaaagaaactgttgtggattataacgtttagaagttccaatttttcagtgctttacaaataaagcatcatttaaccttttaaatgaaaaagattaagatctcatgcaactgttgtattttctggaagccattctccaaaagggaagtgcacatttaaaacacagatatgatggtccttgctgcagggatttaagtctacttgcttttacatcatgaccagcttgaaacggtcacagacagaaaggcctcttgccactgacagggcctctgttgttggcacagacggcacccccaaagtccacactgatgatttctacatgcggcgcttccggtcccaaaatggcagcttaggatcatcagttatggctcctgtaggacccccccgaagtgaaggttctcaccatataacctcaacccccggagtcccaaaaatgggggtaagggcaaggattgcagattggcccccaagaaaggaaaacataaaagaatctagccgttcaagccaggaaatagaaacctcaagttgccttgatagcctgtcctccaaaagcagtcctgtgagtcagggaagttctgttagcctcaattccaatgactcagccatgctgaaaagcatacagaacacgctgaaaaacaagacaagaccgtcggagaacatggactccagatttctcatgcctgaagcctaccccagctcccccagaaaagctcttcgcagaatacgccagcgaagcaacagtgatatcaccataagtgaacttgatgtggatagctttgatgaatgtatctcacctacatacaagactggaccatcactgcacagggaatatggtagcacatcttcaattgataaacagggaacatctggagaaagcttttttgatttgttaaagggctacaaagatgacaaatctgatcgaggtccaactccaaccaagctcagtgactttctcattactggtggtggcaagggttctggtttctctttggatgtaatagacgggcctatctcacagagagagaacctcaggctttttaaggaaagggaaaaaccactcaagcgacgttcaaaatctgaaactggagactcctctatttttcgtaaattgcgcaatgccaaaggtgaagaacttgggaagtcatcagatcttgaagataaccgatcagaagactctgtcaggccctggacatgtccaaagtgctttgcccactatgatgtccagagtatattatttgatttgaatgaggcaattatgaacaggcacaatgttattaagaggaagaagttcacagaatgggtcttcaacaccatagacatgagctagggaaggctgaggaggacaggagaagggcccagacactccctccagtgagtgtcctgcagcccttattccctccatagaaagcatcctcagagcaccttccctggcttcctactctgccccctttcggggagtgcacaacacaatagttgcagatcaacaatcatcacctgccttttgtagaaaagaaaaacaaaaaaagtaaataaaaattttaaacagtaaaataaaagtttaactgcta

SEQ ID NO: 319330 - DNA, 775 bp, Homo sapiens
ggagagcgcgcggcggacgcgcccgggacgcgcggcggcaccgggaggccgggccgagcgaaatgtggtctcgctgtgttgcccagtactggcctcaagcgagcctcctacctcagccttccaaagtgttgggattataggcgtgagccactgcacctggcacagtcttaaaacattttggaaaaagttgaagctctccttttctaccctcctgattctgtgcttctgttggagtgcatatcacttgatggcttctaagacaaatgctaaattcttgtcagattacgcagttttgagagattacctgaagttgcactcaaaagcaagatatactactaactttgaaatggaataaggtgagttggtggattagttccaaagtcacattgcagggaggaaatgtcactcaaactgtcattcttagaagacctgctatttggccaggcgtgagccaccatgcccggatgtattaatggtattttaataataactcttggttgataaacttaaacatgacagttttgagcaggcaccttaagttctgtatactaccgtgaggccaggcacttgtttagcttctgtgtcatacagctaccccttgtattttgttctttttttttttagtataataaatctatagttttattaacacagaaactgatagtgtggtatgaggtttacgtttaaacaaagttttcacagaaatctaacacatgcctaaaaagattttacaatctagctctagatgcaagtccagacaatatcaagaactgat

SEQ ID NO: 319331 - DNA, 296 bp, Homo sapiens
  misc_feature (80)..(80): n is a, c, g, or t
  misc_feature (92)..(92): n is a, c, g, or t
  misc_feature (102)..(102): n is a, c, g, or t
actccctttctcccttccccttttccgcggtttgcgtgatcacctcttttttccattggcccctgtgttgggtaataccncaagggggggtngtgcttcctnggttttttccccaccgttcccaggtgtacgaggcagagggccgggacagctttcctctcagtcattgttcaccccacttgaaaattcagacaagaaaactttgcttaaaagatttcatgtgtgggaaccacagttcctggctgcctttctcctgtgtatgtgtaaattccttaataaatattgcagggaaggac

SEQ ID NO: 319332 - DNA, 2812 bp, Homo sapiens
tatataattctttttatattaaatgcccagaattggcaatccatagagataaaaagtagattcatagttgccaggggctgggaggaagagctgggagaaaatgggtagtgcctgctaatgggtttgtgatttcttttggactaatgaaaatgttctggaattagatagtagtaatcattgcacaactatgtgaatatattaaaaaccactgtattgtacacttaaatttaaactaaagaaaagctgacacatggaggaatgagcagagtcaataaacaggtggttatggtaaaaattatttcacttatgttctagcagaaatgtctgataatctaatattgtagtttaggccttgaatgttgtaatttgtactttattgccctgttcctgactttcacagggccgcgatgggcctcttggaacattggtgtgttcatctgcattcgatgtgctggaatccacaggaatctgggggtgcacatatccagggtaaagtcagttaacctcgaccagtggactcaagaacagattcagtgcatgcaagagatgggaaatggaaaggcaaaccgactttatgaagcctatcttcctgagacctttcggcgacctcagatagacccagctgttgaaggatttattcgagacaaatatgagaagaagaaatacatggaccgaagtctggacatcaatgcctttaggaaagaaaaagatgacaagtggaaaagagggagcgaaccagttccagaaaaaaaattggaacctgttgtttttgagaaggtgaaaatgccacagaaaaaagaagacccacagctacctcggaaaagctccccgaaatccacagcgcctgtcatggatttgttgggccttgatgctcctgtggcctgctccattgcaaatagtaagaccagcaataccctagagaaggatttagatctgttggcctctgttccatccccttcttcttccggttccagaaaggttgtaggttccatgccaactgcagggagtgccggctctgttcctgaaaatctgaacctgtttccggagccagggagcaaatcagaagaaataggcaagaaacagctctctaaagactccattctttcactgtatggatcccagacgcctcaaatgcctactcaagcaatgttcatggctcccgctcagatggcatatcccacagcctaccccagcttccccggggttacacctcctaacagcataatggggagcatgatgcctccaccagtaggcatggttgctcagccaggagcttctgggatggttgcccccatggccatgcctgcaggctatatgggtggcatgcaggcatcaatgatgggtgtgccgaatggaatgatgaccacccagcaggctggctacatggcaggcatggcagctatgccccagactgtgtatggggtccagccagctcagcagctgcaatggaaccttactcagatgacccagcagatggctgggatgaacttctatggagccaatggcatgatgaactatggacagtcaatgagtggcggaaatggacaggcagcaaatcagactctcagtcctcagatgtggaaataaaaacaaaacacctgtatggctgccattctcttcagccctcgctctcccctttccacagcctccacccctgacccccatcctcttttcctacctctctgtttggtttagaaattgctcaataagtcatttggggtttggcatcctgcccagccacttcccaaacatgaagacctctctgttgctttatgttgtacatgccccatagccatcccaacgtcctccccagtcctctcctggcaccagcaccttagaagttgttggcagaaggcacttaaactgtgggagaagtgtgcacacctttgagtcccttccctcaaggttaaagctcctgtcagactctcagaagggtctgtgggtgttgtatattaggcaaacaggggaaagcttagaggtccttctatatgtgttaataagctgtttctaagtgtttaaatttgaaaagcatcatgttctcatgatttatgggaatgaagcaagtactgaaatcaaattaaatactccctgggtcctgggtcagtttgaccctagccctggggtgaggcaagccccctcctatgaggatgagcaaaaatactactctcttcgccctgagttgctttctggatctggggcttcaggacttgctgcttcagtcagcctttattagcaccaaagactttatgaagatcccacacacagacacacatcccttcccgcctcccccctgccttcagtaggatctggctccgtggctggaggaccaacccctatagtgggaatgcagagcttaacgtgtactgcttgtgtgtgtgcgtgagtgtgtgtgtgtgtatgagtgtgtgttccgcctcccaccctctccccatctgctctgggtatttttgtttttgtttagttttaggtttacaacagagaggaattaatttatcagcagcctaaaactgttgtgtttttcttatggtttaaaaaacgccatgtcattgataactccctttctcccttcccttctcccggtctgctgatcactctttcatgcctgtgtatccagggtgctctgtttccccaccgttcccaggtgtacgaggcagagggccgggacagctttcctctcagtcattgttcaccccacttgaaaattcagacaagaaaactttgcttaaaagatttcatgtgtgggaaccacagttcctggctgcctttctcctgtgtatgtgtaaattccttaataaatattgcagggaaggac

SEQ ID NO: 319333 - DNA, 3466 bp, Homo sapiens
  misc_feature (3466)..(3466): n is a, c, g, or t
aggtggggaggaagagctgccggaagtaggcggtggaggtggtagcggagctgacggcagctgccagggaaaccgaggcgcgggacgcaaggccagcagacaggccggccagagggtcatctgcgtccggcacccaggaggctcgtggtccgcctttgcctgggctgagggtctctggccccgcagcctctcttggaggcgggcctgtccctaagcccgccaaggggcgccgcgccgaggggctgcggagtgggggacggacgcccccgacccgggaaggggcgtccggcggggccggaggagagggctctccccgctcaggaggtgcccctgggcgggggaccgggagtcctcaaccccggactgaggcaggggtctctgggggcgaggagggcgcgtcgccctctgcccccgccggcaccctggccatgacaggcaagtcggtgaaggacgtggatcggtaccaggctgtcctggccaacctgctgctggaggaggataacaagttttgtgcagattgccagtctaaagggccgcgatgggcctcttggaacattggtgtgttcatctgcattcgatgtgctggaatccacaggaatctgggggtgcacatatccagggtaaagtcagttaacctcgaccagtggactcaagaacagattcagtgcatgcaagagatgggaaatggaaaggcaaaccgactttatgaagcctatcttcctgagacctttcggcgacctcagatagacccagctgttgaaggatttattcgagacaaatatgagaagaagaaatacatggaccgaagtctggacatcaatgcctttaggaaagaaaaagatgacaagtggaaaagagggagcgaaccagttccagaaaaaaaattggaacctgttgtttttgagaaggtgaaaatgccacagaaaaaagaagacccacagctacctcggaaaagctccccgaaatccacagcgcctgtcatggatttgttgggccttgatgctcctgtggcctgctccattgcaaatagtaagaccagcaataccctagagaaggatttagatctgttggcctctgttccatccccttcttcttccggttccagaaaggttgtaggttccatgccaactgcagggagtgccggctctgttcctgaaaatctgaacctgtttccggagccagggagcaaatcagaagaaataggcaagaaacagctctctaaagactccattctttcactgtatggatcccagacgcctcaaatgcctactcaagcaatgttcatggctcccgctcagatggcatatcccacagcctaccccagcttccccggggttacacctcctaacagcataatggggagcatgatgcctccaccagtaggcatggttgctcagccaggagcttctgggatggttgcccccatggccatgcctgcaggctatatgggtggcatgcaggcatcaatgatgggtgtgccgaatggaatgatgaccacccagcaggctggctacatggcaggcatggcagctatgccccagactgtgtatggggtccagccagctcagcagctgcaatggaaccttactcagatgacccagcagatggctgggatgaacttctatggagccaatggcatgatgaactatggacagtcaatgagtggcggaaatggacaggcagcaaatcagactctcagtcctcagatgtggaaataaaaacaaaacacctgtatggctgccattctcttcagccctcgctctcccctttccacagcctccacccctgacccccatcctcttttcctacctctctgtttggtttagaaattgctcaataagtcatttggggtttggcatcctgcccagccacttcccaaacatgaagacctctctgttgctttatgttgtacatgccccatagccatcccaacgtcctccccagtcctctcctggcaccagcaccttagaagttgttggcagaaggcacttaaactgtgggagaagtgtgcacacctttgagtcccttccctcaaggttaaagctcctgtcagactctcagaagggtctgtgggtgttgtatattaggcaaacaggggaaagcttagaggtccttctatatgtgttaataagctgtttctaagtgtttaaatttgaaaagcatcatgttctcatgatttatgggaatgaagcaagtactgaaatcaaattaaatactccctgggtcctgggtcagtttgaccctagccctggggtgaggcaagccccctcctatgaggatgagcaaaaatactactctcttcgccctgagttgctttctggatctggggcttcaggacttgctgcttcagtcagcctttattagcaccaaagactttatgaagatcccacacacagacacacatcccttcccgcctcccccctgccttcagtaggatctggctccgtggctggaggaccaacccctatagtgggaatgcagagcttaacgtgtactgcttgtgtgtgtgcgtgagtgtgtgtgtgtgtatgagtgtgtgttccgcctcccaccctctccccatctgctctgggtatttttgtttttgtttagttttaggtttacaacagagaggaattaatttatcagcagcctaaaactgttgtgtttttcttatggtttaaaaaacgccatgtcattgataactccctttctcccttcccttctcccggtctgctgatcactctttcatgcctgtgtatccagggtgctctgtttccccaccgttcccaggtgtacgaggcagagggccgggacagctttcctctcagtcattgttcaccccacttgaaaattcagacaagaaaactttgcttaaaagatttcatgtgtgggaaccacagttcctggctgcctttctcctgtgtatgtgtaaattccttaataaatattgcagggaaggacaaaaaaaaaaaaaaaaaaaaaaaaaaaaaaaaaaaaaaaaaaaaaaaaaaaaaaaaaaaaaaaaaaaaaaaaaaaaaaaaaaaaaaaaaaaaaaaaaaaaagaaaagaaaaaaaaaaaagaagaataaaaaaaaaaaaaaaaaaaaaacaaaggtggggcggctatgaggtaccatatacttcatcgcacgggaggcacgaagagccataatcagagcccgctacgaaagtgtgtaagcagagtagcggcttgtaaggaaaggggttggacaataataacgatcgagggggcggacggaatgattgacataaagacgaatgagggtgggagagacaaaagattagccggtgcaggactctatgcgagaaacaactaattcgtgagtgggggagaaacctggacggaacactcctcctcaataattagtccccgaggcggtgtttaaaaaacggggtgtattggtgtgggtgacccagcgttctgtcctggggaacgtcgcggggtggaaaataaattacaggn

SEQ ID NO: 319334 - DNA, 2263 bp, Homo sapiens
gctgactctagaggaccccgaaggcgtgggctgggtctatctgagacctttcggcgacctcagatagacccagctgttgaaggatttattcgagacaaatatgagaagaagaaatacatggaccgaagtctggacatcaatgcctttaggaaagaaaaagatgacaagtggaaaagagggagcgaaccagttccagaaaaaaaattggaacctgttgtttttgagaaggtgaaaatgccacagaaaaaagaagacccacagctacctcggaaaagctccccgaaatccacagcgcctgtcatggatttgttgggccttgatgctcctgtggcctgctccattgcaaatagtaagaccagcaataccctagagaaggatttagatctgttggcctctgttccatccccttcttcttccggttccagaaaggttgtaggttccatgccaactgcagggagtgccggctctgttcctgaaaatctgaacctgtttccggagccagggagcaaatcagaagaaataggcaagaaacagctctctaaagactccattctttcactgtatggatcccagacgcctcaaatgcctactcaagcaatgttcatggctcccgctcagatggcatatcccacagcctaccccagcttccccggggttacacctcctaacagcataatggggagcatgatgcctccaccagtaggcatggttgctcagccaggagcttctgggatggttgcccccatggccatgcctgcaggctatatgggtggcatgcaggcatcaatgatgggtgtgccgaatggaatgatgaccacccagcaggctggctacatggcaggcatggcagctatgccccagactgtgtatggggtccagccagctcagcagctgcaatggaaccttactcagatgacccagcagatggctgggatgaacttctatggagccaatggcatgatgaactatggacagtcaatgagtggcggaaatggacaggcagcaaatcagactctcagtcctcagatgtggaaataaaaacaaaacacctgtatggctgccattctcttcagccctcgctctcccctttccacagcctccacccctgacccccatcctcttttcctacctctctgtttggtttagaaattgctcaataagtcatttggggtttggcatcctgcccagccacttcccaaacatgaagacctctctgttgctttatgttgtacatgccccatagccatcccaacgtcctccccagtcctctcctggcaccagcaccttagaagttgttggcagaaggcacttaaactgtgggagaagtgtgcacacctttgagtcccttccctcaaggttaaagctcctgtcagactctcagaagggtctgtgggtgttgtatattaggcaaacaggggaaagcttagaggtccttctatatgtgttaataagctgtttctaagtgtttaaatttgaaaagcatcatgttctcatgatttatgggaatgaagcaagtactgaaatcaaattaaatactccctgggtcctgggtcagtttgaccctagccctggggtgaggcaagccccctcctatgaggatgagcaaaaatactactctcttcgccctgagttgctttctggatctggggcttcaggacttgctgcttcagtcagcctttattagcaccaaagactttatgaagatcccacacacagacacacatcccttcccgcctcccccctgccttcagtaggatctggctccgtggctggaggaccaacccctatagtgggaatgcagagcttaacgtgtactgcttgtgtgtgtgcgtgagtgtgtgtgtgtgtatgagtgtgtgttccgcctcccaccctctccccatctgctctgggtatttttgtttttgtttagttttaggtttacaacagagaggaattaatttatcagcagcctaaaactgttgtgtttttcttatggtttaaaaaacgccatgtcattgataactccctttctcccttcccttctcccggtctgctgatcactctttcatgcctgtgtatccagggtgctctgtttccccaccgttcccaggtgtacgaggcagagggccgggacagctttcctctcagtcattgttcaccccacttgaaaattcagacaagaaaactttgcttaaaagatttcatgtgtgggaaccacagttcctggctgcctttctcctgtgtatgtgtaaattccttaataaatattgcagggaaggac

SEQ ID NO: 319335 - DNA, 2890 bp, Homo sapiens
aggtggggaggaagagctgccggaagtaggcggtggaggtggtagcggagctgacggcagctgccagggaaaccgaggcgcgggacgcaaggccagcagacaggccggccagagggtcatctgcgtccggcacccaggaggctcgtggtccgcctttgcctgggctgagggtctctggccccgcagcctctcttggaggcgggcctgtccctaagcccgccaaggggcgccgcgccgaggggctgcggagtgggggacggacgcccccgacccgggaaggggcgtccggcggggccggaggagagggctctccccgctcaggaggtgcccctgggcgggggaccgggagtcctcaaccccggactgaggcaggggtctctgggggcgaggagggcgcgtcgccctctgcccccgccggcaccctggccatgacaggcaagtcggtgaaggacgtggatcggtaccaggctgtcctggccaacctgctgctggaggaggataacaagttttgtgcagattgccagtctaaagggccgcgatgggcctcttggaacattggtgtgttcatctgcattcgatgtgctggaatccacaggaatctgggggtgcacatatccagggtaaagtcagttaacctcgaccagtggactcaagaacagattcagtgcatgcaagagatgggaaatggaaaggcaaaccgactttatgaagcctatcttcctgagacctttcggcgacctcagatagacccagctgttgaaggatttattcgagacaaatatgagaagaagaaatacatggaccgaagtctggacatcaatgcctttaggaaagaaaaagatgacaagtggaaaagagggagcgaaccagttccagaaaaaaaattggaacctgttgtttttgagaaggtgaaaatgccacagaaaaaagaagacccacagctacctcggaaaagctccccgaaatccacagcgcctgtcatggatttgttgggccttgatgctcctgtggcctgctccattgcaaatagtaagaccagcaataccctagagaaggatttagatctgttggcctctgttccatccccttcttcttccggttccagaaaggttgtaggttccatgccaactgcagggagtgccggctctgttcctgaaaatctgaacctgtttccggagccagggagcaaatcagaagaaataggcaagaaacagctctctaaagactccattctttcactgtatggatcccagacgcctcaaatgcctactcaagcaatgttcatggctcccgctcagatggcatatcccacagcctaccccagcttccccggggttacacctcctaacagcataatggggagcatgatgcctccaccagtaggcatggttgctcagccaggagcttctgggatggttgcccccatggccatgcctgcaggctatatgggtggcatgcaggcatcaatgatgggtgtgccgaatggaatgatgaccacccagcaggctggctacatggcaggcatggcagctatgccccagactgtgtatggggtccagccagctcagcagctgcaatggaaccttactcagatgacccagcagatggctgggatgaacttctatggagccaatggcatgatgaactatggacagtcaatgagtggcggaaatggacaggcagcaaatcagactctcagtcctcagatgtggaaataaaaacaaaacacctgtatggctgccattctcttcagccctcgctctcccctttccacagcctccacccctgacccccatcctcttttcctacctctctgtttggtttagaaattgctcaataagtcatttggggtttggcatcctgcccagccacttcccaaacatgaagacctctctgttgctttatgttgtacatgccccatagccatcccaacgtcctccccagtcctctcctggcaccagcaccttagaagttgttggcagaaggcacttaaactgtgggagaagtgtgcacacctttgagtcccttccctcaaggttaaagctcctgtcagactctcagaagggtctgtgggtgttgtatattaggcaaacaggggaaagcttagaggtccttctatatgtgttaataagctgtttctaagtgtttaaatttgaaaagcatcatgttctcatgatttatgggaatgaagcaagtactgaaatcaaattaaatactccctgggtcctgggtcagtttgaccctagccctggggtgaggcaagccccctcctatgaggatgagcattgctgcttcagtcagcctttattagcaccaaagactttatgaagatcccacacacagacacacatcccttcccgcctcccccctgccttcagtaggatctggctccgtggctggaggaccaacccctatagtgggaatgcagagcttaacgtgtactgcttgtgtgtgtgcgtgagtgtgtgtgtgtgtatgagtgtgtgttccgcctcccaccctctccccatctgctctgggtatttttgtttttgtttagttttaggtttacaacagagaggaattaatttatcagcagcctaaaactgttgtgtttttcttatggtttaaaaaacgccatgtcattgataactccctttctcccttcccttctcccggtctgctgatcactctttcatgcctgtgtatccagggtgctctgtttccccaccgttcccaggtgtacgaggcagagggccgggacagctttcctctcagtcattgttcaccccacttgaaaattcagacaagaaaactttgcttaaaagatttcatgtgtgggaaccacagttcctggctgcctttctcctgtgtatgtgtaaattccttaataaatattgcagggaaggac

SEQ ID NO: 319336 - DNA, 2433 bp, Homo sapiens
aggtggggaggaagagctgccggaagtaggcggtggaggtggtagcggagctgacggcagctgccagggaaaccgaggcgcgggacgcaaggccagcagacaggccggccagagggtcatctgcgtccggcacccaggaggctcgtggtccgcctttgcctgggctgagggtctctggccccgcagcctctcttggaggcgggcctgtccctaagcccgccaaggggcgccgcgccgaggggctgcggagtgggggacggacgcccccgacccgggaaggggcgtccggcggggccggaggagagggctctccccgctcaggaggtgcccctgggcgggggaccgggagtcctcaaccccggactgaggcaggggtctctgggggcgaggagggcgcgtcgccctctgcccccgccggcaccctggccatgacaggcaagtcggtgaaggacgtggatcggtaccaggctgtcctggccaacctgctgctggaggaggataacaagttttgtgcagattgccagtctaaagggccgcgatgggcctcttggaacattggtgtgttcatctgcattcgatgtgctggaatccacaggaatctgggggtgcacatatccagggtaaagtcagttaacctcgaccagtggactcaagaacagattcagtgcatgcaagagatgggaaatggaaaggcaaaccgactttatgaagcctatcttcctgagacctttcggcgacctcagatagacccagctgttgaaggatttattcgagacaaatatgagaagaagaaatacatggaccgaagtctggacatcaatgcctttaggaaagaaaaagatgacaagtggaaaagagggagcgaaccagttccagaaaaaaaattggaacctgttgtttttgagaaggtgaaaatgccacagaaaaaagaagacccacagctacctcggaaaagctccccgaaatccacagcgcctgtcatggatttgttgggccttgatgctcctgtggcctgctccattgcaaatagtaagaccagcaataccctagagaaggatttagatctgttggcctctgttccatccccttcttcttccggttccagaaaggttgtaggttccatgccaactgcagggagtgccggctctgttcctgaaaatctgaacctgtttccggagccagggagcaaatcagaagaaataggcaagaaacagctctctaaagactccattctttcactgtatggatcccagacgcctcaaatgcctactcaagcaatgttcatggctcccgctcagatggcatatcccacagcctaccccagcttccccggggttacacctcctaacagcataatggggagcatgatgcctccaccagtaggcatggttgctcagccaggagcttctgggatggttgcccccatggccatgcctgcaggctatatgggtggcatgcaggcatcaatgatgggtgtgccgaatggaatgatgaccacccagcaggctggctacatggcaggcatggcagctatgccccagactgtgtatggggtccagccagctcagcagctgcaatggaaccttactcagatgacccagcagatggctgggatgaacttctatggagccaatggcatgatgaactatggacagtcaatgagtggcggaaatggacaggcagcaaatcagactctcagtcctcagatgtggaaataaaaacaaaacacctgtatggctgccattctcttcagccctcgctctcccctttccacagcctccacccctgacccccatcctcttttcctacctctctgtttggtttagaaattgctcaataagtcatttggggtttggcatcctgcccagccacttcccaaacatgaagacctctctgttgctttatgttgtacatgccccatagccatcccaacgtcctccccagtcctctcctggcaccagcaccttagaagttgttggcagaaggcacttaaactgtgggagaagtgtgcacacctttgagtcccttccctcaaggttaaagctcctgtcagactctcagaagggtctgtgggtgttgtatattaggcaaacaggggaaagcttagaggtccttctatatgtgttaataagctgtttctaagtgtttaaatttgaaaagcatcatgttctcatgatttatgggaatgaagcaagtactgaaatcaaattaaatactccctgggtcctgggtcagtttgaccctagccctggggtgaggcaagccccctcctatgaggatgagcaaaaatactactctcttcgccctgagttgctttctggatctggggcttcaggacttgctgcttcagtcagcctttattagcaccaaagactttatgaagatcccacacacagacaacttctaagataagccacaacttctaaggttaag

SEQ ID NO: 319337 - DNA, 817 bp, Homo sapiens
ggatgtgtgtctgtgtgtgggatcttcataaagtctttggtgctaataaaggctgactgaagcagcaagtactgaaatcaaattaaatactccctgggtcctgggtcagtttgaccctagccctggggtgaggcaagccccctcctatgaggatgagcaaaaatactactctcttcgccctgagttgctttctggatctggggcttcaggacttgctgcttcagtcagcctttattagcaccaaagactttatgaagatcccacacacagacacacatcccttcccgcctcccccctgccttcagtaggatctggctccgtggctggaggaccaacccctatagtgggaatgcagagcttaacgtgtactgcttgtgtgtgtgcgtgagtgtgtgtgtgtgtatgagtgtgtgttccgcctcccaccctctccccatctgctctgggtatttttgtttttgtttagttttaggtttacaacagagaggaattaatttatcagcagcctaaaactgttgtgtttttcttatggtttaaaaaacgccatgtcattgataactccctttctcccttcccttctcccggtctgctgatcactctttcatgcctgtgtatccagggtgctctgtttccccaccgttcccaggtgtacgaggcagagggccgggacagctttcctctcagtcattgttcaccccacttgaaaattcagacaagaaaactttgcttaaaagatttcatgtgtgggaaccacagttcctggctgcctttctcctgtgtatgtgtaaattccttaataaatattgcagggaaggac

SEQ ID NO: 319338 - DNA, 1232 bp, Homo sapiens
aggtggggaggaagagctgccggaagtaggcggtggaggtggtagcggagctgacggcagctgccagggaaaccgaggcgcgggacgcaaggccagcagacaggccggccagagggtcatctgcgtccggcacccaggaggctcgtggtccgcctttgcctgggctgagggtctctggccccgcagcctctcttggaggcgggcctgtccctaagcccgccaaggggcgccgcgccgaggggctgcggagtgggggacggacgcccccgacccgggaaggggcgtccggcggggccggaggagagggctctccccgctcaggaggtgcccctgggcgggggaccgggagtcctcaaccccggactgaggcaggggtctctgggggcgaggagggcgcgtcgccctctgcccccgccggcaccctggccatgacaggcaagtcggtgaaggacgtggatcggtaccaggctgtcctggccaacctgctgctggaggaggataacaagttttgtgcagattgccagtctaaagggccgcgatgggcctcttggaacattggtgtgttcatctgcattcgatgtgctggaatccacaggaatctgggggtgcacatatccagggtaaagtcagttaacctcgaccagtggactcaagaacagattcagtgcatgcaagagatgggaaatggaaaggcaaaccgactttatgaagcctatcttcctgagacctttcggcgacctcagatagacccgtatcttttctggagcaacttagaaggctgagtggtattttgatgcttggggagagtcagacaagactccagtcctgtaatgtgactgggtcatctctatgtggattagtcagtgtccttgcttgtcctctgtcctgcaatcaaggtgcacaaaaagcacatgtatttgtgaatgtcggaattgtcatacggtgtcacttgaagaagactcactctggaattaagactgcagtgatttcactgtgaattcttctataaagttacatctccactagtttattttggatctctgaaactattgtttgattaaaaagagtagttcattgtgctctgttaaccctggcagtcagcaaaattgccattcattattatcatctttttatgtcttgggtgaaagaattaactgttgttaccagtttgtcaataaccaataactttcttccaccatctgttcaacagagcatagcacctaggacacaaa

SEQ ID NO: 319339 - DNA, 2943 bp, Homo sapiens
aggtggggaggaagagctgccggaagtaggcggtggaggtggtagcggagctgacggcagctgccagggaaaccgaggcgcgggacgcaaggccagcagacaggccggccagagggtcatctgcgtccggcacccaggaggctcgtggtccgcctttgcctgggctgagggtctctggccccgcagcctctcttggaggcgggcctgtccctaagcccgccaaggggcgccgcgccgaggggctgcggagtgggggacggacgcccccgacccgggaaggggcgtccggcggggccggaggagagggctctccccgctcaggaggtgcccctgggcgggggaccgggagtcctcaaccccggactgaggcaggggtctctgggggcgaggagggcgcgtcgccctctgcccccgccggcaccctggccatgacaggcaagtcggtgaaggacgtggatcggtaccaggctgtcctggccaacctgctgctggaggaggataacaagttttgtgcagattgccagtctaaagggccgcgatgggcctcttggaacattggtgtgttcatctgcattcgatgtgctggaatccacaggaatctgggggtgcacatatccagggtaaagtcagttaacctcgaccagtggactcaagaacagattcagtgcatgcaagagatgggaaatggaaaggcaaaccgactttatgaagcctatcttcctgagacctttcggcgacctcagatagacccagctgttgaaggatttattcgagacaaatatgagaagaagaaatacatggaccgaagtctggacatcaatgcctttaggaaagaaaaagatgacaagtggaaaagagggagcgaaccagttccagaaaaaaaattggaacctgttgtttttgagaaggtgaaaatgccacagaaaaaagaagacccacagctacctcggaaaagctccccgaaatccacagcgcctgtcatggatttgttgggccttgatgctcctgtggcctgctccattgcaaatagtaagaccagcaataccctagagaaggatttagatctgttggcctctgttccatccccttcttcttccggttccagaaaggttgtaggttccatgccaactgcagggagtgccggctctgttcctgaaaatctgaacctgtttccggagccagggagcaaatcagaagaaataggcaagaaacagctctctaaagactccattctttcactgtatggatcccagacgcctcaaatgcctactcaagcaatgttcatggctcccgctcagatggcatatcccacagcctaccccagcttccccggggttacacctcctaacagcataatggggagcatgatgcctccaccagtaggcatggttgctcagccaggagcttctgggatggttgcccccatggccatgcctgcaggctatatgggtggcatgcaggcatcaatgatgggtgtgccgaatggaatgatgaccacccagcaggctggctacatggcaggcatggcagctatgccccagactgtgtatggggtccagccagctcagcagctgcaatggaaccttactcagatgacccagcagatggctgggatgaacttctatggagccaatggcatgatgaactatggacagtcaatgagtggcggaaatggacaggcagcaaatcagactctcagtcctcagatgtggaaataaaaacaaaacacctgtatggctgccattctcttcagccctcgctctcccctttccacagcctccacccctgacccccatcctcttttcctacctctctgtttggtttagaaattgctcaataagtcatttggggtttggcatcctgcccagccacttcccaaacatgaagacctctctgttgctttatgttgtacatgccccatagccatcccaacgtcctccccagtcctctcctggcaccagcaccttagaagttgttggcagaaggcacttaaactgtgggagaagtgtgcacacctttgagtcccttccctcaaggttaaagctcctgtcagactctcagaagggtctgtgggtgttgtatattaggcaaacaggggaaagcttagaggtccttctatatgtgttaataagctgtttctaagtgtttaaatttgaaaagcatcatgttctcatgatttatgggaatgaagcaagtactgaaatcaaattaaatactccctgggtcctgggtcagtttgaccctagccctggggtgaggcaagccccctcctatgaggatgagcaaaaatactactctcttcgccctgagttgctttctggatctggggcttcaggacttgctgcttcagtcagcctttattagcaccaaagactttatgaagatcccacacacagacacacatcccttcccgcctcccccctgccttcagtaggatctggctccgtggctggaggaccaacccctatagtgggaatgcagagcttaacgtgtactgcttgtgtgtgtgcgtgagtgtgtgtgtgtgtatgagtgtgtgttccgcctcccaccctctccccatctgctctgggtatttttgtttttgtttagttttaggtttacaacagagaggaattaatttatcagcagcctaaaactgttgtgtttttcttatggtttaaaaaacgccatgtcattgataactccctttctcccttcccttctcccggtctgctgatcactctttcatgcctgtgtatccagggtgctctgtttccccaccgttcccaggtgtacgaggcagagggccgggacagctttcctctcagtcattgttcaccccacttgaaaattcagacaagaaaactttgcttaaaagatttcatgtgtgggaaccacagttcctggctgcctttctcctgtgtatgtgtaaattccttaataaatattgcagggaaggac

SEQ ID NO: 319340 - DNA, 2444 bp, Homo sapiens
ggaaaggaaaactgcttaaatgatttttaaagggccgcgatgggcctcttggaacattggtgtgttcatctgcattcgatgtgctggaatccacaggaatctgggggtgcacatatccagggtaaagtcagttaacctcgaccagtggactcaagaacagattcagtgcatgcaagagatgggaaatggaaaggcaaaccgactttatgaagcctatcttcctgagacctttcggcgacctcagatagacccagctgttgaaggatttattcgagacaaatatgagaagaagaaatacatggaccgaagtctggacatcaatgcctttaggaaagaaaaagatgacaagtggaaaagagggagcgaaccagttccagaaaaaaaattggaacctgttgtttttgagaaggtgaaaatgccacagaaaaaagaagacccacagctacctcggaaaagctccccgaaatccacagcgcctgtcatggatttgttgggccttgatgctcctgtggcctgctccattgcaaatagtaagaccagcaataccctagagaaggatttagatctgttggcctctgttccatccccttcttcttccggttccagaaaggttgtaggttccatgccaactgcagggagtgccggctctgttcctgaaaatctgaacctgtttccggagccagggagcaaatcagaagaaataggcaagaaacagctctctaaagactccattctttcactgtatggatcccagacgcctcaaatgcctactcaagcaatgttcatggctcccgctcagatggcatatcccacagcctaccccagcttccccggggttacacctcctaacagcataatggggagcatgatgcctccaccagtaggcatggttgctcagccaggagcttctgggatggttgcccccatggccatgcctgcaggctatatgggtggcatgcaggcatcaatgatgggtgtgccgaatggaatgatgaccacccagcaggctggctacatggcaggcatggcagctatgccccagactgtgtatggggtccagccagctcagcagctgcaatggaaccttactcagatgacccagcagatggctgggatgaacttctatggagccaatggcatgatgaactatggacagtcaatgagtggcggaaatggacaggcagcaaatcagactctcagtcctcagatgtggaaataaaaacaaaacacctgtatggctgccattctcttcagccctcgctctcccctttccacagcctccacccctgacccccatcctcttttcctacctctctgtttggtttagaaattgctcaataagtcatttggggtttggcatcctgcccagccacttcccaaacatgaagacctctctgttgctttatgttgtacatgccccatagccatcccaacgtcctccccagtcctctcctggcaccagcaccttagaagttgttggcagaaggcacttaaactgtgggagaagtgtgcacacctttgagtcccttccctcaaggttaaagctcctgtcagactctcagaagggtctgtgggtgttgtatattaggcaaacaggggaaagcttagaggtccttctatatgtgttaataagctgtttctaagtgtttaaatttgaaaagcatcatgttctcatgatttatgggaatgaagcaagtactgaaatcaaattaaatactccctgggtcctgggtcagtttgaccctagccctggggtgaggcaagccccctcctatgaggatgagcaaaaatactactctcttcgccctgagttgctttctggatctggggcttcaggacttgctgcttcagtcagcctttattagcaccaaagactttatgaagatcccacacacagacacacatcccttcccgcctcccccctgccttcagtaggatctggctccgtggctggaggaccaacccctatagtgggaatgcagagcttaacgtgtactgcttgtgtgtgtgcgtgagtgtgtgtgtgtgtatgagtgtgtgttccgcctcccaccctctccccatctgctctgggtatttttgtttttgtttagttttaggtttacaacagagaggaattaatttatcagcagcctaaaactgttgtgtttttcttatggtttaaaaaacgccatgtcattgataactccctttctcccttcccttctcccggtctgctgatcactctttcatgcctgtgtatccagggtgctctgtttccccaccgttcccaggtgtacgaggcagagggccgggacagctttcctctcagtcattgttcaccccacttgaaaattcagacaagaaaactttgcttaaaagatttcatgtgtgggaaccacagttcctggctgcctttctcctgtgtatgtgtaaattccttaataaatattgcagggaaggac

SEQ ID NO: 319341 - DNA, 2558 bp, Homo sapiens
gagaggactttacttactattgcttaaggaagagtcttttatcatcgttctgaatcacattgtctgtggacacaatcactagtgatactggcagagtgaattaggtaatctttaaaccaacctcccttttggtgttaaagtaaaaggttttctaaccactgggagatttgttggctcttggctcttgtaccatcagatacctacctttattcttggcttttcctgggaccaaaaactgctgcttctgttggatcccctgttctgtggttgtcttggtttcagaaagatctgtctctttaggacaccagacaatcacaggcgatatctttgtttttcattttaggtttggtttatgcacttctgcctcctgacttgattctttcacctaatacttcctgagttttgtttctttggtaactctctttgaataacagcagccctacccacaagaacaccgtggctttacagtggagatgggaaaagagttcaaaaccacctgcttatttctttctataacatattttcaccttagccacagaaaaaagaagacccacagctacctcggaaaagctccccgaaatccacagcgcctgtcatggatttgttgggccttgatgctcctgtggcctgctccattgcaaatagtaagaccagcaataccctagagaaggatttagatctgttggcctctgttccatccccttcttcttccggttccagaaaggttgtaggttccatgccaactgcagggagtgccggctctgttcctgaaaatctgaacctgtttccggagccagggagcaaatcagaagaaataggcaagaaacagctctctaaagactccattctttcactgtatggatcccagacgcctcaaatgcctactcaagcaatgttcatggctcccgctcagatggcatatcccacagcctaccccagcttccccggggttacacctcctaacagcataatggggagcatgatgcctccaccagtaggcatggttgctcagccaggagcttctgggatggttgcccccatggccatgcctgcaggctatatgggtggcatgcaggcatcaatgatgggtgtgccgaatggaatgatgaccacccagcaggctggctacatggcaggcatggcagctatgccccagactgtgtatggggtccagccagctcagcagctgcaatggaaccttactcagatgacccagcagatggctgggatgaacttctatggagccaatggcatgatgaactatggacagtcaatgagtggcggaaatggacaggcagcaaatcagactctcagtcctcagatgtggaaataaaaacaaaacacctgtatggctgccattctcttcagccctcgctctcccctttccacagcctccacccctgacccccatcctcttttcctacctctctgtttggtttagaaattgctcaataagtcatttggggtttggcatcctgcccagccacttcccaaacatgaagacctctctgttgctttatgttgtacatgccccatagccatcccaacgtcctccccagtcctctcctggcaccagcaccttagaagttgttggcagaaggcacttaaactgtgggagaagtgtgcacacctttgagtcccttccctcaaggttaaagctcctgtcagactctcagaagggtctgtgggtgttgtatattaggcaaacaggggaaagcttagaggtccttctatatgtgttaataagctgtttctaagtgtttaaatttgaaaagcatcatgttctcatgatttatgggaatgaagcaagtactgaaatcaaattaaatactccctgggtcctgggtcagtttgaccctagccctggggtgaggcaagccccctcctatgaggatgagcaaaaatactactctcttcgccctgagttgctttctggatctggggcttcaggacttgctgcttcagtcagcctttattagcaccaaagactttatgaagatcccacacacagacacacatcccttcccgcctcccccctgccttcagtaggatctggctccgtggctggaggaccaacccctatagtgggaatgcagagcttaacgtgtactgcttgtgtgtgtgcgtgagtgtgtgtgtgtgtatgagtgtgtgttccgcctcccaccctctccccatctgctctgggtatttttgtttttgtttagttttaggtttacaacagagaggaattaatttatcagcagcctaaaactgttgtgtttttcttatggtttaaaaaacgccatgtcattgataactccctttctcccttcccttctcccggtctgctgatcactctttcatgcctgtgtatccagggtgctctgtttccccaccgttcccaggtgtacgaggcagagggccgggacagctttcctctcagtcattgttcaccccacttgaaaattcagacaagaaaactttgcttaaaagatttcatgtgtgggaaccacagttcctggctgcctttctcctgtgtatgtgtaaattccttaataaatattgcagggaaggac

SEQ ID NO: 319342 - DNA, 2458 bp, Homo sapiens
gtttctgagatggcctgtggtcatttttctccaaacctttgaaatcctgaactagtgattctgccctttcagaaagaaagcctgttgtctgcctttcacagcactgatggttgcactttgtttccatccgcttctgctgattgaggttattggctacttaggcttctaatttctgtacctttccttgctctctgaaaatgaaccctcctccataccttgcccttcaaatagccagaagggagccagccagccccccactgtggtgctgaaatacccttcaggcctgggcgtctgctgccctgtgcctgatagctgggctacaggcttccccagagcactctgggaatgtggggtgaagcctcttttgagaagccccgtccatgctagatggttccagaagtctagatttctaggtccatgagcttatgggccacctttgctttttgtctagaatagaaggaaggcatgggcttaataagcagtgctgcatcttaacttcgatctctctttctagatgctcctgtggcctgctccattgcaaatagtaagaccagcaataccctagagaaggatttagatctgttggcctctgttccatccccttcttcttccggttccagaaaggttgtaggttccatgccaactgcagggagtgccggctctgttcctgaaaatctgaacctgtttccggagccagggagcaaatcagaagaaataggcaagaaacagctctctaaagactccattctttcactgtatggatcccagacgcctcaaatgcctactcaagcaatgttcatggctcccgctcagatggcatatcccacagcctaccccagcttccccggggttacacctcctaacagcataatggggagcatgatgcctccaccagtaggcatggttgctcagccaggagcttctgggatggttgcccccatggccatgcctgcaggctatatgggtggcatgcaggcatcaatgatgggtgtgccgaatggaatgatgaccacccagcaggctggctacatggcaggcatggcagctatgccccagactgtgtatggggtccagccagctcagcagctgcaatggaaccttactcagatgacccagcagatggctgggatgaacttctatggagccaatggcatgatgaactatggacagtcaatgagtggcggaaatggacaggcagcaaatcagactctcagtcctcagatgtggaaataaaaacaaaacacctgtatggctgccattctcttcagccctcgctctcccctttccacagcctccacccctgacccccatcctcttttcctacctctctgtttggtttagaaattgctcaataagtcatttggggtttggcatcctgcccagccacttcccaaacatgaagacctctctgttgctttatgttgtacatgccccatagccatcccaacgtcctccccagtcctctcctggcaccagcaccttagaagttgttggcagaaggcacttaaactgtgggagaagtgtgcacacctttgagtcccttccctcaaggttaaagctcctgtcagactctcagaagggtctgtgggtgttgtatattaggcaaacaggggaaagcttagaggtccttctatatgtgttaataagctgtttctaagtgtttaaatttgaaaagcatcatgttctcatgatttatgggaatgaagcaagtactgaaatcaaattaaatactccctgggtcctgggtcagtttgaccctagccctggggtgaggcaagccccctcctatgaggatgagcaaaaatactactctcttcgccctgagttgctttctggatctggggcttcaggacttgctgcttcagtcagcctttattagcaccaaagactttatgaagatcccacacacagacacacatcccttcccgcctcccccctgccttcagtaggatctggctccgtggctggaggaccaacccctatagtgggaatgcagagcttaacgtgtactgcttgtgtgtgtgcgtgagtgtgtgtgtgtgtatgagtgtgtgttccgcctcccaccctctccccatctgctctgggtatttttgtttttgtttagttttaggtttacaacagagaggaattaatttatcagcagcctaaaactgttgtgtttttcttatggtttaaaaaacgccatgtcattgataactccctttctcccttcccttctcccggtctgctgatcactctttcatgcctgtgtatccagggtgctctgtttccccaccgttcccaggtgtacgaggcagagggccgggacagctttcctctcagtcattgttcaccccacttgaaaattcagacaagaaaactttgcttaaaagatttcatgtgtgggaaccacagttcctggctgcctttctcctgtgtatgtgtaaattccttaataaatattgcagggaaggac

SEQ ID NO: 319343 - DNA, 3166 bp, Homo sapiens
  misc_feature (2950)..(2950): n is a, c, g, or t
  misc_feature (2996)..(2996): n is a, c, g, or t
  misc_feature (3028)..(3029): n is a, c, g, or t
  misc_feature (3064)..(3064): n is a, c, g, or t
aggtggggaggaagagctgccggaagtaggcggtggaggtggtagcggagctgacggcagctgccagggaaaccgaggcgcgggacgcaaggccagcagacaggccggccagagggtcatctgcgtccggcacccaggaggctcgtggtccgcctttgcctgggctgagggtctctggccccgcagcctctcttggaggcgggcctgtccctaagcccgccaaggggcgccgcgccgaggggctgcggagtgggggacggacgcccccgacccgggaaggggcgtccggcggggccggaggagagggctctccccgctcaggaggtgcccctgggcgggggaccgggagtcctcaaccccggactgaggcaggggtctctgggggcgaggagggcgcgtcgccctctgcccccgccggcaccctggccatgacaggcaagtcggtgaaggacgtggatcggtaccaggctgtcctggccaacctgctgctggaggaggataacaagttttgtgcagattgccagtctaaagggccgcgatgggcctcttggaacattggtgtgttcatctgcattcgatgtgctggaatccacaggaatctgggggtgcacatatccagggtaaagtcagttaacctcgaccagtggactcaagaacagattcagtgcatgcaagagatgggaaatggaaaggcaaaccgactttatgaagcctatcttcctgagacctttcggcgacctcagatagacccagctgttgaaggatttattcgagacaaatatgagaagaagaaatacatggaccgaagtctggacatcaatgcctttaggaaagaaaaagatgacaagtggaaaagagggagcgaaccagttccagaaaaaaaattggaacctgttgtttttgagaaggtgaaaatgccacagaaaaaagaagacccacagctacctcggaaaagctccccgaaatccacagcgcctgtcatggatttgttgggccttgatgctcctgtggcctgctccattgcaaatagtaagaccagcaataccctagagaaggatttagatctgttggcctctgttccatccccttcttcttccggttccagaaaggttgtaggttccatgccaactgcagggagtgccggctctgttcctgaaaatctgaacctgtttccggagccagggagcaaatcagaagaaataggcaagaaacagctctctaaagactccattctttcactgtatggatcccagacgcctcaaatgcctactcaagcaatgttcatggctcccgctcagatggcatatcccacagcctaccccagcttccccggggttacacctcctaacagcataatggggagcatgatgcctccaccagtaggcatggttgctcagccaggagcttctgggatggttgcccccatggccatgcctgcaggctatatgggtggcatgcaggcatcaatgatgggtgtgccgaatggaatgatgaccacccagcaggctggctacatggcaggcatggcagctatgccccagactgtgtatggggtccagccagctcagcagctgcaatggaaccttactcagatgacccagcagatggctgggatgaacttctatggagccaatggcatgatgaactatggacagtcaatgagtggcggaaatggacaggcagcaaatcagactctcagtcctcagatgtggaaataaaaacaaaacacctgtatggctgccattctcttcagccctcgctctcccctttccacagcctccacccctgacccccatcctcttttcctacctctctgtttggtttagaaattgctcaataagtcatttggggtttggcatcctgcccagccacttcccaaacatgaagacctctctgttgctttatgttgtacatgccccatagccatcccaacgtcctccccagtcctctcctggcaccagcaccttagaagttgttggcagaaggcacttaaactgtgggagaagtgtgcacacctttgagtcccttccctcaaggttaaagctcctgtcagactctcagaagggtctgtgggtgttgtatattaggcaaacaggggaaagcttagaggtccttctatatgtgttaataagctgtttctaagtgtttaaatttgaaaagcatcatgttctcatgatttatgggaatgaagcaagtactgaaatcaaattaaatactccctgggtcctgggtcagtttgaccctagccctggggtgaggcaagccccctcctatgaggatgagcaaaaatactactctcttcgccctgagttgctttctggatctggggcttcaggacttgctgcttcagtcagcctttattagcaccaaagactttatgaagatcccacacacagacacacatcccttcccgcctcccccctgccttcagtaggatctggctccgtggctggaggaccaacccctatagtgggaatgcagagcttaacgtgtactgcttgtgtgtgtgcgtgagtgtgtgtgtgtgtatgagtgtgtgttccgcctcccaccctctccccatctgctctgggtatttttgtttttgtttagttttaggtttacaacagagaggaattaatttatcagcagcctaaaactgttgtgtttttcttatggtttaaaaaacgccatgtcattgataactccctttctcccttcccttctcccggtctgctgatcactctttcatgcctgtgtatccagggtgctctgtttccccaccgttcccaggtgtacgaggcagagggccgggacagctttcctctcagtcattgttcaccccacttgaaaattcagacaagaaaactttgcttaaaagatttcatgtgtgggaaccacagttcctggctgcctttctcctgtgtatgtgtaaattccttaataaatattgcagggaaggaccaaccanccataaaaaaacaaaagccccccccccccccactctacttttcttnccccacccctcaattcccgacctttccctgcnngcctcccacctgtccctctccccctccccccttcntccttccccctctcttcttcctttctgttcccttttttcttttcccctcctcttcctttttctctctttttcctttcctttttcccccccccccaccccccc

SEQ ID NO: 319344 - DNA, 1310 bp, Homo sapiens
aggtggggaggaagagctgccggaagtaggcggtggaggtggtagcggagctgacggcagctgccagggaaaccgaggcgcgggacgcaaggccagcagacaggccggccagagggtcatctgcgtccggcacccaggaggctcgtggtccgcctttgcctgggctgagggtctctggccccgcagcctctcttggaggcgggcctgtccctaagcccgccaaggggcgccgcgccgaggggctgcggagtgggggacggacgcccccgacccgggaaggggcgtccggcggggccggaggagagggctctccccgctcaggaggtgcccctgggcgggggaccgggagtcctcaaccccggactgaggcaggggtctctgggggcgaggagggcgcgtcgccctctgcccccgccggcaccctggccatgacaggcaagtcggtgaaggacgtggatcggtaccaggctgtcctggccaacctgctgctggaggaggataacaagttttgtgcagattgccagtctaaagggccgcgatgggcctcttggaacattggtgtgttcatctgcattcgatgtgctggaatccacaggaatctgggggtgcacatatccagggtaaagtcagttaacctcgaccagtggactcaagaacagattcagtgcatgcaagagatgggaaatggaaaggcaaaccgactttatgaagcctatcttcctgagacctttcggcgacctcagatagacccagctgttgaaggatttattcgagacaaatatgagaagaagaaatacatggaccgaagtctggacatcaatgcctttaggaaagaaaaagatgacaagtggaaaagagggagcgaaccagttccagaaaaaaaattggaacctgttgtttttgagaaggtgaaaatgccacagaaaaaagaagacccacagctacctcggaaaagctccccgaaatccacagcgcctgtcatggatttgttgggccttggtaagagttggacttttcagcttccatgttcttacaaattttgataaattctcagtgaccctggaagataggtagagatggggttctccagttttgtcttcattgccaagactgttctctcacattcttcctgatctgttttacatctgagcagttgctctaaggaagtgtttactgtgacacttttcagagcgacagtgtggtgtagtggttaagagcatggcctttggagccagtgtcgctctgtgttacttactgtctgtgtgaccatgggtagtttacttaacctctgaatgttgctttcataatcc

SEQ ID NO: 319345 - DNA, 239 bp, Homo sapiens
agtttccctttgtctcattctccccatcctggcagagaaagggactctcaccctgccttttgcactaattggcggaatgcccacagcctggtctgaaagtctcctctctccctttcagatgacccagcagatggctgggatgaacttctatggagccaatggcatgatgaactatggacagtcaatgagtggcggaaatggacaggcagcaaatcagactctcagtcctcagatgtgga

SEQ ID NO: 319346 - DNA, 636 bp, Homo sapiens
gagttgcattattttagtcacttttacttttgtatatgttggaaatcttccaaaacaaaatgtatagccataaaaaaaagggagcaaagtaagaaaaaaaggagagcctaaaaaaaaaggtacaggcaaaaaggtgtgaaaagaaactcatcaagagcaagagtattaaatgagaaacatatgccactgacagagttctcagaagagataaaggctgaattaaaaagagatggaggggaaagttttataagtcaaaaacttaggttaaggtttgtgaatattaaagagcgcttcagattgccaatgaaaggtcatagtagtttctataaagtcaaaagatcaaaaacttgacttaaaagagtaagatctctaaaaccaaaggtaacagcagattcttatgaaatgcaccagaaagctggaaagaaagaagaaataaaatgtgaacttatggaacaagagtgctaagggcctgttctacccaggtatgttatgaaatcaaattcatttagtttgggtgtttgttcctttatgttgggaagataaaaaagaacatataattcgtttcttgagtgaaccagtatttatgagaaataagctgggtgtgtaagaatttaagggatgaaaatattccaagtt

SEQ ID NO: 319347 - DNA, 4321 bp, Homo sapiens
gcgtggtgggaaggggcgggattctgccagccgcggctgccgctggagccggtgtccgggctggtgatggggttaattccctttcgtaagactcttacttgcacccacccagccccgccgtcgccccgccgcgccgcgctccaaccgcctcctcctcctcagtaacgcgggccacggaaaggtatgatatatttgatccaagacagtccattccagtccgggaatctacagtggtgacaaggacatgggactcctcctgccagattacagatggttcactacagttgacatcctggctgacaactgtgaaaaagaaccttggattattttattttatttttgtgggacaccacaatcccaaatccaaaggacgcatcaggcttcaagctccctgtagaattcgaaaataaccttttctaatgaggatgtctgatactgttactgtaaaagatgaaactgcaacaatgaaggatttggaggcagaagtgaaagatacaaccagagttgaaaatcttatcaaatcagaaaactatgggaagattttggtagagaagaatgaacattgtattgagaacaatatagatttgcaggagaaaattcagatccagttaacacaatcatttgagaaagaagagaagccctcaaaagatgaagcagaaaaagaaaaggccagtgataagttgcccagaaaaatgttatcaagagattccagtcaagaatacactgattcaactggcatagatctacatgaatttttagtaaatacattaaaaaacaatcccagggacagaatgatgctgctgaaattggaacaagaaattttagatttcattggtaataatgagtctccacgtaaaaaattccccccaatgacatcttaccataggatgctattacacagagtagccgcttactttggattagaccacaatgttgatcagagtgggaagtctgtcatagtaaacaaaactagcaatacaagaatacctgatcagaaatttaatgaacatattaaggatgataaaggtgaagactttcagaaacgttatatcctcaagagagataactctagctttgacaaagatgataaccagatgagaatacgtttgaaagatgacagaagaagcaaatctatagaagaaagagaagaagagtaccagagagccagagaccgaatattttcccaagattccctgtgttcccaagagaattacattattgacaaaagactccaagacgaggatgccagtagtacccagcagaggcgccagatatttagagttaataaagatgcttcagggagatctacaaatagccatcaaagcagcactgagaatgagttgaagtactcggaaccacgaccctggagcagcacagattcagacagctctcttcgaaacctgaaacctgctgtaaccaaagccagcagcttcagtggaatctcagtcctgacaagaggtgatagttctggaagcagcaaaagcataggcaggctttcaaaaacaggtcagcccttcataaacccagatgggagtccagttgtgtataatcctcctatgactcaacaaccagttagatcccaagtgcctggacctccacagccacctctgccagccccacctcaacaaccagcagctaatcacattttctcacagcaggataacctagggtctcagtttagccacatgagtcttgctcgccagccatctgctgatggttctgaccctcatgccgccatgttccagtccactgtggttcttcagtctccacagcagtctggttatatcatgacagcagcccctccaccacatcctcctccaccgccaccaccaccacctcctcctcctcccctaccacctgggcagccagtccctactgctggatatcctgcctctggtcatcctgtcagccagcctgtgctccagcagcagggatatattcagcagccatcaccacagatgccagcctgttattgcgctccaggccactatcactccagccaacctcagtatcgcccagtcccttctgttcattacaattcacatctaaaccaaccactgccacaacctgcgcagcagacaggttatcaagttatacccaaccagcagcaaaactaccaaggaatagttggagttcagcaaccccagagtcagagcctagtcagtggccaacccaacagcattggaaatcagattcaaggagtggtcatcccctatacttcagtgccaacatatcaggtttcactgcctcaaggttctcaaggaattccccatcagacttatcaacagcctgttatgttccctaatcagtctaatcaaggatctatgcccacaacaggaatgcctgtttactatagtgtcattccacctggtcaacaaaacaatttaagctcttcagtaggttacctgcaacatccaggatcagaacaagtacaatttcctcgaaccacttcaccatgcagttcccagcagcttcaaggccaccaatgtacagctggaccaccaccgccacctggtggggggatggtgatgatgcagctcagtgtaccaaacaatccacaatcttgtgcccactcacccccgcagtggaaacaaaacaaatattactgtgatcaccagagaggacagaagtgtgtagaatttagcagtgtagacaatattgtccagcacagccctcaactcagtagccccattatttcaccagctcagtcgccagcaccagctcagctgtccaccctgaaaactgtacgtccctctggaccaccactttccatcatgccccaattttctagaccttttgtccccgggcaaggagattccaggtatccattacttggccagccactgcagtacaatcctcctgctgttctgcacggacacattccaaaccaacagggtcagcctggcagcaggcatggaaaccgaggaaggagacaagctaaaaaagctgcatccacagaccttggagcaggagaaacagttgttgggaaggtcttggaaattactgaactaccagatggaataactcgcatggaagctgaaaagctttttggggaactctttaaaattggcgccaagatccggtggctccgggacccccagtcccaaccacgtcgtcaccccctctgctgtggcagtggggacaacactgccaaccctgaacgctctaaacccagtgacttggcctccacctacaccgtcttagccacattcccctccatttcagctgcacagaatgcactgaagaaacaaattaactcagttaacaagtttaagctgagaacaagcaagaagcactatgactttcacattttggaaagggcaagttctcagtaacagccacctttggacccttcgcctttatggttcccctgccctctcccatctttgattggcttggtatttggagcttctgttaacattatagagactcctaggatgtgtgttcatggcattatagcttttgaagaaaggccagtgatccagcaaagggggaaaaatatgcatttcaccccacatgactaggaatccacatcagaatgatacagagttagcaggtttttctaaggaaatgccattcaaatgcctcctaacttttatagttattttgttttatatttctaaattcttgtatcagatccaaagctctattgtacagcaaattattcttcaaaatgattataaccagttgcaccctgtatttctttttgcagccagcacaatgtgacccaacttaaaatttgggggaaaaagaatgcaggagtgaaataaccaagtcaaaaccatgtactatctccttgggggttagggatgctaagaagagcccacaaatagaggattactcttcccctgaatctctaaactcagaaacaattaccaaaaaatacataactcttccttgtagggccctttccttattcatttaggtagtgtgaacattaagtataaaataaattatgttcttaatgcctcttaaaccacttacattcaaaggggaacagaaatcattctaagcaggaaaatacttccactttttttttttcaagtatctctctaataactaaatgccacttatttgcattctccttgtggattttttgtcacctaaggaaatgcatttgatgagtgctggaaacttcttaagtgctttacagtttgttttcattgtttgcagcggatcactggacatcaaagattcattgcacttatgaacaaggaaccttcttttcaatttctgtgtaatttgcaaggctgtacaatgtgtgctgatgcaagcctttttcagttcaagagaataaatgtttacaaatataaaaaaaaaa

SEQ ID NO: 319348 - DNA, 5809 bp, Homo sapiens
  misc_feature (1311)..(1311): n is a, c, g, or t
  misc_feature (1358)..(1358): n is a, c, g, or t
  misc_feature (1392)..(1392): n is a, c, g, or t
  misc_feature (1526)..(1526): n is a, c, g, or t
gcgtggtgggaaggggcgggattctgccagccgcggctgccgctggagccggtgtccgggctggtgatggggttaattccctttcgtaagactcttacttgcacccacccagccccgccgtcgccccgccgcgccgcgctccaaccgcctcctcctcctcagtaacgcgggccacggaaaggtatgatatatttgatccaagacagtccattccagtccgggaatctacagtggtgacaaggacatgggactcctcctgccagattacagatggttcactacagttgacatcctggctgacaactgtgaaaaagaaccttggattattttattttatttttgtgggacaccacaatcccaaatccaaaggacgcatcaggcttcaagctccctgtagaattcgaaaataaccttttctaatgaggatgtctgatactgttactgtaaaagatgaaactgcaacaatgaaggatttggaggcagaagtgaaagatacaaccagagttgaaaatcttatcaaatcagaaaactatgggaagattttggtagagaagaatgaacattgtattgagaacaatatagatttgcaggtaaacaggaatttttctctggctacaaatactaaatattcagtatatatttatgtttattttcatacaaaactcacttctcaaaattctaaaagggtaagttgacccttcgtgacatgcttactagctggttttggagccagttggattagcttgctgtgagtcttaacttggcttgtatcatgtaatatacttctttttatttgtatgtggctagtgcatttttattggctttctactttctcattccacccttttcctaattaccagtgctgtgagagttttgaactctcacagttaaattttgagtttaacctaagagctcttaaaggaaagacaaatagaatacaataaaactgcagacgaactattggcaaaaacagccctcagggggttcctcagtcactcaacctgactgacaaaaaagatttgtgggcccgggggaagttaatgcttttaatgctgtgcatatataatgacttagagctagccactgagaaggcttctaattccaggcataaatggaaattgagttgattaacaaattgaagataggtaaaaatggtcccaagtaatagcatttctagtactattcatttctttggtaaggttttccagttatctattttctcagaatgaagggctaacacttttaaacaatttattttattttattttatttttttgagatggagtctctctctgtcgcccaggctggagngcagtggtgtgatctcggctcactgcagcctccctctcctgggttcnagcaattctcctgcctcagcctcccgagtagctnggactacaggcatgcacccccacacccggctaatttttctattttagtagagatggagtttcactgtgttgcctaggctgttctagaactcctgagctccggcgatccgcccacctcggcttcccataatgctnggattacaggcgcaagccatcgcacctggcccacaattttttttttaatatctcatcatttatcagtcaggaaacgaagcaaggcttgggctgagtgaattttctattctacagggtatccaaagaggtcctttgttggcatttaacaggccggtggacttggtctggagcatcccggattgcttctcgcacctgtctggcacctagtcaagctcaaagttaaagctagttcggagccttgcagtgtgtgaagaatctccaccaccccctgcaccagagatatcacaggagaaccaggagaaaattcagatccagttaacacaatcatttgagaaagaagagaagccctcaaaagatgaagcagaaaaagaaaaggccagtgataagttgcccagaaaaatgttatcaagagattccagtcaagaatacactgattcaactggcatagatctacatgaatttttagtaaatacattaaaaaacaatcccagggacagaatgatgctgctgaaattggaacaagaaattttagatttcattggtaataatgagtctccacgtaaaaaattccccccaatgacatcttaccataggatgctattacacagagtagccgcttactttggattagaccacaatgttgatcagagtgggaagtctgtcatagtaaacaaaactagcaatacaagaatacctgatcagaaatttaatgaacatattaaggatgataaaggtgaagactttcagaaacgttatatcctcaagagagataactctagctttgacaaagatgataaccagatgagaatacgtttgaaagatgacagaagaagcaaatctatagaagaaagagaagaagagtaccagagagccagagaccgaatattttcccaagattccctgtgttcccaagagaattacattattgacaaaagactccaagacgaggatgccagtagtacccagcagaggcgccagatatttagagttaataaagatgcttcagggagatctacaaatagccatcaaagcagcactgagaatgagttgaagtactcggaaccacgaccctggagcagcacagattcagacagctctcttcgaaacctgaaacctgctgtaaccaaagccagcagcttcagtggaatctcagtcctgacaagaggtgatagttctggaagcagcaaaagcataggcaggctttcaaaaacaggttctgagtcttctggtagtgtagggtcatctacaggctctctttctcacatccagcagcctcttccaggtacagctctcagccagtcttctcatggcgcacctgtcgtctatccaactgtcagcactcatagttctctttcctttgatggtggcctaaatgggcaagtcgcatctcctagcactagcttctttttgcttcccttggaagcggcaggcataccacctggcagtattctgatcaacccacaaacaggtcagcccttcataaacccagatgggagtccagttgtgtataatcctcctatgactcaacaaccagttagatcccaagtgcctggacctccacagccacctctgccagccccacctcaacaaccagcagctaatcacattttctcacagcaggataacctagggtctcagtttagccacatgagtcttgctcgccagccatctgctgatggttctgaccctcatgccgccatgttccagtccactgtggttcttcagtctccacagcagtctggttatatcatgacagcagcccctccaccacatcctcctccaccgccaccaccaccacctcctcctcctcccctaccacctgggcagccagtccctactgctggatatcctgcctctggtcatcctgtcagccagcctgtgctccagcagcagggatatattcagcagccatcaccacagatgccagcctgttattgcgctccaggccactatcactccagccaacctcagtatcgcccagtcccttctgttcattacaattcacatctaaaccaaccactgccacaacctgcgcagcagacaggttatcaagttatacccaaccagcagcaaaactaccaaggaatagttggagttcagcaaccccagagtcagagcctagtcagtggccaacccaacagcattggaaatcagattcaaggagtggtcatcccctatacttcagtgccaacatatcaggtttcactgcctcaaggttctcaaggaattccccatcagacttatcaacagcctgttatgttccctaatcagtctaatcaaggatctatgcccacaacaggaatgcctgtttactatagtgtcattccacctggtcaacaaaacaatttaagctcttcagtaggttacctgcaacatccaggatcagaacaagtacaatttcctcgaaccacttcaccatgcagttcccagcagcttcaaggccaccaatgtacagctggaccaccaccgccacctggtggggggatggtgatgatgcagctcagtgtaccaaacaatccacaatcttgtgcccactcacccccgcagtggaaacaaaacaaatattactgtgatcaccagagaggacagaagtgtgtagaatttagcagtgtagacaatattgtccagcacagccctcaactcagtagccccattatttcaccagctcagtcgccagcaccagctcagctgtccaccctgaaaactgtacgtccctctggaccaccactttccatcatgccccaattttctagaccttttgtccccgggcaaggagattccaggtatccattacttggccagccactgcagtacaatcctcctgctgttctgcacggacacattccaaaccaacagggtcagcctggcagcaggcatggaaaccgaggaaggagacaagctaaaaaagctgcatccacagaccttggagcaggagaaacagttgttgggaaggtcttggaaattactgaactaccagatggaataactcgcatggaagctgaaaagctttttggggaactctttaaaattggcgccaagatccggtggctccgggacccccagtcccaaccacgtcgtcaccccctctgctgtggcagtggggacaacactgccaaccctgaacgctctaaacccagtgacttggcctccacctacaccgtcttagccacattcccctccatttcagctgcacagaatgcactgaagaaacaaattaactcagttaacaagtttaagctgagaacaagcaagaagcactatgactttcacattttggaaagggcaagttctcagtaacagccacctttggacccttcgcctttatggttcccctgccctctcccatctttgattggcttggtatttggagcttctgttaacattatagagactcctaggatgtgtgttcatggcattatagcttttgaagaaaggccagtgatccagcaaagggggaaaaatatgcatttcaccccacatgactaggaatccacatcagaatgatacagagttagcaggtttttctaaggaaatgccattcaaatgcctcctaacttttatagttattttgttttatatttctaaattcttgtatcagatccaaagctctattgtacagcaaattattcttcaaaatgattataaccagttgcaccctgtatttctttttgcagccagcacaatgtgacccaacttaaaatttgggggaaaaagaatgcaggagtgaaataaccaagtcaaaaccatgtactatctccttgggggttagggatgctaagaagagcccacaaatagaggattactcttcccctgaatctctaaactcagaaacaattaccaaaaaatacataactcttccttgtagggccctttccttattcatttaggtagtgtgaacattaagtataaaataaattatgttcttaatgcctcttaaaccacttacattcaaaggggaacagaaatcattctaagcaggaaaatacttccactttttttttttcaagtatctctctaataactaaatgccacttatttgcattctccttgtggattttttgtcacctaaggaaatgcatttgatgagtgctggaaacttcttaagtgctttacagtttgttttcattgtttgcagcggatcactggacatcaaagattcattgcacttatgaacaaggaaccttcttttcaatttctgtgtaatttgcaaggctgtacaatgtgtgctgatgcaagcctttttcagttcaagagaataaatgtttacaaatataaaaaaaaaa

SEQ ID NO: 319349 - DNA, 4156 bp, Homo sapiens
gcgtggtgggaaggggcgggattctgccagccgcggctgccgctggagccggtgtccgggctggtgatggggttaattccctttcgtaagactcttacttgcacccacccagccccgccgtcgccccgccgcgccgcgctccaaccgcctcctcctcctcagtaacgcgggagaaaattcagatccagttaacacaatcatttgagaaagaagagaagccctcaaaagatgaagcagaaaaagaaaaggccagtgataagttgcccagaaaaatgttatcaagagattccagtcaagaatacactgattcaactggcatagatctacatgaatttttagtaaatacattaaaaaacaatcccagggacagaatgatgctgctgaaattggaacaagaaattttagatttcattggtaataatgagtctccacgtaaaaaattccccccaatgacatcttaccataggatgctattacacagagtagccgcttactttggattagaccacaatgttgatcagagtgggaagtctgtcatagtaaacaaaactagcaatacaagaatacctgatcagaaatttaatgaacatattaaggatgataaaggtgaagactttcagaaacgttatatcctcaagagagataactctagctttgacaaagatgataaccagatgagaatacgtttgaaagatgacagaagaagcaaatctatagaagaaagagaagaagagtaccagagagccagagaccgaatattttcccaagattccctgtgttcccaagagaattacattattgacaaaagactccaagacgaggatgccagtagtacccagcagaggcgccagatatttagagttaataaagatgcttcagggagatctacaaatagccatcaaagcagcactgagaatgagttgaagtactcggaaccacgaccctggagcagcacagattcagacagctctcttcgaaacctgaaacctgctgtaaccaaagccagcagcttcagtggaatctcagtcctgacaagaggtgatagttctggaagcagcaaaagcataggcaggctttcaaaaacaggttctgagtcttctggtagtgtagggtcatctacaggctctctttctcacatccagcagcctcttccaggtacagctctcagccagtcttctcatggcgcacctgtcgtctatccaactgtcagcactcatagttctctttcctttgatggtggcctaaatgggcaagtcgcatctcctagcactagcttctttttgcttcccttggaagcggcaggcataccacctggcagtattctgatcaacccacaaacaggtcagcccttcataaacccagatgggagtccagttgtgtataatcctcctatgactcaacaaccagttagatcccaagtgcctggacctccacagccacctctgccagccccacctcaacaaccagcagctaatcacattttctcacagcaggataacctagggtctcagtttagccacatgagtcttgctcgccagccatctgctgatggttctgaccctcatgccgccatgttccagtccactgtggttcttcagtctccacagcagtctggttatatcatgacagcagcccctccaccacatcctcctccaccgccaccaccaccacctcctcctcctcccctaccacctgggcagccagtccctactgctggatatcctgcctctggtcatcctgtcagccagcctgtgctccagcagcagggatatattcagcagccatcaccacagatgccagcctgttattgcgctccaggccactatcactccagccaacctcagtatcgcccagtcccttctgttcattacaattcacatctaaaccaaccactgccacaacctgcgcagcagacaggttatcaagttatacccaaccagcagcaaaactaccaaggaatagttggagttcagcaaccccagagtcagagcctagtcagtggccaacccaacagcattggaaatcagattcaaggagtggtcatcccctatacttcagtgccaacatatcaggtttcactgcctcaaggttctcaaggaattccccatcagacttatcaacagcctgttatgttccctaatcagtctaatcaaggatctatgcccacaacaggaatgcctgtttactatagtgtcattccacctggtcaacaaaacaatttaagctcttcagtaggttacctgcaacatccaggatcagaacaagtacaatttcctcgaaccacttcaccatgcagttcccagcagcttcaaggccaccaatgtacagctggaccaccaccgccacctggtggggggatggtgatgatgcagctcagtgtaccaaacaatccacaatcttgtgcccactcacccccgcagtggaaacaaaacaaatattactgtgatcaccagagaggacagaagtgtgtagaatttagcagtgtagacaatattgtccagcacagccctcaactcagtagccccattatttcaccagctcagtcgccagcaccagctcagctgtccaccctgaaaactgtacgtccctctggaccaccactttccatcatgccccaattttctagaccttttgtccccgggcaaggagattccaggtatccattacttggccagccactgcagtacaatcctcctgctgttctgcacggacacattccaaaccaacagggtcagcctggcagcaggcatggaaaccgaggaaggagacaagctaaaaaagctgcatccacagaccttggagcaggagaaacagttgttgggaaggtcttggaaattactgaactaccagatggaataactcgcatggaagctgaaaagctttttggggaactctttaaaattggcgccaagatccggtggctccgggacccccagtcccaaccacgtcgtcaccccctctgctgtggcagtggggacaacactgccaaccctgaacgctctaaacccagtgacttggcctccacctacaccgtcttagccacattcccctccatttcagctgcacagaatgcactgaagaaacaaattaactcagttaacaagtttaagctgagaacaagcaagaagcactatgactttcacattttggaaagggcaagttctcagtaacagccacctttggacccttcgcctttatggttcccctgccctctcccatctttgattggcttggtatttggagcttctgttaacattatagagactcctaggatgtgtgttcatggcattatagcttttgaagaaaggccagtgatccagcaaagggggaaaaatatgcatttcaccccacatgactaggaatccacatcagaatgatacagagttagcaggtttttctaaggaaatgccattcaaatgcctcctaacttttatagttattttgttttatatttctaaattcttgtatcagatccaaagctctattgtacagcaaattattcttcaaaatgattataaccagttgcaccctgtatttctttttgcagccagcacaatgtgacccaacttaaaatttgggggaaaaagaatgcaggagtgaaataaccaagtcaaaaccatgtactatctccttgggggttagggatgctaagaagagcccacaaatagaggattactcttcccctgaatctctaaactcagaaacaattaccaaaaaatacataactcttccttgtagggccctttccttattcatttaggtagtgtgaacattaagtataaaataaattatgttcttaatgcctcttaaaccacttacattcaaaggggaacagaaatcattctaagcaggaaaatacttccactttttttttttcaagtatctctctaataactaaatgccacttatttgcattctccttgtggattttttgtcacctaaggaaatgcatttgatgagtgctggaaacttcttaagtgctttacagtttgttttcattgtttgcagcggatcactggacatcaaagattcattgcacttatgaacaaggaaccttcttttcaatttctgtgtaatttgcaaggctgtacaatgtgtgctgatgcaagcctttttcagttcaagagaataaatgtttacaaatataaaaaaaaaa

SEQ ID NO: 319350 - DNA, 2532 bp, Homo sapiens
agactccagatttccctgtcaaccacgaggagtccagagaggaaacgcggagcggagacaacagtacctgacgcctctttcagcccgggatcgccccagcagggatgggcgacaagatctggctgcccttccccgtgctccttctggccgctctgcctccggtgctgctgcctggggcggccggcttcacaccttccctcgatagcgacttcacctttacccttcccgccggccagaaggagtgcttctaccagcccatgcccctgaaggcctcgctggagatcgagtaccaagttatcaagttatacccaaccagcagcaaaactaccaaggaatagttggagttcagcaaccccagagtcagagcctagtcagtggccaacccaacagcattggaaatcagattcaaggagtggtcatcccctatacttcagtgccaacatatcaggtttcactgcctcaaggttctcaaggaattccccatcagacttatcaacagcctgttatgttccctaatcagtctaatcaaggatctatgcccacaacaggaatgcctgtttactatagtgtcattccacctggtcaacaaaacaatttaagctcttcagtaggttacctgcaacatccaggatcagaacaagtacaatttcctcgaaccacttcaccatgcagttcccagcagcttcaaggccaccaatgtacagctggaccaccaccgccacctggtggggggatggtgatgatgcagctcagtgtaccaaacaatccacaatcttgtgcccactcacccccgcagtggaaacaaaacaaatattactgtgatcaccagagaggacagaagtgtgtagaatttagcagtgtagacaatattgtccagcacagccctcaactcagtagccccattatttcaccagctcagtcgccagcaccagctcagctgtccaccctgaaaactgtacgtccctctggaccaccactttccatcatgccccaattttctagaccttttgtccccgggcaaggagattccaggtatccattacttggccagccactgcagtacaatcctcctgctgttctgcacggacacattccaaaccaacagggtcagcctggcagcaggcatggaaaccgaggaaggagacaagctaaaaaagctgcatccacagaccttggagcaggagaaacagttgttgggaaggtcttggaaattactgaactaccagatggaataactcgcatggaagctgaaaagctttttggggaactctttaaaattggcgccaagatccggtggctccgggacccccagtcccaaccacgtcgtcaccccctctgctgtggcagtggggacaacactgccaaccctgaacgctctaaacccagtgacttggcctccacctacaccgtcttagccacattcccctccatttcagctgcacagaatgcactgaagaaacaaattaactcagttaacaagtttaagctgagaacaagcaagaagcactatgactttcacattttggaaagggcaagttctcagtaacagccacctttggacccttcgcctttatggttcccctgccctctcccatctttgattggcttggtatttggagcttctgttaacattatagagactcctaggatgtgtgttcatggcattatagcttttgaagaaaggccagtgatccagcaaagggggaaaaatatgcatttcaccccacatgactaggaatccacatcagaatgatacagagttagcaggtttttctaaggaaatgccattcaaatgcctcctaacttttatagttattttgttttatatttctaaattcttgtatcagatccaaagctctattgtacagcaaattattcttcaaaatgattataaccagttgcaccctgtatttctttttgcagccagcacaatgtgacccaacttaaaatttgggggaaaaagaatgcaggagtgaaataaccaagtcaaaaccatgtactatctccttgggggttagggatgctaagaagagcccacaaatagaggattactcttcccctgaatctctaaactcagaaacaattaccaaaaaatacataactcttccttgtagggccctttccttattcatttaggtagtgtgaacattaagtataaaataaattatgttcttaatgcctcttaaaccacttacattcaaaggggaacagaaatcattctaagcaggaaaatacttccactttttttttttcaagtatctctctaataactaaatgccacttatttgcattctccttgtggattttttgtcacctaaggaaatgcatttgatgagtgctggaaacttcttaagtgctttacagtttgttttcattgtttgcagcggatcactggacatcaaagattcattgcacttatgaacaaggaaccttcttttcaatttctgtgtaatttgcaaggctgtacaatgtgtgctgatgcaagcctttttcagttcaagagaataaatgtttacaaatataaaaaaaaaa

SEQ ID NO: 319351 - DNA, 1969 bp, Homo sapiens
ggaaggtgggactacaaaggggcacaaggcaactttgctcttcagtaggttacctgcaacatccaggatcagaacaagtacaatttcctcgaaccacttcaccatgcagttcccagcagcttcaaggccaccaatgtacagctggaccaccaccgccacctggtggggggatggtgatgatgcagctcagtgtaccaaacaatccacaatcttgtgcccactcacccccgcagtggaaacaaaacaaatattactgtgatcaccagagaggacagaagtgtgtagaatttagcagtgtagacaatattgtccagcacagccctcaactcagtagccccattatttcaccagctcagtcgccagcaccagctcagctgtccaccctgaaaactgtacgtccctctggaccaccactttccatcatgccccaattttctagaccttttgtccccgggcaaggagattccaggtatccattacttggccagccactgcagtacaatcctcctgctgttctgcacggacacattccaaaccaacagggtcagcctggcagcaggcatggaaaccgaggaaggagacaagctaaaaaagctgcatccacagaccttggagcaggagaaacagttgttgggaaggtcttggaaattactgaactaccagatggaataactcgcatggaagctgaaaagctttttggggaactctttaaaattggcgccaagatccggtggctccgggacccccagtcccaaccacgtcgtcaccccctctgctgtggcagtggggacaacactgccaaccctgaacgctctaaacccagtgacttggcctccacctacaccgtcttagccacattcccctccatttcagctgcacagaatgcactgaagaaacaaattaactcagttaacaagtttaagctgagaacaagcaagaagcactatgactttcacattttggaaagggcaagttctcagtaacagccacctttggacccttcgcctttatggttcccctgccctctcccatctttgattggcttggtatttggagcttctgttaacattatagagactcctaggatgtgtgttcatggcattatagcttttgaagaaaggccagtgatccagcaaagggggaaaaatatgcatttcaccccacatgactaggaatccacatcagaatgatacagagttagcaggtttttctaaggaaatgccattcaaatgcctcctaacttttatagttattttgttttatatttctaaattcttgtatcagatccaaagctctattgtacagcaaattattcttcaaaatgattataaccagttgcaccctgtatttctttttgcagccagcacaatgtgacccaacttaaaatttgggggaaaaagaatgcaggagtgaaataaccaagtcaaaaccatgtactatctccttgggggttagggatgctaagaagagcccacaaatagaggattactcttcccctgaatctctaaactcagaaacaattaccaaaaaatacataactcttccttgtagggccctttccttattcatttaggtagtgtgaacattaagtataaaataaattatgttcttaatgcctcttaaaccacttacattcaaaggggaacagaaatcattctaagcaggaaaatacttccactttttttttttcaagtatctctctaataactaaatgccacttatttgcattctccttgtggattttttgtcacctaaggaaatgcatttgatgagtgctggaaacttcttaagtgctttacagtttgttttcattgtttgcagcggatcactggacatcaaagattcattgcacttatgaacaaggaaccttcttttcaatttctgtgtaatttgcaaggctgtacaatgtgtgctgatgcaagcctttttcagttcaagagaataaatgtttacaaatataaaaaaaaaa

SEQ ID NO: 319352 - DNA, 2128 bp, Homo sapiens
ctacctgttggcaggtgaatgacactatagtaaacaggcatcctgttgtgggcatagatccttgattagactgattagggaacataacaggctgttgataagtctgatggggaattccttgagaaccatgagtcttgctcgccagccatctgctgatggttctgaccctcatgccgccatgttccagtccactgtgctcttcagtaggttacctgcaacatccaggatcagaacaagtacaatttcctcgaaccacttcaccatgcagttcccagcagcttcaaggccaccaatgtacagctggaccaccaccgccacctggtggggggatggtgatgatgcagctcagtgtaccaaacaatccacaatcttgtgcccactcacccccgcagtggaaacaaaacaaatattactgtgatcaccagagaggacagaagtgtgtagaatttagcagtgtagacaatattgtccagcacagccctcaactcagtagccccattatttcaccagctcagtcgccagcaccagctcagctgtccaccctgaaaactgtacgtccctctggaccaccactttccatcatgccccaattttctagaccttttgtccccgggcaaggagattccaggtatccattacttggccagccactgcagtacaatcctcctgctgttctgcacggacacattccaaaccaacagggtcagcctggcagcaggcatggaaaccgaggaaggagacaagctaaaaaagctgcatccacagaccttggagcaggagaaacagttgttgggaaggtcttggaaattactgaactaccagatggaataactcgcatggaagctgaaaagctttttggggaactctttaaaattggcgccaagatccggtggctccgggacccccagtcccaaccacgtcgtcaccccctctgctgtggcagtggggacaacactgccaaccctgaacgctctaaacccagtgacttggcctccacctacaccgtcttagccacattcccctccatttcagctgcacagaatgcactgaagaaacaaattaactcagttaacaagtttaagctgagaacaagcaagaagcactatgactttcacattttggaaagggcaagttctcagtaacagccacctttggacccttcgcctttatggttcccctgccctctcccatctttgattggcttggtatttggagcttctgttaacattatagagactcctaggatgtgtgttcatggcattatagcttttgaagaaaggccagtgatccagcaaagggggaaaaatatgcatttcaccccacatgactaggaatccacatcagaatgatacagagttagcaggtttttctaaggaaatgccattcaaatgcctcctaacttttatagttattttgttttatatttctaaattcttgtatcagatccaaagctctattgtacagcaaattattcttcaaaatgattataaccagttgcaccctgtatttctttttgcagccagcacaatgtgacccaacttaaaatttgggggaaaaagaatgcaggagtgaaataaccaagtcaaaaccatgtactatctccttgggggttagggatgctaagaagagcccacaaatagaggattactcttcccctgaatctctaaactcagaaacaattaccaaaaaatacataactcttccttgtagggccctttccttattcatttaggtagtgtgaacattaagtataaaataaattatgttcttaatgcctcttaaaccacttacattcaaaggggaacagaaatcattctaagcaggaaaatacttccactttttttttttcaagtatctctctaataactaaatgccacttatttgcattctccttgtggattttttgtcacctaaggaaatgcatttgatgagtgctggaaacttcttaagtgctttacagtttgttttcattgtttgcagcggatcactggacatcaaagattcattgcacttatgaacaaggaaccttcttttcaatttctgtgtaatttgcaaggctgtacaatgtgtgctgatgcaagcctttttcagttcaagagaataaatgtttacaaatataaaaaaaaaa

SEQ ID NO: 319353 - DNA, 1977 bp, Homo sapiens
tctcaagatcagtcattctccaggagcatcagagacatctttgtgctcttcagtaggttacctgcaacatccaggatcagaacaagtacaatttcctcgaaccacttcaccatgcagttcccagcagcttcaaggccaccaatgtacagctggaccaccaccgccacctggtggggggatggtgatgatgcagctcagtgtaccaaacaatccacaatcttgtgcccactcacccccgcagtggaaacaaaacaaatattactgtgatcaccagagaggacagaagtgtgtagaatttagcagtgtagacaatattgtccagcacagccctcaactcagtagccccattatttcaccagctcagtcgccagcaccagctcagctgtccaccctgaaaactgtacgtccctctggaccaccactttccatcatgccccaattttctagaccttttgtccccgggcaaggagattccaggtatccattacttggccagccactgcagtacaatcctcctgctgttctgcacggacacattccaaaccaacagggtcagcctggcagcaggcatggaaaccgaggaaggagacaagctaaaaaagctgcatccacagaccttggagcaggagaaacagttgttgggaaggtcttggaaattactgaactaccagatggaataactcgcatggaagctgaaaagctttttggggaactctttaaaattggcgccaagatccggtggctccgggacccccagtcccaaccacgtcgtcaccccctctgctgtggcagtggggacaacactgccaaccctgaacgctctaaacccagtgacttggcctccacctacaccgtcttagccacattcccctccatttcagctgcacagaatgcactgaagaaacaaattaactcagttaacaagtttaagctgagaacaagcaagaagcactatgactttcacattttggaaagggcaagttctcagtaacagccacctttggacccttcgcctttatggttcccctgccctctcccatctttgattggcttggtatttggagcttctgttaacattatagagactcctaggatgtgtgttcatggcattatagcttttgaagaaaggccagtgatccagcaaagggggaaaaatatgcatttcaccccacatgactaggaatccacatcagaatgatacagagttagcaggtttttctaaggaaatgccattcaaatgcctcctaacttttatagttattttgttttatatttctaaattcttgtatcagatccaaagctctattgtacagcaaattattcttcaaaatgattataaccagttgcaccctgtatttctttttgcagccagcacaatgtgacccaacttaaaatttgggggaaaaagaatgcaggagtgaaataaccaagtcaaaaccatgtactatctccttgggggttagggatgctaagaagagcccacaaatagaggattactcttcccctgaatctctaaactcagaaacaattaccaaaaaatacataactcttccttgtagggccctttccttattcatttaggtagtgtgaacattaagtataaaataaattatgttcttaatgcctcttaaaccacttacattcaaaggggaacagaaatcattctaagcaggaaaatacttccactttttttttttcaagtatctctctaataactaaatgccacttatttgcattctccttgtggattttttgtcacctaaggaaatgcatttgatgagtgctggaaacttcttaagtgctttacagtttgttttcattgtttgcagcggatcactggacatcaaagattcattgcacttatgaacaaggaaccttcttttcaatttctgtgtaatttgcaaggctgtacaatgtgtgctgatgcaagcctttttcagttcaagagaataaatgtttacaaatataaaaaaaaaa

SEQ ID NO: 319354 - DNA, 3710 bp, Homo sapiens
  misc_feature (1301)..(1301): n is a, c, g, or t
  misc_feature (1348)..(1348): n is a, c, g, or t
  misc_feature (1382)..(1382): n is a, c, g, or t
  misc_feature (1516)..(1516): n is a, c, g, or t
agcggaggctgctctagcaggcactcccaatgccagactaatcagctggatgtgtgcagtgagctctatagaggagcaatgcagagcatcagtttacaggtactatggaaagaacatctccttaactctgtatgatgaagcaaataccaatacaatgaaggccacggaaaggtatgatatatttgatccaagacagtccattccagtccgggaatctacagtggtgacaaggacatgggactcctcctgccagattacagatggttcactacagttgacatcctggctgacaactgtgaaaaagaaccttggattattttattttatttttgtgggacaccacaatcccaaatccaaaggacgcatcaggcttcaagctccctgtagaattcgaaaataaccttttctaatgaggatgtctgatactgttactgtaaaagatgaaactgcaacaatgaaggatttggaggcagaagtgaaagatacaaccagagttgaaaatcttatcaaatcagaaaactatgggaagattttggtagagaagaatgaacattgtattgagaacaatatagatttgcaggtaaacaggaatttttctctggctacaaatactaaatattcagtatatatttatgtttattttcatacaaaactcacttctcaaaattctaaaagggtaagttgacccttcgtgacatgcttactagctggttttggagccagttggattagcttgctgtgagtcttaacttggcttgtatcatgtaatatacttctttttatttgtatgtggctagtgcatttttattggctttctactttctcattccacccttttcctaattaccagtgctgtgagagttttgaactctcacagttaaattttgagtttaacctaagagctcttaaaggaaagacaaatagaatacaataaaactgcagacgaactattggcaaaaacagccctcagggggttcctcagtcactcaacctgactgacaaaaaagatttgtgggcccgggggaagttaatgcttttaatgctgtgcatatataatgacttagagctagccactgagaaggcttctaattccaggcataaatggaaattgagttgattaacaaattgaagataggtaaaaatggtcccaagtaatagcatttctagtactattcatttctttggtaaggttttccagttatctattttctcagaatgaagggctaacacttttaaacaatttattttattttattttatttttttgagatggagtctctctctgtcgcccaggctggagngcagtggtgtgatctcggctcactgcagcctccctctcctgggttcnagcaattctcctgcctcagcctcccgagtagctnggactacaggcatgcacccccacacccggctaatttttctattttagtagagatggagtttcactgtgttgcctaggctgttctagaactcctgagctccggcgatccgcccacctcggcttcccataatgctnggattacaggcgcaagccatcgcacctggcccacaattttttttttaatatctcatcatttatcagtcaggaaacgaagcaaggcttgggctgagtgaattttctattctacagggtatccaaagaggtcctttgttggcatttaacaggccggtggacttggtctggagcatcccggattgcttctcgcacctgtctggcacctagtcaagctcaaagttaaagctagttcggagccttgcagtgtgtgaagaatctccaccaccccctgcaccagagatatcacaggagaaccaggagaaaattcagatccagttaacacaatcatttgagaaagaagagaagccctcaaaagatgaagcagaaaaagaaaaggccagtgataagttgcccagaaaaatgttatcaagagattccagtcaagaatacactgattcaactggcatagatctacatgaatttttagtaaatacattaaaaaacaatcccagggacagaatgatgctgctgaaattggaacaagaaattttagatttcattggtaataatgagtctccacgtaaaaaattccccccaatgacatcttaccataggatgctattacacagagtagccgcttactttggattagaccacaatgttgatcagagtgggaagtctgtcatagtaaacaaaactagcaatacaagaatacctgatcagaaatttaatgaacatattaaggatgataaaggtgaagactttcagaaacgttatatcctcaagagagataactctagctttgacaaagatgataaccagatgagaatacgtttgaaagatgacagaagaagcaaatctatagaagaaagagaagaagagtaccagagagccagagaccgaatattttcccaagattccctgtgttcccaagagaattacattattgacaaaagactccaagacgaggatgccagtagtacccagcagaggcgccagatatttagagttaataaagatgcttcagggagatctacaaatagccatcaaagcagcactgagaatgagttgaagtactcggaaccacgaccctggagcagcacagattcagacagctctcttcgaaacctgaaacctgctgtaaccaaagccagcagcttcagtggaatctcagtcctgacaagaggtgatagttctggaagcagcaaaagcataggcaggctttcaaaaacaggttctgagtcttctggtagtgtagggtcatctacaggctctctttctcacatccagcagcctcttccaggtacagctctcagccagtcttctcatggcgcacctgtcgtctatccaactgtcagcactcatagttctctttcctttgatggtggcctaaatgggcaagtcgcatctcctagcactagcttctttttgcttcccttggaagcggcaggcataccacctggcagtattctgatcaacccacaaacaggtcagcccttcataaacccagatgggagtccagttgtgtataatcctcctatgactcaacaaccagttagatcccaagtgcctggacctccacagccacctctgccagccccacctcaacaaccagcagctaatcacattttctcacagcaggataacctagggtctcagtttagccacatgagtcttgctcgccagccatctgctgatggttctgaccctcatgccgccatgttccagtccactgtggttcttcagtctccacagcagtctggttatatcatgacagcagcccctccaccacatcctcctccaccgccaccaccaccacctcctcctcctcccctaccacctgggcagccagtccctactgctggatatcctgcctctggtcatcctgtcagccagcctgtgctccagcagcagggatatattcagcagccatcaccacagatgccagcctgttattgcgctccaggccactatcactccagccaacctcagtatcgcccagtcccttctgttcattacaattcacatctaaaccaaccactgccacaacctgcgcagcagacaggttatcaagttatacccaaccagcagaaagaaaccaaggattgactatccccctgagtttcaccagagaccagggtatttaaaggatccacgataccaggaagtggacagacgattttcaggagttcgccgagatgtgtgtacaaatggg

SEQ ID NO: 319355 - DNA, 3193 bp, Homo sapiens
  misc_feature (1301)..(1301): n is a, c, g, or t
  misc_feature (1348)..(1348): n is a, c, g, or t
  misc_feature (1382)..(1382): n is a, c, g, or t
  misc_feature (1516)..(1516): n is a, c, g, or t
agcggaggctgctctagcaggcactcccaatgccagactaatcagctggatgtgtgcagtgagctctatagaggagcaatgcagagcatcagtttacaggtactatggaaagaacatctccttaactctgtatgatgaagcaaataccaatacaatgaaggccacggaaaggtatgatatatttgatccaagacagtccattccagtccgggaatctacagtggtgacaaggacatgggactcctcctgccagattacagatggttcactacagttgacatcctggctgacaactgtgaaaaagaaccttggattattttattttatttttgtgggacaccacaatcccaaatccaaaggacgcatcaggcttcaagctccctgtagaattcgaaaataaccttttctaatgaggatgtctgatactgttactgtaaaagatgaaactgcaacaatgaaggatttggaggcagaagtgaaagatacaaccagagttgaaaatcttatcaaatcagaaaactatgggaagattttggtagagaagaatgaacattgtattgagaacaatatagatttgcaggtaaacaggaatttttctctggctacaaatactaaatattcagtatatatttatgtttattttcatacaaaactcacttctcaaaattctaaaagggtaagttgacccttcgtgacatgcttactagctggttttggagccagttggattagcttgctgtgagtcttaacttggcttgtatcatgtaatatacttctttttatttgtatgtggctagtgcatttttattggctttctactttctcattccacccttttcctaattaccagtgctgtgagagttttgaactctcacagttaaattttgagtttaacctaagagctcttaaaggaaagacaaatagaatacaataaaactgcagacgaactattggcaaaaacagccctcagggggttcctcagtcactcaacctgactgacaaaaaagatttgtgggcccgggggaagttaatgcttttaatgctgtgcatatataatgacttagagctagccactgagaaggcttctaattccaggcataaatggaaattgagttgattaacaaattgaagataggtaaaaatggtcccaagtaatagcatttctagtactattcatttctttggtaaggttttccagttatctattttctcagaatgaagggctaacacttttaaacaatttattttattttattttatttttttgagatggagtctctctctgtcgcccaggctggagngcagtggtgtgatctcggctcactgcagcctccctctcctgggttcnagcaattctcctgcctcagcctcccgagtagctnggactacaggcatgcacccccacacccggctaatttttctattttagtagagatggagtttcactgtgttgcctaggctgttctagaactcctgagctccggcgatccgcccacctcggcttcccataatgctnggattacaggcgcaagccatcgcacctggcccacaattttttttttaatatctcatcatttatcagtcaggaaacgaagcaaggcttgggctgagtgaattttctattctacagggtatccaaagaggtcctttgttggcatttaacaggccggtggacttggtctggagcatcccggattgcttctcgcacctgtctggcacctagtcaagctcaaagttaaagctagttcggagccttgcagtgtgtgaagaatctccaccaccccctgcaccagagatatcacaggagaaccaggagaaaattcagatccagttaacacaatcatttgagaaagaagagaagccctcaaaagatgaagcagaaaaagaaaaggccagtgataagttgcccagaaaaatgttatcaagagattccagtcaagaatacactgattcaactggcatagatctacatgaatttttagtaaatacattaaaaaacaatcccagggacagaatgatgctgctgaaattggaacaagaaattttagatttcattggtaataatgagtctccacgtaaaaaattccccccaatgacatcttaccataggatgctattacacagagtagccgcttactttggattagaccacaatgttgatcagagtgggaagtctgtcatagtaaacaaaactagcaatacaagaatacctgatcagaaatttaatgaacatattaaggatgataaaggtgaagactttcagaaacgttatatcctcaagagagataactctagctttgacaaagatgataaccagatgagaatacgtttgaaagatgacagaagaagcaaatctatagaagaaagagaagaagagtaccagagagccagagaccgaatattttcccaagattccctgtgttcccaagagaattacattattgacaaaagactccaagacgaggatgccagtagtacccagcagaggcgccagatatttagagttaataaagatgcttcagggagatctacaaatagccatcaaagcagcactgagaatgagttgaagtactcggaaccacgaccctggagcagcacagattcagacagctctcttcgaaacctgaaacctgctgtaaccaaagccagcagcttcagtggaatctcagtcctgacaagaggtgatagttctggaagcagcaaaagcataggcaggctttcaaaaacaggtcagcccttcataaacccagatgggagtccagttgtgtataatcctcctatgactcaacaaccagttagatcccaagtgcctggacctccacagccacctctgccagccccacctcaacaaccagcagctaatcacattttctcacagacggagtctccctctggcgcccaggctggagtgcagtggcgcgacctcggctcactgcaagctccgcctcttggattcacgccattctcctgtctcagcctcccgagtagctgggctacaggcgcccgccaccatgcccggctaattttttgtattttttagtagagacggggtttcaccatgttagccaggatggtctcaatctcctgacctcgtgatccgcccgcctcggcctcccaaagtgctgggatatatttttttacccagagcttttttcttataaaattgctaaaagttaggggctttggtcccaaa

SEQ ID NO: 319356 - DNA, 3070 bp, Homo sapiens
  misc_feature (1301)..(1301): n is a, c, g, or t
  misc_feature (1348)..(1348): n is a, c, g, or t
  misc_feature (1382)..(1382): n is a, c, g, or t
  misc_feature (1516)..(1516): n is a, c, g, or t
agcggaggctgctctagcaggcactcccaatgccagactaatcagctggatgtgtgcagtgagctctatagaggagcaatgcagagcatcagtttacaggtactatggaaagaacatctccttaactctgtatgatgaagcaaataccaatacaatgaaggccacggaaaggtatgatatatttgatccaagacagtccattccagtccgggaatctacagtggtgacaaggacatgggactcctcctgccagattacagatggttcactacagttgacatcctggctgacaactgtgaaaaagaaccttggattattttattttatttttgtgggacaccacaatcccaaatccaaaggacgcatcaggcttcaagctccctgtagaattcgaaaataaccttttctaatgaggatgtctgatactgttactgtaaaagatgaaactgcaacaatgaaggatttggaggcagaagtgaaagatacaaccagagttgaaaatcttatcaaatcagaaaactatgggaagattttggtagagaagaatgaacattgtattgagaacaatatagatttgcaggtaaacaggaatttttctctggctacaaatactaaatattcagtatatatttatgtttattttcatacaaaactcacttctcaaaattctaaaagggtaagttgacccttcgtgacatgcttactagctggttttggagccagttggattagcttgctgtgagtcttaacttggcttgtatcatgtaatatacttctttttatttgtatgtggctagtgcatttttattggctttctactttctcattccacccttttcctaattaccagtgctgtgagagttttgaactctcacagttaaattttgagtttaacctaagagctcttaaaggaaagacaaatagaatacaataaaactgcagacgaactattggcaaaaacagccctcagggggttcctcagtcactcaacctgactgacaaaaaagatttgtgggcccgggggaagttaatgcttttaatgctgtgcatatataatgacttagagctagccactgagaaggcttctaattccaggcataaatggaaattgagttgattaacaaattgaagataggtaaaaatggtcccaagtaatagcatttctagtactattcatttctttggtaaggttttccagttatctattttctcagaatgaagggctaacacttttaaacaatttattttattttattttatttttttgagatggagtctctctctgtcgcccaggctggagngcagtggtgtgatctcggctcactgcagcctccctctcctgggttcnagcaattctcctgcctcagcctcccgagtagctnggactacaggcatgcacccccacacccggctaatttttctattttagtagagatggagtttcactgtgttgcctaggctgttctagaactcctgagctccggcgatccgcccacctcggcttcccataatgctnggattacaggcgcaagccatcgcacctggcccacaattttttttttaatatctcatcatttatcagtcaggaaacgaagcaaggcttgggctgagtgaattttctattctacagggtatccaaagaggtcctttgttggcatttaacaggccggtggacttggtctggagcatcccggattgcttctcgcacctgtctggcacctagtcaagctcaaagttaaagctagttcggagccttgcagtgtgtgaagaatctccaccaccccctgcaccagagatatcacaggagaaccaggagaaaattcagatccagttaacacaatcatttgagaaagaagagaagccctcaaaagatgaagcagaaaaagaaaaggccagtgataagttgcccagaaaaatgttatcaagagattccagtcaagaatacactgattcaactggcatagatctacatgaatttttagtaaatacattaaaaaacaatcccagggacagaatgatgctgctgaaattggaacaagaaattttagatttcattggtaataatgagtctccacgtaaaaaattccccccaatgacatcttaccataggatgctattacacagagtagccgcttactttggattagaccacaatgttgatcagagtgggaagtctgtcatagtaaacaaaactagcaatacaagaatacctgatcagaaatttaatgaacatattaaggatgataaaggtgaagactttcagaaacgttatatcctcaagagagataactctagctttgacaaagatgataaccagatgagaatacgtttgaaagatgacagaagaagcaaatctatagaagaaagagaagaagagtaccagagagccagagaccgaatattttcccaagattccctgtgttcccaagagaattacattattgacaaaagactccaagacgaggatgccagtagtacccagcagaggcgccagatatttagagttaataaagatgcttcagggagatctacaaatagccatcaaagcagcactgagaatgagttgaagtactcggaaccacgaccctggagcagcacagattcagacagctctcttcgaaacctgaaacctgctgtaaccaaagccagcagcttcagtggaatctcagtcctgacaagaggtgatagttctggaagcagcaaaagcataggcaggctttcaaaaacaggttctgagtcttctggtagtgtagggtcatctacaggctctctttctcacatccagcagcctcttccaggtacagctctcagccagtcttctcatggcgcacctgtcgtctatccaactgtcagcactcatagttctctttcctttgatggtggcctaaatgggcaagtcgcatctcctagcactagcttctttttgcttcccttggaagcggcaggcataccacctggcagtattctgatcaacccacaaacaggttggtatccagaaaaaggtgtttcaggaattatctgaaaatttaaggatacttattaaatgtattttctgaatatgtgtagtcag

SEQ ID NO: 319357 - DNA, 251 bp, Homo sapiens
ctgtattctaagttatttttttccctctttttgaatttttcaggtcagcccttcataaacccagatgggagtccagttgtgtataatcctcctatgactcaacaaccagttagatcccaagtgcctggacctccacagccacctctgccagccccacctcaacaaccagcagctaatcacattttctcacaggtgcacatatccatgattacataatgctaagttgacttgcctttacatatttgggacta

SEQ ID NO: 319358 - DNA, 5799 bp, Homo sapiens
  misc_feature (1301)..(1301): n is a, c, g, or t
  misc_feature (1348)..(1348): n is a, c, g, or t
  misc_feature (1382)..(1382): n is a, c, g, or t
  misc_feature (1516)..(1516): n is a, c, g, or t
agcggaggctgctctagcaggcactcccaatgccagactaatcagctggatgtgtgcagtgagctctatagaggagcaatgcagagcatcagtttacaggtactatggaaagaacatctccttaactctgtatgatgaagcaaataccaatacaatgaaggccacggaaaggtatgatatatttgatccaagacagtccattccagtccgggaatctacagtggtgacaaggacatgggactcctcctgccagattacagatggttcactacagttgacatcctggctgacaactgtgaaaaagaaccttggattattttattttatttttgtgggacaccacaatcccaaatccaaaggacgcatcaggcttcaagctccctgtagaattcgaaaataaccttttctaatgaggatgtctgatactgttactgtaaaagatgaaactgcaacaatgaaggatttggaggcagaagtgaaagatacaaccagagttgaaaatcttatcaaatcagaaaactatgggaagattttggtagagaagaatgaacattgtattgagaacaatatagatttgcaggtaaacaggaatttttctctggctacaaatactaaatattcagtatatatttatgtttattttcatacaaaactcacttctcaaaattctaaaagggtaagttgacccttcgtgacatgcttactagctggttttggagccagttggattagcttgctgtgagtcttaacttggcttgtatcatgtaatatacttctttttatttgtatgtggctagtgcatttttattggctttctactttctcattccacccttttcctaattaccagtgctgtgagagttttgaactctcacagttaaattttgagtttaacctaagagctcttaaaggaaagacaaatagaatacaataaaactgcagacgaactattggcaaaaacagccctcagggggttcctcagtcactcaacctgactgacaaaaaagatttgtgggcccgggggaagttaatgcttttaatgctgtgcatatataatgacttagagctagccactgagaaggcttctaattccaggcataaatggaaattgagttgattaacaaattgaagataggtaaaaatggtcccaagtaatagcatttctagtactattcatttctttggtaaggttttccagttatctattttctcagaatgaagggctaacacttttaaacaatttattttattttattttatttttttgagatggagtctctctctgtcgcccaggctggagngcagtggtgtgatctcggctcactgcagcctccctctcctgggttcnagcaattctcctgcctcagcctcccgagtagctnggactacaggcatgcacccccacacccggctaatttttctattttagtagagatggagtttcactgtgttgcctaggctgttctagaactcctgagctccggcgatccgcccacctcggcttcccataatgctnggattacaggcgcaagccatcgcacctggcccacaattttttttttaatatctcatcatttatcagtcaggaaacgaagcaaggcttgggctgagtgaattttctattctacagggtatccaaagaggtcctttgttggcatttaacaggccggtggacttggtctggagcatcccggattgcttctcgcacctgtctggcacctagtcaagctcaaagttaaagctagttcggagccttgcagtgtgtgaagaatctccaccaccccctgcaccagagatatcacaggagaaccaggagaaaattcagatccagttaacacaatcatttgagaaagaagagaagccctcaaaagatgaagcagaaaaagaaaaggccagtgataagttgcccagaaaaatgttatcaagagattccagtcaagaatacactgattcaactggcatagatctacatgaatttttagtaaatacattaaaaaacaatcccagggacagaatgatgctgctgaaattggaacaagaaattttagatttcattggtaataatgagtctccacgtaaaaaattccccccaatgacatcttaccataggatgctattacacagagtagccgcttactttggattagaccacaatgttgatcagagtgggaagtctgtcatagtaaacaaaactagcaatacaagaatacctgatcagaaatttaatgaacatattaaggatgataaaggtgaagactttcagaaacgttatatcctcaagagagataactctagctttgacaaagatgataaccagatgagaatacgtttgaaagatgacagaagaagcaaatctatagaagaaagagaagaagagtaccagagagccagagaccgaatattttcccaagattccctgtgttcccaagagaattacattattgacaaaagactccaagacgaggatgccagtagtacccagcagaggcgccagatatttagagttaataaagatgcttcagggagatctacaaatagccatcaaagcagcactgagaatgagttgaagtactcggaaccacgaccctggagcagcacagattcagacagctctcttcgaaacctgaaacctgctgtaaccaaagccagcagcttcagtggaatctcagtcctgacaagaggtgatagttctggaagcagcaaaagcataggcaggctttcaaaaacaggttctgagtcttctggtagtgtagggtcatctacaggctctctttctcacatccagcagcctcttccaggtacagctctcagccagtcttctcatggcgcacctgtcgtctatccaactgtcagcactcatagttctctttcctttgatggtggcctaaatgggcaagtcgcatctcctagcactagcttctttttgcttcccttggaagcggcaggcataccacctggcagtattctgatcaacccacaaacaggtcagcccttcataaacccagatgggagtccagttgtgtataatcctcctatgactcaacaaccagttagatcccaagtgcctggacctccacagccacctctgccagccccacctcaacaaccagcagctaatcacattttctcacagcaggataacctagggtctcagtttagccacatgagtcttgctcgccagccatctgctgatggttctgaccctcatgccgccatgttccagtccactgtggttcttcagtctccacagcagtctggttatatcatgacagcagcccctccaccacatcctcctccaccgccaccaccaccacctcctcctcctcccctaccacctgggcagccagtccctactgctggatatcctgcctctggtcatcctgtcagccagcctgtgctccagcagcagggatatattcagcagccatcaccacagatgccagcctgttattgcgctccaggccactatcactccagccaacctcagtatcgcccagtcccttctgttcattacaattcacatctaaaccaaccactgccacaacctgcgcagcagacaggttatcaagttatacccaaccagcagcaaaactaccaaggaatagttggagttcagcaaccccagagtcagagcctagtcagtggccaacccaacagcattggaaatcagattcaaggagtggtcatcccctatacttcagtgccaacatatcaggtttcactgcctcaaggttctcaaggaattccccatcagacttatcaacagcctgttatgttccctaatcagtctaatcaaggatctatgcccacaacaggaatgcctgtttactatagtgtcattccacctggtcaacaaaacaatttaagctcttcagtaggttacctgcaacatccaggatcagaacaagtacaatttcctcgaaccacttcaccatgcagttcccagcagcttcaaggccaccaatgtacagctggaccaccaccgccacctggtggggggatggtgatgatgcagctcagtgtaccaaacaatccacaatcttgtgcccactcacccccgcagtggaaacaaaacaaatattactgtgatcaccagagaggacagaagtgtgtagaatttagcagtgtagacaatattgtccagcacagccctcaactcagtagccccattatttcaccagctcagtcgccagcaccagctcagctgtccaccctgaaaactgtacgtccctctggaccaccactttccatcatgccccaattttctagaccttttgtccccgggcaaggagattccaggtatccattacttggccagccactgcagtacaatcctcctgctgttctgcacggacacattccaaaccaacagggtcagcctggcagcaggcatggaaaccgaggaaggagacaagctaaaaaagctgcatccacagaccttggagcaggagaaacagttgttgggaaggtcttggaaattactgaactaccagatggaataactcgcatggaagctgaaaagctttttggggaactctttaaaattggcgccaagatccggtggctccgggacccccagtcccaaccacgtcgtcaccccctctgctgtggcagtggggacaacactgccaaccctgaacgctctaaacccagtgacttggcctccacctacaccgtcttagccacattcccctccatttcagctgcacagaatgcactgaagaaacaaattaactcagttaacaagtttaagctgagaacaagcaagaagcactatgactttcacattttggaaagggcaagttctcagtaacagccacctttggacccttcgcctttatggttcccctgccctctcccatctttgattggcttggtatttggagcttctgttaacattatagagactcctaggatgtgtgttcatggcattatagcttttgaagaaaggccagtgatccagcaaagggggaaaaatatgcatttcaccccacatgactaggaatccacatcagaatgatacagagttagcaggtttttctaaggaaatgccattcaaatgcctcctaacttttatagttattttgttttatatttctaaattcttgtatcagatccaaagctctattgtacagcaaattattcttcaaaatgattataaccagttgcaccctgtatttctttttgcagccagcacaatgtgacccaacttaaaatttgggggaaaaagaatgcaggagtgaaataaccaagtcaaaaccatgtactatctccttgggggttagggatgctaagaagagcccacaaatagaggattactcttcccctgaatctctaaactcagaaacaattaccaaaaaatacataactcttccttgtagggccctttccttattcatttaggtagtgtgaacattaagtataaaataaattatgttcttaatgcctcttaaaccacttacattcaaaggggaacagaaatcattctaagcaggaaaatacttccactttttttttttcaagtatctctctaataactaaatgccacttatttgcattctccttgtggattttttgtcacctaaggaaatgcatttgatgagtgctggaaacttcttaagtgctttacagtttgttttcattgtttgcagcggatcactggacatcaaagattcattgcacttatgaacaaggaaccttcttttcaatttctgtgtaatttgcaaggctgtacaatgtgtgctgatgcaagcctttttcagttcaagagaataaatgtttacaaatataaaaaaaaaa

SEQ ID NO: 319359 - DNA, 2799 bp, Homo sapiens
tgctgttgttgatatatataatttccataatgtgtactattgcatcttatttaaaaataggaagtatttttctttgataagtttggcctatgtgtagaaggcttactaatttttgacttcttccttttttagccaggataacctagggtctcagtttagccacatgagtcttgctcgccagccatctgctgatggttctgaccctcatgccgccatgttccagtccactgtggttcttcagtctccacagcagtctggttatatcatgacagcagcccctccaccacatcctcctccaccgccaccaccaccacctcctcctcctcccctaccacctgggcagccagtccctactgctggatatcctgcctctggtcatcctgtcagccagcctgtgctccagcagcagggatatattcagcagccatcaccacagatgccagcctgttattgcgctccaggccactatcactccagccaacctcagtatcgcccagtcccttctgttcattacaattcacatctaaaccaaccactgccacaacctgcgcagcagacaggttatcaagttatacccaaccagcagcaaaactaccaaggaatagttggagttcagcaaccccagagtcagagcctagtcagtggccaacccaacagcattggaaatcagattcaaggagtggtcatcccctatacttcagtgccaacatatcaggtttcactgcctcaaggttctcaaggaattccccatcagacttatcaacagcctgttatgttccctaatcagtctaatcaaggatctatgcccacaacaggaatgcctgtttactatagtgtcattccacctggtcaacaaaacaatttaagctcttcagtaggttacctgcaacatccaggatcagaacaagtacaatttcctcgaaccacttcaccatgcagttcccagcagcttcaaggccaccaatgtacagctggaccaccaccgccacctggtggggggatggtgatgatgcagctcagtgtaccaaacaatccacaatcttgtgcccactcacccccgcagtggaaacaaaacaaatattactgtgatcaccagagaggacagaagtgtgtagaatttagcagtgtagacaatattgtccagcacagccctcaactcagtagccccattatttcaccagctcagtcgccagcaccagctcagctgtccaccctgaaaactgtacgtccctctggaccaccactttccatcatgccccaattttctagaccttttgtccccgggcaaggagattccaggtatccattacttggccagccactgcagtacaatcctcctgctgttctgcacggacacattccaaaccaacagggtcagcctggcagcaggcatggaaaccgaggaaggagacaagctaaaaaagctgcatccacagaccttggagcaggagaaacagttgttgggaaggtcttggaaattactgaactaccagatggaataactcgcatggaagctgaaaagctttttggggaactctttaaaattggcgccaagatccggtggctccgggacccccagtcccaaccacgtcgtcaccccctctgctgtggcagtggggacaacactgccaaccctgaacgctctaaacccagtgacttggcctccacctacaccgtcttagccacattcccctccatttcagctgcacagaatgcactgaagaaacaaattaactcagttaacaagtttaagctgagaacaagcaagaagcactatgactttcacattttggaaagggcaagttctcagtaacagccacctttggacccttcgcctttatggttcccctgccctctcccatctttgattggcttggtatttggagcttctgttaacattatagagactcctaggatgtgtgttcatggcattatagcttttgaagaaaggccagtgatccagcaaagggggaaaaatatgcatttcaccccacatgactaggaatccacatcagaatgatacagagttagcaggtttttctaaggaaatgccattcaaatgcctcctaacttttatagttattttgttttatatttctaaattcttgtatcagatccaaagctctattgtacagcaaattattcttcaaaatgattataaccagttgcaccctgtatttctttttgcagccagcacaatgtgacccaacttaaaatttgggggaaaaagaatgcaggagtgaaataaccaagtcaaaaccatgtactatctccttgggggttagggatgctaagaagagcccacaaatagaggattactcttcccctgaatctctaaactcagaaacaattaccaaaaaatacataactcttccttgtagggccctttccttattcatttaggtagtgtgaacattaagtataaaataaattatgttcttaatgcctcttaaaccacttacattcaaaggggaacagaaatcattctaagcaggaaaatacttccactttttttttttcaagtatctctctaataactaaatgccacttatttgcattctccttgtggattttttgtcacctaaggaaatgcatttgatgagtgctggaaacttcttaagtgctttacagtttgttttcattgtttgcagcggatcactggacatcaaagattcattgcacttatgaacaaggaaccttcttttcaatttctgtgtaatttgcaaggctgtacaatgtgtgctgatgcaagcctttttcagttcaagagaataaatgtttacaaatataaaaaaaaaa

SEQ ID NO: 319360 - DNA, 5209 bp, Homo sapiens
  misc_feature (1301)..(1301): n is a, c, g, or t
  misc_feature (1348)..(1348): n is a, c, g, or t
  misc_feature (1382)..(1382): n is a, c, g, or t
  misc_feature (1516)..(1516): n is a, c, g, or t
agcggaggctgctctagcaggcactcccaatgccagactaatcagctggatgtgtgcagtgagctctatagaggagcaatgcagagcatcagtttacaggtactatggaaagaacatctccttaactctgtatgatgaagcaaataccaatacaatgaaggccacggaaaggtatgatatatttgatccaagacagtccattccagtccgggaatctacagtggtgacaaggacatgggactcctcctgccagattacagatggttcactacagttgacatcctggctgacaactgtgaaaaagaaccttggattattttattttatttttgtgggacaccacaatcccaaatccaaaggacgcatcaggcttcaagctccctgtagaattcgaaaataaccttttctaatgaggatgtctgatactgttactgtaaaagatgaaactgcaacaatgaaggatttggaggcagaagtgaaagatacaaccagagttgaaaatcttatcaaatcagaaaactatgggaagattttggtagagaagaatgaacattgtattgagaacaatatagatttgcaggtaaacaggaatttttctctggctacaaatactaaatattcagtatatatttatgtttattttcatacaaaactcacttctcaaaattctaaaagggtaagttgacccttcgtgacatgcttactagctggttttggagccagttggattagcttgctgtgagtcttaacttggcttgtatcatgtaatatacttctttttatttgtatgtggctagtgcatttttattggctttctactttctcattccacccttttcctaattaccagtgctgtgagagttttgaactctcacagttaaattttgagtttaacctaagagctcttaaaggaaagacaaatagaatacaataaaactgcagacgaactattggcaaaaacagccctcagggggttcctcagtcactcaacctgactgacaaaaaagatttgtgggcccgggggaagttaatgcttttaatgctgtgcatatataatgacttagagctagccactgagaaggcttctaattccaggcataaatggaaattgagttgattaacaaattgaagataggtaaaaatggtcccaagtaatagcatttctagtactattcatttctttggtaaggttttccagttatctattttctcagaatgaagggctaacacttttaaacaatttattttattttattttatttttttgagatggagtctctctctgtcgcccaggctggagngcagtggtgtgatctcggctcactgcagcctccctctcctgggttcnagcaattctcctgcctcagcctcccgagtagctnggactacaggcatgcacccccacacccggctaatttttctattttagtagagatggagtttcactgtgttgcctaggctgttctagaactcctgagctccggcgatccgcccacctcggcttcccataatgctnggattacaggcgcaagccatcgcacctggcccacaattttttttttaatatctcatcatttatcagtcaggaaacgaagcaaggcttgggctgagtgaattttctattctacagggtatccaaagaggtcctttgttggcatttaacaggccggtggacttggtctggagcatcccggattgcttctcgcacctgtctggcacctagtcaagctcaaagttaaagctagttcggagccttgcagtgtgtgaagaatctccaccaccccctgcaccagagatatcacaggagaaccaggagaaaattcagatccagttaacacaatcatttgagaaagaagagaagccctcaaaagatgaagcagaaaaagaaaaggccagtgataagttgcccagaaaaatgttatcaagagattccagtcaagaatacactgattcaactggcatagatctacatgaatttttagtaaatacattaaaaaacaatcccagggacagaatgatgctgctgaaattggaacaagaaattttagatttcattggtaataatgagtctccacgtaaaaaattccccccaatgacatcttaccataggatgctattacacagagtagccgcttactttggattagaccacaatgttgatcagagtgggaagtctgtcatagtaaacaaaactagcaatacaagaatacctgatcagaaatttaatgaacatattaaggatgataaaggtgaagactttcagaaacgttatatcctcaagagagataactctagctttgacaaagatgataaccagatgagaatacgtttgaaagatgacagaagaagcaaatctatagaagaaagagaagaagagtaccagagagccagagaccgaatattttcccaagattccctgtgttcccaagagaattacattattgacaaaagactccaagacgaggatgccagtagtacccagcagaggcgccagatatttagagttaataaagatgcttcagggagatctacaaatagccatcaaagcagcactgagaatgagttgaagtactcggaaccacgaccctggagcagcacagattcagacagctctcttcgaaacctgaaacctgctgtaaccaaagccagcagcttcagtggaatctcagtcctgacaagaggtgatagttctggaagcagcaaaagcataggcaggctttcaaaaacaggttctgagtcttctggtagtgtagggtcatctacaggctctctttctcacatccagcagcctcttccaggtacagctctcagccagtcttctcatggcgcacctgtcgtctatccaactgtcagcactcatagttctctttcctttgatggtggcctaaatgggcaagtcgcatctcctagcactagcttctttttgcttcccttggaagcggcaggcataccacctggcagtattctgatcaacccacaaacaggtcagcccttcataaacccagatgggagtccagttgtgtataatcctcctatgactcaacaaccagttagatcccaagtgcctggacctccacagccacctctgccagccccacctcaacaaccagcagctaatcacattttctcacagcaggataacctagggtctcagtttagccacatgagtcttgctcgccagccatctgctgatggttctgaccctcatgccgccatgttccagtccactgtggttcttcagtctccacagcagtctggttatatcatgacagcagcccctccaccacatcctcctccaccgccaccaccaccacctcctcctcctcccctaccacctgggcagccagtccctactgctggatatcctgcctctggtcatcctgtcagccagcctgtgctccagcagcagggatatattcagcagccatcaccacagatgccagcctgttattgcgctccaggccactatcactccagccaacctcagtatcgcccagtcccttctgttcattacaattcacatctaaaccaaccactgccacaacctgcgcagcagacaggttatcaagttatacccaaccagcagcaaaactaccaaggaatagttggagttcagcaaccccagagtcagagcctagtcagtggccaacccaacagcattggaaatcagattcaaggagtggtcatcccctatacttcagtgccaacatatcaggtttcactgcctcaaggttctcaaggaattccccatcagacttatcaacagcctgttatgttccctaatcagtctaatcaaggatctatgcccacaacaggaatgcctgtttactatagtgtcattccacctggtcaacaaaacaatttaagctcttcagtaggttacctgcaacatccaggatcagaacaagtacaatttcctcgaacctgaaaagctttttggggaactctttaaaattggcgccaagatccggtggctccgggacccccagtcccaaccacgtcgtcaccccctctgctgtggcagtggggacaacactgccaaccctgaacgctctaaacccagtgacttggcctccacctacaccgtcttagccacattcccctccatttcagctgcacagaatgcactgaagaaacaaattaactcagttaacaagtttaagctgagaacaagcaagaagcactatgactttcacattttggaaagggcaagttctcagtaacagccacctttggacccttcgcctttatggttcccctgccctctcccatctttgattggcttggtatttggagcttctgttaacattatagagactcctaggatgtgtgttcatggcattatagcttttgaagaaaggccagtgatccagcaaagggggaaaaatatgcatttcaccccacatgactaggaatccacatcagaatgatacagagttagcaggtttttctaaggaaatgccattcaaatgcctcctaacttttatagttattttgttttatatttctaaattcttgtatcagatccaaagctctattgtacagcaaattattcttcaaaatgattataaccagttgcaccctgtatttctttttgcagccagcacaatgtgacccaacttaaaatttgggggaaaaagaatgcaggagtgaaataaccaagtcaaaaccatgtactatctccttgggggttagggatgctaagaagagcccacaaatagaggattactcttcccctgaatctctaaactcagaaacaattaccaaaaaatacataactcttccttgtagggccctttccttattcatttaggtagtgtgaacattaagtataaaataaattatgttcttaatgcctcttaaaccacttacattcaaaggggaacagaaatcattctaagcaggaaaatacttccactttttttttttcaagtatctctctaataactaaatgccacttatttgcattctccttgtggattttttgtcacctaaggaaatgcatttgatgagtgctggaaacttcttaagtgctttacagtttgttttcattgtttgcagcggatcactggacatcaaagattcattgcacttatgaacaaggaaccttcttttcaatttctgtgtaatttgcaaggctgtacaatgtgtgctgatgcaagcctttttcagttcaagagaataaatgtttacaaatataaaaaaaaaa

SEQ ID NO: 319361 - DNA, 2113 bp, Homo sapiens
aaagaaaacttgcattctatacctgtaaaaatatttttcagaaacagagatttcaaacacacaaaagctgaattaattgccagccacctcgcactgtgagaactgttaaaggaagtttttcagacagaaggaaaatgataccaatggaaattggtggtacacaaaagaatacaaataaaagctcttcagtaggttacctgcaacatccaggatcagaacaagtacaatttcctcgaaccacttcaccatgcagttcccagcagcttcaaggccaccaatgtacagctggaccaccaccgccacctggtggggggatggtgatgatgcagctcagtgtaccaaacaatccacaatcttgtgcccactcacccccgcagtggaaacaaaacaaatattactgtgatcaccagagaggacagaagtgtgtagaatttagcagtgtagacaatattgtccagcacagccctcaactcagtagccccattatttcaccagctcagtcgccagcaccagctcagctgtccaccctgaaaactgtacgtccctctggaccaccactttccatcatgccccaattttctagaccttttgtccccgggcaaggagattccaggtatccattacttggccagccactgcagtacaatcctcctgctgttctgcacggacacattccaaaccaacagggtcagcctggcagcaggcatggaaaccgaggaaggagacaagctaaaaaagctgcatccacagaccttggagcaggagaaacagttgttgggaaggtcttggaaattactgaactaccagatggaataactcgcatggaagctgaaaagctttttggggaactctttaaaattggcgccaagatccggtggctccgggacccccagtcccaaccacgtcgtcaccccctctgctgtggcagtggggacaacactgccaaccctgaacgctctaaacccagtgacttggcctccacctacaccgtcttagccacattcccctccatttcagctgcacagaatgcactgaagaaacaaattaactcagttaacaagtttaagctgagaacaagcaagaagcactatgactttcacattttggaaagggcaagttctcagtaacagccacctttggacccttcgcctttatggttcccctgccctctcccatctttgattggcttggtatttggagcttctgttaacattatagagactcctaggatgtgtgttcatggcattatagcttttgaagaaaggccagtgatccagcaaagggggaaaaatatgcatttcaccccacatgactaggaatccacatcagaatgatacagagttagcaggtttttctaaggaaatgccattcaaatgcctcctaacttttatagttattttgttttatatttctaaattcttgtatcagatccaaagctctattgtacagcaaattattcttcaaaatgattataaccagttgcaccctgtatttctttttgcagccagcacaatgtgacccaacttaaaatttgggggaaaaagaatgcaggagtgaaataaccaagtcaaaaccatgtactatctccttgggggttagggatgctaagaagagcccacaaatagaggattactcttcccctgaatctctaaactcagaaacaattaccaaaaaatacataactcttccttgtagggccctttccttattcatttaggtagtgtgaacattaagtataaaataaattatgttcttaatgcctcttaaaccacttacattcaaaggggaacagaaatcattctaagcaggaaaatacttccactttttttttttcaagtatctctctaataactaaatgccacttatttgcattctccttgtggattttttgtcacctaaggaaatgcatttgatgagtgctggaaacttcttaagtgctttacagtttgttttcattgtttgcagcggatcactggacatcaaagattcattgcacttatgaacaaggaaccttcttttcaatttctgtgtaatttgcaaggctgtacaatgtgtgctgatgcaagcctttttcagttcaagagaataaatgtttacaaatataaaaaaaaaa

SEQ ID NO: 319362 - DNA, 5334 bp, Homo sapiens
  misc_feature (1301)..(1301): n is a, c, g, or t
  misc_feature (1348)..(1348): n is a, c, g, or t
  misc_feature (1382)..(1382): n is a, c, g, or t
  misc_feature (1516)..(1516): n is a, c, g, or t
agcggaggctgctctagcaggcactcccaatgccagactaatcagctggatgtgtgcagtgagctctatagaggagcaatgcagagcatcagtttacaggtactatggaaagaacatctccttaactctgtatgatgaagcaaataccaatacaatgaaggccacggaaaggtatgatatatttgatccaagacagtccattccagtccgggaatctacagtggtgacaaggacatgggactcctcctgccagattacagatggttcactacagttgacatcctggctgacaactgtgaaaaagaaccttggattattttattttatttttgtgggacaccacaatcccaaatccaaaggacgcatcaggcttcaagctccctgtagaattcgaaaataaccttttctaatgaggatgtctgatactgttactgtaaaagatgaaactgcaacaatgaaggatttggaggcagaagtgaaagatacaaccagagttgaaaatcttatcaaatcagaaaactatgggaagattttggtagagaagaatgaacattgtattgagaacaatatagatttgcaggtaaacaggaatttttctctggctacaaatactaaatattcagtatatatttatgtttattttcatacaaaactcacttctcaaaattctaaaagggtaagttgacccttcgtgacatgcttactagctggttttggagccagttggattagcttgctgtgagtcttaacttggcttgtatcatgtaatatacttctttttatttgtatgtggctagtgcatttttattggctttctactttctcattccacccttttcctaattaccagtgctgtgagagttttgaactctcacagttaaattttgagtttaacctaagagctcttaaaggaaagacaaatagaatacaataaaactgcagacgaactattggcaaaaacagccctcagggggttcctcagtcactcaacctgactgacaaaaaagatttgtgggcccgggggaagttaatgcttttaatgctgtgcatatataatgacttagagctagccactgagaaggcttctaattccaggcataaatggaaattgagttgattaacaaattgaagataggtaaaaatggtcccaagtaatagcatttctagtactattcatttctttggtaaggttttccagttatctattttctcagaatgaagggctaacacttttaaacaatttattttattttattttatttttttgagatggagtctctctctgtcgcccaggctggagngcagtggtgtgatctcggctcactgcagcctccctctcctgggttcnagcaattctcctgcctcagcctcccgagtagctnggactacaggcatgcacccccacacccggctaatttttctattttagtagagatggagtttcactgtgttgcctaggctgttctagaactcctgagctccggcgatccgcccacctcggcttcccataatgctnggattacaggcgcaagccatcgcacctggcccacaattttttttttaatatctcatcatttatcagtcaggaaacgaagcaaggcttgggctgagtgaattttctattctacagggtatccaaagaggtcctttgttggcatttaacaggccggtggacttggtctggagcatcccggattgcttctcgcacctgtctggcacctagtcaagctcaaagttaaagctagttcggagccttgcagtgtgtgaagaatctccaccaccccctgcaccagagatatcacaggagaaccaggagaaaattcagatccagttaacacaatcatttgagaaagaagagaagccctcaaaagatgaagcagaaaaagaaaaggccagtgataagttgcccagaaaaatgttatcaagagattccagtcaagaatacactgattcaactggcatagatctacatgaatttttagtaaatacattaaaaaacaatcccagggacagaatgatgctgctgaaattggaacaagaaattttagatttcattggtaataatgagtctccacgtaaaaaattccccccaatgacatcttaccataggatgctattacacagagtagccgcttactttggattagaccacaatgttgatcagagtgggaagtctgtcatagtaaacaaaactagcaatacaagaatacctgatcagaaatttaatgaacatattaaggatgataaaggtgaagactttcagaaacgttatatcctcaagagagataactctagctttgacaaagatgataaccagatgagaatacgtttgaaagatgacagaagaagcaaatctatagaagaaagagaagaagagtaccagagagccagagaccgaatattttcccaagattccctgtgttcccaagagaattacattattgacaaaagactccaagacgaggatgccagtagtacccagcagaggcgccagatatttagagttaataaagatgcttcagggagatctacaaatagccatcaaagcagcactgagaatgagttgaagtactcggaaccacgaccctggagcagcacagattcagacagctctcttcgaaacctgaaacctgctgtaaccaaagccagcagcttcagtggaatctcagtcctgacaagaggtgatagttctggaagcagcaaaagcataggcaggctttcaaaaacaggttctgagtcttctggtagtgtagggtcatctacaggctctctttctcacatccagcagcctcttccaggtacagctctcagccagtcttctcatggcgcacctgtcgtctatccaactgtcagcactcatagttctctttcctttgatggtggcctaaatgggcaagtcgcatctcctagcactagcttctttttgcttcccttggaagcggcaggcataccacctggcagtattctgatcaacccacaaacaggtcagcccttcataaacccagatgggagtccagttgtgtataatcctcctatgactcaacaaccagttagatcccaagtgcctggacctccacagccacctctgccagccccacctcaacaaccagcagctaatcacattttctcacagcaggataacctagggtctcagtttagccacatgagtcttgctcgccagccatctgctgatggttctgaccctcatgccgccatgttccagtccactgtggttcttcagtctccacagcagtctggttatatcatgacagcagcccctccaccacatcctcctccaccgccaccaccaccacctcctcctcctcccctaccacctgggcagccagtccctactgctggatatcctgcctctggtcatcctgtcagccagcctgtgctccagcagcagggatatattcagcagccatcaccacagatgccagcctgttattgcgctccaggccactatcactccagccaacctcagtatcgcccagtcccttctgttcattacaattcacatctaaaccaaccactgccacaacctgcgcagcagacaggttatcaagttatacccaaccagcagcaaaactaccaaggaatagttggagttcagcaaccccagagtcagagcctagtcagtggccaacccaacagcattggaaatcagattcaaggagtggtcatcccctatacttcagtgccaacatatcaggtttcactgcctcaaggttctcaaggaattccccatcagacttatcaacagcctgttatgttccctaatcagtctaatcaaggatctatgcccacaacaggaatgcctgtttactatagtgtcattccacctggtcaacaaaacaatttaagctcttcagtaggttacctgcaacatccaggatcagaacaagtacaatttcctcgaaccacttcaccatgcagttcccagcagcttcaaggccaccaatgtacagctggaccaccaccgccacctggtggggggatggtgatgatgcagctcagtgtaccaaacaatccacaatcttgtgcccactcacccccgcagtggaaacaaaacaaatattactgtgatcaccagagaggacagaagtgtgtagaatttagcagtgtagacaatattgtccagcacagccctcaactcagtagccccattatttcaccagctcagtcgccagcaccagctcagctgtccaccctgaaaactgtacgtccctctggaccaccactttccatcatgccccaattttctagaccttttgtccccgggcaaggagattccaggtatccattacttggccagccactgcagtacaatcctcctgctgttctgcacggacacattccaaaccaacagggtcagcctggcagcaggcatggaaaccgaggaaggagacaagctaaaaaagctgcatccacagaccttggagcaggagaaacagttgttgggaaggtcttggaaattactgaactaccagatggaataactcgcatggaagctgaaaagctttttggggaactctttaaaattggcgccaagatccggtggctccgggacccccagtcccaaccacgtcgtcaccccctctgctgtggcagtggggacaacactgccaaccctgaacgctctaaacccagtgacttggcctccacctacaccgtcttagccacattcccctccatttcagctgcacagaatgcactgaagaaacaaattaactcagttaacaagtttaagctgagaacaagcaagaagcactatgactttcacattttggaaagggcaagttctcagtaacagccacctttggacccttcgcctttatggttcccctgccctctcccatctttgattggcttggtatttggagcttctgttaacattatagagactcctaggatgtgtgttcatggcattatagcttttgaagaaaggccagtgatccagcaaagggggaaaaatatgcatttcaccccacatgactaggaatccacatcagaatgatacagagttagcaggtttttctaaggaaatgccattcaaatgcctcctaacttttatagtattggtgaaattctaatctgtataagatcaaggtctaatgtccagcaatatctcaaatgtttaccagtgccctgtattttttgagcagaaaagtgccacttaattgggcaagagaggggaaacagcaacaggtatcctggggtgggtagaagagcaaaaggagactcctatttagaaaacaaaaaatccgggggattagagggaaaaaaagtgccaaacgggaaggagaagtagaataggagatctatctgcca

SEQ ID NO: 319363 - DNA, 3612 bp, Homo sapiens
  misc_feature (1301)..(1301): n is a, c, g, or t
  misc_feature (1348)..(1348): n is a, c, g, or t
  misc_feature (1382)..(1382): n is a, c, g, or t
  misc_feature (1516)..(1516): n is a, c, g, or t
agcggaggctgctctagcaggcactcccaatgccagactaatcagctggatgtgtgcagtgagctctatagaggagcaatgcagagcatcagtttacaggtactatggaaagaacatctccttaactctgtatgatgaagcaaataccaatacaatgaaggccacggaaaggtatgatatatttgatccaagacagtccattccagtccgggaatctacagtggtgacaaggacatgggactcctcctgccagattacagatggttcactacagttgacatcctggctgacaactgtgaaaaagaaccttggattattttattttatttttgtgggacaccacaatcccaaatccaaaggacgcatcaggcttcaagctccctgtagaattcgaaaataaccttttctaatgaggatgtctgatactgttactgtaaaagatgaaactgcaacaatgaaggatttggaggcagaagtgaaagatacaaccagagttgaaaatcttatcaaatcagaaaactatgggaagattttggtagagaagaatgaacattgtattgagaacaatatagatttgcaggtaaacaggaatttttctctggctacaaatactaaatattcagtatatatttatgtttattttcatacaaaactcacttctcaaaattctaaaagggtaagttgacccttcgtgacatgcttactagctggttttggagccagttggattagcttgctgtgagtcttaacttggcttgtatcatgtaatatacttctttttatttgtatgtggctagtgcatttttattggctttctactttctcattccacccttttcctaattaccagtgctgtgagagttttgaactctcacagttaaattttgagtttaacctaagagctcttaaaggaaagacaaatagaatacaataaaactgcagacgaactattggcaaaaacagccctcagggggttcctcagtcactcaacctgactgacaaaaaagatttgtgggcccgggggaagttaatgcttttaatgctgtgcatatataatgacttagagctagccactgagaaggcttctaattccaggcataaatggaaattgagttgattaacaaattgaagataggtaaaaatggtcccaagtaatagcatttctagtactattcatttctttggtaaggttttccagttatctattttctcagaatgaagggctaacacttttaaacaatttattttattttattttatttttttgagatggagtctctctctgtcgcccaggctggagngcagtggtgtgatctcggctcactgcagcctccctctcctgggttcnagcaattctcctgcctcagcctcccgagtagctnggactacaggcatgcacccccacacccggctaatttttctattttagtagagatggagtttcactgtgttgcctaggctgttctagaactcctgagctccggcgatccgcccacctcggcttcccataatgctnggattacaggcgcaagccatcgcacctggcccacaattttttttttaatatctcatcatttatcagtcaggaaacgaagcaaggcttgggctgagtgaattttctattctacagggtatccaaagaggtcctttgttggcatttaacaggccggtggacttggtctggagcatcccggattgcttctcgcacctgtctggcacctagtcaagctcaaagttaaagctagttcggagccttgcagtgtgtgaagaatctccaccaccccctgcaccagagatatcacaggagaaccaggagaaaattcagatccagttaacacaatcatttgagaaagaagagaagccctcaaaagatgaagcagaaaaagaaaaggccagtgataagttgcccagaaaaatgttatcaagagattccagtcaagaatacactgattcaactggcatagatctacatgaatttttagtaaatacattaaaaaacaatcccagggacagaatgatgctgctgaaattggaacaagaaattttagatttcattggtaataatgagtctccacgtaaaaaattccccccaatgacatcttaccataggatgctattacacagagtagccgcttactttggattagaccacaatgttgatcagagtgggaagtctgtcatagtaaacaaaactagcaatacaagaatacctgatcagaaatttaatgaacatattaaggatgataaaggtgaagactttcagaaacgttatatcctcaagagagataactctagctttgacaaagatgataaccagatgagaatacgtttgaaagatgacagaagaagcaaatctatagaagaaagagaagaagagtaccagagagccagagaccgaatattttcccaagattccctgtgttcccaagagaattacattattgacaaaagactccaagacgaggatgccagtagtacccagcagaggcgccagatatttagagttaataaagatgcttcagggagatctacaaatagccatcaaagcagcactgagaatgagttgaagtactcggaaccacgaccctggagcagcacagattcagacagctctcttcgaaacctgaaacctgctgtaaccaaagccagcagcttcagtggaatctcagtcctgacaagaggtgatagttctggaagcagcaaaagcataggcaggctttcaaaaacaggttctgagtcttctggtagtgtagggtcatctacaggctctctttctcacatccagcagcctcttccaggtacagctctcagccagtcttctcatggcgcacctgtcgtctatccaactgtcagcactcatagttctctttcctttgatggtggcctaaatgggcaagtcgcatctcctagcactagcttctttttgcttcccttggaagcggcaggcataccacctggcagtattctgatcaacccacaaacaggtcagcccttcataaacccagatgggagtccagttgtgtataatcctcctatgactcaacaaccagttagatcccaagtgcctggacctccacagccacctctgccagccccacctcaacaaccagcagctaatcacattttctcacagcaggataacctagggtctcagtttagccacatgagtcttgctcgccagccatctgctgatggttctgaccctcatgccgccatgttccagtccactgtggttcttcagtctccacagcagtctggttatatcatgacagcagcccctccaccacatcctcctccaccgccaccaccaccacctcctcctcctcccctaccacctgggcagccagtccctactgctggatatcctgcctctggtcatcctgtcagccagcctgtgctccagcagcagggatatattcagcagccatcaccacagatgccagcctgttattgcgctccaggccactatcactccagccaacctcagtatcgcccagtcccttctgttcattacaattcacatctaaaccaaccactgccacaacctgcgcagcagacaggttatcaagttgtacccagaaccggggatggatcctctagatacctgcgtcc

SEQ ID NO: 319364 - DNA, 3268 bp, Homo sapiens
  misc_feature (1301)..(1301): n is a, c, g, or t
  misc_feature (1348)..(1348): n is a, c, g, or t
  misc_feature (1382)..(1382): n is a, c, g, or t
  misc_feature (1516)..(1516): n is a, c, g, or t
agcggaggctgctctagcaggcactcccaatgccagactaatcagctggatgtgtgcagtgagctctatagaggagcaatgcagagcatcagtttacaggtactatggaaagaacatctccttaactctgtatgatgaagcaaataccaatacaatgaaggccacggaaaggtatgatatatttgatccaagacagtccattccagtccgggaatctacagtggtgacaaggacatgggactcctcctgccagattacagatggttcactacagttgacatcctggctgacaactgtgaaaaagaaccttggattattttattttatttttgtgggacaccacaatcccaaatccaaaggacgcatcaggcttcaagctccctgtagaattcgaaaataaccttttctaatgaggatgtctgatactgttactgtaaaagatgaaactgcaacaatgaaggatttggaggcagaagtgaaagatacaaccagagttgaaaatcttatcaaatcagaaaactatgggaagattttggtagagaagaatgaacattgtattgagaacaatatagatttgcaggtaaacaggaatttttctctggctacaaatactaaatattcagtatatatttatgtttattttcatacaaaactcacttctcaaaattctaaaagggtaagttgacccttcgtgacatgcttactagctggttttggagccagttggattagcttgctgtgagtcttaacttggcttgtatcatgtaatatacttctttttatttgtatgtggctagtgcatttttattggctttctactttctcattccacccttttcctaattaccagtgctgtgagagttttgaactctcacagttaaattttgagtttaacctaagagctcttaaaggaaagacaaatagaatacaataaaactgcagacgaactattggcaaaaacagccctcagggggttcctcagtcactcaacctgactgacaaaaaagatttgtgggcccgggggaagttaatgcttttaatgctgtgcatatataatgacttagagctagccactgagaaggcttctaattccaggcataaatggaaattgagttgattaacaaattgaagataggtaaaaatggtcccaagtaatagcatttctagtactattcatttctttggtaaggttttccagttatctattttctcagaatgaagggctaacacttttaaacaatttattttattttattttatttttttgagatggagtctctctctgtcgcccaggctggagngcagtggtgtgatctcggctcactgcagcctccctctcctgggttcnagcaattctcctgcctcagcctcccgagtagctnggactacaggcatgcacccccacacccggctaatttttctattttagtagagatggagtttcactgtgttgcctaggctgttctagaactcctgagctccggcgatccgcccacctcggcttcccataatgctnggattacaggcgcaagccatcgcacctggcccacaattttttttttaatatctcatcatttatcagtcaggaaacgaagcaaggcttgggctgagtgaattttctattctacagggtatccaaagaggtcctttgttggcatttaacaggccggtggacttggtctggagcatcccggattgcttctcgcacctgtctggcacctagtcaagctcaaagttaaagctagttcggagccttgcagtgtgtgaagaatctccaccaccccctgcaccagagatatcacaggagaaccaggagaaaattcagatccagttaacacaatcatttgagaaagaagagaagccctcaaaagatgaagcagaaaaagaaaaggccagtgataagttgcccagaaaaatgttatcaagagattccagtcaagaatacactgattcaactggcatagatctacatgaatttttagtaaatacattaaaaaacaatcccagggacagaatgatgctgctgaaattggaacaagaaattttagatttcattggtaataatgagtctccacgtaaaaaattccccccaatgacatcttaccataggatgctattacacagagtagccgcttactttggattagaccacaatgttgatcagagtgggaagtctgtcatagtaaacaaaactagcaatacaagaatacctgatcagaaatttaatgaacatattaaggatgataaaggtgaagactttcagaaacgttatatcctcaagagagataactctagctttgacaaagatgataaccagatgagaatacgtttgaaagatgacagaagaagcaaatctatagaagaaagagaagaagagtaccagagagccagagaccgaatattttcccaagattccctgtgttcccaagagaattacattattgacaaaagactccaagacgaggatgccagtagtacccagcagaggcgccagatatttagagttaataaagatgcttcagggagatctacaaatagccatcaaagcagcactgagaatgagttgaagtactcggaaccacgaccctggagcagcacagattcagacagctctcttcgaaacctgaaacctgctgtaaccaaagccagcagcttcagtggaatctcagtcctgacaagaggtgatagttctggaagcagcaaaagcataggcaggctttcaaaaacaggtataaatatctacacaaaactgtgcagtcaagtcattagttttcctaatgttgtctcaggtccttatttatcagatggcttctaattatcctaaaatataaaatcactatcaatagtaccttgaccacctccggagcacttaaggggtaatatgtttcttgacatgaggattcactctctgtcctggacacagatttacaaccatcaattaccataaaaattcttctctattgtgacataaacttaattaggtaggttcaatgaaacattatctcttgattgaatgcccataggtaattggaaattctttattacttattcgtagttggtagaaggcatggtttctcacctaggattatttaacactgattgcattttcagctaatactatcaattattgattgcattttttatgataaagtccttcattttccattaaaaaaattaaattgctgaggagattttgaggaatttaaaaaacaaaaacaagtaacttacaaatgactgaaaatttcaataatctcctcattctactacc

SEQ ID NO: 319365 - DNA, 2328 bp, Homo sapiens
  misc_feature (1311)..(1311): n is a, c, g, or t
  misc_feature (1358)..(1358): n is a, c, g, or t
  misc_feature (1392)..(1392): n is a, c, g, or t
  misc_feature (1526)..(1526): n is a, c, g, or t
  misc_feature (2190)..(2190): n is a, c, g, or t
  misc_feature (2194)..(2194): n is a, c, g, or t
  misc_feature (2269)..(2269): n is a, c, g, or t
  misc_feature (2305)..(2305): n is a, c, g, or t
gcgtggtgggaaggggcgggattctgccagccgcggctgccgctggagccggtgtccgggctggtgatggggttaattccctttcgtaagactcttacttgcacccacccagccccgccgtcgccccgccgcgccgcgctccaaccgcctcctcctcctcagtaacgcgggccacggaaaggtatgatatatttgatccaagacagtccattccagtccgggaatctacagtggtgacaaggacatgggactcctcctgccagattacagatggttcactacagttgacatcctggctgacaactgtgaaaaagaaccttggattattttattttatttttgtgggacaccacaatcccaaatccaaaggacgcatcaggcttcaagctccctgtagaattcgaaaataaccttttctaatgaggatgtctgatactgttactgtaaaagatgaaactgcaacaatgaaggatttggaggcagaagtgaaagatacaaccagagttgaaaatcttatcaaatcagaaaactatgggaagattttggtagagaagaatgaacattgtattgagaacaatatagatttgcaggtaaacaggaatttttctctggctacaaatactaaatattcagtatatatttatgtttattttcatacaaaactcacttctcaaaattctaaaagggtaagttgacccttcgtgacatgcttactagctggttttggagccagttggattagcttgctgtgagtcttaacttggcttgtatcatgtaatatacttctttttatttgtatgtggctagtgcatttttattggctttctactttctcattccacccttttcctaattaccagtgctgtgagagttttgaactctcacagttaaattttgagtttaacctaagagctcttaaaggaaagacaaatagaatacaataaaactgcagacgaactattggcaaaaacagccctcagggggttcctcagtcactcaacctgactgacaaaaaagatttgtgggcccgggggaagttaatgcttttaatgctgtgcatatataatgacttagagctagccactgagaaggcttctaattccaggcataaatggaaattgagttgattaacaaattgaagataggtaaaaatggtcccaagtaatagcatttctagtactattcatttctttggtaaggttttccagttatctattttctcagaatgaagggctaacacttttaaacaatttattttattttattttatttttttgagatggagtctctctctgtcgcccaggctggagngcagtggtgtgatctcggctcactgcagcctccctctcctgggttcnagcaattctcctgcctcagcctcccgagtagctnggactacaggcatgcacccccacacccggctaatttttctattttagtagagatggagtttcactgtgttgcctaggctgttctagaactcctgagctccggcgatccgcccacctcggcttcccataatgctnggattacaggcgcaagccatcgcacctggcccacaattttttttttaatatctcatcatttatcagtcaggaaacgaagcaaggcttgggctgagtgaattttctattctacagggtatccaaagaggtcctttgttggcatttaacaggccggtggacttggtctggagcatcccggattgcttctcgcacctgtctggcacctaggtaggcaaggctgcagtgctgggctcaggtagaactagaagcacctatttatggctcctccaacaaggtgggtccaaagtagtcagacttcttatgtggcagctcaggggtcccagagagaatgttccaagaaagccaagcaaagctgcaaggtttcttttgacataggcccagaagttccagaacgttacttcagctatcttcttttgatgacataagtcaataaagccaggccagaggatggggaattagaccctacctctcagtaggaaagaatttgtagccacctttaagctaccacaaaaagttattcaaaaaaaaattgtttaggccgggagcgatggctgtaatcccagcactttgggagaccgaggtgagtggatcacaaggtcaggagatcgagaccatcctgaccaacatggtgaaaccctgtctctagtaaaaatacaaaaaattngccnggcatggttgcgcgcacctatagtcccagctatcctgaggcaggggaatcactcgaacccgggaggcagaggttncagtgagccaagatcgcaccactgcactccagcctngtgacagagcaagactccatctc

SEQ ID NO: 319366 - DNA, 452 bp, Homo sapiens
tctgtttgcaggttcccattttttcttcggaatgtaagctctaggagggcagaaattttgactgttgtgtccatagtactatgtatatggtaggcactgaacaagtatttgctgaatgaataaataaataatacattgtaaatgtctttttaaataaatgccaacataggctgggcacggtgcctcacacctgtaaccccacttctttgggaggccaaggcgggaggatcgcttgagcccaggaattccagatcaccctgggcaacatggtgaaaccccatctctgtaaaaaatacaaaaattaactggacatggtggcacatgcctatagacccagctacttgggaggctgaggtgggagggtcacttgagcccaggaggttgaggctgcggtgagccatgattgccccactgccctccagctcgggtgatgcagtgagacccttgtctca

SEQ ID NO: 319367 - DNA, 435 bp, Homo sapiens
atggatttatattacaaaatataagacctattatagaactgtagcatttaagatagtgtagtattggtgagaggttagatagcagtaaatcaatggaacagaatagagattccagaagcagacccatgcttactggtcatcttatttatgacaaagatgacactgtggtgcagtgggaaaataattttttcccccagcaagaactgcaaggtcaattggatagccttatggaaaaaaaaatgaatcttgactctttcatcacaacatacatgaaaatcaattctagatgaattgcaaatctaggtgtaaaggttaaaaacaaaatcttctaaaataggggttggcaaacttttcttgaagtgcccaatattaaatatttcaggctttgcatatcctacaatctctgttgcaattattcaactctcttccatggta

SEQ ID NO: 319368 - DNA, 288 bp, Homo sapiens
tattgtgttcaagcatcagcttggctggtgctgaggactcttttgatgatgaagtaataaaatggattcaaaatcacttggcatatgtatgtgcatgtacatctgtgtgtgcgtgtgtgtgagtgtgtgtgtgtgcatgcgtgtgagtgtgtgtgtatacgtgtatatgtttaaaggccatataaatgctaaactctgtgtgcaaatgtcctcgaattctgattccaactgtctttatcgagtgctggttgtttatccaggtgaaagcatccgctggccagttttgtc

SEQ ID NO: 319369 - DNA, 95 bp, Homo sapiens
gatcaaccagctgcttgcaggaagctgccagagagctgccgcttcagttaataacgggggtttttatttaagaaataaaaagaaatgtttgcgag

SEQ ID NO: 319370 - DNA, 851 bp, Homo sapiens
tcgtgtaataaactctaaaataataccccagtcccccagcgacatccggccattatggccgaggagtgctcatgctcgctgcaggggtcggaggtcagggcgagcgtctcgcaggccgtaggaggaagatggcggtggagtcgcgcgttacccaggaggaaattaagaaggagccagagaaaccgatcgaccgcgagaagacatgcccactgttgctacgggtcttcaccaccaataacggccgccaccaccgaatggacgagttctcccggggaaatgtaccgtccagcgagttgcagatctacacttggatggatgcaactttgaaagaactgacaagcttagtaaaagaagtctacccagaagctagaaagaagggcactcacttcaattttgcaatcgtttttacagatgttaaaagacctggctatcgagttaaggagattggcagcaccatgtctggcagaaaggggactgatgattccatgaccctgcagtcgcagaagttccagataggagattacttggacatagcaattacccctccaaatcgggcaccacctccttcagggcgcatgagaccatattaaattctatttactatttgttgaatttatttttccgtcagttatgtaaaataaacatactcttcttcctcccctgattattgccattaagcctttaaattctaaacaaattataatgcatcatctatttaggagttagatttggatgtgctattgtatgattacgaatagtctgtatgtttcaagcccttctgtaaaatatgaagaaaagtgctcttagcattctgtgtaaaactgtactgttaaatatatgtgtgtaatcag

SEQ ID NO: 319371 - DNA, 1289 bp, Homo sapiens
taggtttgaactgactttattattttgtaaatgtgaattttacaaagcgctttacaattaatgatcacatccttttgtttgtcatggatttccactgtctgaaacggctctgagcacgcttgaagccctcggtttccctgttcgcttttgaatgtttcagttttagttattgatacaatgtcagccatggctaaaaagtaacagtcttgactctaccgagtaacagcacaaaaacagagtgagggctcaggaaaacaaaacaaaggcttcctccttaaaaaaaagacaaaaaaaaaaagctaagcatctgtggctgaaatctaactcagtggtactgtgaaaccttcctttacagcacaggaaaatttattttttaacagtcgtgagttacagtactttaacccctaaacagactctttaaaacaaccgtctcctttttaaaagtctcttttttccaaacattccatccgaaggatggatgctctacttgcacccagtgccatccaaatgttcaagtcaaaaatatttatacattttatacttatctcgcaggccgtaggaggaagatggcggtggagtcgcgcgttacccaggaggaaattaagaaggagccagagaaaccgatcgaccgcgagaagacatgcccactgttgctacgggtcttcaccaccaataacggccgccaccaccgaatggacgagttctcccggggaaatgtaccgtccagcgagttgcagatctacacttggatggatgcaactttgaaagaactgacaagcttagtaaaagaagtctacccagaagctagaaagaagggcactcacttcaattttgcaatcgtttttacagatgttaaaagacctggctatcgagttaaggagattggcagcaccatgtctggcagaaaggggactgatgattccatgaccctgcagtcgcagaagttccagataggagattacttggacatagcaattacccctccaaatcgggcaccacctccttcagggcgcatgagaccatattaaattctatttactatttgttgaatttatttttccgtcagttatgtaaaataaacatactcttcttcctcccctgattattgccattaagcctttaaattctaaacaaattataatgcatcatctatttaggagttagatttggatgtgctattgtatgattacgaatagtctgtatgtttcaagcccttctgtaaaatatgaagaaaagtgctcttagcattctgtgtaaaactgtactgttaaatatatgtgtgtaatcag

SEQ ID NO: 319372 - DNA, 1103 bp, Homo sapiens
taggtttgaactgactttattattttgtaaatgtgaattttacaaagcgctttacaattaatgatcacatccttttgtttgtcatggatttccactgtctgaaacggctctgagcacgcttgaagccctcggtttccctgttcgcttttgaatgtttcagttttagttattgatacaatgtcagccatggctaaaaagtaacagtcttgactctaccgagtaacagcacaaaaacagagtgagggctcaggaaaacaaaacaaaggcttcctccttaaaaaaaagacaaaaaaaaaaagctaagcatctgtggctgaaatctaactcagtggtactgtgaaaccttcctttacagcacaggaaaatttattttttaacagtcgtgagttacagtactttaacccctaaacagactctttaaaacaaccgtctcctttttaaaagtctcttttttccaaacattccatccgaaggatggatgctctacttgcacccagtgccatccaaatgttcaagtcaaaaatatttatacattttatacttatctcgcaggccgtaggaggaagatggcggtggagtcgcgcgttacccaggaggaaattaagaaggagccagagaaaccgatcgaccgcgagaagacatgcccactgttgctacgggtcttcaccaccaataacggccgccaccaccgaatggacgagttctcccggggaaatgtaccgtccagcgagttgcagatctacacttggatggatgcaactttgaaagaactgacaagcttagtaaaagaagtctacccagaagctagaaagaagggcactcacttcaattttgcaatcgtttttacagatgttaaaagacctggctatcgagttaaggagattggcagcaccatgtctggcagaaaggggactgatgattccatgaccctgcagtcgcagaagttccagataggagattacttggacatagcaattacccctccaaatcgggcaccacctccttcagggcgcatgagaccatattaaattctatttactatttgttgaatttatttttccgtcagttatgtaaaataaacatactcttcttcctcccctgat

SEQ ID NO: 319373 - DNA, 610 bp, Homo sapiens
taactccttcaatgaatcttgttagtgggagaatatgggtttatattaatacgtggtttggcttaataaagtagttaaattttggaagtgtgttataaaatgatggagaaaatccagtgccatattcactttgtagtacatactgggtttcattgatttggatccattaacagttgattttctttcttacagagttaaggagattggcagcaccatgtctggcagaaaggggactgatgattccatgaccctgcagtcgcagaagttccagataggagattacttggacatagcaattacccctccaaatcgggcaccacctccttcagggcgcatgagaccatattaaattctatttactatttgttgaatttatttttccgtcagttatgtaaaataaacatactcttcttcctcccctgattattgccattaagcctttaaattctaaacaaattataatgcatcatctatttaggagttagatttggatgtgctattgtatgattacgaatagtctgtatgtttcaagcccttctgtaaaatatgaagaaaagtgctcttagcattctgtgtaaaactgtactgttaaatatatgtgtgtaatcag

SEQ ID NO: 319374 - DNA, 423 bp, Homo sapiens
actcctgagtgtaaaacaacggcccgggagcactgtaaccgtgcagcgagttgcttatttacactagagatggatgcaactttgaaagaactgacaagcttagtaaaagaagtctacccagaagctagaaagaagggcactcacttcaattttgcaatcgtttttacagatgttaaaagacctggctatcgagttaaggagattggcagcaccatgtctggcagaaaggggactgatgattccatgaccctgcagtcgcagaagttccagataggagattacttggacatagcaattacccctccaaatcgggcaccacctccttcagggcgcatgagaccatattaaattctatttactatttgttgaatttatttttccgtcagttatgtaaaataaacatactcttcttcctcccctgat

SEQ ID NO: 319375 - DNA, 424 bp, Homo sapiens
taactccttcaatgaatcttgttagtgggagaatatgggtttatattaatacgtggtttggcttaataaagtagttaaattttggaagtgtgttataaaatgatggagaaaatccagtgccatattcactttgtagtacatactgggtttcattgatttggatccattaacagttgattttctttcttacagagttaaggagattggcagcaccatgtctggcagaaaggggactgatgattccatgaccctgcagtcgcagaagttccagataggagattacttggacatagcaattacccctccaaatcgggcaccacctccttcagggcgcatgagaccatattaaattctatttactatttgttgaatttatttttccgtcagttatgtaaaataaacatactcttcttcctcccctgat

SEQ ID NO: 319376 - DNA, 2339 bp, Homo sapiens
tcgtgtaataaactctaaaataataccccagtcccccagcgacatccggccattatggccgaggagtgctcatgctcgctgcaggggtcggaggtcagggcgagcgtctcgcaggccgtaggaggaagatggcggtggagtcgcgcgttacccaggaggaaattaagaaggagccagagaaaccgatcgaccgcgagaagacatgcccactgttgctacgggtcttcaccaccaataacggccgccaccaccgaatggacgagttctcccggggaaatgtaccgtccagcgagttgcagatctacacttggatggatgcaactttgaaagaactgacaagcttagtaaaagaagtctacccagaagctagaaagaagggcactcacttcaattttgcaatcgtttttacagatgttaaaagacctggctatcgagttaaggagattggcagcaccatgtctggcagaaaggggactgatgattccatgaccctgcagtcgcagaagttccagataggagattacttggacatagcaattacccctccaaatcgggcaccacctccttcagggcgcatgagaccatattaaattctatttactatttgttgaatttatttttccgtcagttatgtaaaataaacatactcttcttcctcccctgattattgccattaagcctttaaattctaaacaaattataatgcatcatctatttaggagttagatttggatgtgctattgtatgattacgaatagtctgtatgtttcaagcccttctgtaaaatatgaagaaaagtgctcttagcattctgtgtaaaactgtactgttaaatatatgtgtgtaatcagcctgagtgtgaaagttaatggaggcctgggaacagggtttatactaagtagtggaggagcgtatggttaagcccaaaggggcagaacaagaaagccacgggattgtatgaaatcaaacatgagtttgtggtgtagactgctgtatgcagttggaaaggacacgtgagagtgagctcaagtggcagcagaggcagtttggaataagctgcggcaagttgaagaagctgtgttggacgagattgccccgccttgatcagggtaccatgacataaaaggttaaagaacaggcaacacaatgagcacttaagtttttaacatgtggggaatagggcattttaaaggctggaaccagttcagaggaaacaagggtttgggtagaggtagaaaggtttaattaaccctggagatctgcaaatggagggaggggtgaaggaggaatcttaagacggagggagaagagccaaggacaaggtcaggttgaatgagtaggaggtgttcacacatcctcttgtgtgctaggtagtggcgtgcatctgatctgagaggcagtaaagcagtgatgaagacagtgcagcagaacattgaagtcctgattgcagcagtgactctgcaaccttggataaattatttcaatctttattttgtaaaacggagataacggcctataggattgttaagactgaatattttaaaagagcttagaatggtgcctgacaaatgagaaacaataaatactgattattggccataaagtggtattaaaactggatctcttttcttccatggcactactctcattttgaagtttatgaacggtacgacagtgtattgtaaattccctttagtttgttacagtagccaattgaaaatgtatatcccaaaatttaaaaaaaaaagtactagcagcaataaaattgcactagttttatctggtacatacaaaaacagccatttaaaatctgatgattctgtggaattggtgtccctgttagcaatggcagagaccagcctggagcctagatctggtgcttcttctgtgctgtggtttaccccaaacctttaggttgtttattcattcagattagatagactggagccataaagttaatttgcacctagctttttggagaatagccatgattaactgctattcgtggtgggggtgggggggaaccctatgatttactatgcagatgaagagggtaggaactaaataaaggactttgtaagccaaagtggttgggctgctttgtcaaattccaccctttgcttggttccaacatggaatttctcctttaaagatttcaatatcccatcaaaagtacagttagagaatacctagtgaatttattgaatataatgctaagaatcaaaagacttgtactagtttacctctggctttggtaagtgtggctttgagtaataactgagctgtttccccgcatataaaatagaaataaataagtagtcatcatgacaaaaaaaaaa

SEQ ID NO: 319377 - DNA, 2388 bp, Homo sapiens
tcgtgtaataaactctaaaataataccccagtcccccagcgacatccggccattatggccgaggagtgctcatgctcgctgcaggggtcggaggtcagggcgagcgtctcgcaggccgtaggaggaagatggcggtggagtcgcgcgttacccaggaggaaattaagaaggagccagagaaaccgatcgaccgcgagaagacatgcccactgttgctacgggtcttcaccaccaataacggccgccaccaccgaatggacgagttctcccggggaaatgtaccgtccagcgagttgcagatctacacttggatggatgcaactttgaaagaactgacaagcttagtaaaagaagtctacccagaagctagaaagaagggcactcacttcaattttgcaatcgtttttacagatgttaaaagacctggctatcgagttaaggagattggcagcaccatgtctggcagaaaggggactgatgattccatgaccctgcagtcgcagaagttccagataggagattacttggacatagcaattacccctccaaatcgggcaccacctccttcagggcgcatgagaccatattaaattctatttactatttgttgaatttatttttccgtcagttatgtaaaataaacatactcttcttcctcccctgattattgccattaagcctttaaattctaaacaaattataatgcatcatctatttaggagttagatttggatgtgctattgtatgattacgaatagtctgtatgtttcaagcccttctgtaaaatatgaagaaaagtgctcttagcattctgtgtaaaactgtactgttaaatatatgtgtgtaatcagcctgagtgtgaaagttaatggaggcctgggaacagggtttatactaagtagtggaggagcgtatggttaagcccaaaggggcagaacaagaaagccacgggattgtatgaaatcaaacatgagtttgtggtgtagactgctgtatgcagttggaaaggacacgtgagagtgagctcaagtggcagcagaggcagtttggaataagctgcggcaagttgaagaagctgtgttggacgagattgccccgccttgatcagggtaccatgacataaaaggttaaagaacaggcaacacaatgagcacttaagtttttaacatgtggggaatagggcattttaaaggctggaaccagttcagaggaaacaagggtttgggtagaggtagaaaggtttaattaaccctggagatctgcaaatggagggaggggtgaaggaggaatcttaagacggagggagaagagccaaggacaaggtcaggttgaatgagtaggaggtgttcacacatcctcttgtgtgctaggtagtggcgtgcatctgatctgagaggcagtaaagcagtgatgaagacagtgcagcagaacattgaagtcctgattgcagcagtgactctgcaaccttggataaattatttcaatctttattttgtaaaacggagataacggcctataggattgttaagactgaatattttaaaagagcttagaatggtgcctgacaaatgagaaacaataaatactgattattggccataaagtggtattaaaactggatctcttttcttccatggcactactctcattttgaagtttatgaacggtacgacagtgtattgtaaattccctttagtttgttacagtagccaattgaaaatgtatatcccaaaatttaaaaaaaaaagtactagcagcaataaaattgcactagttttatctggtacatacaaaaacagccatttaaaatctgatgattctgtggaattggtgtccctgttagcaatggcagagaccagcctggagcctagatctggtgcttcttctgtgctgtggtttaccccaaacctttaggttgtttattcattcagattagatagactggagccataaagttaatttgcacctagctttttggagaatagccatgattaactgctattcgtggtgggggtgggggggaaccctatgatttactatgcagatgaagagggtaggaactaaataaaggactttgtaagccaaaaaaaagaaaggacgcacacacaccaaccgacaccatagaatagctagacgaaactagacaagaagggggggcgcactaagaaatagataccagagggggccacacaattgcagcacaacacgcgtattacgcaaaaaggggcccccaatgaagtggagccagttataagtagacgacacagcgggccggtgtcaagaaaccgggcgagcggagaacacgagtcagtagggacgatttgaggagagacaccctctgcgcggcggacaaatgagaaagcaccaggagattagacccgggcatat

SEQ ID NO: 319378 - DNA, 2025 bp, Homo sapiens
tcgtgtaataaactctaaaataataccccagtcccccagcgacatccggccattatggccgaggagtgctcatgctcgctgcaggggtcggaggtcagggcgagcgtctcgcaggccgtaggaggaagatggcggtggagtcgcgcgttacccaggaggaaattaagaaggagccagagaaaccgatcgaccgcgagaagacatgcccactgttgctacgggtcttcaccaccaataacggccgccaccaccgaatggacgagttctcccggggaaatgtaccgtccagcgagttgcagatctacacttggatggatgcaactttgaaagaactgacaagcttagtaaaagaagtctacccagaagctagaaagaagggcactcacttcaattttgcaatcgtttttacagatgttaaaagacctggctatcgagttaaggagattggcagcaccatgtctggcagaaaggggactgatgattccatgaccctgcagtcgcagaagttccagataggagattacttggacatagcaattacccctccaaatcgggcaccacctccttcagggcgcatgagaccatattaaattctatttactatttgttgaatttatttttccgtcagttatgtaaaataaacatactcttcttcctcccctgattattgccattaagcctttaaattctaaacaaattataatgcatcatctatttaggagttagatttggatgtgctattgtatgattacgaatagtctgtatgtttcaagcccttctgtaaaatatgaagaaaagtgctcttagcattctgtgtaaaactgtactgttaaatatatgtgtgtaatcagcctgagtgtgaaagttaatggaggcctgggaacagggtttatactaagtagtggaggagcgtatggttaagcccaaaggggcagaacaagaaagccacgggattgtatgaaatcaaacatgagtttgtggtgtagactgctgtatgcagttggaaaggacacgtgagagtgagctcaagtggcagcagaggcagtttggaataagctgcggcaagttgaagaagctgtgttggacgagattgccccgccttgatcagggtaccatgacataaaaggttaaagaacaggcaacacaatgagcacttaagtttttaacatgtggggaatagggcattttaaaggctggaaccagttcagaggaaacaagggtttgggtagaggtagaaaggtttaattaaccctggagatctgcaaatggagggaggggtgaaggaggaatcttaagacggagggagaagagccaaggacaaggtcaggttgaatgagtaggaggtgttcacacatcctcttgtgtgctaggtagtggcgtgcatctgatctgagaggcagtaaagcagtgatgaagacagtgcagcagaacattgaagtcctgattgcagcagtgactctgcaaccttggataaattatttcaatctttattttgtaaaacggagataacggcctataggattgttaagactgaatattttaaaagagcttagaatggtgcctgacaaatgagaaacaataaatactgattattggccataaagtggtattaaaactggatctcttttcttccatggcactactctcattttgaagtttatgaacggtacgacagtgtattgtaaattccctttagtttgttacagtagccaattgaaaatgtatatcccaaaatttaaaaaaaaaagtactagcagcaataaaattgcactagttttatctggtacatacaaaaacacctggagcctagatctggtgcttcttctgtgctgtggtttaccccaaacctttaggttgtttattcattcagattagatagactggagccataaagttaatttgcacctagctttttggagaatagccatgattaactgctattcgtggtgggggtgggggggaaccctatgatttactatgcagatgaagagggtaggaactaaataaaggactttgtaagccaaa

SEQ ID NO: 319379 - DNA, 675 bp, Homo sapiens
accgaagcgctcgctcggataagattgccatcagctgtctacctggtttacaacaccaataacggccgccaccaccgaatggacgagttctcccggggaaatgtaccgtccagcgagttgcagatctacacttggatggatgcaactttgaaagaactgacaagcttagtaaaagaagtctacccagaagctagaaagaagggcactcacttcaattttgcaatcgtttttacagatgttaaaagacctggctatcgagttaaggagattggcagcaccatgtctggcagaaaggggactgatgattccatgaccctgcagtcgcagaagttccagataggagattacttggacatagcaattacccctccaaatcgggcaccacctccttcagggcgcatgagaccatattaaattctatttactatttgttgaatttatttttccgtcagttatgtaaaataaacatactcttcttcctcccctgattattgccattaagcctttaaattctaaacaaattataatgcatcatctatttaggagttagatttggatgtgctattgtatgattacgaatagtctgtatgtttcaagcccttctgtaaaatatgaagaaaagtgctcttagcattctgtgtaaaactgtactgttaaatatatgtgtgtaatcag

SEQ ID NO: 319380 - DNA, 2057 bp, Homo sapiens
tcgtgtaataaactctaaaataataccccagtcccccagcgacatccggccattatggccgaggagtgctcatgctcgctgcaggggtcggaggtcagggcgagcgtctcgcaggccgtaggaggaagatggcggtggagtcgcgcgttacccaggaggaaattaagaaggagccagagaaaccgatcgaccgcgagaagacatgcccactgttgctacgggtcttcaccaccaataacggccgccaccaccgaatggacgagttctcccggggaaatgtaccgtccagcgagttgcagatctacacttggatggatgcaactttgaaagaactgacaagcttagtaaaagaagtctacccagaagctagaaagaagggcactcacttcaattttgcaatcgtttttacagatgttaaaagacctggctatcggcagaaaggggactgatgattccatgaccctgcagtcgcagaagttccagataggagattacttggacatagcaattacccctccaaatcgggcaccacctccttcagggcgcatgagaccatattaaattctatttactatttgttgaatttatttttccgtcagttatgtaaaataaacatactcttcttcctcccctgattattgccattaagcctttaaattctaaacaaattataatgcatcatctatttaggagttagatttggatgtgctattgtatgattacgaatagtctgtatgtttcaagcccttctgtaaaatatgaagaaaagtgctcttagcattctgtgtaaaactgtactgttaaatatatgtgtgtaatcagcctgagtgtgaaagttaatggaggcctgggaacagggtttatactaagtagtggaggagcgtatggttaagcccaaaggggcagaacaagaaagccacgggattgtatgaaatcaaacatgagtttgtggtgtagactgctgtatgcagttggaaaggacacgtgagagtgagctcaagtggcagcagaggcagtttggaataagctgcggcaagttgaagaagctgtgttggacgagattgccccgccttgatcagggtaccatgacataaaaggttaaagaacaggcaacacaatgagcacttaagtttttaacatgtggggaatagggcattttaaaggctggaaccagttcagaggaaacaagggtttgggtagaggtagaaaggtttaattaaccctggagatctgcaaatggagggaggggtgaaggaggaatcttaagacggagggagaagagccaaggacaaggtcaggttgaatgagtaggaggtgttcacacatcctcttgtgtgctaggtagtggcgtgcatctgatctgagaggcagtaaagcagtgatgaagacagtgcagcagaacattgaagtcctgattgcagcagtgactctgcaaccttggataaattatttcaatctttattttgtaaaacggagataacggcctataggattgttaagactgaatattttaaaagagcttagaatggtgcctgacaaatgagaaacaataaatactgattattggccataaagtggtattaaaactggatctcttttcttccatggcactactctcattttgaagtttatgaacggtacgacagtgtattgtaaattccctttagtttgttacagtagccaattgaaaatgtatatcccaaaatttaaaaaaaaaagtactagcagcaataaaattgcactagttttatctggtacatacaaaaacagccatttaaaatctgatgattctgtggaattggtgtccctgttagcaatggcagagaccagcctggagcctagatctggtgcttcttctgtgctgtggtttaccccaaacctttaggttgtttattcattcagattagatagactggagccataaagttaatttgcacctagctttttggagaatagccatgattaactgctattcgtggtgggggtgggggggaaccctatgatttactatgcagatgaagagggtaggaactaaataaaggactttgtaagccaaa

SEQ ID NO: 319381 - DNA, 603 bp, Homo sapiens
tcgtgtaataaactctaaaataataccccagtcccccagcgacatccggccattatggccgaggagtgctcatgctcgctgcaggggtcggaggtcagggcgagcgtctcgcaggccgtaggaggaagatggcggtggagtcgcgcgttacccaggaggaaattaagaaggagccagagaaaccgatcgaccgcgagaagacatgcccactgttgctacgggtcttcaccaccaataacggccgccaccaccgaatggacgagttctcccggggaaatgtaccgtccagcgagttgcagatctacacttggatggatgcaactttgaaagaactgacaagcttagtaaaagaagtctacccagaagctagaaagaagggcactcacttcaattttgcaatcgtttttacagatgttaaaagacctggctatcgagttaaggagattggcagcaccatgtctggcagaaaggggactgatgattccatgaccctgcagtcgcagaagttccagataggagattacttggacatagcaattacccctccaaatcgggcaccacctccttcagggcgcatgagaccatattaaattctatttacta

SEQ ID NO: 319382 - DNA, 1829 bp, Homo sapiens
ccacctttcccctcaccagtaccaccataaaaaacacaaaacagaaacgctggttaggtacgcaaccttgactaactgacaagcttagtaaaagaagtctacccagaagctagaaagaagggcactcacttcaattttgcaatcgtttttacagatgttaaaagacctggctatcgagttaaggagattggcagcaccatgtctggcagaaaggggactgatgattccatgaccctgcagtcgcagaagttccagataggagattacttggacatagcaattacccctccaaatcgggcaccacctccttcagggcgcatgagaccatattaaattctatttactatttgttgaatttatttttccgtcagttatgtaaaataaacatactcttcttcctcccctgattattgccattaagcctttaaattctaaacaaattataatgcatcatctatttaggagttagatttggatgtgctattgtatgattacgaatagtctgtatgtttcaagcccttctgtaaaatatgaagaaaagtgctcttagcattctgtgtaaaactgtactgttaaatatatgtgtgtaatcagcctgagtgtgaaagttaatggaggcctgggaacagggtttatactaagtagtggaggagcgtatggttaagcccaaaggggcagaacaagaaagccacgggattgtatgaaatcaaacatgagtttgtggtgtagactgctgtatgcagttggaaaggacacgtgagagtgagctcaagtggcagcagaggcagtttggaataagctgcggcaagttgaagaagctgtgttggacgagattgccccgccttgatcagggtaccatgacataaaaggttaaagaacaggcaacacaatgagcacttaagtttttaacatgtggggaatagggcattttaaaggctggaaccagttcagaggaaacaagggtttgggtagaggtagaaaggtttaattaaccctggagatctgcaaatggagggaggggtgaaggaggaatcttaagacggagggagaagagccaaggacaaggtcaggttgaatgagtaggaggtgttcacacatcctcttgtgtgctaggtagtggcgtgcatctgatctgagaggcagtaaagcagtgatgaagacagtgcagcagaacattgaagtcctgattgcagcagtgactctgcaaccttggataaattatttcaatctttattttgtaaaacggagataacggcctataggattgttaagactgaatattttaaaagagcttagaatggtgcctgacaaatgagaaacaataaatactgattattggccataaagtggtattaaaactggatctcttttcttccatggcactactctcattttgaagtttatgaacggtacgacagtgtattgtaaattccctttagtttgttacagtagccaattgaaaatgtatatcccaaaatttaaaaaaaaaagtactagcagcaataaaattgcactagttttatctggtacatacaaaaacagccatttaaaatctgatgattctgtggaattggtgtccctgttagcaatggcagagaccagcctggagcctagatctggtgcttcttctgtgctgtggtttaccccaaacctttaggttgtttattcattcagattagatagactggagccataaagttaatttgcacctagctttttggagaatagccatgattaactgctattcgtggtgggggtgggggggaaccctatgatttactatgcagatgaagagggtaggaactaaataaaggactttgtaagccaaa

SEQ ID NO: 319383 - DNA, 791 bp, Homo sapiens
tcgtgtaataaactctaaaataataccccagtcccccagcgacatccggccattatggccgaggagtgctcatgctcgctgcaggggtcggaggtcagggcgagcgtctcgcaggccgtaggaggaagatggcggtggagtcgcgcgttacccaggaggaaattaagaaggagccagagaaaccgatcgaccgcgagaagacatgcccactgttgctacgggtcttcaccaccaataacggccgccaccaccgaatggacgagttctcccaactgacaagcttagtaaaagaagtctacccagaagctagaaagaagggcactcacttcaattttgcaatcgtttttacagatgttaaaagacctggctatcgagttaaggagattggcagcaccatgtctggcagaaaggggactgatgattccatgaccctgcagtcgcagaagttccagataggagattacttggacatagcaattacccctccaaatcgggcaccacctccttcagggcgcatgagaccatattaaattctatttactatttgttgaatttatttttccgtcagttatgtaaaataaacatactcttcttcctcccctgattattgccattaagcctttaaattctaaacaaattataatgcatcatctatttaggagttagatttggatgtgctattgtatgattacgaatagtctgtatgtttcaagcccttctgtaaaatatgaagaaaagtgctcttagcattctgtgtaaaactgtactgttaaatatatgtgtgtaatcag

SEQ ID NO: 319384 - DNA, 1690 bp, Homo sapiens
actcactgacggagaagcagtggctcaaggccatcgagaagggcacgctggaggagatcgtaagaggcagaaaggggactgatgattccatgaccctgcagtcgcagaagttccagataggagattacttggacatagcaattacccctccaaatcgggcaccacctccttcagggcgcatgagaccatattaaattctatttactatttgttgaatttatttttccgtcagttatgtaaaataaacatactcttcttcctcccctgattattgccattaagcctttaaattctaaacaaattataatgcatcatctatttaggagttagatttggatgtgctattgtatgattacgaatagtctgtatgtttcaagcccttctgtaaaatatgaagaaaagtgctcttagcattctgtgtaaaactgtactgttaaatatatgtgtgtaatcagcctgagtgtgaaagttaatggaggcctgggaacagggtttatactaagtagtggaggagcgtatggttaagcccaaaggggcagaacaagaaagccacgggattgtatgaaatcaaacatgagtttgtggtgtagactgctgtatgcagttggaaaggacacgtgagagtgagctcaagtggcagcagaggcagtttggaataagctgcggcaagttgaagaagctgtgttggacgagattgccccgccttgatcagggtaccatgacataaaaggttaaagaacaggcaacacaatgagcacttaagtttttaacatgtggggaatagggcattttaaaggctggaaccagttcagaggaaacaagggtttgggtagaggtagaaaggtttaattaaccctggagatctgcaaatggagggaggggtgaaggaggaatcttaagacggagggagaagagccaaggacaaggtcaggttgaatgagtaggaggtgttcacacatcctcttgtgtgctaggtagtggcgtgcatctgatctgagaggcagtaaagcagtgatgaagacagtgcagcagaacattgaagtcctgattgcagcagtgactctgcaaccttggataaattatttcaatctttattttgtaaaacggagataacggcctataggattgttaagactgaatattttaaaagagcttagaatggtgcctgacaaatgagaaacaataaatactgattattggccataaagtggtattaaaactggatctcttttcttccatggcactactctcattttgaagtttatgaacggtacgacagtgtattgtaaattccctttagtttgttacagtagccaattgaaaatgtatatcccaaaatttaaaaaaaaaagtactagcagcaataaaattgcactagttttatctggtacatacaaaaacagccatttaaaatctgatgattctgtggaattggtgtccctgttagcaatggcagagaccagcctggagcctagatctggtgcttcttctgtgctgtggtttaccccaaacctttaggttgtttattcattcagattagatagactggagccataaagttaatttgcacctagctttttggagaatagccatgattaactgctattcgtggtgggggtgggggggaaccctatgatttactatgcagatgaagagggtaggaactaaataaaggactttgtaagccaaa

SEQ ID NO: 319385 - DNA, 728 bp, Homo sapiens
  misc_feature (631)..(631): n is a, c, g, or t
tcgtgtaataaactctaaaataataccccagtcccccagcgacatccggccattatggccgaggagtgctcatgctcgctgcaggggtcggaggtcagggcgagcgtctcgcaggccgtaggaggaagatggcggtggagtcgcgcgttacccaggaggaaattaagaaggagccagagaaaccgatcgaccgcgagaagacatgcccactgttgctacgggtcttcaccaccaataacggccgccaccaccgaatggacgagttctcccggggaaatgtaccgtccagcgagttgcagatctacacttggatggatgcaactttgaaagaactgacaagcttagtaaaagaagtctacccagaagctagaaagaagggcactcacttcaattttgcaatcgtttttacagatgttaaaagacctggctatcgagttaaggagattggcagcaccatgtctggcagaaaggggactgatgattccatgaccctgcagtcgcagaagttccagataggagattacttggacatagcaattacccctccaaatcgggcaccacctccttcagggcgcatgagaccatattaaattctatttactaagcttgtcagttctttcaaagttgcatncatccaagtgtagatctgcaactcgctggacggtacatttccccgggagaactcgtccattcggtggtggcggccgttattggtggtgaaggtcgac

SEQ ID NO: 319386 - DNA, 1096 bp, Homo sapiens
  misc_feature (17)..(17): n is a, c, g, or t
tccccgtgtctatcgantgccacgtgagagtgagctcaagtggcagcagaggcagtttggaataagctgcggcaagttgaagaagctgtgttggacgagattgccccgccttgatcagggtaccatgacataaaaggttaaagaacaggcaacacaatgagcacttaagtttttaacatgtggggaatagggcattttaaaggctggaaccagttcagaggaaacaagggtttgggtagaggtagaaaggtttaattaaccctggagatctgcaaatggagggaggggtgaaggaggaatcttaagacggagggagaagagccaaggacaaggtcaggttgaatgagtaggaggtgttcacacatcctcttgtgtgctaggtagtggcgtgcatctgatctgagaggcagtaaagcagtgatgaagacagtgcagcagaacattgaagtcctgattgcagcagtgactctgcaaccttggataaattatttcaatctttattttgtaaaacggagataacggcctataggattgttaagactgaatattttaaaagagcttagaatggtgcctgacaaatgagaaacaataaatactgattattggccataaagtggtattaaaactggatctcttttcttccatggcactactctcattttgaagtttatgaacggtacgacagtgtattgtaaattccctttagtttgttacagtagccaattgaaaatgtatatcccaaaatttaaaaaaaaaagtactagcagcaataaaattgcactagttttatctggtacatacaaaaacagccatttaaaatctgatgattctgtggaattggtgtccctgttagcaatggcagagaccagcctggagcctagatctggtgcttcttctgtgctgtggtttaccccaaacctttaggttgtttattcattcagattagatagactggagccataaagttaatttgcacctagctttttggagaatagccatgattaactgctattcgtggtgggggtgggggggaaccctatgatttactatgcagatgaagagggtaggaactaaataaaggactttgtaagccaaa

SEQ ID NO: 319387 - DNA, 796 bp, Homo sapiens
tcgtgtaataaactctaaaataataccccagtcccccagcgacatccggccattatggccgaggagtgctcatgctcgctgcaggggtcggaggtcagggcgagcgtctcgcaggccgtaggaggaagatggcggtggagtcgcgcgttacccaggaggaaattaagaaggagccagagaaaccgatcgaccgcgagaagacatgcccactgttgctacgggtcttcaccaccaataacggccgccaccaccgaatggacgagttctcccggggaaatgtaccgtccagcgagttgcagatctacacttgagtcttgctctgtcatccaggctggagtgcagtggcgcgatctcggctcactgcaacctctgcctcccaggtataagcgattctcctgcctcagcctcctgagtagctgggattacaggcgtgcaccaaacttcctttcatgcacacaattacttaaaatgatgtataaaattgtattccagctgtgtataaggatggatgcaactttgaaagaactgacaagcttagtaaaagaagtctacccagaagctagaaagaagggcactcacttcaattttgcaatcgtttttacagatgttaaaagacctggctatcgagttaaggagattggcagcaccatgtctggcagaaaggggactgatgattccatgaccctgcagtcgcagaagttccagataggagattacttggacatagcaattacccctccaaatcgggcaccacctccttcagggcgcatgagaccatattaaattctatttacta

SEQ ID NO: 319388 - DNA, 1068 bp, Homo sapiens
tcgtgtaataaactctaaaataataccccagtcccccagcgacatccggccattatggccgaggagtgctcatgctcgctgcaggggtcggaggtcagggcgagcgtctcgcaggccgtaggaggaagatggcggtggagtcgcgcgttacccaggaggaaattaagaaggagccagagaaaccgatcgaccgcgagaagacatgcccactgttgctacgggtcttcaccaccaataacggccgccaccaccgaatggacgagttctcccggggaaatgtaccgtccagcgagttgcagatctacacttggtgaggagggcggggtggcctcagggacccgggccgggaacctggaacaacagttaattgcctttgccagtgtagagttattctccctgatttcaatttcatttctccacttggggccttcggactcagctttcaggaagttagaagtttttgttgttaggtgaaaggagatttgcccgtattgtaacgcttttgtgattaatgttgcaacttttgggcggttaagaatggacagacccaagattgctgtcactgttatggctgctaggtacaaaagtgataggtagataaatatgttgtagtatctgccctaaagggactcatagtcaaataaattgcactaggacaacatggtaagggagagtgatgctgtcgagtggtatttgttattctcaaagagcatttccacataatattaagccttaggtaccaaagcaccaaaagtgaaaaataaactaccaaaacccgagttatttcttctctaagggttattggaaaagcttttgatatgtgtttagtgaagatggttcctgaatgtttatctcttgggtgtacctccctacaaactactgtgggcttgtctttagcgctgcacataactccttggattgacaccataatggctttttagtataagtaaaaggtgtgtaattgaaaaatatgtgtatatactctactctgtctcaaaatatatatgtgtgtgcctatataacaaaatttgccgtgttaaccatttatttttattttttgaatctcac

SEQ ID NO: 319389 - DNA, 994 bp, Homo sapiens
tcgtgtaataaactctaaaataataccccagtcccccagcgacatccggccattatggccgaggagtgctcatgctcgctgcaggggtcggaggtcagggcgagcgtctcgcaggccgtaggaggaagatggcggtggagtcgcgcgttacccaggaggaaattaagaaggagccagagaaaccgatcgaccgcgagaagacatgcccactgttgctacgggtcttcaccaccaataacggccgccaccaccgaatggacgagttctccccgggaacctggaacaacagttaattgcctttgccagtgtagagttattctccctgatttcaatttcatttctccacttggggccttcggactcagctttcaggaagttagaagtttttgttgttaggtgaaaggagatttgcccgtattgtaacgcttttgtgattaatgttgcaacttttgggcggttaagaatggacagacccaagattgctgtcactgttatggctgctaggtacaaaagtgataggtagataaatatgttgtagtatctgccctaaagggactcatagtcaaataaattgcactaggacaacatggtaagggagagtgatgctgtcgagtggtatttgttattctcaaagagcatttccacataatattaagccttaggtaccaaagcaccaaaagtgaaaaataaactaccaaaacccgagttatttcttctctaagggttattggaaaagcttttgatatgtgtttagtgaagatggttcctgaatgtttatctcttgggtgtacctccctacaaactactgtgggcttgtctttagcgctgcacataactccttggattgacaccataatggctttttagtataagtaaaaggtgtgtaattgaaaaatatgtgtatatactctactctgtctcaaaatatatatgtgtgtgcctatataacaaaatttgccgtgttaaccatttatttttattttttgaatctcac

SEQ ID NO: 319390 - DNA, 665 bp, Homo sapiens
tcgtgtaataaactctaaaataataccccagtcccccagcgacatccggccattatggccgaggagtgctcatgctcgctgcaggggtcggaggtcagggcgagcgtctcgcaggccgtaggaggaagatggcggtggagtcgcgcgttacccaggaggaaattaagaaggagccagagaaaccgatcgaccgcgagaagacatgcccactgttgctacgggtcttcaccaccaataacggccgccaccaccgaatggacgagttctcccggggaaatgtaccgtccagcgagttgcagatctacacttggatggatgcaactttgaaagaactgacaagcttagtaaaagaagtctacccagaagctagaaagaagggcactcacttcaattttgcaatcgtttttacagatgttaaaagacctggctatcgagttaaggagattggcagcaccatgtctggcagaaaggggactgatgattccatgaccctgcagtcgcagaagttccagataggagattacttggacatagcaattacccctccaaatcgggcaccacctccttcagggcgcatgagaccatattaaattctatttactatttgttgaatttatttttccgtcagttatgtaaaataaacatactcttcttcctcccctgat

SEQ ID NO: 319391 - DNA, 425 bp, Homo sapiens
  misc_feature (18)..(20): n is a, c, g, or t
  misc_feature (28)..(28): n is a, c, g, or t
  misc_feature (34)..(34): n is a, c, g, or t
  misc_feature (69)..(69): n is a, c, g, or t
gacgctgctctagagatnnncaattcgncccggncaatgtaccgtccagcgagttgcagatctacactnggatggatgcaactttgaaagaactgacaagcttagtaaaagaagtctacccagaagctagaaagaagggcactcacttcaattttgcaatcgtttttacagatgttaaaagacctggctatcgagttaaggagattggcagcaccatgtctggcagaaaggggactgatgattccatgaccctgcagtcgcagaagttccagataggagattacttggacatagcaattacccctccaaatcgggcaccacctccttcagggcgcatgagaccatattaaattctatttactatttgttgaatttatttttccgtcagttatgtaaaataaacatactcttcttcctcccctgat

SEQ ID NO: 319392 - DNA, 2086 bp, Homo sapiens
tcgtgtaataaactctaaaataataccccagtcccccagcgacatccggccattatggccgaggagtgctcatgctcgctgcaggggtcggaggtcagggcgagcgtctcgcaggccgtaggaggaagatggcggtggagtcgcgcgttacccaggaggaaattaagaaggagccagagaaaccgatcgaccgcgagaagacatgcccactgttgctacgggtcttcaccaccaataacggccgccaccaccgaatggacgagttctcccggggaaatgtaccgtccagcgagttgcagatctacacttggatggatgcaactttgaaagaactgacaagcttagtaaaagaagtctacccagaagctagaaagaagggcactcacttcaattttgcaatcgtttttacagatgttaaaagacctggctatcgagttaaggagattggcagcaccatgtctggcagaaaggggactgatgattccatgaccctgcagtcgcagaagttccagataggagattacttggacatagcaattacccctccaaatcgggcaccacctccttcagggcgcatgagaccatattaaattctatttactatttgttgaatttatttttccgtcagttatgtaaaataaacatactcttcttcctcccctgattattgccattaagcctttaaattctaaacaaattataatgcatcatctatttaggagttagatttggatgtgctattgtatgattacgaatagtctgtatgtttcaagcccttctgtaaaatatgaagaaaagtgctcttagcattctgtgtaaaactgtactgttaaatatatgtgtgtaatcagcctgagtgtgaaagttaatggaggcctgggaacagggtttatactaagtagtggaggagcgtatggttaagcccaaaggggcagaacaagaaagccacgggattgtatgaaatcaaacatgagtttgtggtgtagactgctgtatgcagttggaaaggacacgtgagagtgagctcaagtggcagcagaggcagtttggaataagctgcggcaagttgaagaagctgtgttggacgagattgccccgccttgatcagggtaccatgacataaaaggttaaagaacaggcaacacaatgagcacttaagtttttaacatgtggggaatagggcattttaaaggctggaaccagttcagaggaaacaagggtttgggtagaggtagaaaggtttaattaaccctggagatctgcaaatggagggaggggtgaaggaggaatcttaagacggagggagaagagccaaggacaaggtcaggttgaatgagtaggaggtgttcacacatcctcttgtgtgctaggtagtggcgtgcatctgatctgagaggcagtaaagcagtgatgaagacagtgcagcagaacattgaagtcctgattgcagcagtgactctgcaaccttggataaattatttcaatctttattttgtaaaacggagataacggcctataggattgttaagactgaatattttaaaagagcttagaatggtgcctgacaaatgagaaacaataaatactgattattggccataaagtggtattaaaactggatctcttttcttccatggcactactctcattttgaagtttatgaacggtacgacagtgtattgtaaattccctttagtttgttacagtagccaattgaaaatgtatatcccaaaatttaaaaaaaaaagtactagcagcaataaaattgcactagttttatctggtacatacaaaaacagccatttaaaatctgatgattctgtggaattggtgtccctgttagcaatggcagagaccagcctggagcctagatctggtgcttcttctgtgctgtggtttaccccaaacctttaggttgtttattcattcagattagatagactggagccataaagttaatttgcacctagctttttggagaatagccatgattaactgctattcgtggtgggggtgggggggaaccctatgatttactatgcagatgaagagggtaggaactaaataaaggactttgtaagccaaa

SEQ ID NO: 319393 - DNA, 2270 bp, Homo sapiens
tcgtgtaataaactctaaaataataccccagtcccccagcgacatccggccattatggccgaggagtgctcatgctcgctgcaggggtcggaggtcagggcgagcgtctcgcaggccgtaggaggaagatggcggtggagtcgcgcgttacccaggaggaaattaagaaggagccagagaaaccgatcgaccgcgagaagacatgcccactgttgctacgggtcttcaccaccaataacggccgccaccaccgaatggacgagttctcccggggaaatgtaccgtccagcgagttgcagatctacacttggatggatgcaactttgaaagaactgacaagcttagtaaaagaagtctacccagaagctagaaagaagggcactcacttcaattttgcaatcgtttttacagatgttaaaagacctggctatcgagttaaggagattggcagcaccatgtctggcagaaaggggactgatgattccatgaccctgcagtcgcagaagttccagataggagattacttggacatagcaattacccctccaaatcgggcaccacctccttcagggcgcatgagaccatattaaattctatttactatttgttgaatttatttttccgtcagttatgtaaaataaacatactcttcttcctcccctgattattgccattaagcctttaaattctaaacaaattataatgcatcatctatttaggagttagatttggatgtgctattgtatgattacgaatagtctgtatgtttcaagcccttctgtaaaatatgaagaaaagtgctcttagcattctgtgtaaaactgtactgttaaatatatgtgtgtaatcagcctgagtgtgaaagttaatggaggcctgggaacagggtttatactaagtagtggaggagcgtatggttaagcccaaaggggcagaacaagaaagccacgggattgtatgaaatcaaacatgagtttgtggtgtagactgctgtatgcagttggaaaggacacgtgagagtgagctcaagtggcagcagaggcagtttggaataagctgcggcaagttgaagaagctgtgttggacgagattgccccgccttgatcagggtaccatgacataaaaggttaaagaacaggcaacacaatgagcacttaagtttttaacatgtggggaatagggcattttaaaggctggaaccagttcagaggaaacaagggtttgggtagaggtagaaaggtttaattaaccctggagatctgcaaatggagggaggggtgaaggaggaatcttaagacggagggagaagagccaaggacaaggtcaggttgaatgagtaggaggtgttcacacatcctcttgtgtgctaggtagtggcgtgcatctgatctgagaggcagtaaagcagtgatgaagacagtgcagcagaacattgaagtcctgattgcagcagtgactctgcaaccttggataaattatttcaatctttattttgtaaaacggagataacggcctataggattgttaagactgaatattttaaaagagcttagaatggtgcctgacaaatgagaaacaataaatactgattattggccataaagtggtattaaaactggatctcttttcttccatggcactactctcattttgaagtttatgaacggtacgacagtgtattgtaaattccctttagtttgttacagtagccaattgaaaatgtatatcccaaaatttaaaaaaaaaagtactagcagcaataaaattgcactagttttatctggtacatacaaaaacagccatttaaaatctgatgattctgtggaattggtgtccctgttagcaatggcagagaccagcctggagcctagatctggtgcttcttctgtgctgtggtttaccccaaacctttaggttgtttattcattcagattagatagactggagccataaagttaatttgcacctagctttttggagaatagccatgattaactgctattcgtggtgggggtgggggggaaccctatgatttactatgcagatgaagagggtaggaactaaataaaggactttgtaagccaaaaaaaaaaaaaaaaaaaaaaaaaaaaaaaaaaaaaaaaaaaagaaaaaaaaaaaaaacagacaaaagcataacccaaagaaagaaaaaaaaacagagagaaacacaaaacatcaaaacgcacacacgactctcagaaagaacacacaaacacagggaggaaggcgcagcaccaatacaggcgagg

SEQ ID NO: 319394 - DNA, 1053 bp, Homo sapiens
tcgtgtaataaactctaaaataataccccagtcccccagcgacatccggccattatggccgaggagtgctcatgctcgctgcaggggtcggaggtcagggcgagcgtctcgcaggccgtaggaggaagatggcggtggagtcgcgcgttacccaggaggaaattaagaaggagccagagaaaccgatcgaccgcgagaagacatgcccactgttgctacgggtcttcaccaccaataacggccgccaccaccgaatggacgagttctcccggggaaatgtaccgtccagcgagttgcagatctacacttggatggatgcaactttgaaagaactgacaagcttagtaaaagaagtctacccagaagctagaaagaagggcactcacttcaattttgcaatcgtttttacagatgttaaaagacctggctatcgagttaaggagattggcagcaccatgtctggcagaaaggggactgatgattccatgaccctgcagtcgcagaagttccagataggagattacttggacatagcaattacccctccaaatcgggcaccacctccttcagggcgcatgagaccatattaaattctatttactatttgttgaatttatttttccgtcagttatgtaaaataaacatactcttcttcctcccctgattattgccattaagcctttaaattctaaacaaattataatgcatcatctatttaggagttagatttggatgtgctattgtatgattacgaatagtctgtatgtttcaagcccttctgtaaaatatgaagaaaagtgctcttagcattctgtgtaaaactgtactgttaaatatatgtgtgtaatcagaaaaaaaaaaaaaaacttcaagtcgacggtatcgattagcttgatatcgaggtttttcttttttttcttggacttaaattacataccgttaagatacccattttaattaatttgactttttatgaccacttagaaaaccaccttcttaaggggtgcttctaggattaccatttggctccaggaaacttgctcaaggtccctc

SEQ ID NO: 319395 - DNA, 1110 bp, Homo sapiens
tcgtgtaataaactctaaaataataccccagtcccccagcgacatccggccattatggccgaggagtgctcatgctcgctgcaggggtcggaggtcagggcgagcgtctcgcaggccgtaggaggaagatggcggtggagtcgcgcgttacccaggaggaaattaagaaggagccagagaaaccgatcgaccgcgagaagacatgcccactgttgctacgggtcttcaccaccaataacggccgccaccaccgaatggacgagttctcccggggaaatgtaccgtccagcgagttgcagatctacacttggatggatgcaactttgaaagaactgacaagcttagtaaaagaagtctacccagaagctagaaagaagggcactcacttcaattttgcaatcgtttttacagatgttaaaagacctggctatcgagttaaggagattggcagcaccatgtctggcagaaaggggactgatgattccatgaccctgcagtcgcagaagttccagataggagattacttggacatagcaattacccctccaaatcgggcaccacctccttcagggcgcatgagaccatattaaattctatttactatttgttgaatttatttttccgtcagttatgtaaaataaacatactcttcttcctcccctgattattgccattaagcctttaaattctaaacaaattataatgcatcatctatttaggagttagatttggatgtgctattgtatgattacgaatagtctgtatgtttcaagcccttctgtaaaatatgaagaaaagtgctcttagcattctgtgtaaaactgtactgttaaatatatgtgtgtaatcagagcaaacccgagtcacaccggtgggaggtcaatgcccgtcttcccagactttaagatggtggatcactcatggggcccaaggtggaccttggactcaaaaccaagcccccagggacacgaggggtgacaatgagatgcggaaatgcagggctcaggccctgaataagggggcagcaggaagaaggacagggacacacattggggcaataacaggccggaaacacgacacgcaacaagaagcggacagcagcgagaagga

SEQ ID NO: 319396 - DNA, 1072 bp, Homo sapiens
  misc_feature (1072)..(1072): n is a, c, g, or t
tcgtgtaataaactctaaaataataccccagtcccccagcgacatccggccattatggccgaggagtgctcatgctcgctgcaggggtcggaggtcagggcgagcgtctcgcaggccgtaggaggaagatggcggtggagtcgcgcgttacccaggaggaaattaagaaggagccagagaaaccgatcgaccgcgagaagacatgcccactgttgctacgggtcttcaccaccaataacggccgccaccaccgaatggacgagttctcccggggaaatgtaccgtccagcgagttgcagatctacacttggatggatgcaactttgaaagaactgacaagcttagtaaaagaagtctacccagaagctagaaagaagggcactcacttcaattttgcaatcgtttttacagatgttaaaagacctggctatcgagttaaggagattggcagcaccatgtctggcagaaaggggactgatgattccatgaccctgcagtcgcagaagttccagataggagattacttggacatagcaattacccctccaaatcgggcaccacctccttcagggcgcatgagaccatattaaattctatttactatttgttgaatttatttttccgtcagttatgtaaaataaacatactcttcttcctcccctgataaaaaaaaaaaaaaaaaaaaaaaaaaaaaaaaaaaaaaaaagggggggggggggaaataatcaagggggggacaaggggcaaccacactttctgtgagcaaagcggcccagatgaggagtacaaacagaccagcagcagcgccgctgtcaaccaacgatgtgcagggacaagccctccttggcaacgtggggcgcaccccctatccgggcgcgacaatagcgcaccacaagacagatgccgctggataataaactgaggtgatgggtcacacgccatgtcgcgaaagttctctgttttgattaccgagacaataaacagcgcgcgatagtcaagagacagagagcacgtcagaagaaggacacgaatgagaatgagacaggcgcgccgctgctaacaacatgtcacn

SEQ ID NO: 319397 - DNA, 1107 bp, Homo sapiens
tcgtgtaataaactctaaaataataccccagtcccccagcgacatccggccattatggccgaggagtgctcatgctcgctgcaggggtcggaggtcagggcgagcgtctcgcaggccgtaggaggaagatggcggtggagtcgcgcgttacccaggaggaaattaagaaggagccagagaaaccgatcgaccgcgagaagacatgcccactgttgctacgggtcttcaccaccaataacggccgccaccaccgaatggacgagttctcccggggaaatgtaccgtccagcgagttgcagatctacacttggatggatgcaactttgaaagaactgacaagcttagtaaaagaagtctacccagaagctagaaagaagggcactcacttcaattttgcaatcgtttttacagatgttaaaagacctggctatcgagttaaggagattggcagcaccatgtctggcagaaaggggactgatgattccatgaccctgcagtcgcagaagttccagataggagattacttggacatagcaattacccctccaaatcgggcaccacctccttcagggcgcatgagaccatattaaattctatttactatttgttgaatttatttttccgtcagttatgtaaaataaacatactcttcttcctcccctgatccaacaatcttcagggaagcctcttttttttttttaaatatcccaatagaaaaaaaatggcgggcttttataaagaatgggtaaatcaaaaaaaataatattaatcagagattgtcctccaaatgaaatgcatggttggtagaaaataggaccctgggaaaatctcctaactctttctctcacagatatgtgtgactcagagaagacagcacgaaaagccctgctgcgcaaaagtgatgaacaaatttagtggccaaaatattccacactcaattggagtgacaaaaagccccatagtgaaatttctgattgtcaaacaaaaatttatctatattatccagagagaaaaccccccaattcagattcacatcatacttctccgtgtatgtccataaatgctgaaaagtaggggagaaatctctaaggccctgaagattgtggg

SEQ ID NO: 319398 - DNA, 498 bp, Homo sapiens
tcgtgtaataaactctaaaataataccccagtcccccagcgacatccggccattatggccgaggagtgctcatgctcgctgcaggggtcggaggtcagggcgagcgtctcgcaggccgtaggaggaagatggcggtggagtcgcgcgttacccaggaggaaattaagaaggagccagagaaaccgatcgaccgcgagaagacatgcccactgttgctacgggtcttcaccaccaataacggccgccaccaccgaatggacgagttctcccggggaaatgtaccgtccagcgagttgcagatctacacttggatggatgcaactttgaaagaactgacaagcttagtaaaagaagtctacccagaagctagaaagaagggcactcacttcaattttgcaatcgtttttacagatgttaaaagacctggctatcgagttaaggagattggcagctcgcccctgagttagcagctcgcccctgagttagcagctcgccgtt

SEQ ID NO: 319399 - DNA, 2118 bp, Homo sapiens
cgccctccggccgcggagctggaaaccgggctccgcgcgtccggggcggctggcggcgcgggcaggcaggcggggaggacaggctgggggcggcgaccgcgaggggccgcgcgcggagggcgcctggtgcagcatgggcggcccgcgggcttgggcgctgctctgcctcgggctcctgctcccgggaggcggcgctgcgtggagcatcggggcagctccgttctccggacgcaggaactggtgctcctatgtggtgacccgcaccatctcatgccatgtgcagaatggcacctaccttcagcgagtgctgcagaactgcccctggcccatgagctgtccggggagcagctacagaactgtggtgagacccacatacaaggtgatgtacaagatagtgaccgcccgtgagtggaggtgctgccctgggcactcaggagtgagctgcgaggaagttgcaggttcctctgcctccttggagcccatgtggtcgggcagtaccatgcggcggatggcgcttcggcccacagccttctcaggttgtctcaactgcagcaaagtgtcagagctgacagagcggctgaaggtgctggaggccaagatgaccatgctgactgtcatagagcagccagtacctccaacaccagctacccctgaggaccctgccccgctctggggtccccctcctgcccagggcagccccggagatggaggcctccaggaccaagtcggtgcttgggggcttcccgggcccaccggccccaagggagatgccggcagtcggggcccaatggggatgagaggcccaccaggtccacagggccccccagggagccctggccgggctggagctgtgggcacccctggagagaggggacctcctgggccaccagggcctcctggcccccctgggcccccagcccctgttgggccaccccatgcccggatctcccagcatggagacccattgctgtccaacaccttcactgagaccaacaaccactggccccagggacccactgggcctccaggccctccagggcccatgggtccccctgggcctcctggccccacaggtgtccctgggagtcctggtcacataggacccccaggccccactggacccaaaggaatctctggccacccaggagagaagggcgagagaggactgcgtggggagcctggcccccaaggctctgctgggcagcggggggaacctggccctaagggagaccctggtgagaagagccactggggggaggggttgcaccagctacgcgaggctttgaagattttagctgagagggttttaatcttggaaacaatgattgggctctatgaaccagagctggggtctggggcgggccctgccggcacaggcacccccagcctccttcggggcaagaggggcggacatgcaaccaactaccggatcgtggcccccaggagccgggacgagagaggctgagggtggtggcggcccctgaggcagaccaggccaggcttcccctcctacctggactcggccagctgcctccagggaccgcccgtccatatttattaatgtcctcagggtcccttctgccatctaggccttaggggtaagcaggtctcagtcctggcaccatgcacatgtctgaggctgagcaagggctgagaggagaggcttgggcctcagtttccctctgtgaagtggggggaggcaggccttcaaggagggatagaggtacaaggcttcgtctcatctgctgtctgagcatccaggcccaaaggcactgagggagtcaggagctggggctcggcacatgcagagatgacagggcagggggcagtcttcctccccctccccgaccaaacctcggggagccctcctgtgcccctccctccttgttgtccagtgctgggttccccaccccgaggtcaggctgcccaatcctctgactggatcaccgggggcttcttgcctcagttcttccctctgagcccccaggccctcccgcatctcaggttggggatggggacatggagaggaaggggccgcctactcctgcaaatgcttgtgacagatgccaggaggtagatgtgtgctggccaataaaggcccctacctgattccccgca

SEQ ID NO: 319400 - DNA, 2175 bp, Homo sapiens
cgccctccggccgcggagctggaaaccgggctccgcgcgtccggggcggctggcggcgcgggcaggcaggcggggaggacaggctgggggcggcgaccgcgaggggccgcgcgcggagggcgcctggtgcagcatgggcggcccgcgggcttgggcgctgctctgcctcgggctcctgctcccgggaggcggcgctgcgtggagcatcggggcagctccgttctccggacgcaggaactggtgctcctatgtggtgacccgcaccatctcatgccatgtgcagaatggcacctaccttcagcgagtgctgcagaactgcccctggcccatgagctgtccggggagcagctacagaactgtggtgagacccacatacaaggtgatgtacaagatagtgaccgcccgtgagtggaggtgctgccctgggcactcaggagtgagctgcgaggaagttgcaggttcctctgcctccttggagcccatgtggtcgggcagtaccatgcggcggatggcgcttcggcccacagccttctcaggttgtctcaactgcagcaaagtgtcagagctgacagagcggctgaaggtgctggaggccaagatgaccatgctgactgtcatagagcagccagtacctccaacaccagctacccctgaggaccctgccccgctctggggtccccctcctgcccagggcagccccggagatggaggcctccaggggctgccaggagccatagagagtgtgagggtcccgctgcttccccgaaatgaccaagtcggtgcttgggggcttcccgggcccaccggccccaagggagatgccggcagtcggggcccaatggggatgagaggcccaccaggtccacagggccccccagggagccctggccgggctggagctgtgggcacccctggagagaggggacctcctgggccaccagggcctcctggcccccctgggcccccagcccctgttgggccaccccatgcccggatctcccagcatggagacccattgctgtccaacaccttcactgagaccaacaaccactggccccagggacccactgggcctccaggccctccagggcccatgggtccccctgggcctcctggccccacaggtgtccctgggagtcctggtcacataggacccccaggccccactggacccaaaggaatctctggccacccaggagagaagggcgagagaggactgcgtggggagcctggcccccaaggctctgctgggcagcggggggaacctggccctaagggagaccctggtgagaagagccactgggctcctagcttacagagcttcctgcagcagcaggctcagctggagctcctggccagacgggtcaccctcctggaagccatcatctggccagaaccagagctggggtctggggcgggccctgccggcacaggcacccccagcctccttcggggcaagaggggcggacatgcaaccaactaccggatcgtggcccccaggagccgggacgagagaggctgagggtggtggcggcccctgaggcagaccaggccaggcttcccctcctacctggactcggccagctgcctccagggaccgcccgtccatatttattaatgtcctcagggtcccttctgccatctaggccttaggggtaagcaggtctcagtcctggcaccatgcacatgtctgaggctgagcaagggctgagaggagaggcttgggcctcagtttccctctgtgaagtggggggaggcaggccttcaaggagggatagaggtacaaggcttcgtctcatctgctgtctgagcatccaggcccaaaggcactgagggagtcaggagctggggctcggcacatgcagagatgacagggcagggggcagtcttcctccccctccccgaccaaacctcggggagccctcctgtgcccctccctccttgttgtccagtgctgggttccccaccccgaggtcaggctgcccaatcctctgactggatcaccgggggcttcttgcctcagttcttccctctgagcccccaggccctcccgcatctcaggttggggatggggacatggagaggaaggggccgcctactcctgcaaatgcttgtgacagatgccaggaggtagatgtgtgctggccaataaaggcccctacctgattccccgca

SEQ ID NO: 319401 - DNA, 2040 bp, Homo sapiens
cgccctccggccgcggagctggaaaccgggctccgcgcgtccggggcggctggcggcgcgggcaggcaggcggggaggacaggctgggggcggcgaccgcgaggggccgcgcgcggagggcgcctggtgcagcatgggcggcccgcgggcttgggcgctgctctgcctcgggctcctgctcccgggaggcggcgctgcgtggagcatcggggcagctccgttctccggacgcaggaactggtgctcctatgtggtgacccgcaccatctcatgccatgtgcagaatggcacctaccttcagcgagtgctgcagaactgcccctggcccatgagctgtccggggagcagctacagaactgtggtgagacccacatacaaggtgatgtacaagatagtgaccgcccgtgagtggaggtgctgccctgggcactcaggagtgagctgcgaggaaggttgtctcaactgcagcaaagtgtcagagctgacagagcggctgaaggtgctggaggccaagatgaccatgctgactgtcatagagcagccagtacctccaacaccagctacccctgaggaccctgccccgctctggggtccccctcctgcccagggcagccccggagatggaggcctccaggaccaagtcggtgcttgggggcttcccgggcccaccggccccaagggagatgccggcagtcggggcccaatggggatgagaggcccaccaggtccacagggccccccagggagccctggccgggctggagctgtgggcacccctggagagaggggacctcctgggccaccagggcctcctggcccccctgggcccccagcccctgttgggccaccccatgcccggatctcccagcatggagacccattgctgtccaacaccttcactgagaccaacaaccactggccccagggacccactgggcctccaggccctccagggcccatgggtccccctgggcctcctggccccacaggtgtccctgggagtcctggtcacataggacccccaggccccactggacccaaaggaatctctggccacccaggagagaagggcgagagaggactgcgtggggagcctggcccccaaggctctgctgggcagcggggggaacctggccctaagggagaccctggtgagaagagccactgggctcctagcttacagagcttcctgcagcagcaggctcagctggagctcctggccagacgggtcaccctcctggaagccatcatctggccagaaccagagctggggtctggggcgggccctgccggcacaggcacccccagcctccttcggggcaagaggggcggacatgcaaccaactaccggatcgtggcccccaggagccgggacgagagaggctgagggtggtggcggcccctgaggcagaccaggccaggcttcccctcctacctggactcggccagctgcctccagggaccgcccgtccatatttattaatgtcctcagggtcccttctgccatctaggccttaggggtaagcaggtctcagtcctggcaccatgcacatgtctgaggctgagcaagggctgagaggagaggcttgggcctcagtttccctctgtgaagtggggggaggcaggccttcaaggagggatagaggtacaaggcttcgtctcatctgctgtctgagcatccaggcccaaaggcactgagggagtcaggagctggggctcggcacatgcagagatgacagggcagggggcagtcttcctccccctccccgaccaaacctcggggagccctcctgtgcccctccctccttgttgtccagtgctgggttccccaccccgaggtcaggctgcccaatcctctgactggatcaccgggggcttcttgcctcagttcttccctctgagcccccaggccctcccgcatctcaggttggggatggggacatggagaggaaggggccgcctactcctgcaaatgcttgtgacagatgccaggaggtagatgtgtgctggccaataaaggcccctacctgattccccgca

SEQ ID NO: 319402 - DNA, 831 bp, Homo sapiens
cgccctccggccgcggagctggaaaccgggctccgcgcgtccggggcggctggcggcgcgggcaggcaggcggggaggacaggctgggggcggcgaccgcgaggggccgcgcgcggagggcgcctggtgcagcatgggcggcccgcgggcttgggcgctgctctgcctcgggctcctgctcccgggaggcggcgctgcgtggagcatcggggcagctccgttctccggacgcaggaactggtgctcctatgtggtgacccgcaccatctcatgccatgtgcagaatggcacctaccttcagcgagtgctgcagaactgcccctggcccatgagctgtccggggagcagctacagaactgtggtgagacccacatacaaggtgatgtacaagatagtgaccgcccgtgagtggaggtgctgccctgggcactcaggagtgagctgcgaggaagttgcaggttcctctgcctccttggagcccatgtggtcgggcagtaccatgcggcggatggcgcttcggcccacagccttctcaggttgtctcaactgcagcaaagtgtcagagctgacagagcggctgaaggtgctggaggccaagatgaccatgctgactgtcatagagcagccagtacctccaacaccagctacccctgaggaccctgccccgctctggggtccccctcctgcccagggcagccccggagatggaggcctccaggaccaagtcggtgcttgggggcttcccgggcccaccggccccaagggagatgccggcagtcggggcccaatggggatgagaggcccaccaggtgagtgcccgcaatgctgccc

SEQ ID NO: 319403 - DNA, 467 bp, Homo sapiens
aaaaagaatgtgaagtaaataagcatataggtggccaagagatatagtcatgcaggtgttgggagagcaactggtgctgggcgacagacattagaggacaggagggctcccagcagcttctgggactgccgttctgcccctgaagattggctccccctgccttcagcgcagcaggatttgcggccttgtcagagagcagccagctgggatccaacgggaccttctgggaggtcctgcaggggttgcttccttccgtctgccttgttgtccccctcctgtcctcacctggtcttgttctggctgtccatggaccctgggctgtggcaggtagtgtggggctgcaggtgcatgtcccgggtggggcatgggccaccgacgggctttgcagggtcccctcccctgcccccttcacggctgcatctgtctctttcctccacagggggaggggttgcaccagctacgcgagg

SEQ ID NO: 319404 - DNA, 150 bp, Homo sapiens
gaactggtgctcctatgtggtgacccgcaccatctcatgccatgtgcagaatggcacctaccttcagcgagtgctgcagaactgcccctggcccatgagctgtccggggagcaggtaaatgaggtggagaaggaactgatggcattccag

SEQ ID NO: 319405 - DNA, 2124 bp, Homo sapiens
cgccctccggccgcggagctggaaaccgggctccgcgcgtccggggcggctggcggcgcgggcaggcaggcggggaggacaggctgggggcggcgaccgcgaggggccgcgcgcggagggcgcctggtgcagcatgggcggcccgcgggcttgggcgctgctctgcctcgggctcctgctcccgggaggcggcgctgcgtggagcatcggggcagctccgttctccggacgcaggaactggtgctcctatgtggtgacccgcaccatctcatgccatgtgcagaatggcacctaccttcagcgagtgctgcagaactgcccctggcccatgagctgtccggggagcagctacagaactgtggtgagacccacatacaaggtgatgtacaagatagtgaccgcccgtgagtggaggtgctgccctgggcactcaggagtgagctgcgaggaagttgcaggttcctctgcctccttggagcccatgtggtcgggcagtaccatgcggcggatggcgcttcggcccacagccttctcaggttgtctcaactgcagcaaagtgtcagagctgacagagcggctgaaggtgctggaggccaagatgaccatgctgactgtcatagagcagccagtacctccaacaccagctacccctgaggaccctgccccgctctggggtccccctcctgcccagggcagccccggagatggaggcctccaggaccaagtcggtgcttgggggcttcccgggcccaccggccccaagggagatgccggcagtcggggcccaatggggatgagaggcccaccaggtccacagggccccccagggagccctggccgggctggagctgtgggcacccctggagagaggggacctcctgggccaccagggcctcctggcccccctgggcccccagcccctgttgggccaccccatgcccggatctcccagcatggagacccattgctgtccaacaccttcactgagaccaacaaccactggccccagggacccactgggcctccaggccctccagggcccatgggtccccctgggcctcctggccccacaggtgtccctgggagtcctggtcacataggacccccaggccccactggacccaaaggaatctctggccacccaggagagaagggcgagagaggactgcgtggggagcctggcccccaaggctctgctgggcagcggggggaacctggccctaagggagaccctggtgagaagagccactgggctcctagcttacagagcttcctgcagcagcaggctcagctggagctcctggccagacgggtcaccctcctggaagccatcatctggccagaaccagagctggggtctggggcgggccctgccggcacaggcacccccagcctccttcggggcaagaggggcggacatgcaaccaactaccggatcgtggcccccaggagccgggacgagagaggctgagggtggtggcggcccctgaggcagaccaggccaggcttcccctcctacctggactcggccagctgcctccagggaccgcccgtccatatttattaatgtcctcagggtcccttctgccatctaggccttaggggtaagcaggtctcagtcctggcaccatgcacatgtctgaggctgagcaagggctgagaggagaggcttgggcctcagtttccctctgtgaagtggggggaggcaggccttcaaggagggatagaggtacaaggcttcgtctcatctgctgtctgagcatccaggcccaaaggcactgagggagtcaggagctggggctcggcacatgcagagatgacagggcagggggcagtcttcctccccctccccgaccaaacctcggggagccctcctgtgcccctccctccttgttgtccagtgctgggttccccaccccgaggtcaggctgcccaatcctctgactggatcaccgggggcttcttgcctcagttcttccctctgagcccccaggccctcccgcatctcaggttggggatggggacatggagaggaaggggccgcctactcctgcaaatgcttgtgacagatgccaggaggtagatgtgtgctggccaataaaggcccctacctgattccccgca

SEQ ID NO: 319406 - DNA, 2192 bp, Homo sapiens
cgccctccggccgcggagctggaaaccgggctccgcgcgtccggggcggctggcggcgcgggcaggcaggcggggaggacaggctgggggcggcgaccgcgaggggccgcgcgcggagggcgcctggtgcagcatgggcggcccgcgggcttgggcgctgctctgcctcgggctcctgctcccgggaggcggcgctgcgtggagcatcggggcagctccgttctccggacgcaggaactggtgctcctatgtggtgacccgcaccatctcatgccatgtgcagaatggcacctaccttcagcgagtgctgcagaactgcccctggcccatgagctgtccggggagcagctacagaactgtggtgagacccacatacaaggtgatgtacaagatagtgaccgcccgtgagtggaggtgctgccctgggcactcaggagtgagctgcgaggaagttgcaggttcctctgcctccttggagcccatgtggtcgggcagtaccatgcggcggatggcgcttcggcccacagccttctcagagactgaagggttctgaggggaagcctaggacccttggccctggccccagcttcctccctccccgcaggttgtctcaactgcagcaaagtgtcagagctgacagagcggctgaaggtgctggaggccaagatgaccatgctgactgtcatagagcagccagtacctccaacaccagctacccctgaggaccctgccccgctctggggtccccctcctgcccagggcagccccggagatggaggcctccaggaccaagtcggtgcttgggggcttcccgggcccaccggccccaagggagatgccggcagtcggggcccaatggggatgagaggcccaccaggtccacagggccccccagggagccctggccgggctggagctgtgggcacccctggagagaggggacctcctgggccaccagggcctcctggcccccctgggcccccagcccctgttgggccaccccatgcccggatctcccagcatggagacccattgctgtccaacaccttcactgagaccaacaaccactggccccagggacccactgggcctccaggccctccagggcccatgggtccccctgggcctcctggccccacaggtgtccctgggagtcctggtcacataggacccccaggccccactggacccaaaggaatctctggccacccaggagagaagggcgagagaggactgcgtggggagcctggcccccaaggctctgctgggcagcggggggaacctggccctaagggagaccctggtgagaagagccactgggctcctagcttacagagcttcctgcagcagcaggctcagctggagctcctggccagacgggtcaccctcctggaagccatcatctggccagaaccagagctggggtctggggcgggccctgccggcacaggcacccccagcctccttcggggcaagaggggcggacatgcaaccaactaccggatcgtggcccccaggagccgggacgagagaggctgagggtggtggcggcccctgaggcagaccaggccaggcttcccctcctacctggactcggccagctgcctccagggaccgcccgtccatatttattaatgtcctcagggtcccttctgccatctaggccttaggggtaagcaggtctcagtcctggcaccatgcacatgtctgaggctgagcaagggctgagaggagaggcttgggcctcagtttccctctgtgaagtggggggaggcaggccttcaaggagggatagaggtacaaggcttcgtctcatctgctgtctgagcatccaggcccaaaggcactgagggagtcaggagctggggctcggcacatgcagagatgacagggcagggggcagtcttcctccccctccccgaccaaacctcggggagccctcctgtgcccctccctccttgttgtccagtgctgggttccccaccccgaggtcaggctgcccaatcctctgactggatcaccgggggcttcttgcctcagttcttccctctgagcccccaggccctcccgcatctcaggttggggatggggacatggagaggaaggggccgcctactcctgcaaatgcttgtgacagatgccaggaggtagatgtgtgctggccaataaaggcccctacctgattccccgca

SEQ ID NO: 319407 - DNA, 1760 bp, Homo sapiens
cgccctccggccgcggagctggaaaccgggctccgcgcgtccggggcggctggcggcgcgggcaggcaggcggggaggacaggctgggggcggcgaccgcgaggggccgcgcgcggagggcgcctggtgcagcatgggcggcccgcgggcttgggcgctgctctgcctcgggctcctgctcccgggaggcggcgctgcgtggagcatcggggcagctccgttctccggacgcagatgaccatgctgactgtcatagagcagccagtacctccaacaccagctacccctgaggaccctgccccgctctggggtccccctcctgcccagggcagccccggagatggaggcctccaggaccaagtcggtgcttgggggcttcccgggcccaccggccccaagggagatgccggcagtcggggcccaatggggatgagaggcccaccaggtccacagggccccccagggagccctggccgggctggagctgtgggcacccctggagagaggggacctcctgggccaccagggcctcctggcccccctgggcccccagcccctgttgggccaccccatgcccggatctcccagcatggagacccattgctgtccaacaccttcactgagaccaacaaccactggccccagggacccactgggcctccaggccctccagggcccatgggtccccctgggcctcctggccccacaggtgtccctgggagtcctggtcacataggacccccaggccccactggacccaaaggaatctctggccacccaggagagaagggcgagagaggactgcgtggggagcctggcccccaaggctctgctgggcagcggggggaacctggccctaagggagaccctggtgagaagagccactgggctcctagcttacagagcttcctgcagcagcaggctcagctggagctcctggccagacgggtcaccctcctggaagccatcatctggccagaaccagagctggggtctggggcgggccctgccggcacaggcacccccagcctccttcggggcaagaggggcggacatgcaaccaactaccggatcgtggcccccaggagccgggacgagagaggctgagggtggtggcggcccctgaggcagaccaggccaggcttcccctcctacctggactcggccagctgcctccagggaccgcccgtccatatttattaatgtcctcagggtcccttctgccatctaggccttaggggtaagcaggtctcagtcctggcaccatgcacatgtctgaggctgagcaagggctgagaggagaggcttgggcctcagtttccctctgtgaagtggggggaggcaggccttcaaggagggatagaggtacaaggcttcgtctcatctgctgtctgagcatccaggcccaaaggcactgagggagtcaggagctggggctcggcacatgcagagatgacagggcagggggcagtcttcctccccctccccgaccaaacctcggggagccctcctgtgcccctccctccttgttgtccagtgctgggttccccaccccgaggtcaggctgcccaatcctctgactggatcaccgggggcttcttgcctcagttcttccctctgagcccccaggccctcccgcatctcaggttggggatggggacatggagaggaaggggccgcctactcctgcaaatgcttgtgacagatgccaggaggtagatgtgtgctggccaataaaggcccctacctgattccccgca

SEQ ID NO: 319408 - DNA, 4718 bp, Homo sapiens
tcagcgacgctgcgcgggtggcggtttgcgaactgcgggtggactgtgtagtgaccggcgtcccgctgtctcgccccgtggcgggtgagcgagggtgcgtggtgcgcggcggcggcggaacgaacgcggtgcgggcggggcgcccgccgcagggcccatggcctcctgcgcgagcatcgacatcgaggacgccacgcagcacctgcgggacatcctcaagctggaccggcccgcgggcggccccagtgcagagagcccacggccatccagtgcctacaatggggacctcaatggacttctggtcccagacccgctctgctcaggtgatagtacctcagcaaacaagactggtcttcggaccatgccacccattaacctgcaagagaagcaggtcatctgtctctcaggagatgatagctccacctgcattgggattttggccaaggaggtggagattgtggctagcagtgactctagcatttcaagcaaggcccggggaagcaacaaggtgaaaattcagcctgtcgccaagtatgactgggaacagaagtactactatggcaacctgattgctgtgtctaactccttcttggcctatgccattcgggctgccaacaatggctctgccatggtgcgggtgatcagcgtcagcacttcggagcggaccttgctcaagggcttcacaggcagtgtggctgatctggctttcgcgcacctcaactctccacagctggcctgcctggatgaggcaggcaacctgttcgtgtggcgcttggctctggttaatggcaaaattcaagaagagatcttggtccatattcggcagccagagggcacgccactgaaccactttcgcaggatcatctggtgccccttcatccctgaggagagcgaagactgctgtgaggagagcagcccaacagtggccctgctgcatgaagaccgggctgaggtgtgggacctggacatgctccgctccagccacagtacctggcctgtggatgttagccagatcaagcagggcttcattgtggtaaaaggtcatagcacgtgcctcagtgaaggagccctctctcctgatgggactgtgctggctactgcgagccacgatggctatgtcaagttctggcagatctacattgaggggcaagatgagccaaggtgtctgcacgagtggaaacctcatgatgggcggcccctctcctgcctcctgttctgtgacaaccataagaaacaagaccctgatgtccctttctggaggttccttattactggtgctgaccagaaccgagagttaaagatgtggtgtacagtatcctggacctgcctgcagactattcgcttctccccagatatcttcagctcagtgagtgtgccccctagcctcaaggtttgcttggacctctcagcagaatacctgattctcagcgatgtgcaacggaaggtcctctatgtgatggagctgctgcaaaaccaggaggagggccacgcctgcttcagctccatctcggagttcctgctcacccaccctgtgctgagctttggtatccaggttgtgagtcgctgccggctacggcacactgaggtgctgcctgccgaagaggaaaatgacagcctgggtgctgatggtacccatggagccggtgccatggagtctgcggccggtgtgctcatcaagctcttttgtgtgcatactaaggcactgcaagatgtgcagatccgcttccagccacagctgaaccctgatgtggtggccccactgcccacccacactgcccacgaggacttcacatttggagagtctcggcccgaactgggctctgagggcctggggtcagccgctcacggctcccagcctgacctccgacgaatcgtggagctgcctgcacctgccgacttcctcagtctgagcagtgagaccaagcccaagttgatgacacctgacgccttcatgacacctagcgcctccttgcagcagatcactgcctctcccagcagcagcagcagcggtagcagcagcagcagcagcagtagcagcagctcccttacagctgtgtctgccatgagcagcacctcagctgtggacccctccttgaccaggccacctgaggagctgaccttgagccccaagctgcagctggatggcagcctgacaatgagcagcagtggcagccttcaggcaagcccgcgtggcctcctgcctggcctgctcccagccccagctgacaaactgactcccaaggggccgggccaggtgcctactgccacctctgcactgtccctggagctgcaggaagtggagcccctggggctaccccaagcctcccctagccgcactcgttcccctgatgtcatctcctcagcttccactgccctgtcccaggacatccctgagattgcatctgaggccctgtcccgtggttttggctcctctgcaccagagggccttgagccagacagtatggcttcagccgcctcggcactgcacctgctgtccccacggccccggccagggcccgagctcggcccccagctcgggcttgatggaggccctggggatggagatcggcataataccccctccctcctggaggcagccttgacccaggaggcctcgactcctgacagtcaggtttggcccacagcacctgacattactcgtgagacctgcagcaccctggcagaaagccccaggaatggccttcaggaaaagcacaagagcctggccttccaccgaccaccatatcacctgctgcagcaacgtgacagccaggatgccagtgctgagcaaagtgaccatgatgatgaggtggccagccttgcctctgcttcaggaggctttggcaccaaagttcctgctccacggctgcctgccaaggactggaagaccaagggatcccctcgaacctcacccaagctcaagaggaaaagcaagaaggatgatggggatgcagccatgggatcccggctcacagagcaccaggtggcagagccccctgaggactggccagcactaatttggcaacagcagagagagctggcagagctgcggcacagccaggaagagctgctgcagcgtctgtgtacccaactcgaaggcctgcagagcacagtcacaggccacgtagaacgtgcccttgagactcggcacgagcaggaacagcggcggctggagcgagcactggctgaggggcagcagcggggagggcagctgcaggagcagctgacacaacagttgtcccaagcactgtcgtcagctgtagctgggcggctagagcgcagcatacgggatgagatcaagaagacagtccctccatgtgtctcaaggagtctggagcctatggcaggccaactgagcaactcagtggctaccaagctcacagctgtggagggcagcatgaaagagaacatctccaagctgctcaagtccaagaacttgactgatgccatcgcccgagcagctgcagacacattacaagggccgatgcaggctgcctaccgggaagccttccagagtgtggtgctgccggcctttgagaagagctgccaggccatgttccagcaaatcaatgatagcttccggctggggacacaggaatacttgcagcagctagaaagccacatgaagagccggaaggcacgggaacaggaggccagggagcctgtgctagcccagctgcggggcctggtcagcacactgcagagtgccactgagcagatggcagccaccgtggccggcagtgttcgtgctgaggtgcagcaccagctgcatgtggctgtgggcagcctgcaggagtccattttagcacaggtacagcgcatcgttaagggtgaggtgagtgtggcgctcaaggagcagcaggccgccgtcacctccagcatcatgcaggccatgcgctcagctgctggcacacctgtcccctctgcccaccttgactgccaggcccagcaagcccatatcctgcagctgctgcagcagggccacctcaatcaggccttccagcaggcgctgacagctgctgacctgaacctggtgctgtatgtgtgtgaaactgtggacccagcccaggtttttgggcagccaccctgcccgctctcccagcctgtgctcctttccctcatccagcagctggcatctgaccttggcactcgaactgacctcaagctcagctacctggaagaggccgtgatgcacctggaccacagtgaccccatcactcgggaccacatgggctccgttatggcccaggtgcgccaaaagctttttcagttcctgcaggctgagccacacaactcacttggcaaagcagctcggcgtctcagcctcatgctgcatggcctcgtgacccccagcctcccttagctgctaagcctgccttgcccaggggtgggatggcactgaaggccagcagacaggcctaggctggggcagggtcacggctggcctttacctgctcaggcccccatctctggggtgtttgggggtcagggagcagggagcactggccgtggtctacagcgtgtggtagtcagaaggtttagctgggcccagggcaggtattgcgcctgcttgggttctgccatgcctggagcatgaccctgagatcgtgacaccacttgagtggaattttccatgttcctttttacctctaatttggatctttttgtttttgaaaaacattgagaaattcaattaaatgcttttggaataaaatgga

SEQ ID NO: 319409 - DNA, 336 bp, Homo sapiens
  misc_feature (33)..(33): n is a, c, g, or t
atacacgccatattagcagcctccgtggcctcnagcaggtacgataggcattaggccctgctaagggtcacgtgtctcttgacaaggcccacataccatacattctactccacccaccacctttgcaccttctggccccagcagactgttcttggttccctttggcctccaggccattgtccctgctgcttcctcttcctggacccctttcttcccacctagcccaccttgctttacaactacccttctcaggaacccatttcccaatcccctagggtaactacacagccctacaggctctctctgagtccctctggagctctcactagcccaccc

SEQ ID NO: 319410 - DNA, 4824 bp, Homo sapiens
tcagcgacgctgcgcgggtggcggtttgcgaactgcgggtggactgtgtagtgaccggcgtcccgctgtctcgccccgtggcgggtgagcgagggtgcgtggtgcgcggcggcggcggaacgaacgcggtgcgggcggggcgcccgccgcagggcccatggcctcctgcgcgagcatcgacatcgaggacgccacgcagcacctgcgggacatcctcaagctggaccggcccgcgggcggccccagtgcagagagcccacggccatccagtgcctacaatggggacctcaatggacttctggtcccagacccgctctgctcaggtgatagtacctcagcaaacaagactggtcttcggaccatgccacccattaacctgcaagagaagcaggtcatctgtctctcaggagatgatagctccacctgcattgggattttggccaaggaggtggagattgtggctagcagtgactctagcatttcaagcaaggcccggggaagcaacaaggtgaaaattcagcctgtcgccaagtatgactgggaacagaagtactactatggcaacctgattgctgtgtctaactccttcttggcctatgccattcgggctgccaacaatggctctgccatggtgcgggtgatcagcgtcagcacttcggagcggaccttgctcaagggcttcacaggcagtgtggctgatctggctttcgcgcacctcaactctccacagctggcctgcctggatgaggcaggcaacctgttcgtgtggcgcttggctctggttaatggcaaaattcaagaagagatcttggtccatattcggcagccagagggcacgccactgaaccactttcgcaggatcatctggtgccccttcatccctgaggagagcgaagactgctgtgaggagagcagcccaacagtggccctgctgcatgaagaccgggctgaggtgtgggacctggacatgctccgctccagccacagtacctggcctgtggatgttagccagatcaagcagggcttcattgtggtaaaaggtcatagcacgtgcctcagtgaaggagccctctctcctgatgggactgtgctggctactgcgagccacgatggctatgtcaagttctggcagatctacattgaggggcaagatgagccaaggtgtctgcacgagtggaaacctcatgatgggcggcccctctcctgcctcctgttctgtgacaaccataagaaacaagaccctgatgtccctttctggaggttccttattactggtgctgaccagaaccgagagttaaagatgtggtgtacagtatcctggacctgcctgcagactattcgcttctccccagatatcttcagctcagtgagtgtgccccctagcctcaaggtttgcttggacctctcagcagaatacctgattctcagcgatgtgcaacggaaggtcctctatgtgatggagctgctgcaaaaccaggaggagggccacgcctgcttcagctccatctcggagttcctgctcacccaccctgtgctgagctttggtatccaggttgtgagtcgctgccggctacggcacactgaggtgctgcctgccgaagaggaaaatgacagcctgggtgctgatggtacccatggagccggtgccatggagtctgcggccggtgtgctcatcaagctcttttgtgtgcatactaaggcactgcaagatgtgcagatccgcttccagccacagctgaaccctgatgtggtggccccactgcccacccacactgcccacgaggacttcacatttggagagtctcggcccgaactgggctctgagggcctggggtcagccgctcacggctcccagcctgacctccgacgaatcgtggagctgcctgcacctgccgacttcctcagtctgagcagtgagaccaagcccaagttgatgacacctgacgccttcatgacacctagcgcctccttgcagcagatcactgcctctcccagcagcagcagcagcggtagcagcagcagcagcagcagtagcagcagctcccttacagctgtgtctgccatgagcagcacctcagctgtggacccctccttgaccaggccacctgaggagctgaccttgagccccaagctgcagctggatggcagcctgacaatgagcagcagtggcagccttcaggcaagcccgcgtggcctcctgcctggcctgctcccagccccagctgacaaactgactcccaaggggccgggccaggtgcctactgccacctctgcactgtccctggagctgcaggaagtggagcccctggggctaccccaagcctcccctagccgcactcgttcccctgatgtcatctcctcagcttccactgccctgtcccaggacatccctgagattgcatctgaggccctgtcccgtggttttggctcctctgcaccagagggccttgagccagacagtatggcttcagccgcctcggcactgcacctgctgtccccacggccccggccagggcccgagctcggcccccagctcgggcttgatggaggccctggggatggagatcggcataataccccctccctcctggaggcagccttgacccaggaggcctcgactcctgacagtcaggtttggcccacagcacctgacattactcgtgagacctgcagcaccctggcagaaagccccaggaatggccttcaggaaaagcacaagagcctggccttccaccgaccaccatatcacctgctgcagcaacgtgacagccaggatgccagtgctgagcaaagtgaccatgatgatgaggtggccagccttgcctctgcttcaggaggctttggcaccaaagttcctgctccacggctgcctgccaaggactggaagaccaagggatcccctcgaacctcacccaagctcaagaggaaaagcaagaaggatgatggggatgcagccatgggatcccggctcacagagcaccaggtggcagagccccctgaggactggccagcactaatttggcaacagcagagagagctggcagagctgcggcacagccaggaagagctgctgcagcgtctgtgtacccaactcgaaggcctgcagagcacagtcacaggccacgtagaacgtgcccttgagactcggcacgagcaggaacatccttgagactggtagcacaacatggcatagggacgggggcagcattcttggcctgggaaggagtacacgacctgctccaggcccgttccttagctatggcgcagagcggcggctggagcgagcactggctgaggggcagcagcggggagggcagctgcaggagcagctgacacaacagttgtcccaagcactgtcgtcagctgtagctgggcggctagagcgcagcatacgggatgagatcaagaagacagtccctccatgtgtctcaaggagtctggagcctatggcaggccaactgagcaactcagtggctaccaagctcacagctgtggagggcagcatgaaagagaacatctccaagctgctcaagtccaagaacttgactgatgccatcgcccgagcagctgcagacacattacaagggccgatgcaggctgcctaccgggaagccttccagagtgtggtgctgccggcctttgagaagagctgccaggccatgttccagcaaatcaatgatagcttccggctggggacacaggaatacttgcagcagctagaaagccacatgaagagccggaaggcacgggaacaggaggccagggagcctgtgctagcccagctgcggggcctggtcagcacactgcagagtgccactgagcagatggcagccaccgtggccggcagtgttcgtgctgaggtgcagcaccagctgcatgtggctgtgggcagcctgcaggagtccattttagcacaggtacagcgcatcgttaagggtgaggtgagtgtggcgctcaaggagcagcaggccgccgtcacctccagcatcatgcaggccatgcgctcagctgctggcacacctgtcccctctgcccaccttgactgccaggcccagcaagcccatatcctgcagctgctgcagcagggccacctcaatcaggccttccagcaggcgctgacagctgctgacctgaacctggtgctgtatgtgtgtgaaactgtggacccagcccaggtttttgggcagccaccctgcccgctctcccagcctgtgctcctttccctcatccagcagctggcatctgaccttggcactcgaactgacctcaagctcagctacctggaagaggccgtgatgcacctggaccacagtgaccccatcactcgggaccacatgggctccgttatggcccaggtgcgccaaaagctttttcagttcctgcaggctgagccacacaactcacttggcaaagcagctcggcgtctcagcctcatgctgcatggcctcgtgacccccagcctcccttagctgctaagcctgccttgcccaggggtgggatggcactgaaggccagcagacaggcctaggctggggcagggtcacggctggcctttacctgctcaggcccccatctctggggtgtttgggggtcagggagcagggagcactggccgtggtctacagcgtgtggtagtcagaaggtttagctgggcccagggcaggtattgcgcctgcttgggttctgccatgcctggagcatgaccctgagatcgtgacaccacttgagtggaattttccatgttcctttttacctctaatttggatctttttgtttttgaaaaacattgagaaattcaattaaatgcttttggaataaaatgga

SEQ ID NO: 319411 - DNA, 4607 bp, Homo sapiens
tcagcgacgctgcgcgggtggcggtttgcgaactgcgggtggactgtgtagtgaccggcgtcccgctgtctcgccccgtggcgggtgagcgagggtgcgtggtgcgcggcggcggcggaacgaacgcggtgcgggcggggcgcccgccgcagggcccatggcctcctgcgcgagcatcgacatcgaggacgccacgcagcacctgcgggacatcctcaagctggaccggcccgcgggcggccccagtgcagagagcccacggccatccagtgcctacaatggggacctcaatggacttctggtcccagacccgctctgctcaggtgatagtacctcagcaaacaagactggtcttcggaccatgccacccattaacctgcaagagaagcaggtcatctgtctctcaggagatgatagctccacctgcattgggattttggccaaggaggtggagattgtggctagcagtgactctagcatttcaagcaaggcccggggaagcaacaaggtgaaaattcagcctgtcgccaagtatgactgggaacagaagtactactatggcaacctgattgctgtgtctaactccttcttggcctatgccattcgggctgccaacaatggctctgccatggtgcgggtgatcagcgtcagcacttcggagcggaccttgctcaagggcttcacaggcagtgtggctgatctggctttcgcgcacctcaactctccacagctggcctgcctggatgaggcaggcaacctgttcgtgtggcgcttggctctggttaatggcaaaattcaagaagagatcttggtccatattcggcagccagagggcacgccactgaaccactttcgcaggatcatctggtgccccttcatccctgaggagagcgaagactgctgtgaggagagcagcccaacagtggccctgctgcatgaagaccgggctgaggtgtgggacctggacatgctccgctccagccacagtacctggcctgtggatgttagccagatcaagcagggcttcattgtggtaaaaggtcatagcacgtgcctcagtgaaggagccctctctcctgatgggactgtgctggctactgcgagccacgatggctatgtcaagttctggcagatctacattgaggggcaagatgagccaaggtgtctgcacgagtggaaacctcatgatgggcggcccctctcctgcctcctgttctgtgacaaccataagaaacaagaccctgatgtccctttctggaggttccttattactggtgctgaccagaaccgagagttaaagatgtggtgtacagtatcctggacctgcctgcagactattcgcttctccccagatatcttcagctcagtgagtgtgccccctagcctcaaggtttgcttggacctctcagcagaatacctgattctcagcgatgtgcaacggaaggtcctctatgtgatggagctgctgcaaaaccaggaggagggccacgcctgcttcagctccatctcggagttcctgctcacccaccctgtgctgagctttggtatccaggttgtgagtcgctgccggctacggcacactgaggtgctgcctgccgaagaggaaaatgacagcctgggtgctgatggtacccatggagccggtgccatggagtctgcggccggtgtgctcatcaagctcttttgtgtgcatactaaggcactgcaagatgtgcagatccgcttccagccacagctgaaccctgatgtggtggccccactgcccacccacactgcccacgaggacttcacatttggagagtctcggcccgaactgggctctgagggcctggggtcagccgctcacggctcccagcctgacctccgacgaatcgtggagctgcctgcacctgccgacttcctcagtctgagcagtgagaccaagcccaagttgatgacacctgacgccttcatgacacctagcgcctccttgcagcagatcactgcctctcccagcagcagcagcagcggtagcagcagcagcagcagcagtagcagcagctcccttacagctgtgtctgccatgagcagcacctcagctgtggacccctccttgaccaggccacctgaggagctgaccttgagccccaagctgcagctggatggcagcctgacaatgagcagcagtggcagccttcaggcaagcccgcgtggcctcctgcctggcctgctcccagccccagctgacaaactgactcccaaggggccgggccaggtgcctactgccacctctgcactgtccctggagctgcaggaagtggagcccctggggctaccccaagcctcccctagccgcactcgttcccctgatgtcatctcctcagcttccactgccctgtcccaggacatccctgagattgcatctgaggccctgtcccgtggttttggctcctctgcaccagagggccttgagccagacagtatggcttcagccgcctcggcactgcacctgctgtccccacggccccggccagggcccgagctcggcccccagctcgggcttgatggaggccctggggatggagatcggcataataccccctccctcctggaggcagccttgacccaggaggcctcgactcctgacagtcaggtttggcccacagcacctgacattactcgtgagacctgcagcaccctggcagaaagccccaggaatggccttcaggaaaagcacaagagcctggccttccaccgaccaccatatcacctgctgcagcaacgtgacagccaggatgccagtgctgagcaaagtgaccatgatgatgaggtggccagccttgcctctgcttcaggaggctttggcaccaaagttcctgctccacggctgcctgccaaggactggaagaccaagggatcccctcgaacctcacccaagctcaagaggaaaagcaagaaggatgatggggatgcagccatgggatcccggctcacagagcaccaggtggcagagccccctgaggactggccagcactaatttggcaacagcagagagagctggcagagctgcggcacagccaggaagagctgctgcagcgtctgtgtacccaactcgaaggcctgcagagcacagtcacaggccacgtagaacgtgcccttgagactcggcacgagcaggaacagcggcggctggagcgagcactggctgaggggcagcagcggggagggcagctgcaggagcagctgacacaacagttgtcccaagcactgtcgtcagctgtagctgggcggctagagcgcagcatacgggatgagatcaagaagacagtccctccatgtgtctcaaggagtctggagcctatggcaggccaactgagcaactcagtggctaccaagctcacagctgtggagggcagcatgaaagagaacatctccaagctgctcaagtccaagaacttgactgatgccatcgcccgagcagctgcagacacattacaagggccgatgcaggctgcctaccgggaagccttccagagtgtggtgctgccggcctttgagaagagctgccaggccatgttccagcaaatcaatgatagcttccggctggggacacaggaatacttgcagcagctagaaagccacatgaagagccggaaggcacgggaacaggaggccagggagcctgtgctagcccagctgcggggcctggtcagcacactgcagagtgccactgagcagatggcagccaccgtggccggcagtgttcgtgctgaggtgcagcaccagctgcatgtggctgtgggcagcctgcaggagtccattttagcacaggtacagcgcatcgttaagggtgagcagcaagcccatatcctgcagctgctgcagcagggccacctcaatcaggccttccagcaggcgctgacagctgctgacctgaacctggtgctgtatgtgtgtgaaactgtggacccagcccaggtttttgggcagccaccctgcccgctctcccagcctgtgctcctttccctcatccagcagctggcatctgaccttggcactcgaactgacctcaagctcagctacctggaagaggccgtgatgcacctggaccacagtgaccccatcactcgggaccacatgggctccgttatggcccaggtgcgccaaaagctttttcagttcctgcaggctgagccacacaactcacttggcaaagcagctcggcgtctcagcctcatgctgcatggcctcgtgacccccagcctcccttagctgctaagcctgccttgcccaggggtgggatggcactgaaggccagcagacaggcctaggctggggcagggtcacggctggcctttacctgctcaggcccccatctctggggtgtttgggggtcagggagcagggagcactggccgtggtctacagcgtgtggtagtcagaaggtttagctgggcccagggcaggtattgcgcctgcttgggttctgccatgcctggagcatgaccctgagatcgtgacaccacttgagtggaattttccatgttcctttttacctctaatttggatctttttgtttttgaaaaacattgagaaattcaattaaatgcttttggaataaaatgga

SEQ ID NO: 319412 - DNA, 4562 bp, Homo sapiens
tcagcgacgctgcgcgggtggcggtttgcgaactgcgggtggactgtgtagtgaccggcgtcccgctgtctcgccccgtggcgggtgagcgagggtgcgtggtgcgcggcggcggcggaacgaacgcggtgcgggcggggcgcccgccgcagggcccatggcctcctgcgcgagcatcgacatcgaggacgccacgcagcacctgcgggacatcctcaagctggaccggcccgcgggcggccccagtgcagagagcccacggccatccagtgcctacaatggggacctcaatggacttctggtcccagacccgctctgctcaggtgatagtacctcagcaaacaagactggtcttcggaccatgccacccattaacctgcaagagaagcaggtcatctgtctctcaggagatgatagctccacctgcattgggattttggccaaggaggtggagattgtggctagcagtgactctagcatttcaagcaaggcccggggaagcaacaaggtgaaaattcagcctgtcgccaagtatgactgggaacagaagtactactatggcaacctgattgctgtgtctaactccttcttggcctatgccattcgggctgccaacaatggctctgccatggtgcgggtgatcagcgtcagcacttcggagcggaccttgctcaagggcttcacaggcagtgtggctgatctggctttcgcgcacctcaactctccacagctggcctgcctggatgaggcaggcaacctgttcgtgtggcgcttggctctggttaatggcaaaattcaagaagagatcttggtccatattcggcagccagagggcacgccactgaaccactttcgcaggatcatctggtgccccttcatccctgaggagagcgaagactgctgtgaggagagcagcccaacagtggccctgctgcatgaagaccgggctgaggtgtgggacctggacatgctccgctccagccacagtacctggcctgtggatgttagccagatcaagcagggcttcattgtggtaaaaggtcatagcacgtgcctcagtgaaggagccctctctcctgatgggactgtgctggctactgcgagccacgatggctatgtcaagttctggcagatctacattgaggggcaagatgagccaaggtgtctgcacgagtggaaacctcatgatgggcggcccctctcctgcctcctgttctgtgacaaccataagaaacaagaccctgatgtccctttctggaggttccttattactggtgctgaccagaaccgagagttaaagatgtggtgtacagtatcctggacctgcctgcagactattcgcttctccccagatatcttcagctcagtgagtgtgccccctagcctcaaggtttgcttggacctctcagcagaatacctgattctcagcgatgtgcaacggaaggtcctctatgtgatggagctgctgcaaaaccaggaggagggccacgcctgcttcagctccatctcggagttcctgctcacccaccctgtgctgagctttggtatccaggttgtgagtcgctgccggctacggcacactgaggtgctgcctgccgaagaggaaaatgacagcctgggtgctgatggtacccatggagccggtgccatggagtctgcggccggtgtgctcatcaagctcttttgtgtgcatactaaggcactgcaagatgtgcagatccgcttccagccacagctgaaccctgatgtggtggccccactgcccacccacactgcccacgaggacttcacatttggagagtctcggcccgaactgggctctgagggcctggggtcagccgctcacggctcccagcctgacctccgacgaatcgtggagctgcctgcacctgccgacttcctcagtctgagcagtgagaccaagcccaagttgatgacacctgacgccttcatgacacctagcgcctccttgcagcagatcactgcctctcccagcagcagcagcagcggtagcagcagcagcagcagcagtagcagcagctcccttacagctgtgtctgccatgagcagcacctcagctgtggacccctccttgaccaggccacctgaggagctgaccttgagccccaagctgcagctggatggcagcctgacaatgagcagcagtggcagccttcaggcaagcccgcgtggcctcctgcctggcctgctcccagccccagctgacaaactgactcccaaggggccgggccaggtgcctactgccacctctgcactgtccctggagctgcaggaagtggagcccctggggctaccccaagcctcccctagccgcactcgttcccctgatgtcatctcctcagcttccactgccctgtcccaggacatccctgagattgcatctgaggccctgtcccgtggttttggctcctctgcaccagagggccttgagccagacagtatggcttcagccgcctcggcactgcacctgctgtccccacggccccggccagggcccgagctcggcccccagctcgggcttgatggaggccctggggatggagatcggcataataccccctccctcctggaggcagccttgacccaggaggcctcgactcctgacagtcaggtttggcccacagcacctgacattactcgtgagacctgcagcaccctggcagaaagccccaggaatggccttcaggaaaagcacaagagcctggccttccaccgaccaccatatcacctgctgcagcaacgtgacagccaggatgccagtgctgagcaaagtgaccatgatgatgaggtggccagccttgcctctgcttcaggaggctttggcaccaaagttcctgctccacggctgcctgccaaggactggaagaccaagggatcccctcgaacctcacccaagctcaagaggaaaagcaagaaggatgatggggatgcagccatgggatcccggctcacagagcaccaggtggcagagccccctgaggactggccagcactaatttggcaacagcagagagagctggcagagctgcggcacagccaggaagagctgctgcagcgtctgtgtacccaactcgaaggcctgcagagcacagtcacaggccacgtagaacgtgcccttgagactcggcacgagcaggaacgtgtctcaaggagtctggagcctatggcaggccaactgagcaactcagtggctaccaagctcacagctgtggagggcagcatgaaagagaacatctccaagctgctcaagtccaagaacttgactgatgccatcgcccgagcagctgcagacacattacaagggccgatgcaggctgcctaccgggaagccttccagagtgtggtgctgccggcctttgagaagagctgccaggccatgttccagcaaatcaatgatagcttccggctggggacacaggaatacttgcagcagctagaaagccacatgaagagccggaaggcacgggaacaggaggccagggagcctgtgctagcccagctgcggggcctggtcagcacactgcagagtgccactgagcagatggcagccaccgtggccggcagtgttcgtgctgaggtgcagcaccagctgcatgtggctgtgggcagcctgcaggagtccattttagcacaggtacagcgcatcgttaagggtgaggtgagtgtggcgctcaaggagcagcaggccgccgtcacctccagcatcatgcaggccatgcgctcagctgctggcacacctgtcccctctgcccaccttgactgccaggcccagcaagcccatatcctgcagctgctgcagcagggccacctcaatcaggccttccagcaggcgctgacagctgctgacctgaacctggtgctgtatgtgtgtgaaactgtggacccagcccaggtttttgggcagccaccctgcccgctctcccagcctgtgctcctttccctcatccagcagctggcatctgaccttggcactcgaactgacctcaagctcagctacctggaagaggccgtgatgcacctggaccacagtgaccccatcactcgggaccacatgggctccgttatggcccaggtgcgccaaaagctttttcagttcctgcaggctgagccacacaactcacttggcaaagcagctcggcgtctcagcctcatgctgcatggcctcgtgacccccagcctcccttagctgctaagcctgccttgcccaggggtgggatggcactgaaggccagcagacaggcctaggctggggcagggtcacggctggcctttacctgctcaggcccccatctctggggtgtttgggggtcagggagcagggagcactggccgtggtctacagcgtgtggtagtcagaaggtttagctgggcccagggcaggtattgcgcctgcttgggttctgccatgcctggagcatgaccctgagatcgtgacaccacttgagtggaattttccatgttcctttttacctctaatttggatctttttgtttttgaaaaacattgagaaattcaattaaatgcttttggaataaaatgga

SEQ ID NO: 319413 - DNA, 1873 bp, Homo sapiens
cgtgattagaggatcccctcagctggccccaaggactggaagaccaagggatcccctcgaacctcacccaagctcaagaggaaaagcaagaaggatgatggggatgcagccatgggatcccggctcacagagcaccaggtggcagagccccctgaggactggccagcactaatttggcaacagcagagagagctggcagagctgcggcacagccaggaagagctgctgcagcgtctgtgtacccaactcgaaggcctgcagagcacagtcacaggccacgtagaacgtgcccttgagactcggcacgagcaggaacagcggcggctggagcgagcactggctgaggggcagcagcggggagggcagctgcaggagcagctgacacaacagttgtcccaagcactgtcgtcagctgtagctgggcggctagagcgcagcatacgggatgagatcaagaagacagtccctccatgtgtctcaaggagtctggagcctatggcaggccaactgagcaactcagtggctaccaagctcacagctgtggagggcagcatgaaagagaacatctccaagctgctcaagtccaagaacttgactgatgccatcgcccgagcagctgcagacacattacaagggccgatgcaggctgcctaccgggaagccttccagagtgtggtgctgccggcctttgagaagagctgccaggccatgttccagcaaatcaatgatagcttccggctggggacacaggaatacttgcagcagctagaaagccacatgaagagccggaaggcacgggaacaggaggccagggagcctgtgctagcccagctgcggggcctggtcagcacactgcagagtgccactgagcagatggcagccaccgtggccggcagtgttcgtgctgaggtgcagcaccagctgcatgtggctgtgggcagcctgcaggagtccattttagcacaggtacagcgcatcgttaagggtgaggtgagtgtggcgctcaaggagcagcaggccgccgtcacctccagcatcatgcaggccatgcgctcagctgctggcacacctgtcccctctgcccaccttgactgccaggcccagcaagcccatatcctgcagctgctgcagcagggccacctcaatcaggccttccagcaggcgctgacagctgctgacctgaacctggtgctgtatgtgtgtgaaactgtggacccagcccaggtttttgggcagccaccctgcccgctctcccagcctgtgctcctttccctcatccagcagctggcatctgaccttggcactcgaactgacctcaagctcagctacctggaagaggccgtgatgcacctggaccacagtgaccccatcactcgggaccacatgggctccgttatggcccaggtgcgccaaaagctttttcagttcctgcaggctgagccacacaactcacttggcaaagcagctcggcgtctcagcctcatgctgcatggcctcgtgacccccagcctcccttagctgctaagcctgccttgcccaggggtgggatggcactgaaggccagcagacaggcctaggctggggcagggtcacggctggcctttacctgctcaggcccccatctctggggtgtttgggggtcagggagcagggagcactggccgtggtctacagcgtgtggtagtcagaaggtttagctgggcccagggcaggtattgcgcctgcttgggttctgccatgcctggagcatgaccctgagatcgtgacaccacttgagtggaattttccatgttcctttttacctctaatttggatctttttgtttttgaaaaacattgagaaattcaattaaatgcttttggaataaaatgga

SEQ ID NO: 319414 - DNA, 1666 bp, Homo sapiens
tagaggatccgccgctgctccctcttcaaaatgagatcatataatatttggttttccattcctgagttacttcacttagagtaacggtctccaggccaggcacggtggctcacacctgtaatcccagcactttcggaggccaaggcagatggatcacgaggccaggagcagctgacacaacagttgtcccaagcactgtcgtcagctgtagctgggcggctagagcgcagcatacgggatgagatcaagaagacagtccctccatgtgtctcaaggagtctggagcctatggcaggccaactgagcaactcagtggctaccaagctcacagctgtggagggcagcatgaaagagaacatctccaagctgctcaagtccaagaacttgactgatgccatcgcccgagcagctgcagacacattacaagggccgatgcaggctgcctaccgggaagccttccagagtgtggtgctgccggcctttgagaagagctgccaggccatgttccagcaaatcaatgatagcttccggctggggacacaggaatacttgcagcagctagaaagccacatgaagagccggaaggcacgggaacaggaggccagggagcctgtgctagcccagctgcggggcctggtcagcacactgcagagtgccactgagcagatggcagccaccgtggccggcagtgttcgtgctgaggtgcagcaccagctgcatgtggctgtgggcagcctgcaggagtccattttagcacaggtacagcgcatcgttaagggtgaggtgagtgtggcgctcaaggagcagcaggccgccgtcacctccagcatcatgcaggccatgcgctcagctgctggcacacctgtcccctctgcccaccttgactgccaggcccagcaagcccatatcctgcagctgctgcagcagggccacctcaatcaggccttccagcaggcgctgacagctgctgacctgaacctggtgctgtatgtgtgtgaaactgtggacccagcccaggtttttgggcagccaccctgcccgctctcccagcctgtgctcctttccctcatccagcagctggcatctgaccttggcactcgaactgacctcaagctcagctacctggaagaggccgtgatgcacctggaccacagtgaccccatcactcgggaccacatgggctccgttatggcccaggtgcgccaaaagctttttcagttcctgcaggctgagccacacaactcacttggcaaagcagctcggcgtctcagcctcatgctgcatggcctcgtgacccccagcctcccttagctgctaagcctgccttgcccaggggtgggatggcactgaaggccagcagacaggcctaggctggggcagggtcacggctggcctttacctgctcaggcccccatctctggggtgtttgggggtcagggagcagggagcactggccgtggtctacagcgtgtggtagtcagaaggtttagctgggcccagggcaggtattgcgcctgcttgggttctgccatgcctggagcatgaccctgagatcgtgacaccacttgagtggaattttccatgttcctttttacctctaatttggatctttttgtttttgaaaaacattgagaaattcaattaaatgcttttggaataaaatgga

SEQ ID NO: 319415 - DNA, 946 bp, Homo sapiens
  misc_feature (53)..(54): n is a, c, g, or t
gctgacctgaacctggtgctgtatgtgtgtgaaactgtggacccagcccaggnntttgggcagccaccctgcccgctctcccagcctgtgctcctttccctctccagcatcatgcaggccatgcgctcagctgctggcacacctgtcccctctgcccaccttgactgccaggcccagcaagcccatatcctgcagctgctgcagcagggccacctcaatcaggccttccagcaggcgctgacagctgctgacctgaacctggtgctgtatgtgtgtgaaactgtggacccagcccaggtttttgggcagccaccctgcccgctctcccagcctgtgctcctttccctcatccagcagctggcatctgaccttggcactcgaactgacctcaagctcagctacctggaagaggccgtgatgcacctggaccacagtgaccccatcactcgggaccacatgggctccgttatggcccaggtgcgccaaaagctttttcagttcctgcaggctgagccacacaactcacttggcaaagcagctcggcgtctcagcctcatgctgcatggcctcgtgacccccagcctcccttagctgctaagcctgccttgcccaggggtgggatggcactgaaggccagcagacaggcctaggctggggcagggtcacggctggcctttacctgctcaggcccccatctctggggtgtttgggggtcagggagcagggagcactggccgtggtctacagcgtgtggtagtcagaaggtttagctgggcccagggcaggtattgcgcctgcttgggttctgccatgcctggagcatgaccctgagatcgtgacaccacttgagtggaattttccatgttcctttttacctctaatttggatctttttgtttttgaaaaacattgagaaattcaattaaatgcttttggaataaaatgga

SEQ ID NO: 319416 - DNA, 957 bp, Homo sapiens
  misc_feature (22)..(22): n is a, c, g, or t
ggttccctctgggcctcggtgncaccaggggcgctcccgtctgctggcacccacctgtagcctgtcctttcccccccatcccaggtttttgggcagccaccctgcccgctctcccagcctgtgctcctttccctcatccagcagctggcatctgaccttggcactcgaactgacctcaagctcaggtaagtggggacagccagggatggggagatgagctggggagtggggcagtgggagggagcagtttgaagctgacgcccacttctgcctgaatcctctccctaattttctccaccagtcctttctgccttcacccagagggttccctctgggcctcggtgccaccagggggcgctcccgtctgctggcacccacctgtagcctgtcctttcccccccatccccagctacctggaagaggccgtgatgcacctggaccacagtgaccccatcactcgggaccacatgggctccgttatggcccaggtgcgccaaaagctttttcagttcctgcaggctgagccacacaactcacttggcaaagcagctcggcgtctcagcctcatgctgcatggcctcgtgacccccagcctcccttagctgctaagcctgccttgcccaggggtgggatggcactgaaggccagcagacaggcctaggctggggcagggtcacggctggcctttacctgctcaggcccccatctctggggtgtttgggggtcagggagcagggagcactggccgtggtctacagcgtgtggtagtcagaaggtttagctgggcccagggcaggtattgcgcctgcttgggttctgccatgcctggagcatgaccctgagatcgtgacaccacttgagtggaattttccatgttcctttttacctctaatttggatctttttgtttttgaaaaacattgagaaattcaattaaatgcttttggaataaaatgga

SEQ ID NO: 319417 - DNA, 3884 bp, Homo sapiens
tcagcgacgctgcgcgggtggcggtttgcgaactgcgggtggactgtgtagtgaccggcgtcccgctgtctcgccccgtggcgggtgagcgagggtgcgtggtgcgcggcggcggcggaacgaacgcggtgcgggcggggcgcccgccgcagggcccatggcctcctgcgcgagcatcgacatcgaggacgccacgcagcacctgcgggacatcctcaagctggaccggcccgcgggcggccccagtgcagagagcccacggccatccagtgcctacaatggggacctcaatggacttctggtcccagacccgctctgctcaggtgatagtacctcagcaaacaagactggtcttcggaccatgccacccattaacctgcaagagaagcaggtcatctgtctctcaggagatgatagctccacctgcattgggattttggccaaggaggtggagattgtggctagcagtgactctagcatttcaagcaaggcccggggaagcaacaaggtgaaaattcagcctgtcgccaagtatgactgggaacagaagtactactatggcaacctgattgctgtgtctaactccttcttggcctatgccattcgggctgccaacaatggctctgccatggtgcgggtgatcagcgtcagcacttcggagcggaccttgctcaagggcttcacaggcagtgtggctgatctggctttcgcgcacctcaactctccacagctggcctgcctggatgaggcaggcaacctgttcgtgtggcgcttggctctggttaatggcaaaattcaagaagagatcttggtccatattcggcagccagagggcacgccactgaaccactttcgcaggatcatctggtgccccttcatccctgaggagagcgaagactgctgtgaggagagcagcccaacagtggccctgctgcatgaagaccgggctgaggtgtgggacctggacatgctccgctccagccacagtacctggcctgtggatgttagccagatcaagcagggcttcattgtggtaaaaggtcatagcacgtgcctcagtgaaggagccctctctcctgatgggactgtgctggctactgcgagccacgatggctatgtcaagttctggcagatctacattgaggggcaagatgagccaaggtgtctgcacgagtggaaacctcatgatgggcggcccctctcctgcctcctgttctgtgacaaccataagaaacaagaccctgatgtccctttctggaggttccttattactggtgctgaccagaaccgagagttaaagatgtggtgtacagtatcctggacctgcctgcagactattcgcttctccccagatatcttcagctcagtgagtgtgccccctagcctcaaggtttgcttggacctctcagcagaatacctgattctcagcgatgtgcaacggaaggtcctctatgtgatggagctgctgcaaaaccaggaggagggccacgcctgcttcagctccatctcggagttcctgctcacccaccctgtgctgagctttggtatccaggttgtgagtcgctgccggctacggcacactgaggtgctgcctgccgaagaggaaaatgacagcctgggtgctgatggtacccatggagccggtgccatggagtctgcggccggtgtgctcatcaagctcttttgtgtgcatactaaggcactgcaagatgtgcagatccgcttccagccacagctgaaccctgatgtggtggccccactgcccacccacactgcccacgaggacttcacatttggagagtctcggcccgaactgggctctgagggcctggggtcagccgctcacggctcccagcctgacctccgacgaatcgtggagctgcctgcacctgccgacttcctcagtctgagcagtgagaccaagcccaagttgatgacacctgacgccttcatgacacctagcgcctccttgcagcagatcactgcctctcccagcagcagcagcagcggtagcagcagcagcagcagcagtagcagcagctcccttacagctgtgtctgccatgagcagcacctcagctgtggacccctccttgaccaggccacctgaggagctgaccttgagccccaagctgcagctggatggcagcctgacaatgagcagcagtggcagccttcaggcaagcccgcgtggcctcctgcctggcctgctcccagccccagctgacaaactgactcccaaggggccgggccaggtgcctactgccacctctgcactgtccctggagctgcaggaagtggagcccctggggctaccccaagcctcccctagccgcactcgttcccctgatgtcatctcctcagcttccactgccctgtcccaggacatccctgagattgcatctgaggccctgtcccgtggttttggctcctctgcaccagagggccttgagccagacagtatggcttcagccgcctcggcactgcacctgctgtccccacggccccggccagggcccgagctcggcccccagctcgggcttgatggaggccctggggatggagatcggcataataccccctccctcctggaggcagccttgacccaggaggcctcgactcctgacagtcaggtttggcccacagcacctgacattactcgtgagacctgcagcaccctggcagaaagccccaggaatggccttcaggaaaagcacaagagcctggccttccaccgaccaccatatcacctgctgcagcaacgtgacagccaggatgccagtgctgagcaaagtgaccatgatgatgaggtggccagccttgcctctgcttcaggaggctttggcaccaaagttcctgctccacggctgcctgccaaggactggaagaccaagggatcccctcgaacctcacccaagctcaagaggaaaagcaagaaggatgatggggatgcagccatgggatcccggctcacagagcaccaggtggcagagccccctgaggactggccagcactaatttggcaacagcagagagagctggcagagctgcggcacagccaggaagagctgctgcagcgtctgtgtacccaactcgaaggcctgcagagcacagtcacaggccacgtagaacgtgcccttgagactcggcacgagcaggaacagcggcggctggagcgagcactggctgaggggcagcagcggggagggcagctgcaggagcagctgacacaacagttgtcccaagcactgtcgtcagctgtagctgggcggctagagcgcagcatacgggatgagatcaagaagacagtccctccatgtgtctcaaggagtctggagcctatggcaggccaactgagcaactcagtggctaccaagctcacagctgtggagggcagcatgaaagagaacatctccaagctgctcaagtccaagaacttgactgatgccatcgcccgagcagctgcagacacattacaagggccgatgcaggctgcctaccgggaagccttccagagtgtggtgctgccggcctttgagaagagctgccaggccatgttccagcaaatcaatgatagcttccggctggggacacaggaatacttgcagcagctagaaagccacatgaagagccggaaggcacgggaacaggaggccagggagcctgtgctagcccagctgcggggcctggtcagcacactgcagagtgccactgagcagatggcagccaccgtggccggcagtgttcgtgctgaggtgcagcaccagctgcatgtggctgtgggcagctgcggagtcatttagcgcggtccgcgatcgtaggtgggggggggtggggcaagggcaggcgcggcctccggttttggggcggccgtgggggccttcc

SEQ ID NO: 319418 - DNA, 385 bp, Homo sapiens
gggagaaatcctagggagggagagggtggtctctaggctgcctcacatagcctgaggtgcttctcgcctatggcagggatgcagccatgggatcccggctcacagagcaccaggtaagtgaatgagcccactttgtacttgtggaacttcaccctgggcgggtggagaagggctctgggccattccctggtctggtgtgtgggaataggtggggcaggcatcgtgtgactgtcagtgctactgacaggtggcagagccccctgaggactggccagcactaatttggcaacagcagagagagctggcagagctgcggcacagccaggaagagctgctgcagcgtctgtgtacccaactcgaaggcctgcagagcacagtcacaggc

SEQ ID NO: 319419 - DNA, 3337 bp, Homo sapiens
aattcctggggaggaaaggattacaaaggagcatccctgattctcagcgatgtgcaacggaaggtcctctatgtgatggagctgctgcaaaaccaggaggagggccacgcctgcttcagctccatctcggagttcctgctcacccaccctgtgctgagctttggtatccaggttgtgagtcgctgccggctacggcacactgaggtgctgcctgccgaagaggaaaatgacagcctgggtgctgatggtacccatggagccggtgccatggagtctgcggccggtgtgctcatcaagctcttttgtgtgcatactaaggcactgcaagatgtgcagatccgcttccagccacagctgaaccctgatgtggtggccccactgcccacccacactgcccacgaggacttcacatttggagagtctcggcccgaactgggctctgagggcctggggtcagccgctcacggctcccagcctgacctccgacgaatcgtggagctgcctgcacctgccgacttcctcagtctgagcagtgagaccaagcccaagttgatgacacctgacgccttcatgacacctagcgcctccttgcagcagatcactgcctctcccagcagcagcagcagcggtagcagcagcagcagcagcagtagcagcagctcccttacagctgtgtctgccatgagcagcacctcagctgtggacccctccttgaccaggccacctgaggagctgaccttgagccccaagctgcagctggatggcagcctgacaatgagcagcagtggcagccttcaggcaagcccgcgtggcctcctgcctggcctgctcccagccccagctgacaaactgactcccaaggggccgggccaggtgcctactgccacctctgcactgtccctggagctgcaggaagtggagcccctggggctaccccaagcctcccctagccgcactcgttcccctgatgtcatctcctcagcttccactgccctgtcccaggacatccctgagattgcatctgaggccctgtcccgtggttttggctcctctgcaccagagggccttgagccagacagtatggcttcagccgcctcggcactgcacctgctgtccccacggccccggccagggcccgagctcggcccccagctcgggcttgatggaggccctggggatggagatcggcataataccccctccctcctggaggcagccttgacccaggaggcctcgactcctgacagtcaggtttggcccacagcacctgacattactcgtgagacctgcagcaccctggcagaaagccccaggaatggccttcaggaaaagcacaagagcctggccttccaccgaccaccatatcacctgctgcagcaacgtgacagccaggatgccagtgctgagcaaagtgaccatgatgatgaggtggccagccttgcctctgcttcaggaggctttggcaccaaagttcctgctccacggctgcctgccaaggactggaagaccaagggatcccctcgaacctcacccaagctcaagaggaaaagcaagaaggatgatggggatgcagccatgggatcccggctcacagagcaccaggtggcagagccccctgaggactggccagcactaatttggcaacagcagagagagctggcagagctgcggcacagccaggaagagctgctgcagcgtctgtgtacccaactcgaaggcctgcagagcacagtcacaggccacgtagaacgtgcccttgagactcggcacgagcaggaacagcggcggctggagcgagcactggctgaggggcagcagcggggagggcagctgcaggagcagctgacacaacagttgtcccaagcactgtcgtcagctgtagctgggcggctagagcgcagcatacgggatgagatcaagaagacagtccctccatgtgtctcaaggagtctggagcctatggcaggccaactgagcaactcagtggctaccaagctcacagctgtggagggcagcatgaaagagaacatctccaagctgctcaagtccaagaacttgactgatgccatcgcccgagcagctgcagacacattacaagggccgatgcaggctgcctaccgggaagccttccagagtgtggtgctgccggcctttgagaagagctgccaggccatgttccagcaaatcaatgatagcttccggctggggacacaggaatacttgcagcagctagaaagccacatgaagagccggaaggcacgggaacaggaggccagggagcctgtgctagcccagctgcggggcctggtcagcacactgcagagtgccactgagcagatggcagccaccgtggccggcagtgttcgtgctgaggtgcagcaccagctgcatgtggctgtgggcagcctgcaggagtccattttagcacaggtacagcgcatcgttaagggtgaggtgagtgtggcgctcaaggagcagcaggccgccgtcacctccagcatcatgcaggccatgcgctcagctgctggcacacctgtcccctctgcccaccttgactgccaggcccagcaagcccatatcctgcagctgctgcagcagggccacctcaatcaggccttccagcaggcgctgacagctgctgacctgaacctggtgctgtatgtgtgtgaaactgtggacccagcccaggtttttgggcagccaccctgcccgctctcccagcctgtgctcctttccctcatccagcagctggcatctgaccttggcactcgaactgacctcaagctcagctacctggaagaggccgtgatgcacctggaccacagtgaccccatcactcgggaccacatgggctccgttatggcccaggtgcgccaaaagctttttcagttcctgcaggctgagccacacaactcacttggcaaagcagctcggcgtctcagcctcatgctgcatggcctcgtgacccccagcctcccttagctgctaagcctgccttgcccaggggtgggatggcactgaaggccagcagacaggcctaggctggggcagggtcacggctggcctttacctgctcaggcccccatctctggggtgtttgggggtcagggagcagggagcactggccgtggtctacagcgtgtggtagtcagaaggtttagctgggcccagggcaggtattgcgcctgcttgggttctgccatgcctggagcatgaccctgagatcgtgacaccacttgagtggaattttccatgttcctttttacctctaatttggatctttttgtttttgaaaaacattgagaaattcaattaaatgcttttggaataaaatgga

SEQ ID NO: 319420 - DNA, 2484 bp, Homo sapiens
tcggccctgatgttagcttcgtgcctactgccacctctgcactgtccctggagctgcaggaagtggagcccctggggctaccccaagcctcccctagccgcactcgttcccctgatgtcatctcctcagcttccactgccctgtcccaggacatccctgagattgcatctgaggccctgtcccgtggttttggctcctctgcaccagagggccttgagccagacagtatggcttcagccgcctcggcactgcacctgctgtccccacggccccggccagggcccgagctcggcccccagctcgggcttgatggaggccctggggatggagatcggcataataccccctccctcctggaggcagccttgacccaggaggcctcgactcctgacagtcaggtttggcccacagcacctgacattactcgtgagacctgcagcaccctggcagaaagccccaggaatggccttcaggaaaagcacaagagcctggccttccaccgaccaccatatcacctgctgcagcaacgtgacagccaggatgccagtgctgagcaaagtgaccatgatgatgaggtggccagccttgcctctgcttcaggaggctttggcaccaaagttcctgctccacggctgcctgccaaggactggaagaccaagggatcccctcgaacctcacccaagctcaagaggaaaagcaagaaggatgatggggatgcagccatgggatcccggctcacagagcaccaggtggcagagccccctgaggactggccagcactaatttggcaacagcagagagagctggcagagctgcggcacagccaggaagagctgctgcagcgtctgtgtacccaactcgaaggcctgcagagcacagtcacaggccacgtagaacgtgcccttgagactcggcacgagcaggaacagcggcggctggagcgagcactggctgaggggcagcagcggggagggcagctgcaggagcagctgacacaacagttgtcccaagcactgtcgtcagctgtagctgggcggctagagcgcagcatacgggatgagatcaagaagacagtccctccatgtgtctcaaggagtctggagcctatggcaggccaactgagcaactcagtggctaccaagctcacagctgtggagggcagcatgaaagagaacatctccaagctgctcaagtccaagaacttgactgatgccatcgcccgagcagctgcagacacattacaagggccgatgcaggctgcctaccgggaagccttccagagtgtggtgctgccggcctttgagaagagctgccaggccatgttccagcaaatcaatgatagcttccggctggggacacaggaatacttgcagcagctagaaagccacatgaagagccggaaggcacgggaacaggaggccagggagcctgtgctagcccagctgcggggcctggtcagcacactgcagagtgccactgagcagatggcagccaccgtggccggcagtgttcgtgctgaggtgcagcaccagctgcatgtggctgtgggcagcctgcaggagtccattttagcacaggtacagcgcatcgttaagggtgaggtgagtgtggcgctcaaggagcagcaggccgccgtcacctccagcatcatgcaggccatgcgctcagctgctggcacacctgtcccctctgcccaccttgactgccaggcccagcaagcccatatcctgcagctgctgcagcagggccacctcaatcaggccttccagcaggcgctgacagctgctgacctgaacctggtgctgtatgtgtgtgaaactgtggacccagcccaggtttttgggcagccaccctgcccgctctcccagcctgtgctcctttccctcatccagcagctggcatctgaccttggcactcgaactgacctcaagctcagctacctggaagaggccgtgatgcacctggaccacagtgaccccatcactcgggaccacatgggctccgttatggcccaggtgcgccaaaagctttttcagttcctgcaggctgagccacacaactcacttggcaaagcagctcggcgtctcagcctcatgctgcatggcctcgtgacccccagcctcccttagctgctaagcctgccttgcccaggggtgggatggcactgaaggccagcagacaggcctaggctggggcagggtcacggctggcctttacctgctcaggcccccatctctggggtgtttgggggtcagggagcagggagcactggccgtggtctacagcgtgtggtagtcagaaggtttagctgggcccagggcaggtattgcgcctgcttgggttctgccatgcctggagcatgaccctgagatcgtgacaccacttgagtggaattttccatgttcctttttacctctaatttggatctttttgtttttgaaaaacattgagaaattcaattaaatgcttttggaataaaatgga

SEQ ID NO: 319421 - DNA, 4448 bp, Homo sapiens
tcagcgacgctgcgcgggtggcggtttgcgaactgcgggtggactgtgtagtgaccggcgtcccgctgtctcgccccgtggcgggtgagcgagggtgcgtggtgcgcggcggcggcggaacgaacgcggtgcgggcggggcgcccgccgcagggcccatggcctcctgcgcgagcatcgacatcgaggacgccacgcagcacctgcgggacatcctcaagctggaccggcccgcgggcggccccagtgcagagagcccacggccatccagtgcctacaatggggacctcaatggacttctggtcccagacccgctctgctcaggtgatagtacctcagcaaacaagactggtcttcggaccatgccacccattaacctgcaagagaagcaggtcatctgtctctcaggagatgatagctccacctgcattgggattttggccaaggaggtggagattgtggctagcagtgactctagcatttcaagcaaggcccggggaagcaacaaggtgaaaattcagcctgtcgccaagtatgactgggaacagaagtactactatggcaacctgattgctgtgtctaactccttcttggcctatgccattcgggctgccaacaatggctctgccatggtgcgggtgatcagcgtcagcacttcggagcggaccttgctcaagggcttcacaggcagtgtggctgatctggctttcgcgcacctcaactctccacagctggcctgcctggatgaggcaggcaacctgttcgtgtggcgcttggctctggttaatggcaaaattcaagaagagatcttggtccatattcggcagccagagggcacgccactgaaccactttcgcaggatcatctggtgccccttcatccctgaggagagcgaagactgctgtgaggagagcagcccaacagtggccctgctgcatgaagaccgggctgaggtgtgggacctggacatgctccgctccagccacagtacctggcctgtggatgttagccagatcaagcagggcttcattgtggtaaaaggtcatagcacgtgcctcagtgaaggagccctctctcctgatgggactgtgctggctactgcgagccacgatggctatgtcaagttctggcagatctacattgaggggcaagatgagccaaggtgtctgcacgagtggaaacctcatgatgggcggcccctctcctgcctcctgttctgtgacaaccataagaaacaagaccctgatgtccctttctggaggttccttattactggtgctgaccagaaccgagagttaaagatgtggtgtacagtatcctggacctgcctgcagactattcgcttctccccagatatcttcagctcagtgagtgtgccccctagcctcaaggtttgcttggacctctcagcagaatacctgattctcagcgatgtgcaacggaaggtcctctatgtgatggagctgctgcaaaaccaggaggagggccacgcctgcttcagctccatctcggagttcctgctcacccaccctgtgctgagctttggtatccaggttgtgagtcgctgccggctacggcacactgaggtgctgcctgccgaagaggaaaatgacagcctgggtgctgatggtacccatggagccggtgccatggagtctgcggccggtgtgctcatcaagctcttttgtgtgcatactaaggcactgcaagatgtgcagatccgcttccagccacagctgaaccctgatgtggtggccccactgcccacccacactgcccacgaggacttcacatttggagagtctcggcccgaactgggctctgagggcctggggtcagccgctcacggctcccagcctgacctccgacgaatcgtggagctgcctgcacctgccgacttcctcagtctgagcagtgagaccaagcccaagttgatgacacctgacgccttcatgacacctagcgcctccttgcagcagatcactgcctctcccagcagcagcagcagcggtagcagcagcagcagcagcagtagcagcagctcccttacagctgtgtctgccatgagcagcacctcagctgtggacccctccttgaccaggccacctgaggagctgaccttgagccccaagctgcagctggatggcagcctgacaatgagcagcagtggcagccttcaggcaagcccgcgtggcctcctgcctggcctgctcccagccccagctgacaaactgactcccaaggggccgggccaggtgcctactgccacctctgcactgtccctggagctgcaggaagtggagcccctggggctaccccaagcctcccctagccgcactcgttcccctgatgtcatctcctcagcttccactgccctgtcccaggacatccctgagattgcatctgaggccctgtcccgtggttttggctcctctgcaccagagggccttgagccagacagtatggcttcagccgcctcggcactgcacctgctgtccccacggccccggccagggcccgagctcggcccccagctcgggcttgatggaggccctggggatggagatcggcataataccccctccctcctggaggcagccttgacccaggaggcctcgactcctgacagtcaggtttggcccacagcacctgacattactcgtgagacctgcagcaccctggcagaaagccccaggaatggccttcaggaaaagcacaagagcctggccttccaccgaccaccatatcacctgctgcagcaacgtgacagccaggatgccagtgctgagcaaagtgaccatgatgatgaggtggccagccttgcctctgcttcaggaggctttggcaccaaagttcctgctccacggctgcctgccaaggactggaagaccaagggatcccctcgaacctcacccaagctcaagaggaaaagcaagaaggatgatggggatgcagccatgggatcccggctcacagagcaccaggtggcagagccccctgaggactggccagcactaatttggcaacagcagagagagctggcagagctgcggcacagccaggaagagctgctgcagcgtctgtgtacccaactcgaaggcctgcagagcacagtcacaggccacgtagaacgtgcccttgagactcggcacgagcaggaacagcggcggctggagcgagcactggctgaggggcagcagcggggagggcagctgcaggagcagctgacacaacagttgtcccaagcactgtcgtcagctgtagctgggcggctagagcgcagcatacgggatgagatcaagaagacagtccctccatgtgtctcaaggagtctggagcctatggcaggccaactgagcaactcagtggctaccaagctcacagctgtggagggcagcatgaaagagaacatctccaagctgctcaagtccaagaacttgactgatgccatcgcccgagcagctgcagacacattacaagggccgatgcaggctgcctaccgggaagccttccagagtgtggtgctgccggcctttgagaagagctgccaggccatgttccagcaaatcaatgatagcttccggctggggacacaggaatacttgcagcagctagaaagccacatgaagagccggaaggcacgggaacaggaggccagggagcctgtgctagcccagcagcaagcccatatcctgcagctgctgcagcagggccacctcaatcaggccttccagcaggcgctgacagctgctgacctgaacctggtgctgtatgtgtgtgaaactgtggacccagcccaggtttttgggcagccaccctgcccgctctcccagcctgtgctcctttccctcatccagcagctggcatctgaccttggcactcgaactgacctcaagctcagctacctggaagaggccgtgatgcacctggaccacagtgaccccatcactcgggaccacatgggctccgttatggcccaggtgcgccaaaagctttttcagttcctgcaggctgagccacacaactcacttggcaaagcagctcggcgtctcagcctcatgctgcatggcctcgtgacccccagcctcccttagctgctaagcctgccttgcccaggggtgggatggcactgaaggccagcagacaggcctaggctggggcagggtcacggctggcctttacctgctcaggcccccatctctggggtgtttgggggtcagggagcagggagcactggccgtggtctacagcgtgtggtagtcagaaggtttagctgggcccagggcaggtattgcgcctgcttgggttctgccatgcctggagcatgaccctgagatcgtgacaccacttgagtggaattttccatgttcctttttacctctaatttggatctttttgtttttgaaaaacattgagaaattcaattaaatgcttttggaataaaatgga

SEQ ID NO: 319422 - DNA, 4942 bp, Homo sapiens
tcagcgacgctgcgcgggtggcggtttgcgaactgcgggtggactgtgtagtgaccggcgtcccgctgtctcgccccgtggcgggtgagcgagggtgcgtggtgcgcggcggcggcggaacgaacgcggtgcgggcggggcgcccgccgcagggcccatggcctcctgcgcgagcatcgacatcgaggacgccacgcagcacctgcgggacatcctcaagctggaccggcccgcgggcggccccagtgcagagagcccacggccatccagtgcctacaatggggacctcaatggacttctggtcccagacccgctctgctcaggtgatagtacctcagcaaacaagactggtcttcggaccatgccacccattaacctgcaagagaagcaggtcatctgtctctcaggagatgatagctccacctgcattgggattttggccaaggaggtggagattgtggctagcagtgactctagcatttcaagcaaggcccggggaagcaacaaggtgaaaattcagcctgtcgccaagtatgactgggaacagaagtactactatggcaacctgattgctgtgtctaactccttcttggcctatgccattcgggctgccaacaatggctctgccatggtgcgggtgatcagcgtcagcacttcggagcggaccttgctcaagggcttcacaggcagtgtggctgatctggctttcgcgcacctcaactctccacagctggcctgcctggatgaggcaggcaacctgttcgtgtggcgcttggctctggttaatggcaaaattcaagaagagatcttggtccatattcggcagccagagggcacgccactgaaccactttcgcaggatcatctggtgccccttcatccctgaggagagcgaagactgctgtgaggagagcagcccaacagtggccctgctgcatgaagaccgggctgaggtgtgggacctggacatgctccgctccagccacagtacctggcctgtggatgttagccagatcaagcagggcttcattgtggtaaaaggtcatagcacgtgcctcagtgaaggagccctctctcctgatgggactgtgctggctactgcgagccacgatggctatgtcaagttctggcagatctacattgaggggcaagatgagccaaggtgtctgcacgagtggaaacctcatgatgggcggcccctctcctgcctcctgttctgtgacaaccataagaaacaagaccctgatgtccctttctggaggttccttattactggtgctgaccagaaccgagagttaaagatgtggtgtacagtatcctggacctgcctgcagactattcgcttctccccagatatcttcagctcagtgagtgtgccccctagcctcaaggtttgcttggacctctcagcagaatacctgattctcagcgatgtgcaacggaaggtcctctatgtgatggagctgctgcaaaaccaggaggagggccacgcctgcttcagctccatctcggagttcctgctcacccaccctgtgctgagctttggtatccaggttgtgagtcgctgccggctacggcacactgaggtgctgcctgccgaagaggaaaatgacagcctgggtgctgatggtacccatggagccggtgccatggagtctgcggccggtgtgctcatcaagctcttttgtgtgcatactaaggcactgcaagatgtgcagatccgcttccagccacagctgaaccctgatgtggtggccccactgcccacccacactgcccacgaggacttcacatttggagagtctcggcccgaactgggctctgagggcctggggtcagccgctcacggctcccagcctgacctccgacgaatcgtggagctgcctgcacctgccgacttcctcagtctgagcagtgagaccaagcccaagttgatgacacctgacgccttcatgacacctagcgcctccttgcagcagatcactgcctctcccagcagcagcagcagcggtagcagcagcagcagcagcagtagcagcagctcccttacagctgtgtctgccatgagcagcacctcagctgtggacccctccttgaccaggccacctgaggagctgaccttgagccccaagctgcagctggatggcagcctgacaatgagcagcagtggcagccttcaggcaagcccgcgtggcctcctgcctggcctgctcccagccccagctgacaaactgactcccaaggggccgggccaggtgcctactgccacctctgcactgtccctggagctgcaggaagtggagcccctggggctaccccaagcctcccctagccgcactcgttcccctgatgtcatctcctcagcttccactgccctgtcccaggacatccctgagattgcatctgaggccctgtcccgtggttttggctcctctgcaccagagggccttgagccagacagtatggcttcagccgcctcggcactgcacctgctgtccccacggccccggccagggcccgagctcggcccccagctcgggcttgatggaggccctggggatggagatcggcataataccccctccctcctggaggcagccttgacccaggaggcctcgactcctgacagtcaggtttggcccacagcacctgacattactcgtgagacctgcagcaccctggcagaaagccccaggaatggccttcaggaaaagcacaagagcctggccttccaccgaccaccatatcacctgctgcagcaacgtgacagccaggatgccagtgctgagcaaagtgaccatgatgatgaggtggccagccttgcctctgcttcaggaggctttggcaccaaagttcctgctccacggctgcctgccaaggactggaagaccaagggatcccctcgaacctcacccaagctcaagaggaaaagcaagaaggatgatggggatgcagccatgggatcccggctcacagagcaccaggtggcagagccccctgaggactggccagcactaatttggcaacagcagagagagctggcagagctgcggcacagccaggaagagctgctgcagcgtctgtgtacccaactcgaaggcctgcagagcacagtcacaggccacgtagaacgtgcccttgagactcggcacgagcaggaacagcggcggctggagcgagcactggctgaggggcagcagcggggagggcagctgcaggagcagctgacacaacagttgtcccaagcactgtcgtcagctgtagctgggcggctagagcgcagcatacgggatgagatcaagaagacagtccctccatgtgtctcaaggagtctggagcctatggcaggccaactgagcaactcagtggctaccaagctcacagctgtggagggcagcatgaaagagaacatctccaagctgctcaagtccaagaacttgactgatgccatcgcccgagcagctgcagacacattacaagggccgatgcaggctgcctaccgggaagccttccagagtgtggtgctgccggcctttgagaagagctgccaggccatgttccagcaaatcaatgatagcttccggctggggacacaggaatacttgcagcagctagaaagccacatgaagagccggaaggcacgggaacaggaggccagggagcctgtgctagcccagctgcggggcctggtcagcacactgcagagtgccactgagcagatggcagccaccgtggccggcagtgttcgtgctgaggtgcagcaccagctgcatgtggctgtgggcagcctgcaggagtccattttagcacaggtacagcgcatcgttaagggtgaggtgagtgtggcgctcaaggagcagcaggccgccgtcacctccagcatcatgcaggccatgcgctcagctgctggcacacctgtcccctctgcccaccttgactgccaggcccagcaagcccatatcctgcagctgctgcagcagggccacctcaatcaggccttccagcaggcgctgacagctgctgacctgaacctggtgctgtatgtgtgtgaaactgtggacccagcccaggtttttgggcagccaccctgcccgctctcccagcctgtgctcctttccctcatccagcagctggcatctgaccttggcactcgaactgacctcaagctcaggtaagtggggacagccagggatggggagatgagctggggagtggggcagtgggagggagcagtttgaagctgacgcccacttctgcctgaatcctctccctaattttctccaccagtcctttctgccttcacccagagggttccctctgggcctcggtgccaccagggggcgctcccgtctgctggcacccacctgtagcctgtcctttcccccccatccccagctacctggaagaggccgtgatgcacctggaccacagtgaccccatcactcgggaccacatgggctccgttatggcccaggtgcgccaaaagctttttcagttcctgcaggctgagccacacaactcacttggcaaagcagctcggcgtctcagcctcatgctgcatggcctcgtgacccccagcctcccttagctgctaagcctgccttgcccaggggtgggatggcactgaaggccagcagacaggcctaggctggggcagggtcacggctggcctttacctgctcaggcccccatctctggggtgtttgggggtcagggagcagggagcactggccgtggtctacagcgtgtggtagtcagaaggtttagctgggcccagggcaggtattgcgcctgcttgggttctgccatgcctggagcatgaccctgagatcgtgacaccacttgagtggaattttccatgttcctttttacctctaatttggatctttttgtttttgaaaaacattgagaaattcaattaaatgcttttggaataaaatgga

SEQ ID NO: 319423 - DNA, 1170 bp, Homo sapiens
ttcgcttctccacccacccctcaaaatggcatgttcaggcagtggggcccctacccctggaccatgaaggctccatgaagagccggaaggcacgggaacaggaggccagggagcctgtgctagcccagctgcggggcctggtcagcacactgcagagtgccactgagcagatggcagccaccgtggccggcagtgttcgtgctgaggtgcagcaccagctgcatgtggctgtgggcagcctgcaggagtccattttagcacaggtacagcgcatcgttaagggtgaggtgagtgtggcgctcaaggagcagcaggccgccgtcacctccagcatcatgcaggccatgcgctcagctgctggcacacctgtcccctctgcccaccttgactgccaggcccagcaagcccatatcctgcagctgctgcagcagggccacctcaatcaggccttccagcaggcgctgacagctgctgacctgaacctggtgctgtatgtgtgtgaaactgtggacccagcccaggtttttgggcagccaccctgcccgctctcccagcctgtgctcctttccctcatccagcagctggcatctgaccttggcactcgaactgacctcaagctcagctacctggaagaggccgtgatgcacctggaccacagtgaccccatcactcgggaccacatgggctccgttatggcccaggtgcgccaaaagctttttcagttcctgcaggctgagccacacaactcacttggcaaagcagctcggcgtctcagcctcatgctgcatggcctcgtgacccccagcctcccttagctgctaagcctgccttgcccaggggtgggatggcactgaaggccagcagacaggcctaggctggggcagggtcacggctggcctttacctgctcaggcccccatctctggggtgtttgggggtcagggagcagggagcactggccgtggtctacagcgtgtggtagtcagaaggtttagctgggcccagggcaggtattgcgcctgcttgggttctgccatgcctggagcatgaccctgagatcgtgacaccacttgagtggaattttccatgttcctttttacctctaatttggatctttttgtttttgaaaaacattgagaaattcaattaaatgcttttggaataaaatgga

SEQ ID NO: 319424 - DNA, 4822 bp, Homo sapiens
tcagcgacgctgcgcgggtggcggtttgcgaactgcgggtggactgtgtagtgaccggcgtcccgctgtctcgccccgtggcgggtgagcgagggtgcgtggtgcgcggcggcggcggaacgaacgcggtgcgggcggggcgcccgccgcagggcccatggcctcctgcgcgagcatcgacatcgaggacgccacgcagcacctgcgggacatcctcaagctggaccggcccgcgggcggccccagtgcagagagcccacggccatccagtgcctacaatggggacctcaatggacttctggtcccagacccgctctgctcaggtgatagtacctcagcaaacaagactggtcttcggaccatgccacccattaacctgcaagagaagcaggtcatctgtctctcaggagatgatagctccacctgcattgggattttggccaaggaggtggagattgtggctagcagtgactctagcatttcaagcaaggcccggggaagcaacaaggtgaaaattcagcctgtcgccaagtatgactgggaacagaagtactactatggcaacctgattgctgtgtctaactccttcttggcctatgccattcgggctgccaacaatggctctgccatggtgcgggtgatcagcgtcagcacttcggagcggaccttgctcaagggcttcacaggcagtgtggctgatctggctttcgcgcacctcaactctccacagctggcctgcctggatgaggcaggcaacctgttcgtgtggcgcttggctctggttaatggcaaaattcaagaagagatcttggtccatattcggcagccagagggcacgccactgaaccactttcgcaggatcatctggtgccccttcatccctgaggagagcgaagactgctgtgaggagagcagcccaacagtggccctgctgcatgaagaccgggctgaggtgtgggacctggacatgctccgctccagccacagtacctggcctgtggatgttagccagatcaagcagggcttcattgtggtaaaaggtcatagcacgtgcctcagtgaaggagccctctctcctgatgggactgtgctggctactgcgagccacgatggctatgtcaagttctggcagatctacattgaggggcaagatgagccaaggtgtctgcacgagtggaaacctcatgatgggcggcccctctcctgcctcctgttctgtgacaaccataagaaacaagaccctgatgtccctttctggaggttccttattactggtgctgaccagaaccgagagttaaagatgtggtgtacagtatcctggacctgcctgcagactattcgcttctccccagatatcttcagctcagtgagtgtgccccctagcctcaaggtttgcttggacctctcagcagaatacctgattctcagcgatgtgcaacggaaggtcctctatgtgatggagctgctgcaaaaccaggaggagggccacgcctgcttcagctccatctcggagttcctgctcacccaccctgtgctgagctttggtatccaggttgtgagtcgctgccggctacggcacactgaggtgctgcctgccgaagaggaaaatgacagcctgggtgctgatggtacccatggagccggtgccatggagtctgcggccggtgtgctcatcaagctcttttgtgtgcatactaaggcactgcaagatgtgcagatccgcttccagccacagctgaaccctgatgtggtggccccactgcccacccacactgcccacgaggacttcacatttggagagtctcggcccgaactgggctctgagggcctggggtcagccgctcacggctcccagcctgacctccgacgaatcgtggagctgcctgcacctgccgacttcctcagtctgagcagtgagaccaagcccaagttgatgacacctgacgccttcatgacacctagcgcctccttgcagcagatcactgcctctcccagcagcagcagcagcggtagcagcagcagcagcagcagtagcagcagctcccttacagctgtgtctgccatgagcagcacctcagctgtggacccctccttgaccaggccacctgaggagctgaccttgagccccaagctgcagctggatggcagcctgacaatgagcagcagtggcagccttcaggcaagcccgcgtggcctcctgcctggcctgctcccagccccagctgacaaactgactcccaaggggccgggccaggtgcctactgccacctctgcactgtccctggagctgcaggaagtggagcccctggggctaccccaagcctcccctagccgcactcgttcccctgatgtcatctcctcagcttccactgccctgtcccaggacatccctgagattgcatctgaggccctgtcccgtggttttggctcctctgcaccagagggccttgagccagacagtatggcttcagccgcctcggcactgcacctgctgtccccacggccccggccagggcccgagctcggcccccagctcgggcttgatggaggccctggggatggagatcggcataataccccctccctcctggaggcagccttgacccaggaggcctcgactcctgacagtcaggtttggcccacagcacctgacattactcgtgagacctgcagcaccctggcagaaagccccaggaatggccttcaggaaaagcacaagagcctggccttccaccgaccaccatatcacctgctgcagcaacgtgacagccaggatgccagtgctgagcaaagtgaccatgatgatgaggtggccagccttgcctctgcttcaggaggctttggcaccaaagttcctgctccacggctgcctgccaaggactggaagaccaagggatcccctcgaacctcacccaagctcaagaggaaaagcaagaaggatgatggggatgcagccatgggatcccggctcacagagcaccaggtggcagagccccctgaggactggccagcactaatttggcaacagcagagagagctggcagagctgcggcacagccaggaagagctgctgcagcgtctgtgtacccaactcgaaggcctgcagagcacagtcacaggccacgtagaacgtgcccttgagactcggcacgagcaggaacagcggcggctggagcgagcactggctgaggggcagcagcggggagggcagctgcaggagcagctgacacaacagttgtcccaagcactgtcgtcagctgtagctgggcggctagagcgcagcatacgggatgagatcaagaagacagtccctccatgtgtctcaaggagtctggagcctatggcaggccaactgagcaactcagtggctaccaagctcacagctgtggagggcagcatgaaagagaacatctccaagctgctcaagtccaagaacttgactgatgccatcgcccgagcagctgcagacacattacaagggccgatgcaggctgcctaccgggaagccttccagagtgtggtgctgccggcctttgagaagagctgccaggccatgttccagcaaatcaatgatagcttccggctggggacacaggaatacttgcagcagctagaaagccacatgaagagccggaaggcacgggaacaggaggccagggagcctgtgctagcccagctgcggggcctggtcagcacactgcagagtgccactgagcagatggcagccaccgtggccggcagtgttcgtgctgaggtgcagcaccagctgcatgtggctgtgggcagcctgcaggagtccattttagcacaggtacagcgcatcgttaagggtgaggtgagtgtggcgctcaaggagcagcaggccgccgtcacctccagcatcatgcaggccatgcgctcagctgctggcacacctgtcccctctgcccaccttgactgccaggcccagcaagcccatatcctgcagctgctgcagcagggccacctcaatcaggccttccagcaggcgctgacagctgctgacctgaacctggtgctgtatgtgtgtgaaactgtggacccagcccaggtttttgggcagccaccctgcccgctctcccagcctgtgctcctttccctcatccagcagctggcatctgaccttggcactcgaactgacctcaagctcagctacctggaagaggccgtgatgcacctggaccacagtgaccccatcactcgggaccacatgggctccgttatggcccaggtgcgccaaaagctttttcagttcctgcaggctgagccacacaactcacttggcaaagcagctcggcgtctcagcctcatgctgcatggcctcgtgacccccagcctcccttagctgctaagcctgccttgcccaggggtgggatggcactgaaggccagcagacaggcctaggctggggcagggtcacggctggcctttacctgctcaggcccccatctctggggtgtttgggggtcagggagcagggagcactggccgtggtctacagcgtgtggtagtcagaaggtttagctgggcccagggcaggtattgcgcctgcttgggttctgccatgcctggagcatgaccctgagatcgtgacaccacttgagtggaattttccatgttcctttttacctctaatttggatctttttgtttttgaaaaacattgagaaattcaattaaatgcttttggaataaaatggagtatgtgtgtgcttttggtttgtctttggtgtgactctcataactgccgtctgttcgttctctgcccatctcttgcccgtggagctctgtcgaggccaacccag

SEQ ID NO: 319425 - DNA, 3085 bp, Homo sapiens
tcagcgacgctgcgcgggtggcggtttgcgaactgcgggtggactgtgtagtgaccggcgtcccgctgtctcgccccgtggcgggtgagcgagggtgcgtggtgcgcggcggcggcggaacgaacgcggtgcgggcggggcgcccgccgcagggcccatggcctcctgcgcgagcatcgacatcgaggacgccacgcagcacctgcgggacatcctcaagctggaccggcccgcgggcggccccagtgcagagagcccacggccatccagtgcctacaatggggacctcaatggacttctggtcccagacccgctctgctcaggtgatagtacctcagcaaacaagactggtcttcggaccatgccacccattaacctgcaagagaagcaggtcatctgtctctcaggagatgatagctccacctgcattgggattttggccaaggaggtggagattgtggctagcagtgactctagcatttcaagcaaggcccggggaagcaacaaggtgaaaattcagcctgtcgccaagtatgactgggaacagaagtactactatggcaacctgattgctgtgtctaactccttcttggcctatgccattcgggctgccaacaatggctctgccatggtgcgggtgatcagcgtcagcacttcggagcggaccttgctcaagggcttcacaggcagtgtggctgatctggctttcgcgcacctcaactctccacagctggcctgcctggatgaggcaggcaacctgttcgtgtggcgcttggctctggttaatggcaaaattcaagaagagatcttggtccatattcggcagccagagggcacgccactgaaccactttcgcaggatcatctggtgccccttcatccctgaggagagcgaagactgctgtgaggagagcagcccaacagtggccctgctgcatgaagaccgggctgaggtgtgggacctggacatgctccgctccagccacagtacctggcctgtggatgttagccagatcaagcagggcttcattgtggtaaaaggtcatagcacgtgcctcagtgaaggagccctctctcctgatgggactgtgctggctactgcgagccacgatggctatgtcaagttctggcagatctacattgaggggcaagatgagccaaggtgtctgcacgagtggaaacctcatgatgggcggcccctctcctgcctcctgttctgtgacaaccataagaaacaagaccctgatgtccctttctggaggttccttattactggtgctgaccagaaccgagagttaaagatgtggtgtacagtatcctggacctgcctgcagactattcgcttctccccagatatcttcagctcagtgagtgtgccccctagcctcaaggtttgcttggacctctcagcagaatacctgattctcagcgatgtgcaacggaaggtcctctatgtgatggagctgctgcaaaaccaggaggagggccacgcctgcttcagctccatctcggagttcctgctcacccaccctgtgctgagctttggtatccaggttgtgagtcgctgccggctacggcacactgaggtgctgcctgccgaagaggaaaatgacagcctgggtgctgatggtacccatggagccggtgccatggagtctgcggccggtgtgctcatcaagctcttttgtgtgcatactaaggcactgcaagatgtgcagatccgcttccagccacagctgaaccctgatgtggtggccccactgcccacccacactgcccacgaggacttcacatttggagagtctcggcccgaactgggctctgagggcctggggtcagccgctcacggctcccagcctgacctccgacgaatcgtggagctgcctgcacctgccgacttcctcagtctgagcagtgagaccaagcccaagttgatgacacctgacgccttcatgacacctagcgcctccttgcagcagatcactgcctctcccagcagcagcagcagcggtagcagcagcagcagcagcagtagcagcagctcccttacagctgtgtctgccatgagcagcacctcagctgtggacccctccttgaccaggccacctgaggagctgaccttgagccccaagctgcagctggatggcagcctgacaatgagcagcagtggcagccttcaggcaagcccgcgtggcctcctgcctggcctgctcccagccccagctgacaaactgactcccaaggggccgggccaggtgcctactgccacctctgcactgtccctggagctgcaggaagtggagcccctggggctaccccaagcctcccctagccgcactcgttcccctgatgtcatctcctcagcttccactgccctgtcccaggacatccctgagattgcatctgaggccctgtcccgtggttttggctcctctgcaccagagggccttgagccagacagtatggcttcagccgcctcggcactgcacctgctgtccccacggccccggccagggcccgagctcggcccccagctcgggcttgatggaggccctggggatggagatcggcataataccccctccctcctggaggcagccttgacccaggaggcctcgactcctgacagtcaggtttggcccacagcacctgacattactcgtgagacctgcagcaccctggcagaaagccccaggaatggccttcaggaaaagcacaagagcctggccttccaccgaccaccatatcacctgctgcagcaacgtgacagccaggatgccagtgctgagcaaagtgaccatgatgatgaggtggccagccttgcctctgcttcaggaggctttggcaccaaagttcctgctccacggctgcctgccaaggactggaagaccaagggatcccctcgaacctcacccaagctcaagaggaaaagcaagaaggatgatgggggatccgccctgggatcccggctcacagagcaccagggggaaaaccccttgaggactgcccaacattaatttgcaaccaaaaaaaaactggcaaacttggcacaaccagaagaactcttgcacttttggaccccaatt

SEQ ID NO: 319426 - DNA, 741 bp, Homo sapiens
cgaaattaacactgaccttacaacatatttcatttgtggacaaagacacagtaaatgtgaggaaactacagaattgctatgactggagctaaatgaatagctctgaagtcagtgtcccatatttgcatatagatattcagaccaggcttgaggctgggtgtggtggcgcacacctgtaatcccagctacttgggaggctgaggcaggagaatcacttgaacctgggaggcggaggttgcagtgagctgagatggcatcactgcactccagcctgggtgacagggtgacactccacctcaaaaaataaaaataaaataaaaataaagttatgctactcctaaaccacttaatatatgttttgtggttttcaaaattatgtaatcagccctgaaacacattggttgaaaatattttgagactttataagttagtatttattaaattaatattattttaataagttttgttaaatcctagtttaaatgacaaagctgtgtatagagtaggggtgactgaaggtggagtactcttgaggtggcgataaaaatgtacccataaatttaaagtccattctgtaattggaatactgaatgtcctgtgtgtggtgaacattttctaggtgattagaattgcatttcactggctgcatttgtttgtggtatgtaagatagctagaaatttattacttaactctgtggggcattgtttagatactgtgaagagttgaggtaaatatgtgtc

SEQ ID NO: 319427 - DNA, 153 bp, Homo sapiens
tctaaagaaatcttaattttaccagtttaaaaaaaacgcttctttttaaaagttcatgtttctaacctttaacaattcagttaataggaaaggagtaacttttaaatcaagctttaaaacatggaaatttaagccagtatgttagatattttt

SEQ ID NO: 319428 - DNA, 526 bp, Homo sapiens
agctgtgtatagagtaggggtgactgaaggtggagtactcttgaggtggcgataaaaatgtacccataaatttaaagtccattctgtaattggaatactgaatgtcctgtgtgtggtgaacattttctaggtgattagaattgcatttcactggctgcatttgtttgtggtatgtaagatagctagaaatttattacttaactctgtggggcattgtttagatactgtgaagagttgaggtaaatatgtgtcttgtaaaagctttgtgtgatcagaatattttggtaattataaaatgtttttgatgatacacatttaactctgttagtaattactctaaagaaatcttaattttaccagtttaaaaaaaacgcttctttttaaaagttcatgtttctaacctttaacaattcagttaataggaaaggagtaacttttaaatcaagctttaaaacatggaaatttaagccagtatgttagatattttttctatcccaccctaccatgataataaaaataaatctat

SEQ ID NO: 319429 - DNA, 616 bp, Homo sapiens
gtgcacgtgtggtagggtttatttaaggtttctaccagccatgaatttgctgggtcaaaggatactgcattgtaaactttgttaaataacttcaaattgttctccaaagtaggcaaatcagtgaacgctgtagttgcattactttattgtctaccttgtgtcagccttctctaattgctagtgagcttttgcgtcttttcatacattgtctcttcaagtgtactcttccatgaattgctggttaatattctgtgcccatttttctaggtgccaaatgctaatcttgggatcaattgggatatacctatgagcaaaataaagagcactactcttagagtttaccttctagcaagaggaaatgtattatgaagaataaacataataaacaagtgcattttatagcacaatagaaggtgataaatactaccggaaaaaagacaaagtaggacagggtaatgtgaaggggattggggccacagagtaggcaaaacattttattgtattaaatagggtggtcaaggtgggcctctttgagaaggcaggatttgagtcaagatgaggaagtaaagaacagcaagaggtcagtgagtcagaagtggagacacagaagagaaga

SEQ ID NO: 319430 - DNA, 666 bp, Homo sapiens
acggggatgatttataagtttggtttctgtcacgtcaggtgctgtgccggcgcttgagataggaaatgtaaaagacaacgtgcgcctcaattcacagtctcgtgagagagacagacaattatattacagcgtgaataaatatcatgaagtcggcggatgtggagaagtgaggcttcggggcacggggtctgggcgctggccggttgctggcccagggcgggaggcagggcgaactctgtgcagcccctccccttttccctgaggcggaggttcggtccctccggaccggacctttgattgacaacttcgataaataatccagtcacacttccgggccctttggttggggatcgccaggcgctgctttcgtcaactgtcaatccgcctgggtttgagtagagtgtgactgttctggtggactttcccctcaccaaacgtctcctcctgcctcagcctgcaccacctttctttctgggtggctgttgcctgttttcttaggggttaatgacggggatgatttataagtttggtttctgtcacgtcaggtgctgtgcccggcgcttgagataggaaatgtaaaagacaacgtgcgcctcaattcacagtctcgtgagagagacagacaattatattacagcgtgaataaatgtaatgaagatgtataca

SEQ ID NO: 319431 - DNA, 3032 bp, Homo sapiens
gggtcggccggcagggggcggggccgggcatggtaacggctcggaagcctaggaggctgggccggagggaggcggaggaaccggtgttcgccgccgccgctgcttcagcttattccttgtggcctctgcgggtcctgcctcagccatgatgatccacggcttccagagcagccaccgggatttctgcttcgggccctggaagctgacggcgtccaagacccacatcatgaagtcggcggatgtggagaaattagccgatgaattacatatgccatctctccctgaaatgatgtttggagacaacgttttaagaatccagcatgggtctggctttggaattgagttcaatgctacagatgcgttaagatgtgtaaacaactaccaaggaatgcttaaagtggcctgtgctgaagagtggcaagaaagcaggacggagggtgaacactccaaagaggttattaaaccatatgattggacctatacaacagattataagggaaccttacttggagaatctcttaagttaaaggttgtacctacaacagatcatatagatacagaaaaattgaaagccagagaacagattaagttttttgaagaagttctcctttttgaggatgaacttcatgatcatggagtttcaagcctgagtgtgaagattagagtaatgccttctagctttttcctgctgttgcggtttttcttgagaattgatggggtgcttatcagaatgaatgacacgagactttaccatgaggctgacaagacctacatgttacgagaatatacgtcacgagaaagcaaaatttctagtttgatgcatgttccaccttccctcttcacggaacctaatgaaatatcccagtatttaccaataaaggaagcagtttgtgagaagctaatatttccagaaagaattgatcctaacccagcagactcacaaaaaagtacacaagtggaataaaatgtgatacaacatatactcactatggaatctgactggacaccttggctatttgtaaggggttatttttattatgagaattaattgccttgtttatgtacagattttctgtagccttaaaggaaaaaaaaataaagatcgttacaggcaggtttcactcaactgctatttgtactgtctgtcttcacattcatattccagatttatattttctggagttaaatttggatgatttctaaattatcacaaagtgggacctcagcagtagtgatgtgtgtgtctcatgagcagtgagcacagtctgcattcatcatgaaacactatcttctaccaggaggaggttaatgtaaatcaccaaatcccaatgccttgtgactttcataggattcctgatcatgcatgttgatgtactggctcttcactttgggctttctgatgtttattcacacctttggagagttgcaacttgccacatacgaaattagtctcatagtgtagtgaacttcaaccccaaaattttaaaaatgtatttccccccagttttaaattgcctttgaaatttaaaaaaaaaaatttagacttagtaccagaaccaaaaatacctagatttttggagaacttattacatacatagaaacatgaatatggtttaccactgtgtgtgtgtaggatgttagaattatctgtcctccatctttaggtgctttttcttaaatgtggttctacttatactgatatttttaatttccatcttccatgcaacctcagagtgaataaaccccttaaatttggtgctggttcgaaaaagtctaaagggtttattaggggttgtttttcgcaaatattacatcaatccttaaagcaacaagattaattttctgcttaaaatatttgggaagataggtaaggaggagggggttttaaaatataaaagcaagtttttctattttaaggtgcatatttgtaacattacaggggatgaagtaaaatgtaattaattagcacaagacttagggagtacagaaaatacacagaagtaaatttcaaatccatttgattgttttcatagtgaccccttagtcattttatattcttgtctgcctttctagaaaaatggttgtcataaagtggaaagtgattaaaaagcatcaaataagaaattatttcaagtggatttttaaaaatatttttttgaagggcagggggaaaattcaccccttttctgatttgaaatatgttgtacatatttccatttgatggataaatcattaagtaagaatatttgatttaaagtattagccaacctcttcaggtattagcctgaagataaattttaacaaaacatatacacttgggtatccgtcattgctcaaactctatagtgtattgctggagccaataggcagggtatattttattagctaaatttgatatttgtcttctgccttctgtatcacctccaagctataggaaatcaggattttgttggctttaagaaaacacatggtatgttcactgtatattaaatatacctgtatttaatgttttctcttaggacagaaaagtagacacacacacacacacacacatgttgtgttcagctttctgttttatattatttgccattgagattagaatagaacaggctctattcatgcaaactatatgaaatgaaaaacttttaagactcttcattaattggagcttctgggcaacatcgtgtgtgtgtgtgtgtgtgtgtgtgtgtgtgtgtgtatacagacattttttttttaacttgttgattcagatgtcttggtccctgaatagtcctagattacttattttgagaattcattgttaaaaattacagggaattaaaataattgcctttttttttttagagggtaagagatgggtagaagagtatgcctctgaaaattttattagtttattcttgtggagaataccaagaaaatgtgtatttgcccattgctaaatatgatatatgccattttgtatttatttgtcccaagtgtctttttgtaagaggagaataaacaataaggaattactgatcaaaaaaaac

SEQ ID NO: 319432 - DNA, 1956 bp, Homo sapiens
gggtcggccggcagggggcggggccgggcatggtaacggctcggaagcctaggaggctgggccggagggaggcggaggaaccggtgttcgccgccgccgctgcttcagcttattccttgtggcctctgcgggtcctgcctcagccatgatgatccacggcttccagagcagccaccgggatttctgcttcgggccctggaagctgacggcgtccaagacccacatcatgaagtcggcggatgtggagaaattagccgatgaattacatatgccatctctccctgaaatgatgtttggagacaacgttttaagaatccagcatgggtctggctttggaattgagttcaatgctacagatgcgttaagatgtgtaaacaactaccaaggaatgcttaaagtggcctgtgctgaagagtggcaagaaagcaggacggagggtgaacactccaaagaggttattaaaccatatgattggacctatacaacagattataagggaaccttacttggagaatctcttaagttaaaggttgtacctacaacagatcatatagatacagaaaaattgaaagccagagaacagattaagttttttgaagaagttctcctttttgaggatgaacttcatgatcatggagtttcaagcctgagtgtgaagattagagtaatgccttctagctttttcctgctgttgcggtttttcttgagaattgatggggtgcttatcagaatgaatgacacgagactttaccatgaggctgacaagacctacatgttacgagaatatacgtcacgagaaagcaaaatttctagtttgatgcatgttccaccttccctcttcacggaacctaatgaaatatcccagtatttaccaataaaggaagcagtttgtgagaagctaatatttccagaaagaattgatcctaacccagcagactcacaaaaaagtacacaagtggaataaaatgtgatacaacatatactcactatggaatctgactggacaccttggctatttgtaaggggttatttttattatgagaattaattgccttgtttatgtacagattttctgtagccttaaaggaaaaaaaaataaagatcgttacaggcaggtttcactcaactgctatttgtactgtctgtcttcacattcatattccagatttatattttctggagttaaatttggatgatttctaaattatcacaaagtgggacctcagcagtagtgatgtgtgtgtctcatgagcagtgagcacagtctgcattcatcatgaaacactatcttctaccaggaggaggttaatgtaaatcaccaaatcccaatgccttgtgactttcataggattcctgatcatgcatgttgatgtactggctcttcactttgggctttctgatgtttattcacacctttggagagttgcaacttgccacatacgaaattagtctcatagtgtagtgaacttcaaccccaaaattttaaaaatgtatttccccccagttttaaattgcctttgaaatttaaaaaaaaaaatttagacttagtaccagaaccaaaaatacctagatttttggagaacttattacatacatagaaacatgaatatggtttaccactgtgtgtgtgtgtgtgtgtgtgtatacagacattttttttttaacttgttgattcagatgtcttggtccctgaatagtcctagattacttattttgagaattcattgttaaaaattacagggaattaaaataattgcctttttttttttagagggtaagagatgggtagaagagtatgcctctgaaaattttattagtttattcttgtggagaataccaagaaaatgtgtatttgcccattgctaaatatgatatatgccattttgtatttatttgtcccaagtgtctttttgtaagaggagaataaacaataaggaattactgatcaaaaaaaac

SEQ ID NO: 319433 - DNA, 816 bp, Homo sapiens
gggtcggccggcagggggcggggccgggcatggtaacggctcggaagcctaggaggctgggccggagggaggcggaggaaccggtgttcgccgccgccgctgcttcagcttattccttgtggcctctgcgggtcctgcctcagccatgatgatccacggcttccagagcagccaccgggatttctgcttcgggccctggaagctgacggcgtccaagacccacatcatgaagtcggcggatgtggagaaattagccgatgaattacatatgccatctctccctgaaatgatgtttggagacaacgttttaagaatccagcatgggtctggctttggaattgagttcaatgctacagatgcgttaagatgtgtaaacaactaccaaggaatgcttaaagtggcctgtgctgaagagtggcaagaaagcaggacggagggtgaacactccaaagaggttattaaaccatatgattggacctatacaacagattataagggaaccttacttggagaatctcttaagttaaaggttgtacctacaacagatcatatagatacagaaaaattgaaagccagagaacagattaagttttttgaagaagttctcctttttgaggatgaacttcatgatcatggagtttcaagcctgagtgtgaagattcctggtggcgggcacctgtagtcccagctactcgggaggctgaggcaggagaagcgtgaacccgggaggcggagcttgcagtgagctgagatcgcaccactgcactccagccctccagcctgggcgacagagcaagactccgtctcaaaaaaaaa

SEQ ID NO: 319434 - DNA, 2426 bp, Homo sapiens
atggccggtgagaggattgcttgatcccaggagttcaaggctgagtgtgaagattagagtaatgccttctagctttttcctgctgttgcggtttttcttgagaattgatggggtgcttatcagaatgaatgacacgagactttaccatgaggctgacaagacctacatgttacgagaatatacgtcacgagaaagcaaaatttctagtttgatgcatgttccaccttccctcttcacggaacctaatgaaatatcccagtatttaccaataaaggaagcagtttgtgagaagctaatatttccagaaagaattgatcctaacccagcagactcacaaaaaagtacacaagtggaataaaatgtgatacaacatatactcactatggaatctgactggacaccttggctatttgtaaggggttatttttattatgagaattaattgccttgtttatgtacagattttctgtagccttaaaggaaaaaaaaataaagatcgttacaggcaggtttcactcaactgctatttgtactgtctgtcttcacattcatattccagatttatattttctggagttaaatttggatgatttctaaattatcacaaagtgggacctcagcagtagtgatgtgtgtgtctcatgagcagtgagcacagtctgcattcatcatgaaacactatcttctaccaggaggaggttaatgtaaatcaccaaatcccaatgccttgtgactttcataggattcctgatcatgcatgttgatgtactggctcttcactttgggctttctgatgtttattcacacctttggagagttgcaacttgccacatacgaaattagtctcatagtgtagtgaacttcaaccccaaaattttaaaaatgtatttccccccagttttaaattgcctttgaaatttaaaaaaaaaaatttagacttagtaccagaaccaaaaatacctagatttttggagaacttattacatacatagaaacatgaatatggtttaccactgtgtgtgtgtaggatgttagaattatctgtcctccatctttaggtgctttttcttaaatgtggttctacttatactgatatttttaatttccatcttccatgcaacctcagagtgaataaaccccttaaatttggtgctggttcgaaaaagtctaaagggtttattaggggttgtttttcgcaaatattacatcaatccttaaagcaacaagattaattttctgcttaaaatatttgggaagataggtaaggaggagggggttttaaaatataaaagcaagtttttctattttaaggtgcatatttgtaacattacaggggatgaagtaaaatgtaattaattagcacaagacttagggagtacagaaaatacacagaagtaaatttcaaatccatttgattgttttcatagtgaccccttagtcattttatattcttgtctgcctttctagaaaaatggttgtcataaagtggaaagtgattaaaaagcatcaaataagaaattatttcaagtggatttttaaaaatatttttttgaagggcagggggaaaattcaccccttttctgatttgaaatatgttgtacatatttccatttgatggataaatcattaagtaagaatatttgatttaaagtattagccaacctcttcaggtattagcctgaagataaattttaacaaaacatatacacttgggtatccgtcattgctcaaactctatagtgtattgctggagccaataggcagggtatattttattagctaaatttgatatttgtcttctgccttctgtatcacctccaagctataggaaatcaggattttgttggctttaagaaaacacatggtatgttcactgtatattaaatatacctgtatttaatgttttctcttaggacagaaaagtagacacacacacacacacacacatgttgtgttcagctttctgttttatattatttgccattgagattagaatagaacaggctctattcatgcaaactatatgaaatgaaaaacttttaagactcttcattaattggagcttctgggcaacatcgtgtgtgtgtgtgtgtgtgtgtgtgtgtgtgtgtgtatacagacattttttttttaacttgttgattcagatgtcttggtccctgaatagtcctagattacttattttgagaattcattgttaaaaattacagggaattaaaataattgcctttttttttttagagggtaagagatgggtagaagagtatgcctctgaaaattttattagtttattcttgtggagaataccaagaaaatgtgtatttgcccattgctaaatatgatatatgccattttgtatttatttgtcccaagtgtctttttgtaagaggagaataaacaataaggaattactgatcaaaaaaaac

SEQ ID NO: 319435 - DNA, 4582 bp, Homo sapiens
gagcgggagtccgcggccgccgctgccgggcccggagtccgcggcgccccgaaggtaatcattaccaaatgaggaggaaaggacgatgtcatcgaggctctgcagcgaggcatccttcttccccatgcagtgttaaacactcccctacgcgagaaacgctgacctacgctcaagctcaaaggatggtagagatagaaattgaagggcgcttgcacaggatcagtatttttgatcccctggagatcatattggaagatgacctcactgctcaagagatgagtgagtgcaacagcaacaaggaaaacagcgagcggcctcctgtctgcttaagaactaagcgtcacaaaaacaacagagtcaaaaagaaaaacgaggccctccccagcgcccacggcacgccggcctcggccagtgccctcccggagcccaaggtgcgcatcgtggagtacagccctccgtccgcccccaggaggcctcctgtgtactacaagttcatcgagaagtcggccgaggaactggacaacgaggtggagtatgacatggacgaggaggactatgcctggctggagatcgtcaatgagaagcgcaagggcgactgcgtccccgccgtgtcgcagagcatgtttgagttcctgatggaccgcttcgagaaggagtcgcactgcgagaaccagaagcagggcgagcagcagtctctgatcgacgaggacgccgtgtgctgcatctgcatggacggggagtgtcagaacagcaacgtgatcctcttctgcgacatgtgcaacctggccgtgcaccaggagtgctacggggtgccctacatccccgagggccagtggctctgccgccactgcctgcagtcgcgggcccggcccgccgactgtgtgctgtgccccaacaagggtggtgccttcaaaaagacagatgacgaccgctggggtcacgtggtgtgtgccctgtggatcccagaggtcggctttgccaacacggtgttcatcgagcccatcgatggggtgaggaacatccctccagcccggtggaaactgacatgctacctctgtaagcagaagggcgtgggtgcctgcatccagtgccacaaagcaaactgctacacagcattccatgtgacgtgtgcccagaaggctggcctgtacatgaaaatggagcccgtgaaggaactgactggcggtggcaccaccttctccgtcagaaagaccgcttactgtgatgtccacacgcctccaggctgcacccggaggcctctgaatatttacggggatgtcgaaatgaaaaatggcgtctgtcgaaaagagagctcggttaaaacggtcaggtccacatccaaggtcaggaagaaggcaaaaaaggctaagaaagctctggctgagccctgcgcggtcctgccgaccgtgtgcgctccttatattcccccgcagaggttaaataggattgcgaatcaggtggccattcagcggaagaagcagtttgtggagcgagcccacagctactggctgctcaagcggctgtccaggaacggggcccccctgctgcggcggctgcagtccagcctgcagtctcagcgaagctcacagcagagagaaaatgatgaggagatgaaggctgccaaagagaagctgaagtactggcagcggctgcggcacgacctggagcgcgctcgcctgctgatcgagctgctgcgcaagcgggagaagctcaagcgtgagcaggtgaaggtggagcaggtcgccatggagctgcggctgaccccgctgacggtgctgctgcgctcagtgctggaccagctgcaagacaaggaccccgccaggatatttgcgcagcccgtgagtctgaaggaggtaccagattatttggatcacattaaacatcccatggactttgccacaatgaggaaacggttagaagctcaagggtataaaaacctccatgagtttgaggaggattttgatctcattatagataactgcatgaagtacaatgccagggacaccgtgttctatagagccgcggtgaggctgcgcgatcagggaggtgttgttctgaggcaggcccggcgcgaggtggacagcatcggcttggaagaggcctcggggatgcacctgcctgagcggcctgctgcggcaccgcggcggcctttctcctgggaagacgtggacaggttgctggaccccgccaacagagcccacctgggcctggaggagcagctgagagagctgctggacatgctcgacctcacctgcgctatgaagtccagcggctcccggagcaagcgggcaaagctgctcaaaaaggaaattgcccttctccgaaacaagctgagccagcagcacagccagcccctgcccacggggccaggcttggaaggcttcgaagaggacggagctgcgctggggccggaggcgggcgaggaaggagataaatctccccctaaacttgaaccatcagatgcattacctcttccttcaaactcggagactaattcagaaccaccaaccctcaaaccagtagaactcaacccagagcagagtaaacttttcaaaagagtcacatttgataatgaatcacatagcgcttgcactcagagcgcactggtaagcggacgccctccagagcccacccgcgccagtagtggcgatgtgccggcggcggcggcctccgcggtggcggagccagcaagcgatgtaaacagacgcacttctgttctcttctgcaaatcgaaaagtgtaagccccccaaagtctgccaagaacactgaaacccagccaacttctcctcagctagggaccaaaacctttttgtctgtagtccttccgaggttggagactcttctgcagccaaggaaaaggtcgcggagcacatgcggagactccgaggtggaggaggagtccccaggaaagcgcctggacgcaggtctcaccaacggctttgggggtgcgaggagcgagcaggagccgggcggcggcctggggaggaaggccacaccccgacgacgctgtgcctccgagtccagcatctcctccagcaacagcccgctctgcgactcgagctttaatgcgcccaaatgtgggcggggcaaaccggctcttgtgcgacggcacacgctggaggaccgcagtgagctgatctcctgcatcgagaatgggaactacgccaaggcggccaggatcgcagccgaagtcggccagagcagcatgtggatctccactgatgccgccgcctcggtgctggagcctctgaaggtggtgtgggccaagtgcagcggctacccctcctacccggcactgatcatcgaccccaagatgccccgtgtgcctggccaccacaacggcgtcaccatcccggccccacccctggacgtgctgaagattggggagcacatgcagaccaagtctgatgagaagctgttcctcgttctcttttttgataataagagaagttggcagtggcttcctaagtccaaaatggttccccttggtattgacgaaactatagacaagttaaagatgatggaagggaggaattccagcatccggaaggccgtgcggatcgcttttgaccgcgccatgaaccacctgagccgcgtccacggggagccgaccagcgacctcagtgacattgactgacggcccggccgccagcgcgggtcttgtccatagtgttgataagctgtacatgtttgtatattgttcaaaacttaacttattctgatttttagttatagctctttaattctttttccccggggaggggggaggttttatttccaagttttctaggaacccatctccgtctgggcgctgtgagtggggtgggcacgtccgggcagcccagtgcgtctgtcgcacgtccccaggccgtgctgctggcgtcactttctttgatatgtagctttttcttaaagacttttgaatgtttaataattttgtaaatcatgctctttacacagagtaccacttatttaataagacgggatgtaaatttacaatgacaaatgtgtattttaagaaagaaaatgacattattttgaatggtactttgtggaaagaggggagaataaagttatgctgtgtacatcacttgcagatcaccaaaaacactccgctgcccgtgaccgccggtgggtgtgtccccgctcccgtcgtcccgcccacctcaaaccccgcaggtgtgcctcccagcggattatttattgtagaaagtgtattcatttgctttataatgaaaaatacatttgcaaaggtatattgatatgcatttttatacaggcacataaaaattcaacttggcttgggagcagaatgcattgcattgtataaatgactctggcctgtgtgtactttgattttataacttgtaatcttttgtttacaatgaggggctttctgtaacttgttttaatttagaacactttggtagcaatagaaactttggatacatttttgtatggtacctgtgatgtatatagaattagtactttatttttatttttaagaggtaaagcattatgttggggaaagtagggtgggtttccaaatttgcattttttatattaaaaataaagtcaaga

SEQ ID NO: 319436 - DNA, 3172 bp, Homo sapiens
gatacactgagtgtttgtgttttaggttaaataggattgcgaatcaggtggccattcagcggaagaagcagtttgtggagcgagcccacagctactggctgctcaagcggctgtccaggaacggggcccccctgctgcggcggctgcagtccagcctgcagtctcagcgaagctcacagcagagagaaaatgatgaggagatgaaggctgccaaagagaagctgaagtactggcagcggctgcggcacgacctggagcgcgctcgcctgctgatcgagctgctgcgcaagcgggagaagctcaagcgtgagcaggtgaaggtggagcaggtcgccatggagctgcggctgaccccgctgacggtgctgctgcgctcagtgctggaccagctgcaagacaaggaccccgccaggatatttgcgcagcccgtgagtctgaaggaggtaccagattatttggatcacattaaacatcccatggactttgccacaatgaggaaacggttagaagctcaagggtataaaaacctccatgagtttgaggaggattttgatctcattatagataactgcatgaagtacaatgccagggacaccgtgttctatagagccgcggtgaggctgcgcgatcagggaggtgttgttctgaggcaggcccggcgcgaggtggacagcatcggcttggaagaggcctcggggatgcacctgcctgagcggcctgctgcggcaccgcggcggcctttctcctgggaagacgtggacaggttgctggaccccgccaacagagcccacctgggcctggaggagcagctgagagagctgctggacatgctcgacctcacctgcgctatgaagtccagcggctcccggagcaagcgggcaaagctgctcaaaaaggaaattgcccttctccgaaacaagctgagccagcagcacagccagcccctgcccacggggccaggcttggaaggcttcgaagaggacggagctgcgctggggccggaggcgggcgaggaaggagataaatctccccctaaacttgaaccatcagatgcattacctcttccttcaaactcggagactaattcagaaccaccaaccctcaaaccagtagaactcaacccagagcagagtaaacttttcaaaagagtcacatttgataatgaatcacatagcgcttgcactcagagcgcactggtaagcggacgccctccagagcccacccgcgccagtagtggcgatgtgccggcggcggcggcctccgcggtggcggagccagcaagcgatgtaaacagacgcacttctgttctcttctgcaaatcgaaaagtgtaagccccccaaagtctgccaagaacactgaaacccagccaacttctcctcagctagggaccaaaacctttttgtctgtagtccttccgaggttggagactcttctgcagccaaggaaaaggtcgcggagcacatgcggagactccgaggtggaggaggagtccccaggaaagcgcctggacgcaggtctcaccaacggctttgggggtgcgaggagcgagcaggagccgggcggcggcctggggaggaaggccacaccccgacgacgctgtgcctccgagtccagcatctcctccagcaacagcccgctctgcgactcgagctttaatgcgcccaaatgtgggcggggcaaaccggctcttgtgcgacggcacacgctggaggaccgcagtgagctgatctcctgcatcgagaatgggaactacgccaaggcggccaggatcgcagccgaagtcggccagagcagcatgtggatctccactgatgccgccgcctcggtgctggagcctctgaaggtggtgtgggccaagtgcagcggctacccctcctacccggcactgatcatcgaccccaagatgccccgtgtgcctggccaccacaacggcgtcaccatcccggccccacccctggacgtgctgaagattggggagcacatgcagaccaagtctgatgagaagctgttcctcgttctcttttttgataataagagaagttggcagtggcttcctaagtccaaaatggttccccttggtattgacgaaactatagacaagttaaagatgatggaagggaggaattccagcatccggaaggccgtgcggatcgcttttgaccgcgccatgaaccacctgagccgcgtccacggggagccgaccagcgacctcagtgacattgactgacggcccggccgccagcgcgggtcttgtccatagtgttgataagctgtacatgtttgtatattgttcaaaacttaacttattctgatttttagttatagctctttaattctttttccccggggaggggggaggttttatttccaagttttctaggaacccatctccgtctgggcgctgtgagtggggtgggcacgtccgggcagcccagtgcgtctgtcgcacgtccccaggccgtgctgctggcgtcactttctttgatatgtagctttttcttaaagacttttgaatgtttaataattttgtaaatcatgctctttacacagagtaccacttatttaataagacgggatgtaaatttacaatgacaaatgtgtattttaagaaagaaaatgacattattttgaatggtactttgtggaaagaggggagaataaagttatgctgtgtacatcacttgcagatcaccaaaaacactccgctgcccgtgaccgccggtgggtgtgtccccgctcccgtcgtcccgcccacctcaaaccccgcaggtgtgcctcccagcggattatttattgtagaaagtgtattcatttgctttataatgaaaaatacatttgcaaaggtatattgatatgcatttttatacaggcacataaaaattcaacttggcttgggagcagaatgcattgcattgtataaatgactctggcctgtgtgtactttgattttataacttgtaatcttttgtttacaatgaggggctttctgtaacttgttttaatttagaacactttggtagcaatagaaactttggatacatttttgtatggtacctgtgatgtatatagaattagtactttatttttatttttaagaggtaaagcattatgttggggaaagtagggtgggtttccaaatttgcattttttatattaaaaataaagtcaaga

SEQ ID NO: 319437 - DNA, 287 bp, Homo sapiens
agtgacgtgtttaatattggcgcatgtgaaataatctttcacagtttttttcagagagtaactgtgtgcctgggcactgcacccagggccgcagcctttggcgttagggaagcacacacagtgtggcccgagcccacggggcccacactgccgagcagacagtacatgcgatgccttgtttccttaactgaattagtattttggtggacttcacatttatagtaagttttataatagattttataatcttcagttttcaaaaatcactttatttataattttttcag

SEQ ID NO: 319438 - DNA, 403 bp, Homo sapiens
ggggaggggaagggaggggtgcactcctggcctcgggcctgtccctgcacggggcccagctgtcttggtggtgctgagcagggcccctttctatcggagggcagtgaatttgttagatgattacatggagcctgctgaaataccatgtgcaagcaatgattttccgcttgtttttccttttaaaaaggcagtggcttcctaagtccaaaatggttccccttggtattgacgaaactatagacaagttaaagatgatggaagggaggaattccagcatccggaaggccgtgcggatcgcttttgaccgcgccatgaaccacctgagccgcgtccacggggagccgaccagcgacctcagtgacattgactgacggcccggccgccagcgcgggtcttgtccata

SEQ ID NO: 319439 - DNA, 946 bp, Homo sapiens
agcttcatggtgagtgaggccagacacactcagacacggcgatggccccggattttgtgttttaaagtgtttcgtcagcatttttgacttcatgttaacacttgtcttttgaaccaaggttttttctttttaaaacctgatttcctattccctggagctctgctcctgtgaacatgtttttgtgtctttggtggccccttcggcctggtgaagtttccgttcaaacgcggccggtgcccacgtggacaggccgcccccgtgtttgcactcacaggttgcacatctgcccccatggcaggctcacggcatcctttctttgccttcacagagcctgtctaaagacccgggcttgtcaagaggagcatcttcatggtgctcagcaaactactacgatcggagccgactgcagtttgttaagttgatttcatttaacgagtaactttggtgtctgcttactgtaaggactatgctcgggaacttgggagtgaaaaggaagatgctgtcttacctgtctgtgaaacgtgctttgtaagatgtgttccaagtgtaacgtcgttgagtcatgcttcagtgtgccctggttgtgctgagctcagggcctgcccgcctgtgttccaggtctcaccaacggctttgggggtgcgaggagcgagcaggagccgggcggcggcctggggaggaaggccacaccccgacgacgctgtgcctccgagtccagcatctcctccagcaacagcccgctctgcgactcgaggtgggcaccgcggccctgcgcttcccaccacgcagctcccagcaccgcccgccccgcctggctgtcctggaagccgggacattccagctcccatcttagtgttctctgaaaaattctggcctgggattcatgtgtgctctgcccttgtggacagtttcccatgctgcatattaatctgctttatagaattca

SEQ ID NO: 319440 - DNA, 4608 bp, Homo sapiens
atccgataggaccaggtagccactgagcatgcctgtctggtgggcatagcctctgtgcctggtggggtccagccctgtatgtggacttcctgggggaccgcctgcatgctgggaaagtcctgcaactgtgggctctgggccggacccctcctccttggggagcgttgctgtggtctccgcagcctgttggtgtggtccgagaggggactggtgtgtggtggtagggacgcaggtgctcaggagggctcctcaggctgcctctctgcctgttactgctgctccctccctggtcctggggactcgctcaggcctggatgtgtggttttggacaccttggaaagaggttagctgtgagttttgctttgattgggctttgagctgctgagctagatctgtccaagcatgcttttgtggttttctcgagtctttggtcaccctgcgtagaattacctttacttttgccttcattttaggtaatcattaccaaatgaggaggaaaggacgatgtcatcgaggctctgcagcgaggcatccttcttccccatgcagtgttaaacactcccctacgcgagaaacgctgacctacgctcaagctcaaaggatggtagagatagaaattgaagggcgcttgcacaggatcagtatttttgatcccctggagatcatattggaagatgacctcactgctcaagagatgagtgagtgcaacagcaacaaggaaaacagcgagcggcctcctgtctgcttaagaactaagcgtcacaaaaacaacagagtcaaaaagaaaaacgaggccctccccagcgcccacggcacgccggcctcggccagtgccctcccggagcccaaggtgcgcatcgtggagtacagccctccgtccgcccccaggaggcctcctgtgtactacaagttcatcgagaagtcggccgaggaactggacaacgaggtggagtatgacatggacgaggaggactatgcctggctggagatcgtcaatgagaagcgcaagggcgactgcgtccccgccgtgtcgcagagcatgtttgagttcctgatggaccgcttcgagaaggagtcgcactgcgagaaccagaagcagggcgagcagcagtctctgatcgacgaggacgccgtgtgctgcatctgcatggacggggagtgtcagaacagcaacgtgatcctcttctgcgacatgtgcaacctggccgtgcaccaggagtgctacggggtgccctacatccccgagggccagtggctctgccgccactgcctgcagtcgcgggcccggcccgccgactgtgtgctgtgccccaacaagggtggtgccttcaaaaagacagatgacgaccgctggggtcacgtggtgtgtgccctgtggatcccagaggtcggctttgccaacacggtgttcatcgagcccatcgatggggtgaggaacatccctccagcccggtggaaactgacatgctacctctgtaagcagaagggcgtgggtgcctgcatccagtgccacaaagcaaactgctacacagcattccatgtgacgtgtgcccagaaggctggcctgtacatgaaaatggagcccgtgaaggaactgactggcggtggcaccaccttctccgtcagaaagaccgcttactgtgatgtccacacgcctccaggctgcacccggaggcctctgaatatttacggggatgtcgaaatgaaaaatggcgtctgtcgaaaagagagctcggttaaaacggtcaggtccacatccaaggtcaggaagaaggcaaaaaaggctaagaaagctctggctgagccctgcgcggtcctgccgaccgtgtgcgctccttatattcccccgcagaggttaaataggattgcgaatcaggtggccattcagcggaagaagcagtttgtggagcgagcccacagctactggctgctcaagcggctgtccaggaacggggcccccctgctgcggcggctgcagtccagcctgcagtctcagcgaagctcacagcagagagaaaatgatgaggagatgaaggctgccaaagagaagctgaagtactggcagcggctgcggcacgacctggagcgcgctcgcctgctgatcgagctgctgcgcaagcgggagaagctcaagcgtgagcaggtgaaggtggagcaggtcgccatggagctgcggctgaccccgctgacggtgctgctgcgctcagtgctggaccagctgcaagacaaggaccccgccaggatatttgcgcagcccgtgagtctgaaggaggtaccagattatttggatcacattaaacatcccatggactttgccacaatgaggaaacggttagaagctcaagggtataaaaacctccatgagtttgaggaggattttgatctcattatagataactgcatgaagtacaatgccagggacaccgtgttctatagagccgcggtgaggctgcgcgatcagggaggtgttgttctgaggcaggcccggcgcgaggtggacagcatcggcttggaagaggcctcggggatgcacctgcctgagcggcctgctgcggcaccgcggcggcctttctcctgggaagacgtggacaggttgctggaccccgccaacagagcccacctgggcctggaggagcagctgagagagctgctggacatgctcgacctcacctgcgctatgaagtccagcggctcccggagcaagcgggcaaagctgctcaaaaaggaaattgcccttctccgaaacaagctgagccagcagcacagccagcccctgcccacggggccaggcttggaaggcttcgaagaggacggagctgcgctggggccggaggcgggcgaggaagtccttccgaggttggagactcttctgcagccaaggaaaaggtcgcggagcacatgcggagactccgaggtggaggaggagtccccaggaaagcgcctggacgcaggtctcaccaacggctttgggggtgcgaggagcgagcaggagccgggcggcggcctggggaggaaggccacaccccgacgacgctgtgcctccgagtccagcatctcctccagcaacagcccgctctgcgactcgagctttaatgcgcccaaatgtgggcggggcaaaccggctcttgtgcgacggcacacgctggaggaccgcagtgagctgatctcctgcatcgagaatgggaactacgccaaggcggccaggatcgcagccgaagtcggccagagcagcatgtggatctccactgatgccgccgcctcggtgctggagcctctgaaggtggtgtgggccaagtgcagcggctacccctcctacccggcactgatcatcgaccccaagatgccccgtgtgcctggccaccacaacggcgtcaccatcccggccccacccctggacgtgctgaagattggggagcacatgcagaccaagtctgatgagaagctgttcctcgttctcttttttgataataagagaagttggcagtggcttcctaagtccaaaatggttccccttggtattgacgaaactatagacaagttaaagatgatggaagggaggaattccagcatccggaaggccgtgcggatcgcttttgaccgcgccatgaaccacctgagccgcgtccacggggagccgaccagcgacctcagtgacattgactgacggcccggccgccagcgcgggtcttgtccatagtgttgataagctgtacatgtttgtatattgttcaaaacttaacttattctgatttttagttatagctctttaattctttttccccggggaggggggaggttttatttccaagttttctaggaacccatctccgtctgggcgctgtgagtggggtgggcacgtccgggcagcccagtgcgtctgtcgcacgtccccaggccgtgctgctggcgtcactttctttgatatgtagctttttcttaaagacttttgaatgtttaataattttgtaaatcatgctctttacacagagtaccacttatttaataagacgggatgtaaatttacaatgacaaatgtgtattttaagaaagaaaatgacattattttgaatggtactttgtggaaagaggggagaataaagttatgctgtgtacatcacttgcagatcaccaaaaacactccgctgcccgtgaccgccggtgggtgtgtccccgctcccgtcgtcccgcccacctcaaaccccgcaggtgtgcctcccagcggattatttattgtagaaagtgtattcatttgctttataatgaaaaatacatttgcaaaggtatattgatatgcatttttatacaggcacataaaaattcaacttggcttgggagcagaatgcattgcattgtataaatgactctggcctgtgtgtactttgattttataacttgtaatcttttgtttacaatgaggggctttctgtaacttgttttaatttagaacactttggtagcaatagaaactttggatacatttttgtatggtacctgtgatgtatatagaattagtactttatttttatttttaagaggtaaagcattatgttggggaaagtagggtgggtttccaaatttgcattttttatattaaaaataaagtcaaga

SEQ ID NO: 319441 - DNA, 4699 bp, Homo sapiens
caatctagtttcaacatacaatgaggatttctgtctgatacagagaaagatacccagtgtctggagggtctgtcttaagaagtgctcttgaagtctgctgggatttcctttcgggactcacagagggaagcctgctccctgagggctttttctcaggcccaatagatcagggtaatcattaccaaatgaggaggaaaggacgatgtcatcgaggctctgcagcgaggcatccttcttccccatgcagtgttaaacactcccctacgcgagaaacgctgacctacgctcaagctcaaaggatggtagagatagaaattgaagggcgcttgcacaggatcagtatttttgatcccctggagatcatattggaagatgacctcactgctcaagagatgagtgagtgcaacagcaacaaggaaaacagcgagcggcctcctgtctgcttaagaactaagcgtcacaaaaacaacagagtcaaaaagaaaaacgaggccctccccagcgcccacggcacgccggcctcggccagtgccctcccggagcccaaggtgcgcatcgtggagtacagccctccgtccgcccccaggaggcctcctgtgtactacaagttcatcgagaagtcggccgaggaactggacaacgaggtggagtatgacatggacgaggaggactatgcctggctggagatcgtcaatgagaagcgcaagggcgactgcgtccccgccgtgtcgcagagcatgtttgagttcctgatggaccgcttcgagaaggagtcgcactgcgagaaccagaagcagggcgagcagcagtctctgatcgacgaggacgccgtgtgctgcatctgcatggacggggagtgtcagaacagcaacgtgatcctcttctgcgacatgtgcaacctggccgtgcaccaggagtgctacggggtgccctacatccccgagggccagtggctctgccgccactgcctgcagtcgcgggcccggcccgccgactgtgtgctgtgccccaacaagggtggtgccttcaaaaagacagatgacgaccgctggggtcacgtggtgtgtgccctgtggatcccagaggtcggctttgccaacacggtgttcatcgagcccatcgatggggtgaggaacatccctccagcccggtggaaactgacatgctacctctgtaagcagaagggcgtgggtgcctgcatccagtgccacaaagcaaactgctacacagcattccatgtgacgtgtgcccagaaggctggcctgtacatgaaaatggagcccgtgaaggaactgactggcggtggcaccaccttctccgtcagaaagaccgcttactgtgatgtccacacgcctccaggctgcacccggaggcctctgaatatttacggggatgtcgaaatgaaaaatggcgtctgtcgaaaagagagctcggttaaaacggtcaggtccacatccaaggtcaggaagaaggcaaaaaaggctaagaaagctctggctgagccctgcgcggtcctgccgaccgtgtgcgctccttatattcccccgcagaggttaaataggattgcgaatcaggtggccattcagcggaagaagcagtttgtggagcgagcccacagctactggctgctcaagcggctgtccaggaacggggcccccctgctgcggcggctgcagtccagcctgcagtctcagcgaagctcacagcagagagaaaatgatgaggagatgaaggctgccaaagagaagctgaagtactggcagcggctgcggcacgacctggagcgcgctcgcctgctgatcgagctgctgcgcaagcgggagaagctcaagcgtgagcaggtgaaggtggagcaggtcgccatggagctgcggctgaccccgctgacggtgctgctgcgctcagtgctggaccagctgcaagacaaggaccccgccaggatatttgcgcagcccgtgagtctgaaggaggtaccagattatttggatcacattaaacatcccatggactttgccacaatgaggaaacggttagaagctcaagggtataaaaacctccatgagtttgaggaggattttgatctcattatagataactgcatgaagtacaatgccagggacaccgtgttctatagagccgcggtgaggctgcgcgatcagggaggtgttgttctgaggcaggcccggcgcgaggtggacagcatcggcttggaagaggcctcggggatgcacctgcctgagcggcctgctgcggcaccgcggcggcctttctcctgggaagacgtggacaggttgctggaccccgccaacagagcccacctgggcctggaggagcagctgagagagctgctggacatgctcgacctcacctgcgctatgaagtccagcggctcccggagcaagcgggcaaagctgctcaaaaaggaaattgcccttctccgaaacaagctgagccagcagcacagccagcccctgcccacggggccaggcttggaaggcttcgaagaggacggagctgcgctggggccggaggcgggcgaggaaggagataaatctccccctaaacttgaaccatcagatgcattacctcttccttcaaactcggagactaattcagaaccaccaaccctcaaaccagtagaactcaacccagagcagagtaaacttttcaaaagagtcacatttgataatgaatcacatagcgcttgcactcagagcgcactggtaagcggacgccctccagagcccacccgcgccagtagtggcgatgtgccggcggcggcggcctccgcggtggcggagccagcaagcgatgtaaacagacgcacttctgttctcttctgcaaatcgaaaagtgtaagccccccaaagtctgccaagaacactgaaacccagccaacttctcctcagctagggaccaaaacctttttgtctgtagtccttccgaggttggagactcttctgcagccaaggaaaaggtcgcggagcacatgcggagactccgaggtggaggaggagtccccaggaaagcgcctggacgcaggtctcaccaacggctttgggggtgcgaggagcgagcaggagccgggcggcggcctggggaggaaggccacaccccgacgacgctgtgcctccgagtccagcatctcctccagcaacagcccgctctgcgactcgagctttaatgcgcccaaatgtgggcggggcaaaccggctcttgtgcgacggcacacgctggaggaccgcagtgagctgatctcctgcatcgagaatgggaactacgccaaggcggccaggatcgcagccgaagtcggccagagcagcatgtggatctccactgatgccgccgcctcggtgctggagcctctgaaggtggtgtgggccaagtgcagcggctacccctcctacccggcactgatcatcgaccccaagatgccccgtgtgcctggccaccacaacggcgtcaccatcccggccccacccctggacgtgctgaagattggggagcacatgcagaccaagtctgatgagaagctgttcctcgttctcttttttgataataagagaagttggcagtggcttcctaagtccaaaatggttccccttggtattgacgaaactatagacaagttaaagatgatggaagggaggaattccagcatccggaaggccgtgcggatcgcttttgaccgcgccatgaaccacctgagccgcgtccacggggagccgaccagcgacctcagtgacattgactgacggcccggccgccagcgcgggtcttgtccatagtgttgataagctgtacatgtttgtatattgttcaaaacttaacttattctgatttttagttatagctctttaattctttttccccggggaggggggaggttttatttccaagttttctaggaacccatctccgtctgggcgctgtgagtggggtgggcacgtccgggcagcccagtgcgtctgtcgcacgtccccaggccgtgctgctggcgtcactttctttgatatgtagctttttcttaaagacttttgaatgtttaataattttgtaaatcatgctctttacacagagtaccacttatttaataagacgggatgtaaatttacaatgacaaatgtgtattttaagaaagaaaatgacattattttgaatggtactttgtggaaagaggggagaataaagttatgctgtgtacatcacttgcagatcaccaaaaacactccgctgcccgtgaccgccggtgggtgtgtccccgctcccgtcgtcccgcccacctcaaaccccgcaggtgtgcctcccagcggattatttattgtagaaagtgtattcatttgctttataatgaaaaatacatttgcaaaggtatattgatatgcatttttatacaggcacataaaaattcaacttggcttgggagcagaatgcattgcattgtataaatgactctggcctgtgtgtactttgattttataacttgtaatcttttgtttacaatgaggggctttctgtaacttgttttaatttagaacactttggtagcaatagaaactttggatacatttttgtatggtacctgtgatgtatatagaattagtactttatttttatttttaagaggtaaagcattatgttggggaaagtagggtgggtttccaaatttgcattttttatattaaaaataaagtcaaga

SEQ ID NO: 319442 - DNA, 3554 bp, Homo sapiens
gagcgggagtccgcggccgccgctgccgggcccggagtccgcggcgccccgaaggtaatcattaccaaatgaggaggaaaggacgatgtcatcgaggctctgcagcgaggcatccttcttccccatgcagtgttaaacactcccctacgcgagaaacgctgacctacgctcaagctcaaaggatggtagagatagaaattgaagggcgcttgcacaggatcagtatttttgatcccctggagatcatattggaagatgacctcactgctcaagagatgagtgagtgcaacagcaacaaggaaaacagcgagcggcctcctgtctgcttaagaactaagcgtcacaaaaacaacagagtcaaaaagaaaaacgaggccctccccagcgcccacggcacgccggcctcggccagtgccctcccggagcccaaggtgcgcatcgtggagtacagccctccgtccgcccccaggaggcctcctgtgtactacaagttcatcgagaagtcggccgaggaactggacaacgaggtggagtatgacatggacgaggaggactatgcctggctggagatcgtcaatgagaagcgcaagggcgactgcgtccccgccgtgtcgcagagcatgtttgagttcctgatggaccgcttcgagaaggagtcgcactgcgagaaccagaagcagggcgagcagcagtctctgatcgacgaggacgccgtgtgctgcatctgcatggacggggagtgtcagaacagcaacgtgatcctcttctgcgacatgtgcaacctggccgtgcaccaggagtgctacggggtgccctacatccccgagggccagtggctctgccgccactgcctgcagtcgcgggcccggcccgccgactgtgtgctgtgccccaacaagggtggtgccttcaaaaagacagatgacgaccgctggggtcacgtggtgtgtgccctgtggatcccagaggtcggctttgccaacacggtgttcatcgagcccatcgatggggtgaggaacatccctccagcccggtggaaactgacatgctacctctgtaagcagaagggcgtgggtgcctgcatccagtgccacaaagcaaactgctacacagcattccatgtgacgtgtgcccagaaggctggcctgtacatgaaaatggagcccgtgaaggaactgactggcggtggcaccaccttctccgtcagaaagaccgcttactgtgatgtccacacgcctccaggctgcacccggaggcctctgaatatttacggggatgtcgaaatgaaaaatggcgtctgtcgaaaagagagctcggttaaaacggtcaggtccacatccaaggtcaggaagaaggcaaaaaaggctaagaaagctctggctgagccctgcgcggtcctgccgaccgtgtgcgctccttatattcccccgcagaggttaaataggattgcgaatcaggtggccattcagcggaagaagcagtttgtggagcgagcccacagctactggctgctcaagcggctgtccaggaacggggcccccctgctgcggcggctgcagtccagcctgcagtctcagcgaagctcacagcagagagaaaatgatgaggagatgaaggctgccaaagagaagctgaagtactggcagcggctgcggcacgacctggagcgcgctcgcctgctgatcgagctgctgcgcaagcgggagaagctcaagcgtgagcaggtgaaggtggagcaggtcgccatggagctgcggctgaccccgctgacggtgctgctgcgctcagtgctggaccagctgcaagacaaggaccccgccaggatatttgcgcagcccgtgagtctgaaggaggtaccagattatttggatcacattaaacatcccatggactttgccacaatgaggaaacggttagaagctcaagggtataaaaacctccatgagtttgaggaggattttgatctcattatagataactgcatgaagtacaatgccagggacaccgtgttctatagagccgcggtgaggctgcgcgatcagggaggtgttgttctgaggcaggcccggcgcgaggtggacagcatcggcttggaagaggcctcggggatgcacctgcctgagcggcctgctgcggcaccgcggcggcctttctcctgggaagacgtggacaggttgctggaccccgccaacagagcccacctgggcctggaggagcagctgagagagctgctggacatgctcgacctcacctgcgctatgaagtccagcggctcccggagcaagcgggcaaagctgctcaaaaaggaaattgcccttctccgaaacaagctgagccagcagcacagccagcccctgcccacggggccaggcttggaaggcttcgaagaggacggagctgcgctggggccggaggcgggcgaggaaggagataaatctccccctaaacttgaaccatcagatgcattacctcttccttcaaactcggagactaattcagaaccaccaaccctcaaaccagtagaactcaacccagagcagagtaaacttttcaaaagagtcacatttgataatgaatcacatagcgcttgcactcagagcgcactggtaagcggacgccctccagagcccacccgcgccagtagtggcgatgtgccggcggcggcggcctccgcggtggcggagccagcaagcgatgtaaacagacgcacttctgttctcttctgcaaatcgaaaagtgtaagccccccaaagtctgccaagaacactgaaacccagccaacttctcctcagctagggaccaaaacctttttgtctgtagtccttccgaggttggagactcttctgcagccaaggaaaaggtcgcggagcacatgcggagactccgaggtggaggaggagtccccaggaaagcgcctggacgcaggtctcaccaacggctttgggggtgcgaggagcgagcaggagccgggcggcggcctggggaggaaggccacaccccgacgacgctgtgcctccgagtccagcatctcctccagcaacagcccgctctgcgactcgagctttaatgcgcccaaatgtgggcggggcaaaccggctcttgtgcgacggcacacgctggaggaccgcagtgagctgatctcctgcatcgagaatgggaactacgccaaggcggccaggatcgcagccgaagtcggccagagcagcatgtggatctccactgatgccgccgcctcggtgctggagcctctgaaggtggtgtgggccaagtgcagcggctacccctcctacccggcactgatcatcgaccccaagatgccccgtgtgcctggccaccacaaaagcgatccgcacggccttccggatgctggaattcctcccttccatcatctttaacttgtctatagtttcgtcaataccaaggggaaccattttggacttaggaagccactgccaacttctcttattatcaaaaaagagaacgaggaacagcttctcatcagacttggtctgcatgtgctccccaatcttcagcacgtccaggggtggggccgg

SEQ ID NO: 319443 - DNA, 790 bp, Homo sapiens
atttgtagactttccatctttaataacattttattgtgtaaataaaagcttgacatacactttttaaaacaaacttgtacattagaattcattttacttgtgatttacacattaatacatattttaaacctaggtgccacagaaacagaagaacaggtttggaatacaatttaatatattttaaaatgagttacatatattttaaaaacatgagccgttttgttatttgacagttctagttactttaatagtttctatggtaacatgcatttaaatctgtaaacacctggtacgttcacagtatttggtttgataaactaattagtaaaaactgtattcaatcaattgataaattaactttttcttttatattacaggaaaacaaccaaagttttaagtagcattttaagaacagatgaatttaagtttggacatctgcaaatgaggtggatctagcaacaataactgtaatggactgtgacaattcaatttattcttaattttgatggttggctatttgacttctctaaaaatgagaaagagctattttaaaatataaagaattttctaatcagtttcagctttgcaggaggtttcctgcataaattgggaagtaacactggaaagtaggaatttggttagtgaagtgggaagactgtatatttataatttgcatactacttgcaattttttgtttttcatcacttgtaataatggaatggaaatgtaagctgtaaagactctcaaatataaaatatttgctacagtgtatatatggtacataattgct

SEQ ID NO: 319444 - DNA, 2658 bp, Homo sapiens
atttgtagactttccatctttaataacattttattgtgtaaataaaagcttgacatacactttttaaaacaaacttgtacattagaattcattttacttgtgatttacacattaatacatattttaaacctaggtgccacagaaacagaagaacaggtttggaatacaatttaatatattttaaaatgagttacatatattttaaaaacatgagccgttttgttatttgacagttctagttactttaatagtttctatggtaacatgcatttaaatctgtaaacacctggtacgttcacagtatttggtttgataaactaattagtaaaaactgtattcaatcaattgataaattaactttttcttttatattacaggaaaacaaccaaagttttaagtagcattttaagaacagatgaatttaagtttggacatctgcaaatgaggtggatctagcaacaataactgtaatggactgtgacaattcaatttattcttaattttgatggttggctatttgacttctctaaaaatgagaaagagctattttaaaatataaagaattttctaatcagtttcagctttgcaggaggtttcctgcataaattgggaagtaacactggaaagtaggaatttggttagtgaagtgggaagactgtatatttataatttgcatactacttgcaattttttgtttttcatcacttgtaataatggaatggaaatgtaagctgtaaagactctcaaatataaaatatttgctacagtgtatatatggtacataattgcttgttgcttttaaagttccttctgttgttctgcttcccactgatttcataccagctcatgaatggatcattacagtctctccagaggcttagaatgattcagaatgttcaatgcatagttctcaataaacaggaggcagaatttttaatgggtatttcttttcagatatatgattggtctctaggtttttgataataatatggtcttaaattcataattactagcagagattgataatttggaaacaatggtagtgaatgaaactgaagttgaaaaacggctgctacttatgtcactaatcagaccatatgaatagcagaagttgagcaatttcaaagtaaaactgatatttttatttccaaaggaatttagacatttgaaaataattgacatacattaagttttaattcgataatttcttatatatggatgaacaatttttgggtttaagcttttaattcctagaaattttatacattaaatctcctgcaatttgtcactctggatgttactgtttaaaaaaaaaaaaaaaaaggggtttcttccagaaaaatctgctgatatataggtaagtaagtgtaaactctccctaattctatttcttagatccctaggtctattggcacaaaagtttgtttcactgaattttgaactcctaaaccagtacttttttgtttcactgttttttgagcttgtttccccagattcaagcttgtattccatgttacgtttcccatcttggtcttttagtgacctcttttttttattttttaattttttaaattttttttttattttactactttgttctttaggaaaatggggttttaaatagaaaaaaatcttcgttaactataaacttattgtttactttaggatgagatatttatacttaggtcccagttttttctttttttttcttttttctttttctttttctttttttttttggccctactagtttccttttctactataggttccagtatatatgtgtatgtgaatacacactcacacacattcacatacatacaactctcacaaacatacacaaaaatacatgtataatttgtataagagctggggtcagaatgaccatataattatattggtttgctttgttatttgcccgttctcaagtcattctaattcttgtttcagaatatgatagagcttattccaatttggaatctgcagatcccttccacttagtactgttaatgaaaacagaacccttttaacaagtaatactaccatgctactttggaaactgcctagtacccaaaatatttgatatgctttttgagttggatacttaaatgcaccaaccaaagcaatgttttgattggctataatttgtatttttgaaaccatttacaacaaacattctcaagaagagtttgtatgtcaaaagtcatttaggttttaaagtcttttgatcttttcttactatatacaatcagtctgcagagactgttatgtgtctgtttgcctttgtacatatatatagcttgtttgaataatcattgtgcatctccattaatgttgttctttgctttgtatataaattaaaagagttgacccaggtgttgttacacagtgtctgtcatccttagagttgaccagaggcacacaaaacacacacacacacacacacacacacacacacacacacacgtgtgtatgtacaatatatcaaaatttactacttatttctaatagaactatgaaaggattttaaaattttatttatactgaatgagaactgagagtatacaaaggtattggtaaaagttgctgtttcatgaattagtttgagaaaatattttaggtcaaatttatatttaagaaataaaattttattagttc

SEQ ID NO: 319445 - DNA, 2781 bp, Homo sapiens
ctcgccccccgccgccgccaccgcggtcagccagcggaccagcggcaggagccgttccccgacgggcagcagggcgctcggcctccgcgtgtgggctgagcgcggcgacgctgctgccccgaaatccccgtggattttgagtcgtatggaacctcaaagtctttgtgacaatggaaaccaaaaaattaattggtaaaccgcttcaaccagcaagacctgttcgtcatctgacttctcccccaggagcagtgttccctttcaactttcaaaacgaatatccatgcaacactcagtgcatacaaagtggagttagcagatgtaagacgaatggaatgcaagccttttctcaaggtcttaatgagcaacagcaacagcagtctccagttaagaaagagagaattaaatacagcagagatttcctgttgaagctctcaagtgtttccatctgcagaaaaaaaccagactttctgcctgatcatcccattgtactgcaaaaaccagaaaacaaccaaagttttaagtagcattttaagaacagatgaatttaagtttggacatctgcaaatgaggtggatctagcaacaataactgtaatggactgtgacaattcaatttattcttaattttgatggttggctatttgacttctctaaaaatgagaaagagctattttaaaatataaagaattttctaatcagtttcagctttgcaggaggtttcctgcataaattgggaagtaacactggaaagtaggaatttggttagtgaagtgggaagactgtatatttataatttgcatactacttgcaattttttgtttttcatcacttgtaataatggaatggaaatgtaagctgtaaagactctcaaatataaaatatttgctacagtgtatatatggtacataattgcttgttgcttttaaagttccttctgttgttctgcttcccactgatttcataccagctcatgaatggatcattacagtctctccagaggcttagaatgattcagaatgttcaatgcatagttctcaataaacaggaggcagaatttttaatgggtatttcttttcagatatatgattggtctctaggtttttgataataatatggtcttaaattcataattactagcagagattgataatttggaaacaatggtagtgaatgaaactgaagttgaaaaacggctgctacttatgtcactaatcagaccatatgaatagcagaagttgagcaatttcaaagtaaaactgatatttttatttccaaaggaatttagacatttgaaaataattgacatacattaagttttaattcgataatttcttatatatggatgaacaatttttgggtttaagcttttaattcctagaaattttatacattaaatctcctgcaatttgtcactctggatgttactgtttaaaaaaaaaaaaaaaaaggggtttcttccagaaaaatctgctgatatataggtaagtaagtgtaaactctccctaattctatttcttagatccctaggtctattggcacaaaagtttgtttcactgaattttgaactcctaaaccagtacttttttgtttcactgttttttgagcttgtttccccagattcaagcttgtattccatgttacgtttcccatcttggtcttttagtgacctcttttttttattttttaattttttaaattttttttttattttactactttgttctttaggaaaatggggttttaaatagaaaaaaatcttcgttaactataaacttattgtttactttaggatgagatatttatacttaggtcccagttttttctttttttttcttttttctttttctttttctttttttttttggccctactagtttccttttctactataggttccagtatatatgtgtatgtgaatacacactcacacacattcacatacatacaactctcacaaacatacacaaaaatacatgtataatttgtataagagctggggtcagaatgaccatataattatattggtttgctttgttatttgcccgttctcaagtcattctaattcttgtttcagaatatgatagagcttattccaatttggaatctgcagatcccttccacttagtactgttaatgaaaacagaacccttttaacaagtaatactaccatgctactttggaaactgcctagtacccaaaatatttgatatgctttttgagttggatacttaaatgcaccaaccaaagcaatgttttgattggctataatttgtatttttgaaaccatttacaacaaacattctcaagaagagtttgtatgtcaaaagtcatttaggttttaaagtcttttgatcttttcttactatatacaatcagtctgcagagactgttatgtgtctgtttgcctttgtacatatatatagcttgtttgaataatcattgtgcatctccattaatgttgttctttgctttgtatataaattaaaagagttgacccaggtgttgttacacagtgtctgtcatccttagagttgaccagaggcacacaaaacacacacacacacacacacacacacacacacacacacacgtgtgtatgtacaatatatcaaaatttactacttatttctaatagaactatgaaaggattttaaaattttatttatactgaatgagaactgagagtatacaaaggtattggtaaaagttgctgtttcatgaattagtttgagaaaatattttaggtcaaatttatatttaagaaataaaattttattagttc

SEQ ID NO: 319446 - DNA, 913 bp, Homo sapiens
ctcgccccccgccgccgccaccgcggtcagccagcggaccagcggcaggagccgttccccgacgggcagcagggcgctcggcctccgcgtgtgggctgagcgcggcgacgctgctgccccgaaatccccgtggattttgagtcgtatggaacctcaaagtctttgtgacaatggaaaccaaaaaattaattggtaaaccgcttcaaccagcaagacctgttcgtcatctgacttctcccccaggagcagtgttccctttcaactttcaaaacgaatatccatgcaacactcagtgcatacaaagtggagttagcagatgtaagacgaatggaatgcaagccttttctcaaggtcttaatgagcaacagcaacagcagtctccagttaagaaagagagaattaaatacagcagagatttcctgttgaagctctcaagtgtttccatctgcagaaaaaaaccagactttctgcctgatcatcccattgtactgcaaaaaccagaaaacaaccaaagttttaagtagcattttaagaacagatgaatttaagtttggacatctgcaaatgaggtggatctagcaacaataactgtaatggactgtgacaattcaatttattcttaattttgatggttggctatttgacttctctaaaaatgagaaagagctattttaaaatataaagaattttctaatcagtttcagctttgcaggaggtttcctgcataaattgggaagtaacactggaaagtaggaatttggttagtgaagtgggaagactgtatatttataatttgcatactacttgcaattttttgtttttcatcacttgtaataatggaatggaaatgtaagctgtaaagactctcaaatataaaatatttgctacagtgtatatatggtacataattgct

SEQ ID NO: 319447 - DNA, 950 bp, Homo sapiens
  misc_feature (914)..(914): n is a, c, g, or t
  misc_feature (917)..(917): n is a, c, g, or t
  misc_feature (932)..(932): n is a, c, g, or t
  misc_feature (934)..(934): n is a, c, g, or t
  misc_feature (942)..(942): n is a, c, g, or t
ctcgccccccgccgccgccaccgcggtcagccagcggaccagcggcaggagccgttccccgacgggcagcagggcgctcggcctccgcgtgtgggctgagcgcggcgacgctgctgccccgaaatccccgtggattttgagtcgtatggaacctcaaagtctttgtgacaatggaaaccaaaaaattaattggtaaaccgcttcaaccagcaagacctgttcgtcatctgacttctcccccaggagcagtgttccctttcaactttcaaaacgaatatccatgcaacactcagtgcatacaaagtggagttagcagatgtaagacgaatggaatgcaagccttttctcaaggtcttaatgagcaacagcaacagcagtctccagttaagaaagagagaattaaatacagcagagatttcctgttgaagctctcaagtgtttccatctgcagaaaaaaaccagactttctgcctgatcatcccattgtactgcaaaaaccagaaaacaaccaaagttttaagtagcattttaagaacagatgaatttaagtttggacatctgcaaatgaggtggatctagcaacaataactgtaatggactgtgacaattcaatttattcttaattttgatggttggctatttgacttctctaaaaatgagaaagagctattttaaaatataaagaattttctaatcagtttcagctttgcaggaggtttcctgcataaattgggaagtaacactggaaagtaggaatttggttagtgaagtgggaagactgtatatttataatttgcatactacttgcaattttttgtttttcatcacttgtaataatggaatggaaatgtaagctgtaaagactctcaaatataaaatatttgctacagtgtatatatggtacataattgctnctngctaccccgggtacnanctcgagtntatatgta

SEQ ID NO: 319448 - DNA, 2851 bp, Homo sapiens
ctcgccccccgccgccgccaccgcggtcagccagcggaccagcggcaggagccgttccccgacgggcagcagggcgctcggcctccgcgtgtgggctgagcgcggcgacgctgctgccccgaaatccccgtggattttgagtcgtatggaacctcaaagtctttgtgacaatggaaaccaaaaaattaattggtaaaccgcttcaaccagcaagacctgttcgtcatctgacttctcccccaggagcagtgttccctttcaactttcaaaacgaatatccatgcaacactcagtgcatacaaagtggagttagcagaacagaatggaaatgcaagaacattttcatcaaaggtcattaaatgaggaaaaaacgaaacagaagatatcaaagattaaagaaaagaagagaaattaaaaataacagaaagaagaattatcatgttgaaagacatcatcaaagtgttatcacatcattggaagaagagaaaaaaacagagtacattatatgacatggatcaatacccagttgttaatggaaaaaaacacaagaaaaaacaaaccacaagattattaaagattagaattatataaagaaacaagaatcgaaattttaaagattatgggaccgtcctggcacatgaaggtctagcaacaataactgtaatggactgtgacaattcaatttattcttaattttgatggttggctatttgacttctctaaaaatgagaaagagctattttaaaatataaagaattttctaatcagtttcagctttgcaggaggtttcctgcataaattgggaagtaacactggaaagtaggaatttggttagtgaagtgggaagactgtatatttataatttgcatactacttgcaattttttgtttttcatcacttgtaataatggaatggaaatgtaagctgtaaagactctcaaatataaaatatttgctacagtgtatatatggtacataattgcttgttgcttttaaagttccttctgttgttctgcttcccactgatttcataccagctcatgaatggatcattacagtctctccagaggcttagaatgattcagaatgttcaatgcatagttctcaataaacaggaggcagaatttttaatgggtatttcttttcagatatatgattggtctctaggtttttgataataatatggtcttaaattcataattactagcagagattgataatttggaaacaatggtagtgaatgaaactgaagttgaaaaacggctgctacttatgtcactaatcagaccatatgaatagcagaagttgagcaatttcaaagtaaaactgatatttttatttccaaaggaatttagacatttgaaaataattgacatacattaagttttaattcgataatttcttatatatggatgaacaatttttgggtttaagcttttaattcctagaaattttatacattaaatctcctgcaatttgtcactctggatgttactgtttaaaaaaaaaaaaaaaaaggggtttcttccagaaaaatctgctgatatataggtaagtaagtgtaaactctccctaattctatttcttagatccctaggtctattggcacaaaagtttgtttcactgaattttgaactcctaaaccagtacttttttgtttcactgttttttgagcttgtttccccagattcaagcttgtattccatgttacgtttcccatcttggtcttttagtgacctcttttttttattttttaattttttaaattttttttttattttactactttgttctttaggaaaatggggttttaaatagaaaaaaatcttcgttaactataaacttattgtttactttaggatgagatatttatacttaggtcccagttttttctttttttttcttttttctttttctttttctttttttttttggccctactagtttccttttctactataggttccagtatatatgtgtatgtgaatacacactcacacacattcacatacatacaactctcacaaacatacacaaaaatacatgtataatttgtataagagctggggtcagaatgaccatataattatattggtttgctttgttatttgcccgttctcaagtcattctaattcttgtttcagaatatgatagagcttattccaatttggaatctgcagatcccttccacttagtactgttaatgaaaacagaacccttttaacaagtaatactaccatgctactttggaaactgcctagtacccaaaatatttgatatgctttttgagttggatacttaaatgcaccaaccaaagcaatgttttgattggctataatttgtatttttgaaaccatttacaacaaacattctcaagaagagtttgtatgtcaaaagtcatttaggttttaaagtcttttgatcttttcttactatatacaatcagtctgcagagactgttatgtgtctgtttgcctttgtacatatatatagcttgtttgaataatcattgtgcatctccattaatgttgttctttgctttgtatataaattaaaagagttgacccaggtgttgttacacagtgtctgtcatccttagagttgaccagaggcacacaaaacacacacacacacacacacacacacacacacacacacacgtgtgtatgtacaatatatcaaaatttactacttatttctaatagaactatgaaaggattttaaaattttatttatactgaatgagaactgagagtatacaaaggtattggtaaaagttgctgtttcatgaattagtttgagaaaatattttaggtcaaatttatatttaagaaataaaattttattagttc

SEQ ID NO: 319449 - DNA, 557 bp, Homo sapiens
gcataggagacccttttcacaagatggcgccgaaagcgaagaaggaagctcctgcccctcctaaagctgaagccaaagcgaaggctttaaaggccaagaaggcagtgttgaaaggtgtccacagccacaaaaagaagaagatccgcacgtcacccaccttccggcggccgaagacactgcgactccggagacagcccaaatatcctcggaagagcgctcccaggagaaacaagcttgaccactatgctatcatcaagtttccgctgaccactgagtctgccatgaagaagatagaagacaacaacacacttgtgttcattgtggatgttaaagccaacaagcaccagattaaacaggctgtgaagaagctgtatgacattgatgtggccaaggtcaacaccctgattcggcctgatggagagaagaaggcatatgttcgactggctcctgattacgatgctttggatgttgccaacaaaattgggatcatctaaactgagtccagctgcctaattctgaatatatatatatatatatcttttcaccataaaaaaaaa

SEQ ID NO: 319450 - DNA, 821 bp, Homo sapiens
  misc_feature (699)..(699): n is a, c, g, or t
gcataggagacccttttcacaagatggcgccgaaagcgaagaaggaagctcctgcccctcctaaagctgaagccaaagcgaaggctttaaaggccaagaaggcagtgttgaaaggtgtccacagccacaaaaagaagaagatccgcacgtcacccaccttccggcggccgaagacactgcgactccggagacagcccaaatatcctcggaagagcgctcccaggagaaacaagcttgaccactatgctatcatcaagtttccgctgaccactgagtctgccatgaagaagatagaagacaacaacacacttgtgttcattgtggatgttaaagccaacaagcaccagattaaacaggctgtgaagaagctgtatgacattgatgtggccaaggtcaacaccctgattcggcctgatggagagaagaaggcatatgttcgactggctcctgattacgatgctttggatgttgccaacaaaattgggatcatctaaactgagtccagctgcctaattctgaatatatatatatatatatcttttcaccataaaaaaaaagaatcggggattagtcggggggcggacaaaagcgtgtgttatgaaggcgccaggctcatatgtgtcttcctgacccagctttcttggacacagggtgagaatccgcgggccccaatgtgagagccgaataaattcagaaagnccaggttagccggtaagaatacgcgcaaaaaagaacccaagtttgtgtcacacacatccattatagaaccacgtttaccggaataaaaaatagtgtgcgagctttacacaggagacaaccat

SEQ ID NO: 319451 - DNA, 591 bp, Homo sapiens
ggccagacattcggttctgggaagctacatgcatccactggttggagctccatgtccccgggcctcgtggttttgcgatgggctcctgcccctcctaaagctgaagccaaagcgaaggctttaaaggccaagaaggcagtgttgaaaggtgtccacagccacaaaaagaagaagatccgcacgtcacccaccttccggcggccgaagacactgcgactccggagacagcccaaatatcctcggaagagcgctcccaggagaaacaagcttgaccactatgctatcatcaagtttccgctgaccactgagtctgccatgaagaagatagaagacaacaacacacttgtgttcattgtggatgttaaagccaacaagcaccagattaaacaggctgtgaagaagctgtatgacattgatgtggccaaggtcaacaccctgattcggcctgatggagagaagaaggcatatgttcgactggctcctgattacgatgctttggatgttgccaacaaaattgggatcatctaaactgagtccagctgcctaattctgaatatatatatatatatatcttttcaccataaaaaaaaa

SEQ ID NO: 319452 - DNA, 696 bp, Homo sapiens
ttttttttatggggaaaagatatatatatatatatattcagaattaggcagctggactcagtttagatgatcccaattttgttggcaacatccaaagcatcgtaatcaggagccagtcgaacatatgccttcttctctccatcaggccgaatcagggtgttgaccttggccacatcaatgtcatacagcttcttcacagcctgtttaatctggtgcttgttggctttaaaggccaagaaggcagtgttgaaaggtgtccacagccacaaaaagaagaagatccgcacgtcacccaccttccggcggccgaagacactgcgactccggagacagcccaaatatcctcggaagagcgctcccaggagaaacaagcttgaccactatgctatcatcaagtttccgctgaccactgagtctgccatgaagaagatagaagacaacaacacacttgtgttcattgtggatgttaaagccaacaagcaccagattaaacaggctgtgaagaagctgtatgacattgatgtggccaaggtcaacaccctgattcggcctgatggagagaagaaggcatatgttcgactggctcctgattacgatgctttggatgttgccaacaaaattgggatcatctaaactgagtccagctgcctaattctgaatatatatatatatatatcttttcaccataaaaaaaaa

SEQ ID NO: 319453 - DNA, 764 bp, Homo sapiens
  misc_feature (577)..(577): n is a, c, g, or t
  misc_feature (584)..(584): n is a, c, g, or t
  misc_feature (590)..(590): n is a, c, g, or t
  misc_feature (592)..(592): n is a, c, g, or t
gcataggagacccttttcacaagatggcgccgaaagcgaagaaggaagctcctgcccctcctaaagctgaagccaaagcgaaggctttaaaggccaagaaggcagtgttgaaaggtgtccacagccacaaaaagaagaagatccgcacgtcacccaccttccggcggccgaagacactgcgactccggagacagcccaaatatcctcggaagagcgctcccaggagaaacaagcttgaccactatgctatcatcaagtttccgctgaccactgagtctgccatgaagaagatagaagacaacaacacacttgtgttcattgtggatgttaaagccaacaagcaccagattaaacaggctgtgaagaagctgtatgacattgatgtggccaaggtcaacaccctgattcggcctgatggagagaagaaggcatatgttcgactggctcctgattacgatgctttggatgttgccaacaaaattgggatcatctaaactgagtccagctgcctaattctgaatatatatatatatatatcttttcaccataaaaaaaaatacatgcctgtctgtcaatntctggtngggctngngaggccacacacacacactgatatgacagggtcgggacaagactcctgttcatacttactcacttgtcgaaaaaacctcaacctgacaatccaaccatgtatgatcatcccagacgatctcgcgactagagctcagtgtcctaggaaaaaccaaaactacagaactgcatcg

SEQ ID NO: 319454 - DNA, 768 bp, Homo sapiens
ggccagacattcggttctgggaagctacatgcatccactggttggagctccatgtccccgggcctcgtggttttgcgatgggctcctgcccctcctaaagctgaagccaaagcgaaggctttaaaggccaagaaggcagtgttgaaaggtgtccacagccacaaaaagaagaagatccgcacgtcacccaccttccggcggccgaagacactgcgactccggagacagcccaaatatcctcggaagagcgctcccaggagaaacaagcttgaccactatgctatcatcaagtttccgctgaccactgagtctgccatgaagaagatagaagacaacaacacacttgtgttcattgtggatgttaaagccaacaagcaccagattaaacaggctgtgaagaagctgtatgacattgatgtggccaaggtcaacaccctgattcggcctgatggagagaagaaggcatatgttcgactggctcctgattacgatgctttggatgttgccaacaaaattgggatcatctaaactgagtccagctgcctaattctgaatatatatatatatatatcttttcaccataaaaaaaaaaaaaaaaaaaaaatccgggggttttaatgggggggggggaaaaaggggtaggaaaaagggcacatgggtcaataggtgtttccggacccagttttttgggacaaggggggaaaatgggggggcccccaaagggggggcgaaaaatgcgaaaagccgggttacggataaggggaaaat

SEQ ID NO: 319455 - DNA, 806 bp, Homo sapiens
ggacccgcctgcacccgtaacaccgggggcttcccacaaccacaggcagactcccagacctggaaccacttctggaacagaagaccctgaattgagacctggactcaaagagattatcctggaactttaaaagttgacagccctctggatttcggactcccatgggccggtgaacccctttattgttggcccaagtttcgtcccatctggaacaccgtctttaatcaatacctgtacccctgttgtatctaggaagtaactagcttgctctttgagttttaccggctcataaggtggaagggacttgccttgtctcagattaagacctttggactgtggatttttggttaatgctgaaaagagttaagactttgggggactgttaggaaggcatgattggttttgaatagtgagcctcacgcgcagccacctggccgccctctggcccttcctgggcatcgtggctgaggtgctggtgctggtcaccatcatcttcatctacgagaagcgccggaagcccgaggacgtcctggatgatgacgacgccggctctgcacccctgaagagcagcgggcagcaccagaatgacaaaggcaagaacgtccgccagaggaactcttcctgaggcaggtggcccgaggacgctccctgctccgcgtctgcgccgccgccggagtccactcccagtgcttgcaagattccaacactgggagtggacaccagaatgacaaggcaagaacgtccgccagaggaactcttcctgaggcaggtggcccgaggacgctcctgctccgcgtcttgcaagc

SEQ ID NO: 319456 - DNA, 267 bp, Homo sapiens
gtccgagtacgcagaagcctccccagctcacccctggaggacggccggctctctatagtcaccaggctcacgtgggaaccccccttccacccacacgcacataaggggtttgctggggaactggcgccatcgccgggactccagaaccgcagaagcctccccagctcacccctggaggacggccggctctctatagcaccagggctcacgtgggaacccccctcccacccaccgccacaataaagatcgcccccacctccaccctca

SEQ ID NO: 319457 - DNA, 1660 bp, Homo sapiens
cgatacggctagtcgaggctggtgtgaatcggccgaggatagcggccgcgggcggcggcggcagcggttggaggttgtaggaccggcgaggaataggaatcatggcggctgcgctgttcgtgctgctgggattcgcgctgctgggcacccacggagcctccggggctgccggcacagtcttcactaccgtagaagaccttggctccaagatactcctcacctgctccttgaatgacagcgccacagaggtcacagggcaccgctggctgaaggggggcgtggtgctgaaggaggacgcgctgcccggccagaaaacggagttcaaggtggactccgacgaccagtggggagagtactcctgcgtcttcctccccgagcccatgggcacggccaacatccagctccacgggcctcccagagtgaaggctgtgaagtcgtcagaacacatcaacgagggggagacggccatgctggtctgcaagtcagagtccgtgccacctgtcactgactgggcctggtacaagatcactgactctgaggacaaggccctcatgaacggctccgagagcaggttcttcgtgagttcctcgcagggccggtcagagctacacattgagaacctgaacatggaggccgaccccggccagtaccggtgcaacggcaccagctccaagggctccgaccaggccatcatcacgctccgcgtgcgcagccacctggccgccctctggcccttcctgggcatcgtggctgaggtgctggtgctggtcaccatcatcttcatctacgagaagcgccggaagcccgaggacgtcctggatgatgacgacgccggctctgcacccctgaagagcagcgggcagcaccagaatgacaaaggcaagaacgtccgccagaggaactcttcctgaggcaggtggcccgaggacgctccctgctccgcgtctgcgccgccgccggagtccactcccagtgcttgcaagattccaagttctcacctcttaaagaaaacccaccccgtagattcccatcatacacttccttcttttttaaaaaagttgggttttctccattcaggattctgttccttaggattttttccttctgaagtgtttcacgagagcccgggagctgctgccctgcggccccgtctgtggctttcagcctctgggtctgagtcatggccgggtgggcggcacagccttctccactggccggagtcagtgccaggtccttgccctttgtggaaagtcacaggtcacacgaggggccccgtgtcctgcctgtctgaagccaatgctgtctggttgcgccatttttgtgcttttatgtttaattttatgagggccacgggtctgtgttcgactcagcctcagggacgactctgacctcttggccacagaggactcacttgcccacaccgagggcgaccccgtcacagcctcaagtcactcccaagccccctccttgtctgtgcatccgggggcagctctggagggggtttgctggggaactggcgccatcgccgggactccagaaccgcagaagcctccccagctcacccctggaggacggccggctctctatagcaccagggctcacgtgggaacccccctcccacccaccgccacaataaagatcgcccccacctccaccctca

SEQ ID NO: 319458 - DNA, 2019 bp, Homo sapiens
gatcttcccgcctcgacctcccaaggctctgggagtacagacgtgagccacagcggccggcccgtgtttaactcagataaaatctgggtaacacactttcaacgcttcaaccccctcgggcgcaccgctctgcgctcattgcaactttgaaagcaggaaggaagaaatgcgcaggctccagccgcgtccccgcaggccccactcccgtttcctagcaacgccgggtcacgtgcgccgccgcccggattccgtagcgtgagcctgccggagccggcgcgtacatgcgagcgtgtgcgcgcgtgcgcaggcggggcgaccggcgtccccggcgctcgccccgcccccgagatgacgccgtgcgtgcgcgcgcccggtccgcgcctccgccgctttttatagcgcggccgcgggcggcggcggcagcggttggaggttgtaggaccggcgaggaataggaatcatggcggctgcgctgttcgtgctgctgggattcgcgctgctgggcacccacggagcctccggggctgccggcacagtcttcactaccgtagaagaccttggctccaagatactcctcacctgctccttgaatgacagcgccacagaggtcacagggcaccgctggctgaaggggggcgtggtgctgaaggaggacgcgctgcccggccagaaaacggagttcaaggtggactccgacgaccagtggggagagtactcctgcgtcttcctccccgagcccatgggcacggccaacatccagctccacgggcctcccagagtgaaggctgtgaagtcgtcagaacacatcaacgagggggagacggccatgctggtctgcaagtcagagtccgtgccacctgtcactgactgggcctggtacaagatcactgactctgaggacaaggccctcatgaacggctccgagagcaggttcttcgtgagttcctcgcagggccggtcagagctacacattgagaacctgaacatggaggccgaccccggccagtaccggtgcaacggcaccagctccaagggctccgaccaggccatcatcacgctccgcgtgcgcagccacctggccgccctctggcccttcctgggcatcgtggctgaggtgctggtgctggtcaccatcatcttcatctacgagaagcgccggaagcccgaggacgtcctggatgatgacgacgccggctctgcacccctgaagagcagcgggcagcaccagaatgacaaaggcaagaacgtccgccagaggaactcttcctgaggcaggtggcccgaggacgctccctgctccgcgtctgcgccgccgccggagtccactcccagtgcttgcaagattccaagttctcacctcttaaagaaaacccaccccgtagattcccatcatacacttccttcttttttaaaaaagttgggttttctccattcaggattctgttccttaggattttttccttctgaagtgtttcacgagagcccgggagctgctgccctgcggccccgtctgtggctttcagcctctgggtctgagtcatggccgggtgggcggcacagccttctccactggccggagtcagtgccaggtccttgccctttgtggaaagtcacaggtcacacgaggggccccgtgtcctgcctgtctgaagccaatgctgtctggttgcgccatttttgtgcttttatgtttaattttatgagggccacgggtctgtgttcgactcagcctcagggacgactctgacctcttggccacagaggactcacttgcccacaccgagggcgaccccgtcacagcctcaagtcactcccaagccccctccttgtctgtgcatccgggggcagctctggagggggtttgctggggaactggcgccatcgccgggactccagaaccgcagaagcctccccagctcacccctggaggacggccggctctctatagcaccagggctcacgtgggaacccccctcccacccaccgccacaataaagatcgcccccacctccaccctca

SEQ ID NO: 319459 - DNA, 1718 bp, Homo sapiens
cgatacggctagtcgaggctggtgtgaatcggccgaggatagcggccgcgggcggcggcggcagcggttggaggttgtaggaccggcgaggaataggaatcatggcggctgcgctgttcgtgctgctgggattcgcgctgctgggcacccacggagcctccggggctgccggcacagtcttcactaccgtagaagaccttggctccaagatactcctcacctgctccttgaatgacagcgccacagaggtcacagggcaccgctggctgaaggggggcgtggtgctgaaggaggacgcgctgcccggccagaaaacggagttcaaggtggactccgacgaccagtggggagagtactcctgcgtcttcctccccgagcccatgggcacggccaacatccagctccacgggcctcccagagtgaaggctgtgaagtcgtcagaacacatcaacgagggggagacggccatgctggtctgcaagtcagagtccgtgccacctgtcactgactgggcctggtacaagatcactgactctgaggacaaggccctcatgaacggctccgagagcaggttcttcgtgagttcctcgcagggccggtcagagctacacattgagaacctgaacatggaggccgaccccggccagtaccggtgcaacggcaccagctccaagggctccgaccaggccatcatcacgctccgcgtgcgcagccacctggccgccctctggcccttcctgggcatcgtggctgaggtgctggtgctggtcaccatcatcttcatctacgagaagcgccggaagcccgaggacgtcctggatgatgacgacgccggctctgcacccctgaagagcagcgggcagcaccagaatgacaaaggcaagaacgtccgccagaggaactcttcctgaggcaggtggcccgaggacgctccctgctccgcgtctgcgccgccgccggagtccactcccagtgcttgcaagattccaagttctcacctcttaaagaaaacccaccccgtagattcccatcatacacttccttcttttttaaaaaagttgggttttctccattcaggattctgttccttaggattttttccttctgaagtgtttcacgagagcccgggagctgctgccctgcggccccgtctgtggctttcagcctctgggtctgagtcatggccgggtgggcggcacagccttctccactggccggagtcagtgccaggtccttgccctttgtggaaagtcacaggtcacacgaggggccccgtgtcctgcctgtctgaagccaatgctgtctggttgcgccatttttgtgcttttatgtttaattttatgagggccacgggtctgtgttcgactcagcctcagggacgactctgacctcttggccacagaggactcacttgcccacaccgagggcgaccccgtcacagcctcaagtcactcccaagccccctccttgtctgtgcatccgggggcagctctggagggggtttgctggggaactggcgccatcgccgggactccagaaccgcagaagcctccccagctcacccctggaggacggccggctctctatagcaccagggctcacgtgggaacccccctcccacccaccgccacaataaagatcgcccccacctccaccctcaaaaggaggaagaagacggaggcctgggggcggaaaacgaggtgcagggaatggccctg

SEQ ID NO: 319460 - DNA, 1691 bp, Homo sapiens
cgatacggctagtcgaggctggtgtgaatcggccgaggatagcggccgcgggcggcggcggcagcggttggaggttgtaggaccggcgaggaataggaatcatggcggctgcgctgttcgtgctgctgggattcgcgctgctgggcacccacggagcctccggggctgccggcacagtcttcactaccgtagaagaccttggctccaagatactcctcacctgctccttgaatgacagcgccacagaggtcacagggcaccgctggctgaaggggggcgtggtgctgaaggaggacgcgctgcccggccagaaaacggagttcaaggtggactccgacgaccagtggggagagtactcctgcgtcttcctccccgagcccatgggcacggccaacatccagctccacgggcctcccagagtgaaggctgtgaagtcgtcagaacacatcaacgagggggagacggccatgctggtctgcaagtcagagtccgtgccacctgtcactgactgggcctggtacaagatcactgactctgaggacaaggccctcatgaacggctccgagagcaggttcttcgtgagttcctcgcagggccggtcagagctacacattgagaacctgaacatggaggccgaccccggccagtaccggtgcaacggcaccagctccaagggctccgaccaggccatcatcacgctccgcgtgcgcagccacctggccgccctctggcccttcctgggcatcgtggctgaggtgctggtgctggtcaccatcatcttcatctacgagaagcgccggaagcccgaggacgtcctggatgatgacgacgccggctctgcacccctgaagagcagcgggcagcaccagaatgacaaaggcaagaacgtccgccagaggaactcttcctgaggcaggtggcccgaggacgctccctgctccgcgtctgcgccgccgccggagtccactcccagtgcttgcaagattccaagttctcacctcttaaagaaaacccaccccgtagattcccatcatacacttccttcttttttaaaaaagttgggttttctccattcaggattctgttccttaggattttttccttctgaagtgtttcacgagagcccgggagctgctgccctgcggccccgtctgtggctttcagcctctgggtctgagtcatggccgggtgggcggcacagccttctccactggccggagtcagtgccaggtccttgccctttgtggaaagtcacaggtcacacgaggggccccgtgtcctgcctgtctgaagccaatgctgtctggttgcgccatttttgtgcttttatgtttaattttatgagggccacgggtctgtgttcgactcagcctcagggacgactctgacctcttggccacagaggactcacttgcccacaccgagggcgaccccgtcacagcctcaagtcactcccaagccccctccttgtctgtgcatccgggggcagctctggagggggtttgctggggaactggcgccatcgccgggactccagaaccgcagaagcctccccagctcacccctggaggacggccggctctctatagcaccagggctcacgtgggaacccccctcccacccaccgccacaataaagatcgcccccacctccaccctcagattaacccacagcctctacctagccctgtc

SEQ ID NO: 319461 - DNA, 1690 bp, Homo sapiens
cgatacggctagtcgaggctggtgtgaatcggccgaggatagcggccgcgggcggcggcggcagcggttggaggttgtaggaccggcgaggaataggaatcatggcggctgcgctgttcgtgctgctgggattcgcgctgctgggcacccacggagcctccggggctgccggcacagtcttcactaccgtagaagaccttggctccaagatactcctcacctgctccttgaatgacagcgccacagaggtcacagggcaccgctggctgaaggggggcgtggtgctgaaggaggacgcgctgcccggccagaaaacggagttcaaggtggactccgacgaccagtggggagagtactcctgcgtcttcctccccgagcccatgggcacggccaacatccagctccacgggcctcccagagtgaaggctgtgaagtcgtcagaacacatcaacgagggggagacggccatgctggtctgcaagtcagagtccgtgccacctgtcactgactgggcctggtacaagatcactgactctgaggacaaggccctcatgaacggctccgagagcaggttcttcgtgagttcctcgcagggccggtcagagctacacattgagaacctgaacatggaggccgaccccggccagtaccggtgcaacggcaccagctccaagggctccgaccaggccatcatcacgctccgcgtgcgcagccacctggccgccctctggcccttcctgggcatcgtggctgaggtgctggtgctggtcaccatcatcttcatctacgagaagcgccggaagcccgaggacgtcctggatgatgacgacgccggctctgcacccctgaagagcagcgggcagcaccagaatgacaaaggcaagaacgtccgccagaggaactcttcctgaggcaggtggcccgaggacgctccctgctccgcgtctgcgccgccgccggagtccactcccagtgcttgcaagattccaagttctcacctcttaaagaaaacccaccccgtagattcccatcatacacttccttcttttttaaaaaagttgggttttctccattcaggattctgttccttaggattttttccttctgaagtgtttcacgagagcccgggagctgctgccctgcggccccgtctgtggctttcagcctctgggtctgagtcatggccgggtgggcggcacagccttctccactggccggagtcagtgccaggtccttgccctttgtggaaagtcacaggtcacacgaggggccccgtgtcctgcctgtctgaagccaatgctgtctggttgcgccatttttgtgcttttatgtttaattttatgagggccacgggtctgtgttcgactcagcctcagggacgactctgacctcttggccacagaggactcacttgcccacaccgagggcgaccccgtcacagcctcaagtcactcccaagccccctccttgtctgtgcatccgggggcagctctggagggggtttgctggggaactggcgccatcgccgggactccagaaccgcagaagcctccccagctcacccctggaggacggccggctctctatagcaccagggctcacgtgggaacccccctcccacccaccgccacaataaagatcgcccccacctccaccctcaaaaaaaaattctagatcgcgagcggccgct

SEQ ID NO: 319462 - DNA, 1697 bp, Homo sapiens
cgatacggctagtcgaggctggtgtgaatcggccgaggatagcggccgcgggcggcggcggcagcggttggaggttgtaggaccggcgaggaataggaatcatggcggctgcgctgttcgtgctgctgggattcgcgctgctgggcacccacggagcctccggggctgccggcacagtcttcactaccgtagaagaccttggctccaagatactcctcacctgctccttgaatgacagcgccacagaggtcacagggcaccgctggctgaaggggggcgtggtgctgaaggaggacgcgctgcccggccagaaaacggagttcaaggtggactccgacgaccagtggggagagtactcctgcgtcttcctccccgagcccatgggcacggccaacatccagctccacgggcctcccagagtgaaggctgtgaagtcgtcagaacacatcaacgagggggagacggccatgctggtctgcaagtcagagtccgtgccacctgtcactgactgggcctggtacaagatcactgactctgaggacaaggccctcatgaacggctccgagagcaggttcttcgtgagttcctcgcagggccggtcagagctacacattgagaacctgaacatggaggccgaccccggccagtaccggtgcaacggcaccagctccaagggctccgaccaggccatcatcacgctccgcgtgcgcagccacctggccgccctctggcccttcctgggcatcgtggctgaggtgctggtgctggtcaccatcatcttcatctacgagaagcgccggaagcccgaggacgtcctggatgatgacgacgccggctctgcacccctgaagagcagcgggcagcaccagaatgacaaaggcaagaacgtccgccagaggaactcttcctgaggcaggtggcccgaggacgctccctgctccgcgtctgcgccgccgccggagtccactcccagtgcttgcaagattccaagttctcacctcttaaagaaaacccaccccgtagattcccatcatacacttccttcttttttaaaaaagttgggttttctccattcaggattctgttccttaggattttttccttctgaagtgtttcacgagagcccgggagctgctgccctgcggccccgtctgtggctttcagcctctgggtctgagtcatggccgggtgggcggcacagccttctccactggccggagtcagtgccaggtccttgccctttgtggaaagtcacaggtcacacgaggggccccgtgtcctgcctgtctgaagccaatgctgtctggttgcgccatttttgtgcttttatgtttaattttatgagggccacgggtctgtgttcgactcagcctcagggacgactctgacctcttggccacagaggactcacttgcccacaccgagggcgaccccgtcacagcctcaagtcactcccaagccccctccttgtctgtgcatccgggggcagctctggagggggtttgctggggaactggcgccatcgccgggactccagaaccgcagaagcctccccagctcacccctggaggacggccggctctctatagcaccagggctcacgtgggaacccccctcccacccaccgccacaataaagatcgcccccacctccaccctcaaacatggcgttgtatcgggatcctctagatacacacg

SEQ ID NO: 319463 - DNA, 1669 bp, Homo sapiens
  misc_feature (85)..(85): n is a, c, g, or t
aacaaccaacccccccaccaaaccccccccccccccaccacccaacccacaaccagacagagagacggtgtaaatcggccgaggngtaggaccggcgaggaataggaatcatggcggctgcgctgttcgtgctgctgggattcgcgctgctgggcacccacggagcctccggggctgccggcacagtcttcactaccgtagaagaccttggctccaagatactcctcacctgctccttgaatgacagcgccacagaggtcacagggcaccgctggctgaaggggggcgtggtgctgaaggaggacgcgctgcccggccagaaaacggagttcaaggtggactccgacgaccagtggggagagtactcctgcgtcttcctccccgagcccatgggcacggccaacatccagctccacgggcctcccagagtgaaggctgtgaagtcgtcagaacacatcaacgagggggagacggccatgctggtctgcaagtcagagtccgtgccacctgtcactgactgggcctggtacaagatcactgactctgaggacaaggccctcatgaacggctccgagagcaggttcttcgtgagttcctcgcagggccggtcagagctacacattgagaacctgaacatggaggccgaccccggccagtaccggtgcaacggcaccagctccaagggctccgaccaggccatcatcacgctccgcgtgcgcagccacctggccgccctctggcccttcctgggcatcgtggctgaggtgctggtgctggtcaccatcatcttcatctacgagaagcgccggaagcccgaggacgtcctggatgatgacgacgccggctctgcacccctgaagagcagcgggcagcaccagaatgacaaaggcaagaacgtccgccagaggaactcttcctgaggcaggtggcccgaggacgctccctgctccgcgtctgcgccgccgccggagtccactcccagtgcttgcaagattccaagttctcacctcttaaagaaaacccaccccgtagattcccatcatacacttccttcttttttaaaaaagttgggttttctccattcaggattctgttccttaggattttttccttctgaagtgtttcacgagagcccgggagctgctgccctgcggccccgtctgtggctttcagcctctgggtctgagtcatggccgggtgggcggcacagccttctccactggccggagtcagtgccaggtccttgccctttgtggaaagtcacaggtcacacgaggggccccgtgtcctgcctgtctgaagccaatgctgtctggttgcgccatttttgtgcttttatgtttaattttatgagggccacgggtctgtgttcgactcagcctcagggacgactctgacctcttggccacagaggactcacttgcccacaccgagggcgaccccgtcacagcctcaagtcactcccaagccccctccttgtctgtgcatccgggggcagctctggagggggtttgctggggaactggcgccatcgccgggactccagaaccgcagaagcctccccagctcacccctggaggacggccggctctctatagcaccagggctcacgtgggaacccccctcccacccaccgccacaataaagatcgcccccacctccaccctca

SEQ ID NO: 319464 - DNA, 1804 bp, Homo sapiens
  misc_feature (1)..(1): n is a, c, g, or t
nggcggagaagatgtatacgacgtcactactaggtgcgagatcgcgcacgttacattccggcgtgtaggcgcgcccgcatcaagctgtccgtaattgatgcatgaccatttactaccggaacgtctactgtgaatcacggtccatacatcaggcaccagagctccgtaattcagtccgaagatgcgtggagtgtggagagttagtacggacccgtgcgtagtaggaccggcgaggaataggaatcatggcggctgcgctgttcgtgctgctgggattcgcgctgctgggcacccacggagcctccggggctgccggcacagtcttcactaccgtagaagaccttggctccaagatactcctcacctgctccttgaatgacagcgccacagaggtcacagggcaccgctggctgaaggggggcgtggtgctgaaggaggacgcgctgcccggccagaaaacggagttcaaggtggactccgacgaccagtggggagagtactcctgcgtcttcctccccgagcccatgggcacggccaacatccagctccacgggcctcccagagtgaaggctgtgaagtcgtcagaacacatcaacgagggggagacggccatgctggtctgcaagtcagagtccgtgccacctgtcactgactgggcctggtacaagatcactgactctgaggacaaggccctcatgaacggctccgagagcaggttcttcgtgagttcctcgcagggccggtcagagctacacattgagaacctgaacatggaggccgaccccggccagtaccggtgcaacggcaccagctccaagggctccgaccaggccatcatcacgctccgcgtgcgcagccacctggccgccctctggcccttcctgggcatcgtggctgaggtgctggtgctggtcaccatcatcttcatctacgagaagcgccggaagcccgaggacgtcctggatgatgacgacgccggctctgcacccctgaagagcagcgggcagcaccagaatgacaaaggcaagaacgtccgccagaggaactcttcctgaggcaggtggcccgaggacgctccctgctccgcgtctgcgccgccgccggagtccactcccagtgcttgcaagattccaagttctcacctcttaaagaaaacccaccccgtagattcccatcatacacttccttcttttttaaaaaagttgggttttctccattcaggattctgttccttaggattttttccttctgaagtgtttcacgagagcccgggagctgctgccctgcggccccgtctgtggctttcagcctctgggtctgagtcatggccgggtgggcggcacagccttctccactggccggagtcagtgccaggtccttgccctttgtggaaagtcacaggtcacacgaggggccccgtgtcctgcctgtctgaagccaatgctgtctggttgcgccatttttgtgcttttatgtttaattttatgagggccacgggtctgtgttcgactcagcctcagggacgactctgacctcttggccacagaggactcacttgcccacaccgagggcgaccccgtcacagcctcaagtcactcccaagccccctccttgtctgtgcatccgggggcagctctggagggggtttgctggggaactggcgccatcgccgggactccagaaccgcagaagcctccccagctcacccctggaggacggccggctctctatagcaccagggctcacgtgggaacccccctcccacccaccgccacaataaagatcgcccccacctccaccctca

SEQ ID NO: 319465 - DNA, 1605 bp, Homo sapiens
cgatacggctagtcgaggctggtgtgaatcggccgaggatagcggccgcgggcggcggcggcagcggttggaggttgtaggaccggcgaggaataggaatcatggcggctgcgctgttcgtgctgctgggattcgcgctgctgggcacccacggagcctccggggctgccggcacagtcttcactaccgtagaagaccttggctccaagatactcctcacctgctccttgaatgacagcgccacagaggtcacagggcaccgctggctgaaggggggcgtggtgctgaaggaggacgcgctgcccggccagaaaacggagttcaaggtggactccgacgaccagtggggagagtactcctgcgtcttcctccccgagcccatgggcacggccaacatccagctccacgggcctcccagagtgaaggctgtgaagtcgtcagaacacatcaacgagggggagacggccatgctggtctgcaagtcagagtccgtgccacctgtcactgactgggcctggtacaagatcactgactctgaggacaaggccctcatgaacggctccgagagcaggttcttcgtgagttcctcgcagggccggtcagagctacacattgagaacctgaacatggaggccgaccccggccagtaccggtgcaacggcaccagctccaagggctccgaccaggccatcatcacgctccgcgtgcgcagccacctggccgccctctggcccttcctgggcatcgtggctgaggtgctggtgctggtcaccatcatcttcatctacgagaagcgccggaagcccgaggacgtcctggatgatgacgacgccggctctgcacccctgaagagcagcgggcagcaccagaatgacaaaggcaagaacgtccgccagaggaactcttcctgaggcaggtggcccgaggacgctccctgctccgcgtctgcgccgccgccggagtccactcccagtgcttgcaagattccaagttctcacctcttaaagaaaacccaccccgtagattcccatcatacacttccttcttttttaaaaaagttgggttttctccattcaggattctgttccttaggattttttccttctgaagtgtttcacgagagcccgggagctgctgccctgcggccccgtctgtggctttcagcctctgggtctgagtcatggccgggtgggcggcacagccttctccactggccggagtcagtgccaggtccttgccctttgtggaaagtcacaggtcacacgaggggccccgtgtcctgcctgtctgaagccaatgctgtctggttgcgccatttttgtgcttttatgtttaattttatgagggccacgggtctgtgttcgactcagcctcagggacgactctgacctcttggccacagaggactcacttgcccacaccgagggcgaccccgtcacagcctcaagtcactcccaagccccctccttgtctgtgcatccgggggcagctctggagggggtttgctggggaactggcgccatcgccgggactccagaaccgcagaagcctccccagctcacccctggagcattacactcgccaggggggggtcatccagttagg

SEQ ID NO: 319466 - DNA, 1644 bp, Homo sapiens
cgatacggctagtcgaggctggtgtgaatcggccgaggatagcggccgcgggcggcggcggcagcggttggaggttgtaggaccggcgaggaataggaatcatggcggctgcgctgttcgtgctgctgggattcgcgctgctgggcacccacggagcctccggggctgccggcacagtcttcactaccgtagaagaccttggctccaagatactcctcacctgctccttgaatgacagcgccacagaggtcacagggcaccgctggctgaaggggggcgtggtgctgaaggaggacgcgctgcccggccagaaaacggagttcaaggtggactccgacgaccagtggggagagtactcctgcgtcttcctccccgagcccatgggcacggccaacatccagctccacgggcctcccagagtgaaggctgtgaagtcgtcagaacacatcaacgagggggagacggccatgctggtctgcaagtcagagtccgtgccacctgtcactgactgggcctggtacaagatcactgactctgaggacaaggccctcatgaacggctccgagagcaggttcttcgtgagttcctcgcagggccggtcagagctacacattgagaacctgaacatggaggccgaccccggccagtaccggtgcaacggcaccagctccaagggctccgaccaggccatcatcacgctccgcgtgcgcagccacctggccgccctctggcccttcctgggcatcgtggctgaggtgctggtgctggtcaccatcatcttcatctacgagaagcgccggaagcccgaggacgtcctggatgatgacgacgccggctctgcacccctgaagagcagcgggcagcaccagaatgacaaaggcaagaacgtccgccagaggaactcttcctgaggcaggtggcccgaggacgctccctgctccgcgtctgcgccgccgccggagtccactcccagtgcttgcaagattccaagttctcacctcttaaagaaaacccaccccgtagattcccatcatacacttccttcttttttaaaaaagttgggttttctccattcaggattctgttccttaggattttttccttctgaagtgtttcacgagagcccgggagctgctgccctgcggccccgtctgtggctttcagcctctgggtctgagtcatggccgggtgggcggcacagccttctccactggccggagtcagtgccaggtccttgccctttgtggaaagtcacaggtcacacgaggggccccgtgtcctgcctgtctgaagccaatgctgtctggttgcgccatttttgtgcttttatgtttaattttatgagggccacgggtctgtgttcgactcagcctcagggacgactctgacctcttggccacagaggactcacttgcccacaccgagggcgaccccgtcacagcctcaagtcactcccaagccccctccttgtctgtgcatccgggggcagctctggagggggtttgctggggaactggcgccatcgccgggactccagaaccgcagaagcctccccagctcacccctggagtggggcgatctttattgtggccgtgggtggcgagcgggttcccacgtgagcctgtgctatagatggtaccgaca

SEQ ID NO: 319467 - DNA, 1563 bp, Homo sapiens
cgatacggctagtcgaggctggtgtgaatcggccgaggatagcggccgcgggcggcggcggcagcggttggaggttgtaggaccggcgaggaataggaatcatggcggctgcgctgttcgtgctgctgggattcgcgctgctgggcacccacggagcctccggggctgccggcacagtcttcactaccgtagaagaccttggctccaagatactcctcacctgctccttgaatgacagcgccacagaggtcacagggcaccgctggctgaaggggggcgtggtgctgaaggaggacgcgctgcccggccagaaaacggagttcaaggtggactccgacgaccagtggggagagtactcctgcgtcttcctccccgagcccatgggcacggccaacatccagctccacgggcctcccagagtgaaggctgtgaagtcgtcagaacacatcaacgagggggagacggccatgctggtctgcaagtcagagtccgtgccacctgtcactgactgggcctggtacaagatcactgactctgaggacaaggccctcatgaacggctccgagagcaggttcttcgtgagttcctcgcagggccggtcagagctacacattgagaacctgaacatggaggccgaccccggccagtaccggtgcaacggcaccagctccaagggctccgaccaggccatcatcacgctccgcgtgcgcagccacctggccgccctctggcccttcctgggcatcgtggctgaggtgctggtgctggtcaccatcatcttcatctacgagaagcgccggaagcccgaggacgtcctggatgatgacgacgccggctctgcacccctgaagagcagcgggcagcaccagaatgacaaaggcaagaacgtccgccagaggaactcttcctgaggcaggtggcccgaggacgctccctgctccgcgtctgcgccgccgccggagtccactcccagtgcttgcaagattccaagttctcacctcttaaagaaaacccaccccgtagattcccatcatacacttccttcttttttaaaaaagttgggttttctccattcaggattctgttccttaggattttttccttctgaagccactggccggagtcagtgccaggtccttgccctttgtggaaagtcacaggtcacacgaggggccccgtgtcctgcctgtctgaagccaatgctgtctggttgcgccatttttgtgcttttatgtttaattttatgagggccacgggtctgtgttcgactcagcctcagggacgactctgacctcttggccacagaggactcacttgcccacaccgagggcgaccccgtcacagcctcaagtcactcccaagccccctccttgtctgtgcatccgggggcagctctggagggggtttgctggggaactggcgccatcgccgggactccagaaccgcagaagcctccccagctcacccctggaggacggccggctctctatagcaccagggctcacgtgggaacccccctcccacccaccgccacaataaagatcgcccccacctccaccctca

SEQ ID NO: 319468 - DNA, 1053 bp, Homo sapiens
cgatacggctagtcgaggctggtgtgaatcggccgaggatagcggccgcgggcggcggcggcagcggttggaggttgtaggaccggcgaggaataggaatcatggcggctgcgctgttcgtgctgctgggattcgcgctgctgggcacccacggagcctccggggctgccggcacagtcttcactaccgtagaagaccttggctccaagatactcctcacctgctccttgaatgacagcgccacagaggtcacagggcaccgctggctgaaggggggcgtggtgctgaaggaggacgcgctgcccggccagaaaacggagttcaaggtggactccgacgaccagtggggagagtactcctgcgtcttcctccccgagcccatgggcacggccaacatccagctccacgggcctcccagagtgaaggctgtgaagtcgtcagaacacatcaacgagggggagacggccatgctggtctgcaagtcagagtccgtgccacctgtcactgactgggcctggtacaagatcactgactctgaggacaaggccctcatgaacggctccgagagcaggttcttcgtgagttcctcgcagggccggtcagagctacacattgagaacctgaacatggaggccgaccccggccagtaccggtgcaacggcaccagctccaagggctccgaccaggccatcatcacgctccgcgtgcgcagccacctggccgccctctggcccttcctgggcatcgtggctgaggtgctggtgctggtcaccatcatcttcatctacgagaagcgccggaagcccgaggacgtcctggatgatgacgacgccggctctgcacccctgaagagcagcgggcagcaccagaatgacaaaggcaagaacgtccgccagaggaactcttcctgaggcaggtggcccgaggacgctccctgctccgcgtctgcgccgccgccggagtccactcccagtgcttgcaagattccaagttctcacctcttaaagaaaacccaccccgtagtccagaatgccccgagtacgagctcgatca

SEQ ID NO: 319469 - DNA, 1841 bp, Homo sapiens
cgatacggctagtcgaggctggtgtgaatcggccgaggatagcggccgcgggcggcggcggcagcggttggaggttgtaggaccggcgaggaataggaatcatggcggctgcgctgttcgtgctgctgggattcgcgctgctgggcacccacggagcctccggggctgccggcacagtcttcactaccgtagaagaccttggctccaagatactcctcacctgctccttgaatgacagcgccacagaggtcacagggcaccgctggctgaaggggggcgtggtgctgaaggaggacgcgctgcccggccagaaaacggagttcaaggtggactccgacgaccagtggggagagtactcctgcgtcttcctccccgagcccatgggcacggccaacatccagctccacgggcctcccagagtgaaggctgtgaagtcgtcagaacacatcaacgagggggagacggccatgctggtctgcaagtcagagtccgtgccacctgtcactgactgggcctggtacaagatcactgactctgaggacaaggccctcatgaacggctccgagagcaggttcttcgtgagttcctcgcagggccggtcagagctacacattgagaacctgaacatggaggccgaccccggccagtaccggtgcaacggcaccagctccaagggctccgaccaggccatcatcacgctccgcgtgcgcagccacctggccgccctctggcccttcctgggcatcgtggctgaggtgctggtgctggtcaccatcatcttcatctacgagaagcgccggaagcccgaggacgtcctggatgatgacgacgccggctctgcacccctgtaagttccagctgtgggggtcgggggtcccaaggagcggcctgctgccccaggcctttaaaacacaaaggcagagcccctgggcttcagtattcgggggtcctgggggccggggtgggcaggggtgacttggagagagtgacttgcgggggacaccctctcacccggctctgcacccctggaagagcagcgggcagcaccagaatgacaaaggcaagaacgtccgccagaggaactcttcctgaggcaggtggcccgaggacgctccctgctccgcgtctgcgccgccgccggagtccactcccagtgcttgcaagattccaagttctcacctcttaaagaaaacccaccccgtagattcccatcatacacttccttcttttttaaaaaagttgggttttctccattcaggattctgttccttaggattttttccttctgaagtgtttcacgagagcccgggagctgctgccctgcggccccgtctgtggctttcagcctctgggtctgagtcatggccgggtgggcggcacagccttctccactggccggagtcagtgccaggtccttgccctttgtggaaagtcacaggtcacacgaggggccccgtgtcctgcctgtctgaagccaatgctgtctggttgcgccatttttgtgcttttatgtttaattttatgagggccacgggtctgtgttcgactcagcctcagggacgactctgacctcttggccacagaggactcacttgcccacaccgagggcgaccccgtcacagcctcaagtcactcccaagccccctccttgtctgtgcatccgggggcagctctggagggggtttgctggggaactggcgccatcgccgggactccagaaccgcagaagcctccccagctcacccctggaggacggccggctctctatagcaccagggctcacgtgggaacccccctcccacccaccgccacaataaagatcgcccccacctccaccctca

SEQ ID NO: 319470 - DNA, 1845 bp, Homo sapiens
cgatacggctagtcgaggctggtgtgaatcggccgaggatagcggccgcgggcggcggcggcagcggttggaggttgtaggaccggcgaggaataggaatcatggcggctgcgctgttcgtgctgctgggattcgcgctgctgggcacccacggagcctccggggctgccggcacagtcttcactaccgtagaagaccttggctccaagatactcctcacctgctccttgaatgacagcgccacagaggtcacagggcaccgctggctgaaggggggcgtggtgctgaaggaggacgcgctgcccggccagaaaacggagttcaaggtggactccgacgaccagtggggagagtactcctgcgtcttcctccccgagcccatgggcacggccaacatccagctccacggtgagtcctgcagtcatggggtaccgggcaccaccgactgtcgggagaagttgttggcctgaggcacccggcacatcccagagccctggccccctgctccctggaggggaacagccctcctgcgggaggccggggatgggggcgggcctgcggttccaggctcctctctctcaccctcctgtcagggcctcccagagtgaaggctgtgaagtcgtcagaacacatcaacgagggggagacggccatgctggtctgcaagtcagagtccgtgccacctgtcactgactgggcctggtacaagatcactgactctgaggacaaggccctcatgaacggctccgagagcaggttcttcgtgagttcctcgcagggccggtcagagctacacattgagaacctgaacatggaggccgaccccggccagtaccggtgcaacggcaccagctccaagggctccgaccaggccatcatcacgctccgcgtgcgcagccacctggccgccctctggcccttcctgggcatcgtggctgaggtgctggtgctggtcaccatcatcttcatctacgagaagcgccggaagcccgaggacgtcctggatgatgacgacgccggctctgcacccctgaagagcagcgggcagcaccagaatgacaaaggcaagaacgtccgccagaggaactcttcctgaggcaggtggcccgaggacgctccctgctccgcgtctgcgccgccgccggagtccactcccagtgcttgcaagattccaagttctcacctcttaaagaaaacccaccccgtagattcccatcatacacttccttcttttttaaaaaagttgggttttctccattcaggattctgttccttaggattttttccttctgaagtgtttcacgagagcccgggagctgctgccctgcggccccgtctgtggctttcagcctctgggtctgagtcatggccgggtgggcggcacagccttctccactggccggagtcagtgccaggtccttgccctttgtggaaagtcacaggtcacacgaggggccccgtgtcctgcctgtctgaagccaatgctgtctggttgcgccatttttgtgcttttatgtttaattttatgagggccacgggtctgtgttcgactcagcctcagggacgactctgacctcttggccacagaggactcacttgcccacaccgagggcgaccccgtcacagcctcaagtcactcccaagccccctccttgtctgtgcatccgggggcagctctggagggggtttgctggggaactggcgccatcgccgggactccagaaccgcagaagcctccccagctcacccctggaggacggccggctctctatagcaccagggctcacgtgggaacccccctcccacccaccgccacaataaagatcgcccccacctccaccctca

SEQ ID NO: 319471 - DNA, 1667 bp, Homo sapiens
tatgaacgtatgcacgtcaaataggacctcatggttgcgtgctctgctcgtgctttgttgcgattctggctgcttagtagctgcctcggatcctcacggtacgtgctggcacggttcttcactaccgtcaagagaaatgttgagatccgagatactcctcatcctgtgtccttggaatgactagtgcctagctaggatggttcacataggttagcagcatagagcatagcacatagcgggagcagttgtgatagctcgtacatgaggtacagctcttgaccctgttgtcagaagatagatcgtgaagtgcgtggtggtctccgactatgcattgcgggatagtacatctctgggttttctcgtacctcactgatcccattgaggcatgttctacatacgcgaagttccatggtacggcctcccagagtgaaggctgtgaagtcgtcagaacacatcaacgagggggagacggccatgctggtctgcaagtcagagtccgtgccacctgtcactgactgggcctggtacaagatcactgactctgaggacaaggccctcatgaacggctccgagagcaggttcttcgtgagttcctcgcagggccggtcagagctacacattgagaacctgaacatggaggccgaccccggccagtaccggtgcaacggcaccagctccaagggctccgaccaggccatcatcacgctccgcgtgcgcagccacctggccgccctctggcccttcctgggcatcgtggctgaggtgctggtgctggtcaccatcatcttcatctacgagaagcgccggaagcccgaggacgtcctggatgatgacgacgccggctctgcacccctgaagagcagcgggcagcaccagaatgacaaaggcaagaacgtccgccagaggaactcttcctgaggcaggtggcccgaggacgctccctgctccgcgtctgcgccgccgccggagtccactcccagtgcttgcaagattccaagttctcacctcttaaagaaaacccaccccgtagattcccatcatacacttccttcttttttaaaaaagttgggttttctccattcaggattctgttccttaggattttttccttctgaagtgtttcacgagagcccgggagctgctgccctgcggccccgtctgtggctttcagcctctgggtctgagtcatggccgggtgggcggcacagccttctccactggccggagtcagtgccaggtccttgccctttgtggaaagtcacaggtcacacgaggggccccgtgtcctgcctgtctgaagccaatgctgtctggttgcgccatttttgtgcttttatgtttaattttatgagggccacgggtctgtgttcgactcagcctcagggacgactctgacctcttggccacagaggactcacttgcccacaccgagggcgaccccgtcacagcctcaagtcactcccaagccccctccttgtctgtgcatccgggggcagctctggagggggtttgctggggaactggcgccatcgccgggactccagaaccgcagaagcctccccagctcacccctggaggacggccggctctctatagcaccagggctcacgtgggaacccccctcccacccaccgccacaataaagatcgcccccacctccaccctca

SEQ ID NO: 319472 - DNA, 1855 bp, Homo sapiens
gatcttcccgcctcgacctcccaaggctctgggagtacagacgtgagccacagcggccggcccgtgtttaactcagataaaatctgggtaacacactttcaacgcttcaaccccctcgggcgcaccgctctgcgctcattgcaactttgaaagcaggaaggaagaaatgcgcaggctccagccgcgtccccgcaggccccactcccgtttcctagcaacgccgggtcacgtgcgccgccgcccggattccgtagcgtgagcctgccggagccggcgcgtacatgcgagcgtgtgcgcgcgtgcgcaggcggggcgaccggcgtccccggcgctcgccccgcccccgagatgacgccgtgcgtgcgcgcgcccggtccgcgcctccgccgctttttatagcgcggccgcgggcggcggcggcagcggttggaggttgtaggaccggcgaggaataggaatcatggcggctgcgctgttcgtgctgctgggattcgcgctgctgggcacccacggagcctccggggctgccggcacagtcttcactaccgtagaagaccttggctccaagatactcctcacctgctccttgaatgacagcgccacagaggtcacagggcaccgctggctgaaggggggcgtggtgctgaaggggggagacggccatgctggtctgcaagtcagagtccgtgccacctgtcactgactgggcctggtacaagatcactgactctgaggacaaggccctcatgaacggctccgagagcaggttcttcgtgagttcctcgcagggccggtcagagctacacattgagaacctgaacatggaggccgaccccggccagtaccggtgcaacggcaccagctccaagggctccgaccaggccatcatcacgctccgcgtgcgcagccacctggccgccctctggcccttcctgggcatcgtggctgaggtgctggtgctggtcaccatcatcttcatctacgagaagcgccggaagcccgaggacgtcctggatgatgacgacgccggctctgcacccctgaagagcagcgggcagcaccagaatgacaaaggcaagaacgtccgccagaggaactcttcctgaggcaggtggcccgaggacgctccctgctccgcgtctgcgccgccgccggagtccactcccagtgcttgcaagattccaagttctcacctcttaaagaaaacccaccccgtagattcccatcatacacttccttcttttttaaaaaagttgggttttctccattcaggattctgttccttaggattttttccttctgaagtgtttcacgagagcccgggagctgctgccctgcggccccgtctgtggctttcagcctctgggtctgagtcatggccgggtgggcggcacagccttctccactggccggagtcagtgccaggtccttgccctttgtggaaagtcacaggtcacacgaggggccccgtgtcctgcctgtctgaagccaatgctgtctggttgcgccatttttgtgcttttatgtttaattttatgagggccacgggtctgtgttcgactcagcctcagggacgactctgacctcttggccacagaggactcacttgcccacaccgagggcgaccccgtcacagcctcaagtcactcccaagccccctccttgtctgtgcatccgggggcagctctggagggggtttgctggggaactggcgccatcgccgggactccagaaccgcagaagcctccccagctcacccctggaggacggccggctctctatagcaccagggctcacgtgggaacccccctcccacccaccgccacaataaagatcgcccccacctccaccctca

SEQ ID NO: 319473 - DNA, 1652 bp, Homo sapiens
cgatacggctagtcgaggctggtgtgaatcggccgaggatagcggccgcgggcggcggcggcagcggttggaggttgtaggaccggcgaggaataggaatcatggcggctgcgctgttcgtgctgctgggattcgcgctgctgggcacccacggagcctccggggctgccggcacagtcttcactaccgtagaagaccttggctccaagatactcctcacctgctccttgaatgacagcgccacagaggtcacagggcaccgctggctgaaggggggcgtggtgctgaaggaggacgcgctgcccggccagaaaacggagttcaaggtggactccgacgaccagtggggagagtactcctgcgtcttcctccccgagcccatgggcacggccaacatccagctccacgggcctcccagagtgaaggctgtgaagtcgtcagaacacatcaacgagggggagacggccatgctggtctgcaagtcagagtccgtgccacctgtcactgactgggcctggtacaagatcactgactctgaggacaaggccctcatgaacggctccgagagcaggttcttcgtgagttcctcgcagggccggtcagagctacacattgagaacctgaacatggaggccgaccccggccagtaccggtgcaacggcaccagctccaagggctccgaccaggccatcatcacgctccgcgtgcgcagccacctggccgccctctggcccttcctgggcatcgtggctgaggtgctggtgctggtcaccatcatcttcatctacgagaagcgccggaagcccgaggacgtcctggatgccggctctgcacccctggaagagcagcgggcagcaccagaatgacaaaggcaagaacgtccgccagaggaactcttcctgaggcaggtggcccgaggacgctccctgctccgcgtctgcgccgccgccggagtccactcccagtgcttgcaagattccaagttctcacctcttaaagaaaacccaccccgtagattcccatcatacacttccttcttttttaaaaaagttgggttttctccattcaggattctgttccttaggattttttccttctgaagtgtttcacgagagcccgggagctgctgccctgcggccccgtctgtggctttcagcctctgggtctgagtcatggccgggtgggcggcacagccttctccactggccggagtcagtgccaggtccttgccctttgtggaaagtcacaggtcacacgaggggccccgtgtcctgcctgtctgaagccaatgctgtctggttgcgccatttttgtgcttttatgtttaattttatgagggccacgggtctgtgttcgactcagcctcagggacgactctgacctcttggccacagaggactcacttgcccacaccgagggcgaccccgtcacagcctcaagtcactcccaagccccctccttgtctgtgcatccgggggcagctctggagggggtttgctggggaactggcgccatcgccgggactccagaaccgcagaagcctccccagctcacccctggaggacggccggctctctatagcaccagggctcacgtgggaacccccctcccacccaccgccacaataaagatcgcccccacctccaccctca

SEQ ID NO: 319474 - DNA, 1176 bp, Homo sapiens
  misc_feature (54)..(54): n is a, c, g, or t
catgtgtttgcattaaatcctcccctgtaataatggcctggacagataataatngagacaagccctcatgaacggctccgagagcaggttcttcgtgagttcctcgcagggccggtcagagctacacattgagaacctgaacatggaggccgaccccggccagtaccggtgcaacggcaccagctccaagggctccgaccaggccatcatcacgctccgcgtgcgcagccacctggccgccctctggcccttcctgggcatcgtggctgaggtgctggtgctggtcaccatcatcttcatctacgagaagcgccggaagcccgaggacgtcctggatgatgacgacgccggctctgcacccctgaagagcagcgggcagcaccagaatgacaaaggcaagaacgtccgccagaggaactcttcctgaggcaggtggcccgaggacgctccctgctccgcgtctgcgccgccgccggagtccactcccagtgcttgcaagattccaagttctcacctcttaaagaaaacccaccccgtagattcccatcatacacttccttcttttttaaaaaagttgggttttctccattcaggattctgttccttaggattttttccttctgaagtgtttcacgagagcccgggagctgctgccctgcggccccgtctgtggctttcagcctctgggtctgagtcatggccgggtgggcggcacagccttctccactggccggagtcagtgccaggtccttgccctttgtggaaagtcacaggtcacacgaggggccccgtgtcctgcctgtctgaagccaatgctgtctggttgcgccatttttgtgcttttatgtttaattttatgagggccacgggtctgtgttcgactcagcctcagggacgactctgacctcttggccacagaggactcacttgcccacaccgagggcgaccccgtcacagcctcaagtcactcccaagccccctccttgtctgtgcatccgggggcagctctggagggggtttgctggggaactggcgccatcgccgggactccagaaccgcagaagcctccccagctcacccctggaggacggccggctctctatagcaccagggctcacgtgggaacccccctcccacccaccgccacaataaagatcgcccccacctccaccctca

SEQ ID NO: 319475 - DNA, 1018 bp, Homo sapiens
  misc_feature (832)..(832): n is a, c, g, or t
  misc_feature (846)..(846): n is a, c, g, or t
  misc_feature (869)..(869): n is a, c, g, or t
  misc_feature (930)..(930): n is a, c, g, or t
  misc_feature (932)..(932): n is a, c, g, or t
  misc_feature (934)..(934): n is a, c, g, or t
  misc_feature (943)..(943): n is a, c, g, or t
  misc_feature (946)..(947): n is a, c, g, or t
  misc_feature (1006)..(1007): n is a, c, g, or t
cgatacggctagtcgaggctggtgtgaatcggccgaggatagcggccgcgggcggcggcggcagcggttggaggttgtaggaccggcgaggaataggaatcatggcggctgcgctgttcgtgctgctgggattcgcgctgctgggcacccacggagcctccggggctgccggcacagtcttcactaccgtagaagaccttggctccaagatactcctcacctgctccttgaatgacagcgccacagaggtcacagggcaccgctggctgaaggggggcgtggtgctgaaggaggacgcgctgcccggccagaaaacggagttcaaggtggactccgacgaccagtggggagagtactcctgcgtcttcctccccgagcccatgggcacggccaacatccagctccacgggcctcccagagtgaaggctgtgaagtcgtcagaacacatcaacgagggggagacggccatgctggtctgcaagtcagagtccgtgccacctgtcactgactgggcctggtacaagatcactgactctgaggacaaggccctcatgaacggctccgagagcaggttcttcgtgagttcctcgcagggccggtcagagctacacattgagaacctgaacatggaggccgaccccggccagtaccggtgcaacggcaccagctccaagggctccgaccaggccatcatcacgctccgcgtgcgcagccacctggccgccctctggcccttcctgggcatcgtggctgaggtgctggtgctggtcaccatcatcttcatctacgagaagcgccggaagcccgaggacgtcctggatgaagccgggtngaccctgaaaagangggagcccgatgaaaggagaagncgcagagaactctgaggggggccagagacccgccagttggcgccggacacccgggaaccgncncntaaaacccnganncaaccttaaagggccccgggccggtccggagcacggggggggggccgacggggcgcggnnaagagcatcag

SEQ ID NO: 319476 - DNA, 1013 bp, Homo sapiens
cgatacggctagtcgaggctggtgtgaatcggccgaggatagcggccgcgggcggcggcggcagcggttggaggttgtaggaccggcgaggaataggaatcatggcggctgcgctgttcgtgctgctgggattcgcgctgctgggcacccacggagcctccggggctgccggcacagtcttcactaccgtagaagaccttggctccaagatactcctcacctgctccttgaatgacagcgccacagaggtcacagggcaccgctggctgaaggggggcgtggtgctgaaggaggacgcgctgcccggccagaaaacggagttcaaggtggactccgacgaccagtggggagagtactcctgcgtcttcctccccgagcccatgggcacggccaacatccagctccacgggcctcccagagtgaaggctgtgaagtcgtcagaacacatcaacgagggggagacggccatgctggtctgcaagtcagagtccgtgccacctgtcactgactgggcctggtacaagatcactgactctgaggacaaggccctcatgaacggctccgagagcaggttcttcgtgagttcctcgcagggccggtcagagctacacattgagaacctgaacatggaggccgaccccggccagtaccggtgcaacggcaccagctccaagggctccgaccaggccatcatcacgctccgcgtgcgcagccacctggccgccctctggcccttcctgggcatcgtggctgaggtgctggtgctggtcaccatcatcttcatctacgagaagcgccggaagcccgaggacgtcctggatgatgagagccggttgaccctaaagaaggggggccgatgaaaggaaatgtcccaagagacctcgaggagggcgggaccctgtcgtgcgcgggagccccgtgatctcccttaaccggatccaacctttaggggcgagagcctttcgtagacggaccccgagagggggccgccctagcctctattgcgcccgggt

SEQ ID NO: 319477 - DNA, 1420 bp, Homo sapiens
gatcttcccgcctcgacctcccaaggctctgggagtacagacgtgagccacagcggccggcccgtgtttaactcagataaaatctgggtaacacactttcaacgcttcaaccccctcgggcgcaccgctctgcgctcattgcaactttgaaagcaggaaggaagaaatgcgcaggctccagccgcgtccccgcaggccccactcccgtttcctagcaacgccgggtcacgtgcgccgccgcccggattccgtagcgtgagcctgccggagccggcgcgtacatgcgagcgtgtgcgcgcgtgcgcaggcggggcgaccggcgtccccggcgctcgccccgcccccgagatgacgccgtgcgtgcgcgcgcccggtccgcgcctccgccgctttttatagcgcggccgcgggcggcggcggcagcggttggaggttgtaggaccggcgaggaataggaatcatggcggctgcgctgttcgtgctgctgggattcgcgctgctgggcacccacggagcctccggggctgccggcacagtcttcactaccgtagaagaccttggctccaagatactcctcacctgctccttgaatgacagcgccacagaggaagagcagcgggcagcaccagaatgacaaaggcaagaacgtccgccagaggaactcttcctgaggcaggtggcccgaggacgctccctgctccgcgtctgcgccgccgccggagtccactcccagtgcttgcaagattccaagttctcacctcttaaagaaaacccaccccgtagattcccatcatacacttccttcttttttaaaaaagttgggttttctccattcaggattctgttccttaggattttttccttctgaagtgtttcacgagagcccgggagctgctgccctgcggccccgtctgtggctttcagcctctgggtctgagtcatggccgggtgggcggcacagccttctccactggccggagtcagtgccaggtccttgccctttgtggaaagtcacaggtcacacgaggggccccgtgtcctgcctgtctgaagccaatgctgtctggttgcgccatttttgtgcttttatgtttaattttatgagggccacgggtctgtgttcgactcagcctcagggacgactctgacctcttggccacagaggactcacttgcccacaccgagggcgaccccgtcacagcctcaagtcactcccaagccccctccttgtctgtgcatccgggggcagctctggagggggtttgctggggaactggcgccatcgccgggactccagaaccgcagaagcctccccagctcacccctggaggacggccggctctctatagcaccagggctcacgtgggaacccccctcccacccaccgccacaataaagatcgcccccacctccaccctca

SEQ ID NO: 319478 - DNA, 1563 bp, Homo sapiens
  misc_feature (729)..(729): n is a, c, g, or t
  misc_feature (1006)..(1006): n is a, c, g, or t
gatcttcccgcctcgacctcccaaggctctgggagtacagacgtgagccacagcggccggcccgtgtttaactcagataaaatctgggtaacacactttcaacgcttcaaccccctcgggcgcaccgctctgcgctcattgcaactttgaaagcaggaaggaagaaatgcgcaggctccagccgcgtccccgcaggccccactcccgtttcctagcaacgccgggtcacgtgcgccgccgcccggattccgtagcgtgagcctgccggagccggcgcgtacatgcgagcgtgtgcgcgcgtgcgcaggcggggcgaccggcgtccccggcgctcgccccgcccccgagatgacgccgtgcgtgcgcgcgcccggtccgcgcctccgccgctttttatagcgcggccgcgggcggcggcggcagcggttggaggttgtaggaccggcgaggaataggaatcatggcggctgcgctgttcgtgctgctgggattcgcgctgctgggcacccacggagcctccggggctgccggcacagtcttcactaccgtagaagaccttggctccaagatactcctcacctgctccttgaatgacagcgccacagaggtcacagggcaccgctggctgaaggggggcgtggtgctgaaggaggacgcgctgcccggccagaaaacggagttcaaagtgtggactcgcgactgtaccaagttgggcgcagagtacttccntgcagtctttcctctcgccgagcccaatgaggctgcggcgcatactatcccagtcgtcctacgcggtcgctcccaaggagtgtagaggcatgtcgcacatgtcctggtcaaggaatccaccaagtacagactggaatgcgcgtgcacgaacagagctcgattggctcgtggtaccttggcgagagtccaggatgtttccggtgttcccatcgcttgctacaccttgaacttgcgggccctcgcgttgaccaacaagactctagctttggagcatacnttggaaggcacctacaaggccgcacttacaattcgtacttctgggcgtcgcgtagcagccgacgcgtttgctttcctggcgtacgtttccctacggggagttgggcctcggggtaccacgcacgacttagcactatttgggaggaacccttgtagaccaattgtggaggagcctcgtaccccccgggctccatgtgaccctgggtcgcgacatttgggcgaccccacgcattcccgcaaatgcgcgcgttccttgcacacgaggggcccaatgcgtattcgactgctctcccccgcgggtgtcgctcgcccaggcgctacccgttggggcccagccccattctgggaccccgttcgtccattgggggcgaattcccggttgggccgctgtggagaggtcggcgtggggtcgcttgtggttcaagcctcattcccacttctgtgtccaatccttgagcggaggaagcgccggcccgggatagagcccccggcatgtggaccggtccttgggggaattgagtttgaccggactgcccgcgggtccttgtggttgccccg

SEQ ID NO: 319479 - DNA, 1656 bp, Homo sapiens
  misc_feature (36)..(36): n is a, c, g, or t
agcggagacaattaggctaggtcgaggctgggtgtnggcggccgcgggcggcggcggcagcggttggaggttgtaggaccggcgaggaataggaatcatggcggctgcgctgttcgtgctgctgggattcgcgctgctgggcacccacggagcctccggggctgccggcacagtcttcactaccgtagaagaccttggctccaagatactcctcacctgctccttgaatgacagcgccacagaggtcacagggcaccgctggctgaaggggggcgtggtgctgaaggaggacgcgctgcccggccagaaaacggagttcaaggtggactccgacgaccagtggggagagtactcctgcgtcttcctccccgagcccatgggcacggccaacatccagctccacgggcctcccagagtgaaggctgtgaagtcgtcagaacacatcaacgagggggagacggccatgctggtctgcaagtcagagtccgtgccacctgtcactgactgggcctggtacaagatcactgactctgaggacaaggccctcatgaacggctccgagagcaggttcttcgtgagttcctcgcagggccggtcagagctacacattgagaacctgaacatggaggccgaccccggccagtaccggtgcaacggcaccagctccaagggctccgaccaggccatcatcacgctccgcgtgcgcagccacctggccgccctctggcccttcctgggcatcgtggctgaggtgctggtgctggtcaccatcatcttcatctacgagaagcgccggaagcccgaggacgtcctggatgatgacgacgccggctctgcacccctgaagagcagcgggcagcaccagaatgacaaaggcaagaacgtccgccagaggaactcttcctgaggcaggtggcccgaggacgctccctgctccgcgtctgcgccgccgccggagtccactcccagtgcttgcaagattccaagttctcacctcttaaagaaaacccaccccgtagattcccatcatacacttccttcttttttaaaaaagttgggttttctccattcaggattctgttccttaggattttttccttctgaagtgtttcacgagagcccgggagctgctgccctgcggccccgtctgtggctttcagcctctgggtctgagtcatggccgggtgggcggcacagccttctccactggccggagtcagtgccaggtccttgccctttgtggaaagtcacaggtcacacgaggggccccgtgtcctgcctgtctgaagccaatgctgtctggttgcgccatttttgtgcttttatgtttaattttatgagggccacgggtctgtgttcgactcagcctcagggacgactctgacctcttggccacagaggactcacttgcccacaccgagggcgaccccgtcacagcctcaagtcactcccaagccccctccttgtctgtgcatccgggggcagctctggagggggtttgctggggaactggcgccatcgccgggactccagaaccgcagaagcctccccagctcacccctggaggacggccggctctctatagcaccagggctcacgtgggaacccccctcccacccaccgccacaataaagatcgcccccacctccaccctca

SEQ ID NO: 319480 - DNA, 1692 bp, Homo sapiens
cgatacggctagtcgaggctggtgtgaatcggccgaggatagcggccgcgggcggcggcggcagcggttggaggttgtaggaccggcgaggaataggaatcatggcggctgcgctgttcgtgctgctgggattcgcgctgctgggcacccacggagcctccggggctgccggcacagtcttcactaccgtagaagaccttggctccaagatactcctcacctgctccttgaatgacagcgccacagaggtcacagggcaccgctggctgaaggggggcgtggtgctgaaggaggacgcgctgcccggccagaaaacggagttcaaggtggactccgacgaccagtggggagagtactcctgcgtcttcctccccgagcccatgggcacggccaacatccagctccacgggcctcccagagtgaaggctgtgaagtcgtcagaacacatcaacgagggggagacggccatgctggtctgcaagtcagagtccgtgccacctgtcactgactgggcctggtacaagatcactgactctgaggacaaggccctcatgaacggctccgagagcaggttcttcgtgagttcctcgcagggccggtcagagctacacattgagaacctgaacatggaggccgaccccggccagtaccggtgcaacggcaccagctccaagggctccgaccaggccatcatcacgctccgcgtgcgcagccacctggccgccctctggcccttcctgggcatcgtggctgaggtgctggtgctggtcaccatcatcttcatctacgagaagcgccggaagcccgaggacgtcctggatgatgacgacgccggctctgcacccctgaagagcagcgggcagcaccagaatgacaaaggcaagaacgtccgccagaggaactcttcctgaggcaggtggcccgaggacgctccctgctccgcgtctgcgccgccgccggagtccactcccagtgcttgcaagattccaagttctcacctcttaaagaaaacccaccccgtagattcccatcatacacttccttcttttttaaaaaagttgggttttctccattcaggattctgttccttaggattttttccttctgaagtgtttcacgagagcccgggagctgctgccctgcggccccgtctgtggctttcagcctctgggtctgagtcatggccgggtgggcggcacagccttctccactggccggagtcagtgccaggtccttgccctttgtggaaagtcacaggtcacacgaggggccccgtgtcctgcctgtctgaagccaatgctgtctggttgcgccatttttgtgcttttatgtttaattttatgagggccacgggtctgtgttcgactcagcctcagggacgactctgacctcttggccacagaggactcacttgcccacaccgagggcgaccccgtcacagcctcaagtcactcccaagccccctccttgtctgtgcatccgggggcagctctggagggggtttgctggggaactggcgccatcgccgggactccagaaccgcagaagcctccccagctcacccctggaggacggccggctctctatagcaccagggctcacgtgggaacccccctcccacccaccgccacaataaagatcgcccccacctccaccctcatgccacccctgtggctggtttcgtgtcccccg

SEQ ID NO: 319481 - DNA, 1626 bp, Homo sapiens
cgatacggctagtcgaggctggtgtgaatcggccgaggataggtaggaccggcgaggaataggaatcatggcggctgcgctgttcgtgctgctgggattcgcgctgctgggcacccacggagcctccggggctgccggcacagtcttcactaccgtagaagaccttggctccaagatactcctcacctgctccttgaatgacagcgccacagaggtcacagggcaccgctggctgaaggggggcgtggtgctgaaggaggacgcgctgcccggccagaaaacggagttcaaggtggactccgacgaccagtggggagagtactcctgcgtcttcctccccgagcccatgggcacggccaacatccagctccacgggcctcccagagtgaaggctgtgaagtcgtcagaacacatcaacgagggggagacggccatgctggtctgcaagtcagagtccgtgccacctgtcactgactgggcctggtacaagatcactgactctgaggacaaggccctcatgaacggctccgagagcaggttcttcgtgagttcctcgcagggccggtcagagctacacattgagaacctgaacatggaggccgaccccggccagtaccggtgcaacggcaccagctccaagggctccgaccaggccatcatcacgctccgcgtgcgcagccacctggccgccctctggcccttcctgggcatcgtggctgaggtgctggtgctggtcaccatcatcttcatctacgagaagcgccggaagcccgaggacgtcctggatgatgacgacgccggctctgcacccctgaagagcagcgggcagcaccagaatgacaaaggcaagaacgtccgccagaggaactcttcctgaggcaggtggcccgaggacgctccctgctccgcgtctgcgccgccgccggagtccactcccagtgcttgcaagattccaagttctcacctcttaaagaaaacccaccccgtagattcccatcatacacttccttcttttttaaaaaagttgggttttctccattcaggattctgttccttaggattttttccttctgaagtgtttcacgagagcccgggagctgctgccctgcggccccgtctgtggctttcagcctctgggtctgagtcatggccgggtgggcggcacagccttctccactggccggagtcagtgccaggtccttgccctttgtggaaagtcacaggtcacacgaggggccccgtgtcctgcctgtctgaagccaatgctgtctggttgcgccatttttgtgcttttatgtttaattttatgagggccacgggtctgtgttcgactcagcctcagggacgactctgacctcttggccacagaggactcacttgcccacaccgagggcgaccccgtcacagcctcaagtcactcccaagccccctccttgtctgtgcatccgggggcagctctggagggggtttgctggggaactggcgccatcgccgggactccagaaccgcagaagcctccccagctcacccctggaggacggccggctctctatagcaccagggctcacgtgggaacccccctcccacccaccgccacaataaagatcgcccccacctccaccctca

SEQ ID NO: 319482 - DNA, 1633 bp, Homo sapiens
cgatacggctagtcgaggctggtgtgaatcggccgaggatagcggccgcgggcggcggcggcagcggttggaggttgtaggaccggcgaggaataggaatcatggcggctgcgctgttcgtgctgctgggattcgcgctgctgggcacccacggagcctccggggctgccggcacagtcttcactaccgtagaagaccttggctccaagatactcctcacctgctccttgaatgacagcgccacagaggtcacagggcaccgctggctgaaggggggcgtggtgctgaaggaggacgcgctgcccggccagaaaacggagttcaaggtggactccgacgaccagtggggagagtactcctgcgtcttcctccccgagcccatgggcacggccaacatccagctccacgggcctcccagagtgaaggctgtgaagtcgtcagaacacatcaacgagggggagacggccatgctggtctgcaagtcagagtccgtgccacctgtcactgactgggcctggtacaagatcactgactctgaggacaaggccctcatgaacggctccgagagcaggttcttcgtgagttcctcgcagggccggtcagagctacacattgagaacctgaacatggaggccgaccccggccagtaccggtgcaacggcaccagctccaagggctccgaccaggccatcatcacgctccgcgtgcgcagccacctggccgccctctggcccttcctgggcatcgtggctgaggtgctggtgctggtcaccatcatcttcatctacgagaagcgccggaagcccgaggacgtcctggatgatgacgacgccggctctgcacccctgaagagcagcgggcagcaccagaatgacaaaggcaagaacgtccgccagaggaactcttcctgaggcaggtggcccgaggacgctccctgctccgcgtctgcgccgccgccggagtccactcccagtgcttgcaagattccaagttctcacctcttaaagaaaacccaccccgtagattcccatcatacacttccttcttttttaaaaaagttgggttttctccattcaggattctgttccttaggattttttccttctgaagtgtttcacgagagcccgggagctgctgccctgcggccccgtctgtggctttcagcctctgggtctgagtcatggccgggtgggcggcacagccttctccactggccggagtcagtgccaggtccttgccctttgtggaaagtcacaggtcacacgaggggccccgtgtcctgcctgtctgaagccaatgctgtctggttgcgccatttttgtgcttttatgtttaattttatgagggccacgggtctgtgttcgactcagcctcagggacgactctgacctcttggccacagaggactcacttgcccacaccgagggcgaccccgtcacagcctcaagtcactcccaagccccctccttgtctgtgcatccgggggcagctctggagggggtttgctggggaactggcgccatcgccgggactccagaaccgcagaagcctccccagctcacccctggagctcacgtgggaacccccctcccacccaccgccacaataaagatcgcccccacctccaccctca

SEQ ID NO: 319483 - DNA, 1627 bp, Homo sapiens
cgatacggctagtcgaggctggtgtgaatcggccgaggatagcggccgcgggcggcggcggcagcggttggaggttgtaggaccggcgaggaataggaatcatggcggctgcgctgttcgtgctgctgggattcgcgctgctgggcacccacggagcctccggggctgccggcacagtcttcactaccgtagaagaccttggctccaagatactcctcacctgctccttgaatgacagcgccacagaggtcacagggcaccgctggctgaaggggggcgtggtgctgaaggaggacgcgctgcccggccagaaaacggagttcaaggtggactccgacgaccagtggggagagtactcctgcgtcttcctccccgagcccatgggcacggccaacatccagctccacgggcctcccagagtgaaggctgtgaagtcgtcagaacacatcaacgagggggagacggccatgctggtctgcaagtcagagtccgtgccacctgtcactgactgggcctggtacaagatcactgactctgaggacaaggccctcatgaacggctccgagagcaggttcttcgtgagttcctcgcagggccggtcagagctacacattgagaacctgaacatggaggccgaccccggccagtaccggtgcaacggcaccagctccaagggctccgaccaggccatcatcacgctccgcgtgcgcagccacctggccgccctctggcccttcctgggcatcgtggctgaggtgctggtgctggtcaccatcatcttcatctacgagaagcgccggaagcccgaggacgtcctggatgatgacgacgccggctctgcacccctgaagagcagcgggcagcaccagaatgacaaaggcaagaacgtccgccagaggaactcttcctgaggcaggtggcccgaggacgctccctgctccgcgtctgcgccgccgccggagtccactcccagtgcttgcaagattccaagttctcacctcttaaagaaaacccaccccgtagattcccatcatacacttccttcttttttaaaaaagttgggttttctccattcaggattctgttccttaggattttttccttctgaagtgtttcacgagagcccgggagctgctgccctgcggccccgtctgtggctttcagcctctgggtctgagtcatggccgggtgggcggcacagccttctccactggccggagtcagtgccaggtccttgccctttgtggaaagtcacaggtcacacgaggggccccgtgtcctgcctgtctgaagccaatgctgtctggttgcgccatttttgtgcttttatgtttaattttatgagggccacgggtctgtgttcgactcagcctcagggacgactctgacctcttggccacagaggactcacttgcccacaccgagggcgaccccgtcacagcctcaagtcactcccacgtgagccctggtgctatggagagccggccgtcctccaggggtgagctggggaggcttctgcggttctggagtcccggcgatggcgccagttccccagcaaaccccctccagagctgcccccggatgcacagacaaggaggtcgacgcggccgcgaatttagtagtagta

SEQ ID NO: 319484 - DNA, 1379 bp, Homo sapiens
cgatacggctagtcgaggctggtgtgaatcggccgaggatagcggccgcgggcggcggcggcagcggttggaggttgtaggaccggcgaggaataggaatcatggcggctgcgctgttcgtgctgctgggattcgcgctgctgggcacccacggagcctccggggctgccggcacagtcttcactaccgtagaagaccttggctccaagatactcctcacctgctccttgaatgacagcgccacagaggtcacagggcaccgctggctgaaggggggcgtggtgctgaaggaggacgcgctgcccggccagaaaacggagttcaaggtggactccgacgaccagtggggagagtactcctgcgtcttcctccccgagcccatgggcacggccaacatccagctccacgggcctcccagagtgaaggctgtgaagtcgtcagaacacatcaacgagggggagacggccatgctggtctgcaagtcagagtccgtgccacctgtcactgactgggcctggtacaagatcactgactctgaggacaaggccctcatgaacggctccgagagcaggttcttcgtgagttcctcgcagggccggtcagagctacacattgagaacctgaacatggaggccgaccccggccagtaccggtgcaacggcaccagctccaagggctccgaccaggccatcatcacgctccgcgtgcgcagccacctggccgccctctggcccttcctgggcatcgtggctgaggtgctggtgctggtcaccatcatcttcatctacgagaagcgccggaagcccgaggacgtcctggatgatgacgacgccggctctgcacccctgaagagcagcgggcagcaccagaatgacaaaggcaagaacgtccgccagaggaactcttcctgaggcaggtggcccgaggacgctccctgctccgcgtctgcgccgccgccggagtccactcccagtgcttgcaagattccaagttctcacctcttaaagaaaacccaccccgtagattcccatcatacacttccttcttttttaaaaaagttgggttttctccattcaaaaaaaccaaaaagaaagaagaacaagatatatcactaagggaccaagtttaaacataccagtatcttgtacaagggtgaccaataaaaagtagattatacgataggcaactggcagataaataaaaacgcggaacgggcaaaacatggataaatggacaactttgtgaacgacactcattattggagaggaacaaatatagaagatacattacaagaataaaccatgagacaatcagataaaagaaatggacaacaaccattatcacgtgaaattgtagaataatagaatgaaaaataacat

SEQ ID NO: 319485 - DNA, 1685 bp, Homo sapiens
cgatacggctagtcgaggctggtgtgaatcggccgaggatagcggccgcgggcggcggcggcagcggttggaggttgtaggaccggcgaggaataggaatcatggcggctgcgctgttcgtgctgctgggattcgcgctgctgggcacccacggagcctccggggctgccggcacagtcttcactaccgtagaagaccttggctccaagatactcctcacctgctccttgaatgacagcgccacagaggtcacagggcaccgctggctgaaggggggcgtggtgctgaaggaggacgcgctgcccggccagaaaacggagttcaaggtggactccgacgaccagtggggagagtactcctgcgtcttcctccccgagcccatgggcacggccaacatccagctccacgggcctcccagagtgaaggctgtgaagtcgtcagaacacatcaacgagggggagacggccatgctggtctgcaagtcagagtccgtgccacctgtcactgactgggcctggtacaagatcactgactctgaggacaaggccctcatgaacggctccgagagcaggttcttcgtgagttcctcgcagggccggtcagagctacacattgagaacctgaacatggaggccgaccccggccagtaccggtgcaacggcaccagctccaagggctccgaccaggccatcatcacgctccgcgtgcgcagccacctggccgccctctggcccttcctgggcatcgtggctgaggtgctggtgctggtcaccatcatcttcatctacgagaagcgccggaagcccgaggacgtcctggatgatgacgacgccggctctgcacccctgaagagcagcgggcagcaccagaatgacaaaggcaagaacgtccgccagaggaactcttcctgaggcaggcccgcaatcgtacgcatccctgactctgagttctgcggcggccctgcgtgagtccactccgcacgctgcttcgccaatcattgcgagacggcttttgtgcacgctcattcatagagaaacagcccgaggagattcccatcatacacttccttcttttttaaaaaagttgggttttctccattcaggattctgttccttaggattttttccttctgaagtgtttcacgagagcccgggagctgctgccctgcggccccgtctgtggctttcagcctctgggtctgagtcatggccgggtgggcggcacagccttctccactggccggagtcagtgccaggtccttgccctttgtggaaagtcacaggtcacacgaggggccccgtgtcctgcctgtctgaagccaatgctgtctggttgcgccatttttgtgcttttatgtttaattttatgagggccacgggtctgtgttcgactcagcctcagggacgactctgacctcttggccacagaggactcacttgcccacaccgagggcgaccccgtcacagcctcaagtcactcccaagccccctccttgtctgtgcatccgggggcagctctggagggggtttgctggggaactggcgccatcgccgggactccagaaccgcagaagcctccccagctcacccctggaggacggccggctctctatagcaccagggctcacgtgggaacccccctcccacccaccgccacaataaagatcgcccccacctccaccctca

SEQ ID NO: 319486 - DNA, 1779 bp, Homo sapiens
gatcttcccgcctcgacctcccaaggctctgggagtacagacgtgagccacagcggccggcccgtgtttaactcagataaaatctgggtaacacactttcaacgcttcaaccccctcgggcgcaccgctctgcgctcattgcaactttgaaagcaggaaggaagaaatgcgcaggctccagccgcgtccccgcaggccccactcccgtttcctagcaacgccgggtcacgtgcgccgccgcccggattccgtagcgtgagcctgccggagccggcgcgtacatgcgagcgtgtgcgcgcgtgcgcaggcggggcgaccggcgtccccggcgctcgccccgcccccgagatgacgccgtgcgtgcgcgcgcccggtccgcgcctccgccgctttttatagcgcggccgcgggcggcggcggcagcggttggaggttgtaggaccggcgaggaataggaatcatggcggctgcgctgttcgtgctgctgggattcgcgctgctgggcacccacggagcctccggggctgggcctcccagagtgaaggctgtgaagtcgtcagaacacatcaacgagggggagacggccatgctggtctgcaagtcagagtccgtgccacctgtcactgactgggcctggtacaagatcactgactctgaggacaaggccctcatgaacggctccgagagcaggttcttcgtgagttcctcgcagggccggtcagagctacacattgagaacctgaacatggaggccgaccccggccagtaccggtgcaacggcaccagctccaagggctccgaccaggccatcatcacgctccgcgtgcgcagccacctggccgccctctggcccttcctgggcatcgtggctgaggtgctggtgctggtcaccatcatcttcatctacgagaagcgccggaagcccgaggacgtcctggatgatgacgacgccggctctgcacccctgaagagcagcgggcagcaccagaatgacaaaggcaagaacgtccgccagaggaactcttcctgaggcaggtggcccgaggacgctccctgctccgcgtctgcgccgccgccggagtccactcccagtgcttgcaagattccaagttctcacctcttaaagaaaacccaccccgtagattcccatcatacacttccttcttttttaaaaaagttgggttttctccattcaggattctgttccttaggattttttccttctgaagtgtttcacgagagcccgggagctgctgccctgcggccccgtctgtggctttcagcctctgggtctgagtcatggccgggtgggcggcacagccttctccactggccggagtcagtgccaggtccttgccctttgtggaaagtcacaggtcacacgaggggccccgtgtcctgcctgtctgaagccaatgctgtctggttgcgccatttttgtgcttttatgtttaattttatgagggccacgggtctgtgttcgactcagcctcagggacgactctgacctcttggccacagaggactcacttgcccacaccgagggcgaccccgtcacagcctcaagtcactcccaagccccctccttgtctgtgcatccgggggcagctctggagggggtttgctggggaactggcgccatcgccgggactccagaaccgcagaagcctccccagctcacccctggaggacggccggctctctatagcaccagggctcacgtgggaacccccctcccacccaccgccacaataaagatcgcccccacctccaccctca

SEQ ID NO: 319487 - DNA, 1635 bp, Homo sapiens
cgatacggctagtcgaggctggtgtgaatcggccgaggatagcggccgcgggcggcggcggcagcggttggaggttgtaggaccggcgaggaataggaatcatggcggctgcgctgttcgtgctgctgggattcgcgctgctgggcacccacggagcctccggggctgccggcacagtcttcactaccgtagaagaccttggctccaagatactcctcacctgctccttgaatgacagcgccacagaggtcacagggcaccgctggctgaaggggggcgtggtgctgaaggaggacgcgctgcccggccagaaaacggagttcaaggtggactccgacgaccagtggggagagtactcctgcgtcttcctccccgagcccatgggcacggccaacatccagctccacgggcctcccagagtgaaggctgtgaagtcgtcagaacacatcaacgagggggagacggccatgctggtctgcaagtcagagtccgtgccacctgtcactgactgggcctggtacaagatcactgactctgaggacaaggccctcatgaacggctccgagagcaggttcttcgtgagttcctcgcagggccggtcagagctacacattgagaacctgaacatggaggccgaccccggccagtaccggtgcaacggcaccagctccaagggctccgaccaggccatcatcacgctccgcgtgcgcagccacctggccgccctctggcccttcctgggcatcgtggctgaggtgctggtgctggtcaccatcatcttcatctacgagaagcgccggaagcccgaggacgtcctggatggaagagcagcgggcagcaccagaatgacaaaggcaagaacgtccgccagaggaactcttcctgaggcaggtggcccgaggacgctccctgctccgcgtctgcgccgccgccggagtccactcccagtgcttgcaagattccaagttctcacctcttaaagaaaacccaccccgtagattcccatcatacacttccttcttttttaaaaaagttgggttttctccattcaggattctgttccttaggattttttccttctgaagtgtttcacgagagcccgggagctgctgccctgcggccccgtctgtggctttcagcctctgggtctgagtcatggccgggtgggcggcacagccttctccactggccggagtcagtgccaggtccttgccctttgtggaaagtcacaggtcacacgaggggccccgtgtcctgcctgtctgaagccaatgctgtctggttgcgccatttttgtgcttttatgtttaattttatgagggccacgggtctgtgttcgactcagcctcagggacgactctgacctcttggccacagaggactcacttgcccacaccgagggcgaccccgtcacagcctcaagtcactcccaagccccctccttgtctgtgcatccgggggcagctctggagggggtttgctggggaactggcgccatcgccgggactccagaaccgcagaagcctccccagctcacccctggaggacggccggctctctatagcaccagggctcacgtgggaacccccctcccacccaccgccacaataaagatcgcccccacctccaccctca

SEQ ID NO: 319488 - DNA, 1550 bp, Homo sapiens
cgatacggctagtcgaggctggtgtgaatcggccgaggatagcggccgcgggcggcggcggcagcggttggaggttgtaggaccggcgaggaataggaatcatggcggctgcgctgttcgtgctgctgggattcgcgctgctgggcacccacggagcctccggggctgccggcacagtcttcactaccgtagaagaccttggctccaagatactcctcacctgctccttgaatgacagcgccacagaggtcacagggcaccgctggctgaaggggggcgtggtgctgaaggaggacgcgctgcccggccagaaaacggagttcaaggtggactccgacgaccagtggggagagtactcctgcgtcttcctccccgagcccatgggcacggccaacatccagctccacggtgagtcctgcagtcatggggtaccgggccctcatgaacggctccgagagcaggttcttcgtgagttcctcgcagggccggtcagagctacacattgagaacctgaacatggaggccgaccccggccagtaccggtgcaacggcaccagctccaagggctccgaccaggccatcatcacgctccgcgtgcgcagccacctggccgccctctggcccttcctgggcatcgtggctgaggtgctggtgctggtcaccatcatcttcatctacgagaagcgccggaagcccgaggacgtcctggatgatgacgacgccggctctgcacccctgaagagcagcgggcagcaccagaatgacaaaggcaagaacgtccgccagaggaactcttcctgaggcaggtggcccgaggacgctccctgctccgcgtctgcgccgccgccggagtccactcccagtgcttgcaagattccaagttctcacctcttaaagaaaacccaccccgtagattcccatcatacacttccttcttttttaaaaaagttgggttttctccattcaggattctgttccttaggattttttccttctgaagtgtttcacgagagcccgggagctgctgccctgcggccccgtctgtggctttcagcctctgggtctgagtcatggccgggtgggcggcacagccttctccactggccggagtcagtgccaggtccttgccctttgtggaaagtcacaggtcacacgaggggccccgtgtcctgcctgtctgaagccaatgctgtctggttgcgccatttttgtgcttttatgtttaattttatgagggccacgggtctgtgttcgactcagcctcagggacgactctgacctcttggccacagaggactcacttgcccacaccgagggcgaccccgtcacagcctcaagtcactcccaagccccctccttgtctgtgcatccgggggcagctctggagggggtttgctggggaactggcgccatcgccgggactccagaaccgcagaagcctccccagctcacccctggaggacggccggctctctatagcaccagggctcacgtgggaacccccctcccacccaccgccacaataaagatcgcccccacctccaccctca

SEQ ID NO: 319489 - DNA, 1521 bp, Homo sapiens
gcacaatgaagcagtcggacgcgtctccccaagaaagccggcacagtcttcactaccgtagaagaccttggctccaagatactcctcacctgctccttgaatgacagcgccacagaggtcacagggcaccgctggctgaaggggggcgtggtgctgaaggaggacgcgctgcccggccagaaaacggagttcaaggtggactccgacgaccagtggggagagtactcctgcgtcttcctccccgagcccatgggcacggccaacatccagctccacgggcctcccagagtgaaggctgtgaagtcgtcagaacacatcaacgagggggagacggccatgctggtctgcaagtcagagtccgtgccacctgtcactgactgggcctggtacaagatcactgactctgaggacaaggccctcatgaacggctccgagagcaggttcttcgtgagttcctcgcagggccggtcagagctacacattgagaacctgaacatggaggccgaccccggccagtaccggtgcaacggcaccagctccaagggctccgaccaggccatcatcacgctccgcgtgcgcagccacctggccgccctctggcccttcctgggcatcgtggctgaggtgctggtgctggtcaccatcatcttcatctacgagaagcgccggaagcccgaggacgtcctggatgccggctctgcacccctggaagagcagcgggcagcaccagaatgacaaaggcaagaacgtccgccagaggaactcttcctgaggcaggtggcccgaggacgctccctgctccgcgtctgcgccgccgccggagtccactcccagtgcttgcaagattccaagttctcacctcttaaagaaaacccaccccgtagattcccatcatacacttccttcttttttaaaaaagttgggttttctccattcaggattctgttccttaggattttttccttctgaagtgtttcacgagagcccgggagctgctgccctgcggccccgtctgtggctttcagcctctgggtctgagtcatggccgggtgggcggcacagccttctccactggccggagtcagtgccaggtccttgccctttgtggaaagtcacaggtcacacgaggggccccgtgtcctgcctgtctgaagccaatgctgtctggttgcgccatttttgtgcttttatgtttaattttatgagggccacgggtctgtgttcgactcagcctcagggacgactctgacctcttggccacagaggactcacttgcccacaccgagggcgaccccgtcacagcctcaagtcactcccaagccccctccttgtctgtgcatccgggggcagctctggagggggtttgctggggaactggcgccatcgccgggactccagaaccgcagaagcctccccagctcacccctggaggacggccggctctctatagcaccagggctcacgtgggaacccccctcccacccaccgccacaataaagatcgcccccacctccaccctca

SEQ ID NO: 319490 - DNA, 1546 bp, Homo sapiens
gcacaatgaagcagtcggacgcgtctccccaagaaagccggcacagtcttcactaccgtagaagaccttggctccaagatactcctcacctgctccttgaatgacagcgccacagaggtcacagggcaccgctggctgaaggggggcgtggtgctgaaggaggacgcgctgcccggccagaaaacggagttcaaggtggactccgacgaccagtggggagagtactcctgcgtcttcctccccgagcccatgggcacggccaacatccagctccacgggcctcccagagtgaaggctgtgaagtcgtcagaacacatcaacgagggggagacggccatgctggtctgcaagtcagagtccgtgccacctgtcactgactgggcctggtacaagatcactgactctgaggacaaggccctcatgaacggctccgagagcaggttcttcgtgagttcctcgcagggccggtcagagctacacattgagaacctgaacatggaggccgaccccggccagtaccggtgcaacggcaccagctccaagggctccgaccaggccatcatcacgctccgcgtgcgcagccacctggccgccctctggcccttcctgggcatcgtggctgaggtgctggtgctggtcaccatcatcttcatctacgagaagcgccggaagcccgaggacgtcctggatgccggctctgcacccctggaagagcagcgggcagcaccagaatgacaaaggcaagaacgtccgccagaggaactcttcctgaggcaggcccgcaatcgtacgcatccctgactctgagttctgcggcggccctgcgtgagtccactccgcacgctgcttcgccaatcattgcgagacggcttttgtgcacgctcattcatagagaaacagcccgaggagattcccatcatacacttccttcttttttaaaaaagttgggttttctccattcaggattctgttccttaggattttttccttctgaagtgtttcacgagagcccgggagctgctgccctgcggccccgtctgtggctttcagcctctgggtctgagtcatggccgggtgggcggcacagccttctccactggccggagtcagtgccaggtccttgccctttgtggaaagtcacaggtcacacgaggggccccgtgtcctgcctgtctgaagccaatgctgtctggttgcgccatttttgtgcttttatgtttaattttatgagggccacgggtctgtgttcgactcagcctcagggacgactctgacctcttggccacagaggactcacttgcccacaccgagggcgaccccgtcacagcctcaagtcactcccaagccccctccttgtctgtgcatccgggggcagctctggagggggtttgctggggaactggcgccatcgccgggactccagaaccgcagaagcctccccagctcacccctggaggacggccggctctctatagcaccagggctcacgtgggaacccccctcccacccaccgccacaataaagatcgcccccacctccaccctca

SEQ ID NO: 319491 - DNA, 282 bp, Homo sapiens
ataatcttccaagataaaataaattattggaaaattgatgctcttattttaaatataaataagatagctgtcagatgttaagacagcctaatttatttgaatgcaatattgatcttgccttcttttggaatttaataggtatggtatgatccagaaggctatcactcccttccagcttacctcaacagcctgaataatttccttctgcgagttaacatgtcaaaatacgatgctgcccgacatggtaaagttactaacacaaaagtgtcctgtattgcaact

SEQ ID NO: 319492 - DNA, 7322 bp, Homo sapiens
  misc_feature (1534)..(1534): n is a, c, g, or t
  misc_feature (1681)..(1681): n is a, c, g, or t
  misc_feature (5454)..(5454): n is a, c, g, or t
  misc_feature (7019)..(7019): n is a, c, g, or t
atttcctataaatatcacaaatatttccaacaaaagagcatagatgtcttttatacaattcttttgagaatgattctgcagatttctgcattttctcctcattaatttgacctgggatggttttcactgaggaaaaaaatctttaagcaaacatgttaaatgtttacctatataaaaattattacttcaggtgactccgataatataacgcatgtgtggaatgaggatgatggacagaccttatctccaagcagtctggctgcacagctcctaattctggaaaactttgaagatgccctcttaaatatatcagcaaatagtccttatattccttacttggcatgtgtgagaaatgtgactgacagtttggccagaggttcaccagaaaatctaagactcctgcagtccacaatacgatttaaaaaatcttttcttcgcaatggttcctatgaagattactttcctccagttcctgaagtcctaaaatcaaaactgtctcaacttcgaaacttgaccgaacttctttgtgaatctgaaactttcagtttgatagagaagtcatgccagctctctgatatgagctttgggagcctgtgtgaagaaagtgagtttgatctgcaactcctcgaagcggcagagctgggcaccgaaatagcagccagcttactgtaccatgacaatgtcatatctaaaaaagtgagagatttgctgactggagatccaagcaaaattaatttaaatatggatcagtttctagaacaggcactgcaaatgaattacttggaaaatatcactcagttaataccgatcatagaagccatgctgcatgtcaataacagtgcagatgcttctgaaaagccaggtcagttactagaaatgtttaaaaatgttgaagagctgaaagaagatttaaggagaacaacaggaatgtccaacaggactattgacaagttgctggccattcccatccctgataatagagctgagattatttctcaggtgttctggctgcattcctgtgatactaatatcaccactcccaaactagaagatgcaatgaaagaattctgcaacctgtctctttcagagagatcccggcagtcttacctcatcggactcacccttctgcactacttaaacatttacaacttcacatacaaggtgtttttcccgaggaaagatcaaaagccagtagaaaagatgatggagctcttcataagactaaaagagattctcaatcagatggcttctggcacacatccgctgctagacaaaatgagatccctgaagcaaatgcatctgcccagaagtgttccattaacacaggcaatgtacagaagcaaccgaatgaacacaccacaaggatcatttagcaccatctcccaagcattatgttctcaaggaattaccactgaatatttaactgccatgctgccctcttcccagaggccaaaaggcaaccacaccaaggattttttgacttataaattaactaaagagcaaattgcttcaaaatatggaattcccataaatnccacaccattttgcttctccctttataaagacatcattaacatgcccgctggacctgtgatttgggctttcttgaaacctatgttgttgggaagaattttgtatgcaccatataacccagtcacaaaggcaataatggaaaagtccnatgtaactctgagacagctggcggaattaagagaaaaatctcaagagtggatggataagtcgccacttttcatgaattccttccatctgttaaaccaggcaattccaatgctccagaatactctaaggaacccttttgtgcaagtttttgtaaagttctccgtgggactcgatgctgttgaactattgaaacagatagatgaactcgatattctaagactgaaattagagaacaacattgacatcatcgatcagcttaacacactatcttccctgacagtaaatatttcctcttgtgtattatatgaccgtattcaggcagcaaaaaccatagatgaaatggagagagaggctaaaaggctctacaaaagcaacgaactctttggaagtgttatttttaagcttccttctaacagaagctggcacagaggctatgactctggaaatgtctttcttcctcctgtcataaaatataccatccggatgagtctcaagaccgcacagaccacaagaagcctaagaaccaagatttgggctccagggccacacaattctccatcacacaaccagatctatggcagggcttttatttatttacaggatagtattgaaagagcaatcattgaattgcaaactggaaggaactcccaggaaatagcagtccaggttcaagcaattccttatccctgcttcatgaaagacaacttcctaaccagtgtctcttattctcttccaattgtgcttatggttgcctgggttgtatttatagctgcctttgtaaaaaagcttgtctatgagaaagacctccggcttcatgagtacatgaagatgatgggtgtgaactcctgcagccatttctttgcctggcttatagagagtgttggatttttactggttaccatcgtgatcctcatcattatactcaagtttggcaatattcttcctaaaacaaatgggttcattttgttcctgtatttttcggactacagcttctcggttattgccatgagctatcttatcagtgtcttcttcaacaacaccaacattgcagctctgatcggaagcctcatctacatcattgccttctttccatttattgttctggttacagtggagaatgagttgagctatgtattgaaagtgttcatgagcctgctgtccccaacagcattcagctatgcaagccaatacattgcacgatacgaagaacagggcattggtcttcagtgggaaaatatgtacacctccccggttcaggatgacaccacctcatttggctggctgtgctgtctaatcctagctgactctttcatttatttccttattgcttggtatgtcaggaatgtcttcccagggacatacggtatggcagctccctggtattttccaattcttccttcctattggaaggagcgatttgggtgtgcagaggtgaagcctgagaagagcaatggcctcatgtttactaacatcatgatgcagaacaccaacccatctgccagtcctgaatacatgttttcctctaacatcgagcctgaacctaaagatctcacagtcggggttgccctgcatggggtcacaaagatctatggctcaaaagttgctgttgataacctcaatctgaacttttatgaagggcatattacttcattgctggggcccaatggagctgggaaaactactaccatttccatgttaactgggctgtttggggcctcagcaggcaccatttttgtatatggaaaagatatcaaaacagacctacacacggtacggaagaacatgggagtctgtatgcagcacgacgtcttgttcagttacctcactactaaggagcaccttctcctatatggttccatcaaagttcctcactggactaaaaagcagctccacgaggaagtaaaaaggactttaaaagatactggactatatagccatcgtcataagagagttggaacactgtcaggaggcatgaagaggaagttatctatatccatagctctcattggtggatcaagggtagtaattttggatgaaccatctactggagttgacccatgttctcgccgaagtatatgggatgttatatccaagaacaaaactgccagaacaatcattctgtcaacgcaccacttggacgaggctgaagtgctgagtgaccgcatcgccttcctggagcagggtgggcttaggtgctgtgggtccccattttacctcaaggaagcctttggcgatgggtatcacctcacgcttaccaagaagaagagtccaaatttaaatgcaaatgcagtatgtgacaccatggccgtgacagcaatgatccaatcacatctccccgaagcctacctcaaggaggatattgggggagagcttgtttatgtacttcctccattcagcaccaaagtctcaggggcctacctgtcactcctacgggcactcgacaatggcatgggtgacctcaacatcgggtgctacggcatttcagataccaccgtggaggaggtctttctgaacttgaccaaagagtcacaaaaaaatagtgctatgagtcttgagcacttaacacaaaagaaaattgggaattccaatgccaatggcatctcaactcctgacgatttatctgtgagcagcagcaatttcacagacagagatgacaaaatcctgacaagaggagagaggctggatggctttggactgttgctgaagaagatcatggctatactcatcaagaggttccaccacacccgcaggaactggaaaggtctcattgctcaggttatcctccccatcgtctttgttaccactgccatgggccttggcacactgagaaattccagcaacagttatccagagattcagatctccccctctctttatggtacctccgaacagacagccttctatgctaattatcacccgagcacggaagcacttgtctcagcaatgtgggacttccctggaattgacaacatgtgtctgaacaccagtgatctacagtgtttaaacaaagacagtctggaaaaatggaacaccagtggagaacccatcactaattttggtgtttgctcctgctcagaaaatgtccaggaatgtcctaaatttaactattccccaccgcacagaagaacttactcatcccaggtaatttataacctcactgggcaacgagtggaaaattatcttatatcaactgcaaatgagtttgtccaaaaaagatatggaggttggagttttgggctgcctttgacaaaagaccttcgttttgatataacaggagtccctgccaatagaacacttgccaaggtatggtatgatccagaaggctatcactcccttccagcttacctcaacagcctgaataatttccttctgcgagttaacatgtcaaaatacgatgctgcccgacatggcatcatcatgtatagccatccttatccaggagtgcaagaccaagaacaagccacaatcagcagtttaatcgatattttagtggcactgtctatcttgatgggctactctgtcaccaccgccagctttgtcacctatgttgtaagggaacatcaaaccaaagccaaacagttgcagcacatttcaggcattggcgtgacatgctactgggtaacaaacttcatttatgacatggttttctacttggtgcctgtagcgttttcaattggtatcattgcgattttcaaattacctgcattctacagtgaaaacaacctaggcgctgtatctctcctacttctcctgtttgggtatgcaacattttcntggatgtacttgctggctgggctcttccatgaaacaggaatggccttcatcacttacgtctgtgtcaacttgttttttggcattaattccattgtttccctgtcagtggtatactttctttccaaggaaaagcctaatgatccgactttagaacttatttctgaaaccctcaagcgcattttcctgattttcccacaattctgttttggctacggtttgattgaactttctcaacaacagtcggtcctagacttcttaaaagcatatggagtggaatacccaaatgaaacctttgagatgaataaactaggtgcaatgtttgtggctttggtttctcagggcaccatgtttttttccttgcgactcttaatcaacgaatccctgataaagaaactcaggcttttcttcagaaaatttaattcttcacatgtaagggagacaatagatgaggatgaagatgtgcgggctgagagattaagagttgagagtggtgcagctgaatttgacttggtccaactttattgtctcacaaagacctaccaacttatccacaaaaagattatagctgtaaacaacatcagcattgggatacctgctggagagtgttttgggcttcttggagtgaatggagcaggaaagaccactatattcaagatgctgacaggagacatcattccttcaagtggaaacattctgatcagaaataagaccggatctctgggtcacgttgattctcacagctcattagttggctactgtcctcaggaagatgccttagatgacctggtaactgtggaagaacatttgtatttctatgccagggtacatggaattccagaaaaggatattaaagaaactgttcataaactccttaggagacttcacctgatgcccttcaaggacagagctacctctatgtgcagttatggcacaaaaagaaaattatccactgcactggccttgatagggaaaccttccattctactgctggatgagccgagctctggcatggatccgaagtcgaaacggcacctctggaagatcatttcagaagaagtacagaacaaatgttccgtcatcctcacatctcacagcatggaagaatgtgaagctctctgtaccaggttggccattatggtgaatggaaagtttcaatgtattggatctttgcagcacataaagagcaggtttggacgaggatttactgtcaaagttcacttgaagaataacaaagtgaccatggagaccctcacaaagttcatgcagctgcactttccaaaaacatacttaaaagatcagcacctcagcatgctagagtatcatgtaccagtcacagcaggaggagtcgcaaacatttttgatctgctggaaaccaacaagactgctttaaatattacaaatttcttagtgagtcagaccactctggaagaggttttcatcaactttgccaaagaccagaagtcctatgaaactgctgataccagcagccaaggttccactataagtgttgactcacaagatgaccagatggagtcttaacacttccagcaaactcaatctcagcntgtgaccaatggcttcattttgaagaaaagccacagaagatacacttccgcaagatatcttcattttaaagtaaagtaatatactgtatggaaagttacaactgtgttagactaacaagtaattataaaaggaaatttttccttctaaggtcagtgagtgttgttgctactgaaatgaattcctgtatactcaacactgtgagcatgctaatgtatatgctggtgattcttatgcaaaggtgaagccacctcaagatgaatatcttaatttattactttcaataaaaagacagtttaaaaggc

SEQ ID NO: 319493 - DNA, 699 bp, Homo sapiens
ggagaaacttggtgtccaggggaggcccccggcggctggagcgcggcggcagcgggcgcagaggccggagggagaggaggcgaggggcggcccgagcgcggggcgggagcgaggccagcggtcatgtgcccgtgccccctgcaccgcggccgcggccccccggccgtgtgcgcctgcagcgcgggtcgcctggggctgcgctcgtccgccgcgcagctcaccgccgcccggctcaaggcgctaggcgacgagctgcaccagcgcaccatgtggcggcgccgcgcgcggagccggagggcgccggcgcccggcgcgctccccacctactggccttggctgtgcgcggccgcgcaggtggcggcgctggcggcctggctgctcggcaggcggaacttgtaggaacgcggggcttcttggtggggccggagccgagacccagccggagcgagcaacaggttggtgaaaaccctgtgtccttggagaaagctggttcccgttttccagagggggagcccagagcttgaaaggccgcggttggcacttcgagaaggaagtggagagtaaagacagcgcctggagcgatcgtagaaacacagaatgggactggggaagccctttggaaatccagctgcagaaacagacaccccaatgctatttacatacagctctatatatataaaaaaagaaaatatgaatatt

SEQ ID NO: 319494 - DNA, 1842 bp, Homo sapiens
ggagaaacttggtgtccaggggaggcccccggcggctggagcgcggcggcagcgggcgcagaggccggagggagaggaggcgaggggcggcccgagcgcggggcgggagcgaggccagcggtcatgtgcccgtgccccctgcaccgcggccgcggccccccggccgtgtgcgcctgcagcgcgggtcgcctggggctgcgctcgtccgccgcgcagctcaccgccgcccggctcaaggcgctaggcgacgagctgcaccagcgcaccatgtggcggcgccgcgcgcggagccggagggcgccggcgcccggcgcgctccccacctactggccttggctgtgcgcggccgcgcaggtggcggcgctggcggcctggctgctcggcaggcggaacttgtaggaacgcggggcttcttggtggggccggagccgagacccagccggagcgagcaacagcctacatctgacctcagaataccagccgctccggcctttcttgtgcttttgatttaatttggggaaactcattttttcccagctctgagccccaggggaggctcctctgaggctggggaggcctggaggaggatgggtatgatttaaccagtcaatactcaaagatacaggagagagggaacaaaagacgctttatggtggttgagatcttcccatgtcaacacgcaaaggttttcctcatcctttttaatggctgcatgatgttctgttgcttggatgaaccaggatttccttatatggtcacttccttgggaacatttgcattgtttcctgttttctggttggtgaaaaccctgtgtccttggagaaagctggttcccgttttccagagggggagcccagagcttgaaaggccgcggttggcacttcgagaaggaagtggagagtaaagacagcgcctggagcgatcgtagaaacacagaatgggactggggaagccctttggaaatccagctgcagaaacagacaccccaatgctatttacatacagctctatatatataaaaaaagaaaatatgaatattacgtatcagtgcatgccttgttgaggacgtggttgccttccttttctgcaccttgcgatgtgaactttgatattctgtaatgtctggggcgccagaagagagatgcctgctgtgtacttagaaactatttgcaaagactggtgggaattagccccagcatcggccaactgcctggggatagatgctggtggaataagaggtaacagtgcaaaaggcatgatagaaaaaaaaagtgaggacttgggaccgattgtgtaggggcagtctgggatgcctccatttcttgactcgtcctagcctctccctctgtacttacctaggtcgatcgctagatcccactgtcacgtcaagagaaatgggatttttgtgtctctggtgcttcacttaaaattttgctggtgctaagtgcgttcctgctggtgctgctgtggtattctgttgacagacttggaaggccaggggacaagagagatttctattttgctgtttcagattcttttttttttttttttaagggacaagttgcaaaagtgccacttgagagtctcttctcttcttctacctggggacgaatatccagaggtggtttggagcaaaccttggggtctaggagggaggatggcattgagaggcttgctggttatgaggcagaaagctgacctcatgcatgacttggttgctatctcccccacccccacaaaagtgtcctcggagttcagcccacagcctcctccactccccaaggggatttcagggtttaggttttatggattaaagagccaagaaatggctacattctgttc

SEQ ID NO: 319495 - DNA, 1502 bp, Homo sapiens
ggagaaacttggtgtccaggggaggcccccggcggctggagcgcggcggcagcgggcgcagaggccggagggagaggaggcgaggggcggcccgagcgcggggcgggagcgaggccagcggtcatgtgcccgtgccccctgcaccgcggccgcggccccccggccgtgtgcgcctgcagcgcgggtcgcctggggctgcgctcgtccgccgcgcagctcaccgccgcccggctcaaggcgctaggcgacgagctgcaccagcgcaccatgtggcggcgccgcgcgcggagccggagggcgccggcgcccggcgcgctccccacctactggccttggctgtgcgcggccgcgcaggtggcggcgctggcggcctggctgctcggcaggcggaacttgtaggaacgcggggcttcttggtggggccggagccgagacccagccggagcgagcaacaggttggtgaaaaccctgtgtccttggagaaagctggttcccgttttccagagggggagcccagagcttgaaaggccgcggttggcacttcgagaaggaagtggagagtaaagacagcgcctggagcgatcgtagaaacacagaatgggactggggaagccctttggaaatccagctgcagaaacagacaccccaatgctatttacatacagctctatatatataaaaaaagaaaatatgaatattacgtatcagtgcatgccttgttgaggacgtggttgccttccttttctgcaccttgcgatgtgaactttgatattctgtaatgtctggggcgccagaagagagatgcctgctgtgtacttagaaactatttgcaaagactggtgggaattagccccagcatcggccaactgcctggggatagatgctggtggaataagaggtaacagtgcaaaaggcatgatagaaaaaaaaagtgaggacttgggaccgattgtgtaggggcagtctgggatgcctccatttcttgactcgtcctagcctctccctctgtacttacctaggtcgatcgctagatcccactgtcacgtcaagagaaatgggatttttgtgtctctggtgcttcacttaaaattttgctggtgctaagtgcgttcctgctggtgctgctgtggtattctgttgacagacttggaaggccaggggacaagagagatttctattttgctgtttcagattcttttttttttttttttaagggacaagttgcaaaagtgccacttgagagtctcttctcttcttctacctggggacgaatatccagaggtggtttggagcaaaccttggggtctaggagggaggatggcattgagaggcttgctggttatgaggcagaaagctgacctcatgcatgacttggttgctatctcccccacccccacaaaagtgtcctcggagttcagcccacagcctcctccactccccaaggggatttcagggtttaggttttatggattaaagagccaagaaatggctacattctgttc

SEQ ID NO: 319496 - DNA, 831 bp, Homo sapiens
ggagaaacttggtgtccaggggaggcccccggcggctggagcgcggcggcagcgggcgcagaggccggagggagaggaggcgaggggcggcccgagcgcggggcgggagcgaggccagcggtcatgtgcccgtgccccctgcaccgcggccgcggccccccggccgtgtgcgcctgcagcgcgggtcgcctggggctgcgctcgtccgccgcgcagctcaccgccgcccggctcaaggcgctaggcgacgagctgcaccagcgcaccatgtggcggcgccgcgcgcggagccggagggcgccggcgcccggcgcgctccccacctactggccttggctgtgcgcggccgcgcaggtggcggcgctggcggcctggctgctcggcaggcggaacttgtaggaacgcggggcttcttggtggggccggagccgagacccagccggagcgagcaacagcctacatctgacctcagaataccagccgctccggcctttcttgtgcttttgatttaatttggggaaactcattttttcccagctctgagccccaggggaggctcctctgaggctggggaggcctggaggaggatgggtatgatttaaccagtcaatactcaaagatacaggagagagggaacaaaagacgctttatgggaagcttcatggaaagggacatgaattttggagtcaggccgactttcacatcactttctccatctcgcatttgccagttgtgtgaccttaggccgatcccattaccttctgagccttggtttcctcatctgtaaaatgggaagaataatagcatctgtgctggaggagcactatgtat

SEQ ID NO: 319497 - DNA, 609 bp, Homo sapiens
attgcatttagaccattgtcaaactccttaaattggcctcggagacctgtgatggccaatcttccccacccctgtgggtcaggttcctctggtgtgggcctatctcttagtgcaaggctccctgtagactgtcctggggctgcctgtctaaatgcaatcagtttatatcgggatcgcgatttttctttcttggtggggctgtttatgaagagtctaaatgcaatcatgattgcatttagaccctccagaaggggctgggcccggggtcctgcaggcggcaccttttggtagagtttgtttccctggaaaatggggaaaatgtttcaagccaggtgaggggggaagttaacactgaaatatgtattgtttttaaaaatcaaatgcacacgcatggaagctgcttgtccatgcactggttttgtcactggcgtcctggaatccgaccgtgttggggtgcaggcgctgtcagactccggctgatcctggctcgagcacacacatctaagggccaggctggttccgcatggtgatctccgtcttgtatgtctgaatgttggcctaaaataaagattactgttgtaaaataaatgttttcactgcggaaaaaac

SEQ ID NO: 319498 - DNA, 5552 bp, Homo sapiens
ggctgcagtgcacagtattttgcaactagtttgtgatttctccttgctcattctctctgctgttctttttattttaattaattaatttattttgtttatttatatatttgtttttaaggaacagggtccctgtctcctgggctccagtgcagtggagtgatcatagctcactgcagcctcaaactcctgggctcaagcggtcctcccgcctcagcctcccaaaatgctgggactacaggtgtgagcccctgtgccggcccacagtacacagctgcagttcttcaggatctcttggggtggccgtattctgccgtctcacacttctccatgccatggcgtctgtctgtgcacgtggcaaactccacaaggcagtgttggattcttttgctttgaacggtcttatggaataaagtccatcagctctgcccttggtactttcatctatactttgtgatactttctttttattttttcttctagaatagcctaacatggcagaccagagacagcgctcactgtctacctctggggagtcattgtaccacgtccttgggttggacaagaacgcaacctcagatgacattaaaaagtcctatcggaagcttgccttgaaatatcaccccgacaagaaccccgacaacccggaggccgcggacaagtttaaggagatcaacaacgcgcacgccatcctcacggacgccacaaaaaggaacatctacgacaagtacggctcgctgggtctctacgtggccgagcagtttggggaagagaacgtgaacacctacttcgtgctgtccagctggtgggccaaggccctgtttgtcttctgcggcctcctcacgtgctgctactgctgctgctgtctgtgctgctgcttcaactgctgctgcgggaagtgtaagcccaaggcgcctgaaggcgaggagacggagttctacgtgtcccccgaggatctggaggcacagctgcagtctgacgagagggaggccacagacacgccgatcgtcatacagccggcatccgccaccgagaccacccagctcacagccgactcccaccccagctaccacactgacgggttcaactaaatccaggaggagctgtggtcagaggaggagccggcgcctggccacgccaaccttagaatcatgaactgtagtcacagagatgggaaggcagcctcctgcctgccctggccttgctggggcccctcctgcctccacgcccacccagcgtcgacccttgacccacgaagtgcgtagcatgcagtatttaaagcagtgtagctacggtcttctgtttttttcccttttttaatagcatgtatggggttctgttccatgtctgtgttgtggacattccgcggcatgaccgcgtgaactgcacggtggagctgcctcagggctgtcggtcaggttggtccagtgaggggtgactgcagccggtcaggtgggcgaggagaaggggggctgcccctttcctacctgtgcttgaggggccggaggcaggtgctgcctggcagagctgtgttaccgtcttggcctcggggtctggtccacactctgtgctcccagccttgaggctgcagtaggactctgatctcacctgccagaagagaggcggggccgcgtcctcctggcgtcaccggcgtcactgtcattccttggtgtctgtgctgggcatggttggcttgggggtctgtggtttcctgggccttgtggcagggtttctcccgtgggagaatttggtgtggaaagcataggaggccccttccgaggttgacaccgtgtcctccgcggtgtttctcgcctggtcgtctcgtcgtgtggacgctgccgttctggttctcggaggtgtgtccttcgccgtgttggggttatttgtctgtgttcctgcacttttcccgggctctgagctggattgatggggccagtctcccccctcccatcttgaggtcgttctccacattccttccagcacacctgtcctttccatagccctttttggacctttagaaccacagatgataggaccagcccaatgagccacagtcagagagtagattgtgcatgtgtgagcacccagctactggggacgggggctctcccacgacccctcctcctgtgtttgccagagctcccatctgccccactcgcctttgccccgtcatcgatgattcaggcagagccagattcgttaggtccctggaggaaggactgactggaccagagggaccctctggctcaggagggttgggtccctgggaggccggcagccaggccacagaatccacacgtggaccattgtgggtccctgggaggccggcagccaggccacggaatccacacgtggaccattgtgggtcccttgggaggccagcagccagactacggaatccacatgtggaccatgggaagtcagtctcttgcgtgtcctagaccttgtgggtggcgccctgcataggggagcagggggaacgggtctgatgtccctgtgctggctgagggctcagagctgcccgcactccgtagctcatgggatgtgctgggcctgcctttggcgccatgctgcagactccagtgggcctggtttctgcagaatgtccatggtggccgctgcagagttgcagaggtccctgtagagataaagctgaggaggaggctgtgtgtgatggctctggctcggaccaaccagatgagcctcctgaagcccccttccctgcctgcctgctgacccgtggccccagctcactcattgccctcagcagccacccgaggctgtgcagaagggtaggttcaggttgaccaggaagctgccaaaagggacatggatatgaggatacatctggacgtgcttaggaacagggtgctggttgagggcccccagctgacccctactgcagatccgcatgtggaccatgagccggctgccagcactaggtcctgggcagctttgtttgtcccacttttctttgtttcttctcactaaaatgatcacgaagacctttgacaagaggagagatatgcactgtgatattaaattagaaataatttatcaaaatcagacctctcctaaaagaataagaaattcattgtttggcccatcctgaaaggtgaggtggcgagacagtggggtgcctccgtgccgcttcgtgcagcagcaagttcagcctgagatgctggctgtactcagcctttgcaatttttgtagatgtagcttaggacgtgagttatttttccgcagactggccaagagccaggttctaagcttggacctaaggtagaaagctgcccatcgggggccctagctcagccccaccaggccctctgttgggcctgcacacagctctgtggctagaacactccaaggcccttcggtacccatcagagtgggccccttgccaggtggcttttcagttacagagtccagtggaccattttgtagaaccatgcagctccctgcggaaggtggggtagggtgggaaagaggagcaggtctggaggtttgtggaacccagtcccctgcagaatctgtaaaacctaataaatcatggttgtggccattctcacggtggtgattgtgattagacgacccccgggaagcccagacactcggggcctggagttcctccccctgcctgacctagaagcagaaccgttttcagcgctctgccctgttggctttaaggctttgtcttaatttaaggaaaaagatcctcccgggttttatttctctctttcttgagtggactgtttccctataattaaaagaggtggtgagtcctggggcagcttccgcgcctccctgtccacgtgctaacagatcaggacgcccccagcacccctgcctgcttttgctggtggcagtgacgggaccccgactcctcactctcgggccgcagacaatgctgtgagcaagtgtggccatgggcacagaatgtccctttggacgccgctgctgggggctgccaggggccctctggggtcgtgctttgaggcccgtccggttcacgagggggtccgggcagcactgactgcttccgacctgcaggaggcgtaggagcggccctgcgggccctttcacggcagctgctgctgtatagatttgtctccactcagtgacgtgggatttttttgtcttccttttggctttatttttaaactgctttagatattactgctcagtgtttgtgaactttcctagttctctatgttgttagtgcagccagcacccagtggggacctactagaaaaaggaactggcatgcacacgtgcccagcaggaaaagcttcgtcttcacgtcggctgctgccatccagaagaggccctggagcctcacgccgtcgaggctgctctcaggcgttctgttccgggcgaggcttgtgctgcaaggaagggcaccagcatgcaggctgccactggagggtccgggtgctgcgggcagagttcagcgcttgtccaccctcccttagctctgactcagtgcatcctactgtggggacatctcgtgaggggacacgaaatgactgatctcaccctttcccagtattcagagctgtgaacccctgtggcgcaggactggcctgtgtctgttattttggttgtaaatcattctcctgtggaattggcaaaagctacatttttactgtccttaccagcaacagtttgcgtcgtcacatgctgtgagtgtgggctgtggtgtgtccgtgtgtgtacatatgtgtatatgtatatatcacgcagcaggagtgtcattcatgctgctgtcccctggtgaagtgacaagtacaattaaaggtggctctgaaatggcctctggtttcttgggagtcgggcagggacctgcaggaggctttcccagcaggtgcacagaaggaagcgctgagcccactgtgtgcagagggtgtgtgcccagggcactgccacggcccccaccagcattggcctctgctctgcagggtggggtgcccatcctgggggctgtgtgtcatgctcacctgacccaggtgtgtgtcccggtgtgaaatcgaggaggggactggaagcccttccctgccttgaaacatgaaagctgattttctgagcagcagatacggtcagtggcaaagctgcatctgaagggcggcctgggaaggggccctgtgctggccccgggtccgccccagaggagtccacacagcaccacctccagaaggggctgggcccggggtcctgcaggcggcaccttttggtagagtttgtttccctggaaaatggggaaaatgtttcaagccaggtgaggggggaagttaacactgaaatatgtattgtttttaaaaatcaaatgcacacgcatggaagctgcttgtccatgcactggttttgtcactggcgtcctggaatccgaccgtgttggggtgcaggcgctgtcagactccggctgatcctggctcgagcacacacatctaagggccaggctggttccgcatggtgatctccgtcttgtatgtctgaatgttggcctaaaataaagattactgttgtaaaataaatgttttcactgcggaaaaaac

SEQ ID NO: 319499 - DNA, 5772 bp, Homo sapiens
cgctgccggtgccgcacccgcgccctctgccgccgccgccgccgccgcccggggtctccaggctgaggagtgcgtcggccgctgcccagcagcgccgcgaatcggggagcggagccgcggagccggcgggagggcgggcgggcgggcggacgggcagaatagcctaacatggcagaccagagacagcgctcactgtctacctctggggagtcattgtaccacgtccttgggttggacaagaacgcaacctcagatgacattaaaaagtcctatcggaagcttgccttgaaatatcaccccgacaagaaccccgacaacccggaggccgcggacaagtttaaggagatcaacaacgcgcacgccatcctcacggacgccacaaaaaggaacatctacgacaagtacggctcgctgggtctctacgtggccgagcagtttggggaagagaacgtgaacacctacttcgtgctgtccagctggtgggccaaggccctgtttgtcttctgcggcctcctcacgtgctgctactgctgctgctgtctgtgctgctgcttcaactgctgctgcgggaagtgtaagcccaaggcgcctgaaggcgaggagacggagttctacgtgtcccccgaggatctggaggcacagctgcagtctgacgagaggggagggcactgacactgtgccgcgagtgtttgtggtggcagctgggactgttgaggtgtgaacgtggaccctgagaggccacagacacgccgatcgtcatacagccggcatccgccaccgagaccacccagctcacagccgactcccaccccagctaccacactgacgggttcaactaaatccaggaggagctgtggtcagaggaggagccggcgcctggccacgccaaccttagaatcatgaactgtagtcacagagatgggaaggcagcctcctgcctgccctggccttgctggggcccctcctgcctccacgcccacccagcgtcgacccttgacccacgaagtgcgtagcatgcagtatttaaagcagtgtagctacggtcttctgtttttttcccttttttaatagcatgtatggggttctgttccatgtctgtgttgtggacattccgcggcatgaccgcgtgaactgcacggtggagctgcctcagggctgtcggtcaggttggtccagtgaggggtgactgcagccggtcaggtgggcgaggagaaggggggctgcccctttcctacctgtgcttgaggggccggaggcaggtgctgcctggcagagctgtgttaccgtcttggcctcggggtctggtccacactctgtgctcccagccttgaggctgcagtaggactctgatctcacctgccagaagagaggcggggccgcgtcctcctggcgtcaccggcgtcactgtcattccttggtgtctgtgctgggcatggttggcttgggggtctgtggtttcctgggccttgtggcagggtttctcccgtgggagaatttggtgtggaaagcataggaggccccttccgaggttgacaccgtgtcctccgcggtgtttctcgcctggtcgtctcgtcgtgtggacgctgccgttctggttctcggaggtgtgtccttcgccgtgttggggttatttgtctgtgttcctgcacttttcccgggctctgagctggattgatggggccagtctcccccctcccatcttgaggtcgttctccacattccttccagcacacctgtcctttccatagccctttttggacctttagaaccacagatgataggaccagcccaatgagccacagtcagagagtagattgtgcatgtgtgagcacccagctactggggacgggggctctcccacgacccctcctcctgtgtttgccagagctcccatctgccccactcgcctttgccccgtcatcgatgattcaggcagagccagattcgttaggtccctggaggaaggactgactggaccagagggaccctctggctcaggagggttgggtccctgggaggccggcagccaggccacagaatccacacgtggaccattgtgggtccctgggaggccggcagccaggccacggaatccacacgtggaccattgtgggtcccttgggaggccagcagccagactacggaatccacatgtggaccatgggaagtcagtctcttgcgtgtcctagaccttgtgggtggcgccctgcataggggagcagggggaacgggtctgatgtccctgtgctggctgagggctcagagctgcccgcactccgtagctcatgggatgtgctgggcctgcctttggcgccatgctgcagactccagtgggcctggtttctgcagaatgtccatggtggccgctgcagagttgcagaggtccctgtagagataaagctgaggaggaggctgtgtgtgatggctctggctcggaccaaccagatgagcctcctgaagcccccttccctgcctgcctgctgacccgtggccccagctcactcattgccctcagcagccacccgaggctgtgcagaagggtaggttcaggttgaccaggaagctgccaaaagggacatggatatgaggatacatctggacgtgcttaggaacagggtgctggttgagggcccccagctgacccctactgcagatccgcatgtggaccatgagccggctgccagcactaggtcctgggcagctttgtttgtcccacttttctttgtttcttctcactaaaatgatcacgaagacctttgacaagaggagagatatgcactgtgatattaaattagaaataatttatcaaaatcagacctctcctaaaagaataagaaattcattgtttggcccatcctgaaaggtgaggtggcgagacagtggggtgcctccgtgccgcttcgtgcagcagcaagttcagcctgagatgctggctgtactcagcctttgcaatttttgtagatgtagcttaggacgtgagttatttttccgcagactggccaagagccaggttctaagcttggacctaaggtagaaagctgcccatcgggggccctagctcagccccaccaggccctctgttgggcctgcacacagctctgtggctagaacactccaaggcccttcggtacccatcagagtgggccccttgccaggtggcttttcagttacagagtccagtggaccattttgtagaaccatgcagctccctgcggaaggtggggtagggtgggaaagaggagcaggtctggaggtttgtggaacccagtcccctgcagaatctgtaaaacctaataaatcatggttgtggccattctcacggtggtgattgtgattagacgacccccgggaagcccagacactcggggcctggagttcctccccctgcctgacctagaagcagaaccgttttcagcgctctgccctgttggctttaaggctttgtcttaatttaaggaaaaagatcctcccgggttttatttctctctttcttgagtggactgtttccctataattaaaagaggtggtgagtcctggggcagcttccgcgcctccctgtccacgtgctaacagatcaggacgcccccagcacccctgcctgcttttgctggtggcagtgacgggaccccgactcctcactctcgggccgcagacaatgctgtgagcaagtgtggccatgggcacagaatgtccctttggacgccgctgctgggggctgccaggggccctctggggtcgtgctttgaggcccgtccggttcacgagggggtccgggcagcactgactgcttccgacctgcaggaggcgtaggagcggccctgcgggccctttcacggcagctgctgctgtatagatttgtctccactcagtgacgtgggatttttttgtcttccttttggctttatttttaaactgctttagatattactgctcagtgtttgtgaactttcctagttctctatgttgttagtgcagccagcacccagtggggacctactagaaaaaggaactggcatgcacacgtgcccagcaggaaaagcttcgtcttcacgtcggctgctgccatccagaagaggccctggagcctcacgccgtcgaggctgctctcaggcgttctgttccgggcgaggcttgtgctgcaaggaagggcaccagcatgcaggctgccactggagggtccgggtgctgcgggcagagttcagcgcttgtccaccctcccttagctctgactcagtgcatcctactgtggggacatctcgtgaggggacacgaaatgactgatctcaccctttcccagtattcagagctgtgaacccctgtggcgcaggactggcctgtgtctgttattttggttgtaaatcattctcctgtggaattggcaaaagctacatttttactgtccttaccagcaacagtttgcgtcgtcacatgctgtgagtgtgggctgtggtgtgtccgtgtgtgtacatatgtgtatatgtatatatcacgcagcaggagtgtcattcatgctgctgtcccctggtgaagtgacaagtacaattaaaggtggctctgaaatggcctctggtttcttgggagtcgggcagggacctgcaggaggctttcccagcaggtgcacagaaggaagcgctgagcccactgtgtgcagagggtgtgtgcccagggcactgccacggcccccaccagcattggcctctgctctgcagggtggggtgcccatcctgggggctgtgtgtcatgctcacctgacccaggtgtgtgtcccggtgtgaaatcgaggaggggactggaagcccttccctgccttgaaacatgaaagctgattttctgagcagcagatacggtcagtggcaaagctgcatctgaagggcggcctgggaaggggccctgtgctggccccgggtccgccccagaggagtccacacagcaccacctccagaaggggctgggcccggggtcctgcaggcggcaccttttggtagagtttgtttccctggaaaatggggaaaatgtttcaagccaggtgaggggggaagttaacactgaaatatgtattgtttttaaaaatcaaatgcacacgcatggaagctgcttgtccatgcactggttttgtcactggcgtcctggaatccgaccgtgttggggtgcaggcgctgtcagactccggctgatcctggctcgagcacacacatctaagggccagcttgggaagggggctcctgtgctcggccccgggtccgcccagaggtagtccacacagtaccaacctccagtaaggggctggcccggggtccctgcaggcggacctttttggtagagtttgtttcccctggaaaatggggaacaatgttttccagcccacgtgaacgggggaagttaacactgaaaatatgtatgtttttacaatcaaatgcacacgcatggaagctgttgtccatggcactggttttgtcactggggtctggaatccggaccgtggtgggggtgcaggcgctgtcagactccggggtgatcctggtcgagggcacccatctaagggcccgggtgctgccgctggggactccggcggtatgctgaaatgtggggctaaaataagagtacgggggggcctcaacagcaaacaaccaccgcacacaccaacaaagacacacacaccccacacaccacacgccgagctgcaaaaccaaacacacacgcggcggtcaatacaagccccccacaaaacagccaacaacatagggcgcaaacgacgggaaacggtgcccaacg

SEQ ID NO: 319500 - DNA, 5111 bp, Homo sapiens
cgctgccggtgccgcacccgcgccctctgccgccgccgccgccgccgcccggggtctccaggctgaggagtgcgtcggccgctgcccagcagcgccgcgaatcggggagcggagccgcggagccggcgggagggcgggcgggcgggcggacgggcagaatagcctaacatggcagaccagagacagcgctcactgtctacctctggggagtcattgtaccacgtccttgggttggacaagaacgcaacctcagatgacattaaaaagtcctatcggaagcttgccttgaaatatcaccccgacaagaaccccgacaacccggaggccgcggacaagtttaaggagatcaacaacgcgcacgccatcctcacggacgccacaaaaaggaacatctacgacaagtacggctcgctgggtctctacgtggccgagcagtttggggaagagaacgtgaacacctacttcgtgctgtccagctggtgggccaaggccctgtttgtcttctgcggcctcctcacgtgctgctactgctgctgctgtctgtgctgctgcttcaactgctgctgcgggaagtgtaagcccaaggcgcctgaaggcgaggagacggagttctacgtgtcccccgaggatctggaggcacagctgcagtctgacgagaggggagggcactgacactgtgccgcgagtgtttgtggtggcagctgggactgttgaggtgtgaacgtggaccctgagaggccacagacacgccgatcgtcatacagccggcatccgccaccgagaccacccagctcacagccgactcccaccccagctaccacactgacgggttcaactaaatccaggaggagctgtggtcagaggaggagccggcgcctggccacgccaaccttagaatcatgaactgtagtcacagagatgggaaggcagcctcctgcctgccctggccttgctggggcccctcctgcctccacgcccacccagcgtcgacccttgacccacgaagtgcgtagcatgcagtatttaaagcagtgtagctacggtcttctgtttttttcccttttttaatagcatgtatggggttctgttccatgtctgtgttgtggacattccgcggcatgaccgcgtgaactgcacggtggagctgcctcagggctgtcggtcaggttggtccagtgaggggtgactgcagccggtcaggtgggcgaggagaaggggggctgcccctttcctacctgtgcttgaggggccggaggcaggtgctgcctggcagagctgtgttaccgtcttggcctcggggtctggtccacactctgtgctcccagccttgaggctgcagtaggactctgatctcacctgccagaagagaggcggggccgcgtcctcctggcgtcaccggcgtcactgtcattccttggtgtctgtgctgggcatggttggcttgggggtctgtggtttcctgggccttgtggcagggtttctcccgtgggagaatttggtgtggaaagcataggaggccccttccgaggttgacaccgtgtcctccgcggtgtttctcgcctggtcgtctcgtcgtgtggacgctgccgttctggttctcggaggtgtgtccttcgccgtgttggggttatttgtctgtgttcctgcacttttcccgggctctgagctggattgatggggccagtctcccccctcccatcttgaggtcgttctccacattccttccagcacacctgtcctttccatagccctttttggacctttagaaccacagatgataggaccagcccaatgagccacagtcagagagtagattgtgcatgtgtgagcacccagctactggggacgggggctctcccacgacccctcctcctgtgtttgccagagctcccatctgccccactcgcctttgccccgtcatcgatgattcaggcagagccagattcgttaggtccctggaggaaggactgactggaccagagggaccctctggctcaggagggttgggtccctgggaggccggcagccaggccacagaatccacacgtggaccattgtgggtccctgggaggccggcagccaggccacggaatccacacgtggaccattgtgggtcccttgggaggccagcagccagactacggaatccacatgtggaccatgggaagtcagtctcttgcgtgtcctagaccttgtgggtggcgccctgcataggggagcagggggaacgggtctgatgtccctgtgctggctgagggctcagagctgcccgcactccgtagctcatgggatgtgctgggcctgcctttggcgccatgctgcagactccagtgggcctggtttctgcagaatgtccatggtggccgctgcagagttgcagaggtccctgtagagataaagctgaggaggaggctgtgtgtgatggctctggctcggaccaaccagatgagcctcctgaagcccccttccctgcctgcctgctgacccgtggccccagctcactcattgccctcagcagccacccgaggctgtgcagaagggtaggttcaggttgaccaggaagctgccaaaagggacatggatatgaggatacatctggacgtgcttaggaacagggtgctggttgagggcccccagctgacccctactgcagatccgcatgtggaccatgagccggctgccagcactaggtcctgggcagctttgtttgtcccacttttctttgtttcttctcactaaaatgatcacgaagacctttgacaagaggagagatatgcactgtgatattaaattagaaataatttatcaaaatcagacctctcctaaaagaataagaaattcattgtttggcccatcctgaaaggtgaggtggcgagacagtggggtgcctccgtgccgcttcgtgcagcagcaagttcagcctgagatgctggctgtactcagcctttgcaatttttgtagatgtagcttaggacgtgagttatttttccgcagactggccaagagccaggttctaagcttggacctaaggtagaaagctgcccatcgggggccctagctcagccccaccaggccctctgttgggcctgcacacagctctgtggctagaacactccaaggcccttcggtacccatcagagtgggccccttgccaggtggcttttcagttacagagtccagtggaccattttgtagaaccatgcagctccctgcggaaggtggggtagggtgggaaagaggagcaggtctggaggtttgtggaacccagtcccctgcagaatctgtaaaacctaataaatcatggttgtggccattctcacggtggtgattgtgattagacgacccccgggaagcccagacactcggggcctggagttcctccccctgcctgacctagaagcagaaccgttttcagcgctctgccctgttggctttaaggctttgtcttaatttaaggaaaaagatcctcccgggttttatttctctctttcttgagtggactgtttccctataattaaaagaggtggtgagtcctggggcagcttccgcgcctccctgtccacgtgctaacagatcaggacgcccccagcacccctgcctgcttttgctggtggcagtgacgggaccccgactcctcactctcgggccgcagacaatgctgtgagcaagtgtggccatgggcacagaatgtccctttggacgccgctgctgggggctgccaggggccctctggggtcgtgctttgaggcccgtccggttcacgagggggtccgggcagcactgactgcttccgacctgcaggaggcgtaggagcggccctgcgggccctttcacggcagctgctgctgtatagatttgtctccactcagtgacgtgggatttttttgtcttccttttggctttatttttaaactgctttagatattactgctcagtgtttgtgaactttcctagttctctatgttgttagtgcagccagcacccagtggggacctactagaaaaaggaactggcatgcacacgtgcccagcaggaaaagcttcgtcttcacgtcggctgctgccatccagaagaggccctggagcctcacgccgtcgaggctgctctcaggcgttctgttccgggcgaggcttgtgctgcaaggaagggcaccagcatgcaggctgccactggagggtccgggtgctgcgggcagagttcagcgcttgtccaccctcccttagctctgactcagtgcatcctactgtggggacatctcgtgaggggacacgaaatgactgatctcaccctttcccagtattcagagctgtgaacccctgtggcgcaggactggcctgtgtctgttattttggttgtaaatcattctcctgtggaattggcaaaagctacatttttactgtccttaccagcaacagtttgcgtcgtcacatgctgtgagtgtgggctgtggtgtgtccgtgtgtgtacatatgtgtatatgtatatatcacgcagcaggagtgtcattcatgctgctgtcccctggtgaagtgacaagtacaattaaaggtggctctgaaatggcctctggtttcttgggagtcgggcagggacctgcaggaggctttcccagcaggtgcacagaaggaagcgctgagcccactgtgtgcagagggtgtgtgcccagggcactgccacggcccccaccagcattggcctctgctctgcagggtggggtgcccatcctgggggctgtgtgtcatgctcacctgacccaggtgtgtgtcccggtgtgaaatcgaggaggggactggaagcccttccctgccttgaaacatgaaagctgattttctgagcagcagatacggtcagtggcaaagctgcatctgaagggcggcctgggaaggggccctgtgctggccccgggtccgccccagaggagtccacacagcaccacctccagaaggggctgggcccggggtcctgcaggcggcaccttttggtagagtttgtatttttagtaggaatggggtttctccatgttgctcaggctggtctcgaactcccaacctcaggtgatctgcctgcctcatcctcccaaagtgctgggattacaggcatgagccacccag

SEQ ID NO: 319501 - DNA, 4184 bp, Homo sapiens
  misc_feature (4083)..(4083): n is a, c, g, or t
cgctgccggtgccgcacccgcgccctctgccgccgccgccgccgccgcccggggtctccaggctgaggagtgcgtcggccgctgcccagcagcgccgcgaatcggggagcggagccgcggagccggcgggagggcgggcgggcgggcggacgggcagaatagcctaacatggcagaccagagacagcgctcactgtctacctctggggagtcattgtaccacgtccttgggttggacaagaacgcaacctcagatgacattaaaaagtcctatcggaagcttgccttgaaatatcaccccgacaagaaccccgacaacccggaggccgcggacaagtttaaggagatcaacaacgcgcacgccatcctcacggacgccacaaaaaggaacatctacgacaagtacggctcgctgggtctctacgtggccgagcagtttggggaagagaacgtgaacacctacttcgtgctgtccagctggtgggccaaggccctgtttgtcttctgcggcctcctcacgtgctgctactgctgctgctgtctgtgctgctgcttcaactgctgctgcgggaagtgtaagcccaaggcgcctgaaggcgaggagacggagttctacgtgtcccccgaggatctggaggcacagctgcagtctgacgagaggggagggcactgacactgtgccgcgagtgtttgtggtggcagctgggactgttgaggtgtgaacgtggaccctgagaggccacagacacgccgatcgtcatacagccggcatccgccaccgagaccacccagctcacagccgactcccaccccagctaccacactgacgggttcaactaaatccaggaggagctgtggtcagaggaggagccggcgcctggccacgccaaccttagaatcatgaactgtagtcacagagatgggaaggcagcctcctgcctgccctggccttgctggggcccctcctgcctccacgcccacccagcgtcgacccttgacccacgaagtgcgtagcatgcagtatttaaagcagtgtagctacggtcttctgtttttttcccttttttaatagcatgtatggggttctgttccatgtctgtgttgtggacattccgcggcatgaccgcgtgaactgcacggtggagctgcctcagggctgtcggtcaggttggtccagtgaggggtgactgcagccggtcaggtgggcgaggagaaggggggctgcccctttcctacctgtgcttgaggggccggaggcaggtgctgcctggcagagctgtgttaccgtcttggcctcggggtctggtccacactctgtgctcccagccttgaggctgcagtaggactctgatctcacctgccagaagagaggcggggccgcgtcctcctggcgtcaccggcgtcactgtcattccttggtgtctgtgctgggcatggttggcttgggggtctgtggtttcctgggccttgtggcagggtttctcccgtgggagaatttggtgtggaaagcataggaggccccttccgaggttgacaccgtgtcctccgcggtgtttctcgcctggtcgtctcgtcgtgtggacgctgccgttctggttctcggaggtgtgtccttcgccgtgttggggttatttgtctgtgttcctgcacttttcccgggctctgagctggattgatggggccagtctcccccctcccatcttgaggtcgttctccacattccttccagcacacctgtcctttccatagccctttttggacctttagaaccacagatgataggaccagcccaatgagccacagtcagagagtagattgtgcatgtgtgagcacccagctactggggacgggggctctcccacgacccctcctcctgtgtttgccagagctcccatctgccccactcgcctttgccccgtcatcgatgattcaggcagagccagattcgttaggtccctggaggaaggactgactggaccagagggaccctctggctcaggagggttgggtccctgggaggccggcagccaggccacagaatccacacgtggaccattgtgggtccctgggaggccggcagccaggccacggaatccacacgtggaccattgtgggtcccttgggaggccagcagccagactacggaatccacatgtggaccatgggaagtcagtctcttgcgtgtcctagaccttgtgggtggcgccctgcataggggagcagggggaacgggtctgatgtccctgtgctggctgagggctcagagctgcccgcactccgtagctcatgggatgtgctgggcctgcctttggcgccatgctgcagactccagtgggcctggtttctgcagaatgtccatggtggccgctgcagagttgcagaggtccctgtagagataaagctgaggaggaggctgtgtgtgatggctctggctcggaccaaccagatgagcctcctgaagcccccttccctgcctgcctgctgacccgtggccccagctcactcattgccctcagcagccacccgaggctgtgcagaagggtaggttcaggttgaccaggaagctgccaaaagggacatggatatgaggatacatctggacgtgcttaggaacagggtgctggttgagggcccccagctgacccctactgcagatccgcatgtggaccatgagccggctgccagcactaggtcctgggcagctttgtttgtcccacttttctttgtttcttctcactaaaatgatcacgaagacctttgacaagaggagagatatgcactgtgatattaaattagaaataatttatcaaaatcagacctctcctaaaagaataagaaattcattgtttggcccatcctgaaaggtgaggtggcgagacagtggggtgcctccgtgccgcttcgtgcagcagcaagttcagcctgagatgctggctgtactcagcctttgcaatttttgtagatgtagcttaggacgtgagttatttttccgcagactggccaagagccaggttctaagcttggacctaaggtagaaagctgcccatcgggggccctagctcagccccaccaggccctctgttgggcctgcacacagctctgtggctagaacactccaaggcccttcggtacccatcagagtgggccccttgccaggtggcttttcagttacagagtccagtggaccattttgtagaaccatgcagctccctgcggaaggtggggtagggtgggaaagaggagcaggtctggaggtttgtggaacccagtcccctgcagaatctgtaaaacctaataaatcatggttgtggccattctcacggtggtgattgtgattagacgacccccgggaagcccagacactcggggcctggagttcctccccctgcctgacctagaagcagaaccgttttcagcgctctgccctgttggctttaaggctttgtcttaatttaaggaaaaagatcctcccgggttttatttctctctttcttgagtggactgtttccctataattaaaagaggtggtgagtcctggggcagcttccgcgcctccctgtccacgtgctaacagatcaggacgcccccagcacccctgcctgcttttgctggtggcagtgacgggaccccgactcctcactctcgggccgcagacaatgctgtgagcaagtgtggccatgggcacagaatgtccctttggacgccgctgctgggggctgccaggggccctctggggtcgtgctttgaggcccgtccggttcacgagggggtccgggcagcactgactgcttccgacctgcaggaggcgtaggagcggccctgcgggccctttcacggcagctgctgctgtatagatttgtctccactcagtgacgtgggatttttttgtcttccttttggctttatttttaaactgctttagatattactgctcagtgtttgtgaactttcctagttctctatgttgttagtgcagccagcacccagtggggacctactagaaaaaggaactggcatgcacacgtgcccagcaggaaaagcttcgtcttcacgtcggctgctgccatccagaagaggcggaacnaagcgggaaggaaggccaagggatctgaccggaaagtttctgcggaagggcaacactcacggtcgctggggaccggttgggacagaaacgtgcccctttgg

SEQ ID NO: 319502 - DNA, 1091 bp, Homo sapiens
  misc_feature (22)..(22): n is a, c, g, or t
tagaggttcccatgcaataacntgcatcctactgtggggacatctcgtgaggggacacgaaatgactgatctcaccctttcccagtattcagagctgtgaacccctgtggcgcaggactggcctgtgtctgttattttggttgtaaatcattctcctgtggaattggcaaaagctacatttttactgtccttaccagcaacagtttgcgtcgtcacatgctgtgagtgtgggctgtggtgtgtccgtgtgtgtacatatgtgtatatgtatatatcacgcagcaggagtgtcattcatgctgctgtcccctggtgaagtgacaagtacaattaaaggtggctctgaaatggcctctggtttcttgggagtcgggcagggacctgcaggaggctttcccagcaggtgcacagaaggaagcgctgagcccactgtgtgcagagggtgtgtgcccagggcactgccacggcccccaccagcattggcctctgctctgcagggtggggtgcccatcctgggggctgtgtgtcatgctcacctgacccaggtgtgtgtcccggtgtgaaatcgaggaggggactggaagcccttccctgccttgaaacatgaaagctgattttctgagcagcagatacggtcagtggcaaagctgcatctgaagggcggcctgggaaggggccctgtgctggccccgggtccgccccagaggagtccacacagcaccacctccagaaggggctgggcccggggtcctgcaggcggcaccttttggtagagtttgtttccctggaaaatggggaaaatgtttcaagccaggtgaggggggaagttaacactgaaatatgtattgtttttaaaaatcaaatgcacacgcatggaagctgcttgtccatgcactggttttgtcactggcgtcctggaatccgaccgtgttggggtgcaggcgctgtcagactccggctgatcctggctcgagcacacacatctaagggccaggctggttccgcatggtgatctccgtcttgtatgtctgaatgttggcctaaaataaagattactgttgtaaaataaatgttttcactgcggaaaaaac

SEQ ID NO: 319503 - DNA, 2754 bp, Homo sapiens
cgctgccggtgccgcacccgcgccctctgccgccgccgccgccgccgcccggggtctccaggctgaggagtgcgtcggccgctgcccagcagcgccgcgaatcggggagcggagccgcggagccggcgggagggcgggcgggcgggcggacgggcagaatagcctaacatggcagaccagagacagcgctcactgtctacctctggggagtcattgtaccacgtccttgggttggacaagaacgcaacctcagatgacattaaaaagtcctatcggaagcttgccttgaaatatcaccccgacaagaaccccgacaacccggaggccgcggacaagtttaaggagatcaacaacgcgcacgccatcctcacggacgccacaaaaaggaacatctacgacaagtacggctcgctgggtctctacgtggccgagcagtttggggaagagaacgtgaacacctacttcgtgctgtccagctggtgggccaaggccctgtttgtcttctgcggcctcctcacgtgctgctactgctgctgctgtctgtgctgctgcttcaactgctgctgcgggaagtgtaagcccaaggcgcctgaaggcgaggagacggagttctacgtgtcccccgaggatctggaggcacagctgcagtctgacgagaggggagggcactgacactgtgccgcgagtgtttgtggtggcagctgggactgttgaggtgtgaacgtggaccctgagaggccacagacacgccgatcgtcatacagccggcatccgccaccgagaccacccagctcacagccgactcccaccccagctaccacactgacgggttcaactaaatccaggaggagctgtggtcagaggaggagccggcgcctggccacgccaaccttagaatcatgaactgtagtcacagagatgggaaggcagcctcctgcctgccctggccttgctggggcccctcctgcctccacgcccacccagcgtcgacccttgacccacgaagtgcgtagcatgcagtatttaaagcagtgtagctacggtcttctgtttttttcccttttttaatagcatgtatggggttctgttccatgtctgtgttgtggacattccgcggcatgaccgcgtgaactgcacggtggagctgcctcagggctgtcggtcaggttggtccagtgaggggtgactgcagccggtcaggtgggcgaggagaaggggggctgcccctttcctacctgtgcttgaggggccggaggcaggtgctgcctggcagagctgtgttaccgtcttggcctcggggtctggtccacactctgtgctcccagccttgaggctgcagtaggactctgatctcacctgccagaagagaggcggggccgcgtcctcctggcgtcaccggcgtcactgtcattccttggtgtctgtgctgggcatggttggcttgggggtctgtggtttcctgggccttgtggcagggtttctcccgtgggagaatttggtgtggaaagcataggaggccccttccgaggttgacaccgtgtcctccgcggtgtttctcgcctggtcgtctcgtcgtgtggacgctgccgttctggttctcggaggtgtgtccttcgccgtgttggggttatttgtctgtgttcctgcacttttcccgggctctgagctggattgatggggccagtctcccccctcccatcttgaggtcgttctccacattccttccagcacacctgtcctttccatagccctttttggacctttagaaccacagatgataggaccagcccaatgagccacagtcagagagtagattgtgcatgtgtgagcacccagctactggggacgggggctctcccacgacccctcctcctgtgtttgccagagctcccatctgccccactcgcctttgccccgtcatcgatgattcaggcagagccagattcgttaggtccctggaggaaggactgactggaccagagggaccctctggctcaggagggttgggtccctgggaggccggcagccaggccacagaatccacacgtggaccattgtgggtccctgggaggccggcagccaggccacggaatccacacgtggaccattgtgggtcccttgggaggccagcagccagactacggaatccacatgtggaccatgggaagtcagtctcttgcgtgtcctagaccttgtgggtggcgccctgcataggggagcagggggaacgggtctgatgtccctgtgctggctgagggctcagagctgcccgcactccgtagctcatgggatgtgctgggcctgcctttggcgccatgctgcagactccagtgggcctggtttctgcagaatgtccatggtggccgctgcagagttgcagaggtccctgtagagataaagctgaggaggaggctgtgtgtgatggctctggctcggaccaaccagatgagcctcctgaagcccccttccctgcctgcctgctgacccgtggccccagctcactcattgccctcagcagccacccgaggctgtgcagaagggtaggttcaggttgaccaggaagctgccaaaagggacatggatatgaggatacatctggacgtgcttaggaacagggtgctggttgagggcccccagctgacccctactgcagatccgctggttccgcatggtgatctccgtcttgtatgtctgaatgttggcctaaaataaagattactgttgtaaaataaatgttttcactgcggaaaaaac

SEQ ID NO: 319504 - DNA, 890 bp, Homo sapiens
ggctgcagtgcacagtattttgcaactagtttgtgatttctccttgctcattctctctgctgttctttttattttaattaattaatttattttgtttatttatatatttgtttttaaggaacagggtccctgtctcctgggctccagtgcagtggagtgatcatagctcactgcagcctcaaactcctgggctcaagcggtcctcccgcctcagcctcccaaaatgctgggactacaggtgtgagcccctgtgccggcccacagtacacagctgcagttcttcaggatctcttggggtggccgtattctgccgtctcacacttctccatgccatggcgtctgtctgtgcacgtggcaaactccacaaggcagtgttggattcttttgctttgaacggtcttatggaataaagtccatcagctctgcccttggtactttcatctatactttgtgatactttctttttattttttcttctagaatagcctaacatggcagaccagagacagcgctcactgtctacctctggggagtcattgtaccacgtccttgggttggacaagaacgcaacctcagatgacattaaaaagtcctatcggaagcttgccttgaaatatcaccccgacaagaaccccgacaacccggaggccgcggacaagtttaaggagatcaacaacgcgcacgccctggctccagctcagattcacttcctctcgtacttggatgcttggtgatggtcgtggaagccgttttattttctcttgctgttctcctgttgcgttaagctcagcatcactgttgctttttattcttagaattaaggaggaaagctgaaatcttttggggatttctgtgtttcccgggacctttaggaattccttttttttttt

SEQ ID NO: 319505 - DNA, 5229 bp, Homo sapiens
cgctgccggtgccgcacccgcgccctctgccgccgccgccgccgccgcccggggtctccaggctgaggagtgcgtcggccgctgcccagcagcgccgcgaatcggggagcggagccgcggagccggcgggagggcgggcgggcgggcggacgggcagaatagcctaacatggcagaccagagacagcgctcactgtctacctctggggagtcattgtaccacgtccttgggttggacaagaacgcaacctcagatgacattaaaaagtcctatcggaagcttgccttgaaatatcaccccgacaagaaccccgacaacccggaggccgcggacaagtttaaggagatcaacaacgcgcacgccatcctcacggacgccacaaaaaggaacatctacgacaagtacggctcgctgggtctctacgtggccgagcagtttggggaagagaacgtgaacacctacttcgtgctgtccagctggtgggccaaggccctgtttgtcttctgcggcctcctcacgtgctgctactgctgctgctgtctgtgctgctgcttcaactgctgctgcgggaagtgtaagcccaaggcgcctgaaggcgaggagacggagttctacgtgtcccccgaggatctggaggcacagctgcagtctgacgagagggaggccacagacacgccgatcgtcatacagccggcatccgccaccgagaccacccagctcacagccgactcccaccccagctaccacactgacgggttcaactaaatccaggaggagctgtggtcagaggaggagccggcgcctggccacgccaaccttagaatcatgaactgtagtcacagagatgggaaggcagcctcctgcctgccctggccttgctggggcccctcctgcctccacgcccacccagcgtcgacccttgacccacgaagtgcgtagcatgcagtatttaaagcagtgtagctacggtcttctgtttttttcccttttttaatagcatgtatggggttctgttccatgtctgtgttgtggacattccgcggcatgaccgcgtgaactgcacggtggagctgcctcagggctgtcggtcaggttggtccagtgaggggtgactgcagccggtcaggtgggcgaggagaaggggggctgcccctttcctacctgtgcttgaggggccggaggcaggtgctgcctggcagagctgtgttaccgtcttggcctcggggtctggtccacactctgtgctcccagccttgaggctgcagtaggactctgatctcacctgccagaagagaggcggggccgcgtcctcctggcgtcaccggcgtcactgtcattccttggtgtctgtgctgggcatggttggcttgggggtctgtggtttcctgggccttgtggcagggtttctcccgtgggagaatttggtgtggaaagcataggaggccccttccgaggttgacaccgtgtcctccgcggtgtttctcgcctggtcgtctcgtcgtgtggacgctgccgttctggttctcggaggtgtgtccttcgccgtgttggggttatttgtctgtgttcctgcacttttcccgggctctgagctggattgatggggccagtctcccccctcccatcttgaggtcgttctccacattccttccagcacacctgtcctttccatagccctttttggacctttagaaccacagatgataggaccagcccaatgagccacagtcagagagtagattgtgcatgtgtgagcacccagctactggggacgggggctctcccacgacccctcctcctgtgtttgccagagctcccatctgccccactcgcctttgccccgtcatcgatgattcaggcagagccagattcgttaggtccctggaggaaggactgactggaccagagggaccctctggctcaggagggttgggtccctgggaggccggcagccaggccacagaatccacacgtggaccattgtgggtccctgggaggccggcagccaggccacggaatccacacgtggaccattgtgggtcccttgggaggccagcagccagactacggaatccacatgtggaccatgggaagtcagtctcttgcgtgtcctagaccttgtgggtggcgccctgcataggggagcagggggaacgggtctgatgtccctgtgctggctgagggctcagagctgcccgcactccgtagctcatgggatgtgctgggcctgcctttggcgccatgctgcagactccagtgggcctggtttctgcagaatgtccatggtggccgctgcagagttgcagaggtccctgtagagataaagctgaggaggaggctgtgtgtgatggctctggctcggaccaaccagatgagcctcctgaagcccccttccctgcctgcctgctgacccgtggccccagctcactcattgccctcagcagccacccgaggctgtgcagaagggtaggttcaggttgaccaggaagctgccaaaagggacatggatatgaggatacatctggacgtgcttaggaacagggtgctggttgagggcccccagctgacccctactgcagatccgcatgtggaccatgagccggctgccagcactaggtcctgggcagctttgtttgtcccacttttctttgtttcttctcactaaaatgatcacgaagacctttgacaagaggagagatatgcactgtgatattaaattagaaataatttatcaaaatcagacctctcctaaaagaataagaaattcattgtttggcccatcctgaaaggtgaggtggcgagacagtggggtgcctccgtgccgcttcgtgcagcagcaagttcagcctgagatgctggctgtactcagcctttgcaatttttgtagatgtagcttaggacgtgagttatttttccgcagactggccaagagccaggttctaagcttggacctaaggtagaaagctgcccatcgggggccctagctcagccccaccaggccctctgttgggcctgcacacagctctgtggctagaacactccaaggcccttcggtacccatcagagtgggccccttgccaggtggcttttcagttacagagtccagtggaccattttgtagaaccatgcagctccctgcggaaggtggggtagggtgggaaagaggagcaggtctggaggtttgtggaacccagtcccctgcagaatctgtaaaacctaataaatcatggttgtggccattctcacggtggtgattgtgattagacgacccccgggaagcccagacactcggggcctggagttcctccccctgcctgacctagaagcagaaccgttttcagcgctctgccctgttggctttaaggctttgtcttaatttaaggaaaaagatcctcccgggttttatttctctctttcttgagtggactgtttccctataattaaaagaggtggtgagtcctggggcagcttccgcgcctccctgtccacgtgctaacagatcaggacgcccccagcacccctgcctgcttttgctggtggcagtgacgggaccccgactcctcactctcgggccgcagacaatgctgtgagcaagtgtggccatgggcacagaatgtccctttggacgccgctgctgggggctgccaggggccctctggggtcgtgctttgaggcccgtccggttcacgagggggtccgggcagcactgactgcttccgacctgcaggaggcgtaggagcggccctgcgggccctttcacggcagctgctgctgtatagatttgtctccactcagtgacgtgggatttttttgtcttccttttggctttatttttaaactgctttagatattactgctcagtgtttgtgaactttcctagttctctatgttgttagtgcagccagcacccagtggggacctactagaaaaaggaactggcatgcacacgtgcccagcaggaaaagcttcgtcttcacgtcggctgctgccatccagaagaggccctggagcctcacgccgtcgaggctgctctcaggcgttctgttccgggcgaggcttgtgctgcaaggaagggcaccagcatgcaggctgccactggagggtccgggtgctgcgggcagagttcagcgcttgtccaccctcccttagctctgactcagtgcatcctactgtggggacatctcgtgaggggacacgaaatgactgatctcaccctttcccagtattcagagctgtgaacccctgtggcgcaggactggcctgtgtctgttattttggttgtaaatcattctcctgtggaattggcaaaagctacatttttactgtccttaccagcaacagtttgcgtcgtcacatgctgtgagtgtgggctgtggtgtgtccgtgtgtgtacatatgtgtatatgtatatatcacgcagcaggagtgtcattcatgctgctgtcccctggtgaagtgacaagtacaattaaaggtggctctgaaatggcctctggtttcttgggagtcgggcagggacctgcaggaggctttcccagcaggtgcacagaaggaagcgctgagcccactgtgtgcagagggtgtgtgcccagggcactgccacggcccccaccagcattggcctctgctctgcagggtggggtgcccatcctgggggctgtgtgtcatgctcacctgacccaggtgtgtgtcccggtgtgaaatcgaggaggggactggaagcccttccctgccttgaaacatgaaagctgattttctgagcagcagatacggtcagtggcaaagctgcatctgaagggcggcctgggaaggggccctgtgctggccccgggtccgccccagaggagtccacacagcaccacctccagaaggggctgggcccggggtcctgcaggcggcaccttttggtagagtttgtttccctggaaaatggggaaaatgtttcaagccaggtgaggggggaagttaacactgaaatatgtattgtttttaaaaatcaaatgcacacgcatggaagctgcttgtccatgcactggttttgtcactggcgtcctggaatccgaccgtgttggggtgcaggcgctgtcagactccggctgatcctggctcgagcacacacatctaagggccaggctggttccgcatggtgatctccgtcttgtatgtctgaatgttggcctaaaataaagattactgttgtaaaataaatgttttcactgcggaaaaaac

SEQ ID NO: 319506 - DNA, 5303 bp, Homo sapiens
cgctgccggtgccgcacccgcgccctctgccgccgccgccgccgccgcccggggtctccaggctgaggagtgcgtcggccgctgcccagcagcgccgcgaatcggggagcggagccgcggagccggcgggagggcgggcgggcgggcggacgggcagaatagcctaacatggcagaccagagacagcgctcactgtctacctctggggagtcattgtaccacgtccttgggttggacaagaacgcaacctcagatgacattaaaaagtcctatcggaagcttgccttgaaatatcaccccgacaagaaccccgacaacccggaggccgcggacaagtttaaggagatcaacaacgcgcacgccatcctcacggacgccacaaaaaggaacatctacgacaagtacggctcgctgggtctctacgtggccgagcagtttggggaagagaacgtgaacacctacttcgtgctgtccagctggtgggccaaggccctgtttgtcttctgcggcctcctcacgtgctgctactgctgctgctgtctgtgctgctgcttcaactgctgctgcgggaagtgtaagcccaaggcgcctgaaggcgaggagacggagttctacgtgtcccccgaggatctggaggcacagctgcagtctgacgagaggggagggcactgacactgtgccgcgagtgtttgtggtggcagctgggactgttgaggtgtgaacgtggaccctgagaggccacagacacgccgatcgtcatacagccggcatccgccaccgagaccacccagctcacagccgactcccaccccagctaccacactgacgggttcaactaaatccaggaggagctgtggtcagaggaggagccggcgcctggccacgccaaccttagaatcatgaactgtagtcacagagatgggaaggcagcctcctgcctgccctggccttgctggggcccctcctgcctccacgcccacccagcgtcgacccttgacccacgaagtgcgtagcatgcagtatttaaagcagtgtagctacggtcttctgtttttttcccttttttaatagcatgtatggggttctgttccatgtctgtgttgtggacattccgcggcatgaccgcgtgaactgcacggtggagctgcctcagggctgtcggtcaggttggtccagtgaggggtgactgcagccggtcaggtgggcgaggagaaggggggctgcccctttcctacctgtgcttgaggggccggaggcaggtgctgcctggcagagctgtgttaccgtcttggcctcggggtctggtccacactctgtgctcccagccttgaggctgcagtaggactctgatctcacctgccagaagagaggcggggccgcgtcctcctggcgtcaccggcgtcactgtcattccttggtgtctgtgctgggcatggttggcttgggggtctgtggtttcctgggccttgtggcagggtttctcccgtgggagaatttggtgtggaaagcataggaggccccttccgaggttgacaccgtgtcctccgcggtgtttctcgcctggtcgtctcgtcgtgtggacgctgccgttctggttctcggaggtgtgtccttcgccgtgttggggttatttgtctgtgttcctgcacttttcccgggctctgagctggattgatggggccagtctcccccctcccatcttgaggtcgttctccacattccttccagcacacctgtcctttccatagccctttttggacctttagaaccacagatgataggaccagcccaatgagccacagtcagagagtagattgtgcatgtgtgagcacccagctactggggacgggggctctcccacgacccctcctcctgtgtttgccagagctcccatctgccccactcgcctttgccccgtcatcgatgattcaggcagagccagattcgttaggtccctggaggaaggactgactggaccagagggaccctctggctcaggagggttgggtccctgggaggccggcagccaggccacagaatccacacgtggaccattgtgggtccctgggaggccggcagccaggccacggaatccacacgtggaccattgtgggtcccttgggaggccagcagccagactacggaatccacatgtggaccatgggaagtcagtctcttgcgtgtcctagaccttgtgggtggcgccctgcataggggagcagggggaacgggtctgatgtccctgtgctggctgagggctcagagctgcccgcactccgtagctcatgggatgtgctgggcctgcctttggcgccatgctgcagactccagtgggcctggtttctgcagaatgtccatggtggccgctgcagagttgcagaggtccctgtagagataaagctgaggaggaggctgtgtgtgatggctctggctcggaccaaccagatgagcctcctgaagcccccttccctgcctgcctgctgacccgtggccccagctcactcattgccctcagcagccacccgaggctgtgcagaagggtaggttcaggttgaccaggaagctgccaaaagggacatggatatgaggatacatctggacgtgcttaggaacagggtgctggttgagggcccccagctgacccctactgcagatccgcatgtggaccatgagccggctgccagcactaggtcctgggcagctttgtttgtcccacttttctttgtttcttctcactaaaatgatcacgaagacctttgacaagaggagagatatgcactgtgatattaaattagaaataatttatcaaaatcagacctctcctaaaagaataagaaattcattgtttggcccatcctgaaaggtgaggtggcgagacagtggggtgcctccgtgccgcttcgtgcagcagcaagttcagcctgagatgctggctgtactcagcctttgcaatttttgtagatgtagcttaggacgtgagttatttttccgcagactggccaagagccaggttctaagcttggacctaaggtagaaagctgcccatcgggggccctagctcagccccaccaggccctctgttgggcctgcacacagctctgtggctagaacactccaaggcccttcggtacccatcagagtgggccccttgccaggtggcttttcagttacagagtccagtggaccattttgtagaaccatgcagctccctgcggaaggtggggtagggtgggaaagaggagcaggtctggaggtttgtggaacccagtcccctgcagaatctgtaaaacctaataaatcatggttgtggccattctcacggtggtgattgtgattagacgacccccgggaagcccagacactcggggcctggagttcctccccctgcctgacctagaagcagaaccgttttcagcgctctgccctgttggctttaaggctttgtcttaatttaaggaaaaagatcctcccgggttttatttctctctttcttgagtggactgtttccctataattaaaagaggtggtgagtcctggggcagcttccgcgcctccctgtccacgtgctaacagatcaggacgcccccagcacccctgcctgcttttgctggtggcagtgacgggaccccgactcctcactctcgggccgcagacaatgctgtgagcaagtgtggccatgggcacagaatgtccctttggacgccgctgctgggggctgccaggggccctctggggtcgtgctttgaggcccgtccggttcacgagggggtccgggcagcactgactgcttccgacctgcaggaggcgtaggagcggccctgcgggccctttcacggcagctgctgctgtatagatttgtctccactcagtgacgtgggatttttttgtcttccttttggctttatttttaaactgctttagatattactgctcagtgtttgtgaactttcctagttctctatgttgttagtgcagccagcacccagtggggacctactagaaaaaggaactggcatgcacacgtgcccagcaggaaaagcttcgtcttcacgtcggctgctgccatccagaagaggccctggagcctcacgccgtcgaggctgctctcaggcgttctgttccgggcgaggcttgtgctgcaaggaagggcaccagcatgcaggctgccactggagggtccgggtgctgcgggcagagttcagcgcttgtccaccctcccttagctctgactcagtgcatcctactgtggggacatctcgtgaggggacacgaaatgactgatctcaccctttcccagtattcagagctgtgaacccctgtggcgcaggactggcctgtgtctgttattttggttgtaaatcattctcctgtggaattggcaaaagctacatttttactgtccttaccagcaacagtttgcgtcgtcacatgctgtgagtgtgggctgtggtgtgtccgtgtgtgtacatatgtgtatatgtatatatcacgcagcaggagtgtcattcatgctgctgtcccctggtgaagtgacaagtacaattaaaggtggctctgaaatggcctctggtttcttgggagtcgggcagggacctgcaggaggctttcccagcaggtgcacagaaggaagcgctgagcccactgtgtgcagagggtgtgtgcccagggcactgccacggcccccaccagcattggcctctgctctgcagggtggggtgcccatcctgggggctgtgtgtcatgctcacctgacccaggtgtgtgtcccggtgtgaaatcgaggaggggactggaagcccttccctgccttgaaacatgaaagctgattttctgagcagcagatacggtcagtggcaaagctgcatctgaagggcggcctgggaaggggccctgtgctggccccgggtccgccccagaggagtccacacagcaccacctccagaaggggctgggcccggggtcctgcaggcggcaccttttggtagagtttgtttccctggaaaatggggaaaatgtttcaagccaggtgaggggggaagttaacactgaaatatgtattgtttttaaaaatcaaatgcacacgcatggaagctgcttgtccatgcactggttttgtcactggcgtcctggaatccgaccgtgttggggtgcaggcgctgtcagactccggctgatcctggctcgagcacacacatctaagggccaggctggttccgcatggtgatctccgtcttgtatgtctgaatgttggcctaaaataaagattactgttgtaaaataaatgttttcactgcggaaaaaac

SEQ ID NO: 319507 - DNA, 4558 bp, Homo sapiens
cgctgccggtgccgcacccgcgccctctgccgccgccgccgccgccgcccggggtctccaggctgaggagtgcgtcggccgctgcccagcagcgccgcgaatcggggagcggagccgcggagccggcgggagggcgggcgggcgggcggacgggcagaatagcctaacatggcagaccagagacagcgctcactgtctacctctggggagtcattgtaccacgtccttgggttggacaagaacgcaacctcagatgacattaaaaagtcctatcggaagcttgccttgaaatatcaccccgacaagaaccccgacaacccggaggccgcggacaagtttaaggagatcaacaacgcgcacgccatcctcacggacgccacaaaaaggaacatctacgacaagtacggctcgctgggtctctacgtggccgagcagtttggggaagagaacgtgaacacctacttcgtgctgtccagctggtgggccaaggccctgtttgtcttctgcggcctcctcacgtgctgctactgctgctgctgtctgtgctgctgcttcaactgctgctgcgggaagtgtaagcccaaggcgcctgaaggcgaggagacggagttctacgtgtcccccgaggatctggaggcacagctgcagtctgacgagaggggagggcactgacactgtgccgcgagtgtttgtggtggcagctgggactgttgaggtgtgaacgtggaccctgagaggccacagacacgccgatcgtcatacagccggcatccgccaccgagaccacccagctcacagccgactcccaccccagctaccacactgacgggttcaactaaatccaggaggagctgtggtcagaggaggagccggcgcctggccacgccaaccttagaatcatgaactgtagtcacagagatgggaaggcagcctcctgcctgccctggccttgctggggcccctcctgcctccacgcccacccagcgtcgacccttgacccacgaagtgcgtagcatgcagtatttaaagcagtgtagctacggtcttctgtttttttcccttttttaatagcatgtatggggttctgttccatgtctgtgttgtggacattccgcggcatgaccgcgtgaactgcacggtggagctgcctcagggctgtcggtcaggttggtccagtgaggggtgactgcagccggtcaggtgggcgaggagaaggggggctgcccctttcctacctgtgcttgaggggccggaggcaggtgctgcctggcagagctgtgttaccgtcttggcctcggggtctggtccacactctgtgctcccagccttgaggctgcagtaggactctgatctcacctgccagaagagaggcggggccgcgtcctcctggcgtcaccggcgtcactgtcattccttggtgtctgtgctgggcatggttggcttgggggtctgtggtttcctgggccttgtggcagggtttctcccgtgggagaatttggtgtggaaagcataggaggccccttccgaggttgacaccgtgtcctccgcggtgtttctcgcctggtcgtctcgtcgtgtggacgctgccgttctggttctcggaggtgtgtccttcgccgtgttggggttatttgtctgtgttcctgcacttttcccgggctctgagctggattgatggggccagtctcccccctcccatcttgaggtcgttctccacattccttccagcacacctgtcctttccatagccctttttggacctttagaaccacagatgataggaccagcccaatgagccacagtcagagagtagattgtgcatgtgtgagcacccagctactggggacgggggctctcccacgacccctcctcctgtgtttgccagagctcccatctgccccactcgcctttgccccgtcatcgatgattcaggcagagccagattcgttaggtccctggaggaaggactgactggaccagagggaccctctggctcaggagggttgggtccctgggaggccggcagccaggccacagaatccacacgtggaccattgtgggtccctgggaggccggcagccaggccacggaatccacacgtggaccattgtgggtcccttgggaggccagcagccagactacggaatccacatgtggaccatgggaagtcagtctcttgcgtgtcctagaccttgtgggtggcgccctgcataggggagcagggggaacgggtctgatgtccctgtgctggctgagggctcagagctgcccgcactccgtagctcatgggatgtgctgggcctgcctttggcgccatgctgcagactccagtgggcctggtttctgcagaatgtccatggtggccgctgcagagttgcagaggtccctgtagagataaagctgaggaggaggctgtgtgtgatggctctggctcggaccaaccagatgagcctcctgaagcccccttccctgcctgcctgctgacccgtggccccagctcactcattgccctcagcagccacccgaggctgtgcagaagggtaggttcaggttgaccaggaagctgccaaaagggacatggatatgaggatacatctggacgtgcttaggaacagggtgctggttgagggcccccagctgacccctactgcagatccgcatgtggaccatgagccggctgccagcactaggtcctgggcagctttgtttgtcccacttttctttgtttcttctcactaaaatgatcacgaagacctttgacaagaggagagatatgcactgtgatattaaattagaaataatttatcaaaatcagacctctcctaaaagaataagaaattcattgtttggcccatcctgaaaggtgaggtggcgagacagtggggtgcctccgtgccgcttcgtgcagcagcaagttcagcctgagatgctggctgtactcagcctttgcaatttttgtagatgtagcttaggacgtgagttatttttccgcagactggccaagagccaggttctaagcttggacctaaggtagaaagctgcccatcgggggccctagctcagccccaccaggccctctgttgggcctgcacacagctctgtggctagaacactccaaggcccttcggtacccatcagagtgggccccttgccaggtggcttttcagttacagagtccagtggaccattttgtagaaccatgcagctccctgcggaaggtggggtagggtgggaaagaggagcaggtctggaggtttgtggaacccagtcccctgcagaatctgtaaaacctaataaatcatggttgtggccattctcacggtggtgattgtgattagacgacccccgggaagcccagacactcggggcctggagttcctccccctgcctgacctagaagcagaaccgttttcagcgctctgccctgttggctttaaggctttgtcttaatttaaggaaaaagatcctcccgggttttatttctctctttcttgagtggactgtttccctataattaaaagaggtggtgagtcctggggcagcttccgcgcctccctgtccacgtgctaacagatcaggacgcccccagcacccctgcctgcttttgctggtggcagtgacgggaccccgactcctcactctcgggccgcagacaatgctgtgagcaagtgtggccatgggcacagaatgtccctttggacgccgctgctgggggctgccaggggccctctggggtcgtgctttgaggcccgtccggttcacgagggggtccgggcagcactgactgcttccgacctgcaggaggcgtaggagcggccctgcgggccctttcacggcagctgctgctgtatagatttgtctccactcagtgacgtgggatttttttgtcttccttttggctttatttttaaactgctttagatattactgctcagtgtttgtgaactttcctagttctctatgttgttagtgcagccagcacccagtggggacctactagaaaaaggaactggcatgcacacgtgcccagcaggaaaagcttcgtcttcacgtcggctgctgccatccagaagaggccctggagcctcacgccgtcgaggctgctctcaggcgttctgttccgggcgaggcttgtgctgcaaggaagggcaccagcatgcaggctgccactggagggtccgggtgctgcgggcagagttcagcgcttgtccaccctcccttagctctgactcagtgcatcctactgtggggacatctcgtgaggggacacgaaatgactgatctcaccctttcccagtattcagagctgtgaacccctgtggcgcaggactggcctgtgtctgttattttggttgtaaatcattctcctgtggaattggcaaaagctacatttttactgtccttaccagcaacagtttgcgtcgtcacatgctgtgagtgtgggctgtggtgtgtccgtgtgtgtacatatgtgtatatgtatatatcacgcagcaggagtgtcattcatgctgctgtcccctggtgaagtgacaagtacaattaaaggtggctctga

SEQ ID NO: 319508 - DNA, 3319 bp, Homo sapiens
cgctgccggtgccgcacccgcgccctctgccgccgccgccgccgccgcccggggtctccaggctgaggagtgcgtcggccgctgcccagcagcgccgcgaatcggggagcggagccgcggagccggcgggagggcgggcgggcgggcggacgggcagaatagcctaacatggcagaccagagacagcgctcactgtctacctctggggagtcattgtaccacgtccttgggttggacaagaacgcaacctcagatgacattaaaaagtcctatcggaagcttgccttgaaatatcaccccgacaagaaccccgacaacccggaggccgcggacaagtttaaggagatcaacaacgcgcacgccatcctcacggacgccacaaaaaggaacatctacgacaagtacggctcgctgggtctctacgtggccgagcagtttggggaagagaacgtgaacacctacttcgtgctgtccagctggtgggccaaggccctgtttgtcttctgcggcctcctcacgtgctgctactgctgctgctgtctgtgctgctgcttcaactgctgctgcgggaagtgtaagcccaaggcgcctgaaggcgaggagacggagttctacgtgtcccccgaggatctggaggcacagctgcagtctgacgagaggggagggcactgacactgtgccgcgagtgtttgtggtggcagctgggactgttgaggtgtgaacgtggaccctgagaggccacagacacgccgatcgtcatacagccggcatccgccaccgagaccacccagctcacagccgactcccaccccagctaccacactgacgggttcaactaaatccaggaggagctgtggtcagaggaggagccggcgcctggccacgccaaccttagaatcatgaactgtagtcacagagatgggaaggcagcctcctgcctgccctggccttgctggggcccctcctgcctccacgcccacccagcgtcgacccttgacccacgaagtgcgtagcatgcagtatttaaagcagtgtagctacggtcttctgtttttttcccttttttaatagcatgtatggggttctgttccatgtctgtgttgtggacattccgcggcatgaccgcgtgaactgcacggtggagctgcctcagggctgtcggtcaggttggtccagtgaggggtgactgcagccggtcaggtgggcgaggagaaggggggctgcccctttcctacctgtgcttgaggggccggaggcaggtgctgcctggcagagctgtgttaccgtcttggcctcggggtctggtccacactctgtgctcccagccttgaggctgcagtaggactctgatctcacctgccagaagagaggcggggccgcgtcctcctggcgtcaccggcgtcactgtcattccttggtgtctgtgctgggcatggttggcttgggggtctgtggtttcctgggccttgtggcagggtttctcccgtgggagaatttggtgtggaaagcataggaggccccttccgaggttgacaccgtgtcctccgcggtgtttctcgcctggtcgtctcgtcgtgtggacgctgccgttctggttctcggaggtgtgtccttcgccgtgttggggttatttgtctgtgttcctgcacttttcccgggctctgagctggattgatggggccagtctcccccctcccatcttgaggtcgttctccacattccttccagcacacctgtcctttccatagccctttttggacctttagaaccacagatgataggaccagcccaatgagccacagtcagagagtagattgtgcatgtgtgagcacccagctactggggacgggggctctcccacgacccctcctcctgtgtttgccagagctcccatctgccccactcgcctttgccccgtcatcgatgattcaggcagagccagattcgttaggtccctggaggaaggactgactggaccagagggaccctctggctcaggagggttgggtccctgggaggccggcagccaggccacagaatccacacgtggaccattgtgggtccctgggaggccggcagccaggccacggaatccacacgtggaccattgtgggtcccttgggaggccagcagccagactacggaatccacatgtggaccatgggaagtcagtctcttgcgtgtcctagaccttgtgggtggcgccctgcataggggagcagggggaacgggtctgatgtccctgtgctggctgagggctcagagctgcccgcactccgtagctcatgggatgtgctgggcctgcctttggcgccatgctgcagactccagtgggcctggtttctgcagaatgtccatggtggccgctgcagagttgcagaggtccctgtagagataaagctgaggaggaggctgtgtgtgatggctctggctcggaccaaccagatgagcctcctgaagcccccttccctgcctgcctgctgacccgtggccccagctcactcattgccctcagcagccacccgaggctgtgcagaagggtaggttcaggttgaccaggaagctgccaaaagggacatggatatgaggatacatctggacgtgcttaggaacagggtgctggttgagggcccccagctgacccctactgcagatccgcatgtggaccatgagccggctgccagcactaggtcctgggcagctttgtttgtcccacttttctttgtttcttctcactaaaatgatcacgaagacctttgacaagaggagagatatgcactgtgatattaaattagaaataatttatcaaaatcagacctctcctaaaagaataagaaattcattgtttggcccatcctgaaaggtgaggtggcgagacagtggggtgcctccgtgccgcttcgtgcagcagcaagttcagcctgagatgctggctgtactcagcctttgcaatttttgtagatgtagcttaggacgtgagttatttttccgcagactggccaagagccaggttctaagcttggacctaaggtagaaagctgcccatcgggggccctagctcagccccaccaggccctctgttgggcctgcacacagctctgtggctagaacactccaaggcccttcggtacccatcagagtgggccccttgccaggtggcttttcagttacagagtccagtggaccattttgtagaaccatgcagctccctgcggaaggtggggtagggtgggaaagaggagcaggtctggaggtttgtggaacccagtcccctgcagaatctgtaaaacctaataaatcatggttgtggccattctca

SEQ ID NO: 319509 - DNA, 2708 bp, Homo sapiens
cgctgccggtgccgcacccgcgccctctgccgccgccgccgccgccgcccggggtctccaggctgaggagtgcgtcggccgctgcccagcagcgccgcgaatcggggagcggagccgcggagccggcgggagggcgggcgggcgggcggacgggcagaatagcctaacatggcagaccagagacagcgctcactgtctacctctggggagtcattgtaccacgtccttgggttggacaagaacgcaacctcagatgacattaaaaagtcctatcggaagcttgccttgaaatatcaccccgacaagaaccccgacaacccggaggccgcggacaagtttaaggagatcaacaacgcgcacgccatcctcacggacgccacaaaaaggaacatctacgacaagtacggctcgctgggtctctacgtggccgagcagtttggggaagagaacgtgaacacctacttcgtgctgtccagctggtgggccaaggccctgtttgtcttctgcggcctcctcacgtgctgctactgctgctgctgtctgtgctgctgcttcaactgctgctgcgggaagtgtaagcccaaggcgcctgaaggcgaggagacggagttctacgtgtcccccgaggatctggaggcacagctgcagtctgacgagaggggagggcactgacactgtgccgcgagtgtttgtggtggcagctgggactgttgaggtgtgaacgtggaccctgagaggccacagacacgccgatcgtcatacagccggcatccgccaccgagaccacccagctcacagccgactcccaccccagctaccacactgacgggttcaactaaatccaggaggagctgtggtcagaggaggagccggcgcctggccacgccaaccttagaatcatgaactgtagtcacagagatgggaaggcagcctcctgcctgccctggccttgctggggcccctcctgcctccacgcccacccagcgtcgacccttgacccacgaagtgcgtagcatgcagtatttaaagcagtgtagctacggtcttctgtttttttcccttttttaatagcatgtatggggttctgttccatgtctgtgttgtggacattccgcggcatgaccgcgtgaactgcacggtggagctgcctcagggctgtcggtcaggttggtccagtgaggggtgactgcagccggtcaggtgggcgaggagaaggggggctgcccctttcctacctgtgcttgaggggccggaggcaggtgctgcctggcagagctgtgttaccgtcttggcctcggggtctggtccacactctgtgctcccagccttgaggctgcagtaggactctgatctcacctgccagaagagaggcggggccgcgtcctcctggcgtcaccggcgtcactgtcattccttggtgtctgtgctgggcatggttggcttgggggtctgtggtttcctgggccttgtggcagggtttctcccgtgggagaatttggtgtggaaagcataggaggccccttccgaggttgacaccgtgtcctccgcggtgtttctcgcctggtcgtctcgtcgtgtggacgctgccgttctggttctcggaggtgtgtccttcgccgtgttggggttatttgtctgtgttcctgcacttttcccgggctctgagctggattgatggggccagtctcccccctcccatcttgaggtcgttctccacattccttccagcacacctgtcctttccatagccctttttggacctttagaaccacagatgataggaccagcccaatgagccacagtcagagagtagattgtgcatgtgtgagcacccagctactggggacgggggctctcccacgacccctcctcctgtgtttgccagagctcccatctgccccactcgcctttgccccgtcatcgatgattcaggcagagccagattcgttaggtccctggaggaaggactgactggaccagagggaccctctggctcaggagggttgggtccctgggaggccggcagccaggccacagaatccacacgtggaccattgtgggtccctgggaggccggcagccaggccacggaatccacacgtggaccattgtgggtcccttgggaggccagcagccagactacggaatccacatgtggaccatgggaagtcagtctcttgcgtgtcctagaccttgtgggtggcgccctgcataggggagcagggggaacgggtctgatgtccctgtgctggctgagggctcagagctgcccgcactccgtagctcatgggatgtgctgggcctgcctttggcgccatgctgcagactccagtgggcctggtttctgcagaatgtccatggtggccgctgcagagttgcagaggtccctgtagagataaagctgaggaggaggctgtgtgtgatggctctggctcggaccaaccagatgagcctcctgaagcccccttccctgcctgcctgctgacccgtggccccagctcactcattgccctcagcagccacccgaggctgtgcagaagggtaggttcaggttgaccaggaagctgccaaaagggacatggatatgaggatacatctggacgtgcttaggaacaggggtgggaaagaggagcaggtctggaggtttgtggaacccagtcccctgcagaatctgtaaaacctaataaatcatggttgtggccattctca

SEQ ID NO: 319510 - DNA, 239 bp, Homo sapiens
gcttttttgttttcatcagactgataaaaacccaataaacaactccaggggttggcaaactttttattaaaaggacacattataactattttaagattaaggtccatactgtttctgtcacaactactcaactctcttatcagagatcaaaatgtaaacaagtaggtatgtctatgttccaataaaactttatttgcaaaataagcaattggctttttgtagggggttagatatagggg

SEQ ID NO: 319511 - DNA, 171 bp, Homo sapiens
catggtcttaatagttggagctcatttataatacttgtttttgtgtcattttctgataattccatcatctcgttcttttctggtcttcatttagtgattttattttattgatagttttctgcttctttgcatgcctcagtattctttgaaatttttatttatttacttttt

SEQ ID NO: 319512 - DNA, 962 bp, Homo sapiens
  misc_feature (31)..(31): n is a, c, g, or t
  misc_feature (51)..(51): n is a, c, g, or t
cagaaagagatagctgagcataggatctganggcctctgggttggttaaantcgagagggctggcatgatgtccggggagtcagccaggagcttggggaagggaagcgcgcccccggggccggtcccggagggctcgatccgcatctacagcatgaggttctgcccgtttgctgagaggacgcgtctagtcctgaaggccaagggaatcaggcatgaagtcatcaatatcaacctgaaaaataagcctgagtggttctttaagaaaaatccctttggtctggtgccagttctggaaaacagtcagggtcagctgatctacgagtctgccatcacctgtgagtacctggatgaagcatacccagggaagaagctgttgccggatgacccctatgagaaagcttgccagaagatgatcttagagttgttttctaaggtgccatccttggtaggaagctttattagaagccaaaataaagaagactatgctggcctaaaagaagaatttcgtaaagaatttaccaagctagaggaggttctgactaataagaagacgaccttctttggtggcaattctatctctatgattgattacctcatctggccctggtttgaacggctggaagcaatgaagttaaatgagtgtgtagaccacactccaaaactgaaactgtggatggcagccatgaaggaagatcccacagtctcagccctgcttactagtgagaaagactggcaaggtttcctagagctctacttacagaacagccctgaggcctgtgactatgggctctgaagggggcaggagtcagcaataaagctatgtctgatattttccttcactaataaaaaaaacaaaaaccgggtctttgcgggcggggacagcggatgcaagggcgtggccaatgctccgaccgttcgccacagggcacatcgggccaatgaggcaaatcagcgcgactgc

SEQ ID NO: 319513 - DNA, 187 bp, Homo sapiens
tcaagcttctaacgatgtacggggacatgaaggaagatcccacagtctcagccctgcttactagtgagaaagactggcaaggtttcctagagctctacttacagaacagccctgaggcctgtgactatgggctctgaagggggcaggagtcagcaataaagctatgtctgatattttccttcactaa

SEQ ID NO: 319514 - DNA, 1609 bp, Homo sapiens
agttatgcattcgtctagtgcttggtgaatctgcatttttacaagattaaatatagggtagaggaagcggtcaaattgcatttttctccagcgagaggaaggatgactcctagacctgtctttgtcccatacttgggaagataagctgttagtttacattgccaagatgaaattcaactgatctgttttagagtaaagatcttgcgggccaacaaggaatttccttggggaggtgtgtggcctttgatctttgtagctatttagcaacaaaatgggaggcagtgttgcctgactcagtttccaagcttgactcttccctttggcatagtgagtttggagtcaagagatttttattttcccttcacaagctgaacaggagcctttggagagaacgctctggaccggtgagtgagccatgaggtcgggccacaggctctgaagtcgtgaagccttgggacggagcgggtggtgcttcgaggtcagtgtcacgggagggaggtcagggtcagggtcagacgtggagccccgtggagtgcggagtggtgaccccttcgttcgggggcggagggatgactgagcatttataacttttgtgtatctccccgtgggtgcagcccttggccagcgagatgctttgacacagccccttaagatgttttaagggctatcccataaagccgggaaggcacaacgggtggagctggcggccgccgggggcaggcacttttgagctaaggaggaagcgggggagggaaggagggcgggaaggacgcgccacctacttcctgaatcccctgcaaaccccagaggagctcggcctgcgctgcgccacgatgtccggggagtcagccaggagcttggggaagggaagcgcgcccccggggccggtcccggagggctcgatccgcatctacagcatgaggttctgcccgtttgctgagaggacgcgtctagtcctgaaggccaagggaatcaggcatgaagtcatcaatatcaacctgaaaaataagcctgagtggttctttaagaaaaatccctttggtctggtgccagttctggaaaacagtcagggtcagctgatctacgagtctgccatcacctgtgagtacctggatgaagcatacccagggaagaagctgttgccggatgacccctatgagaaagcttgccagaagatgatcttagagttgttttctaaggtgccatccttggtaggaagctttattagaagccaaaataaagaagactatgctggcctaaaagaagaatttcgtaaagaatttaccaagctagaggaggttctgactaataagaagacgaccttctttggtggcaattctatctctatgattgattacctcatctggccctggtttgaacggctggaagcaatgaagttaaatgagtgtgtagaccacactccaaaactgaaactgtggatggcagccatgaaggaagatcccacagtctcagccctgcttactagtgagaaagactggcaaggtttcctagagctctacttacagaacagccctgaggcctgtgactatgggctctgaagggggcaggagtcagcaataaagctatgtctgatattttccttcactaa

SEQ ID NO: 319515 - DNA, 1806 bp, Homo sapiens
agttatgcattcgtctagtgcttggtgaatctgcatttttacaagattaaatatagggtagaggaagcggtcaaattgcatttttctccagcgagaggaaggatgactcctagacctgtctttgtcccatacttgggaagataagctgttagtttacattgccaagatgaaattcaactgatctgttttagagtaaagatcttgcgggccaacaaggaatttccttggggaggtgtgtggcctttgatctttgtagctatttagcaacaaaatgggaggcagtgttgcctgactcagtttccaagcttgactcttccctttggcatagtgagtttggagtcaagagatttttattttcccttcacaagctgaacaggagcctttggagagaacgctctggaccggtgagtgagccatgaggtcgggccacaggctctgaagtcgtgaagccttgggacggagcgggtggtgcttcgaggtcagtgtcacgggagggaggtcagggtcagggtcagacgtggagccccgtggagtgcggagtggtgaccccttcgttcgggggcggagggatgactgagcatttataacttttgtgtatctccccgtgggtgcagcccttggccagcgagatgctttgacacagccccttaagatgttttaagggctatcccataaagccgggaaggcacaacgggtggagctggcggccgccgggggcaggcacttttgagctaaggaggaagcgggggagggaaggagggcgggaaggacgcgccacctacttcctgaatcccctgcaaaccccagaggagctcggcctgcgctgcgccacgatgtccggggagtcagccaggagcttggggaagggtgaggcctgcccgccgcgaagagggggtgatctcggcgacccccggcatgttcgaggctgctccgggagcccagccgcccgggagcgccccaccggcggggaacgggtcggagctgcagtgggacgcgggggcggtgggatacggggggtctcgacacctctctgggccgtaatcgccttcgcttctccccggcaggaagcgcgcccccggggccggtcccggagggctcgatccgcatctacagcatgaggttctgcccgtttgctgagaggacgcgtctagtcctgaaggccaagggaatcaggcatgaagtcatcaatatcaacctgaaaaataagcctgagtggttctttaagaaaaatccctttggtctggtgccagttctggaaaacagtcagggtcagctgatctacgagtctgccatcacctgtgagtacctggatgaagcatacccagggaagaagctgttgccggatgacccctatgagaaagcttgccagaagatgatcttagagttgttttctaaggtgccatccttggtaggaagctttattagaagccaaaataaagaagactatgctggcctaaaagaagaatttcgtaaagaatttaccaagctagaggaggttctgactaataagaagacgaccttctttggtggcaattctatctctatgattgattacctcatctggccctggtttgaacggctggaagcaatgaagttaaatgagtgtgtagaccacactccaaaactgaaactgtggatggcagccatgaaggaagatcccacagtctcagccctgcttactagtgagaaagactggcaaggtttcctagagctctacttacagaacagccctgaggcctgtgactatgggctctgaagggggcaggagtcagcaataaagctatgtctgatattttccttcactaa

SEQ ID NO: 319516 - DNA, 977 bp, Homo sapiens
ggtgcaggggacgttgctgggaatcaaacttgacttgtaaagccaataaaagccacttggagaattggcctcagatcttgtctgcaactgtccctgtaaaggtgaggaaactgaaacacactgagctgaacaggagcctttggagagaacgctctggaccggtgagtgagccatgaggtcgggccacaggctctgaagtcgtgaagccttgggacggagcgggtggtgcttcgaggaagcgcgcccccggggccggtcccggagggctcgatccgcatctacagcatgaggttctgcccgtttgctgagaggacgcgtctagtcctgaaggccaagggaatcaggcatgaagtcatcaatatcaacctgaaaaataagcctgagtggttctttaagaaaaatccctttggtctggtgccagttctggaaaacagtcagggtcagctgatctacgagtctgccatcacctgtgagtacctggatgaagcatacccagggaagaagctgttgccggatgacccctatgagaaagcttgccagaagatgatcttagagttgttttctaaggtgccatccttggtaggaagctttattagaagccaaaataaagaagactatgctggcctaaaagaagaatttcgtaaagaatttaccaagctagaggaggttctgactaataagaagacgaccttctttggtggcaattctatctctatgattgattacctcatctggccctggtttgaacggctggaagcaatgaagttaaatgagtgtgtagaccacactccaaaactgaaactgtggatggcagccatgaaggaagatcccacagtctcagccctgcttactagtgagaaagactggcaaggtttcctagagctctacttacagaacagccctgaggcctgtgactatgggctctgaagggggcaggagtcagcaataaagctatgtctgatattttccttcactaa

SEQ ID NO: 319517 - DNA, 1798 bp, Homo sapiens
agttatgcattcgtctagtgcttggtgaatctgcatttttacaagattaaatatagggtagaggaagcggtcaaattgcatttttctccagcgagaggaaggatgactcctagacctgtctttgtcccatacttgggaagataagctgttagtttacattgccaagatgaaattcaactgatctgttttagagtaaagatcttgcgggccaacaaggaatttccttggggaggtgtgtggcctttgatctttgtagctatttagcaacaaaatgggaggcagtgttgcctgactcagtttccaagcttgactcttccctttggcatagtgagtttggagtcaagagatttttattttcccttcacaagctgaacaggagcctttggagagaacgctctggaccggtgagtgagccatgaggtcgggccacaggctctgaagtcgtgaagccttgggacggagcgggtggtgcttcgaggtcagtgtcacgggagggaggtcagggtcagggtcagacgtggagccccgtggagtgcggagtggtgaccccttcgttcgggggcggagggatgactgagcatttataacttttgtgtatctccccgtgggtgcagcccttggccagcgagatgctttgacacagccccttaagatgttttaagggctatcccataaagccgggaaggcacaacgggtggagctggcggccgccgggggcaggcacttttgagctaaggaggaagcgggggagggaaggagggcgggaaggacgcgccacctacttcctgaatcccctgcaaaccccagaggagctcggcctgcgctgcgccacgatgtccggggagtcagccaggagcttggggaagggaagcgcgcccccggggccggtcccggagggctcgatccgcatctacagcatgaggttctgcccgtttgctgagaggacgcgtctagtcctgaaggccaagggaatcaggcatgaagtcatcaatatcaacctgaaaaataagcctgagtggttctttaagaaaaatccctttggtctggtgccagttctggaaaacagtcagggtcagctgatctacgagtctgccatcacctgtgagtacctggatgaagcatacccagggaagaagctgttgccggatgacccctatgagaaagcttgccagaagatgatcttagagttgttttctaaggtgccatccttggtaggaagctttattagaagccaaaataaagaagactatgctggcctaaaagaagaatttcgtaaagaatttaccaagctagaggaggttctgactaataagaagacgaccttctttggtggcaattctatctctatgattgattacctcatctggccctggtttgaacggctggaagcaatgaagttaaatgagtgtgtagaccacactccaaaactgaaactgtggatggcagccatgaaggaagatcccacagtctcagccctgcttactagtgagaaagactggcaaggtttcctagagctctacttacagaacagccctgaggcctgtgactatgggctctgaagggggcaggagtcagcaataaagctatgtctgatattttccttcactaaaaaaacacaaaagaaaacagacacatgtcaaataggagaaaacaagaagggaggggagaaaccaaaaggagaaaacctaaaggagagcgacggggggccgggcaaacaatggcctcagaaaggggggcggactcagggaggaacggcatgtcgccaaggacggcacacgtagagacgggaaggggaacg

SEQ ID NO: 319518 - DNA, 690 bp, Homo sapiens
gcctccagggctcaagcaatcttctcacctcagcatccggagtagccgagactacaggcatgaagtcatcaatatcaacctgaaaaataagcctgagtggttctttaagaaaaatccctttggtctggtgccagttctggaaaacagtcagggtcagctgatctacgagtctgccatcacctgtgagtacctggatgaagcatacccagggaagaagctgttgccggatgacccctatgagaaagcttgccagaagatgatcttagagttgttttctaaggtgccatccttggtaggaagctttattagaagccaaaataaagaagactatgctggcctaaaagaagaatttcgtaaagaatttaccaagctagaggaggttctgactaataagaagacgaccttctttggtggcaattctatctctatgattgattacctcatctggccctggtttgaacggctggaagcaatgaagttaaatgagtgtgtagaccacactccaaaactgaaactgtggatggcagccatgaaggaagatcccacagtctcagccctgcttactagtgagaaagactggcaaggtttcctagagctctacttacagaacagccctgaggcctgtgactatgggctctgaagggggcaggagtcagcaataaagctatgtctgatattttccttcactaa

SEQ ID NO: 319519 - DNA, 1555 bp, Homo sapiens
agttatgcattcgtctagtgcttggtgaatctgcatttttacaagattaaatatagggtagaggaagcggtcaaattgcatttttctccagcgagaggaaggatgactcctagacctgtctttgtcccatacttgggaagataagctgttagtttacattgccaagatgaaattcaactgatctgttttagagtaaagatcttgcgggccaacaaggaatttccttggggaggtgtgtggcctttgatctttgtagctatttagcaacaaaatgggaggcagtgttgcctgactcagtttccaagcttgactcttccctttggcatagtgagtttggagtcaagagatttttattttcccttcacaagctgaacaggagcctttggagagaacgctctggaccggtgagtgagccatgaggtcgggccacaggctctgaagtcgtgaagccttgggacggagcgggtggtgcttcgaggtcagtgtcacgggagggaggtcagggtcagggtcagacgtggagccccgtggagtgcggagtggtgaccccttcgttcgggggcggagggatgactgagcatttataacttttgtgtatctccccgtgggtgcagcccttggccagcgagatgctttgacacagccccttaagatgttttaagggctatcccataaagccgggaaggcacaacgggtggagctggcggccgccgggggcaggcacttttgagctaaggaggaagcgggggagggaaggagggcgggaaggacgcgccacctacttcctgaatcccctgcaaaccccagaggagctcggcctgcgctgcgccacgatgtccggggagtcagccaggagcttggggaagggaagcgcgcccccggggccggtcccggagggctcgatccgcatctacagcatgaggttctgcccgtttgctgagaggacgcgtctagtcctgaaggccaagggaatcaggcatgaagtcatcaatatcaacctgaaaaataagcctgagtggttctttaagaaaaatccctttggtctggtgccagttctggatgaagcatacccagggaagaagctgttgccggatgacccctatgagaaagcttgccagaagatgatcttagagttgttttctaaggtgccatccttggtaggaagctttattagaagccaaaataaagaagactatgctggcctaaaagaagaatttcgtaaagaatttaccaagctagaggaggttctgactaataagaagacgaccttctttggtggcaattctatctctatgattgattacctcatctggccctggtttgaacggctggaagcaatgaagttaaatgagtgtgtagaccacactccaaaactgaaactgtggatggcagccatgaaggaagatcccacagtctcagccctgcttactagtgagaaagactggcaaggtttcctagagctctacttacagaacagccctgaggcctgtgactatgggctctgaagggggcaggagtcagcaataaagctatgtctgatattttccttcactaa

SEQ ID NO: 319520 - DNA, 1949 bp, Homo sapiens
agttatgcattcgtctagtgcttggtgaatctgcatttttacaagattaaatatagggtagaggaagcggtcaaattgcatttttctccagcgagaggaaggatgactcctagacctgtctttgtcccatacttgggaagataagctgttagtttacattgccaagatgaaattcaactgatctgttttagagtaaagatcttgcgggccaacaaggaatttccttggggaggtgtgtggcctttgatctttgtagctatttagcaacaaaatgggaggcagtgttgcctgactcagtttccaagcttgactcttccctttggcatagtgagtttggagtcaagagatttttattttcccttcacaagctgaacaggagcctttggagagaacgctctggaccggtgagtgagccatgaggtcgggccacaggctctgaagtcgtgaagccttgggacggagcgggtggtgcttcgaggtcagtgtcacgggagggaggtcagggtcagggtcagacgtggagccccgtggagtgcggagtggtgaccccttcgttcgggggcggagggatgactgagcatttataacttttgtgtatctccccgtgggtgcagcccttggccagcgagatgctttgacacagccccttaagatgttttaagggctatcccataaagccgggaaggcacaacgggtggagctggcggccgccgggggcaggcacttttgagctaaggaggaagcgggggagggaaggagggcgggaaggacgcgccacctacttcctgaatcccctgcaaaccccagaggagctcggcctgcgctgcgccacgatgtccggggagtcagccaggagcttggggaagggaagcgcgcccccggggccggtcccggagggctcgatccgcatctacagcatgaggttctgcccgtttgctgagaggacgcgtctagtcctgaaggccaagggaatcaggcatgaagtcatcaatatcaacctgaaaaataagcctgagtggttctttaagaaaaatccctttggtctggtgccagttctggaaaacagtcagggtcagctgatctacgagtctgccatcacctgtgagtacctggatgaagcatacccagggaagaagctgttgccggatgacccctatgagaaagcttgccagaagatgatcttagagttgttttctaaggtgccatccttggtaggaagctttattagaagccaaaataaagaagactatgctggcctaaaagaagaatttcgtaaagaatttaccaagctagaggaggttctgactaataagaagacgaccttctttggtggcaattctatctctatgattgattacctcatctggccctggtttgaacggctggaagcaatgaagttaaatgagagtaagatatttgaatattttgtgcataatttaggatgacaggtggaatagtatatattgacctttctttataacagaagttgaaatatttaatacaactggtctgaatgagaacaagcagacaggggaatcttggactatcccaggcatgtcatatacctacactaactactctccatcactgcaatggggcaggggatttctgagacatgtagtaaagtgctttaaaatttattccttccttcctgattaaaaacccataaggggaaggatatggtagcttacgcctgtaagcccagcacttcgggaggccgagacgggtggatcatctgaggtcaggagttagagaccagcctggccaatgtggtgaaaccccatctctactaaaaatacaaaaattagctgggcatggtggtacacacctgtaatctcagctactcgggaggctgaggcaggagaatcacttgaacccgggaggcagttgcagtgagctgagatcatgtcactgaactccagcctgggcaagagcaagacacttcatca

SEQ ID NO: 319521 - DNA, 1577 bp, Homo sapiens
agttatgcattcgtctagtgcttggtgaatctgcatttttacaagattaaatatagggtagaggaagcggtcaaattgcatttttctccagcgagaggaaggatgactcctagacctgtctttgtcccatacttgggaagataagctgttagtttacattgccaagatgaaattcaactgatctgttttagagtaaagatcttgcgggccaacaaggaatttccttggggaggtgtgtggcctttgatctttgtagctatttagcaacaaaatgggaggcagtgttgcctgactcagtttccaagcttgactcttccctttggcatagtgagtttggagtcaagagatttttattttcccttcacaagctgaacaggagcctttggagagaacgctctggaccggtgagtgagccatgaggtcgggccacaggctctgaagtcgtgaagccttgggacggagcgggtggtgcttcgaggtcagtgtcacgggagggaggtcagggtcagggtcagacgtggagccccgtggagtgcggagtggtgaccccttcgttcgggggcggagggatgactgagcatttataacttttgtgtatctccccgtgggtgcagcccttggccagcgagatgctttgacacagccccttaagatgttttaagggctatcccataaagccgggaaggcacaacgggtggagctggcggccgccgggggcaggcacttttgagctaaggaggaagcgggggagggaaggagggcgggaaggacgcgccacctacttcctgaatcccctgcaaaccccagaggagctcggcctgcgctgcgccacgatgtccggggagtcagccaggagcttggggaagggaagcgcgcccccggggccggtcccggagggctcgatccgcatctacagcatgaggttctgcccgtttgctgagaggacgcgtctagtcctgaaggccaagggaatcaggcatgaagtcatcaatatcaacctgaaaaataagcctgagtggttctttaagaaaaatccctttggtctggtgccagttctggaaaacagtcagggtcagctgatctacgagtctgccatcacctgtgagtacctggatgaagcatacccagggaagaagctgttgccggatgacccctatgagaaagcttgccagaagatgatcttagagttgttttctaaggtgccatccttggtaggaagctttattagaagccaaaataaagaagactatgctggcctaaaagaagaatttcgtaaagaatttaccaagctagaggaggttctgactaataagaagacgaccttctttggtggcaattctatctctatgattgattacctcatctggccctggtttgaacggctggaagcaatgaagttaaatgagagtaagatatttgaatattttgtgcataatttaggatgacaggtggaatagtatatattgacctttctttataacagaaggtccaggtatgccagaaggtccaggtatgccagaaggtccaggtatgccagaaggtccagtatgccagaagctccagtatgccagaagtcc

SEQ ID NO: 319522 - DNA, 466 bp, Homo sapiens
atccccatcagggcagaagcaggaagcagaagatgatcttagagttgttttctaaggtgccatccttggtaggaagctttattagaagccaaaataaagaagactatgctggcctaaaagaagaatttcgtaaagaatttaccaagctagaggaggttctgactaataagaagacgaccttctttggtggcaattctatctctatgattgattacctcatctggccctggtttgaacggctggaagcaatgaagttaaatgagtgtgtagaccacactccaaaactgaaactgtggatggcagccatgaaggaagatcccacagtctcagccctgcttactagtgagaaagactggcaaggtttcctagagctctacttacagaacagccctgaggcctgtgactatgggctctgaagggggcaggagtcagcaataaagctatgtctgatattttccttcactaa

SEQ ID NO: 319523 - DNA, 1510 bp, Homo sapiens
agttatgcattcgtctagtgcttggtgaatctgcatttttacaagattaaatatagggtagaggaagcggtcaaattgcatttttctccagcgagaggaaggatgactcctagacctgtctttgtcccatacttgggaagataagctgttagtttacattgccaagatgaaattcaactgatctgttttagagtaaagatcttgcgggccaacaaggaatttccttggggaggtgtgtggcctttgatctttgtagctatttagcaacaaaatgggaggcagtgttgcctgactcagtttccaagcttgactcttccctttggcatagtgagtttggagtcaagagatttttattttcccttcacaagctgaacaggagcctttggagagaacgctctggaccggtgagtgagccatgaggtcgggccacaggctctgaagtcgtgaagccttgggacggagcgggtggtgcttcgaggtcagtgtcacgggagggaggtcagggtcagggtcagacgtggagccccgtggagtgcggagtggtgaccccttcgttcgggggcggagggatgactgagcatttataacttttgtgtatctccccgtgggtgcagcccttggccagcgagatgctttgacacagccccttaagatgttttaagggctatcccataaagccgggaaggcacaacgggtggagctggcggccgccgggggcaggcacttttgagctaaggaggaagcgggggagggaaggagggcgggaaggacgcgccacctacttcctgaatcccctgcaaaccccagaggagctcggcctgcgctgcgccacgatgtccggggagtcagccaggagcttggggaagggaagcgcgcccccggggccggtcccggagggctcgatccgcatctacagcatgaggttctgcccgtttgctgagaggacgcgtctagtcctgaaggccaagggaatcaggcatgaagtcatcaatatcaacctgaaaaataagcctgagtggttctttaagaaaaatccctttggtctggtgccagttctggaaaacagtcagggtcagctgatctacgagtctgccatcacctgtgagtacctggatgaagcatacccagggaagaagctgttgccggatgacccctatgagaaagcttgccagaagatgatcttagagttgttttctaaggttctgactaataagaagacgaccttctttggtggcaattctatctctatgattgattacctcatctggccctggtttgaacggctggaagcaatgaagttaaatgagtgtgtagaccacactccaaaactgaaactgtggatggcagccatgaaggaagatcccacagtctcagccctgcttactagtgagaaagactggcaaggtttcctagagctctacttacagaacagccctgaggcctgtgactatgggctctgaagggggcaggagtcagcaataaagctatgtctgatattttccttcactaa

SEQ ID NO: 319524 - DNA, 1979 bp, Homo sapiens
agttatgcattcgtctagtgcttggtgaatctgcatttttacaagattaaatatagggtagaggaagcggtcaaattgcatttttctccagcgagaggaaggatgactcctagacctgtctttgtcccatacttgggaagataagctgttagtttacattgccaagatgaaattcaactgatctgttttagagtaaagatcttgcgggccaacaaggaatttccttggggaggtgtgtggcctttgatctttgtagctatttagcaacaaaatgggaggcagtgttgcctgactcagtttccaagcttgactcttccctttggcatagtgagtttggagtcaagagatttttattttcccttcacaagctgaacaggagcctttggagagaacgctctggaccggtgagtgagccatgaggtcgggccacaggctctgaagtcgtgaagccttgggacggagcgggtggtgcttcgaggtcagtgtcacgggagggaggtcagggtcagggtcagacgtggagccccgtggagtgcggagtggtgaccccttcgttcgggggcggagggatgactgagcatttataacttttgtgtatctccccgtgggtgcagcccttggccagcgagatgctttgacacagccccttaagatgttttaagggctatcccataaagccgggaaggcacaacgggtggagctggcggccgccgggggcaggcacttttgagctaaggaggaagcgggggagggaaggagggcgggaaggacgcgccacctacttcctgaatcccctgcaaaccccagaggagctcggcctgcgctgcgccacgatgtccggggagtcagccaggagcttggggaagggtgaggcctgcccgccgcgaagagggggtgatctcggcgacccccggcatgttcgaggctgctccgggagcccagccgcccgggagcgccccaccggcggggaacgggtcggagctgcagtgggacgcgggggcggtgggatacggggggtctcgacacctctctgggccgtaatcgccttcgcttctccccggcaggaagcgcgcccccggggccggtcccggagggctcgatccgcatctacagcatgaggttctgcccgtttgctgagaggacgcgtctagtcctgaaggccaagggaatcaggcatgaagtcatcaatatcaacctgaaaaataagcctgagtggttctttaagaaaaatccctttggtctggtgccagttctggaaaacagtcagggtcagctgatctacgagtctgccatcacctgtgagtacctggatgaagcatacccagggaagaagctgttgccggatgacccctatgagaaagcttgccagaagatgatcttagagttgttttctaaggtgccatccttggtaggaagctttattagaagccaaaataaagaagactatgctggcctaaaagaagaatttcgtaaagaatttaccaagctagaggagaccaacagattctaaagcttaattaagctttttgatcagaaaaaaacccaacttggatacatcggagtaaaaactgcttctctcacctgctctacttatttcccttcagcatttctagtgagtcttactacatgcacaagtaagaaatacttttatgctgtttaatgttcagggttctgactaataagaagacgaccttctttggtggcaattctatctctatgattgattacctcatctggccctggtttgaacggctggaagcaatgaagttaaatgagtgtgtagaccacactccaaaactgaaactgtggatggcagccatgaaggaagatcccacagtctcagccctgcttactagtgagaaagactggcaaggtttcctagagctctacttacagaacagccctgaggcctgtgactatgggctctgaagggggcaggagtcagcaataaagctatgtctgatattttccttcactaa

SEQ ID NO: 319525 - DNA, 1276 bp, Homo sapiens
agttatgcattcgtctagtgcttggtgaatctgcatttttacaagattaaatatagggtagaggaagcggtcaaattgcatttttctccagcgagaggaaggatgactcctagacctgtctttgtcccatacttgggaagataagctgttagtttacattgccaagatgaaattcaactgatctgttttagagtaaagatcttgcgggccaacaaggaatttccttggggaggtgtgtggcctttgatctttgtagctatttagcaacaaaatgggaggcagtgttgcctgactcagtttccaagcttgactcttccctttggcatagtgagtttggagtcaagagatttttattttcccttcacaagctgaacaggagcctttggagagaacgctctggaccggtgagtgagccatgaggtcgggccacaggctctgaagtcgtgaagccttgggacggagcgggtggtgcttcgaggtcagtgtcacgggagggaggtcagggtcagggtcagacgtggagccccgtggagtgcggagtggtgaccccttcgttcgggggcggagggatgactgagcatttataacttttgtgtatctccccgtgggtgcagcccttggccagcgagatgctttgacacagccccttaagatgttttaagggctatcccataaagccgggaaggcacaacgggtggagctggcggccgccgggggcaggcacttttgagctaaggaggaagcgggggagggaaggagggcgggaaggacgcgccacctacttcctgaatcccctgcaaaccccagaggagctcggcctgcgctgcgccacgatgtccggggagtcagccaggagcttggggaagggaagcgcgcccccggggccggtcccggagggctcgatccgcatctacagcatgaggttctgcccgtttgctgagaggacgcgtctagtcctgaaggccaagggaatcaggcatgaagtcatcaatatcaacctgaaaaataagcctgagtggttctttaagaaaaatccctttggtctggtgccagttctggaaaacagtcagggtcagctgatctacgagtctgccatcacctgtgagtacctggatgaagcatacccagggaagaagctgttgccggatgacccctatgagaaagcttgccagaagatgatcttagagttgttttctaaggtgccatccttggtaggaagctttattagaagccaaaataaagaagactatgcatcagcggatcgagtgggtacccg

SEQ ID NO: 319526 - DNA, 870 bp, Homo sapiens
tatgcatactcttaaaacatggttgtaccaatttacacctctacgacagtggttccatacccttgccaacttcattttgttcattgtaggcattctcttgggtgtatagtgttattgcattttggttttaatttgcatttccctaatgactaatgcagttgaacacctttccaaatgataattggccatttggacatcatctttcttgaagatcaagtcttgctcatttttccaatgggtcgtttgctatttttcttactgattcccaggaatcctttctatattctgaataccagtcctttgtattacaaatatgttgtactctgtgacttgttttatttttcaattttccagtttatgttgttgattgttttacttcatcccagaccaacagattctaaagcttaattaagctttttgatcagaaaaaaacccaacttggatacatcggagtaaaaactgcttctctcacctgctctacttatttcccttcagcatttctagtgagtcttactacatgcacaagtaagaaatacttttatgctgtttaatgttcagggttctgactaataagaagacgaccttctttggtggcaattctatctctatgattgattacctcatctggccctggtttgaacggctggaagcaatgaagttaaatgagtgtgtagaccacactccaaaactgaaactgtggatggcagccatgaaggaagatcccacagtctcagccctgcttactagtgagaaagactggcaaggtttcctagagctctacttacagaacagccctgaggcctgtgactatgggctctgaagggggcaggagtcagcaataaagctatgtctgatattttccttcactaa

SEQ ID NO: 319527 - DNA, 1177 bp, Homo sapiens
agttatgcattcgtctagtgcttggtgaatctgcatttttacaagattaaatatagggtagaggaagcggtcaaattgcatttttctccagcgagaggaaggatgactcctagacctgtctttgtcccatacttgggaagataagctgttagtttacattgccaagatgaaattcaactgatctgttttagagtaaagatcttgcgggccaacaaggaatttccttggggaggtgtgtggcctttgatctttgtagctatttagcaacaaaatgggaggcagtgttgcctgactcagtttccaagcttgactcttccctttggcatagtgagtttggagtcaagagatttttattttcccttcacaagctgaacaggagcctttggagagaacgctctggaccggtgagtgagccatgaggtcgggccacaggctctgaagtcgtgaagccttgggacggagcgggtggtgcttcgaggtcagtgtcacgggagggaggtcagggtcagggtcagacgtggagccccgtggagtgcggagtggtgaccccttcgttcgggggcggagggatgactgagcatttataacttttgtgtatctccccgtgggtgcagcccttggccagcgagatgctttgacacagccccttaagatgttttaagggctatcccataaagccgggaaggcacaacgggtggagctggcggccgccgggggcaggcacttttgagctaaggaggaagcgggggagggaaggagggcgggaaggacgcgccacctacttcctgaatcccctgcaaaccccagaggagctcggcctgcgctgcgccacgatgtccggggagtcagccaggagcttggggaagggaagcgcgcccccggggccggtcccggagggctcgatccgcatctacagcatgaggttctgcccgtttgctgagaggacgcgtctagtcctgaaggccaagggaatcaggcatgaagtcatcaatatcaacctgaaaaataagcctgagtggttctttaagaaaaatccctttggtctggtgccagttctggaaaacagtcagggtcagctgatctacgagtctgccatcacctgtgagtacctggatgaagcatacccagggaagaagctgttgccggatcagcggatcgagtgggaacctctagatca

SEQ ID NO: 319528 - DNA, 1170 bp, Homo sapiens
agttatgcattcgtctagtgcttggtgaatctgcatttttacaagattaaatatagggtagaggaagcggtcaaattgcatttttctccagcgagaggaaggatgactcctagacctgtctttgtcccatacttgggaagataagctgttagtttacattgccaagatgaaattcaactgatctgttttagagtaaagatcttgcgggccaacaaggaatttccttggggaggtgtgtggcctttgatctttgtagctatttagcaacaaaatgggaggcagtgttgcctgactcagtttccaagcttgactcttccctttggcatagtgagtttggagtcaagagatttttattttcccttcacaagctgaacaggagcctttggagagaacgctctggaccggtgagtgagccatgaggtcgggccacaggctctgaagtcgtgaagccttgggacggagcgggtggtgcttcgaggtcagtgtcacgggagggaggtcagggtcagggtcagacgtggagccccgtggagtgcggagtggtgaccccttcgttcgggggcggagggatgactgagcatttataacttttgtgtatctccccgtgggtgcagcccttggccagcgagatgctttgacacagccccttaagatgttttaagggctatcccataaagccgggaaggcacaacgggtggagctggcggccgccgggggcaggcacttttgagctaaggaggaagcgggggagggaaggagggcgggaaggacgcgccacctacttcctgaatcccctgcaaaccccagaggagctcggcctgcgctgcgccacgatgtccggggagtcagccaggagcttggggaagggaagcgcgcccccggggccggtcccggagggctcgatccgcatctacagcatgaggttctgcccgtttgctgagaggacgcgtctagtcctgaaggccaagggaatcaggcatgaagtcatcaatatcaacctgaaaaataagcctgagtggttctttaagaaaaatccctttggtctggtgccagttctggatgaagcatacccagggaagaagctgttgccggatgacccctatgagaaagcttgccagaagatgatcttagagttgttttctaaggtttgtgcataagaaatttcagctc

SEQ ID NO: 319529 - DNA, 844 bp, Homo sapiens
  misc_feature (31)..(31): n is a, c, g, or t
  misc_feature (51)..(51): n is a, c, g, or t
cagaaagagatagctgagcataggatctganggcctctgggttggttaaantcgagagggctggcatgatgtccggggagtcagccaggagcttggggaagggaagcgcgcccccggggccggtcccggagggctcgatccgcatctacagcatgaggttctgcccgtttgctgagaggacgcgtctagtcctgaaggccaagggaatcaggcatgaagtcatcaatatcaacctgaaaaataagcctgagtggttctttaagaaaaatccctttggtctggtgccagttctggaaaacagtcagggtcagctgatctacgagtctgccatcacctgtgagtacctggatgaagcatacccagggaagaagctgttgccggatgacccctatgagaaagcttgccagaagatgatcttagagttgttttctaaggtgccatccttggtaggaagctttattagaagccaaaataaagaagactatgctggcctaaaagaagaatttcgtaaagaatttaccaagctagaggaggttctgactaataagaagacgaccttctttggtggcaattctatctctatgattgattacctcatctggccctggtttgaacggctggaagcaatgaagttaaatgagtgtgtagaccacactccaaaactgaaactgtggatggcagccatgaaggaagatcccacagtctcagccctgcttactagtgagaaagactggcaaggtttcctagagctctacttacagaacagccctgaggcctgtgactatgggctctgaagggggcaggagtcagcaataaagctatgtctgatattttccttcactaa

SEQ ID NO: 319530 - DNA, 1208 bp, Homo sapiens
tgtctgtgtatatatagcacatgaggtcaattttcctttgcctttaatgaatcacctggtgcactaagatattccacccccccactccccacacgctcattcgcacccatgctgacacctacgtgtacatgcgggatggtgcccatgcacgcctgtgcttacacacatgcacacacaaatatgcacagaacacacatctgtatgtgtgttagcaaagagactcctgaactccctctgatggctgaagccatctctcccctgtgaggcacaggtggcctgggttgcttgcacttggggcgtggctgggatctattgtctgagagggtgaggacaccacgcaaatttagacaagcccatgagatcaggctgggcccatggtgaaagtcccacacttagtcaatacccactcatctggaatattgtctccacagccccagccacagctgcaggcctgggcttccagcgggaagcgcgcccccggggccggtcccggagggctcgatccgcatctacagcatgaggttctgcccgtttgctgagaggacgcgtctagtcctgaaggccaagggaatcaggcatgaagtcatcaatatcaacctgaaaaataagcctgagtggttctttaagaaaaatccctttggtctggtgccagttctggaaaacagtcagggtcagctgatctacgagtctgccatcacctgtgagtacctggatgaagcatacccagggaagaagctgttgccggatgacccctatgagaaagcttgccagaagatgatcttagagttgttttctaaggtgccatccttggtaggaagctttattagaagccaaaataaagaagactatgctggcctaaaagaagaatttcgtaaagaatttaccaagctagaggaggttctgactaataagaagacgaccttctttggtggcaattctatctctatgattgattacctcatctggccctggtttgaacggctggaagcaatgaagttaaatgagtgtgtagaccacactccaaaactgaaactgtggatggcagccatgaaggaagatcccacagtctcagccctgcttactagtgagaaagactggcaaggtttcctagagctctacttacagaacagccctgaggcctgtgactatgggctctgaagggggcaggagtcagcaataaagctatgtctgatattttccttcactaa

SEQ ID NO: 319531 - DNA, 1146 bp, Homo sapiens
agttatgcattcgtctagtgcttggtgaatctgcatttttacaagattaaatatagggtagaggaagcggtcaaattgcatttttctccagcgagaggaaggatgactcctagacctgtctttgtcccatacttgggaagataagctgttagtttacattgccaagatgaaattcaactgatctgttttagagtaaagatcttgcgggccaacaaggaatttccttggggaggtgtgtggcctttgatctttgtagctatttagcaacaaaatgggaggcagtgttgcctgactcagtttccaagcttgactcttccctttggcatagtgagtttggagtcaagagatttttattttcccttcacaagctgaacaggagcctttggagagaacgctctggaccggaagcgcgcccccggggccggtcccggagggctcgatccgcatctacagcatgaggttctgcccgtttgctgagaggacgcgtctagtcctgaaggccaagggaatcaggcatgaagtcatcaatatcaacctgaaaaataagcctgagtggttctttaagaaaaatccctttggtctggtgccagttctggaaaacagtcagggtcagctgatctacgagtctgccatcacctgtgagtacctggatgaagcatacccagggaagaagctgttgccggatgacccctatgagaaagcttgccagaagatgatcttagagttgttttctaaggtgccatccttggtaggaagctttattagaagccaaaataaagaagactatgctggcctaaaagaagaatttcgtaaagaatttaccaagctagaggaggttctgactaataagaagacgaccttctttggtggcaattctatctctatgattgattacctcatctggccctggtttgaacggctggaagcaatgaagttaaatgagtgtgtagaccacactccaaaactgaaactgtggatggcagccatgaaggaagatcccacagtctcagccctgcttactagtgagaaagactggcaaggtttcctagagctctacttacagaacagccctgaggcctgtgactatgggctctgaagggggcaggagtcagcaataaagctatgtctgatattttccttcactaa

SEQ ID NO: 319532 - DNA, 1716 bp, Homo sapiens
agttatgcattcgtctagtgcttggtgaatctgcatttttacaagattaaatatagggtagaggaagcggtcaaattgcatttttctccagcgagaggaaggatgactcctagacctgtctttgtcccatacttgggaagataagctgttagtttacattgccaagatgaaattcaactgatctgttttagagtaaagatcttgcgggccaacaaggaatttccttggggaggtgtgtggcctttgatctttgtagctatttagcaacaaaatgggaggcagtgttgcctgactcagtttccaagcttgactcttccctttggcatagtgagtttggagtcaagagatttttattttcccttcacaagctgaacaggagcctttggagagaacgctctggaccggtgagtgagccatgaggtcgggccacaggctctgaagtcgtgaagccttgggacggagcgggtggtgcttcgaggtcagtgtcacgggagggaggtcagggtcagggtcagacgtggagccccgtggagtgcggagtggtgaccccttcgttcgggggcggagggatgactgagcatttataacttttgtgtatctccccgtgggtgcagcccttggccagcgagatgctttgacacagccccttaagatgttttaagggctatcccataaagccgggaaggcacaacgggtggagctggcggccgccgggggcaggcacttttgagctaaggaggaagcgggggagggaaggagggcgggaaggacgcgccacctacttcctgaatcccctgcaaaccccagaggagctcggcctgcgctgcgccacgatgtccggggagtcagccaggagcttggggaagggtgaggcctgcccgccgcgaagagggggtgatctcggcgacccccggcatgttcgaggctgctccgggagcccagccgcccgggagcgccccaccggcggggaacgggaagcgcgcccccggggccggtcccggagggctcgatccgcatctacagcatgaggttctgcccgtttgctgagaggacgcgtctagtcctgaaggccaagggaatcaggcatgaagtcatcaatatcaacctgaaaaataagcctgagtggttctttaagaaaaatccctttggtctggtgccagttctggaaaacagtcagggtcagctgatctacgagtctgccatcacctgtgagtacctggatgaagcatacccagggaagaagctgttgccggatgacccctatgagaaagcttgccagaagatgatcttagagttgttttctaaggtgccatccttggtaggaagctttattagaagccaaaataaagaagactatgctggcctaaaagaagaatttcgtaaagaatttaccaagctagaggaggttctgactaataagaagacgaccttctttggtggcaattctatctctatgattgattacctcatctggccctggtttgaacggctggaagcaatgaagttaaatgagtgtgtagaccacactccaaaactgaaactgtggatggcagccatgaaggaagatcccacagtctcagccctgcttactagtgagaaagactggcaaggtttcctagagctctacttacagaacagccctgaggcctgtgactatgggctctgaagggggcaggagtcagcaataaagctatgtctgatattttccttcactaa

SEQ ID NO: 319533 - DNA, 1853 bp, Homo sapiens
agttatgcattcgtctagtgcttggtgaatctgcatttttacaagattaaatatagggtagaggaagcggtcaaattgcatttttctccagcgagaggaaggatgactcctagacctgtctttgtcccatacttgggaagataagctgttagtttacattgccaagatgaaattcaactgatctgttttagagtaaagatcttgcgggccaacaaggaatttccttggggaggtgtgtggcctttgatctttgtagctatttagcaacaaaatgggaggcagtgttgcctgactcagtttccaagcttgactcttccctttggcatagtgagtttggagtcaagagatttttattttcccttcacaagctgaacaggagcctttggagagaacgctctggaccggtgagtgagccatgaggtcgggccacaggctctgaagtcgtgaagccttgggacggagcgggtggtgcttcgaggtcagtgtcacgggagggaggtcagggtcagggtcagacgtggagccccgtggagtgcggagtggtgaccccttcgttcgggggcggagggatgactgagcatttataacttttgtgtatctccccgtgggtgcagcccttggccagcgagatgctttgacacagccccttaagatgttttaagggctatcccataaagccgggaaggcacaacgggtggagctggcggccgccgggggcaggcacttttgagctaaggaggaagcgggggagggaaggagggcgggaaggacgcgccacctacttcctgaatcccctgcaaaccccagaggagctcggcctgcgctgcgccacgatgtccggggagtcagccaggagcttggggaagggaagcgcgcccccggggccggtcccggagggctcgatccgcatctacagcatgaggttctgcccgtttgctgagaggacgcgtctagtcctgaaggccaagggaatcaggcatgaagtcatcaatatcaacctgaaaaataagcctgagtggttctttaagaaaaatccctttggtctggtgccagttctggaaaacagtcagggtcagctgatctacgagtctgccatcacctgtgagtacctggatgaagcatacccagggaagaagctgttgccggatgacccctatgagaaagcttgccagaagatgatcttagagttgttttctaaggtgccatccttggtaggaagctttattagaagccaaaataaagaagactatgctggcctaaaagaagaatttcgtaaagaatttaccaagctagaggaggttctgactaataagaagacgaccttctttggtggcaattctatctctatgattgattacctcatctggccctggtttgaacggctggaagcaatgaagttaaatgagtgtgtagaccacactccaaaactgaaactgtggatggcagccatgaaggaagatcccacagtctcagccctgcttactagtgagaaagactggcaaggtttcctagagctctacttacagaacagccctgaggcctgtgactatgggctctgaagggggcaggagtcagcaataaagctatgtctgatattttccttcactaaaaaacacacaaaaaaaaaaccgggggcataaacggggcggaacaaggtacaaacgggccagtgcaatgaggtaccggacccagtttgggacacggggaacacgcgggcccaaaggagggaaaaataagagcgtcgagagaagacaaacaagtacaaccacacacacacacaacacacaacgacaaccaacagcaaagcaagaggaagagcacaaacaaaacacatacaaagaagacagcaataa

SEQ ID NO: 319534 - DNA, 1852 bp, Homo sapiens
  misc_feature (1628)..(1628): n is a, c, g, or t
agttatgcattcgtctagtgcttggtgaatctgcatttttacaagattaaatatagggtagaggaagcggtcaaattgcatttttctccagcgagaggaaggatgactcctagacctgtctttgtcccatacttgggaagataagctgttagtttacattgccaagatgaaattcaactgatctgttttagagtaaagatcttgcgggccaacaaggaatttccttggggaggtgtgtggcctttgatctttgtagctatttagcaacaaaatgggaggcagtgttgcctgactcagtttccaagcttgactcttccctttggcatagtgagtttggagtcaagagatttttattttcccttcacaagctgaacaggagcctttggagagaacgctctggaccggtgagtgagccatgaggtcgggccacaggctctgaagtcgtgaagccttgggacggagcgggtggtgcttcgaggtcagtgtcacgggagggaggtcagggtcagggtcagacgtggagccccgtggagtgcggagtggtgaccccttcgttcgggggcggagggatgactgagcatttataacttttgtgtatctccccgtgggtgcagcccttggccagcgagatgctttgacacagccccttaagatgttttaagggctatcccataaagccgggaaggcacaacgggtggagctggcggccgccgggggcaggcacttttgagctaaggaggaagcgggggagggaaggagggcgggaaggacgcgccacctacttcctgaatcccctgcaaaccccagaggagctcggcctgcgctgcgccacgatgtccggggagtcagccaggagcttggggaagggaagcgcgcccccggggccggtcccggagggctcgatccgcatctacagcatgaggttctgcccgtttgctgagaggacgcgtctagtcctgaaggccaagggaatcaggcatgaagtcatcaatatcaacctgaaaaataagcctgagtggttctttaagaaaaatccctttggtctggtgccagttctggaaaacagtcagggtcagctgatctacgagtctgccatcacctgtgagtacctggatgaagcatacccagggaagaagctgttgccggatgacccctatgagaaagcttgccagaagatgatcttagagttgttttctaaggtgccatccttggtaggaagctttattagaagccaaaataaagaagactatgctggcctaaaagaagaatttcgtaaagaatttaccaagctagaggaggttctgactaataagaagacgaccttctttggtggcaattctatctctatgattgattacctcatctggccctggtttgaacggctggaagcaatgaagttaaatgagtgtgtagaccacactccaaaactgaaactgtggatggcagccatgaaggaagatcccacagtctcagccctgcttactagtgagaaagactggcaaggtttcctagagctctacttacagaacagccctgaggcctgtgactatgggctctgaagggggcaggagtcagcaataaagctatgtctgatattttccttcactaaaaaaaaaaaaaaaaaaatnaaaaaaaaaaaggggggacacatagtgcggggggcggggaaaaagaggggatcagagaacgggcgccaagggggcacaaagcgggttcctgggaaccaaagttttctctgtggtccaaacaaggggggaacaattcgcgcaggggaacccacacaaaaagggagggccggaaataaatcgcaaaataagcccagggaaacccggggataagaaggcggcacaaa

SEQ ID NO: 319535 - DNA, 1636 bp, Homo sapiens
agttatgcattcgtctagtgcttggtgaatctgcatttttacaagattaaatatagggtagaggaagcggtcaaattgcatttttctccagcgagaggaaggatgactcctagacctgtctttgtcccatacttgggaagataagctgttagtttacattgccaagatgaaattcaactgatctgttttagagtaaagatcttgcgggccaacaaggaatttccttggggaggtgtgtggcctttgatctttgtagctatttagcaacaaaatgggaggcagtgttgcctgactcagtttccaagcttgactcttccctttggcatagtgagtttggagtcaagagatttttattttcccttcacaagctgaacaggagcctttggagagaacgctctggaccggtgagtgagccatgaggtcgggccacaggctctgaagtcgtgaagccttgggacggagcgggtggtgcttcgaggtcagtgtcacgggagggaggtcagggtcagggtcagacgtggagccccgtggagtgcggagtggtgaccccttcgttcgggggcggagggatgactgagcatttataacttttgtgtatctccccgtgggtgcagcccttggccagcgagatgctttgacacagccccttaagatgttttaagggctatcccataaagccgggaaggcacaacgggtggagctggcggccgccgggggcaggcacttttgagctaaggaggaagcgggggagggaaggagggcgggaaggacgcgccacctacttcctgaatcccctgcaaaccccagaggagctcggcctgcgctgcgccacgatgtccggggagtcagccaggagcttggggaagggaagcgcgcccccggggccggtcccggagggctcgatccgcatctacagcatgaggttctgcccgtttgctgagaggacgcgtctagtcctgaaggccaagggaatcaggcatgaagtcatcaatatcaacctgaaaaataagcctgagtggttctttaagaaaaatccctttggtctggtgccagttctggaaaacagtcagggtcagctgatctacgagtctgccatcacctgtgagtacctggatgaagcatacccagggaagaagctgttgccggatgacccctatgagaaagcttgccagaagatgatcttagagttgttttctaaggtgccatccttggtaggaagctttattagaagccaaaataaagaagactatgctggcctaaaagaagaatttcgtaaagaatttaccaagctagaggaggttctgactaataagaagacgaccttctttggtggcaattctatctctatgattgattacctcatctggccctggtttgaacggctggaagcaatgaagttaaatgagtgtgtagaccacactccaaaactgaaactgtggatggcagccatgaaggaagatcccacagtctcagccctgcttactagtgagaaagactggcaaggtttcctagagctctacttacagaacagccctgaggcctgtgactatgggctctgaagggggcaggagtcagcaataaagctatgtctgatattttccttcactaaatatgaataatagcatgcttttatttt

SEQ ID NO: 319536 - DNA, 1960 bp, Homo sapiens
agttatgcattcgtctagtgcttggtgaatctgcatttttacaagattaaatatagggtagaggaagcggtcaaattgcatttttctccagcgagaggaaggatgactcctagacctgtctttgtcccatacttgggaagataagctgttagtttacattgccaagatgaaattcaactgatctgttttagagtaaagatcttgcgggccaacaaggaatttccttggggaggtgtgtggcctttgatctttgtagctatttagcaacaaaatgggaggcagtgttgcctgactcagtttccaagcttgactcttccctttggcatagtgagtttggagtcaagagatttttattttcccttcacaagctgaacaggagcctttggagagaacgctctggaccggtgagtgagccatgaggtcgggccacaggctctgaagtcgtgaagccttgggacggagcgggtggtgcttcgaggtcagtgtcacgggagggaggtcagggtcagggtcagacgtggagccccgtggagtgcggagtggtgaccccttcgttcgggggcggagggatgactgagcatttataacttttgtgtatctccccgtgggtgcagcccttggccagcgagatgctttgacacagccccttaagatgttttaagggctatcccataaagccgggaaggcacaacgggtggagctggcggccgccgggggcaggcacttttgagctaaggaggaagcgggggagggaaggagggcgggaaggacgcgccacctacttcctgaatcccctgcaaaccccagaggagctcggcctgcgctgcgccacgatgtccggggagtcagccaggagcttggggaagggtgaggcctgcccgccgcgaagagggggtgatctcggcgacccccggcatgttcgaggctgctccgggagcccagccgcccgggagcgccccaccggcggggaacgggaagcgcgcccccggggccggtcccggagggctcgatccgcatctacagcatgaggttctgcccgtttgctgagaggacgcgtctagtcctgaaggccaagggaatcaggcatgaagtcatcaatatcaacctgaaaaataagcctgagtggttctttaagaaaaatccctttggtctggtgccagttctggaaaacagtcagggtcagctgatctacgagtctgccatcacctgtgagtacctggatgaagcatacccagggaagaagctgttgccggatgacccctatgagaaagcttgccagaagatgatcttagagttgttttctaaggtgccatccttggtaggaagctttattagaagccaaaataaagaagactatgctggcctaaaagaagaatttcgtaaagaatttaccaagctagaggaggttctgactaataagaagacgaccttctttggtggcaattctatctctatgattgattacctcatctggccctggtttgaacggctggaagcaatgaagttaaatgagtgtgtagaccacactccaaaactgaaactgtggatggcagccatgaaggaagatcccacagtctcagccctgcttactagtgagaaagactggcaaggtttcctagagctctacttacagaacagccctgaggcctgtgactatgggctctgaagggggcaggagtcagcaataaagctatgtctgatattttccttcactaaaaaacacacaaaaaaaaaaccgggggcataaacggggcggaacaaggtacaaacgggccagtgcaatgaggtaccggacccagtttgggacacggggaacacgcgggcccaaaggagggaaaaataagagcgtcgagagaagacaaacaagtacaaccacacacacacacaacacacaacgacaaccaacagcaaagcaagaggaagagcacaaacaaaacacatacaaagaagacagcaataa

SEQ ID NO: 319537 - DNA, 1563 bp, Homo sapiens
agttatgcattcgtctagtgcttggtgaatctgcatttttacaagattaaatatagggtagaggaagcggtcaaattgcatttttctccagcgagaggaaggatgactcctagacctgtctttgtcccatacttgggaagataagctgttagtttacattgccaagatgaaattcaactgatctgttttagagtaaagatcttgcgggccaacaaggaatttccttggggaggtgtgtggcctttgatctttgtagctatttagcaacaaaatgggaggcagtgttgcctgactcagtttccaagcttgactcttccctttggcatagtgagtttggagtcaagagatttttattttcccttcacaagctgaacaggagcctttggagagaacgctctggaccggtgagtgagccatgaggtcgggccacaggctctgaagtcgtgaagccttgggacggagcgggtggtgcttcgaggtcagtgtcacgggagggaggtcagggtcagggtcagacgtggagccccgtggagtgcggagtggtgaccccttcgttcgggggcggagggatgactgagcatttataacttttgtgtatctccccgtgggtgcagcccttggccagcgagatgctttgacacagccccttaagatgttttaagggctatcccataaagccgggaaggcacaacgggtggagctggcggccgccgggggcaggcacttttgagctaaggaggaagcgggggagggaaggagggcgggaaggacgcgccacctacttcctgaatcccctgcaaaccccagaggagctcggcctgcgctgcgccacgatgtccggggagtcagccaggagcttggggaagggaagcgcgcccccggggccggtcccggagggctcgatccgcatctacagcatgaggttctgcccgtttgctgagaggacgcgtctagtcctgaaggccaagggaatcaggcatgaagtcatcaatatcaacctgaaaaataagcctgagtggttctttaagaaaaatccctttggtctggtgccagttctggaaaacagtcagggtcagctgatctacgagtctgccatcacctgtgagtacctggatgaagcatacccagggaagaagctgttgccggatgacccctatgagaaagcttgccagaagatgatcttagagttgttttctaaggtgccatccttggtaggaagctttattagaagccaaaataaagaagactatgcgttctgactaataagaagacgaccttctttggtggcaattctatctctatgattgattacctcatctggccctggtttgaacggctggaagcaatgaagttaaatgagtgtgtagaccacactccaaaactgaaactgtggatggcagccatgaaggaagatcccacagtctcagccctgcttactagtgagaaagactggcaaggtttcctagagctctacttacagaacagccctgaggcctgtgactatgggctctgaagggggcaggagtcagcaataaagctatgtctgatattttccttcactaa

SEQ ID NO: 319538 - DNA, 2122 bp, Homo sapiens
agttatgcattcgtctagtgcttggtgaatctgcatttttacaagattaaatatagggtagaggaagcggtcaaattgcatttttctccagcgagaggaaggatgactcctagacctgtctttgtcccatacttgggaagataagctgttagtttacattgccaagatgaaattcaactgatctgttttagagtaaagatcttgcgggccaacaaggaatttccttggggaggtgtgtggcctttgatctttgtagctatttagcaacaaaatgggaggcagtgttgcctgactcagtttccaagcttgactcttccctttggcatagtgagtttggagtcaagagatttttattttcccttcacaagctgaacaggagcctttggagagaacgctctggaccggtgagtgagccatgaggtcgggccacaggctctgaagtcgtgaagccttgggacggagcgggtggtgcttcgaggtcagtgtcacgggagggaggtcagggtcagggtcagacgtggagccccgtggagtgcggagtggtgaccccttcgttcgggggcggagggatgactgagcatttataacttttgtgtatctccccgtgggtgcagcccttggccagcgagatgctttgacacagccccttaagatgttttaagggctatcccataaagccgggaaggcacaacgggtggagctggcggccgccgggggcaggcacttttgagctaaggaggaagcgggggagggaaggagggcgggaaggacgcgccacctacttcctgaatcccctgcaaaccccagaggagctcggcctgcgctgcgccacgatgtccggggagtcagccaggagcttggggaagggaagcgcgcccccggggccggtcccggagggctcgatccgcatctacagcatgaggttctgcccgtttgctgagaggacgcgtctagtcctgaaggccaagggaatcaggcatgaagtcatcaatatcaacctgaaaaataagcctgagtggttctttaagaaaaatccctttggtctggtgccagttctggaaaacagtcagggtcagctgatctacgagtctgccatcacctgtgagtacctggatgaagcatacccagggaagaagctgttgccggatgacccctatgagaaagcttgccagaagatgatcttagagttgttttctaaggtgccatccttggtaggaagctttattagaagccaaaataaagaagactatgctggcctaaaagaagaatttcgtaaagaatttaccaagctagaggagaccaacagattctaaagcttaattaagctttttgatcagaaaaaaacccaacttggatacatcggagtaaaaactgcttctctcacctgctctacttatttcccttcagcatttctagtgagtcttactacatgcacaagtaagaaatacttttatgctgtttaatgttcagggttctgactaataagaagacgaccttctttggtggcaattctatctctatgattgattacctcatctggccctggtttgaacggctggaagcaatgaagttaaatgagagtaagatatttgaatattttgtgcataatttaggatgacaggtggaatagtatatattgacctttctttataacagaagttgaaatatttaatacaactggtctgaatgagaacaagcagacaggggaatcttggactatcccaggcatgtcatatacctacactaactactctccatcactgcaatggggcaggggatttctgagacatgtagtaaagtgctttaaaatttattccttccttcctgattaaaaacccataaggggaaggatatggtagcttacgcctgtaagcccagcacttcgggaggccgagacgggtggatcatctgaggtcaggagttagagaccagcctggccaatgtggtgaaaccccatctctactaaaaatacaaaaattagctgggcatggtggtacacacctgtaatctcagctactcgggaggctgaggcaggagaatcacttgaacccgggaggcagttgcagtgagctgagatcatgtcactgaactccagcctgggcaagagcaagacacttcatca

SEQ ID NO: 319539 - DNA, 483 bp, Homo sapiens
ctcttggagaaaagcattctaggcaaagcaatagcaagtacaaatattctcaagagattcacagggcttgctcagggggcagaagcaggaagcaagggtcttgggaggggcagaagcaggaagcagtggcctaaaagaagaatttcgtaaagaatttaccaagctagaggaggttctgactaataagaagacgaccttctttggtggcaattctatctctatgattgattacctcatctggccctggtttgaacggctggaagcaatgaagttaaatgagtgtgtagaccacactccaaaactgaaactgtggatggcagccatgaaggaagatcccacagtctcagccctgcttactagtgagaaagactggcaaggtttcctagagctctacttacagaacagccctgaggcctgtgactatgggctctgaagggggcaggagtcagcaataaagctatgtctgatattttccttcactaa

SEQ ID NO: 319540 - DNA, 1753 bp, Homo sapiens
  misc_feature (1529)..(1529): n is a, c, g, or t
agttatgcattcgtctagtgcttggtgaatctgcatttttacaagattaaatatagggtagaggaagcggtcaaattgcatttttctccagcgagaggaaggatgactcctagacctgtctttgtcccatacttgggaagataagctgttagtttacattgccaagatgaaattcaactgatctgttttagagtaaagatcttgcgggccaacaaggaatttccttggggaggtgtgtggcctttgatctttgtagctatttagcaacaaaatgggaggcagtgttgcctgactcagtttccaagcttgactcttccctttggcatagtgagtttggagtcaagagatttttattttcccttcacaagctgaacaggagcctttggagagaacgctctggaccggtgagtgagccatgaggtcgggccacaggctctgaagtcgtgaagccttgggacggagcgggtggtgcttcgaggtcagtgtcacgggagggaggtcagggtcagggtcagacgtggagccccgtggagtgcggagtggtgaccccttcgttcgggggcggagggatgactgagcatttataacttttgtgtatctccccgtgggtgcagcccttggccagcgagatgctttgacacagccccttaagatgttttaagggctatcccataaagccgggaaggcacaacgggtggagctggcggccgccgggggcaggcacttttgagctaaggaggaagcgggggagggaaggagggcgggaaggacgcgccacctacttcctgaatcccctgcaaaccccagaggagctcggcctgcgctgcgccacgatgtccggggagtcagccaggagcttggggaagggaagcgcgcccccggggccggtcccggagggctcgatccgcatctacagcatgaggttctgcccgtttgctgagaggacgcgtctagtcctgaaggccaagggaatcaggcatgaagtcatcaatatcaacctgaaaaataagcctgagtggttctttaagaaaaatccctttggtctggtgccagttctggaaaacagtcagggtcagctgatctacgagtctgccatcacctgtgagtacctggatgaagcatacccagggaagaagctgttgccggatgacccctatgagaaagcttgccagaagatgatcttagagttgttttctaaggttctgactaataagaagacgaccttctttggtggcaattctatctctatgattgattacctcatctggccctggtttgaacggctggaagcaatgaagttaaatgagtgtgtagaccacactccaaaactgaaactgtggatggcagccatgaaggaagatcccacagtctcagccctgcttactagtgagaaagactggcaaggtttcctagagctctacttacagaacagccctgaggcctgtgactatgggctctgaagggggcaggagtcagcaataaagctatgtctgatattttccttcactaaaaaaaaaaaaaaaaaaatnaaaaaaaaaaaggggggacacatagtgcggggggcggggaaaaagaggggatcagagaacgggcgccaagggggcacaaagcgggttcctgggaaccaaagttttctctgtggtccaaacaaggggggaacaattcgcgcaggggaacccacacaaaaagggagggccggaaataaatcgcaaaataagcccagggaaacccggggataagaaggcggcacaaa

SEQ ID NO: 319541 - DNA, 566 bp, Homo sapiens
ttttttaggtagtgggtggtgagcttaaccctggaaaatgaatccctctatctctaaagaaaatctctgtgaaacccctacgtggaggcggaattgctctcccagcccttgcattgcagaggggtgggaaagattactttttctttatgtgtttgacgggaaacaaaactaggtaaaatctacagtacaccacaagggtcacaatactgttgtgcgcacatcgcggtagggcgtggaaaggggcagacctgactctcttaaggaggctgagagcccaaactgctgtcccaaacatgcacttccttgcttaaggtatggtacaagcaatgcctgcccattggagagaaaaaacttaagtagataaggaaataagaaccactcataattcttcaccttaggaataatctcctgttaatatggtgtacattcttcctgattattttctacacatacatgtaaaatatgtctttcttttttaaatagggttgtactatgctgttatgagtggctttaatgaataaacatttgtagcatcctctttaatgggtaaacagcaaaaaaaacga

SEQ ID NO: 319542 - DNA, 2207 bp, Homo sapiens
cgaaaaggagggtgactctcctcggcgggggcttcgggtgacatcacatcctccaaatgcgaaatcaggctccgggccggccgaagggcgcaactttcccccctcggcgccccaccggctcccgcgcgcctcccctcgcgcccgagcttcgagccaagcagcgtcctggggagcgcgtcatggccttaccagtgaccgccttgctcctgccgctggccttgctgctccacgccgccaggccgagccagttccgggtgtcgccgctggatcggacctggaacctgggcgagacagtggagctgaagtgccaggtgctgctgtccaacccgacgtcgggctgctcgtggctcttccagccgcgcggcgccgccgccagtcccaccttcctcctatacctctcccaaaacaagcccaaggcggccgaggggctggacacccagcggttctcgggcaagaggttgggggacaccttcgtcctcaccctgagcgacttccgccgagagaacgagggctactatttctgctcggccctgagcaactccatcatgtacttcagccacttcgtgccggtcttcctgccagcgaagcccaccacgacgccagcgccgcgaccaccaacaccggcgcccaccatcgcgtcgcagcccctgtccctgcgcccagaggcgtgccggccagcggcggggggcgcagtgcacacgagggggctggacttcgcctgtgatatctacatctgggcgcccttggccgggacttgtggggtccttctcctgtcactggttatcaccctttactgcaaccacaggaaccgaagacgtgtttgcaaatgtccccggcctgtggtcaaatcgggagacaagcccagcctttcggcgagatacgtctaaccctgtgcaacagccactacattacttcaaactgagatccttccttttgagggagcaagtccttccctttcattttttccagtcttcctccctgtgtattcattctcatgattattattttagtgggggcggggtgggaaagattactttttctttatgtgtttgacgggaaacaaaactaggtaaaatctacagtacaccacaagggtcacaatactgttgtgcgcacatcgcggtagggcgtggaaaggggcaggccagagctacccgcagagttctcagaatcatgctgagagagctggaggcacccatgccatctcaacctcttccccgcccgttttacaaagggggaggctaaagcccagagacagcttgatcaaaggcacacagcaagtcagggttggagcagtagctggagggaccttgtctcccagctcagggctctttcctccacaccattcaggtctttctttccgaggcccctgtctcagggtgaggtgcttgagtctccaacggcaagggaacaagtacttcttgatacctgggatactgtgcccagagcctcgaggaggtaatgaattaaagaagagaactgcctttggcagagttctataatgtaaacaatatcagactttttttttttataatcaagcctaaaattgtatagacctaaaataaaatgaagtggtgagcttaaccctggaaaatgaatccctctatctctaaagaaaatctctgtgaaacccctatgtggaggcggaattgctctcccagcccttgcattgcagaggggcccatgaaagaggacaggctacccctttacaaatagaatttgagcatcagtgaggttaaactaaggccctcttgaatctctgaatttgagatacaaacatgttcctgggatcactgatgactttttatactttgtaaagacaattgttggagagcccctcacacagccctggcctctgctcaactagcagatacagggatgaggcagacctgactctcttaaggaggctgagagcccaaactgctgtcccaaacatgcacttccttgcttaaggtatggtacaagcaatgcctgcccattggagagaaaaaacttaagtagataaggaaataagaaccactcataattcttcaccttaggaataatctcctgttaatatggtgtacattcttcctgattattttctacacatacatgtaaaatatgtctttcttttttaaatagggttgtactatgctgttatgagtggctttaatgaataaacatttgtagcatcctctttaatgggtaaacagcaaaaaaaacga

SEQ ID NO: 319543 - DNA, 2096 bp, Homo sapiens
cgaaaaggagggtgactctcctcggcgggggcttcgggtgacatcacatcctccaaatgcgaaatcaggctccgggccggccgaagggcgcaactttcccccctcggcgccccaccggctcccgcgcgcctcccctcgcgcccgagcttcgagccaagcagcgtcctggggagcgcgtcatggccttaccagtgaccgccttgctcctgccgctggccttgctgctccacgccgccaggccgagccagttccgggtgtcgccgctggatcggacctggaacctgggcgagacagtggagctgaagtgccaggtgctgctgtccaacccgacgtcgggctgctcgtggctcttccagccgcgcggcgccgccgccagtcccaccttcctcctatacctctcccaaaacaagcccaaggcggccgaggggctggacacccagcggttctcgggcaagaggttgggggacaccttcgtcctcaccctgagcgacttccgccgagagaacgagggctactatttctgctcggccctgagcaactccatcatgtacttcagccacttcgtgccggtcttcctgccagcgaagcccaccacgacgccagcgccgcgaccaccaacaccggcgcccaccatcgcgtcgcagcccctgtccctgcgcccagaggcgtgccggccagcggcggggggcgcagggaaccgaagacgtgtttgcaaatgtccccggcctgtggtcaaatcgggagacaagcccagcctttcggcgagatacgtctaaccctgtgcaacagccactacattacttcaaactgagatccttccttttgagggagcaagtccttccctttcattttttccagtcttcctccctgtgtattcattctcatgattattattttagtgggggcggggtgggaaagattactttttctttatgtgtttgacgggaaacaaaactaggtaaaatctacagtacaccacaagggtcacaatactgttgtgcgcacatcgcggtagggcgtggaaaggggcaggccagagctacccgcagagttctcagaatcatgctgagagagctggaggcacccatgccatctcaacctcttccccgcccgttttacaaagggggaggctaaagcccagagacagcttgatcaaaggcacacagcaagtcagggttggagcagtagctggagggaccttgtctcccagctcagggctctttcctccacaccattcaggtctttctttccgaggcccctgtctcagggtgaggtgcttgagtctccaacggcaagggaacaagtacttcttgatacctgggatactgtgcccagagcctcgaggaggtaatgaattaaagaagagaactgcctttggcagagttctataatgtaaacaatatcagactttttttttttataatcaagcctaaaattgtatagacctaaaataaaatgaagtggtgagcttaaccctggaaaatgaatccctctatctctaaagaaaatctctgtgaaacccctatgtggaggcggaattgctctcccagcccttgcattgcagaggggcccatgaaagaggacaggctacccctttacaaatagaatttgagcatcagtgaggttaaactaaggccctcttgaatctctgaatttgagatacaaacatgttcctgggatcactgatgactttttatactttgtaaagacaattgttggagagcccctcacacagccctggcctctgctcaactagcagatacagggatgaggcagacctgactctcttaaggaggctgagagcccaaactgctgtcccaaacatgcacttccttgcttaaggtatggtacaagcaatgcctgcccattggagagaaaaaacttaagtagataaggaaataagaaccactcataattcttcaccttaggaataatctcctgttaatatggtgtacattcttcctgattattttctacacatacatgtaaaatatgtctttcttttttaaatagggttgtactatgctgttatgagtggctttaatgaataaacatttgtagcatcctctttaatgggtaaacagcaaaaaaaacga

SEQ ID NO: 319544 - DNA, 1006 bp, Homo sapiens
cgaaaaggagggtgactctcctcggcgggggcttcgggtgacatcacatcctccaaatgcgaaatcaggctccgggccggccgaagggcgcaactttcccccctcggcgccccaccggctcccgcgcgcctcccctcgcgcccgagcttcgagccaagcagcgtcctggggagcgcgtcatggccttaccagtgaccgccttgctcctgccgctggccttgctgctccacgccgccaggccgagccagttccgggtgtcgccgctggatcggacctggaacctgggcgagacagtggagctgaagtgccaggtgctgctgtccaacccgacgtcgggctgctcgtggctcttccagccgcgcggcgccgccgccagtcccaccttcctcctatacctctcccaaaacaagcccaaggcggccgaggggctggacacccagcggttctcgggcaagaggttgggggacaccttcgtcctcaccctgagcgacttccgccgagagaacgagggctactatttctgctcggccctgagcaactccatcatgtacttcagccacttcgtgccggtcttcctgccagcgaagcccaccacgacgccagcgccgcgaccaccaacaccggcgcccaccatcgcgtcgcagcccctgtccctgcgcccagaggcgtgccggccagcggcggggggcgcagtgcacacgagggggctggacttcgcctgtgatatctacatctgggcgcccttggccgggacttgtggggtccttctcctgtcactggttatcaccctttactgcaaccacagaaccgaagacgtgtttgcaaatgtccccggcctgtggtcaaatcgggcagacaagcccaggcttacaggcgacaatacgatcttacccctgttgccaacaatccaactacaattacctccaaacctgcacgattcccttacctcttgcacggaacccaacttcattcccctattcaatataattccacgacctatccatcc

SEQ ID NO: 319545 - DNA, 1706 bp, Homo sapiens
ccctctgcggtgagacctgcagaacaggaattggtgccgggtcagcagccggcgatgaagccggacgaagcctgcaaaccccacccatacgccagcttcacatagctcctatccattgcacagcagcgtggggaagcaccgttctctaccctccaaacaaaagcatgaaccaggtgcagtggctcacgtctgtaatcccagcattttggaggccaaggtggatggatggattccttgagtccaggagttcaagaccagcctgggcaacatggtgaacccccatctctacaaaaatttagccagggaaccgaagacgtgtttgcaaatgtccccggcctgtggtcaaatcgggagacaagcccagcctttcggcgagatacgtctaaccctgtgcaacagccactacattacttcaaactgagatccttccttttgagggagcaagtccttccctttcattttttccagtcttcctccctgtgtattcattctcatgattattattttagtgggggcggggtgggaaagattactttttctttatgtgtttgacgggaaacaaaactaggtaaaatctacagtacaccacaagggtcacaatactgttgtgcgcacatcgcggtagggcgtggaaaggggcaggccagagctacccgcagagttctcagaatcatgctgagagagctggaggcacccatgccatctcaacctcttccccgcccgttttacaaagggggaggctaaagcccagagacagcttgatcaaaggcacacagcaagtcagggttggagcagtagctggagggaccttgtctcccagctcagggctctttcctccacaccattcaggtctttctttccgaggcccctgtctcagggtgaggtgcttgagtctccaacggcaagggaacaagtacttcttgatacctgggatactgtgcccagagcctcgaggaggtaatgaattaaagaagagaactgcctttggcagagttctataatgtaaacaatatcagactttttttttttataatcaagcctaaaattgtatagacctaaaataaaatgaagtggtgagcttaaccctggaaaatgaatccctctatctctaaagaaaatctctgtgaaacccctatgtggaggcggaattgctctcccagcccttgcattgcagaggggcccatgaaagaggacaggctacccctttacaaatagaatttgagcatcagtgaggttaaactaaggccctcttgaatctctgaatttgagatacaaacatgttcctgggatcactgatgactttttatactttgtaaagacaattgttggagagcccctcacacagccctggcctctgctcaactagcagatacagggatgaggcagacctgactctcttaaggaggctgagagcccaaactgctgtcccaaacatgcacttccttgcttaaggtatggtacaagcaatgcctgcccattggagagaaaaaacttaagtagataaggaaataagaaccactcataattcttcaccttaggaataatctcctgttaatatggtgtacattcttcctgattattttctacacatacatgtaaaatatgtctttcttttttaaatagggttgtactatgctgttatgagtggctttaatgaataaacatttgtagcatcctctttaatgggtaaacagcaaaaaaaacga

SEQ ID NO: 319546 - DNA, 843 bp, Homo sapiens
cgaaaaggagggtgactctcctcggcgggggcttcgggtgacatcacatcctccaaatgcgaaatcaggctccgggccggccgaagggcgcaactttcccccctcggcgccccaccggctcccgcgcgcctcccctcgcgcccgagcttcgagccaagcagcgtcctggggagcgcgtcatggccttaccagtgaccgccttgctcctgccgctggccttgctgctccacgccgccaggccgagccagttccgggtgtcgccgctggatcggacctggaacctgggcgagacagtggagctgaagtgccaggtgctgctgtccaacccgacgtcgggctgctcgtggctcttccagccgcgcggcgccgccgccagtcccaccttcctcctatacctctcccaaaacaagcccaaggcggccgaggggctggacacccagcggttctcgggcaagaggttgggggacaccttcgtcctcaccctgagcgacttccgccgagagaacgagggctactatttctgctcggccctgagcaactccatcatgtacttcagccacttcgtgccggtcttcctgccagcgaagcccaccacgacgccagcgccgcgaccaccaacaccggcgcccaccatcgcgtcgcagcccctgtccctgcgcccagaggcgtgccggccagcggcggggggcgcagtgcacacgagggggctggacttcgcctgtgatatctacatctgggcgcccttggccgggacttgtggggtccttctcctgtcactggttatcaccctttactgcaaccacagtaagtcccgaggaatcgcggcgggaaggagtcggcccc

SEQ ID NO: 319547 - DNA, 2202 bp, Homo sapiens
ctagtctttcagccttcaggctgtttttggcttgaagctctcttggcctcctagtttctacctaatcatgtccctggtggaggccatcagcctctggaatgaaggggtgctggcagcggacaagaaggactggaagggagccctggatgccttcagtgccgtccaggacccccactcccggatttgcttcaacattggctgcatgtacactatcctgaagaacatgactgaagcagagaaggcctttaccagaagcattaaccgagacaagcacttggcagtggcttacttccaacgagggatgctctactaccagacagagaaatatgatttggctatcaaagaccttaaagaagccttgattcagcttcgagggaaccagctgatagactataagatcctggggctccagttcaagctgtttgcctgtgaggtgttatataacattgctttcatgtatgccaagaaggaggaatggaaaaaagctgaagaacagttagcattggccacgagcatgaagtctgagcccagacattccaaaatcgacaaggcgatggagtgtgtctggaagcagaagctatatgagccagtggtgatccctgtgggcaggctgtttcgaccaaatgagagacaagtggctcagctggccaagaaggattacctaggcaaggcgacggtcgtggcatctgtggtggatcaagacagtttctctgggtttgcccctctgcaaccacaggcagctgagcctccacccagaccgaaaaccccagagatcttcagggctctggaaggggaggctcaccgtgtgctatttgggtttgtgcctgagacaaaagaagagctccaggtcatgccagggaacattgtctttgtcttgaagaagggcaatgataactgggccacggtcatgttcaacgggcagaaggggcttgttccctgcaactaccttgaaccagttgagctgcggatccaccctcagcagcagccccaggaggaaagctctccgcagtccgacatcccagctcctcctagttccaaagcccctggaagaccccagctgtcaccaggccagaaacaaaaagaagagcctaaggaagtgaagctcagtgttcccatgccctacacactcaaggtgcactacaagtacacggtagtcatgaagactcagcccgggctcccctacagccaggtccgggacatggtgtctaagaaactggagctccggctggaacacactaagctgagctatcggcctcgggacagcaatgagctggtgcccctttcagaagacagcatgaaggatgcctggggccaggtgaaaaactactgcctgactctgtggtgtgagaacacagtgggtgaccaaggctttccagatgaacccaaggaaagtgaaaaagctgatgctaataaccagacaacagaacctcagcttaagaaaggcagccaagtggaggcactcttcagttatgaggctacccaaccagaggacctggagtttcaggaaggggatataatcctggtgttatcaaaggtgaatgaagaatggctggaaggggagtgcaaagggaaggtgggcattttccccaaagtttttgttgaagactgcgcaactacagatttggaaagcactcggagagaagtctaggatgtttcacaaactacaaagctgaagaaaatgaagccctattacttgtttgtaagatttagcacccttctgctgtatactgtactgagacattacagtttggaagtgttaactatttattccctgttaaaatttaacctactagacaatgatgtgagtacccaggatgatttcctggggcacagtgggtgaggagatggggacaggtgaatggaggagttaggggagaggaaaagtggatggaagtgtctggaaagggcacgagagagtcttccaggtactgatcctgtttcttgctctgagtgctagctagccagctgtgttcacactgtaaacattcatcaagctgtacatttggtgcacttttctgtgtcataccacaataaaaaaaaacctatcatcttacaaaaacaagacacccaagtccaggcccaaggagtaagtacaaatattcctgtttctgaaccattactgtaattggctcttaaggcttgaagtaaccttataggttactcataaggcatatacaaataaacttgtttgttttctttttt

SEQ ID NO: 319548 - DNA, 2471 bp, Homo sapiens
ctccacccctactcgccctctctctctctgcttctttccttttctctctcatggtagggttatgagtcagttgccaaaaggtggggacatttcctgatgcatttgcaacactgagaagttatcttaagggaggctgggccccattctactcatctggcccagaaagtgaacaccttgggggccactaaggcagccctgctaggggagacgctccaacctgtcttctctctgtctcctggcagctctcttggcctcctagtttctacctaatcatgtccctggtggaggccatcagcctctggaatgaaggggtgctggcagcggacaagaaggactggaagggagccctggatgccttcagtgccgtccaggacccccactcccggatttgcttcaacattggctgcatgtacactatcctgaagaacatgactgaagcagagaaggcctttaccagaagcattaaccgagacaagcacttggcagtggcttacttccaacgagggatgctctactaccagacagagaaatatgatttggctatcaaagaccttaaagaagccttgattcagcttcgagggaaccagctgatagactataagatcctggggctccagttcaagctgtttgcctgtgaggtgttatataacattgctttcatgtatgccaagaaggaggaatggaaaaaagctgaagaacagttagcattggccacgagcatgaagtctgagcccagacattccaaaatcgacaaggcgatggagtgtgtctggaagcagaagctatatgagccagtggtgatccctgtgggcaggctgtttcgaccaaatgagagacaagtggctcagctggccaagaaggattacctaggcaaggcgacggtcgtggcatctgtggtggatcaagacagtttctctgggtttgcccctctgcaaccacaggcagctgagcctccacccagaccgaaaaccccagagatcttcagggctctggaaggggaggctcaccgtgtgctatttgggtttgtgcctgagacaaaagaagagctccaggtcatgccagggaacattgtctttgtcttgaagaagggcaatgataactgggccacggtcatgttcaacgggcagaaggggcttgttccctgcaactaccttgaaccagttgagctgcggatccaccctcagcagcagccccaggaggaaagctctccgcagtccgacatcccagctcctcctagttccaaagcccctggaagaccccagctgtcaccaggccagaaacaaaaagaagagcctaaggaagtgaagctcagtgttcccatgccctacacactcaaggtgcactacaagtacacggtagtcatgaagactcagcccgggctcccctacagccaggtccgggacatggtgtctaagaaactggagctccggctggaacacactaagctgagctatcggcctcgggacagcaatgagctggtgcccctttcagaagacagcatgaaggatgcctggggccaggtgaaaaactactgcctgactctgtggtgtgagaacacagtgggtgaccaaggctttccagatgaacccaaggaaagtgaaaaagctgatgctaataaccagacaacagaacctcagcttaagaaaggcagccaagtggaggcactcttcagttatgaggctacccaaccagaggacctggagtttcaggaaggggatataatcctggtgttatcaaaggtgaatgaagaatggctggaaggggagtgcaaagggaaggtgggcattttccccaaagtttttgttgaagactgcgcaactacagatttggaaagcactcggagagaagtctaggatgtttcacaaactacaaagctgaagaaaatgaagccctattacttgtttgtaagatttagcacccttctgctgtatactgtactgagacattacagtttggaagtgttaactatttattccctgttaaaatttaacctactagacaatgatgtgagtacccaggatgatttcctggggcacagtgggtgaggagatggggacaggtgaatggaggagttaggggagaggaaaagtggatggaagtgtctggaaagggcacgagagagtcttccaggtactgatcctgtttcttgctctgagtgctagctagccagctgtgttcacactgtaaacattcatcaagctgtacatttggtgcacttttctgtgtcataccacaataaaaaaaaacctatcatcttacaaaaacaagacacccaagtccaggcccaaggagtaagtacaaatattcctgtttctgaaccattactgtaattggctcttaaggcttgaagtaaccttataggttactcataaggcatatacaaataaacttgtttgttttcttttttttttttttttttttttattttttttatttttttttttttttttttttttatttattttatatct

SEQ ID NO: 319549 - DNA, 2177 bp, Homo sapiens
ctccacccctactcgccctctctctctctgcttctttccttttctctctcatggtagggttatgagtcagttgccaaaaggtggggacatttcctgatgcatttgcaacactgagaagttatcttaagggaggctgggccccattctactcatctggcccagaaagtgaacaccttgggggccactaaggcagccctgctaggggagacgctccaacctgtcttctctctgtctcctggcagctctcttggcctcctagtttctacctaatcatgtccctggtggaggccatcagcctctggaatgaaggggtgctggcagcggacaagaaggactggaagggagccctggatgccttcagtgccgtccaggacccccactcccggatttgcttcaacattggctgcatgtacactatcctgaagaacatgactgaagcagagaaggcctttaccagaagcattaaccgagacaagcacttggcagtggcttacttccaacgagggatgctctactaccagacagagaaatatgatttggctatcaaagaccttaaagaagccttgattcagcttcgagggaaccagctgatagactataagatcctggggctccagttcaagctgtttgcctgtgaggtgttatataacattgctttcatgtatgccaagaaggaggaatggaaaaaagctgaagaacagttagcattggccacgagcatgaagtctgagcccagacattccaaaatcgacaaggcgatggagtgtgtctggaagcagaagctatatgagccagtggtgatccctgtgggcaggctgtttcgaccaaatgagagacaagtggctcagctggccaagaaggattacctaggcaaggcgacggtcgtggcatctgtggtggatcaagacagtttctctgggtttgcccctctgcaaccacaggcagctgagcctccacccagaccgaaaaccccagagatcttcagggctctggaaggggaggctcaccgtgtgctatttgggtttgtgcctgagacaaaagaagagctccaggtcatgccagggaacattgtctttgtcttgaagaagggcaatgataactgggccacggtcatgttcaacgggcagaaggggcttgttccctgcaactaccttgaaccagttgagctgcggatccaccctcagcagcagccccaggaggaaagctctccgcagtccgacatcccagctcctcctagttccaaagcccctggaagaccccagctgtcaccaggccagaaacaaaaagaagagcctaaggaagtgaagctcagtgttcccatgccctacacactcaaggtgcactacaagtacacggtagtcatgaagactcagcccgggctcccctacagccaggtccgggacatggtgtctaagaaactggagctccggctggaacacactaagctgagctatcggcctcgggacagcaatgagctggtgcccctttcagaagacagcatgaaggatgcctggggccaggtgaaaaactactgcctgactctgtggtgtgagaacacagtgcaaagtttttgttgaagactgcgcaactacagatttggaaagcactcggagagaagtctaggatgtttcacaaactacaaagctgaagaaaatgaagccctattacttgtttgtaagatttagcacccttctgctgtatactgtactgagacattacagtttggaagtgttaactatttattccctgttaaaatttaacctactagacaatgatgtgagtacccaggatgatttcctggggcacagtgggtgaggagatggggacaggtgaatggaggagttaggggagaggaaaagtggatggaagtgtctggaaagggcacgagagagtcttccaggtactgatcctgtttcttgctctgagtgctagctagccagctgtgttcacactgtaaacattcatcaagctgtacatttggtgcacttttctgtgtcataccacaataaaaaaaaacctatcatcttacaaaaacaagacacccaagtccaggcccaaggagtaagtacaaatattcctgtttctgaaccattactgtaattggctcttaaggcttgaagtaaccttataggttactcataaggcatatacaaataaacttgtttgttttctttttt

SEQ ID NO: 319550 - DNA, 1345 bp, Homo sapiens
ctccctactttttccattcaggccagaaacaaaaagaagagcctaaggtaacatttttccctcatactgtttcaagtggtagaagatgggatagcttgggctatcaaccacagacatgtctgtctggattataggaagagccccaaagggagggtcgaaccagttgctaccttacagagtccatgagctagggaccttcttaatagcctcctccactatcatgcacacacttcctactacccaagctagtgggccagatcttactcagtaggaattcctgtccaagcaagggttgggctaaaggacctctgaaggccttttaggctactgtgaaaccagttacttactggcctctcccctgctgtattgggtaccccctgtgccaaatcacgaaactgcggtgatccaggatgttgagagaaagcctcagacactcaggagttccctttgtttcctccccactcaggaagtgaagctcagtgttcccatgccctacacactcaaggtgcactacaagtacacggtagtcatgaagactcagcccgggctcccctacagccaggtccgggacatggtgtctaagaaactggagctccggctggaacacactaagctgagctatcggcctcgggacagcaatgagctggtgcccctttcagaagacagcatgaaggatgcctggggccaggtgaaaaactactgcctgactctgtggtgtgagaacacagtgcaaagtttttgttgaagactgcgcaactacagatttggaaagcactcggagagaagtctaggatgtttcacaaactacaaagctgaagaaaatgaagccctattacttgtttgtaagatttagcacccttctgctgtatactgtactgagacattacagtttggaagtgttaactatttattccctgttaaaatttaacctactagacaatgatgtgagtacccaggatgatttcctggggcacagtgggtgaggagatggggacaggtgaatggaggagttaggggagaggaaaagtggatggaagtgtctggaaagggcacgagagagtcttccaggtactgatcctgtttcttgctctgagtgctagctagccagctgtgttcacactgtaaacattcatcaagctgtacatttggtgcacttttctgtgtcataccacaataaaaaaaaacctatcatcttacaaaaacaagacacccaagtccaggcccaaggagtaagtacaaatattcctgtttctgaaccattactgtaattggctcttaaggcttgaagtaaccttataggttactcataaggcatatacaaataaacttgtttgttttctttttt

SEQ ID NO: 319551 - DNA, 1727 bp, Homo sapiens
ctccacccctactcgccctctctctctctgcttctttccttttctctctcatggtagggttatgagtcagttgccaaaaggtggggacatttcctgatgcatttgcaacactgagaagttatcttaagggaggctgggccccattctactcatctggcccagaaagtgaacaccttgggggccactaaggcagccctgctaggggagacgctccaacctgtcttctctctgtctcctggcagctctcttggcctcctagtttctacctaatcatgtccctggtggaggccatcagcctctggaatgaaggggtgctggcagcggacaagaaggactggaagggagccctggatgccttcagtgccgtccaggacccccactcccggatttgcttcaacattggctgcatgtacactatcctgaagaacatgactgaagcagagaaggcctttaccagaagcattaaccgagacaagcacttggcagtggcttacttccaacgagggatgctctactaccagacagagaaatatgatttggctatcaaagaccttaaagaagccttgattcagcttcgagggaaccagctgatagactataagatcctggggctccagttcaagctgtttgcctgtgaggtgttatataacattgctttcatgtatgccaagaaggaggaatggaaaaaagctgaagaacagttagcattggccacgagcatgaagtctgagcccagacattccaaaatcgacaaggcgatggagtgtgtctggaagcagaagctatatgagccagtggtgatccctgtgggcaggctgtttcgaccaaatgagagacaagtggctcagctggccaagaaggattacctaggcaaggcgacggtcgtggcatctgtggtggatcaagacagtttctctgggtttgcccctctgcaaccacaggcagctgagcctccacccagaccgaaaaccccagagatcttcagggctctggaaggggaggctcaccgtgtgctatttgggtttgtgcctgagacaaaagaagagctccaggtcatgccagggaacattgtctttgtcttgaagaagggcaatgataactgggccacggtcatgttcaacgggcagaaggggcttgttccctgcaactaccttgaaccagttgagctgcggatccaccctcagcagcagccccaggaggaaagctctccgcagtccgacatcccagctcctcctagttccaaagcccctggaagaccccagctgtcaccaggccagaaacaaaaagaagagcctaaggaagtgaagctcagtgttcccatgccctacacactcaaggtgcactacaagtacacggtagtcatgaagactcagcccgggctcccctacagccaggtccgggacatggtgtctaagaaacaaaaagaagagcctaaggaagtgaagctcagtgttcccatgccctacacactcaaggtgctagctagccagctgtgttcacactgtaaacattcatcaagctgtacatttggtgcacttttctgtgtcataccacaataaaaaaaaacctatcatcttacaaaaacaagacacccaagtccaggcccaaggagtaagtacaaatattcctgtttctgaaccattactgtaattggctcttaaggcttgaagtaaccttataggttactcataaggcatatacaaataaacttgtttgttttctttttt

SEQ ID NO: 319552 - DNA, 897 bp, Homo sapiens
ctccacccctactcgccctctctctctctgcttctttccttttctctctcatggtagggttatgagtcagttgccaaaaggtggggacatttcctgatgcatttgcaacactgagaagttatcttaagggaggctgggccccattctactcatctggcccagaaagtgaacaccttgggggccactaaggcagccctgctaggggagacgctccaacctgtcttctctctgtctcctggcagctctcttggcctcctagtttctacctaatcatgtccctggtggaggccatcagcctctggaatgaaggggtgctggcagcggacaagaaggactggaagggagccctggatgccttcagtgccgtccaggacccccactcccggatttgcttcaacattggctgcatgtacactatcctgaagaacatgactgaagcagagaaggcctttaccagaagcattaaccgagacaagcacttggcagtggcttacttccaacgagggatgctctactaccagacagagaaatatgatttggctatcaaagaccttaaagaagccttgattcagcttcgagggaaccagctgatagactataagatcctggggctccagttcaagctgtttgcctgtgaggtgttatataacattgctttcatgtatgccaagaaggaggaatggaaaaaactgtacatttggtgcacttttctgtgtcataccacaataaaaaaaaacctatcatcttacaaaaacaagacacccaagtccaggcccaaggagtaagtacaaatattcctgtttctgaaccattactgtaattggctcttaaggcttgaagtaaccttataggttactcataaggcatatacaaataaacttgtttgttttctttttt

SEQ ID NO: 319553 - DNA, 351 bp, Homo sapiens
gttatacaaattgcacctcaattaaaaacatttcttttttaagagagaagaaagcaagcctgtgttagcaggggtggggtgaatgctcgtttcttcagttgctgaaatcctaatccagaggctcaggaatctaatccttagttactgtccacgtctgaaaccaggctcacgtaagaacaggtctagggcatgagcaaagagggagacccagaagaatggaaacagtgctggcagagcctcacaccctcctgtccttgattttaggtcgtggcatctgtggtggatcaagacagtttctctgggtttgcccctctgcaaccacaggtaaggcagtcctgaccttctccatgg

SEQ ID NO: 319554 - DNA, 685 bp, Homo sapiens
cttacagagtccatgagctagggaccttcttaatagcctcctccactatcatgcacacacttcctactacccaagctagtgggccagatcttactcagtaggaattcctgtccaagcaagggttgggctaaaggacctctgaaggccttttaggctactgtgaaaccagttacttactggcctctcccctgctgtattgggtaccccctgtgccaaatcacgaaactgcggtgatccaggatgttgagagaaagcctcagacactcaggagttccctttgtttcctccccactcaggaagtgaagctcagtgttcccatgccctacacactcaaggtgcactacaagtacacggtagtcatgaagactcagcccgggctcccctacagccaggtccgggacatggtgtctaagaaactggagctccggctggaacacactaagctgaggtgagctccatgcaggcagctgtgaggggtacagtgggaaccttgtgctggcctggaggagggaagaggaggatggtttttgtgatgatgttctttgactggattcttactcattatccccacccagctatcggcctcgggacagcaatgagctggtgcccctttcagaagacagcatgaaggatgcctggggccaggtgaaaaactactgcctgactctgtggtgtgagaacacag

SEQ ID NO: 319555 - DNA, 2407 bp, Homo sapiens
ctccacccctactcgccctctctctctctgcttctttccttttctctctcatggtagggttatgagtcagttgccaaaaggtggggacatttcctgatgcatttgcaacactgagaagttatcttaagggaggctgggccccattctactcatctggcccagaaagtgaacaccttgggggccactaaggcagccctgctaggggagacgctccaacctgtcttctctctgtctcctggcagctctcttggcctcctagtttctacctaatcatgtccctggtggaggccatcagcctctggaatgaaggggtgctggcagcggacaagaaggactggaagggagccctggatgccttcagtgccgtccaggacccccactcccggatttgcttcaacattggctgcatgtacactatcctgaagaacatgactgaagcagagaaggcctttaccagaagcattaaccgagacaagcacttggcagtggcttacttccaacgagggatgctctactaccagacagagaaatatgatttggctatcaaagaccttaaagaagccttgattcagcttcgagggaaccagctgatagactataagatcctggggctccagttcaagctgtttgcctgtgaggtgttatataacattgctttcatgtatgccaagaaggaggaatggaaaaaagctgaagaacagttagcattggccacgagcatgaagtctgagcccagacattccaaaatcgacaaggcgatggagtgtgtctggaagcagaagctatatgagccagtggtgatccctgtgggcaggctgtttcgaccaaatgagagacaagtggctcagctggccaagaaggattacctaggcaaggcgacggtcgtggcatctgtggtggatcaagacagtttctctgggtttgcccctctgcaaccacaggcagctgagcctccacccagaccgaaaaccccagagatcttcagggctctggaaggggaggctcaccgtgtgctatttgggtttgtgcctgagacaaaagaagagctccaggtcatgccagggaacattgtctttgtcttgaagaagggcaatgataactgggccacggtcatgttcaacgggcagaaggggcttgttccctgcaactaccttgaaccagttgagctgcggatccaccctcagcagcagccccaggaggaaagctctccgcagtccgacatcccagctcctcctagttccaaagcccctggaagaccccagctgtcaccaggccagaaacaaaaagaagagcctaaggaagtgaagctcagtgttcccatgccctacacactcaaggtgcactacaagtacacggtagtcatgaagactcagcccgggctcccctacagccaggtccgggacatggtgtctaagaaactggagctccggctggaacacactaagctgagctatcggcctcgggacagcaatgagctggtgcccctttcagaagacagcatgaaggatgcctggggccaggtgaaaaactactgcctgactctgtggtgtgagaacacagtgggtgaccaaggctttccagatgaacccaaggaaagtgaaaaagctgatgctaataaccagacaacagaacctcagcttaagaaaggcagccaagtggaggcactcttcagttatgaggctacccaaccagaggacctggagtttcaggaaggggatataatcctggtgttatcaaaggtgaatgaagaatggctggaaggggagtgcaaagggaaggtgggcattttccccaaagtttttgttgaagactgcgcaactacagatttggaaagcactcggagagaagtctaggatgtttcacaaactacaaagctgaagaaaatgaagccctattacttgtttgtaagatttagcacccttctgctgtatactgtactgagacattacagtttggaagtgttaactatttattccctgttaaaatttaacctactagacaatgatgtgagtacccaggatgatttcctggggcacagtgggtgaggagatggggacaggtgaatggaggagttaggggagaggaaaagtggatggaagtgtctggaaagggcacgagagagtcttccaggtactgatcctgtttcttgctctgagtgctagctagccagctgtgttcacactgtaaacattcatcaagctgtacatttggtgcacttttctgtgtcataccacaataaaaaaaaacctatcatcttacaaaaacaagacacccaagtccaggcccaaggagtaagtacaaatattcctgtttctgaaccattactgtaattggctcttaaggcttgaagtaaccttataggttactcataaggcatatacaaataaacttgtttgttttctttttt

SEQ ID NO: 319556 - DNA, 2221 bp, Homo sapiens
ctccacccctactcgccctctctctctctgcttctttccttttctctctcatggtagggttatgagtcagttgccaaaaggtggggacatttcctgatgcatttgcaacactgagaagttatcttaagggaggctgggccccattctactcatctggcccagaaagtgaacaccttgggggccactaaggcagccctgctaggggagacgctccaacctgtcttctctctgtctcctggcagctctcttggcctcctagtttctacctaatcatgtccctggtggaggccatcagcctctggaatgaaggggtgctggcagcggacaagaaggactggaagggagccctggatgccttcagtgccgtccaggacccccactcccggatttgcttcaacattggctgcatgtacactatcctgaagaacatgactgaagcagagaaggcctttaccagaagcattaaccgagacaagcacttggcagtggcttacttccaacgagggatgctctactaccagacagagaaatatgatttggctatcaaagaccttaaagaagccttgattcagcttcgagggaaccagctgatagactataagatcctggggctccagttcaagctgtttgcctgtgaggtgttatataacattgctttcatgtatgccaagaaggaggaatggaaaaaagctgaagaacagttagcattggccacgagcatgaagtctgagcccagacattccaaaatcgacaaggcgatggagtgtgtctggaagcagaagctatatgagccagtggtgatccctgtgggcaggctgtttcgaccaaatgagagacaagtggctcagctggccaagaaggattacctaggcaaggcgacggtcgtggcatctgtggtggatcaagacagtttctctgggtttgcccctctgcaaccacaggcagctgagcctccacccagaccgaaaaccccagagatcttcagggctctggaaggggaggctcaccgtgtgctatttgggtttgtgcctgagacaaaagaagagctccaggtcatgccagggaacattgtctttgtcttgaagaagggcaatgataactgggccacggtcatgttcaacgggcagaaggggcttgttccctgcaactaccttgaaccagttgagctgcggatccaccctcagcagcagccccaggaggaaagctctccgcagtccgacatcccagctcctcctagttccaaagcccctggaagaccccagctgtcaccaggccagaaacaaaaagaagagcctaaggaagtgaagctcagtgttcccatgccctacacactcaaggtgcactacaagtacacggtagtcatgaagactcagcccgggctcccctacagccaggtccgggacatggtgtctaagaaactggagctccggctggaacacactaagctgagctatcggcctcgggacagcaatgagctggtgcccctttcagaagacagcatgaaggatgcctggggccaggtgaaaaactactgcctgactctgtggtgtgagaacacagtgggtgaccaaggctttccagatgaacccaaggaaagtgaaaaagctgatgctaataaccagacaacagaacctcagcttaagaaaggcagccaagtggaggcactcttcagttatgaggctacccaaccagaggacctggagtttcaggaaggggatataatcctggtgttatcaaaggtgaatgaagaatggctggaaggggagtgcaaagggaaggtgggcattttcccgttaaaatttaacctactagacaatgatgtgagtacccaggatgatttcctggggcacagtgggtgaggagatggggacaggtgaatggaggagttaggggagaggaaaagtggatggaagtgtctggaaagggcacgagagagtcttccaggtactgatcctgtttcttgctctgagtgctagctagccagctgtgttcacactgtaaacattcatcaagctgtacatttggtgcacttttctgtgtcataccacaataaaaaaaaacctatcatcttacaaaaacaagacacccaagtccaggcccaaggagtaagtacaaatattcctgtttctgaaccattactgtaattggctcttaaggcttgaagtaaccttataggttactcataaggcatatacaaataaacttgtttgttttctttttt

SEQ ID NO: 319557 - DNA, 1091 bp, Homo sapiens
ctccacccctactcgccctctctctctctgcttctttccttttctctctcatggtagggttatgagtcagttgccaaaaggtggggacatttcctgatgcatttgcaacactgagaagttatcttaagggaggctgggccccattctactcatctggcccagaaagtgaacaccttgggggccactaaggcagccctgctaggggagacgctccaacctgtcttctctctgtctcctggcagctctcttggcctcctagtttctacctaatcatgtccctggtggaggccatcagcctctggaatgaaggggtgctggcagcggacaagaaggactggaagggagccctggatgccttcagtgccgtccaggacccccactcccggatttgcttcaacattggctgcatgtacactatcctgaagaacatgactgaagcagagaaggcctttaccagaagcattaaccgagacaagcacttggcagtggcttacttccaacgagggatgctctactaccagacagagaacaaagtttttgttgaagactgcgcaactacagatttggaaagcactcggagagaagtctaggatgtttcacaaactacaaagctgaagtgtactgagacattacagtttggaagtgttaactatttattccctgttaaaatttaacctactagacaatgatgtgagtacccaggatgatttcctggggcacagtgggtgaggagatggggacaggtgaatggaggagttaggggagaggaaaagtggatggaagtgtctggaaagggcacgagagagtcttccaggtactgatcctgtttcttgctctgagtgctagctagccagctgtgttcacactgtaaacattcatcaagctgtacatttggtgcacttttctgtgtcataccacaataaaaaaaaacctatcatcttacaaaaacaagacacccaagtccaggcccaaggagtaagtacaaatattcctgtttctgaaccattactgtaattggctcttaaggcttgaagtaaccttataggttactcataaggcatatacaaataaacttgtttgttttctttttt

SEQ ID NO: 319558 - DNA, 2689 bp, Homo sapiens
acgccccgggcatgcgcagcggctcgctcggaagctgcgacgccgagtttcactctggctgccttctcctgagagtcggagccacagccagagccctgcccaggccgagccggagctgcagcccgagcgcggtggtgccctcagccccgtcctcttgtcctcctcagcctcggtgccttggaatttgtgtcgctgagtcagcaagcctttcagatttgcccggtttttgttgtttgtggtttgtatcaagatgggaactcaaacaagtcattcctcctaaggagctggtgtcttcatccagaagggacagtttgtgccagctctccagagagaaaagatctgccggaggcgctgggcaatgaccccgggactccaggccagaggggtctgaagctgtttgggaaagcagcgggactccttgggaagatggccatggccccaagcccttccctggtgcaggtgtacaccagccccgcggctgtggccgtgtgggaatggcaggacgggctgggcacctggcacccctacagtgccaccgtctgcagcttcatcgagcagcagtttgtccagcagaagggccaacgttttgggcttgggagcctggcccacagcatccccttgggccaggcagacccctcgctggccccttacattattgacctccccagctggacccagttccgccaggacaccggcaccatgcgggctgtgcggagacacctgttcccccagcactcagcccctggccgaggtgtcgtctgggagtggctgagcgacgatggctcctggactgcctatgaagccagcgtctgtgactatctggagcagcaggtggccaggggcaaccagctcgtggacttggcccccctggggtacaactacactgtcaactacaccacccacacgcagaccaacaagacttccagcttctgccgcagcgtgcggcgccaagcagggccgccttacccggtgaccaccatcatcgctccgccgggccacacaggcgtcgcctgctcttgccaccagtgcctcagtggcagcagaactggccccgtgtcaggccgctaccgccactccatgaccaacctccctgcataccccgtcccccagcaccccccacacaggaccgcttctgtgtttgggacccaccaggcctttgcaccgtacaacaaaccctcactctccggggcccggtctgcgcccaggctgaacaccaccaacgcctggggcgcagctcctccttccctggggagccagcccctctaccgctccagcctctcccacctgggaccgcagcacctgcccccaggatcctccacctccggtgcagtcagtgcctccctccccagcggtccctcaagcagcccagggagcgtccctgccactgtgcccatgcagatgccaaagcccagcagagtccagcaggcgctcgcaggcatgacgagtgttctgatgtcagccattggactccctgtgtgtcttagccgcgcaccccagcccaccagccctcccgcctcccgtctggcttccaaaagtcacggctcagttaagagattgaggaaaatgtccgtgaaagaagcgaccccgaagccagagccagagccagagcaggtcataaaaaactacacggaagagctgaaagtgcccccagatgaggactgcatcatctgcatggagaagctgtccgcagcgtctggatacagcgatgtgactgacagcaaggcaatcgggtccctggctgtgggccacctcaccaagtgcagccatgccttccacctgctgtgcctcctggccatgtactgcaacggcaataaggatggaagtctgcagtgtccctcctgcaaaaccatctatggagagaagacggggacccagccccagggaaagatggaggtattacggttccagatgtcgctccccggccacgaggactgcgggaccatcctcatagtttacagcattccccatggcatccagggccctgagcaccccaatcccggaaagccgttcactgccagagggtttccccgccagtgctaccttccagacaacgcccagggccgcaaggtcctagagctcctgaaggtggcctggaagaggcggctcatcttcacagtgggcacgtccagcaccacgggtgagacggacaccgtggtatggaacgagatccaccacaagacagagatggaccgcaacattacgggccacggctatcccgaccccaactacctgcagaacgtgctggctgagctggctgcccagggggtgaccgaggactgcctggagcagcagtgacctcgcaccccagcacgcccgcctctggtggccaccccgctgccccatggctggctgggtggccaggcaggaagtgcccagcccgagaggctgggaggtttgttgagggtgtggggtgtgccccacctgaagccggggctccccctgcctgcctctctctcctcctcccctctgggaattgggcagccctgggcagttgtactcatgggggcttaggatgcagctacctcagtgcgcagggcccgtctgtcctctgggggctgcttcgggcccgcggtgctcggggcctggtgtggggcgagtagagacttccccagcctggacgggcgtgggttctgggtcagcttcttttacctcaattttgtttgcaataaatgctctatagccaaagcca

SEQ ID NO: 319559 - DNA, 2524 bp, Homo sapiens
acgccccgggcatgcgcagcggctcgctcggaagctgcgacgccgagtttcactctggctgccttctcctgagagtcggagccacagccagagccctgcccaggccgagccggagctgcagcccgagcgcggtggtgccctcagccccgtcctcttgtcctcctcagcctcgatctgccggaggcgctgggcaatgaccccgggactccaggccagaggggtctgaagctgtttgggaaagcagcgggactccttgggaagatggccatggccccaagcccttccctggtgcaggtgtacaccagccccgcggctgtggccgtgtgggaatggcaggacgggctgggcacctggcacccctacagtgccaccgtctgcagcttcatcgagcagcagtttgtccagcagaagggccaacgttttgggcttgggagcctggcccacagcatccccttgggccaggcagacccctcgctggccccttacattattgacctccccagctggacccagttccgccaggacaccggcaccatgcgggctgtgcggagacacctgttcccccagcactcagcccctggccgaggtgtcgtctgggagtggctgagcgacgatggctcctggactgcctatgaagccagcgtctgtgactatctggagcagcaggtggccaggggcaaccagctcgtggacttggcccccctggggtacaactacactgtcaactacaccacccacacgcagaccaacaagacttccagcttctgccgcagcgtgcggcgccaagcagggccgccttacccggtgaccaccatcatcgctccgccgggccacacaggcgtcgcctgctcttgccaccagtgcctcagtggcagcagaactggccccgtgtcaggccgctaccgccactccatgaccaacctccctgcataccccgtcccccagcaccccccacacaggaccgcttctgtgtttgggacccaccaggcctttgcaccgtacaacaaaccctcactctccggggcccggtctgcgcccaggctgaacaccaccaacgcctggggcgcagctcctccttccctggggagccagcccctctaccgctccagcctctcccacctgggaccgcagcacctgcccccaggatcctccacctccggtgcagtcagtgcctccctccccagcggtccctcaagcagcccagggagcgtccctgccactgtgcccatgcagatgccaaagcccagcagagtccagcaggcgctcgcaggcatgacgagtgttctgatgtcagccattggactccctgtgtgtcttagccgcgcaccccagcccaccagccctcccgcctcccgtctggcttccaaaagtcacggctcagttaagagattgaggaaaatgtccgtgaaagaagcgaccccgaagccagagccagagccagagcaggtcataaaaaactacacggaagagctgaaagtgcccccagatgaggactgcatcatctgcatggagaagctgtccgcagcgtctggatacagcgatgtgactgacagcaaggcaatcgggtccctggctgtgggccacctcaccaagtgcagccatgccttccacctgctgtgcctcctggccatgtactgcaacggcaataaggatggaagtctgcagtgtccctcctgcaaaaccatctatggagagaagacggggacccagccccagggaaagatggaggtattacggttccagatgtcgctccccggccacgaggactgcgggaccatcctcatagtttacagcattccccatggcatccagggccctgagcaccccaatcccggaaagccgttcactgccagagggtttccccgccagtgctaccttccagacaacgcccagggccgcaaggtcctagagctcctgaaggtggcctggaagaggcggctcatcttcacagtgggcacgtccagcaccacgggtgagacggacaccgtggtatggaacgagatccaccacaagacagagatggaccgcaacattacgggccacggctatcccgaccccaactacctgcagaacgtgctggctgagctggctgcccagggggtgaccgaggactgcctggagcagcagtgacctcgcaccccagcacgcccgcctctggtggccaccccgctgccccatggctggctgggtggccaggcaggaagtgcccagcccgagaggctgggaggtttgttgagggtgtggggtgtgccccacctgaagccggggctccccctgcctgcctctctctcctcctcccctctgggaattgggcagccctgggcagttgtactcatgggggcttaggatgcagctacctcagtgcgcagggcccgtctgtcctctgggggctgcttcgggcccgcggtgctcggggcctggtgtggggcgagtagagacttccccagcctggacgggcgtgggttctgggtcagcttcttttacctcaattttgtttgcaataaatgctctatagccaaagcca

SEQ ID NO: 319560 - DNA, 487 bp, Homo sapiens
cttgggttgggagtggcagggccaggcgtgtgggtgtcaggagcccaggcacaaggccccagagtcccagaggagactcagacgggccctagccctttcggtctcctgtcttgagccaaggtggatcgtagggcctggggcagggtgggaagataacggggcagcaggcagcgggcactggctgccagccaaggtccacctgtggtggatggaggcatctttttgtcttgttgaaccatgagcctttcccctggtttccctccacttctccacagctcagagggaaattcaggaacattcggggttggcatctcggagcgggggaggagctggagctgtgcaggggcctgtccctgtgcgggctctcggagcaccctatcctggtgtggggcgagtagagacttccccagcctggacgggcgtgggttctgggtcagcttcttttacctcaattttgtttgcaataaatgctctatagccaaagcca

SEQ ID NO: 319561 - DNA, 2548 bp, Homo sapiens
acgccccgggcatgcgcagcggctcgctcggaagctgcgacgccgagtttcactctggctgccttctcctgagagtcggagccacagccagagccctgcccaggccgagccggagctgcagcccgagcgcggtggtgccctcagccccgtcctcttgtcctcctcagcctcggtgccttggaatttgtgtcgctgagtcagcaagcctttcagatttgcccggtttttgttgtttgtggtttgtatcaagatgggaactcaaacaagtcattcctcctaaggagctggtgtcttcatccagaagggacagtttgtgccagctctccagagagaaaagatctgccggaggcgctgggcaatgaccccgggactccaggccagaggggtctgaagctgtttgggaaagcagcgggactccttgggaagatggccatggccccaagcccttccctggtgcaggtgtacaccagccccgcggctgtggccgtgtgggaatggcaggacgggctgggcacctggcacccctacagtgccaccgtctgcagcttcatcgagcagcagtttgtccagcagaagggccaacgttttgggcttgggagcctggcccacagcatccccttgggccaggcagacccctcgctggccccttacattattgacctccccagctggacccagttccgccaggacaccggcaccatgcgggctgtgcggagacacctgttcccccagcactcagcccctggccgaggtgtcgtctgggagtggctgagcgacgatggctcctggactgcctatgaagccagcgtctgtgactatctggagcagcaggtggccaggggcaaccagctcgtggacttggcccccctggggtacaactacactgtcaactacaccacccacacgcagaccaacaagacttccagcttctgccgcagcgtgcggcgccaagcagggccgccttacccggtgaccaccatcatcgctccgccgggccacacaggcgtcgcctgctcttgccaccagtgcctcagtggcagcagaactggccccgtgtcaggccgctaccgccactccatgaccaacctccctgcataccccgtcccccagcaccccccacacaggaccgcttctgtgtttgggacccaccaggcctttgcaccgtacaacaaaccctcactctccggggcccggtctgcgcccaggctgaacaccaccaacgcctggggcgcagctcctccttccctggggagccagcccctctaccgctccagcctctcccacctgggaccgcagcacctgcccccaggatcctccacctccggtgcagtcagtgcctccctccccagcggtccctcaagcagcccagggagcgtccctgccactgtgcccatgcagatgccaaagcccagcagagtccagcaggcgctcgcagaagcgaccccgaagccagagccagagccagagcaggtcataaaaaactacacggaagagctgaaagtgcccccagatgaggactgcatcatctgcatggagaagctgtccgcagcgtctggatacagcgatgtgactgacagcaaggcaatcgggtccctggctgtgggccacctcaccaagtgcagccatgccttccacctgctgtgcctcctggccatgtactgcaacggcaataaggatggaagtctgcagtgtccctcctgcaaaaccatctatggagagaagacggggacccagccccagggaaagatggaggtattacggttccagatgtcgctccccggccacgaggactgcgggaccatcctcatagtttacagcattccccatggcatccagggccctgagcaccccaatcccggaaagccgttcactgccagagggtttccccgccagtgctaccttccagacaacgcccagggccgcaaggtcctagagctcctgaaggtggcctggaagaggcggctcatcttcacagtgggcacgtccagcaccacgggtgagacggacaccgtggtatggaacgagatccaccacaagacagagatggaccgcaacattacgggccacggctatcccgaccccaactacctgcagaacgtgctggctgagctggctgcccagggggtgaccgaggactgcctggagcagcagtgacctcgcaccccagcacgcccgcctctggtggccaccccgctgccccatggctggctgggtggccaggcaggaagtgcccagcccgagaggctgggaggtttgttgagggtgtggggtgtgccccacctgaagccggggctccccctgcctgcctctctctcctcctcccctctgggaattgggcagccctgggcagttgtactcatgggggcttaggatgcagctacctcagtgcgcagggcccgtctgtcctctgggggctgcttcgggcccgcggtgctcggggcctggtgtggggcgagtagagacttccccagcctggacgggcgtgggttctgggtcagcttcttttacctcaattttgtttgcaataaatgctctatagccaaagcca

SEQ ID NO: 319562 - DNA, 2809 bp, Homo sapiens
acgccccgggcatgcgcagcggctcgctcggaagctgcgacgccgagtttcactctggctgccttctcctgagagtcggagccacagccagagccctgcccaggccgagccggagctgcagcccgagcgcggtggtgccctcagccccgtcctcttgtcctcctcagcctcggtgccttggaatttgtgtcgctgagtcagcaagcctttcagatttgcccggtttttgttgtttgtggtttgtatcaagatgggaactcaaacaagtcattcctcctaaggagctggtgtcttcatccagaagggacagtttgtgccagctctccagagagaaaaggatctggtactgttctggagtggcctgtagcagacactgaaccaccagccagctgcatttgttgtcctggaagtcattgccaactctgccagtcacactggggtccccaaagaagtcaagatctgccggaggcgctgggcaatgaccccgggactccaggccagaggggtctgaagctgtttgggaaagcagcgggactccttgggaagatggccatggccccaagcccttccctggtgcaggtgtacaccagccccgcggctgtggccgtgtgggaatggcaggacgggctgggcacctggcacccctacagtgccaccgtctgcagcttcatcgagcagcagtttgtccagcagaagggccaacgttttgggcttgggagcctggcccacagcatccccttgggccaggcagacccctcgctggccccttacattattgacctccccagctggacccagttccgccaggacaccggcaccatgcgggctgtgcggagacacctgttcccccagcactcagcccctggccgaggtgtcgtctgggagtggctgagcgacgatggctcctggactgcctatgaagccagcgtctgtgactatctggagcagcaggtggccaggggcaaccagctcgtggacttggcccccctggggtacaactacactgtcaactacaccacccacacgcagaccaacaagacttccagcttctgccgcagcgtgcggcgccaagcagggccgccttacccggtgaccaccatcatcgctccgccgggccacacaggcgtcgcctgctcttgccaccagtgcctcagtggcagcagaactggccccgtgtcaggccgctaccgccactccatgaccaacctccctgcataccccgtcccccagcaccccccacacaggaccgcttctgtgtttgggacccaccaggcctttgcaccgtacaacaaaccctcactctccggggcccggtctgcgcccaggctgaacaccaccaacgcctggggcgcagctcctccttccctggggagccagcccctctaccgctccagcctctcccacctgggaccgcagcacctgcccccaggatcctccacctccggtgcagtcagtgcctccctccccagcggtccctcaagcagcccagggagcgtccctgccactgtgcccatgcagatgccaaagcccagcagagtccagcaggcgctcgcaggcatgacgagtgttctgatgtcagccattggactccctgtgtgtcttagccgcgcaccccagcccaccagccctcccgcctcccgtctggcttccaaaagtcacggctcagttaagagattgaggaaaatgtccgtgaaagaagcgaccccgaagccagagccagagccagagcaggtcataaaaaactacacggaagagctgaaagtgcccccagatgaggactgcatcatctgcatggagaagctgtccgcagcgtctggatacagcgatgtgactgacagcaaggcaatcgggtccctggctgtgggccacctcaccaagtgcagccatgccttccacctgctgtgcctcctggccatgtactgcaacggcaataaggatggaagtctgcagtgtccctcctgcaaaaccatctatggagagaagacggggacccagccccagggaaagatggaggtattacggttccagatgtcgctccccggccacgaggactgcgggaccatcctcatagtttacagcattccccatggcatccagggccctgagcaccccaatcccggaaagccgttcactgccagagggtttccccgccagtgctaccttccagacaacgcccagggccgcaaggtcctagagctcctgaaggtggcctggaagaggcggctcatcttcacagtgggcacgtccagcaccacgggtgagacggacaccgtggtatggaacgagatccaccacaagacagagatggaccgcaacattacgggccacggctatcccgaccccaactacctgcagaacgtgctggctgagctggctgcccagggggtgaccgaggactgcctggagcagcagtgacctcgcaccccagcacgcccgcctctggtggccaccccgctgccccatggctggctgggtggccaggcaggaagtgcccagcccgagaggctgggaggtttgttgagggtgtggggtgtgccccacctgaagccggggctccccctgcctgcctctctctcctcctcccctctgggaattgggcagccctgggcagttgtactcatgggggcttaggatgcagctacctcagtgcgcagggcccgtctgtcctctgggggctgcttcgggcccgcggtgctcggggcctggtgtggggcgagtagagacttccccagcctggacgggcgtgggttctgggtcagcttcttttacctcaattttgtttgcaataaatgctctatagccaaagcca

SEQ ID NO: 319563 - DNA, 2895 bp, Homo sapiens
acgccccgggcatgcgcagcggctcgctcggaagctgcgacgccgagtttcactctggctgccttctcctgagagtcggagccacagccagagccctgcccaggccgagccggagctgcagcccgagcgcggtggtgccctcagccccgtcctcttgtcctcctcagcctcggtgccttggaatttgtgtcgctgagtcagcaagcctttcagatttgcccggtttttgttgtttgtggtttgtatcaagatgggaactcaaacaagtcattcctcctaaggagctggtgtcttcatccagaagggacagtttgtgccagctctccagagagaaaagaacacggctggcagatccagctcctcgtatagtgccttcacccgggccaccttctcggcctccttctgcctgtaattttccttcaggatctggtactgttctggagtggcctgtagcagacactgaaccaccagccagctgcatttgttgtcctggaagtcattgccaactctgccagtcacactggggtccccaaagaagtcaagatctgccggaggcgctgggcaatgaccccgggactccaggccagaggggtctgaagctgtttgggaaagcagcgggactccttgggaagatggccatggccccaagcccttccctggtgcaggtgtacaccagccccgcggctgtggccgtgtgggaatggcaggacgggctgggcacctggcacccctacagtgccaccgtctgcagcttcatcgagcagcagtttgtccagcagaagggccaacgttttgggcttgggagcctggcccacagcatccccttgggccaggcagacccctcgctggccccttacattattgacctccccagctggacccagttccgccaggacaccggcaccatgcgggctgtgcggagacacctgttcccccagcactcagcccctggccgaggtgtcgtctgggagtggctgagcgacgatggctcctggactgcctatgaagccagcgtctgtgactatctggagcagcaggtggccaggggcaaccagctcgtggacttggcccccctggggtacaactacactgtcaactacaccacccacacgcagaccaacaagacttccagcttctgccgcagcgtgcggcgccaagcagggccgccttacccggtgaccaccatcatcgctccgccgggccacacaggcgtcgcctgctcttgccaccagtgcctcagtggcagcagaactggccccgtgtcaggccgctaccgccactccatgaccaacctccctgcataccccgtcccccagcaccccccacacaggaccgcttctgtgtttgggacccaccaggcctttgcaccgtacaacaaaccctcactctccggggcccggtctgcgcccaggctgaacaccaccaacgcctggggcgcagctcctccttccctggggagccagcccctctaccgctccagcctctcccacctgggaccgcagcacctgcccccaggatcctccacctccggtgcagtcagtgcctccctccccagcggtccctcaagcagcccagggagcgtccctgccactgtgcccatgcagatgccaaagcccagcagagtccagcaggcgctcgcaggcatgacgagtgttctgatgtcagccattggactccctgtgtgtcttagccgcgcaccccagcccaccagccctcccgcctcccgtctggcttccaaaagtcacggctcagttaagagattgaggaaaatgtccgtgaaagaagcgaccccgaagccagagccagagccagagcaggtcataaaaaactacacggaagagctgaaagtgcccccagatgaggactgcatcatctgcatggagaagctgtccgcagcgtctggatacagcgatgtgactgacagcaaggcaatcgggtccctggctgtgggccacctcaccaagtgcagccatgccttccacctgctgtgcctcctggccatgtactgcaacggcaataaggatggaagtctgcagtgtccctcctgcaaaaccatctatggagagaagacggggacccagccccagggaaagatggaggtattacggttccagatgtcgctccccggccacgaggactgcgggaccatcctcatagtttacagcattccccatggcatccagggccctgagcaccccaatcccggaaagccgttcactgccagagggtttccccgccagtgctaccttccagacaacgcccagggccgcaaggtcctagagctcctgaaggtggcctggaagaggcggctcatcttcacagtgggcacgtccagcaccacgggtgagacggacaccgtggtatggaacgagatccaccacaagacagagatggaccgcaacattacgggccacggctatcccgaccccaactacctgcagaacgtgctggctgagctggctgcccagggggtgaccgaggactgcctggagcagcagtgacctcgcaccccagcacgcccgcctctggtggccaccccgctgccccatggctggctgggtggccaggcaggaagtgcccagcccgagaggctgggaggtttgttgagggtgtggggtgtgccccacctgaagccggggctccccctgcctgcctctctctcctcctcccctctgggaattgggcagccctgggcagttgtactcatgggggcttaggatgcagctacctcagtgcgcagggcccgtctgtcctctgggggctgcttcgggcccgcggtgctcggggcctggtgtggggcgagtagagacttccccagcctggacgggcgtgggttctgggtcagcttcttttacctcaattttgtttgcaataaatgctctatagccaaagcca

SEQ ID NO: 319564 - DNA, 1930 bp, Homo sapiens
cctggcagtggggctggatactggcctgcctcccaccagagtccccccagctcctccctgctgtgggctggcctgggaggaagggggtggggtgcacttacatttgcaggtctttccagcccctggggcagcctgattaaccagcttctccagggccaagctgttgggggtgaggtgcagcccgaagcagccagaccagcccctgagcctcccgggtgctggcagctgtcatggggctaccctgggggcagcctcacctagggctgcagatgctcctcctggcgttgaactgtctccggcccagcctgagcctggagctggtgccctacacaccacagataacagcttgggacctggaagggaaggtcacagccaccaccttctccctggagcagccgcgctgtgtcttcgatgggcttgccagcgccagcgataccgtctggctcgtggtggccttcagcaatgcctccaggggcttccagaacccggagacactggctgacattccggcctccccacagctgctgaccgatggccactacatgacgctgcccctgtctccggaccagctgccctgtggcgaccccatggcgggcagcggaggcgcccccgtgctgcgggtgggccatgaccacggctgccaccagcagcccttctgcaacgcgcccctccctggccctggaccctatcgggtgaagttcctcctgatggacaccaggggctcacccagggctgagaccaagtggtcagaccccatcactctccaccaagggaagacccccggatccatcgacacctggccagggcggcgaagtggcagcatgatcgtcattacctccatcctctcttctctggccggcctcctactcttggccttcttggcagcctctaccatgcgcttctccagcctgtggtggccggaggaggccccggagcagctgcggatcggctccttcatgggcaagcgctacatgacccaccacatcccacccagcgaggccgccacactgccggtgggctgcaagcctgggctggaccccctccccagcctcagcccctagcctggcctctttgcatggggctgggggagatggggcgccgggagtgagtgcatggtgctttgtcccagctcctgcacccacaggccccctcagggctccttgcctttcccccccaccagcacaccccgtaccctgcctggaatcccagcaccagcccccctgcctctcctctgcctttctggtttctctccctctccaagcatctgtaagttgcactcaggagggtttaggggagggccatgggcaggctggtctcgtgatagtgagtgagtgctcatgggatctggttgtttagaagcatgcagcacctcctgcttcactctctctgtctctcctgctccaccatggccagaaacgtgcctgcttccccttcgccttctgccgtgattgtcagtttcttgagggctccccagccatgcttcctgtacagcctgcaaaactgtgagtcaattaaacctcttttcttcataaaaaaaaaagaaaagaaaaaagaaaaaaaagaggacaaaaagaaaaaaacaaacacacgctggggcgcgcccgacataaagtagccgcaaggggggacgacactggcagacgacagaccacaagcgtaagtagaacaagaagggcgccaataagtagggggaggcacgacatgtacagacaacggagaaaacggccgcgccgcgccccgcgggagagccaaacggcgcgcgatggagggcagcagcacacggcaacgaagacgagagcaccaatcgagcggggaaagaagcacacaggctgctcgcggcgccggcgggctacacaacaagcggggagcaccgcatccgccacggcgaggcacgtaaggcgccacccgacggggggagcgagataggacg

SEQ ID NO: 319565 - DNA, 1850 bp, Homo sapiens
cctggcagtggggctggatactggcctgcctcccaccagagtccccccagctcctccctgctgtgggctggcctgggaggaagggggtggggtgcacttacatttgcaggtctttccagcccctggggcagcctgattaaccagcttctccagggccaagctgttgggggtgaggtgcagcccgaagcagccagaccagcccctgagcctcccgggtgctggcagctgtcatggggctaccctgggggcagcctcacctagggctgcagatgctcctcctggcgttgaactgtctccggcccagcctgagcctggagctggtgccctacacaccacagataacagcttgggacctggaagggaaggtcacagccaccaccttctccctggagcagccgcgctgtgtcttcgatgggcttgccagcgccagcgataccgtctggctcgtggtggccttcagcaatgcctccaggggcttccagaacccggagacactggctgacattccggcctccccacagctgctgaccgatggccactacatgacgctgcccctgtctccggaccagctgccctgtggcgaccccatggcgggcagcggaggcgcccccgtgctgcgggtgggccatgaccacggctgccaccagcagcccttctgcaacgcgcccctccctggccctggaccctatcgggaagacccccggatccatcgacacctggccagggcggcgaagtggcagcatgatcgtcattacctccatcctctcttctctggccggcctcctactcttggccttcttggcagcctctaccatgcgcttctccagcctgtggtggccggaggaggccccggagcagctgcggatcggctccttcatgggcaagcgctacatgacccaccacatcccacccagcgaggccgccacactgccggtgggctgcaagcctgggctggaccccctccccagcctcagcccctagcctggcctctttgcatggggctgggggagatggggcgccgggagtgagtgcatggtgctttgtcccagctcctgcacccacaggccccctcagggctccttgcctttcccccccaccagcacaccccgtaccctgcctggaatcccagcaccagcccccctgcctctcctctgcctttctggtttctctccctctccaagcatctgtaagttgcactcaggagggtttaggggagggccatgggcaggctggtctcgtgatagtgagtgagtgctcatgggatctggttgtttagaagcatgcagcacctcctgcttcactctctctgtctctcctgctccaccatggccagaaacgtgcctgcttccccttcgccttctgccgtgattgtcagtttcttgagggctccccagccatgcttcctgtacagcctgcaaaactgtgagtcaattaaacctcttttcttcataaaaaaaaaagaaaagaaaaaagaaaaaaaagaggacaaaaagaaaaaaacaaacacacgctggggcgcgcccgacataaagtagccgcaaggggggacgacactggcagacgacagaccacaagcgtaagtagaacaagaagggcgccaataagtagggggaggcacgacatgtacagacaacggagaaaacggccgcgccgcgccccgcgggagagccaaacggcgcgcgatggagggcagcagcacacggcaacgaagacgagagcaccaatcgagcggggaaagaagcacacaggctgctcgcggcgccggcgggctacacaacaagcggggagcaccgcatccgccacggcgaggcacgtaaggcgccacccgacggggggagcgagataggacg

SEQ ID NO: 319566 - DNA, 2015 bp, Homo sapiens
cctggcagtggggctggatactggcctgcctcccaccagagtccccccagctcctccctgctgtgggctggcctgggaggaagggggtggggtgcacttacatttgcaggtctttccagcccctggggcagcctgattaaccagcttctccagggccaagctgttgggggtgaggtgcagcccgaagcagccagaccagcccctgagcctcccgggtgctggcagctgtcatggggctaccctgggggcagcctcacctagggctgcagatgctcctcctggcgttgaactgtctccggcccagcctgagcctgggtgagtgggggtcctggatggacgcgtccagccagacccaaggggctgggggccctgctggagtgattggaccctgggcgcccgcccccctccgattgggagaggcagccccagggacccccacgcccgtctccgtggctcaccttttgtcccccgtggccacagagctggtgccctacacaccacagataacagcttgggacctggaagggaaggtcacagccaccaccttctccctggagcagccgcgctgtgtcttcgatgggcttgccagcgccagcgataccgtctggctcgtggtggccttcagcaatgcctccaggggcttccagaacccggagacactggctgacattccggcctccccacagctgctgaccgatggccactacatgacgctgcccctgtctccggaccagctgccctgtggcgaccccatggcgggcagcggaggcgcccccgtgctgcgggtgggccatgaccacggctgccaccagcagcccttctgcaacgcgcccctccctggccctggaccctatcgggaagacccccggatccatcgacacctggccagggcggcgaagtggcagcatgatcgtcattacctccatcctctcttctctggccggcctcctactcttggccttcttggcagcctctaccatgcgcttctccagcctgtggtggccggaggaggccccggagcagctgcggatcggctccttcatgggcaagcgctacatgacccaccacatcccacccagcgaggccgccacactgccggtgggctgcaagcctgggctggaccccctccccagcctcagcccctagcctggcctctttgcatggggctgggggagatggggcgccgggagtgagtgcatggtgctttgtcccagctcctgcacccacaggccccctcagggctccttgcctttcccccccaccagcacaccccgtaccctgcctggaatcccagcaccagcccccctgcctctcctctgcctttctggtttctctccctctccaagcatctgtaagttgcactcaggagggtttaggggagggccatgggcaggctggtctcgtgatagtgagtgagtgctcatgggatctggttgtttagaagcatgcagcacctcctgcttcactctctctgtctctcctgctccaccatggccagaaacgtgcctgcttccccttcgccttctgccgtgattgtcagtttcttgagggctccccagccatgcttcctgtacagcctgcaaaactgtgagtcaattaaacctcttttcttcataaaaaaaaaagaaaagaaaaaagaaaaaaaagaggacaaaaagaaaaaaacaaacacacgctggggcgcgcccgacataaagtagccgcaaggggggacgacactggcagacgacagaccacaagcgtaagtagaacaagaagggcgccaataagtagggggaggcacgacatgtacagacaacggagaaaacggccgcgccgcgccccgcgggagagccaaacggcgcgcgatggagggcagcagcacacggcaacgaagacgagagcaccaatcgagcggggaaagaagcacacaggctgctcgcggcgccggcgggctacacaacaagcggggagcaccgcatccgccacggcgaggcacgtaaggcgccacccgacggggggagcgagataggacg

SEQ ID NO: 319567 - DNA, 1587 bp, Homo sapiens
gccctgagggaggaggtggcatggggggtcagggctggagactgggcgaacacagaacccccactcataaggacaaagctgctttctcccctcccacctccatctgttctctcctcctgcagcctccaggggcttccagaacccggagacactggctgacattccggcctccccacagctgctgaccgatggccactacatgacgctgcccctgtctccggaccagctgccctgtggcgaccccatggcgggcagcggaggcgcccccgtgctgcgggtgggccatgaccacggctgccaccagcagcccttctgcaacgcgcccctccctggccctggaccctatcgggtgaagttcctcctgatggacaccaggggctcacccagggctgagaccaagtggtcagaccccatcactctccaccaagggaagacccccggatccatcgacacctggccagggcggcgaagtggcagcatgatcgtcattacctccatcctctcttctctggccggcctcctactcttggccttcttggcagcctctaccatgcgcttctccagcctgtggtggccggaggaggccccggagcagctgcggatcggctccttcatgggcaagcgctacatgacccaccacatcccacccagcgaggccgccacactgccggtgggctgcaagcctgggctggaccccctccccagcctcagcccctagcctggcctctttgcatggggctgggggagatggggcgccgggagtgagtgcatggtgctttgtcccagctcctgcacccacaggccccctcagggctccttgcctttcccccccaccagcacaccccgtaccctgcctggaatcccagcaccagcccccctgcctctcctctgcctttctggtttctctccctctccaagcatctgtaagttgcactcaggagggtttaggggagggccatgggcaggctggtctcgtgatagtgagtgagtgctcatgggatctggttgtttagaagcatgcagcacctcctgcttcactctctctgtctctcctgctccaccatggccagaaacgtgcctgcttccccttcgccttctgccgtgattgtcagtttcttgagggctccccagccatgcttcctgtacagcctgcaaaactgtgagtcaattaaacctcttttcttcataaaaaaaaaagaaaagaaaaaagaaaaaaaagaggacaaaaagaaaaaaacaaacacacgctggggcgcgcccgacataaagtagccgcaaggggggacgacactggcagacgacagaccacaagcgtaagtagaacaagaagggcgccaataagtagggggaggcacgacatgtacagacaacggagaaaacggccgcgccgcgccccgcgggagagccaaacggcgcgcgatggagggcagcagcacacggcaacgaagacgagagcaccaatcgagcggggaaagaagcacacaggctgctcgcggcgccggcgggctacacaacaagcggggagcaccgcatccgccacggcgaggcacgtaaggcgccacccgacggggggagcgagataggacg

SEQ ID NO: 319568 - DNA, 1111 bp, Homo sapiens
aagcctctttttccaagactggcccacgtcagcccagcccactgttggcgagcatgacccatgtttggtctcctccaggactgcatcatctgcatggagaagctgtccgcagcgtctggatacagcgatgtgactgacagcaaggcaatcgggtccctggctgtgggccacctcaccaagtgcagccatgccttccacctgctgtgcctcctggccatgtactgcaacggcaataaggatggaagtctgcagtgtccctcctgcaaaaccatctatggagagaagacggggacccagccccagggaaagatggaggtattacggttccagatgtcgctccccggccacgaggactgcgggaccatcctcatagtttacagcattccccatggcatccagggccctgagcaccccaatcccggaaagccgttcactgccagagggtttccccgccagtgctaccttccagacaacgcccagggccgcaaggtcctagagctcctgaaggtggcctggaagaggcggctcatcttcacagtgggcacgtccagcaccacgggtgagacggacaccgtggtatggaacgagatccaccacaagacagagatggaccgcaacattacgggccacggctatcccgaccccaactacctgcagaacgtgctggctgagctggctgcccagggggtgaccgaggactgcctggagcagcagtgacctcgcaccccagcacgcccgcctctggtggccaccccgctgccccatggctggctgggtggccaggcaggaagtgcccagcccgagaggctgggaggtttgttgagggtgtggggtgtgccccacctgaagccggggctccccctgcctgcctctctctcctcctcccctctgggaattgggcagccctgggcagttgtactcatgggggcttaggatgcagctacctcagtgcgcagggcccgtctgtcctctgggggctgcttcgggcccgcggtgctcggggcctggtgtggggcgagtagagacttccccagcctggacgggcgtgggttctgggtcagcttcttttacctcaattttgtttgcaataaatgctctatagccaaagcca

SEQ ID NO: 319569 - DNA, 1752 bp, Homo sapiens
  misc_feature (184)..(184): n is a, c, g, or t
  misc_feature (246)..(246): n is a, c, g, or t
  misc_feature (567)..(567): n is a, c, g, or t
gtgtgcacagacagcgagtgaggccgtcagggtgggctcctgccacgtcttggcccctccccagagtcgctggacttaggagctagtctgcatgtgacagaccttcccagtcagtggcaggcgtttcccgggacagtgtctgtgtggcggtcggcgtgtgtgcagctgcctgtacatgctggancccagactcccttgtccctgtgatgttcatgccagggtaatgcaagttgaatcaaatcgtgntgccacaacgccccctggagtagtttgtgcccgaagcggctgtctgactcttccgcgcagcctcagaagcgccggggtcggttcctcactcaatgtgcgcggggatgcggctcccaggagactgtgctgctgtttctgctcttctgcatcctccatggctcctggggctgagccgggtccccggacggtgggactggggaaggctttgcccgacggagctcggggctctgtgcctggcgctgagctctcccgtcccgcacactggcctccctgtctgggcccctctcgcatttcctcctggcagcttagacctcttccttnccttcctcgccctctggcctcctctccagcctgtgctcctcaggacgctgcttatgtacttctctcttctagaagcgaccccgaagccagagccagagccagagcaggtcataaaaaactacacggaagagctgaaagtgcccccagatgaggactgcatcatctgcatggagaagctgtccgcagcgtctggatacagcgatgtgactgacagcaaggcaatcgggtccctggctgtgggccacctcaccaagtgcagccatgccttccacctgctgtgcctcctggccatgtactgcaacggcaataaggatggaagtctgcagtgtccctcctgcaaaaccatctatggagagaagacggggacccagccccagggaaagatggaggtattacggttccagatgtcgctccccggccacgaggactgcgggaccatcctcatagtttacagcattccccatggcatccagggccctgagcaccccaatcccggaaagccgttcactgccagagggtttccccgccagtgctaccttccagacaacgcccagggccgcaaggtcctagagctcctgaaggtggcctggaagaggcggctcatcttcacagtgggcacgtccagcaccacgggtgagacggacaccgtggtatggaacgagatccaccacaagacagagatggaccgcaacattacgggccacggctatcccgaccccaactacctgcagaacgtgctggctgagctggctgcccagggggtgaccgaggactgcctggagcagcagtgacctcgcaccccagcacgcccgcctctggtggccaccccgctgccccatggctggctgggtggccaggcaggaagtgcccagcccgagaggctgggaggtttgttgagggtgtggggtgtgccccacctgaagccggggctccccctgcctgcctctctctcctcctcccctctgggaattgggcagccctgggcagttgtactcatgggggcttaggatgcagctacctcagtgcgcagggcccgtctgtcctctgggggctgcttcgggcccgcggtgctcggggcctggtgtggggcgagtagagacttccccagcctggacgggcgtgggttctgggtcagcttcttttacctcaattttgtttgcaataaatgctctatagccaaagcca

SEQ ID NO: 319570 - DNA, 2754 bp, Homo sapiens
acgccccgggcatgcgcagcggctcgctcggaagctgcgacgccgagtttcactctggctgccttctcctgagagtcggagccacagccagagccctgcccaggccgagccggagctgcagcccgagcgcggtggtgccctcagccccgtcctcttgtcctcctcagcctcggtgccttggaatttgtgtcgctgagtcagcaagcctttcagatttgcccggtttttgttgtttgtggtttgtatcaagatgggaactcaaacaagtcattcctcctaaggagctggtgtcttcatccagaagggacagtttgtgccagctctccagagagaaaagaaacttccaattgaagacactgagctgaaccattccgcccgcccgcccgcccgagggcactccagatctgccggaggcgctgggcaatgaccccgggactccaggccagaggggtctgaagctgtttgggaaagcagcgggactccttgggaagatggccatggccccaagcccttccctggtgcaggtgtacaccagccccgcggctgtggccgtgtgggaatggcaggacgggctgggcacctggcacccctacagtgccaccgtctgcagcttcatcgagcagcagtttgtccagcagaagggccaacgttttgggcttgggagcctggcccacagcatccccttgggccaggcagacccctcgctggccccttacattattgacctccccagctggacccagttccgccaggacaccggcaccatgcgggctgtgcggagacacctgttcccccagcactcagcccctggccgaggtgtcgtctgggagtggctgagcgacgatggctcctggactgcctatgaagccagcgtctgtgactatctggagcagcaggtggccaggggcaaccagctcgtggacttggcccccctggggtacaactacactgtcaactacaccacccacacgcagaccaacaagacttccagcttctgccgcagcgtgcggcgccaagcagggccgccttacccggtgaccaccatcatcgctccgccgggccacacaggcgtcgcctgctcttgccaccagtgcctcagtggcagcagaactggccccgtgtcaggccgctaccgccactccatgaccaacctccctgcataccccgtcccccagcaccccccacacaggaccgcttctgtgtttgggacccaccaggcctttgcaccgtacaacaaaccctcactctccggggcccggtctgcgcccaggctgaacaccaccaacgcctggggcgcagctcctccttccctggggagccagcccctctaccgctccagcctctcccacctgggaccgcagcacctgcccccaggatcctccacctccggtgcagtcagtgcctccctccccagcggtccctcaagcagcccagggagcgtccctgccactgtgcccatgcagatgccaaagcccagcagagtccagcaggcgctcgcaggcatgacgagtgttctgatgtcagccattggactccctgtgtgtcttagccgcgcaccccagcccaccagccctcccgcctcccgtctggcttccaaaagtcacggctcagttaagagattgaggaaaatgtccgtgaaagaagcgaccccgaagccagagccagagccagagcaggtcataaaaaactacacggaagagctgaaagtgcccccagatgaggactgcatcatctgcatggagaagctgtccgcagcgtctggatacagcgatgtgactgacagcaaggcaatcgggtccctggctgtgggccacctcaccaagtgcagccatgccttccacctgctgtgcctcctggccatgtactgcaacggcaataaggatggaagtctgcagtgtccctcctgcaaaaccatctatggagagaagacggggacccagccccagggaaagatggaggtattacggttccagatgtcgctccccggccacgaggactgcgggaccatcctcatagtttacagcattccccatggcatccagggccctgagcaccccaatcccggaaagccgttcactgccagagggtttccccgccagtgctaccttccagacaacgcccagggccgcaaggtcctagagctcctgaaggtggcctggaagaggcggctcatcttcacagtgggcacgtccagcaccacgggtgagacggacaccgtggtatggaacgagatccaccacaagacagagatggaccgcaacattacgggccacggctatcccgaccccaactacctgcagaacgtgctggctgagctggctgcccagggggtgaccgaggactgcctggagcagcagtgacctcgcaccccagcacgcccgcctctggtggccaccccgctgccccatggctggctgggtggccaggcaggaagtgcccagcccgagaggctgggaggtttgttgagggtgtggggtgtgccccacctgaagccggggctccccctgcctgcctctctctcctcctcccctctgggaattgggcagccctgggcagttgtactcatgggggcttaggatgcagctacctcagtgcgcagggcccgtctgtcctctgggggctgcttcgggcccgcggtgctcggggcctggtgtggggcgagtagagacttccccagcctggacgggcgtgggttctgggtcagcttcttttacctcaattttgtttgcaataaatgctctatagccaaagcca

SEQ ID NO: 319571 - DNA, 2887 bp, Homo sapiens
  misc_feature (2887)..(2887): n is a, c, g, or t
acgccccgggcatgcgcagcggctcgctcggaagctgcgacgccgagtttcactctggctgccttctcctgagagtcggagccacagccagagccctgcccaggccgagccggagctgcagcccgagcgcggtggtgccctcagccccgtcctcttgtcctcctcagcctcggtgccttggaatttgtgtcgctgagtcagcaagcctttcagatttgcccggtttttgttgtttgtggtttgtatcaagatgggaactcaaacaagtcattcctcctaaggagctggtgtcttcatccagaagggacagtttgtgccagctctccagagagaaaagatctgccggaggcgctgggcaatgaccccgggactccaggccagaggggtctgaagctgtttgggaaagcagcgggactccttgggaagatggccatggccccaagcccttccctggtgcaggtgtacaccagccccgcggctgtggccgtgtgggaatggcaggacgggctgggcacctggcacccctacagtgccaccgtctgcagcttcatcgagcagcagtttgtccagcagaagggccaacgttttgggcttgggagcctggcccacagcatccccttgggccaggcagacccctcgctggccccttacattattgacctccccagctggacccagttccgccaggacaccggcaccatgcgggctgtgcggagacacctgttcccccagcactcagcccctggccgaggtgtcgtctgggagtggctgagcgacgatggctcctggactgcctatgaagccagcgtctgtgactatctggagcagcaggtggccaggggcaaccagctcgtggacttggcccccctggggtacaactacactgtcaactacaccacccacacgcagaccaacaagacttccagcttctgccgcagcgtgcggcgccaagcagggccgccttacccggtgaccaccatcatcgctccgccgggccacacaggcgtcgcctgctcttgccaccagtgcctcagtggcagcagaactggccccgtgtcaggccgctaccgccactccatgaccaacctccctgcataccccgtcccccagcaccccccacacaggaccgcttctgtgtttgggacccaccaggcctttgcaccgtacaacaaaccctcactctccggggcccggtctgcgcccaggctgaacaccaccaacgcctggggcgcagctcctccttccctggggagccagcccctctaccgctccagcctctcccacctgggaccgcagcacctgcccccaggatcctccacctccggtgcagtcagtgcctccctccccagcggtccctcaagcagcccagggagcgtccctgccactgtgcccatgcagatgccaaagcccagcagagtccagcaggcgctcgcaggcatgacgagtgttctgatgtcagccattggactccctgtgtgtcttagccgcgcaccccagcccaccagccctcccgcctcccgtctggcttccaaaagtcacggctcagttaagagattgaggaaaatgtccgtgaaagaagcgaccccgaagccagagccagagccagagcaggtcataaaaaactacacggaagagctgaaagtgcccccagatgaggactgcatcatctgcatggagaagctgtccgcagcgtctggatacagcgatgtgactgacagcaaggcaatcgggtccctggctgtgggccacctcaccaagtgcagccatgccttccacctgctgtgcctcctggccatgtactgcaacggcaataaggatggaagtctgcagtgtccctcctgcaaaaccatctatggagagaagacggggacccagccccagggaaagatggaggtattacggttccagatgtcgctccccggccacgaggactgcgggaccatcctcatagtttacagcattccccatggcatccagggccctgagcaccccaatcccggaaagccgttcactgccagagggtttccccgccagtgctaccttccagacaacgcccagggccgcaaggtcctagagctcctgaaggtggcctggaagaggcggctcatcttcacagtgggcacgtccagcaccacgggtgagacggacaccgtggtatggaacgagatccaccacaagacagagatggaccgcaacattacgggccacggctatcccgaccccaactacctgcagaacgtgctggctgagctggctgcccagggggtgaccgaggactgcctggagcagcagtgacctcgcaccccagcacgcccgcctctggtggccaccccgctgccccatggctggctgggtggccaggcaggaagtgcccagcccgagaggctgggaggtttgttgagggtgtggggtgtgccccacctgaagccggggctccccctgcctgcctctctctcctcctcccctctgggaattgggcagccctgggcagttgtactcatgggggcttaggatgcagctacctcagtgcgcagggcccgtctgtcctctgggggctgcttcgggcccgcggtgctcggggcctggtgtggggcgagtagagacttccccagcctggacgggcgtgggttctgggtcagcttcttttacctcaattttgtttgcaataaatgctctatagccaaagccaaaaaaaaacaaaaaaaacacctcaaggaaaaaaagtcgcggcgccgcaaaacacaggaacaacaaatcgcacacaggagccaacaccgggacacacgagaccaaaataccaggacacaagcggccaacaaagggaggaccccatatagcgagccgcactaaccggacaaaccccgacaccctgcatcacgaccgggan

SEQ ID NO: 319572 - DNA, 1098 bp, Homo sapiens
cctggcagtggggctggatactggcctgcctcccaccagagtccccccagctcctccctgctgtgggctggcctgggaggaagggggtggggtgcacttacatttgcaggtctttccagcccctggggcagcctgattaaccagcttctccagggccaagctgttgggggtgaggtgcagcccgaagcagccagaccagcccctgagcctcccgggtgctggcagctgtcatggggctaccctgggggcagcctcacctagggctgcagatgctcctcctggcgttgaactgtctccggcccagcctgagcctggagctggtgccctacacaccacagataacagcttgggacctggaagggaaggtcacagccaccaccttctccctggagcagccgcgctgtgtcttcgatgggcttgccagcgccagcgataccgtctggctcgtggtggccttcagcaatgcctccaggggcttccagaacccggagacactggctgacattccggcctccccacagctgctgaccgatggccactacatgacgctgcccctgtctccggaccagctgccctgtggcgaccccatggcgggcagcggaggcgcccccgtgctgcgggtgggccatgaccacggctgccaccagcagcccttctgcaacgcgcccctccctggccctggaccctatcgggtgaagttcctcctgatggacaccaggggctcacccagggctgagaccaagtggtcagaccccatcactctccaccaagggaagacccccggatccatcgacacctggccagggcggcgaagtggcagcatgatcgtcattacctccatcctctcttctctggccggcctcctactcttggccttcttggcagcctctaccatgcgcttctccagcctgtggtggccggaggaggccccggagcagctgcggatcggctccttcatgggcaagcgctacatgacccaccacatcccacccagcgaggccgccacactgccggtgggctgcaagcctgggctggacccttccactagcctactgcccttgctgggggggacatggccgggttgtggcttgcctctcc

SEQ ID NO: 319573 - DNA, 2095 bp, Homo sapiens
cctggcagtggggctggatactggcctgcctcccaccagagtccccccagctcctccctgctgtgggctggcctgggaggaagggggtggggtgcacttacatttgcaggtctttccagcccctggggcagcctgattaaccagcttctccagggccaagctgttgggggtgaggtgcagcccgaagcagccagaccagcccctgagcctcccgggtgctggcagctgtcatggggctaccctgggggcagcctcacctagggctgcagatgctcctcctggcgttgaactgtctccggcccagcctgagcctgggtgagtgggggtcctggatggacgcgtccagccagacccaaggggctgggggccctgctggagtgattggaccctgggcgcccgcccccctccgattgggagaggcagccccagggacccccacgcccgtctccgtggctcaccttttgtcccccgtggccacagagctggtgccctacacaccacagataacagcttgggacctggaagggaaggtcacagccaccaccttctccctggagcagccgcgctgtgtcttcgatgggcttgccagcgccagcgataccgtctggctcgtggtggccttcagcaatgcctccaggggcttccagaacccggagacactggctgacattccggcctccccacagctgctgaccgatggccactacatgacgctgcccctgtctccggaccagctgccctgtggcgaccccatggcgggcagcggaggcgcccccgtgctgcgggtgggccatgaccacggctgccaccagcagcccttctgcaacgcgcccctccctggccctggaccctatcgggtgaagttcctcctgatggacaccaggggctcacccagggctgagaccaagtggtcagaccccatcactctccaccaagggaagacccccggatccatcgacacctggccagggcggcgaagtggcagcatgatcgtcattacctccatcctctcttctctggccggcctcctactcttggccttcttggcagcctctaccatgcgcttctccagcctgtggtggccggaggaggccccggagcagctgcggatcggctccttcatgggcaagcgctacatgacccaccacatcccacccagcgaggccgccacactgccggtgggctgcaagcctgggctggaccccctccccagcctcagcccctagcctggcctctttgcatggggctgggggagatggggcgccgggagtgagtgcatggtgctttgtcccagctcctgcacccacaggccccctcagggctccttgcctttcccccccaccagcacaccccgtaccctgcctggaatcccagcaccagcccccctgcctctcctctgcctttctggtttctctccctctccaagcatctgtaagttgcactcaggagggtttaggggagggccatgggcaggctggtctcgtgatagtgagtgagtgctcatgggatctggttgtttagaagcatgcagcacctcctgcttcactctctctgtctctcctgctccaccatggccagaaacgtgcctgcttccccttcgccttctgccgtgattgtcagtttcttgagggctccccagccatgcttcctgtacagcctgcaaaactgtgagtcaattaaacctcttttcttcataaaaaaaaaagaaaagaaaaaagaaaaaaaagaggacaaaaagaaaaaaacaaacacacgctggggcgcgcccgacataaagtagccgcaaggggggacgacactggcagacgacagaccacaagcgtaagtagaacaagaagggcgccaataagtagggggaggcacgacatgtacagacaacggagaaaacggccgcgccgcgccccgcgggagagccaaacggcgcgcgatggagggcagcagcacacggcaacgaagacgagagcaccaatcgagcggggaaagaagcacacaggctgctcgcggcgccggcgggctacacaacaagcggggagcaccgcatccgccacggcgaggcacgtaaggcgccacccgacggggggagcgagataggacg

SEQ ID NO: 319574 - DNA, 133 bp, Homo sapiens
ctcactggtaatggtaattttcaccatctggtgaaagtatggtccagtttctccacagtatagttactatatttcccttacaacaaataagcaatctgtggggaatctacatccttcttgttactttcttatc

SEQ ID NO: 319575 - DNA, 664 bp, Homo sapiens
gatggagtgaaatgcagggcaaatgtcttaaaggaaatgacagattctaagaggcgggctagtggcttgtaacccacatggaagaggttatgaaaggacgatagaatggaatgagcctgtgaggctggaaagaggtattttccttggtctaagaaccatttgccttgagtggggagggatttataggtggaaacttcagtgggagagtaagtaggagtgactaatgagaaagagagaaactggccatgagggacagaagtaggaatactggctccttctttagctgtcttatcagcataactgttgccttgagcagtggggtctgaggtcctttgatggcctttgcagtgaatggctccaccttcctttggaagtaaagcgtccttgcgaagggtttttattaaagaggcattaatgatggaggacccttgctcactaggaaacttctttcagcccgtatggtggtgcaggacgtcagaggcatatttaaagccagtataaatattgacacgcaatccttttgcaagagtgagggctcaagttaaggcaatgagttaggcttgctgagaggtagtggagtggaccagagcggtagcctcaatgatagatgtataagatactatatcatagcctgcctttgctggtgagtggcgattaggcctgg

SEQ ID NO: 319576 - DNA, 980 bp, Homo sapiens
  misc_feature (976)..(976): n is a, c, g, or t
gagctcctgacctcgtgatccgcccacctcggcctcccaaagcgctgggattacaggcgtgagcaccgcgcccggccagcgactgcatttatagaggactcttaagatcagggagaagcccatacttctctagaaataaggaaggtgttttaattctcaggaggtcaacaagtcctgaggacggacttcagttgatgcatttccctttgaactggactctgccctcgatttcataacacagggcacggggttagctgtggtaggaagagttgtctccagccactcctaacccaacccagggctcaaagaccagtgtgtgagcctcagggggcgtgtctctaagctcccggaaaccaagccaattttcgcatgcgtgttcttctttgctttttttctggtaagaggacccacagttgcatcaaactttcaaagggacctgggacccctcagaaaagatctagaagcactgttctagggagagaaacagaaaaacagagtctgaagggcagtggagggaggaggccttccaagaaggcctggacacccgacctggaggggaaacgcgtttgtaggggaggaagggctccctctgcctctcacgggctcccacggctgtgatctgaattatctctccacactctccctgagggatcgagagcagtaaagggcaacgtcctgtcttctctctgatctgggagcccctgagaagccagcattcttctctcccagcttacctcttcctttggctgtattttccagggtaagaaaaagaagaggaagagagaaaagcagctgtcccagacacagtcacagcagcaagtccaggaggcagagggtgcgtctcggggcactggcctcttctcctgcttttccttttgtcacagccacacctgcccatgctgtctctagctccctgatgggtcagggcttctgcctcggtattcgcgggcgggtattattacccctttctcgaggnggcc

SEQ ID NO: 319577 - DNA, 479 bp, Homo sapiens
  misc_feature (264)..(264): n is a, c, g, or t
catgttgatggtacttcaagccatgagactggaggagatccctgagactgaagctgagaaaaaaagaggtcaagggctgagccgtgggcactacagcttttgcacactggagagaagagcaagaactggcaaaggagactgagaaggagcagccagagagtacctgcagatgaaatggcccctcctcgatgtcccctccagcgccacagtcaaggacacgaggtcaccatctccagcacacttgtctaataaagttcctgtcgntcagcacaggcacccatctcagggtccagcgtgacctccaatggggtcagcatagtcaccaactctgagttccatacaacctcgagtgggatcagcacaggcaccaactctgagttcagaacagcgtccagtgggatcagcatagccaccaactctgagtccagcacaacctccagtggggccagcacagccaccaactctgagtccagcacacc

SEQ ID NO: 319578 - DNA, 1183 bp, Homo sapiens
ctggctggggaagacgggaaatcacaatggcagagctgcagatggagtcggggaagctggggcaggcggcaggggcgagaagagacaggagacagaaagtgcaagagaggtaagagcgagaagtgccctctgcccaggtccatgcccacagctctgctggcctctcccccgtccttccccgccacgctccatgcccaccaggccctcccggtgctacaggcccagcctctttccctggtcaccaagtctgcccactaagctccccccgacccctgcaggctgtcacatgactcattgagtagtaatgattcagaagaaaaagaaaaaggagactttattggtcaatatttgaccactctggactgttctgtaaagtggctggtaacaacagcactttacagtttgtagatgtaaccagtagctgatcttaaggcttttttaaaaaacaaaacaaaacaacaaaaaaaaatctttataagaaagagaactgaaaagtagcgtgctattcgtcctgtaggtgctgtggtggatggacctgggcagagggcacttctctctcttacctctcttgcactttctgtctcctgtctcttctcgcccctgccgcctgccccagcttccccgactccatctgcagctctgccattgtgacatttcctgttacccagcccaagttttcatcgtctgctcaataccgtgggttcttcttcgtcctctgtcctctgcccagtgtgaggccatcaccatgtgagaagacatcttggcctgatttgctgccaccagcgtcccctccctcagtgggcccgaactcgccagccccagctttcagtggagaaagcggtcctctgaaatggtttcctcccaacccccgcatttaaagggactcaaggtgcctgccacttcctcagcgaagaagtctgtgttcctccccgtccttgccagtggcgatcatcccttcacaatcccagagtggcaggcgggaccagccccatggtctggctcctgtcacctgggtccgtgccagcacaatctgccaaagttctagagaccctgttcccttccccatcacctcacatgcttcttctgtgtgtatttctttttgtttttatggtttttggagcaatttaaactcccagttgtttattttcacaaaagaaaataaaattgcagttgcaagaccttt

SEQ ID NO: 319579 - DNA, 3055 bp, Homo sapiens
gcgccgggccgggccgggcagggcgcgggcggctaggggctccgagagcggcggccccggcccgcggccccaccatgccccagctcggcggcgggggcggcggcggcggcggcggcagcgggggaggcggcggctccagcgccggggcggccggcggaggggacgacctcggggcgaacgacgagctgatccccttccaggacgaggggggcgaggagcaggagccgagcagcgatagcgcctcggcgcagcgggacctagacgaggtcaagtcgtccctggtcaacgagtcggagaaccagagcagcagctcggactcggaggcggagaggcgcccgcagcccgtccgggacactttccagaagccgcgggactatttcgccgaagtgagaaggcctcaggacagcgcgttctttaaaggacccccgtaccctgggtaccccttcctgatgatcccggacctgagcagcccgtacctctccaacggacccctgtctcccggaggagcgcgcacctacctgcagatgaaatggcccctcctcgatgtcccctccagcgccacagtcaaggacacgaggtcaccatctccagcacacttgtctaataaagttcctgtcgttcagcacccgcatcacatgcatccgctgactcccctcatcacctacagcaatgaccacttctcccccggctcccctcccacccacctctccccagagatcgatccaaagacaggaatcccccggccccctcacccatccgagctgtcaccgtattacccactctctcccggagctgtcggacaaatcccccaccccctcggctggctcgtcccacagcaaggccagcccatgtactcccttcctcccggtggcttccggcacccttaccccgccctcgccatgaacgcctcgatgtccagcctggtctccagtcggttctctcctcacatggtggctcctgcccaccctggcctgcccacctcagggatcccccaccctgccatcgtctcccccatcgtcaagcaggaaccggcaccccccagcctgagccctgcagtgagcgtgaaatcaccagtcaccgtgaaaaaggaggaggaaaagaagccccacgtgaagaagcctctgaatgccttcatgttgtatatgaaggagatgagggccaaggtggtggctgagtgcaccctgaaggaaagtgcagccattaaccagatccttggaagaaagtggcacaacctgtctcgagaagaacaggccaagtactacgagctggcccggaaggagcggcagcttcactcgcagctctacccaacctggtcagcccgggacaactatggtaagaaaaagaagaggaagagagaaaagcagctgtcccagacacagtcacagcagcaagtccaggaggcagagggtgccctggcctccaagagcaagaagccatgtgttcagtacctgccccccgagaagccctgtgacagccctgcctcctcccacgggagcatgctggactccccggccactccctctgcagctttggcctcaccagctgcccctgctgccacccattcggagcaagcccagcccctctccctcaccaccaaaccagaaacccgggcccagctggctctccactctgccgccttcctgtcggctaaggctgcagcctcctcctctgggcagatgggcagccagcctcccctcctgtcccggcccctcccccttgggtccatgcccacagctctgctggcctctcccccgtccttccccgccacgctccatgcccaccaggccctcccggtgctacaggcccagcctctttccctggtcaccaagtctgcccactaagctccccccgacccctgcaggctgtcacatgactcattgagtagtaatgattcagaagaaaaagaaaaaggagactttattggtcaatatttgaccactctggactgttctgtaaagtggctggtaacaacagcactttacagtttgtagatgtaaccagtagctgatcttaaggcttttttaaaaaacaaaacaaaacaacaaaaaaaaatctttataagaaagagaactgaaaagtagcgtgctattcgtcctgtaggtgctgtggtggatggacctgggcagagggcacttctctctcttacctctcttgcactttctgtctcctgtctcttctcgcccctgccgcctgccccagcttccccgactccatctgcagctctgccattgtgacatttcctgttacccagcccaagttttcatcgtctgctcaataccgtgggttcttcttcgtcctctgtcctctgcccagtgtgaggccatcaccatgtgagaagacatcttggcctgatttgctgccaccagcgtcccctccctcagtgggcccgaactcgccagccccagctttcagtggagaaagcggtcctctgaaatggtttcctcccaacccccgcatttaaagggactcaaggtgcctgccacttcctcagcgaagaagtctgtgttcctccccgtccttgccagtggcgatcatcccttcacaatcccagagtggcaggcgggaccagccccatggtctggctcctgtcacctgggtccgtgccagcacaatctgccaaagttctagagaccctgttcccttccccatcacctcacatgcttcttctgtgtgtatttctttttgtttttatggtttttggagcaatttaaactcccagttgtttattttcacaaaagaaaataaaattgcagttgcaagacctttaaagagtgtttctttagtgcttttgttgaatcaaaccacctgtttgtttcactcccaaaccctgtgttagactttcgcagatatgcaaaggaagattgccacttgccacaggggaatgttaggcatgcctgacacccttagaaaacctgaacccagcttcctgtctcaaatgtgcatgggccagtcagtgtccatgactgagctgcaaagggggtaatcattttcacagctgatttaaatgaatttgccgcctggaatgacattcagcttatgcttctatcacccattt

SEQ ID NO: 319580 - DNA, 389 bp, Homo sapiens
cagcgcagatcatccctcagcagcctgtagtgtttgagatgacacagcgcagatcattccccagaagcctgtactgtttcccacacacagtgcacgtgaggggagcgatggagggtgggtgtgatcccttctcaagtcctgctgctctgctgtgtccactgctgtcatctctcagggactgttttgaggactgaatgggatgttgcctggaaaatacctggcacttacttgattccataaataacagctggtcatactctccatctccttggcaaccattcctggtcttttttgtctctttcagtctaataaagttcctgtcgttcagcacccgcatcacatgcatccgctgactcccctcatcacctacagcaatgaccacttctccc

SEQ ID NO: 319581 - DNA, 2766 bp, Homo sapiens
gcgccgggccgggccgggcagggcgcgggcggctaggggctccgagagcggcggccccggcccgcggccccaccatgccccagctcggcggcgggggcggcggcggcggcggcggcagcgggggaggcggcggctccagcgccggggcggccggcggaggggacgacctcggggcgaacgacgagctgatccccttccaggacgaggggggcgaggagcaggagccgagcagcgatagcgcctcggcgcagcgggacctagacgaggtcaagtcgtccctggtcaacgagtcggagaaccagagcagcagctcggactcggaggcggagaggcgcccgcagcccgtccgggacactttccagaagccgcgggactatttcgccgaagtgagaaggcctcaggacagcgcgttctttaaaggacccccgtaccctgggtaccccttcctgatgatcccggacctgagcagcccgtacctctccaacggacccctgtctcccggaggagcgcgcacctacctgcagatgaaatggcccctcctcgatgtcccctccagcgccacagtcaaggacacgaggtcaccatctccagcacacttgtctaataaagttcctgtcgttcagcacccgcatcacatgcatccgctgactcccctcatcacctacagcaatgaccacttctcccccggctcccctcccacccacctctccccagagatcgatccaaagacaggaatcccccggccccctcacccatccgagctgtcaccgtattacccactctctcccggagctgtcggacaaatcccccaccccctcggctggctcgtcccacagcaaggccagcccatgtactcccttcctcccggtggcttccggcacccttaccccgccctcgccatgaacgcctcgatgtccagcctggtctccagtcggttctctcctcacatggtggctcctgcccaccctggcctgcccacctcagggatcccccaccctgccatcgtctcccccatcgtcaagcaggaaccggcaccccccagcctgagccctgcagtgagcgtgaaatcaccagtcaccgtgaaaaaggaggaggaaaagaagccccacgtgaagaagcctctgaatgccttcatgttgtatatgaaggagatgagggccaaggtggtggctgagtgcaccctgaaggaaagtgcagccattaaccagatccttggaagaaagtggcacaacctgtctcgagaagaacaggccaagtactacgagctggcccggaaggagcggcagcttcactcgcagctctacccaacctggtcagcccgggacaactatggtaagaaaaagaagaggaagagagaaaagcagctgtcccagacacagtcacagcagcaagtccaggaggcagagggtgccctggcctccaagagcaagaagccatgtgttcagtacctgccccccgagaagccctgtgacagccctgcctcctcccacgggagcatgctggactccccggccactccctctgcagctttggcctcaccagctgcccctgctgccacccattcggagcaagcccagcccctctccctcaccaccaaaccagaaacccgggcccagctggctctccactctgccgccttcctgtcggctaaggctgcagcctcctcctctgggcagatgggcagccagcctcccctcctgtcccggcccctcccccttgggtccatgcccacagctctgctggcctctcccccgtccttccccgccacgctccatgcccaccaggccctcccggtgctacaggcccagcctctttccctggtcaccaagtctgcccactaagctccccccgacccctgcaggctgtcacatgactcattgagtagtaatgattcagaagaaaaagaaaaaggagactttattggtcaatatttgaccactctggactgttctgtaaagtggctggtaacaacagcactttacagtttgtagatgtaaccagtagctgatcttaaggcttttttaaaaaacaaaacaaaacaacaaaaaaaaatctttataagaaagagaactgaaaagtagcgtgctattcgtcctgtaggtgctgtggtggatggacctgggcagagggcacttctctctcttacctctcttgcactttctgtctcctgtctcttctcgcccctgccgcctgccccagcttccccgactccatctgcagctctgccattgtgacatttcctgttacccagcccaagttttcatcgtctgctcaataccgtgggttcttcttcgtcctctgtcctctgcccagtgtgaggccatcaccatgtgagaagacatcttggcctgatttgctgccaccagcgtcccctccctcagtgggcccgaactcgccagccccagctttcagtggagaaagcggtcctctgaaatggtttcctcccaacccccgcatttaaagggactcaaggtgcctgccacttcctcagcgaagaagtctgtgttcctccccgtccttgccagtggcgatcatcccttcacaatcccagagtggcaggcgggaccagccccatggtctggctcctgtcacctgggtccgtgccagcacaatctgccaaagttctagagaccctgttcccttccccatcacctcacatgcttcttctgtgtgtatttctttttgtttttatggtttttggagcaatttaaactcccagttgtttattttcacaaaagaaaataaaattgcagttgcaagaccttt

SEQ ID NO: 319582 - DNA, 1425 bp, Homo sapiens
gcgccgggccgggccgggcagggcgcgggcggctaggggctccgagagcggcggccccggcccgcggccccaccatgccccagctcggcggcgggggcggcggcggcggcggcggcagcgggggaggcggcggctccagcgccggggcggccggcggaggggacgacctcggggcgaacgacgagctgatccccttccaggacgaggggggcgaggagcaggagccgagcagcgatagcgcctcggcgcagcgggacctagacgaggtcaagtcgtccctggtcaacgagtcggagaaccagagcagcagctcggactcggaggcggagaggcgcccgcagcccgtccgggacactttccagaagccgcgggactatttcgccgaagtgagaaggcctcaggacagcgcgttctttaaaggacccccgtaccctgggtaccccttcctgatgatcccggacctgagcagcccgtacctctccaacggacccctgtctcccggaggagcgcgcacctacctgcagatgaaatggcccctcctcgatgtcccctccagcgccacagtcaaggacacgaggtcaccatctccagcacacttgtctaataaagttcctgtcgttcagcacccgcatcacatgcatccgctgactcccctcatcacctacagcaatgaccacttctcccccggctcccctcccacccacctctccccagagatcgatccaaagacaggaatcccccggccccctcacccatccgagctgtcaccgtattacccactctctcccggagctgtcggacaaatcccccaccccctcggctggctcgtcccacagcaaggccagcccatgtactcccttcctcccggtggcttccggcacccttaccccgccctcgccatgaacgcctcgatgtccagcctggtctccagtcggttctctcctcacatggtggctcctgcccaccctggcctgcccacctcagggatcccccaccctgccatcgtctcccccatcgtcaagcaggaaccggcaccccccagcctgagccctgcagtgagcgtgaaatcaccagtcaccgtgaaaaaggaggaggaaaagaagccccacgtgaagaagcctctgaatgccttcatgttgtatatgaaggagatgagggccaaggtggtggctgagtgcaccctgaaggaaagtgcagccattaaccagatccttggaagaaagtggcacaacctgtctcgagaagaacaggccaagtactacgagctggcccggaaggagcggcagcttcactcgcagctctacccaacctggtcagcccgggacaactatgtaagtgcacactctgggcagaggacgctcagaccccaggaacagcctctgcaagaggaggaagggtgaaggaaagcaactgcatttattttta

SEQ ID NO: 319583 - DNA, 421 bp, Homo sapiens
tcatcataagacaactataattccaaaactcttctgataaccacaaagtaacatggctgttaaatattaaaagtgtttaatagctaaaatatttaatatctggggcttgcagctttgtgttggcattttgagttagaatgagtgaacctcagttcagaggtgttatattgaaaggtttcaagtaaaaagcattttacacttcttttggggaatggctttcatgcctaaaacataaaattgttctgatgttttactttaactcattttctcaatgcagccaaaaagagatgcaaattatctcctctaatttctcctccagaaggacacattgtctctgcaaaatgttcctgagagggatctagagttattacagaactgaactgagcatcttggcacatgccttctctgtctctcctcctcc

SEQ ID NO: 319584 - DNA, 751 bp, Homo sapiens
tactgaattctcacaggaagtctcagacgaagacactgctaactccactttcagagagaaacactgaggctcagagctaaactaactcgcctcagagcccacatcctggacttgagcctcagggtgttgcatgccaaagcctgtcctcttcaccccagcttcctgggcattggagcggatccatagtgttagatatgcagtgggaatggcccccattccaagccacttcctgacctgatggcagcaccctgctagtcctcacatggagccctggagaagccgggttccttaacccagatttgaatcaatagcctcacacctggtatgcacatccaggccaagtgtggctgaatggggagcatctgttctggagacggccaccctcatgggctcctctgcttcctgtcccttcgggcactgatttatggcacacagcagggaagggcctgagcttgagccctgaccatcgttatcatcaccatcttcattccagtgcagtgaagaacattctgaaggtagagatgaaggtcttctttctgaatgaagctccttgcatgattcagggatcttcctcttgaaggcaccaatcattttgactttaatgcatgcactctgacttacttgtggtgatctctcctggaaatacatggaaaaatgaaaaataggctaactggggagatttcttaaataccagtttgtatggctgtgttaacctgaatgattaaatataggattgttttttaagttaaaa

SEQ ID NO: 319585 - DNA, 615 bp, Homo sapiens
tactgaattctcacaggaagtctcagacgaagacactgctaactccactttcagagagaaacactgaggctcagagctaaactaactcgcctcagagcccacatcctggacttgagcctcagggtgttgcatgccaaagcctgtcctcttcaccccagcttcctgggcattggagcggatccatagtgttagatatgcagtgggaatggcccccattccaagccacttcctgacctgatggcagcaccctgctagtcctctgcttcctgtcccttcgggcactgatttatggcacacagcagggaagggcctgagcttgagccctgaccatcgttatcatcaccatcttcattccagtgcagtgaagaacattctgaaggtagagatgaaggtcttctttctgaatgaagctccttgcatgattcagggatcttcctcttgaaggcaccaatcattttgactttaatgcatgcactctgacttacttgtggtgatctctcctggaaatacatggaaaaatgaaaaataggctaactggggagatttcttaaataccagtttgtatggctgtgttaacctgaatgattaaatataggattgttttttaagttaaaa

SEQ ID NO: 319586 - DNA, 500 bp, Homo sapiens
attccgtctaaaaaaagctaaaaagctccgactttttctctacatctgagctgtgggaaacagtcaagtatttaacaacaacaacaaaaaacaaacaaacaaaccacctcaggaaagcactcttgggatgaaatacaaataaacaacttttatattgaaaagtatgtgtaactacatactaaaataagagtttaggcttaggcctcaggagatgagtgtcagactcacagggaagtgcaaaccaaaatgcaaatttcaaagtgggtatcactaaagtacatgaccccttgttgatatagtgggtatacaagtgacaggtaataaaggctgaggagcgctggggtaagagtgccacctccttcacatcaagacagagaaagctcaaggccatgtcaagagctggctatgttgtgctcgagtttggaagacacctttttctggcgtctctaacctgagaaataccagattgctcgggcagcatgaaagaggccttttagctt

SEQ ID NO: 319587 - DNA, 2803 bp, Homo sapiens
cagtcagattaactgaaagtaaagagaggactgcgggagtttgggacctttgtgcagacgtgctcatgctcgttcgtgtagagggcgggagagaggaaaggaaggagggcattgggagctgaggccccacctttcatttcagaaaagtgcacaggcagagcgggctgagtcacaggcacaggtgaggaactcaactcaaactcctctctctgggaaaacgcggtgcttgctcctcccggagtggccttggcagggtgttggagccctcggtctgccccgtccggtctctggggccaaggctgggtttccctcatgtatggcaagagctctactcgtgcggtgcttcttctccttggcatacagctcacagctctttggcctatagcagctgtggaaatttatacctcccgggtgctggaggctgttaatgggacagatgctcggttaaaatgcactttctccagctttgcccctgtgggtgatgctctaacagtgacctggaattttcgtcctctagacgggggacctgagcagtttgtattctactaccacatagatcccttccaacccatgagtgggcggtttaaggaccgggtgtcttgggatgggaatcctgagcggtacgatgcctccatccttctctggaaactgcagttcgacgacaatgggacatacacctgccaggtgaagaacccacctgatgttgatggggtgataggggagatccggctcagcgtcgtgcacactgtacgcttctctgagatccacttcctggctctggccattggctctgcctgtgcactgatgatcataatagtaattgtagtggtcctcttccagcattaccggaaaaagcgatgggccgaaagagctcataaagtggtggagataaaatcaaaagaagaggaaaggctcaaccaagagaaaaaggtctctgtttatttagaagacacagactaacaattttagatggaagctgagatgatttccaagaacaagaaccctagtatttcttgaagttaatggaaacttttctttggcttttccagttgtgacccgttttccaaccagttctgcagcatattagattctagacaagcaacacccctctggagccagcacagtgctcctccatatcaccagtcatacacagcctcattattaaggtcttatttaatttcagagtgtaaattttttcaagtgctcattaggttttataaacaagaagctacatttttgcccttaagacactacttacagtgttatgacttgtatacacatatattggtatcaaaggggataaaagccaatttgtctgttacatttcctttcacgtatttcttttagcagcacttctgctactaaagttaatgtgtttactctctttccttcccacattctcaattaaaaggtgagctaagcctcctcggtgtttctgattaacagtaaatcctaaattcaaactgttaaatgacatttttatttttatgtctctccttaactatgagacacatcttgttttactgaatttctttcaatattccaggtgatagatttttgttgttttgttaattaatccaagatttacaatagcacaacgctaaatcacacagtaactacaaaaggttacatagatatgaaaagattggcagaggccattgcaggatgaatcacttgtcacttttcttctgtgctgggaaaaataatcaacaatgtgggtctttcatgagcagtgacggatagtttagcttactatgtttcccccccaattcaatgatctataacaacagagcaaagtctatgctcatttgcagactggaatcattaagtaatttaataaaaagattgtgaaacagcatattacaagtttgaaaattcagggctggtgaaaaaaatcaactctaaatgatgataattttgtacagttttatataaaactctgagaactagaagaaattattaactttttttcttttttaattctaattcacttgtttattttgggggaggaagactttggtatggagcaaagaaataccaaaactactttaaatggaataaaaccaactttattctttttttcccccatactggtagataaagcaaactttataagtgggctattgaaagaaaagttacaagcttaagatacagaagcatttgttcaaaggatagaaagcatctaaaagtttaggctcaagatcaatctttacagattgatattttcagtttttaatcgactggactgcagatgttttttcttttaacaaactggaattttcaaacagattatctgtatttaaatgtatagaccttgatatttttccaatactattttttaaaaaattgtatgatttacatatgaacctcagttctgaaattcattacatatctgtctcattctgccttttatactgtctaaaaaagcaaagttttaaagtgcaattttaaaactgtaaattacatctgaaggctatatatcctttaatcacattttatattttttcttcacaattctaacctttgaaaatattataactggatatttcttcaaacagatgtcctggatgatggtccataagaataatgaagaagtagttaaaaatgtatggacagtttttccggcaaaatttgtagcttatgtcttggctaaatagtcaaggggtaatatgggcctgttgtttagtgtctccttcctaaagagcacttttgtattgtaatttattttttattatgctttaaacactatgtaaataaacctttagtaataaagaattatcagttatataatttgtgtatatac

SEQ ID NO: 319588 - DNA, 672 bp, Homo sapiens
atggtaaaataaggtgtctgctttaaaactctggagttcccgaatcagaacccaaactgtattcccttacattctgaaaagtctctaagttcagaggtgtgaatattattaattagatggcaccagtttagctctgtgtaaacttcaatctactcccaagtgcatgtaattcttccaaaaatatgggggaaaaataccttacctgaagcttctgtgggatttacccacttgcttcttgtcttgttcacctgacatttggtttctgcttgttacagaaaagaagaggaaaggctcaaccaagagaaaaaggtctctgtttatttagaagacacagactaacaattttagatggtaaggttcacaaataggttgatttctttcttcagctttctgacatgtccagcccatctctaatgaggactcccagatcatcactttatggctgttaggtgtttcccatatgaaattagaggagctgggtcagggagacaaaagtcttctattagtcttatggatagctcctccttgagtgtattttgtgcaaaagattaagaagctggactctactgccattaaagctgagagaatcctaaggttatttgtggcttcggggttatatttattactactactactaataaatattcaacaagtaaataaatcttttttaaa

SEQ ID NO: 319589 - DNA, 2749 bp, Homo sapiens
cagtcagattaactgaaagtaaagagaggactgcgggagtttgggacctttgtgcagacgtgctcatgctcgttcgtgtagagggcgggagagaggaaaggaaggagggcattgggagctgaggccccacctttcatttcagaaaagtgcacaggcagagcgggctgagtcacaggcacaggtgaggaactcaactcaaactcctctctctgggaaaacgcggtgcttgctcctcccggagtggccttggcagggtgttggagccctcggtctgccccgtccggtctctggggccaaggctgggtttccctcatgtatggcaagagctctactcgtgcggtgcttcttctccttggcatacagctcacagctctttggcctatagcagctgtggaaatttatacctcccgggtgctggaggctgttaatgggacagatgctcgctggaattttcgtcctctagacgggggacctgagcagtttgtattctactaccacatagatcccttccaacccatgagtgggcggtttaaggaccgggtgtcttgggatgggaatcctgagcggtacgatgcctccatccttctctggaaactgcagttcgacgacaatgggacatacacctgccaggtgaagaacccacctgatgttgatggggtgataggggagatccggctcagcgtcgtgcacactgtacgcttctctgagatccacttcctggctctggccattggctctgcctgtgcactgatgatcataatagtaattgtagtggtcctcttccagcattaccggaaaaagcgatgggccgaaagagctcataaagtggtggagataaaatcaaaagaagaggaaaggctcaaccaagagaaaaaggtctctgtttatttagaagacacagactaacaattttagatggaagctgagatgatttccaagaacaagaaccctagtatttcttgaagttaatggaaacttttctttggcttttccagttgtgacccgttttccaaccagttctgcagcatattagattctagacaagcaacacccctctggagccagcacagtgctcctccatatcaccagtcatacacagcctcattattaaggtcttatttaatttcagagtgtaaattttttcaagtgctcattaggttttataaacaagaagctacatttttgcccttaagacactacttacagtgttatgacttgtatacacatatattggtatcaaaggggataaaagccaatttgtctgttacatttcctttcacgtatttcttttagcagcacttctgctactaaagttaatgtgtttactctctttccttcccacattctcaattaaaaggtgagctaagcctcctcggtgtttctgattaacagtaaatcctaaattcaaactgttaaatgacatttttatttttatgtctctccttaactatgagacacatcttgttttactgaatttctttcaatattccaggtgatagatttttgttgttttgttaattaatccaagatttacaatagcacaacgctaaatcacacagtaactacaaaaggttacatagatatgaaaagattggcagaggccattgcaggatgaatcacttgtcacttttcttctgtgctgggaaaaataatcaacaatgtgggtctttcatgagcagtgacggatagtttagcttactatgtttcccccccaattcaatgatctataacaacagagcaaagtctatgctcatttgcagactggaatcattaagtaatttaataaaaagattgtgaaacagcatattacaagtttgaaaattcagggctggtgaaaaaaatcaactctaaatgatgataattttgtacagttttatataaaactctgagaactagaagaaattattaactttttttcttttttaattctaattcacttgtttattttgggggaggaagactttggtatggagcaaagaaataccaaaactactttaaatggaataaaaccaactttattctttttttcccccatactggtagataaagcaaactttataagtgggctattgaaagaaaagttacaagcttaagatacagaagcatttgttcaaaggatagaaagcatctaaaagtttaggctcaagatcaatctttacagattgatattttcagtttttaatcgactggactgcagatgttttttcttttaacaaactggaattttcaaacagattatctgtatttaaatgtatagaccttgatatttttccaatactattttttaaaaaattgtatgatttacatatgaacctcagttctgaaattcattacatatctgtctcattctgccttttatactgtctaaaaaagcaaagttttaaagtgcaattttaaaactgtaaattacatctgaaggctatatatcctttaatcacattttatattttttcttcacaattctaacctttgaaaatattataactggatatttcttcaaacagatgtcctggatgatggtccataagaataatgaagaagtagttaaaaatgtatggacagtttttccggcaaaatttgtagcttatgtcttggctaaatagtcaaggggtaatatgggcctgttgtttagtgtctccttcctaaagagcacttttgtattgtaatttattttttattatgctttaaacactatgtaaataaacctttagtaataaagaattatcagttatataatttgtgtatatac

SEQ ID NO: 319590 - DNA, 1575 bp, Homo sapiens
cagtcagattaactgaaagtaaagagaggactgcgggagtttgggacctttgtgcagacgtgctcatgctcgttcgtgtagagggcgggagagaggaaaggaaggagggcattgggagctgaggccccacctttcatttcagaaaagtgcacaggcagagcgggctgagtcacaggcacaggtgaggaactcaactcaaactcctctctctgggaaaacgcggtgcttgctcctcccggagtggccttggcagggtgttggagccctcggtctgccccgtccggtctctggggccaaggctgggtttccctcatgtatggcaagagctctactcgtgcggtgcttcttctccttggcatacagctcacagctctttggcctatagcagctgtggaaatttatacctcccgggtgctggaggctgttaatgggacagatgctcggttaaaatgcactttctccagctttgcccctgtgggtgatgctctaacagtgacctggaattttcgtcctctagacgggggacctgagcagtttgtattctactaccacatagatcccttccaacccatgagtgggcggtttaaggaccgggtgtcttgggatgggaatcctgagcggtacgatgcctccatccttctctggaaactgcagttcgacgacaatgggacatacacctgccaggtgaagaacccacctgatgttgatggggtgataggggagatccggctcagcgtcgtgcacactgtacgcttctctgagatccacttcctggctctggccattggctctgcctgtgcactgatgatcataatagtaattgtagtggtcctcttccagcattaccggaaaaagcgatgggccgaaagagctcataaagtggtggagataaaatcaaaagaagaggaaaggctcaaccaagagaaaaaggtctctgtttatttagaagacacagactaacaattttagatggaagctgagatgatttccaagaacaagaaccctagtatttcttgaagttaatggaaacttttctttggcttttccagttgtgacccgttttccaaccagttctgcagcatattagattctagacaagcaacacccctctggagccagcacagtgctcctccatatcaccagtcatacacagcctcattattaaggtcttatttaatttcagagtgtaaattttttcaagtgctcattaggttttataaacaagaagctacatttttgcccttaagacactacttacagtgttatgacttgtatacacatatattggtatcaaaggggataaaagccaatttgtctgttacatttcctttcacgtatttcttttagcagcacttctgctactaaagttaatgtgtttactctctttccttcccacattctcaattaaaaggtgagctaagcctcctcggtgtttctgattaacagtaaatcctaaattcaaactgttaaatgacatttttatttttatgtctctccttaactatgagacacatcttgttttactgaatttctttcaatattccaggtgatgctcaaagatcttgggggtaccga

SEQ ID NO: 319591 - DNA, 1743 bp, Homo sapiens
cagtcagattaactgaaagtaaagagaggactgcgggagtttgggacctttgtgcagacgtgctcatgctcgttcgtgtagagggcgggagagaggaaaggaaggagggcattgggagctgaggccccacctttcatttcagaaaagtgcacaggcagagcgggctgagtcacaggcacaggtgaggaactcaactcaaactcctctctctgggaaaacgcggtgcttgctcctcccggagtggccttggcagggtgttggagccctcggtctgccccgtccggtctctggggccaaggctgggtttccctcatgtatggcaagagctctactcgtgcggtgcttcttctccttggcatacagctcacagctctttggcctatagcagctgtggaaatttatacctcccgggtgctggaggctgttaatgggacagatgctcggttaaaatgcactttctccagctttgcccctgtgggtgatgctctaacagtgacctggaattttcgtcctctagacgggggacctgagcagtttgtattctactaccacatagatcccttccaacccatgagtgggcggtttaaggaccgggtgtcttgggatgggaatcctgagcggtacgatgcctccatccttctctggaaactgcagttcgacgacaatgggacatacacctgccaggtgaagaacccacctgatgttgatggggtgataggggagatccggctcagcgtcgtgcacactgtacgcttctctgagatccacttcctggctctggccattggctctgcctgtgcactgatgatcataatagtaattgtagtggtcctcttccagcattaccggaaaaagcgatgggccgaaagagctcataaagtggtggagataaaatcgtaaggctgggcagttctgggaaagttctaacactcttatggcgactcttggtattttgcagtgggctaaatagttgctgaacagatgtttttccctttaagtaaatcctatataaaagaattcacatttgcaggacagataaatcaggtatgaactagtaactttacaaaagctttcttaattttacaaaatatttccttatgggatttctttactatgtgggggggttgattttacaaaaatgtgctatgtaaagcttttctaaaaaatcccttatgtttaaagtgaagcatacatttgtaaaaaccactgggctaggcagtcagcagggccactatgagtcagggcttaggaaagtctgttgtgctgatagcaggtgttcattaaatgtattttaaaattgagataaaatttacccaccataaaatttacctttttcattttcacaaagttgtgcagcaatcatcactaattgcagaacgtttttaagctccctcccgtaaagaaaccccatatccctagctatcactccctattatcccctcctaccagcccccgacaactactcatctactttctgtctctatggatttgcttattctggacatttcatttaaatagaatcatacaatatgtggtcttttatgcccagcttctttcacttagcataatgctttcaaggctcatccttgttgatgtattagtatttctttcctttttatgactgcataatattccattgtatgaatataccacatattgtttgtccattcaattgatgggcatttaggttttttctgcttgttggctgttgtgactaatgctgctataaacattcatttacaa

SEQ ID NO: 319592 - DNA, 2747 bp, Homo sapiens
cagtcagattaactgaaagtaaagagaggactgcgggagtttgggacctttgtgcagacgtgctcatgctcgttcgtgtagagggcgggagagaggaaaggaaggagggcattgggagctgaggccccacctttcatttcagaaaagtgcacaggcagagcgggctgagtcacaggcacaggtgaggaactcaactcaaactcctctctctgggaaaacgcggtgcttgctcctcccggagtggccttggcagggtgttggagccctcggtctgccccgtccggtctctggggccaaggctgggtttccctcatgtatggcaagagctctactcgtgcggtgcttcttctccttggcatacagctcacagctctttggcctatagcagctgtggaaatttatacctcccgggtgctggaggctgttaatgggacagatgctcggttaaaatgcactttctccagctttgcccctgtgggtgatgctctaacagtgacctggaattttcgtcctctagacgggggacctgagcagtttgtattctactaccacatagatcccttccaacccatgagtgggcggtttaaggaccgggtgtcttgggatgggaatcctgagcggtacgatgcctccatccttctctggaaactgcagttcgacgacaatgggacatacacctgccaggtgaagaacccacctgatgttgatggggtgataggggagatccggctcagcgtcgtgcacactgatgatcataatagtaattgtagtggtcctcttccagcattaccggaaaaagcgatgggccgaaagagctcataaagtggtggagataaaatcaaaagaagaggaaaggctcaaccaagagaaaaaggtctctgtttatttagaagacacagactaacaattttagatggaagctgagatgatttccaagaacaagaaccctagtatttcttgaagttaatggaaacttttctttggcttttccagttgtgacccgttttccaaccagttctgcagcatattagattctagacaagcaacacccctctggagccagcacagtgctcctccatatcaccagtcatacacagcctcattattaaggtcttatttaatttcagagtgtaaattttttcaagtgctcattaggttttataaacaagaagctacatttttgcccttaagacactacttacagtgttatgacttgtatacacatatattggtatcaaaggggataaaagccaatttgtctgttacatttcctttcacgtatttcttttagcagcacttctgctactaaagttaatgtgtttactctctttccttcccacattctcaattaaaaggtgagctaagcctcctcggtgtttctgattaacagtaaatcctaaattcaaactgttaaatgacatttttatttttatgtctctccttaactatgagacacatcttgttttactgaatttctttcaatattccaggtgatagatttttgttgttttgttaattaatccaagatttacaatagcacaacgctaaatcacacagtaactacaaaaggttacatagatatgaaaagattggcagaggccattgcaggatgaatcacttgtcacttttcttctgtgctgggaaaaataatcaacaatgtgggtctttcatgagcagtgacggatagtttagcttactatgtttcccccccaattcaatgatctataacaacagagcaaagtctatgctcatttgcagactggaatcattaagtaatttaataaaaagattgtgaaacagcatattacaagtttgaaaattcagggctggtgaaaaaaatcaactctaaatgatgataattttgtacagttttatataaaactctgagaactagaagaaattattaactttttttcttttttaattctaattcacttgtttattttgggggaggaagactttggtatggagcaaagaaataccaaaactactttaaatggaataaaaccaactttattctttttttcccccatactggtagataaagcaaactttataagtgggctattgaaagaaaagttacaagcttaagatacagaagcatttgttcaaaggatagaaagcatctaaaagtttaggctcaagatcaatctttacagattgatattttcagtttttaatcgactggactgcagatgttttttcttttaacaaactggaattttcaaacagattatctgtatttaaatgtatagaccttgatatttttccaatactattttttaaaaaattgtatgatttacatatgaacctcagttctgaaattcattacatatctgtctcattctgccttttatactgtctaaaaaagcaaagttttaaagtgcaattttaaaactgtaaattacatctgaaggctatatatcctttaatcacattttatattttttcttcacaattctaacctttgaaaatattataactggatatttcttcaaacagatgtcctggatgatggtccataagaataatgaagaagtagttaaaaatgtatggacagtttttccggcaaaatttgtagcttatgtcttggctaaatagtcaaggggtaatatgggcctgttgtttagtgtctccttcctaaagagcacttttgtattgtaatttattttttattatgctttaaacactatgtaaataaacctttagtaataaagaattatcagttatataatttgtgtatatac

SEQ ID NO: 319593 - DNA, 1293 bp, Homo sapiens
cagtcagattaactgaaagtaaagagaggactgcgggagtttgggacctttgtgcagacgtgctcatgctcgttcgtgtagagggcgggagagaggaaaggaaggagggcattgggagctgaggccccacctttcatttcagaaaagtgcacaggcagagcgggctgagtcacaggcacaggtgaggaactcaactcaaactcctctctctgggaaaacgcggtgcttgctcctcccggagtggccttggcagggtgttggagccctcggtctgccccgtccggtctctggggccaaggctgggtttccctcatgtatggcaagagctctactcgtgcggtgcttcttctccttggcatacagctcacagctctttggcctatagcagctgtggaaatttatacctcccgggtgctggaggctgttaatgggacagatgctcggttaaaatgcactttctccagctttgcccctgtgggtgatgctctaacagtgacctggaattttcgtcctctagacgggggacctgagcagtttgtattctactaccacatagatcccttccaacccatgagtgggcggtttaaggaccgggtgtcttgggatgggaatcctgagcggtacgatgcctccatccttctctggaaactgcagttcgacgacaatgggacatacacctgccaggtgaagaacccacctgatgttgatggggtgataggggagatccggctcagcgtcgtgcacactgtacgcttctctgagatccacttcctggctctggccattggctctgcctgtgcactgatgatcataatagtaattgtagtggtcctcttccagcattaccggaaaaagcgatgggccgaaagagctcataaagtggtggagataaaatcaaaagaagaggaaaggctcaaccaagagaaaaaggtctctgtttatttagaagacacagactaacaattttagatggtaaggttcacaaataggttgatttctttcttcagctttctgacatgtccagcccatctctaatgaggactcccagatcatcactttatggctgttaggtgtttcccatatgaaattagaggagctgggtcagggagacaaaagtcttctattagtcttatggatagctcctccttgagtgtattttgtgcaaaagattaagaagctggactctactgccattaaagctgagagaatcctaaggttatttgtggcttcggggttatatttattactactactactaataaatattcaacaagtaaataaatcttttttaaa

SEQ ID NO: 319594 - DNA, 533 bp, Homo sapiens
agtcctcagtaatatcaggcaattcacctagaattcagaaagcaacaaatagaacaattcctctctcttgggacttcattttcttggatctgaatttttaagtcctgaagattctgaaatattccaaaggattaggagtttaaaattctctcttcctcatggaggaaaaccaggagatatacaaagaggtatcctgctagaggatcccaggctaacgatggattagggaagaacagatgatgtgtccaagcgaggaggacataagagaagcaaggtgccaaataaagaatgagaggtcaaatgtaatacaatttgctgactgtaagggggagagtttttttccccaaaatgccaaagtacataaagataaaggtgaaagtttcctctcaccagttccagtgttaacagtgagagttcttgggcaagccctccccaaatgaccgaaatggccctcctgctactccaggactacattttaccagcatagtgacaaagtaaaaagcaaatgattagttcaagccagtgatgtgaag

SEQ ID NO: 319595 - DNA, 162 bp, Homo sapiens
cacaggaaattaaaaacatgaaacatatctaggtgctaaagctgtatccaaaattcttagcaagcagggtgacctgggattccttggcaaatgactttaaaaaaaattctcatcagacatttttagttcaattcaataaaaagagggtgtgtgtatgggagt

SEQ ID NO: 319596 - DNA, 583 bp, Homo sapiens
atcctttgctggagctggcacacggaggaagtcctggagggagggtagacaccgtggaggtaagggcttgggacctgtgtcaggagagctaggtccatctccctcccagtctctcactaggcttatgatctttagcagtgaaaataatctctctaaggtggggaaaggaccccggtccctgctgtgctcaataaattatgaggatcaaaataaattatcagtgaatgtgaatgggaaaactaagaaattgttaaaattctcgaatacattacattttcatccacagaaaagtataggctagggatcatgggggaatagttagtaatgacagggatagttgaacttaaaaaaaaagtttgtgaggctgacaaagaagaaacggacacatttcctgatcttggagggttcatagggtagaagatggtagatgacagctgggtgtggtggcactcgcctgtagtcccagctactcaagaggctgtggtgggaggattgcttgagcccaggcattcaaggctgcagtgagctataatcatgccactgcattccaactgagtgacacagcaagactcctctcttaaaa

SEQ ID NO: 319597 - DNA, 640 bp, Homo sapiens
atcctttgctggagctggcacacggaggaagtcctggagggagggtagacaccgtggaggtaagggcttgggacctgtgtcaggagagctaggtccatctccctcccagtctctcactaggcttatgatctttagcagtgaaaataatctctctaaggtggggaaaggaccccggtccctgctgtgctcaataaattatgaggatcaaaataaattatcaaatgagtactatcaggaaggttcaaaccacgggctaaatcagtagttctaaaacttgactacacatcggaatcacctagggaactttaaaagatactaagatttaggtccaacctgggtttactgatttaacaacctaggttgtggctgtggcctgggaacatggatattaaaaactctccaggtggttctacgcagtggctaggtttgatgacctctgcctagatgtcccaacgactaagagatgtgcgttggggacaaggcaattctcttagtagaaagaggctttcgggacagcattcttattattgagaattgagaattcatatgccacacaatttatccttttaaagtgtgcagctcagtggcttctagcgtaatcacaaggttgtgccaccgtcaccactgtctaccctggaag

SEQ ID NO: 319598 - DNA, 399 bp, Homo sapiens
gacttacgaatctcgaacctcggtaccccccccgactagcccgacagcccagactagcccgacagctccccgactagcccgacagctccccgactagcccgacagctccccgactagcccgacagctccccgactagcccgacagctccccgactagcccgacagctccccgactagcccgacggtgtgtacgcatcacggacactggcctcagctatctgtccaccatgtcgtccctccgcagcctctacctgcgatggtgctgccaggtgcaagacttcgggctgaagcacctcctggccctggggagtttgcgcctcctgtctctggcaggctgcccgctgctcaccaccaccgggctgtcgggctagtcgaggggatcctcaagtagccccgaaa

SEQ ID NO: 319599 - DNA, 637 bp, Homo sapiens
ccccgactagttcgacagcattagggacaatataatgtgtgctgtagtggacgcttgtaccaagtgccacagaaaggagagagctgactgcctggaagtcagaggcccctcagaggagggaacatttcagcttaatcttcaaggatgaggaataattcactgggcagaaaaatgaggggataagaatccaacctgtcgggctagtcggggccccgactagcccgacggtgtgtacgcatcacggacactggcctcagctatctgtccaccatgtcgtccctccgcagcctctacctgcgatggtgctgccaggtgcaagacttcgggctgaagcacctcctggccctggggagtttgcgcctcctgtctctggcaggctgcccgctgctcaccaccaccgggctgtcgggcctggtgcagctgcaggagctggaggagctggagctgaccaactgccccggggccacccccgagctcttcaagtatttctcgcagcacctgccccgctgcctcgtcattgagtagcgcgaggcccccgccccggtcgcgggaacccggccatgacctgggcgggggcgcggggcgccgccgagccccctcttcccgccttgcgctcgggggagcccccgcgcccccg

SEQ ID NO: 319600 - DNA, 1053 bp, Homo sapiens
agatgggctcttctggtatttctcggcctgcgagaagtgtgtgctggcccaggtgtgcaaggcctggcggcgcgtgctgtaccagcccaagttctgggcaggcctcacgccggtgctgcatgccaaggagctctacaacgtgctgcctggtggcgagaaggagttcgtgaacctgcagggttttgccgccagaggcttcgagggcttctgcctggttggcgtctccgacctggacatctgtgagttcattgacaactatgcgctctccaagaagggtgtcaaagccatgagcctcaagcgctccaccatcacggacgcaggcctcgaggttatgcttgaacagatgcagggcgtggtgcgtctggagctgtcgggctgcaacgacttcaccgaggccgggctgtggtccagcctgagcgcgcgcatcacctcgctgagcgtgagtgactgcatcaacgtggccgacgacgccatcgcggccatctcgcagctgctgcccaacctggcggagctgagcctgcaggcctaccacgtgacggacacggcgctggcctacttcacggcgcgccagggccacagcacgcacacgctgcgcctgctctcctgctgggagatcaccaaccacggcgtggtcaacgtggtgcacagcctgcccaacctcaccgcgctcagcctctcgggctgctccaaggtcaccgacgacggcgtggagctcgtggccgagaacctgcgcaagctgcgcagccttgacctctcgtggtgcccacgcatcaccgacatggcgctggagtacgtggcctgcgacctgcaccgcctagaggagctcgtgctcgacagggtgtgtacgcatcacggacactggcctcagctatctgtccaccatgtcgtccctccgcagcctctacctgcgatggtgctgccaggtgcaagacttcgggctgaagcacctcctggccctggggagtttgcgcctcctgtctctggcaggctgcccgctgctcaccaccaccgggctgtcgggctagtcgaggggatcctcaagtagccccgaaa

SEQ ID NO: 319601 - DNA, 1447 bp, Homo sapiens
agatgggctcttctggtatttctcggcctgcgagaagtgtgtgctggcccaggtgtgcaaggcctggcggcgcgtgctgtaccagcccaagttctgggcaggcctcacgccggtgctgcatgccaaggagctctacaacgtgctgcctggtggcgagaaggagttcgtgaacctgcagggttttgccgccagaggcttcgagggcttctgcctggttggcgtctccgacctggacatctgtgagttcattgacaactatgcgctctccaagaagggtgtcaaagccatgagcctcaagcgctccaccatcacggacgcaggcctcgaggttatgcttgaacagatgcagggcgtggtgcgtctggagctgtcgggctgcaacgacttcaccgaggccgggctgtggtccagcctgagcgcgcgcatcacctcgctgagcgtgagtgactgcatcaacgtggccgacgacgccatcgcggccatctcgcagctgctgcccaacctggcggagctgagcctgcaggcctaccacgtgacggacacggcgctggcctacttcacggcgcgccagggccacagcacgcacacgctgcgcctgctctcctgctgggagatcaccaaccacggcgtggtcaacgtggtgcacagcctgcccaacctcaccgcgctcagcctctcgggctgctccaaggtcaccgacgacggcgtggagctcgtggccgagaacctgcgcaagctgcgcagccttgacctctcgtggtgcccacgcatcaccgacatggcgctggagtacgtggcctgcgacctgcaccgcctagaggagctcgtgctcgacaggtgcgcgcccccgggccgcgccgggcggggctgggccgggcggggctgcacggggcggggcggggcggggctgcacggggccgggggcgggggcttccggcggggctggggctgtggcgcggcgggcagagccctcggagcctggggagtgggaaccgcagaaccgcagcacgggttggctggacccccgtccttcccgggtgtgtacgcatcacggacactggcctcagctatctgtccaccatgtcgtccctccgcagcctctacctgcgatggtgctgccaggtgcaagacttcgggctgaagcacctcctggccctggggagtttgcgcctcctgtctctggcaggctgcccgctgctcaccaccaccgggctgtcgggcctggtgcagctgcaggagctggaggagctggagctgaccaactgccccggggccacccccgagctcttcaagtatttctcgcagcacctgccccgctgcctcgtcattgagtagcgcgaggcccccgccccggtcgcgggaacccggccatgacctgggcgggggcgcggggcgccgccgagccccctcttcccgccttgcgctcgggggagcccccgcgcccccg

SEQ ID NO: 319602 - DNA, 404 bp, Homo sapiens
gccgctggccacggacgagaagatcctcagatgggctcttctggtatttctcggcctgcgagaagtgtgtgctggcccaggtgtgcaaggcctggcggcgcgtgctgtaccagcccaagttctgggcaggcctcacgccggtgctgcatgccaaggagctctacaacgtgctgcctggtggcgagaaggagttcgtgaacctgcagggttttgccgccagaggcttcgagggcttctgcctggttggcgtctccgacctggacatctgtgagttcattgacaactatgcgctctccaagaagggtgtcaaagccatgagcctcaagcgctccaccatcacggacgcaggcctcgaggtgtgcaccaggctcgggggggacagggctggggggcaggggcgggca

SEQ ID NO: 319603 - DNA, 1248 bp, Homo sapiens
agatgggctcttctggtatttctcggcctgcgagaagtgtgtgctggcccaggtgtgcaaggcctggcggcgcgtgctgtaccagcccaagttctgggcaggcctcacgccggtgctgcatgccaaggagctctacaacgtgctgcctggtggcgagaaggagttcgtgaacctgcagggttttgccgccagaggcttcgagggcttctgcctggttggcgtctccgacctggacatctgtgagttcattgacaactatgcgctctccaagaagggtgtcaaagccatgagcctcaagcgctccaccatcacggacgcaggcctcgaggttatgcttgaacagatgcagggcgtggtgcgtctggagctgtcgggctgcaacgacttcaccgaggccgggctgtggtccagcctgagcgcgcgcatcacctcgctgagcgtgagtgactgcatcaacgtggccgacgacgccatcgcggccatctcgcagctgctgcccaacctggcggagctgagcctgcaggcctaccacgtgacggacacggcgctggcctacttcacggcgcgccagggccacagcacgcacacgctgcgcctgctctcctgctgggagatcaccaaccacggcgtggtcaacgtggtgcacagcctgcccaacctcaccgcgctcagcctctcgggctgctccaaggtcaccgacgacggcgtggagctcgtggccgagaacctgcgcaagctgcgcagccttgacctctcgtggtgcccacgcatcaccgacatggcgctggagtacgtggcctgcgacctgcaccgcctagaggagctcgtgctcgacagggtgtgtacgcatcacggacactggcctcagctatctgtccaccatgtcgtccctccgcagcctctacctgcgatggtgctgccaggtgcaagacttcgggctgaagcacctcctggccctggggagtttgcgcctcctgtctctggcaggctgcccgctgctcaccaccaccgggctgtcgggcctggtgcagctgcaggagctggaggagctggagctgaccaactgccccggggccacccccgagctcttcaagtatttctcgcagcacctgccccgctgcctcgtcattgagtagcgcgaggcccccgccccggtcgcgggaacccggccatgacctgggcgggggcgcggggcgccgccgagccccctcttcccgccttgcgctcgggggagcccccgcgcccccg

SEQ ID NO: 319604 - DNA, 261 bp, Homo sapiens
gacttacgaatctcgaacctcggtaccccccccgactagcccgacggtgtgtacgcatcacggacactggcctcagctatctgtccaccatgtcgtccctccgcagcctctacctgcgatggtgctgccaggtgcaagacttcgggctgaagcacctcctggccctggggagtttgcgcctcctgtctctggcaggctgcccgctgctcaccaccaccgggctgtcgggctagtcgaggggatcctcaagtagccccgaaa

SEQ ID NO: 319605 - DNA, 1585 bp, Homo sapiens
agatgggctcttctggtatttctcggcctgcgagaagtgtgtgctggcccaggtgtgcaaggcctggcggcgcgtgctgtaccagcccaagttctgggcaggcctcacgccggtgctgcatgccaaggagctctacaacgtgctgcctggtggcgagaaggagttcgtgaacctgcagggttttgccgccagaggcttcgagggcttctgcctggttggcgtctccgacctggacatctgtgagttcattgacaactatgcgctctccaagaagggtgtcaaagccatgagcctcaagcgctccaccatcacggacgcaggcctcgaggttatgcttgaacagatgcagggcgtggtgcgtctggagctgtcgggctgcaacgacttcaccgaggccgggctgtggtccagcctgagcgcgcgcatcacctcgctgagcgtgagtgactgcatcaacgtggccgacgacgccatcgcggccatctcgcagctgctgcccaacctggcggagctgagcctgcaggcctaccacgtgacggacacggcgctggcctacttcacggcgcgccagggccacagcacgcacacgctgcgcctgctctcctgctgggagatcaccaaccacggcgtggtcaacgtggtgcacagcctgcccaacctcaccgcgctcagcctctcgggctgctccaaggtcaccgacgacggcgtggagctcgtggccgagaacctgcgcaagctgcgcagccttgacctctcgtggtgcccacgcatcaccgacatggcgctggagtacgtggcctgcgacctgcaccgcctagaggagctcgtgctcgacaggtgcgcgcccccgggccgcgccgggcggggctgggccgggcggggctgcacggggcggggcggggcggggctgcacggggccgggggcgggggcttccggcggggctggggctgtggcgcggcgggcagagccctcggagcctggggagtgggaaccgcagaaccgcagcacgggttggctggacccccgtccttcccggtgggtgggagcgaggaggggccagcggctgctccgggtggggcaggaagggattcacgccaggggcactcccaggaagacgagggatggccggggccaggtgatttgaaggtgggggtcccctctggtgcaaccacaggtgtgtacgcatcacggacactggcctcagctatctgtccaccatgtcgtccctccgcagcctctacctgcgatggtgctgccaggtgcaagacttcgggctgaagcacctcctggccctggggagtttgcgcctcctgtctctggcaggctgcccgctgctcaccaccaccgggctgtcgggcctggtgcagctgcaggagctggaggagctggagctgaccaactgccccggggccacccccgagctcttcaagtatttctcgcagcacctgccccgctgcctcgtcattgagtagcgcgaggcccccgccccggtcgcgggaacccggccatgacctgggcgggggcgcggggcgccgccgagccccctcttcccgccttgcgctcgggggagcccccgcgcccccg

SEQ ID NO: 319606 - DNA, 1252 bp, Homo sapiens
agatgggctcttctggtatttctcggcctgcgagaagtgtgtgctggcccaggtgtgcaaggcctggcggcgcgtgctgtaccagcccaagttctgggcaggcctcacgccggtgctgcatgccaaggagctctacaacgtgctgcctggtggcgagaaggagttcgtgaacctgcagggttttgccgccagaggcttcgagggcttctgcctggttggcgtctccgacctggacatctgtgagttcattgacaactatgcgctctccaagaagggtgtcaaagccatgagcctcaagcgctccaccatcacggacgcaggcctcgaggttatgcttgaacagatgcagggcgtggtgcgtctggagctgtcgggctgcaacgacttcaccgaggccgggctgtggtccagcctgagcgcgcgcatcacctcgctgagcgtgagtgactgcatcaacgtggccgacgacgccatcgcggccatctcgcagctgctgcccaacctggcggagctgagcctgcaggcctaccacgtgacggacacggcgctggcctacttcacggcgcgccagggccacagcacgcacacgctgcgcctgctctcctgctgggagatcaccaaccacggcgtggtcaacgtggtgcacagcctgcccaacctcaccgcgctcagcctctcgggctgctccaaggtcaccgacgacggcgtggagctcgtggccgagaacctgcgcaagctgcgcagccttgacctctcgtggtgcccacgcatcaccgacatggcgctggagtacgtggcctgcgacctgcaccgcctagaggagctcgtgctcgacaggtgcgcgcccccgggccgcgccgggcggggctgggccgggcggggctgcacggggcggggcggggcggggctgcacggggccgggggcgggggcttccggcggggctggggctgtggcgcggcgggcagagccctcggagcctggggagtgggaaccgcagaaccgcagcacgggttggctggacccccgtccttcccgggtgtgtacgcatcacggacactggcctcagctatctgtccaccatgtcgtccctccgcagcctctacctgcgatggtgctgccaggtgcaagacttcgggctgaagcacctcctggccctggggagtttgcgcctcctgtctctggcaggctgcccgctgctcaccaccaccgggctgtcgggctagtcgaggggatcctcaagtagccccgaaa

SEQ ID NO: 319607 - DNA, 139 bp, Homo sapiens
taaagtacttcagtactagaagtctagagagtgaggttgatgatacattgtaaatcaaaagtggtttctcacacacaaaatgaaaggtcttcgttaaaaatttcatcactagggcccagccctgttccctccacctcac

SEQ ID NO: 319608 - DNA, 689 bp, Homo sapiens
tcgcccaaagggggttcgcccaaaggctgagcactgatctgctttggagaacctgatcctgagactccagcaggatgtcttatcaacagcagcagtgcaagcagccctgccagccacctcctgtgtgccccacgccaaagtgcccagagccatgtccacccccgaagtgccctgagccctgcccaccaccaaagtgtccacagccctgcccacctcagcagtgccagcagaaatatcctcctgtgacaccttccccaccctgccagtcaaagtatccaccgaagagcaagtaacagcttcagaattcatcaggaccaagaaaggataaggatatttggctcacctcgttccacagctccaccttcatcttctcatcaaagcctaccatggatacacagggagcttctttctccttagccagtaatctgcccatgatgatccctgacagcaaaaagtttcttttctgaggctgccatactgccactgtccaggtggagactgagcaaaggaagtcctgggctgtgccagctcccagagcttcggaagaaagagcagcagctctctccctgggaaccatcagagaattctgttgatgtgttctgtgtctgtctgtcacctggtcacgagcttctaccacctttgcaattgtcacttatctttcactccctgaataaagtatctatgcatat

SEQ ID NO: 319609 - DNA, 433 bp, Homo sapiens
tagaggatccccctgtatcccggggaagagcaagtaacagcttcagaattcatcaggaccaagaaaggataaggatatttggctcacctcgttccacagctccaccttcatcttctcatcaaagcctaccatggatacacagggagcttctttctccttagccagtaatctgcccatgatgatccctgacagcaaaaagtttcttttctgaggctgccatactgccactgtccaggtggagactgagcaaaggaagtcctgggctgtgccagctcccagagcttcggaagaaagagcagcagctctctccctgggaaccatcagagaattctgttgatgtgttctgtgtctgtctgtcacctggtcacgagcttctaccacctttgcaattgtcacttatctttcactccctgaataaagtatctatgcatat

SEQ ID NO: 319610 - DNA, 789 bp, Homo sapiens
aattcctagggctgatgaaacaacttgctaaagtggaaaggagaagacaggaagtcatgaaaagagagctaagagtttaaataaatttttggagattggagaaataatatgccatggtattacataagctttggcttctctctctggaggagtccattcctgtgaacactgtcatatcatttctttcagattctgagactccagcaggatgtcttatcaacagcagcagtgcaagcagccctgccagccacctcctgtgtgccccacgccaaagtgcccagagccatgtccacccccgaagtgccctgagccctgcccaccaccaaagtgtccacagccctgcccacctcagcagtgccagcaaaaatgtcctcctgtgacaccttccccaccctgccagccaaagtgtccacccaagagcaagtaacagctatcagaattcatcaggagcatgaaaggataaggataattggctcaccttgttccacagcttcacctgcatcttctcatcaaagcctaccatggatacacagttagcttctttcctcttagccagtgatctgcccatgatgatccctgatagcaaaaggtttcctttctgaggctgccatattgccactgtccaggtggagactgagaaaggaagtcctcagcagtgtcagttcccagagctttggaagaaggaccagcagctctgtccctgggaaccatcaaaaaatgctgttgatgttttctgtgtctgtctgtcacctgggcatgggcttctaacacctgtgcaattgtcacttt

SEQ ID NO: 319611 - DNA, 316 bp, Homo sapiens
aattcctagggctgatgaaacaacttgctaaagtggaaaggagaagacaggaagtcatgaaaagagagctaagagtttaaataaatttttggagattggagaaataatatgccatggtattacataagctttggcttctctctctggaggagtccattcctgtgaacactgtcatatcatttctttcagattctgagactccagcaggatgtcttatcaacagcagcagtgcaagcagccctgccagccacctcctgtgtgccccacgccaaagtgcccagagcaatacccgcaacactcaccccacgagagatcg

SEQ ID NO: 319612 - DNA, 748 bp, Homo sapiens
actctagaggataccctactggctgaccactactggctgacccactactggctgacccactactggactcttaaacccctggtacctgagcactgatctgccttggagaacctgatcctgagactccagcaggatgtcttatcaacagcagcagtgcaagcagccctgccagccacctcctgtgtgccccacgccaaagtgcccagagccatgtccacccccgaagtgccctgagccctgcccaccaccaaagtgtccacagccctgcccacctcagcagtgccagcagaaatatcctcctgtgacaccttccccaccctgccagtcaaagtatccaccgaagagcaagtaacagcttcagaattcatcaggaccaagaaaggataaggatatttggctcacctcgttccacagctccaccttcatcttctcatcaaagcctaccatggatacacagggagcttctttctccttagccagtaatctgcccatgatgatccctgacagcaaaaagtttcttttctgaggctgccatactgccactgtccaggtggagactgagcaaaggaagtcctgggctgtgccagctcccagagcttcggaagaaagagcagcagctctctccctgggaaccatcagagaattctgttgatgtgttctgtgtctgtctgtcacctggtcacgagcttctaccacctttgcaattgtcacttatctttcactccctgaataaagtatctatgcatat

SEQ ID NO: 319613 - DNA, 892 bp, Homo sapiens
ggaaataagatgcttgattctttataacagagataatttatttggaaaaattgtatgagaaaacacaggatttcctagggacaatgaagcaatttgttaaagtggaagggagaaaccagaaagtcttgaaaaggtaattaagaatttaaataatttcttggagattggagaaataatatgccatggtattacacaagctttggcttctctctctggaggattcccttcccacgaacactgttgtatcatttctttcagatcctgagactccagcaggatgtcttatcaacagcagcagtgcaagcagccctgccagccacctcctgtgtgccccacgccaaagtgcccagagccatgtccacccccgaagtgccctgagccctgcccaccaccaaagtgtccacagccctgcccacctcagcagtgccagcagaaatatcctcctgtgacaccttccccaccctgccagtcaaagtatccaccgaagagcaagtaacagcttcagaattcatcaggaccaagaaaggataaggatatttggctcacctcgttccacagctccaccttcatcttctcatcaaagcctaccatggatacacagggagcttctttctccttagccagtaatctgcccatgatgatccctgacagcaaaaagtttcttttctgaggctgccatactgccactgtccaggtggagactgagcaaaggaagtcctgggctgtgccagctcccagagcttcggaagaaagagcagcagctctctccctgggaaccatcagagaattctgttgatgtgttctgtgtctgtctgtcacctggtcacgagcttctaccacctttgcaattgtcacttatctttcactccctgaataaagtatctatgcatat

SEQ ID NO: 319614 - DNA, 892 bp, Homo sapiens
  misc_feature (752)..(752): n is a, c, g, or t
  misc_feature (758)..(758): n is a, c, g, or t
  misc_feature (761)..(761): n is a, c, g, or t
  misc_feature (773)..(773): n is a, c, g, or t
  misc_feature (776)..(776): n is a, c, g, or t
actctagaggataccctactggctgaccactactggctgacccactactggctgacccactactggactcttaaacccctggtacctgagcactgatctgccttggagaacctgatcctgagactccagcaggatgtcttatcaacagcagcagtgcaagcagccctgccagccacctcctgtgtgccccacgccaaagtgcccagagccatgtccacccccgaagtgccctgagccctgcccaccaccaaagtgtccacagccctgcccacctcagcagtgccagcagaaatatcctcctgtgacaccttccccaccctgccagtcaaagtatccaccgaagagcaagtaacagcttcagaattcatcaggaccaagaaaggataaggatatttggctcacctcgttccacagctccaccttcatcttctcatcaaagcctaccatggatacacagggagcttctttctccttagccagtaatctgcccatgatgatccctgacagcaaaaagtttcttttctgaggctgccatactgccactgtccaggtggagactgagcaaaggaagtcctgggctgtgccagctcccagagcttcggaagaaagagcagcagctctctccctgggaaccatcagagaattctgttgatgtgttctgtgtctgtctgtcacctggtcacgagcttctaccacctttgcaattgtcacttatctttcactccctgaataaagtatctatgcatattaanaaaaanaancaatggccccgntgncctaagcgtggaagcttgaggccgccttcctttagtgggggttcatttatgatccttgttacttgactcggtgagccacgagcgttcggttgtgggcagcggcatcagctcactta

SEQ ID NO: 319615 - DNA, 639 bp, Homo sapiens
tgtatcggggaggatatggtggtggcctgtgtactggcttgggtggtggctttggtggtggctttgctggtggtgatgggcttctggtgggcagtgagaaggtgaccatgcagaacctcaatgaccgcctggcctcctacctggacaagggtcacttatctttcactccccgggatctccccgggatacagagtgacaccttccccaccctgccagtcaaagtatccaccgaagagcaagtaacagcttcagaattcatcaggaccaagaaaggataaggatatttggctcacctcgttccacagctccaccttcatcttctcatcaaagcctaccatggatacacagggagcttctttctccttagccagtaatctgcccatgatgatccctgacagcaaaaagtttcttttctgaggctgccatactgccactgtccaggtggagactgagcaaaggaagtcctgggctgtgccagctcccagagcttcggaagaaagagcagcagctctctccctgggaaccatcagagaattctgttgatgtgttctgtgtctgtctgtcacctggtcacgagcttctaccacctttgcaattgtcacttatctttcactccctgaataaagtatctatgcatat

SEQ ID NO: 319616 - DNA, 715 bp, Homo sapiens
taccctaggcatcaccagatgctggacgcctcttcccatctgttctgtgtcttaatgtctgtagacctgtaatcagtacattctcaccccaagccatagtctctctcttattgtatcctaaaaatacgtactataaagctttggttcacacacactctgaagaatcctgtaagcccctgaattaagcagaaagtcttcatggcttttctggtcttcggctgctcagggttcatctgaagattcggatgaaaagaaatgcatgtttcctgccgaacccccttgggccgaacccgttcggccaaaggacaagagcaagtaacagcttcagaattcatcaggaccaagaaaggataaggatatttggctcacctcgttccacagctccaccttcatcttctcatcaaagcctaccatggatacacagggagcttctttctccttagccagtaatctgcccatgatgatccctgacagcaaaaagtttcttttctgaggctgccatactgccactgtccaggtggagactgagcaaaggaagtcctgggctgtgccagctcccagagcttcggaagaaagagcagcagctctctccctgggaaccatcagagaattctgttgatgtgttctgtgtctgtctgtcacctggtcacgagcttctaccacctttgcaattgtcacttatctttcactccctgaataaagtatctatgcatat

SEQ ID NO: 319617 - DNA, 813 bp, Homo sapiens
aattcctagggctgatgaaacaacttgctaaagtggaaaggagaagacaggaagtcatgaaaagagagctaagagtttaaataaatttttggagattggagaaataatatgccatggtattacataagctttggcttctctctctggaggagtccattcctgtgaacactgtcatatcatttctttcagattctgagactccagcaggatgtcttatcaacagcagcagtgcaagcagccctgccagccacctcctgtgtgccccacgccaaagtgcccagagccatgtccacccccgaagtgccctgagccctgcccaccaccaaagtgtccacagccctgcccacctcagcagtgccagcaaaaatgtcctcctgtgacaccttccccaccctgccagccaaagtgtccacccaagagcaagtaacagctatcagaattcatcaggagcatgaaaggataaggataattggctcaccttgttccacagcttcacctgcatcttctcatcaaagcctaccatggatacacagttagcttctttcctcttagccagtgatctgcccatgatgatccctgatagcaagaatggcatatcagtatttaaaaaagcaaattaacctgacagccattgcaaaccatgtaatacccgaccgttgatacatcctgatatgccattcttgctgcagcaagaatggcatatcactgaaggagccacgaagttatataacacacggtaaacatccacctggctcaaggggcaaatgcagtacgtacagcattggcagaggtgcgtcagacgtggcagaacta

SEQ ID NO: 319618 - DNA, 1052 bp, Homo sapiens
actctagaggataccctactggctgaccactactggctgacccactactggctgacccactactggactcttaaacccctggtacctgagcactgatctgccttggagaacctgatcctgagactccagcaggatgtcttatcaacagcagcagtgcaagcagccctgccagccacctcctgtgtgccccacgccaaagtgcccagagccatgtccacccccgaagtgccctgagccctgcccaccaccaaagtgtccacagccctgcccacctcagcagtgccagcagaaatatcctcctgtgacaccttccccaccctgccagtcaaagtatccaccgaagagcaagtaacagcttcagaattcatcaggaccaagaaaggataaggatatttggctcacctcgttccacagctccaccttcatcttctcatcaaagcctaccatggatacacagggagcttctttctccttagccagtaatctgcccatgatgatccctgacagcaaaaagtttcttttctgaggctgccatactgccactgtccaggtggagactgagcaaaggaagtcctgggctgtgccagctcccagagcttcggaagaaagagcagcagctctctccctgggaaccatcagagaattctgttgatgtgttctgtgtctgtctgtcacctggtcacgagcttctaccacctttgcaattgtcacttatctttcactccctgaataaagtatctatgcatatatatttgtgaatggatcttttgtttattttcaaatctgctttattagcaatagtatgtaatcttttggatttatttcaatctttctttgattcacagcaggatctcacaattggagtcataccaaagattatttctgtatcattttaaaccccttttattttccctaattagcatttgattgatttgaggaggatattattcaacttctctgaattgacaacttctctttactgcaaagtgagcaaaataacatttacattacaaactagtctaaggcataaaatttgattactatctgatatt

SEQ ID NO: 319619 - DNA, 796 bp, Homo sapiens
gtatagcttttgtttgggtttttcttctcacctttaaaaaaatgagccatttctatttcattttctctgtaactgtctacttaacccttctgaggcttagtctgtacaatggaggcagtccctccttccctcagaagattacagtaagaattggatgaaataaagcctttagctcagtgcctgacacagaagaacatgcagtgaaggaaagctgctattgctccaacaaagatgtaggccattaaatttttaaaaccattttatacatgcacacatacatacaaggactcctctctcctgcaaaaattgttaccttaagtgtggttctctggttctaaggagggaagtgctaagtaagaaagacagggaggtggatattgtggttccccatcagacagaaaacacgggcacctgtttggtaatctttttcttacagtgttattgctaaattcagacagtcttcctaacccacacctgcttttaaaaagcttagctctaacatgaaactgtatgctttttgcttcttggtgttttgtataaaaaaaatcattataaccctgccataaagactgatttttgttcgttctgagccttcaaggaatttgttttttacaactggaatatgctcctgtgtgtgttaacagatcatggatgttttatgttttcactgatcatttaaagagtttgacctcagagctccaggatcatcagtaaatttgtcatgttatatatttatttttttataaatcaagacttctgtgtgctcttaaatatattaaaaacaatttacatttca

SEQ ID NO: 319620 - DNA, 759 bp, Homo sapiens
cctgtgttctgatgctaatacataaatccagttaaagtaatttttctcctgccatgtgctgtttacttcccaattcaggtttcagacctacttcctgttttttctgttgaataaggttctgagaaacattttccttttgttaaatgcaaaatggctacttggtgcttctgctgctttcacacagtttttttcctccttctagagtcaatgcatgtgttgatgtggtgctctcaggggtgaagctcttgcaggcacttggccttagtcctgggaatgggaaagatcacagcattctgcattcaaggaatgatctggaagaagccttcattcacttcatggggaagggagcagctgctgagcgcttcttcagtgataaggaaacttttcacgacattgcccaggttgcgtcagagttcccaggagcccaggtctgtttggttcagcaatagtaaattaagggtggaaaaagatgcctttttaatatggttcctagaagcaagcaagcaacttttcattccagtttgaagaggaggggagcaaaatcacccctggttgaaaactgtgggtctaggttgatggttctcagacttgagcatgtgtcagaatcatttggagaggctgttgaaacacagatttctgggcctactaccagagttcagattcagtagatgtgggatgggacccaagaatttacctttccagcaagtttcctggttgatcctgtaggtctgagaacctccttttgagaaccactggtct

SEQ ID NO: 319621 - DNA, 829 bp, Homo sapiens
cccggaagaggagcggcgaggaaaggagttggttcgcgcaggtgcggcgcctgggtccccatggcgctgtggcgcggctccgcgtacgcgggcttcctggcgctggccgtgggctgcgtcttcctgctggagccagagctgccaggctcggcgctgcgctctctctggagctcgctgtgtctggggcccgcgcctgcgcccccgggacccgtctcccccgagggccggttggcggcagcctgggacgcgcttatcgtgcggccagtccggcgctggcgccgcgtggcagtggggtgagtgccaacggggcctgggtctctgagcctccgaggtcggccttggaggtcgggcggagccgcgcagaaacagggcttctcagaggtccccgggaggcgctgctgtccgcgctggccccttggcgagaagtgtcggacgtctgagtggaacccggttcgtcaccgctgctctttccactcggctggcctctgcgcctttctctcatcccggtaggaccagccctaacagcttcttgctaatcccgctttgtctgacacctttctccgagccttcttcctcgttccaacttttagccccttctcttctggcgactgttgttttgcaatcaaagatacttgaccttacccactatgacaacactcttcctctttcttctgaacttcttgaagacgcgtgatgtctgcctttacccactttcgaaacgccgtgtagtctagaaaccacacgactgtactgcaactcctctcagatttgcctttttgaatcttcattatctactctgcagccttccacgcattgaacacgcccttct

SEQ ID NO: 319622 - DNA, 645 bp, Homo sapiens
cactgtggccttgacctgtcatgctcagtgtcccgagtagctggaactacaggcatgtaccaccacacccggctaatttttatattcttggtagggacaggatttgccaagttgctcaggctggtcttcaactactgggatcaggccttggcctcccatcttggcctctgaaagtgctggaattacagctgtgattccacacccagcccagtattaaatatcttataacaactaatatggttaggctttgtgtccccgctcaaatctcatcttgaattgtaatccccataagctaatcaagggagagaccaggtggaggtaattgaatcatgggggcggttcccccattctgttctcctgatagtgagttcgttctcatgagatcctttggttttataaggggctcttccctgctattcactcggcacggctccttcctgacaccttaagaagaaggtgccttgcttccccttcaccttccaccatgaatgtaagtttcctgaggccttcccagccatgctgaactgtaagtcaattaaacctctttcctttataaattacccagtcccgggcaattcattatagcattatgaaaattgactaatgcaacaactttatgagggaggcagataacagatattgtca

SEQ ID NO: 319623 - DNA, 2737 bp, Homo sapiens
cccggaagaggagcggcgaggaaaggagttggttcgcgcaggtgcggcgcctgggtccccatggcgctgtggcgcggctccgcgtacgcgggcttcctggcgctggccgtgggctgcgtcttcctgctggagccagagctgccaggctcggcgctgcgctctctctggagctcgctgtgtctggggcccgcgcctgcgcccccgggacccgtctcccccgagggccggttggcggcagcctgggacgcgcttatcgtgcggccagtccggcgctggcgccgcgtggcagtggggtgagtgccaacggggcctgggtctctgagcctccgaggtcggccttggaggtcgggcggagccgcgcagaaacagggcttctcagaggtccccgggaggcgctgctgtccgcgctggccccttggcgagaagtgtcggacgtctgagtggaacccggttcgtcaccgctgctctttccactcggctggcctctgcgcctttctctcatcccgagtcaatgcatgtgttgatgtggtgctctcaggggtgaagctcttgcaggcacttggccttagtcctgggaatgggaaagatcacagcattctgcattcaaggaatgatctggaagaagccttcattcacttcatggggaagggagcagctgctgagcgcttcttcagtgataaggaaacttttcacgacattgcccaggttgcgtcagagttcccaggagcccagcactatgtaggaggaaatgcagctttaattggacagaaatttgcagccaactcagatttaaaggttcttctttgcggtccagttggtccaaagctacatgagcttcttgatgacaatgtctttgttccaccagagtcattgcaggaagtggatgagttccacctcattttagagtatcaagcaggggaggagtggggccagttaaaagctccccatgccaaccgattcatcttctctcacgacctctccaacggggccatgaatatgctggaggtgtttgtgtctagcctggaggagtttcagccagacctggtggtcctctctggattgcacatgatggagggacaaagcaaggagctccagaggaagagactcttggaggttgtaacctccatttctgacatccccactggtattccagttcacctagagctggccagtatgactaacagggagctcatgagcagcattgtccatcagcaggtctttcccgcggtgacttcccttgggctgaatgaacaggagctgttatttctcacccagtcagcctctggacctcactcttctctctcttcctggaacggtgttcctgatgtgggcatggtcagtgacatcctcttctggatcttgaaagaacatgggaggagtaaaagcagagcctcggatctcaccaggatccatttccacacgctggtctaccacatcctggcaactgtggatggacactgggccaaccagctggcagccgtggctgcaggagctcgtgtggctgggacacaggcctgcgccacagaaaccatagacaccagccgagtgtctctgagggcaccccaagagttcatgacttcccattcggaggcaggctccaggattgtattaaacccaaacaagccagtagtagaatggcacagagagggaatatccttccacttcacaccagtattggtgtgtaaagaccccattcgaactgtaggccttggagatgccatttcagccgaaggactcttctattcggaagtacaccctcactattaggaagattcttaggggtaatttttctgaggaaggagaactagccaacttaagaattacaggaagaaagtggtttggaagacagccaaagaaataaaagcagattaaattgtatcaggtacattccagcctgttggcaactccataaaaacatttcagattttaatccgaatttagctaatgagactggatttttgttttttatgttgtgtgtcacagagctaaaaactcagttcccaaatccccagtttatgcagcgccatcaggtattttaagctaaacttcttcacccctgagagcatgtcagctggagaaaagcagttcttccttgcccacttgagaagtgcacgcccactcacccaacatcctggtctctaggaaagcctcatgtgaggttcctctttctttcagctcagtgcccatgggcaaggatcatgatttccattccgtgttacaatgacaatatttaatgagcataaccttctcagtctcctgctctcaaatttaggacagagccgctaaggacaaaacaatccctcccgtgctttatgatggcagcaggggctggggagcctctgagggactctttcattctgcagttgtctggaagcctgggtggcgtcatgagctgaaggatcatgctttcctgtcctggctccataggttataggctggctggtgaaaggttcacgtggcccaggctgaacttcattgcctagctttggatgtgctttctgccataaagactgatttttgttcgttctgagccttcaaggaatttgttttttacaactggaatatgctcctgtgtgtgttaacagatcatggatgttttatgttttcactgatcatttaaagagtttgacctcagagctccaggatcatcagtaaatttgtcatgttatatatttatttttttataaatcaagacttctgtgtgctcttaaatatattaaaaacaatttacatttca

SEQ ID NO: 319624 - DNA, 2438 bp, Homo sapiens
ttcgttaaggaaatatttcaagagggactgtggcaccaagacagtgaatgcctgcccctgagccccgatgagaaggaattaagggccctgtgactctgtatgtgaccagaagccacatcaggctccgccaggcctggcaactgtccctggtgttctgttcttcacctcctgcggctcctgactcttcagttctcagttggaattgagagtcaatgcatgtgttgatgtggtgctctcaggggtgaagctcttgcaggcacttggccttagtcctgggaatgggaaagatcacagcattctgcattcaaggaatgatctggaagaagccttcattcacttcatggggaagggagcagctgctgagcgcttcttcagtgataaggaaacttttcacgacattgcccaggttgcgtcagagttcccaggagcccagcactatgtaggaggaaatgcagctttaattggacagaaatttgcagccaactcagatttaaaggttcttctttgcggtccagttggtccaaagctacatgagcttcttgatgacaatgtctttgttccaccagagtcattgcaggaagtggatgagttccacctcattttagagtatcaagcaggggaggagtggggccagttaaaagctccccatgccaaccgattcatcttctctcacgacctctccaacggggccatgaatatgctggaggtgtttgtgtctagcctggaggagtttcagccagacctggtggtcctctctggattgcacatgatggagggacaaagcaaggagctccagaggaagagactcttggaggttgtaacctccatttctgacatccccactggtattccagttcacctagagctggccagtatgactaacagggagctcatgagcagcattgtccatcagcaggtctttcccgcggtgacttcccttgggctgaatgaacaggagctgttatttctcacccagtcagcctctggacctcactcttctctctcttcctggaacggtgttcctgatgtgggcatggtcagtgacatcctcttctggatcttgaaagaacatgggaggagtaaaagcagagcctcggatctcaccaggatccatttccacacgctggtctaccacatcctggcaactgtggatggacactgggccaaccagctggcagccgtggctgcaggagctcgtgtggctgggacacaggcctgcgccacagaaaccatagacaccagccgagtgtctctgagggcaccccaagagttcatgacttcccattcggaggcaggctccaggattgtattaaacccaaacaagccagtagtagaatggcacagagagggaatatccttccacttcacaccagtattggtgtgtaaagaccccattcgaactgtaggccttggagatgccatttcagccgaaggactcttctattcggaagtacaccctcactattaggaagattcttaggggtaatttttctgaggaaggagaactagccaacttaagaattacaggaagaaagtggtttggaagacagccaaagaaataaaagcagattaaattgtatcaggtacattccagcctgttggcaactccataaaaacatttcagattttaatccgaatttagctaatgagactggatttttgttttttatgttgtgtgtcacagagctaaaaactcagttcccaaatccccagtttatgcagcgccatcaggtattttaagctaaacttcttcacccctgagagcatgtcagctggagaaaagcagttcttccttgcccacttgagaagtgcacgcccactcacccaacatcctggtctctaggaaagcctcatgtgaggttcctctttctttcagctcagtgcccatgggcaaggatcatgatttccattccgtgttacaatgacaatatttaatgagcataaccttctcagtctcctgctctcaaatttaggacagagccgctaaggacaaaacaatccctcccgtgctttatgatggcagcaggggctggggagcctctgagggactctttcattctgcagttgtctggaagcctgggtggcgtcatgagctgaaggatcatgctttcctgtcctggctccataggttataggctggctggtgaaaggttcacgtggcccaggctgaacttcattgcctagctttggatgtgctttctgccataaagactgatttttgttcgttctgagccttcaaggaatttgttttttacaactggaatatgctcctgtgtgtgttaacagatcatggatgttttatgttttcactgatcatttaaagagtttgacctcagagctccaggatcatcagtaaatttgtcatgttatatatttatttttttataaatcaagacttctgtgtgctcttaaatatattaaaaacaatttacatttca

SEQ ID NO: 319625 - DNA, 2757 bp, Homo sapiens
cactgtggccttgacctgtcatgctcagtgtcccgagtagctggaactacaggcatgtaccaccacacccggctaatttttatattcttggtagggacaggatttgccaagttgctcaggctggtcttcaactactgggatcaggccttggcctcccatcttggcctctgaaagtgctggaattacagctgtgattccacacccagcccagtattaaatatcttataacaactaatatggttaggctttgtgtccccgctcaaatctcatcttgaattgtaatccccataagctaatcaagggagagaccaggtggaggtaattgaatcatgggggcggttcccccattctgttctcctgatagtgagttcgttctcatgagatcctttggttttataaggggctcttccctgctattcactcggcacggctccttcctgacaccttaagaagaaggtgccttgcttccccttcaccttccaccatgaatgtaagtttcctgaggccttcccagccatgctgaactagtcaatgcatgtgttgatgtggtgctctcaggggtgaagctcttgcaggcacttggccttagtcctgggaatgggaaagatcacagcattctgcattcaaggaatgatctggaagaagccttcattcacttcatggggaagggagcagctgctgagcgcttcttcagtgataaggaaacttttcacgacattgcccaggttgcgtcagagttcccaggagcccagcactatgtaggaggaaatgcagctttaattggacagaaatttgcagccaactcagatttaaaggttcttctttgcggtccagttggtccaaagctacatgagcttcttgatgacaatgtctttgttccaccagagtcattgcaggaagtggatgagttccacctcattttagagtatcaagcaggggaggagtggggccagttaaaagctccccatgccaaccgattcatcttctctcacgacctctccaacggggccatgaatatgctggaggtgtttgtgtctagcctggaggagtttcagccagacctggtggtcctctctggattgcacatgatggagggacaaagcaaggagctccagaggaagagactcttggaggttgtaacctccatttctgacatccccactggtattccagttcacctagagctggccagtatgactaacagggagctcatgagcagcattgtccatcagcaggtctttcccgcggtgacttcccttgggctgaatgaacaggagctgttatttctcacccagtcagcctctggacctcactcttctctctcttcctggaacggtgttcctgatgtgggcatggtcagtgacatcctcttctggatcttgaaagaacatgggaggagtaaaagcagagcctcggatctcaccaggatccatttccacacgctggtctaccacatcctggcaactgtggatggacactgggccaaccagctggcagccgtggctgcaggagctcgtgtggctgggacacaggcctgcgccacagaaaccatagacaccagccgagtgtctctgagggcaccccaagagttcatgacttcccattcggaggcaggctccaggattgtattaaacccaaacaagccagtagtagaatggcacagagagggaatatccttccacttcacaccagtattggtgtgtaaagaccccattcgaactgtaggccttggagatgccatttcagccgaaggactcttctattcggaagtacaccctcactattaggaagattcttaggggtaatttttctgaggaaggagaactagccaacttaagaattacaggaagaaagtggtttggaagacagccaaagaaataaaagcagattaaattgtatcaggtacattccagcctgttggcaactccataaaaacatttcagattttaatccgaatttagctaatgagactggatttttgttttttatgttgtgtgtcacagagctaaaaactcagttcccaaatccccagtttatgcagcgccatcaggtattttaagctaaacttcttcacccctgagagcatgtcagctggagaaaagcagttcttccttgcccacttgagaagtgcacgcccactcacccaacatcctggtctctaggaaagcctcatgtgaggttcctctttctttcagctcagtgcccatgggcaaggatcatgatttccattccgtgttacaatgacaatatttaatgagcataaccttctcagtctcctgctctcaaatttaggacagagccgctaaggacaaaacaatccctcccgtgctttatgatggcagcaggggctggggagcctctgagggactctttcattctgcagttgtctggaagcctgggtggcgtcatgagctgaaggatcatgctttcctgtcctggctccataggttataggctggctggtgaaaggttcacgtggcccaggctgaacttcattgcctagctttggatgtgctttctgccataaagactgatttttgttcgttctgagccttcaaggaatttgttttttacaactggaatatgctcctgtgtgtgttaacagatcatggatgttttatgttttcactgatcatttaaagagtttgacctcagagctccaggatcatcagtaaatttgtcatgttatatatttatttttttataaatcaagacttctgtgtgctcttaaatatattaaaaacaatttacatttca

SEQ ID NO: 319626 - DNA, 3226 bp, Homo sapiens
tttctcctaggttcagttaggtcgtgtttcctagcagtgtcactattcaagggttgagtccacgtcttgctctctggagaatgtcaatgtaatgtatttttcccatcgtacagagtctttgttgatttgcaaaatgttggatttggggttcatacccatattttttgttgtcatgggcatttaggtcatcagtctgttctcttatttgcttgttcttttgttaattcattcccatggctatatgccagacacagcatgatgcagaaggaatacgacagaggatgacacaggccctgccctcagctcacagtttactgccagagatagacacttggaaaaagtaattgcaggccgggcatggtggctcacgcctgtaatcccagcactttgggaggctaaggcaggcagatcacctgaggtcaggagtttaagaccagcctggccaacatggtgaaactccgtctctactgaaaatacaaaaattagccaggcgtggtggcgggtacctgtaatcccagctactcgggaggctgaggcaggagaatcgcttgaacctgggaggcagaggttgcagtgagctgaggtcgcgccattgcgctccaacctgggcaacagagtgaaactccatctcagaagaaaaaaaaaaaaaaaaaaggaaaaaagaaaaaggaattgcaaaatcatgtgcctcagtcctgtattagggtacagtggtggccccagaaaggaggtaatcaagtctgcttaggggtggtaggattaggaaaggcttcatgtttagggaggaactagcacttgaacttgggtctttaaacagtcattcctctaaagcaactcacatagaagcaactggagcagctagatagtctgatcctttggatcaggtgcccagaaaccactgatgggcagcagggaagaggagatgcagtgagcttggctgttgggaagaaattcagcctgcttaagttccaactgaatgaaagatgctcagggcaatgctgtgaggaagaatgtgctttaaacaatgacagcctatactgtctgcagggcgtgcgtgctgcacactgtatgctggtatttggaagtcatgctgccattctgtactgtctctcctgtgtttgagagctcaagtagggctctcctgggactcagggggagctaattaccttgaaaaaggcatatagcacccatactatgtttctgtttcttggctgggtttgggtttaggtttttggtttgtttcttgcagtgccatgctgaccttaggccattgttgctggggtctcctcagccagaaaccagcctgcttggagccaaggctcctgtgaggtgcctgaaagtgcccccacagctaggagacctaaagcctcttccttttcttcccattgtgttgactgggtttttcgggaggagtggggccagttaaaagctccccatgccaaccgattcatcttctctcacgacctctccaacggggccatgaatatgctggaggtgtttgtgtctagcctggaggagtttcagccagacctggtggtcctctctggattgcacatgatggagggacaaagcaaggagctccagaggaagagactcttggaggttgtaacctccatttctgacatccccactggtattccagttcacctagagctggccagtatgactaacagggagctcatgagcagcattgtccatcagcaggtctttcccgcggtgacttcccttgggctgaatgaacaggagctgttatttctcacccagtcagcctctggacctcactcttctctctcttcctggaacggtgttcctgatgtgggcatggtcagtgacatcctcttctggatcttgaaagaacatgggaggagtaaaagcagagcctcggatctcaccaggatccatttccacacgctggtctaccacatcctggcaactgtggatggacactgggccaaccagctggcagccgtggctgcaggagctcgtgtggctgggacacaggcctgcgccacagaaaccatagacaccagccgagtgtctctgagggcaccccaagagttcatgacttcccattcggaggcaggctccaggattgtattaaacccaaacaagccagtagtagaatggcacagagagggaatatccttccacttcacaccagtattggtgtgtaaagaccccattcgaactgtaggccttggagatgccatttcagccgaaggactcttctattcggaagtacaccctcactattaggaagattcttaggggtaatttttctgaggaaggagaactagccaacttaagaattacaggaagaaagtggtttggaagacagccaaagaaataaaagcagattaaattgtatcaggtacattccagcctgttggcaactccataaaaacatttcagattttaatccgaatttagctaatgagactggatttttgttttttatgttgtgtgtcacagagctaaaaactcagttcccaaatccccagtttatgcagcgccatcaggtattttaagctaaacttcttcacccctgagagcatgtcagctggagaaaagcagttcttccttgcccacttgagaagtgcacgcccactcacccaacatcctggtctctaggaaagcctcatgtgaggttcctctttctttcagctcagtgcccatgggcaaggatcatgatttccattccgtgttacaatgacaatatttaatgagcataaccttctcagtctcctgctctcaaatttaggacagagccgctaaggacaaaacaatccctcccgtgctttatgatggcagcaggggctggggagcctctgagggactctttcattctgcagttgtctggaagcctgggtggcgtcatgagctgaaggatcatgctttcctgtcctggctccataggttataggctggctggtgaaaggttcacgtggcccaggctgaacttcattgcctagctttggatgtgctttctgccataaagactgatttttgttcgttctgagccttcaaggaatttgttttttacaactggaatatgctcctgtgtgtgttaacagatcatggatgttttatgttttcactgatcatttaaagagtttgacctcagagctccaggatcatcagtaaatttgtcatgttatatatttatttttttataaatcaagacttctgtgtgctcttaaatatattaaaaacaatttacatttca

SEQ ID NO: 319627 - DNA, 2491 bp, Homo sapiens
cccggaagaggagcggcgaggaaaggagttggttcgcgcaggtgcggcgcctgggtccccatggcgctgtggcgcggctccgcgtacgcgggcttcctggcgctggccgtgggctgcgtcttcctgctggagccagagctgccaggctcggcgctgcgctctctctggagctcgctgtgtctggggcccgcgcctgcgcccccgggacccgtctcccccgagggccggttggcggcagcctgggacgcgcttatcgtgcggccagtccggcgctggcgccgcgtggcagtgggagtcaatgcatgtgttgatgtggtgctctcaggggtgaagctcttgcaggcacttggccttagtcctgggaatgggaaagatcacagcattctgcattcaaggaatgatctggaagaagccttcattcacttcatggggaagggagcagctgctgagcgcttcttcagtgataaggaaacttttcacgacattgcccaggttgcgtcagagttcccaggagcccagcactatgtaggaggaaatgcagctttaattggacagaaatttgcagccaactcagatttaaaggttcttctttgcggtccagttggtccaaagctacatgagcttcttgatgacaatgtctttgttccaccagagtcattgcaggaagtggatgagttccacctcattttagagtatcaagcaggggaggagtggggccagttaaaagctccccatgccaaccgattcatcttctctcacgacctctccaacggggccatgaatatgctggaggtgtttgtgtctagcctggaggagtttcagccagacctggtggtcctctctggattgcacatgatggagggacaaagcaaggagctccagaggaagagactcttggaggttgtaacctccatttctgacatccccactggtattccagttcacctagagctggccagtatgactaacagggagctcatgagcagcattgtccatcagcaggtctttcccgcggtgacttcccttgggctgaatgaacaggagctgttatttctcacccagtcagcctctggacctcactcttctctctcttcctggaacggtgttcctgatgtgggcatggtcagtgacatcctcttctggatcttgaaagaacatgggaggagtaaaagcagagcctcggatctcaccaggatccatttccacacgctggtctaccacatcctggcaactgtggatggacactgggccaaccagctggcagccgtggctgcaggagctcgtgtggctgggacacaggcctgcgccacagaaaccatagacaccagccgagtgtctctgagggcaccccaagagattgtattaaacccaaacaagccagtagtagaatggcacagagagggaatatccttccacttcacaccagtattggtgtgtaaagaccccattcgaactgtaggccttggagatgccatttcagccgaaggactcttctattcggaagtacaccctcactattaggaagattcttaggggtaatttttctgaggaaggagaactagccaacttaagaattacaggaagaaagtggtttggaagacagccaaagaaataaaagcagattaaattgtatcaggtacattccagcctgttggcaactccataaaaacatttcagattttaatccgaatttagctaatgagactggatttttgttttttatgttgtgtgtcacagagctaaaaactcagttcccaaatccccagtttatgcagcgccatcaggtattttaagctaaacttcttcacccctgagagcatgtcagctggagaaaagcagttcttccttgcccacttgagaagtgcacgcccactcacccaacatcctggtctctaggaaagcctcatgtgaggttcctctttctttcagctcagtgcccatgggcaaggatcatgatttccattccgtgttacaatgacaatatttaatgagcataaccttctcagtctcctgctctcaaatttaggacagagccgctaaggacaaaacaatccctcccgtgctttatgatggcagcaggggctggggagcctctgagggactctttcattctgcagttgtctggaagcctgggtggcgtcatgagctgaaggatcatgctttcctgtcctggctccataggttataggctggctggtgaaaggttcacgtggcccaggctgaacttcattgcctagctttggatgtgctttctgccataaagactgatttttgttcgttctgagccttcaaggaatttgttttttacaactggaatatgctcctgtgtgtgttaacagatcatggatgttttatgttttcactgatcatttaaagagtttgacctcagagctccaggatcatcagtaaatttgtcatgttatatatttatttttttataaatcaagacttctgtgtgctcttaaatatattaaaaacaatttacatttca

SEQ ID NO: 319628 - DNA, 2228 bp, Homo sapiens
cccggaagaggagcggcgaggaaaggagttggttcgcgcaggtgcggcgcctgggtccccatggcgctgtggcgcggctccgcgtacgcgggcttcctggcgctggccgtgggctgcgtcttcctgctggagccagagctgccaggctcggcgctgcgctctctctggagctcgctgtgtctggggcccgcgcctgcgcccccgggacccgtctcccccgagggccggttggcggcagcctgggacgcgcttatcgtgcggccagtccggcgctggcgccgcgtggcagtgggagtcaatgcatgtgttgatgtggtgctctcaggggtgaagctcttgcaggcacttggccttagtcctgggaatgggaaagatcacagcattctgcattcaaggaatgatctggaagaagccttcattcacttcatggggaagggagcagctgctgagcgcttcttcagtgataaggaaacttttcacgacattgcccaggttgcgtcagagttcccaggagcccagcactatgtaggaggaaatgcagctttaattggacagaaatttgcagccaactcagatttaaaggttcttctttgcggtccagttggtccaaagctacatgagcttcttgatgacaatgtctttgttccaccagagtcattgcaggaagtggatgagttccacctcattttagagtatcaagcagcaggtctttcccgcggtgacttcccttgggctgaatgaacaggagctgttatttctcacccagtcagcctctggacctcactcttctctctcttcctggaacggtgttcctgatgtgggcatggtcagtgacatcctcttctggatcttgaaagaacatgggaggagtaaaagcagagcctcggatctcaccaggatccatttccacacgctggtctaccacatcctggcaactgtggatggacactgggccaaccagctggcagccgtggctgcaggagctcgtgtggctgggacacaggcctgcgccacagaaaccatagacaccagccgagtgtctctgagggcaccccaagagttcatgacttcccattcggaggcaggctccaggattgtattaaacccaaacaagccagtagtagaatggcacagagagggaatatccttccacttcacaccagtattggtgtgtaaagaccccattcgaactgtaggccttggagatgccatttcagccgaaggactcttctattcggaagtacaccctcactattaggaagattcttaggggtaatttttctgaggaaggagaactagccaacttaagaattacaggaagaaagtggtttggaagacagccaaagaaataaaagcagattaaattgtatcaggtacattccagcctgttggcaactccataaaaacatttcagattttaatccgaatttagctaatgagactggatttttgttttttatgttgtgtgtcacagagctaaaaactcagttcccaaatccccagtttatgcagcgccatcaggtattttaagctaaacttcttcacccctgagagcatgtcagctggagaaaagcagttcttccttgcccacttgagaagtgcacgcccactcacccaacatcctggtctctaggaaagcctcatgtgaggttcctctttctttcagctcagtgcccatgggcaaggatcatgatttccattccgtgttacaatgacaatatttaatgagcataaccttctcagtctcctgctctcaaatttaggacagagccgctaaggacaaaacaatccctcccgtgctttatgatggcagcaggggctggggagcctctgagggactctttcattctgcagttgtctggaagcctgggtggcgtcatgagctgaaggatcatgctttcctgtcctggctccataggttataggctggctggtgaaaggttcacgtggcccaggctgaacttcattgcctagctttggatgtgctttctgccataaagactgatttttgttcgttctgagccttcaaggaatttgttttttacaactggaatatgctcctgtgtgtgttaacagatcatggatgttttatgttttcactgatcatttaaagagtttgacctcagagctccaggatcatcagtaaatttgtcatgttatatatttatttttttataaatcaagacttctgtgtgctcttaaatatattaaaaacaatttacatttca

SEQ ID NO: 319629 - DNA, 2502 bp, Homo sapiens
gtatagcttttgtttgggtttttcttctcacctttaaaaaaatgagccatttctatttcattttctctgtaactgtctacttaacccttctgaggcttagtctgtacaatggaggcagtccctccttccctcagaagattacagtaagaattggatgaaataaagcctttagctcagtgcctgacacagaagaacatgcagtgaaggaaagctgctattgctccaacaaagatgtaggccattaaatttttaaaaccattttatacatgcacacatacatacaaggactcctctctcctgcaaaaattgttaccttaagtgtggttctctggttctaaggagggaagtgctaagtaagaaagacagggaggtggatattgtggttccccatcagacagaaaacacgggcacctgtttggtaatctttttcttacagtgttattgctaaattcagacagtcttcctaacccacacctgcttttaaaaagcttagctctaacatgaaactgtatgctttttgcttcttggtgttttgtataaaaaaaatcattataaccctgacagtatgttgcttgaggtctccattttactggtctaatactgctgacattcaggaactgagagccatgccccatcagtggtaagagtatctcctatgtgtgcagtggcaaaagctagggaccatggaaagaaacacaaaatatagacacctctgccttttgtcttacagtggcatatcacaaaagactgcatctgaaacaatgttactgcagctttccagtttctcccaaatgatgatgaaggtgaagataggggtgtgatagctaaaacagtgacttcagggccagggagtcctgtatcaaggaagaaagctgcctgcctgtgttccctgtcatttagtcactggctgtgtcataagacatcttaggagccaggttatctccatcagaaagatacctgttgttgtttttgttagccaggtctttcccgcggtgacttcccttgggctgaatgaacaggagctgttatttctcacccagtcagcctctggacctcactcttctctctcttcctggaacggtgttcctgatgtgggcatggtcagtgacatcctcttctggatcttgaaagaacatgggaggagtaaaagcagagcctcggatctcaccaggatccatttccacacgctggtctaccacatcctggcaactgtggatggacactgggccaaccagctggcagccgtggctgcaggagctcgtgtggctgggacacaggcctgcgccacagaaaccatagacaccagccgagtgtctctgagggcaccccaagagttcatgacttcccattcggaggcaggctccaggattgtattaaacccaaacaagccagtagtagaatggcacagagagggaatatccttccacttcacaccagtattggtgtgtaaagaccccattcgaactgtaggccttggagatgccatttcagccgaaggactcttctattcggaagtacaccctcactattaggaagattcttaggggtaatttttctgaggaaggagaactagccaacttaagaattacaggaagaaagtggtttggaagacagccaaagaaataaaagcagattaaattgtatcaggtacattccagcctgttggcaactccataaaaacatttcagattttaatccgaatttagctaatgagactggatttttgttttttatgttgtgtgtcacagagctaaaaactcagttcccaaatccccagtttatgcagcgccatcaggtattttaagctaaacttcttcacccctgagagcatgtcagctggagaaaagcagttcttccttgcccacttgagaagtgcacgcccactcacccaacatcctggtctctaggaaagcctcatgtgaggttcctctttctttcagctcagtgcccatgggcaaggatcatgatttccattccgtgttacaatgacaatatttaatgagcataaccttctcagtctcctgctctcaaatttaggacagagccgctaaggacaaaacaatccctcccgtgctttatgatggcagcaggggctggggagcctctgagggactctttcattctgcagttgtctggaagcctgggtggcgtcatgagctgaaggatcatgctttcctgtcctggctccataggttataggctggctggtgaaaggttcacgtggcccaggctgaacttcattgcctagctttggatgtgctttctgccataaagactgatttttgttcgttctgagccttcaaggaatttgttttttacaactggaatatgctcctgtgtgtgttaacagatcatggatgttttatgttttcactgatcatttaaagagtttgacctcagagctccaggatcatcagtaaatttgtcatgttatatatttatttttttataaatcaagacttctgtgtgctcttaaatatattaaaaacaatttacatttca

SEQ ID NO: 319630 - DNA, 2107 bp, Homo sapiens
cccggaagaggagcggcgaggaaaggagttggttcgcgcaggtgcggcgcctgggtccccatggcgctgtggcgcggctccgcgtacgcgggcttcctggcgctggccgtgggctgcgtcttcctgctggagccagagctgccaggctcggcgctgcgctctctctggagctcgctgtgtctggggcccgcgcctgcgcccccgggacccgtctcccccgagggccggttggcggcagcctgggacgcgcttatcgtgcggccagtccggcgctggcgccgcgtggcagtgggagtcaatgcatgtgttgatgtggtgctctcaggggtgaagctcttgcaggcacttggccttagtcctgggaatgggaaagatcacagcattctgcattcaaggaatgatctggaagaagccttcattcacttcatggggaagggagcagctgctgagcgcttcttcagtgataaggaaacttttcacgacattgcccaggttgcgtcagagttcccaggagcccagcactatgtaggaggaaatgcagctttaattggacagaaatttgcagccaactcagatttaaagcaggtctttcccgcggtgacttcccttgggctgaatgaacaggagctgttatttctcacccagtcagcctctggacctcactcttctctctcttcctggaacggtgttcctgatgtgggcatggtcagtgacatcctcttctggatcttgaaagaacatgggaggagtaaaagcagagcctcggatctcaccaggatccatttccacacgctggtctaccacatcctggcaactgtggatggacactgggccaaccagctggcagccgtggctgcaggagctcgtgtggctgggacacaggcctgcgccacagaaaccatagacaccagccgagtgtctctgagggcaccccaagagttcatgacttcccattcggaggcaggctccaggattgtattaaacccaaacaagccagtagtagaatggcacagagagggaatatccttccacttcacaccagtattggtgtgtaaagaccccattcgaactgtaggccttggagatgccatttcagccgaaggactcttctattcggaagtacaccctcactattaggaagattcttaggggtaatttttctgaggaaggagaactagccaacttaagaattacaggaagaaagtggtttggaagacagccaaagaaataaaagcagattaaattgtatcaggtacattccagcctgttggcaactccataaaaacatttcagattttaatccgaatttagctaatgagactggatttttgttttttatgttgtgtgtcacagagctaaaaactcagttcccaaatccccagtttatgcagcgccatcaggtattttaagctaaacttcttcacccctgagagcatgtcagctggagaaaagcagttcttccttgcccacttgagaagtgcacgcccactcacccaacatcctggtctctaggaaagcctcatgtgaggttcctctttctttcagctcagtgcccatgggcaaggatcatgatttccattccgtgttacaatgacaatatttaatgagcataaccttctcagtctcctgctctcaaatttaggacagagccgctaaggacaaaacaatccctcccgtgctttatgatggcagcaggggctggggagcctctgagggactctttcattctgcagttgtctggaagcctgggtggcgtcatgagctgaaggatcatgctttcctgtcctggctccataggttataggctggctggtgaaaggttcacgtggcccaggctgaacttcattgcctagctttggatgtgctttctgccataaagactgatttttgttcgttctgagccttcaaggaatttgttttttacaactggaatatgctcctgtgtgtgttaacagatcatggatgttttatgttttcactgatcatttaaagagtttgacctcagagctccaggatcatcagtaaatttgtcatgttatatatttatttttttataaatcaagacttctgtgtgctcttaaatatattaaaaacaatttacatttca

SEQ ID NO: 319631 - DNA, 1939 bp, Homo sapiens
cccggaagaggagcggcgaggaaaggagttggttcgcgcaggtgcggcgcctgggtccccatggcgctgtggcgcggctccgcgtacgcgggcttcctggcgctggccgtgggctgcgtcttcctgctggagccagagctgccaggctcggcgctgcgctctctctggagctcgctgtgtctggggcccgcgcctgcgcccccgggacccgtctcccccgagggccggttggcggcagcctgggacgcgcttatcgtgcggccagtccggcgctggcgccgcgtggcagtggggttcttctttgcggtccagttggtccaaagctacatgagcttcttgatgacaatgtctttgttccaccagagtcattgcaggaagtggatgagttccacctcattttagagtatcaagcagcaggtctttcccgcggtgacttcccttgggctgaatgaacaggagctgttatttctcacccagtcagcctctggacctcactcttctctctcttcctggaacggtgttcctgatgtgggcatggtcagtgacatcctcttctggatcttgaaagaacatgggaggagtaaaagcagagcctcggatctcaccaggatccatttccacacgctggtctaccacatcctggcaactgtggatggacactgggccaaccagctggcagccgtggctgcaggagctcgtgtggctgggacacaggcctgcgccacagaaaccatagacaccagccgagtgtctctgagggcaccccaagagttcatgacttcccattcggaggcaggctccaggattgtattaaacccaaacaagccagtagtagaatggcacagagagggaatatccttccacttcacaccagtattggtgtgtaaagaccccattcgaactgtaggccttggagatgccatttcagccgaaggactcttctattcggaagtacaccctcactattaggaagattcttaggggtaatttttctgaggaaggagaactagccaacttaagaattacaggaagaaagtggtttggaagacagccaaagaaataaaagcagattaaattgtatcaggtacattccagcctgttggcaactccataaaaacatttcagattttaatccgaatttagctaatgagactggatttttgttttttatgttgtgtgtcacagagctaaaaactcagttcccaaatccccagtttatgcagcgccatcaggtattttaagctaaacttcttcacccctgagagcatgtcagctggagaaaagcagttcttccttgcccacttgagaagtgcacgcccactcacccaacatcctggtctctaggaaagcctcatgtgaggttcctctttctttcagctcagtgcccatgggcaaggatcatgatttccattccgtgttacaatgacaatatttaatgagcataaccttctcagtctcctgctctcaaatttaggacagagccgctaaggacaaaacaatccctcccgtgctttatgatggcagcaggggctggggagcctctgagggactctttcattctgcagttgtctggaagcctgggtggcgtcatgagctgaaggatcatgctttcctgtcctggctccataggttataggctggctggtgaaaggttcacgtggcccaggctgaacttcattgcctagctttggatgtgctttctgccataaagactgatttttgttcgttctgagccttcaaggaatttgttttttacaactggaatatgctcctgtgtgtgttaacagatcatggatgttttatgttttcactgatcatttaaagagtttgacctcagagctccaggatcatcagtaaatttgtcatgttatatatttatttttttataaatcaagacttctgtgtgctcttaaatatattaaaaacaatttacatttca

SEQ ID NO: 319632 - DNA, 2910 bp, Homo sapiens
cccggaagaggagcggcgaggaaaggagttggttcgcgcaggtgcggcgcctgggtccccatggcgctgtggcgcggctccgcgtacgcgggcttcctggcgctggccgtgggctgcgtcttcctgctggagccagagctgccaggctcggcgctgcgctctctctggagctcgctgtgtctggggcccgcgcctgcgcccccgggacccgtctcccccgagggccggttggcggcagcctgggacgcgcttatcgtgcggccagtccggcgctggcgccgcgtggcagtgggagtcaatgcatgtgttgatgtggtgctctcaggggtgaagctcttgcaggcacttggccttagtcctgggaatgggaaagatcacagcattctgcattcaaggaatgatctggaagaagccttcattcacttcatggggaagggagcagctgctgagcgcttcttcagtgataaggaaacttttcacgacattgcccaggttgcgtcagagttcccaggagcccagcactatgtaggaggaaatgcagctttaattggacagaaatttgcagccaactcagatttaaaggttcttctttgcggtccagttggtccaaagctacatgagcttcttgatgacaatgtctttgttccaccagagtcattgcaggaagtggatgagttccacctcattttagagtatcaagcaggggaggagtggggccagttaaaagctccccatgccaaccgattcatcttctctcacgacctctccaacggggccatgaatatgctggaggtgtttgtgtctagcctggaggagtttcagccagacctggtggtcctctctggattgcacatgatggagggacaaagcaaggagctccagaggaagagactcttggaggttgtaacctccatttctgacatccccactggtattccagttcacctagagctggccagtatgactaacagggagctcatgagcagcattgtccatcagcaggtctttcccgcggtgacttcccttgggctgaatgaacaggagctgttatttctcacccagtcagcctctggacctcactcttctctctcttcctggaacggtgttcctgatgtgggcatggtcagtgacatcctcttctggatcttgaaagaacatgggaggagtaaaagcagagcctcggatctcaccaggatccatttccacacgctggtctaccacatcctggcaactgtggatggacactgggccaaccagctggcagccgtggctgcaggagctcgtgtggctgggacacaggcctgcgccacagaaaccatagacaccagccgagtgtctctgagggcaccccaagagttcatgacttcccattcggaggcaggctccaggattgtattaaacccaaacaagccagtagtagaatggcacagagagggaatatccttccacttcacaccagtattggtgtgtaaagaccccattcgaactgtaggccttggagatgccatttcagccgaaggactcttctattcggaagtacaccctcactattaggaagattcttaggggtaatttttctgaggaaggagaactagccaacttaagaattacaggaagaaagtggtttggaagacagccaaagaaataaaagcagattaaattgtatcaggtacattccagcctgttggcaactccataaaaacatttcagattttaatccgaatttagctaatgagactggatttttgttttttatgttgtgtgtcacagagctaaaaactcagttcccaaatccccagtttatgcagcgccatcaggtattttaagctaaacttcttcacccctgagagcatgtcagctggagaaaagcagttcttccttgcccacttgagaagtgcacgcccactcacccaacatcctggtctctaggaaagcctcatgtgaggttcctctttctttcagctcagtgcccatgggcaaggatcatgatttccattccgtgttacaatgacaatatttaatgagcataaccttctcagtctcctgctctcaaatttaggacagagccgctaaggacaaaacaatccctcccgtgctttatgatggcagcaggggctggggagcctctgagggactctttcattctgcagttgtctggaagcctgggtggcgtcatgagctgaaggatcatgctttcctgtcctggctccataggttataggctggctggtgaaaggttcacgtggcccaggctgaacttcattgcctagctttggatgtgctttctgccataaagactgatttttgttcgttctgagccttcaaggaatttgttttttacaactggaatatgctcctgtgtgtgttaacagatcatggatgttttatgttttcactgatcatttaaagagtttgacctcagagctccaggatcatcagtaaatttgtcatgttatatatttatttttttataaatcaagacttctgtgtgctcttaaatatattaaaaacaatttacatttcaaaaaaaaaaaaaaaaaaaaaaaaaaaaattgtggggggccccgggcccgaaaaaggtttttaaacccttcgttgggggcgggggccacggttaggagacctgggcacggggtccgagaagaatcgcggccctcgtcgagggtggggtttccccacccaaaaaaaaaaggcgcgggcagcgcgtgttggcaccaaccccaagggtggcggggcgtccacggggtccacacagggggccagcgagcaataagacccgccccgggggcgaaaaaacaaagacgaaacacatagaagcgcacagcacaccgacacaacgaaacacctagcaacagcaaacagaacacaaaacgacacaacaaccgcaagacaaaacagagagagcagaga

SEQ ID NO: 319633 - DNA, 1821 bp, Homo sapiens
ggaagagactcttggaggtcctggcctcccagggacatatcttggcagctggctgtggagcttgcctcctgctgcagtgaggcacctcactgtatcccttcagatgtgggcagcagcttgagtaggacagggcagaacatcttcttgcctgagcctctgcatcctgtgctaaaccgaccatggctgcaagctgcagggttgtaacctccatttctgacatccccactggtattccagttcacctagagctggccagtatgactaacagggagctcatgagcagcattgtccatcagcaggtctttcccgcggtgacttcccttgggctgaatgaacaggagctgttatttctcacccagtcagcctctggacctcactcttctctctcttcctggaacggtgttcctgatgtgggcatggtcagtgacatcctcttctggatcttgaaagaacatgggaggagtaaaagcagagcctcggatctcaccaggatccatttccacacgctggtctaccacatcctggcaactgtggatggacactgggccaaccagctggcagccgtggctgcaggagctcgtgtggctgggacacaggcctgcgccacagaaaccatagacaccagccgagtgtctctgagggcaccccaagagttcatgacttcccattcggaggcaggctccaggattgtattaaacccaaacaagccagtagtagaatggcacagagagggaatatccttccacttcacaccagtattggtgtgtaaagaccccattcgaactgtaggccttggagatgccatttcagccgaaggactcttctattcggaagtacaccctcactattaggaagattcttaggggtaatttttctgaggaaggagaactagccaacttaagaattacaggaagaaagtggtttggaagacagccaaagaaataaaagcagattaaattgtatcaggtacattccagcctgttggcaactccataaaaacatttcagattttaatccgaatttagctaatgagactggatttttgttttttatgttgtgtgtcacagagctaaaaactcagttcccaaatccccagtttatgcagcgccatcaggtattttaagctaaacttcttcacccctgagagcatgtcagctggagaaaagcagttcttccttgcccacttgagaagtgcacgcccactcacccaacatcctggtctctaggaaagcctcatgtgaggttcctctttctttcagctcagtgcccatgggcaaggatcatgatttccattccgtgttacaatgacaatatttaatgagcataaccttctcagtctcctgctctcaaatttaggacagagccgctaaggacaaaacaatccctcccgtgctttatgatggcagcaggggctggggagcctctgagggactctttcattctgcagttgtctggaagcctgggtggcgtcatgagctgaaggatcatgctttcctgtcctggctccataggttataggctggctggtgaaaggttcacgtggcccaggctgaacttcattgcctagctttggatgtgctttctgccataaagactgatttttgttcgttctgagccttcaaggaatttgttttttacaactggaatatgctcctgtgtgtgttaacagatcatggatgttttatgttttcactgatcatttaaagagtttgacctcagagctccaggatcatcagtaaatttgtcatgttatatatttatttttttataaatcaagacttctgtgtgctcttaaatatattaaaaacaatttacatttca

SEQ ID NO: 319634 - DNA, 2524 bp, Homo sapiens
cccggaagaggagcggcgaggaaaggagttggttcgcgcaggtgcggcgcctgggtccccatggcgctgtggcgcggctccgcgtacgcgggcttcctggcgctggccgtgggctgcgtcttcctgctggagccagagctgccaggctcggcgctgcgctctctctggagctcgctgtgtctggggcccgcgcctgcgcccccgggacccgtctcccccgagggccggttggcggcagcctgggacgcgcttatcgtgcggccagtccggcgctggcgccgcgtggcagtgggagtcaatgcatgtgttgatgtggtgctctcaggggtgaagctcttgcaggcacttggccttagtcctgggaatgggaaagatcacagcattctgcattcaaggaatgatctggaagaagccttcattcacttcatggggaagggagcagctgctgagcgcttcttcagtgataaggaaacttttcacgacattgcccaggttgcgtcagagttcccaggagcccagcactatgtaggaggaaatgcagctttaattggacagaaatttgcagccaactcagatttaaaggttcttctttgcggtccagttggtccaaagctacatgagcttcttgatgacaatgtctttgttccaccagagtcattgcaggaagtggatgagttccacctcattttagagtatcaagcaggggaggagtggggccagttaaaagctccccatgccaaccgattcatcttctctcacgacctctccaacggggccatgaatatgctggaggtgtttgtgtctagcctggaggagtttcagccagacctggtggtcctctctggattgcacatgatggagggacaaagcaaggagctccagaggaagagactcttggaggttgtaacctccatttctgacatccccactggtattccagttcacctagagctggccagtatgactaacagggagctcatgagcagcattgtccatcagcaggtctttcccgcggtgacttcccttgggctgaatgaacaggagctgttatttctcacccagtcagcctctggacctcactcttctctctcttcctggaacggtgttcctgatgtgggcatggtcagtgacatcctcttctggatcttgaaagaacatgggaggagtaaaagcagagcctcggatctcaccaggatccatttccacacgctggtctaccacatcctggcaactgtggatggacactgggccaaccagctggcagccgtggctgcaggagctcgtgtggctgggacacaggcctgcgccacagaaaccatagacaccagccgagtgtctctgagggcaccccaagagttcatgacttcccattcggaggcaggctccaggattgtattaaacccaaacaagccagtagtagaatggcacagagagggaatatccttccacttcacaccagtattggtgtgtaaagaccccattcgaactgtaggccttggagatgccatttcagccgaaggactcttctattcggaagtacaccctcactattaggaagattcttaggggtaatttttctgaggaaggagaactagccaacttaagaattacaggaagaaagtggtttggaagacagccaaagaaataaaagcagattaaattgtatcaggtacattccagcctgttggcaactccataaaaacatttcagattttaatccgaatttagctaatgagactggatttttgttttttatgttgtgtgtcacagagctaaaaactcagttcccaaatccccagtttatgcagcgccatcaggtattttaagctaaacttcttcacccctgagagcatgtcagctggagaaaagcagttcttccttgcccacttgagaagtgcacgcccactcacccaacatcctggtctctaggaaagcctcatgtgaggttcctctttctttcagctcagtgcccatgggcaaggatcatgatttccattccgtgttacaatgacaatatttaatgagcataaccttctcagtctcctgctctcaaatttaggacagagccgctaaggacaaaacaatccctcccgtgctttatgatggcagcaggggctggggagcctctgagggactctttcattctgcagttgtctggaagcctgggtggcgtcatgagctgaaggatcatgctttcctgtcctggctccataggttataggctggctggtgaaaggttcacgtggcccaggctgaacttcattgcctagctttggatgtgctttctgccataaagactgatttttgttcgttctgagccttcaaggaatttgttttttacaactggaatatgctcctgtgtgtgttaacagatcatggatgttttatgttttcactgatcatttaaagagtttgacctcagagctccaggatcatcagtaaatttgtcatgttatatatttatttttttataaatcaagacttctgtgtgctcttaaatatattaaaaacaatttacatttca

SEQ ID NO: 319635 - DNA, 2650 bp, Homo sapiens
cccggaagaggagcggcgaggaaaggagttggttcgcgcaggtgcggcgcctgggtccccatggcgctgtggcgcggctccgcgtacgcgggcttcctggcgctggccgtgggctgcgtcttcctgctggagccagagctgccaggctcggcgctgcgctctctctggagctcgctgtgtctggggcccgcgcctgcgcccccgggacccgtctcccccgagggccggttggcggcagcctgggacgcgcttatcgtgcggccagtccggcgctggcgccgcgtggcagtggggggctcttccctgctattcactcggcacggctccttcctgacaccttaagaagaaggtgccttgcttccccttcaccttccaccatgaatgtaagtttcctgaggccttcccagccatgctgaactagtcaatgcatgtgttgatgtggtgctctcaggggtgaagctcttgcaggcacttggccttagtcctgggaatgggaaagatcacagcattctgcattcaaggaatgatctggaagaagccttcattcacttcatggggaagggagcagctgctgagcgcttcttcagtgataaggaaacttttcacgacattgcccaggttgcgtcagagttcccaggagcccagcactatgtaggaggaaatgcagctttaattggacagaaatttgcagccaactcagatttaaaggttcttctttgcggtccagttggtccaaagctacatgagcttcttgatgacaatgtctttgttccaccagagtcattgcaggaagtggatgagttccacctcattttagagtatcaagcaggggaggagtggggccagttaaaagctccccatgccaaccgattcatcttctctcacgacctctccaacggggccatgaatatgctggaggtgtttgtgtctagcctggaggagtttcagccagacctggtggtcctctctggattgcacatgatggagggacaaagcaaggagctccagaggaagagactcttggaggttgtaacctccatttctgacatccccactggtattccagttcacctagagctggccagtatgactaacagggagctcatgagcagcattgtccatcagcaggtctttcccgcggtgacttcccttgggctgaatgaacaggagctgttatttctcacccagtcagcctctggacctcactcttctctctcttcctggaacggtgttcctgatgtgggcatggtcagtgacatcctcttctggatcttgaaagaacatgggaggagtaaaagcagagcctcggatctcaccaggatccatttccacacgctggtctaccacatcctggcaactgtggatggacactgggccaaccagctggcagccgtggctgcaggagctcgtgtggctgggacacaggcctgcgccacagaaaccatagacaccagccgagtgtctctgagggcaccccaagagttcatgacttcccattcggaggcaggctccaggattgtattaaacccaaacaagccagtagtagaatggcacagagagggaatatccttccacttcacaccagtattggtgtgtaaagaccccattcgaactgtaggccttggagatgccatttcagccgaaggactcttctattcggaagtacaccctcactattaggaagattcttaggggtaatttttctgaggaaggagaactagccaacttaagaattacaggaagaaagtggtttggaagacagccaaagaaataaaagcagattaaattgtatcaggtacattccagcctgttggcaactccataaaaacatttcagattttaatccgaatttagctaatgagactggatttttgttttttatgttgtgtgtcacagagctaaaaactcagttcccaaatccccagtttatgcagcgccatcaggtattttaagctaaacttcttcacccctgagagcatgtcagctggagaaaagcagttcttccttgcccacttgagaagtgcacgcccactcacccaacatcctggtctctaggaaagcctcatgtgaggttcctctttctttcagctcagtgcccatgggcaaggatcatgatttccattccgtgttacaatgacaatatttaatgagcataaccttctcagtctcctgctctcaaatttaggacagagccgctaaggacaaaacaatccctcccgtgctttatgatggcagcaggggctggggagcctctgagggactctttcattctgcagttgtctggaagcctgggtggcgtcatgagctgaaggatcatgctttcctgtcctggctccataggttataggctggctggtgaaaggttcacgtggcccaggctgaacttcattgcctagctttggatgtgctttctgccataaagactgatttttgttcgttctgagccttcaaggaatttgttttttacaactggaatatgctcctgtgtgtgttaacagatcatggatgttttatgttttcactgatcatttaaagagtttgacctcagagctccaggatcatcagtaaatttgtcatgttatatatttatttttttataaatcaagacttctgtgtgctcttaaatatattaaaaacaatttacatttca

SEQ ID NO: 319636 - DNA, 2863 bp, Homo sapiens
cccggaagaggagcggcgaggaaaggagttggttcgcgcaggtgcggcgcctgggtccccatggcgctgtggcgcggctccgcgtacgcgggcttcctggcgctggccgtgggctgcgtcttcctgctggagccagagctgccaggctcggcgctgcgctctctctggagctcgctgtgtctggggcccgcgcctgcgcccccgggacccgtctcccccgagggccggttggcggcagcctgggacgcgcttatcgtgcggccagtccggcgctggcgccgcgtggcagtggggtgagtgccaacggggcctgggtctctgagcctccgaggtcggccttggaggtcgggcggagccgcgcagaaacagggcttctcagaggtccccgggaggcgctgctgtccgcgctggccccttggcgagaagtgtcggacgtctgagtggaacccggttcgtcaccgctgctctttccactcggctggcctctgcgcctttctctcatcccggggctcttccctgctattcactcggcacggctccttcctgacaccttaagaagaaggtgccttgcttccccttcaccttccaccatgaatgtaagtttcctgaggccttcccagccatgctgaactagtcaatgcatgtgttgatgtggtgctctcaggggtgaagctcttgcaggcacttggccttagtcctgggaatgggaaagatcacagcattctgcattcaaggaatgatctggaagaagccttcattcacttcatggggaagggagcagctgctgagcgcttcttcagtgataaggaaacttttcacgacattgcccaggttgcgtcagagttcccaggagcccagcactatgtaggaggaaatgcagctttaattggacagaaatttgcagccaactcagatttaaaggttcttctttgcggtccagttggtccaaagctacatgagcttcttgatgacaatgtctttgttccaccagagtcattgcaggaagtggatgagttccacctcattttagagtatcaagcaggggaggagtggggccagttaaaagctccccatgccaaccgattcatcttctctcacgacctctccaacggggccatgaatatgctggaggtgtttgtgtctagcctggaggagtttcagccagacctggtggtcctctctggattgcacatgatggagggacaaagcaaggagctccagaggaagagactcttggaggttgtaacctccatttctgacatccccactggtattccagttcacctagagctggccagtatgactaacagggagctcatgagcagcattgtccatcagcaggtctttcccgcggtgacttcccttgggctgaatgaacaggagctgttatttctcacccagtcagcctctggacctcactcttctctctcttcctggaacggtgttcctgatgtgggcatggtcagtgacatcctcttctggatcttgaaagaacatgggaggagtaaaagcagagcctcggatctcaccaggatccatttccacacgctggtctaccacatcctggcaactgtggatggacactgggccaaccagctggcagccgtggctgcaggagctcgtgtggctgggacacaggcctgcgccacagaaaccatagacaccagccgagtgtctctgagggcaccccaagagttcatgacttcccattcggaggcaggctccaggattgtattaaacccaaacaagccagtagtagaatggcacagagagggaatatccttccacttcacaccagtattggtgtgtaaagaccccattcgaactgtaggccttggagatgccatttcagccgaaggactcttctattcggaagtacaccctcactattaggaagattcttaggggtaatttttctgaggaaggagaactagccaacttaagaattacaggaagaaagtggtttggaagacagccaaagaaataaaagcagattaaattgtatcaggtacattccagcctgttggcaactccataaaaacatttcagattttaatccgaatttagctaatgagactggatttttgttttttatgttgtgtgtcacagagctaaaaactcagttcccaaatccccagtttatgcagcgccatcaggtattttaagctaaacttcttcacccctgagagcatgtcagctggagaaaagcagttcttccttgcccacttgagaagtgcacgcccactcacccaacatcctggtctctaggaaagcctcatgtgaggttcctctttctttcagctcagtgcccatgggcaaggatcatgatttccattccgtgttacaatgacaatatttaatgagcataaccttctcagtctcctgctctcaaatttaggacagagccgctaaggacaaaacaatccctcccgtgctttatgatggcagcaggggctggggagcctctgagggactctttcattctgcagttgtctggaagcctgggtggcgtcatgagctgaaggatcatgctttcctgtcctggctccataggttataggctggctggtgaaaggttcacgtggcccaggctgaacttcattgcctagctttggatgtgctttctgccataaagactgatttttgttcgttctgagccttcaaggaatttgttttttacaactggaatatgctcctgtgtgtgttaacagatcatggatgttttatgttttcactgatcatttaaagagtttgacctcagagctccaggatcatcagtaaatttgtcatgttatatatttatttttttataaatcaagacttctgtgtgctcttaaatatattaaaaacaatttacatttca

SEQ ID NO: 319637 - DNA, 2511 bp, Homo sapiens
cccggaagaggagcggcgaggaaaggagttggttcgcgcaggtgcggcgcctgggtccccatggcgctgtggcgcggctccgcgtacgcgggcttcctggcgctggccgtgggctgcgtcttcctgctggagccagagctgccaggctcggcgctgcgctctctctggagctcgctgtgtctggggcccgcgcctgcgcccccgggacccgtctcccccgagggccggttggcggcagcctgggacgcgcttatcgtgcggccagtccggcgctggcgccgcgtggcagtggggtgagtgccaacggggcctgggtctctgagcctccgaggtcggccttggaggtcgggcggagccgcgcagaaacagggcttctcagaggtccccgggaggcgctgctgtccgcgctggccccttggcgagaagtgtcggacgtctgagtggaacccggttcgtcaccgctgctctttccactcggctggcctctgcgcctttctctcatcccgcactatgtaggaggaaatgcagctttaattggacagaaatttgcagccaactcagatttaaaggttcttctttgcggtccagttggtccaaagctacatgagcttcttgatgacaatgtctttgttccaccagagtcattgcaggaagtggatgagttccacctcattttagagtatcaagcaggggaggagtggggccagttaaaagctccccatgccaaccgattcatcttctctcacgacctctccaacggggccatgaatatgctggaggtgtttgtgtctagcctggaggagtttcagccagacctggtggtcctctctggattgcacatgatggagggacaaagcaaggagctccagaggaagagactcttggaggttgtaacctccatttctgacatccccactggtattccagttcacctagagctggccagtatgactaacagggagctcatgagcagcattgtccatcagcaggtctttcccgcggtgacttcccttgggctgaatgaacaggagctgttatttctcacccagtcagcctctggacctcactcttctctctcttcctggaacggtgttcctgatgtgggcatggtcagtgacatcctcttctggatcttgaaagaacatgggaggagtaaaagcagagcctcggatctcaccaggatccatttccacacgctggtctaccacatcctggcaactgtggatggacactgggccaaccagctggcagccgtggctgcaggagctcgtgtggctgggacacaggcctgcgccacagaaaccatagacaccagccgagtgtctctgagggcaccccaagagttcatgacttcccattcggaggcaggctccaggattgtattaaacccaaacaagccagtagtagaatggcacagagagggaatatccttccacttcacaccagtattggtgtgtaaagaccccattcgaactgtaggccttggagatgccatttcagccgaaggactcttctattcggaagtacaccctcactattaggaagattcttaggggtaatttttctgaggaaggagaactagccaacttaagaattacaggaagaaagtggtttggaagacagccaaagaaataaaagcagattaaattgtatcaggtacattccagcctgttggcaactccataaaaacatttcagattttaatccgaatttagctaatgagactggatttttgttttttatgttgtgtgtcacagagctaaaaactcagttcccaaatccccagtttatgcagcgccatcaggtattttaagctaaacttcttcacccctgagagcatgtcagctggagaaaagcagttcttccttgcccacttgagaagtgcacgcccactcacccaacatcctggtctctaggaaagcctcatgtgaggttcctctttctttcagctcagtgcccatgggcaaggatcatgatttccattccgtgttacaatgacaatatttaatgagcataaccttctcagtctcctgctctcaaatttaggacagagccgctaaggacaaaacaatccctcccgtgctttatgatggcagcaggggctggggagcctctgagggactctttcattctgcagttgtctggaagcctgggtggcgtcatgagctgaaggatcatgctttcctgtcctggctccataggttataggctggctggtgaaaggttcacgtggcccaggctgaacttcattgcctagctttggatgtgctttctgccataaagactgatttttgttcgttctgagccttcaaggaatttgttttttacaactggaatatgctcctgtgtgtgttaacagatcatggatgttttatgttttcactgatcatttaaagagtttgacctcagagctccaggatcatcagtaaatttgtcatgttatatatttatttttttataaatcaagacttctgtgtgctcttaaatatattaaaaacaatttacatttca

SEQ ID NO: 319638 - DNA, 2601 bp, Homo sapiens
cccggaagaggagcggcgaggaaaggagttggttcgcgcaggtgcggcgcctgggtccccatggcgctgtggcgcggctccgcgtacgcgggcttcctggcgctggccgtgggctgcgtcttcctgctggagccagagctgccaggctcggcgctgcgctctctctggagctcgctgtgtctggggcccgcgcctgcgcccccgggacccgtctcccccgagggccggttggcggcagcctgggacgcgcttatcgtgcggccagtccggcgctggcgccgcgtggcagtgggagtcaatgcatgtgttgatgtggtgctctcaggggtgaagctcttgcaggcacttggccttagtcctgggaatgggaaagatcacagcattctgcattcaaggaatgatctggaagaagccttcattcacttcatggggaagggagcagctgctgagcgcttcttcagtgataaggaaacttttcacgacattgcccaggttgcgtcagagttcccaggagcccagcactatgtaggaggaaatgcagctttaattggacagaaatttgcagccaactcagatttaaaggttcttctttgcggtccagttggtccaaagctacatgagcttcttgatgacaatgtctttgttccaccagagtcattgcaggaagtggatgagttccacctcattttagagtatcaagcaggggaggagtggggccagttaaaagctccccatgccaaccgattcatcttctctcacgacctctccaacggggccatgaatatgctggaggtgtttgtgtctagcctggaggagtttcagccagacctggtggtcctctctggattgcacatgatggagggacaaagcaaggagctccagaggaagagactcttggaggttgtaacctccatttctgacatccccactggtattccagttcacctagagctggccagtatgactaacagggagctcatgagcagcattgtccatcagcaggtctttcccgcggtgacttcccttgggctgaatgaacaggagctgttatttctcacccagtcagcctctggacctcactcttctctctcttcctggaacggtgttcctgatgtgggcatggtcagtgacatcctcttctggatcttgaaagaacatgggaggagtaaaagcagagcctcggatctcaccaggatccatttccacacgctggtctaccacatcctggcaactgtggatggacactgggccaaccagctggcagccgtggctgcaggagctcgtgtggctgggacacaggcctgcgccacagaaaccatagacaccagccgagtgtctctgagggcaccccaagagttcatgacttcccattcggaggcaggctccaggattgtattaaacccaaacaagccagtagtagaatggcacagagagggaatatccttccacttcacaccagtattggtgtgtaaagaccccattcgaactgtaggccttggagatgccatttcagccgaaggactcttctattcggaagtacaccctcactattaggaagattcttaggggtaatttttctgaggaaggagaactagccaacttaagaattacaggaagaaagtggtttggaagacagccaaagaaataaaagcagattaaattgtatcaggtacattccagcctgttggcaactccataaaaacatttcagattttaatccgaatttagctaatgagactggatttttgttttttatgttgtgtgtcacagagctaaaaactcagttcccaaatccccagtttatgcagcgccatcaggtattttaagctaaacttcttcacccctgagagcatgtcagctggagaaaagcagttcttccttgcccacttgagaagtgcacgcccactcacccaacatcctggtctctaggaaagcctcatgtgaggttcctctttctttcagctcagtgcccatgggcaaggatcatgatttccattccgtgttacaatgacaatatttaatgagcataaccttctcagtctcctgctctcaaatttaggacagagccgctaaggacaaaacaatccctcccgtgctttatgatggcagcaggggctggggagcctctgagggactctttcattctgcagttgtctggaagcctgggtggcgtcatgagctgaaggatcatgctttcctgtcctggctccataggttataggctggctggtgaaaggttcacgtggcccaggctgaacttcattgcctagctttggatgtgctttctgccataaagactgatttttgttcgttctgagccttcaaggaatttgttttttacaactggaatatgctcctgtgtgtgttaacagatcatggatgttttatgttttcactgatcatttaaagagtttgacctcagagctccaggatcatcagtaaatttgtcatgttatatatttatttttttataaatcaagacttctgtgtgctcttaaatatattaaaaacaatttacatttcaggaattctgtctgtaattgatttttgtctccatcaccactctggaaccagataagataaaaatcattctgatcttca

SEQ ID NO: 319639 - DNA, 1514 bp, Homo sapiens
ggagggggcgcagtcccgggttcgaccggccgagccccgcgcgccccgcccggcccctgcgcctccgcccggccggccgcggggagggggcatgagccggcgcccgccggcccccgagctgcgggccggcctagagccccgcgcggcgccccgcggagccaagccgtcgccgccgccgccgccaaaccgcgggcgcacgagtgggccgcgcgatgcagcggccgggggagccggcggccgcgcgcttcggcgcccccgagggctgcgcggaccaccggccgcagcgctatcgcagcttcatgattgaggagatcctcacggagccacccgggcccaagggcgccgcgcccgcagccgccgctgccgcggcgggcgagctgctgaagttcggcgtgcaggcgctgctggcggcgcggcccttccacagccacctggccgtgctgaaggccgagcaggcggcggtgttcaagttcccactggcgccgctgggctgttcagggctgagctctgcgttgctggcggcagggcccgggctgcccggcgccgcgggtgcgccacacctgccgctcgagttgcagctccgcgggaagctggaggcggcaggccctggggagccaggcaccaaagccaagaaggggcgtcggagccgcactgtgttcaccgagctgcagctgatgggcctggagaaacgcttcgagaagcagaagtacctttccacgccggacagaatagatcttgctgagtccctgggcctgagccagttgcaggtgaagacgtggtaccagaatcggaggatgaagtggaagaaaatagtgctgcagggcggcggcctggagtctcccaccaagcccaaggggcggcccaagaagaactcaattccaacgagcgagcagcttactgagcaggagcgcgccaaggatgcagagaaaccggcggaggtgccgggcgagcccagcgacaggagccgcgaggactgagggcggtatacggtgcggggcctgggatgcccgcgccacccgcagccccctcactcggcggaaacccgcgagccggcccttccgcgtccaagaagtttacttcctaagcctttttattatgatcttgaatgcggacaattggggccaaacgaggaaggacacagacccaaaagccagacccaggtcccagcgcgcttctgggctctaacctgggagactcgcatccagcccggcggaagctacagtctctaccctgagctccgtggcgcagagcgctccacgcgtattcacgccccgctcctcgcctgcacccccaccccgtctggggcctgccctcccggccggggagcctccaggcacacacccgcttctggacgtcggggacccagcggttgggctcaggccacaacggcctgagattgccccggggcaacccgtcggctcggcctggaggccgggtccccgatgtcgctggggcccctaccccctcttgcgaagacggtgactttttttccaataaaatattttatgacacaa

SEQ ID NO: 319640 - DNA, 310 bp, Homo sapiens
tttttccaataaaatattttatgacacaatcgggctcggtggagcagcttctgaatccgcagggggtgagggtgggggtgggggtgggctcggcaagataagcggaacgcgggcagttgcttcttaaacttcctttcctccggctctgtcgaaggcagctgtgctcttcaccatcaagcccgggctaggcacggcgggcggctcggtggctgcaggatcctaggaatcgcttccactctgggcgtgaggggccagtctgaactccacctcctctcccttgccagccagagagtcgctggcaggagcggtc

SEQ ID NO: 319641 - DNA, 1329 bp, Homo sapiens
  misc_feature (1)..(1): n is a, c, g, or t
  misc_feature (4)..(6): n is a, c, g, or t
  misc_feature (10)..(10): n is a, c, g, or t
nctnnngccnggggaactccaggacagaacacggacagggtcgaggagatactccctcccaaatctggggaacggcaacgttgaggagggtctccatctgcgccaccggcgccgaccggcagggcgtggaggttttgcgctgggaggcactggccaagcgcgagcacccccgcggcacgtggtgcggcagtccctggggcagaggagcgcggccgtagctcacccgggtcctcattctctttcttcgcagccgtgctgaaggccgagcaggcggcggtgttcaagttcccactggcgccgctgggctgttcagggctgagctctgcgttgctggcggcagggcccgggctgcccggcgccgcgggtgcgccacacctgccgctcgagttgcagctccgcgggaagctggaggcggcaggccctggggagccaggcaccaaagccaagaaggggcgtcggagccgcactgtgttcaccgagctgcagctgatgggcctggagaaacgcttcgagaagcagaagtacctttccacgccggacagaatagatcttgctgagtccctgggcctgagccagttgcaggtgaagacgtggtaccagaatcggaggatgaagtggaagaaaatagtgctgcagggcggcggcctggagtctcccaccaagcccaaggggcggcccaagaagaactcaattccaacgagcgagcagcttactgagcaggagcgcgccaaggatgcagagaaaccggcggaggtgccgggcgagcccagcgacaggagccgcgaggactgagggcggtatacggtgcggggcctgggatgcccgcgccacccgcagccccctcactcggcggaaacccgcgagccggcccttccgcgtccaagaagtttacttcctaagcctttttattatgatcttgaatgcggacaattggggccaaacgaggaaggacacagacccaaaagccagacccaggtcccagcgcgcttctgggctctaacctgggagactcgcatccagcccggcggaagctacagtctctaccctgagctccgtggcgcagagcgctccacgcgtattcacgccccgctcctcgcctgcacccccaccccgtctggggcctgccctcccggccggggagcctccaggcacacacccgcttctggacgtcggggacccagcggttgggctcaggccacaacggcctgagattgccccggggcaacccgtcggctcggcctggaggccgggtccccgatgtcgctggggcccctaccccctcttgcgaagacggtgactttttttccaataaaatattttatgacacaa

SEQ ID NO: 319642 - DNA, 3424 bp, Homo sapiens
ggagagaggacctatttctacctaaggacattcccggaaggcaatgggtttcaaacaatatcctgaagagactcatctcggggaactaagcaggtggtaatcagagaacacagagcccccggaagaattttatggcatttcaggcaagccacaggccagcctggggaaaaagcaggaagaaaaactggcaatacgagggcccaacccaaaagttattcctgaagagaaacaacgtgtcagcaccagatgggccttcagaccccagcatctccgcgagcagtgagcaaagcggggcacagcagcctcccggtttacaggttgaaaggattgttgacaaaaggaaaaataaaaaagggaagacagagtatttggttcggtggaaaggctatgacagcgaggacgacacttgggagccggaacagcacctcgtgaactgtgaggaatacatccacgacttcaacagacgccacacggagaagcagaaggagagcacattgaccagaacaaacaggacctctcccaacaatgctaggaaacaaatctccagatccaccaacagcaacttttctaagacctctcctaaggcactcgtgattgggaaagaccacgaatccaaaaacagccagctgtttgctgccagccagaagttcaggaagaacacagctccatctctctccagccggaagaacatggacctagcgaagtcaggtatcaagatcctcgtgcctaaaagccccgttaagagcaggaccgcagtggacggctttcagagcgagagccctgagaaactggaccccgtcgagcagggtcaggaggacacagtggcacccgaagtggcagcggaaaagccggtcggagctttattgggccccggtgccgagagggccaggatggggagcaggcccaggatacacccactagtgcctcaggtgcccggccctgtgactgcagccatggccacaggcttagctgttaacgggaaaggtacatctccgttcatggatgcattaacagccaatgggacaaccaacatacagacatctgttacaggagtgactgccagcaaaaggaaatttattgacgacagaagagaccagccttttgacaagcgattgcgtttcagcgtgaggcaaacagaaagtgcctacagatacagagatattgtggtcaggaagcaggatggcttcacccacatcttgttatccacaaagtcctcagagaataactcactaaatccagaggtaatgagagaagtccagagtgctctgagcacggccgctgccgatgacagcaagctggtactgctcagcgccgttggcagcgtcttctgttgtggacttgactttatttattttatacgacgtctgacagatgacaggaaaagagaaagcactaaaatggcagaagctatcagaaacttcgtgaatactttcattcaatttaagaagcccattattgtagcagtcaatggcccagccattggtctaggagcatctatattgcctctttgcgatgtggtttgggctaatgaaaaggcttggtttcaaacaccctataccaccttcggacagagtccagatggctgttctaccgttatgtttcccaagataatgggaggagcatctgcaaacgagatgctgctcagtggacggaagctgacagcgcaggaggcgtgtggcaagggcctggtctcccaggtgttttggcccgggacgttcactcaggaagtgatggttcgcattaaggagcttgcctcgtgcaatccagttgtgcttgaggaatccaaagccctcgtgcgctgcaacatgaagatggagctggagcaggccaacgagagggagtgtgaggtgctgaagaaaatctggggctcggcccaggggatggactccatgttaaagtacttgcagaggaagatcgatgagttctgagtgtcgggctgcccactggtgacaccgggatcgggctgagcaggagaacatcaccggctccagttcccctgatccattctcacagcctgaaacaagctcacccgtagcttacgcttggaagcaggactgggaacatccacgctatttattatcgaggagttttaaagtactgtaactttaaaataaataactacaaagcttctttgtccaaacgtcattattttatacttatatacacgcaggtgtaaaagtataaaggtgagcactagactgctcttagaagctctaatttttgttttctttggctagtactgtataaaaaacagaattgtgttttattggttttggatgacagaaaagtctggaataatgtttgttttcctcatttcttccttctagaacacagaatctaaaggggtgttagccagcctcgcctccctgccccacgtagagacacagagtgatgtgaggcgttggctttttctccaagaaggtacagatacctcagattcgggaaactcaaaatcaaaagacttagcttctaggataaatacttctgatgaaaaatccgctgaggagcataccccaaaccagacatatgcttaggattcatgctgagatatcaattggtttccccttctttttaaaatacgtccagttcttacccagttaacatgaagaaaccactgtctctagaagaaagcttgttttgcagtattagtgaatcactgaatagcttaagtatgactatctaagttataagttagtctttagtgggttttaaatagtttttctgacccttctgaaaaataactacataagtgcttcttgttgctgggtgagaaatactactttatagacagttttggttttctgtttgcagatatgattgatgtatttcaccaaaataaaatatttttatgtttataaagtgtaatttttaggttcacttagaatatattttatttaataagttaaaattcttttggcacactattaaatgcaaaaactcctttcaaaacaaaaaagaactaccttatattcaacatttaatgttcttggcctctgcttttatgtctatacaatatactgagttcagtatggtgtccaagagtgccctgtgtggatagacatgtgcactccttccaggagtgggtactgattccagactccagatgcctattattagttaggcttctgagcttgcaatcatattgaatgtatgaagagcgaaatcaaattcttatttttgtacagttttgaagtttatacttagaactgaccacctccccggccacgcggagagctgtacagtgtgtaaatctgcctttatcttggattgattggtacagtatttttgcatctgtgggacctaccttttcgttcagtagtttgaactatatataaactgtacaatctgtaaagtttttatagaataaatattcagctgtgaaaactggttaaataaaactaatatttcttaacacaaaaaaaat

SEQ ID NO: 319643 - DNA, 2808 bp, Homo sapiens
aggggagccgcgatccggccgcgccgcccgcacgccgccgcgcccgccccagcccgcccggccccgcggcggggcgcgatgagcccgagcgcgagccggcccgccggggagtgagcgcggggcgcccagggcgcgttgcgtagctgctcctgcgcacaaccccgccgcgccgccggcccgcactggccgcggagtgcaagaggctcgtccgtgcccagcgcccggccggccgcgggagcaggaagcgcaggccacgcaggacccaactgaaacaaagtgtcggccgcccggcgccggcgcccgccccgaccctgcccctcccgcccgcaactccgccgcccaccatggcttccgaggagctgtacgaggtacatctccgttcatggatgcattaacagccaatgggacaaccaacatacagacatctgttacaggagtgactgccagcaaaaggaaatttattgacgacagaagagaccagccttttgacaagcgattgcgtttcagcgtgaggcaaacagaaagtgcctacagatacagagatattgtggtcaggaagcaggatggcttcacccacatcttgttatccacaaagtcctcagagaataactcactaaatccagaggtaatgagagaagtccagagtgctctgagcacggccgctgccgatgacagcaagctggtactgctcagcgccgttggcagcgtcttctgttgtggacttgactttatttattttatacgacgtctgacagatgacaggaaaagagaaagcactaaaatggcagaagctatcagaaacttcgtgaatactttcattcaatttaagaagcccattattgtagcagtcaatggcccagccattggtctaggagcatctatattgcctctttgcgatgtggtttgggctaatgaaaaggcttggtttcaaacaccctataccaccttcggacagagtccagatggctgttctaccgttatgtttcccaagataatgggaggagcatctgcaaacgagatgctgctcagtggacggaagctgacagcgcaggaggcgtgtggcaagggcctggtctcccaggtgttttggcccgggacgttcactcaggaagtgatggttcgcattaaggagcttgcctcgtgcaatccagttgtgcttgaggaatccaaagccctcgtgcgctgcaacatgaagatggagctggagcaggccaacgagagggagtgtgaggtgctgaagaaaatctggggctcggcccaggggatggactccatgttaaagtacttgcagaggaagatcgatgagttctgagtgtcgggctgcccactggtgacaccgggatcgggctgagcaggagaacatcaccggctccagttcccctgatccattctcacagcctgaaacaagctcacccgtagcttacgcttggaagcaggactgggaacatccacgctatttattatcgaggagttttaaagtactgtaactttaaaataaataactacaaagcttctttgtccaaacgtcattattttatacttatatacacgcaggtgtaaaagtataaaggtgagcactagactgctcttagaagctctaatttttgttttctttggctagtactgtataaaaaacagaattgtgttttattggttttggatgacagaaaagtctggaataatgtttgttttcctcatttcttccttctagaacacagaatctaaaggggtgttagccagcctcgcctccctgccccacgtagagacacagagtgatgtgaggcgttggctttttctccaagaaggtacagatacctcagattcgggaaactcaaaatcaaaagacttagcttctaggataaatacttctgatgaaaaatccgctgaggagcataccccaaaccagacatatgcttaggattcatgctgagatatcaattggtttccccttctttttaaaatacgtccagttcttacccagttaacatgaagaaaccactgtctctagaagaaagcttgttttgcagtattagtgaatcactgaatagcttaagtatgactatctaagttataagttagtctttagtgggttttaaatagtttttctgacccttctgaaaaataactacataagtgcttcttgttgctgggtgagaaatactactttatagacagttttggttttctgtttgcagatatgattgatgtatttcaccaaaataaaatatttttatgtttataaagtgtaatttttaggttcacttagaatatattttatttaataagttaaaattcttttggcacactattaaatgcaaaaactcctttcaaaacaaaaaagaactaccttatattcaacatttaatgttcttggcctctgcttttatgtctatacaatatactgagttcagtatggtgtccaagagtgccctgtgtggatagacatgtgcactccttccaggagtgggtactgattccagactccagatgcctattattagttaggcttctgagcttgcaatcatattgaatgtatgaagagcgaaatcaaattcttatttttgtacagttttgaagtttatacttagaactgaccacctccccggccacgcggagagctgtacagtgtgtaaatctgcctttatcttggattgattggtacagtatttttgcatctgtgggacctaccttttcgttcagtagtttgaactatatataaactgtacaatctgtaaagtttttatagaataaatattcagctgtgaaaactggttaaataaaactaatatttcttaacacaaaaaaaat

SEQ ID NO: 319644 - DNA, 1855 bp, Homo sapiens
agttaagaatgcacccagtgccaagtgtgaaatgtgctttatacatatgttaggcccgacatattgtgagaaaatgtctggtaacctttttaacaggtgattgctggaatttgatgattgcctccgtaaatgtggaggcacaggggacccgtgtctgcccgcatgcaccctgctaactggctgcttgttttccggtgcaggtgcttgaggaatccaaagccctcgtgcgctgcaacatgaagatggagctggagcaggccaacgagagggagtgtgaggtgctgaagaaaatctggggctcggcccaggggatggactccatgttaaagtacttgcagaggaagatcgatgagttctgagtgtcgggctgcccactggtgacaccgggatcgggctgagcaggagaacatcaccggctccagttcccctgatccattctcacagcctgaaacaagctcacccgtagcttacgcttggaagcaggactgggaacatccacgctatttattatcgaggagttttaaagtactgtaactttaaaataaataactacaaagcttctttgtccaaacgtcattattttatacttatatacacgcaggtgtaaaagtataaaggtgagcactagactgctcttagaagctctaatttttgttttctttggctagtactgtataaaaaacagaattgtgttttattggttttggatgacagaaaagtctggaataatgtttgttttcctcatttcttccttctagaacacagaatctaaaggggtgttagccagcctcgcctccctgccccacgtagagacacagagtgatgtgaggcgttggctttttctccaagaaggtacagatacctcagattcgggaaactcaaaatcaaaagacttagcttctaggataaatacttctgatgaaaaatccgctgaggagcataccccaaaccagacatatgcttaggattcatgctgagatatcaattggtttccccttctttttaaaatacgtccagttcttacccagttaacatgaagaaaccactgtctctagaagaaagcttgttttgcagtattagtgaatcactgaatagcttaagtatgactatctaagttataagttagtctttagtgggttttaaatagtttttctgacccttctgaaaaataactacataagtgcttcttgttgctgggtgagaaatactactttatagacagttttggttttctgtttgcagatatgattgatgtatttcaccaaaataaaatatttttatgtttataaagtgtaatttttaggttcacttagaatatattttatttaataagttaaaattcttttggcacactattaaatgcaaaaactcctttcaaaacaaaaaagaactaccttatattcaacatttaatgttcttggcctctgcttttatgtctatacaatatactgagttcagtatggtgtccaagagtgccctgtgtggatagacatgtgcactccttccaggagtgggtactgattccagactccagatgcctattattagttaggcttctgagcttgcaatcatattgaatgtatgaagagcgaaatcaaattcttatttttgtacagttttgaagtttatacttagaactgaccacctccccggccacgcggagagctgtacagtgtgtaaatctgcctttatcttggattgattggtacagtatttttgcatctgtgggacctaccttttcgttcagtagtttgaactatatataaactgtacaatctgtaaagtttttatagaataaatattcagctgtgaaaactggttaaataaaactaatatttcttaacacaaaaaaaat

SEQ ID NO: 319645 - DNA, 1083 bp, Homo sapiens
  misc_feature (11)..(11): n is a, c, g, or t
  misc_feature (15)..(15): n is a, c, g, or t
agctgactctngagnatccctataggcgctaggtgcgagagggccaggatggggagcaggccaggatacacccactagtgcctcaggtgcccggccctgtgactgcagccatggccacaggcttagctgttaacgggaagttgaaaggattgttgacaaaaggaaaaataaaaaagggaagacagagtatttggttcggtggaaaggctatgacagcgaggacgacacttgggagccggaacagcacctcgtgaactgtgaggaatacatccacgacttcaacagacgccacacggagaagcagaaggagagcacattgaccagaacaaacaggacctctcccaacaatgctaggaaacaaatctccagatccaccaacagcaacttttctaagacctctcctaaggcactcgtgattgggaaagaccacgaatccaaaaacagccagctgtttgctgccagccagaagttcaggaagaacacagctccatctctctccagccggaagaacatggacctagcgaagtcaggtatcaagatcctcgtgcctaaaagccccgttaagagcaggaccgcagtggacggctttcagagcgagagccctgagaaactggaccccgtcgagcagggtcaggaggacacagtggcacccgaagtggcagcggaaaagccggtcggagctttattgggccccggtgccgagagggccaggatggggagcaggcccaggatacacccactagtgcctcaggtgcccggccctgtgactgcagccatggccacaggcttagctgttaacgggaaaggtacatctccgttcatggatgcattaacagccaatgggacaaccaacatacagacatctgttacaggagtgactgccagcaaaaggaaatttattgacgacagaagagaccagccttttgacaagcgattgcgtttcagcgtgaggcaaacagaaagtgcctacagatacagagatattgtggtcaggaagcaggatggcttcacccacatcttgttatccacaaagtcctcagagaataactcactaaatccagaggtgagaggcgctcttgggct

SEQ ID NO: 319646 - DNA, 3246 bp, Homo sapiens
  misc_feature (11)..(11): n is a, c, g, or t
  misc_feature (15)..(15): n is a, c, g, or t
agctgactctngagnatccctataggcgctaggtgcgagagggccaggatggggagcaggccaggatacacccactagtgcctcaggtgcccggccctgtgactgcagccatggccacaggcttagctgttaacgggaagttgaaaggattgttgacaaaaggaaaaataaaaaagggaagacagagtatttggttcggtggaaaggctatgacagcgaggacgacacttgggagccggaacagcacctcgtgaactgtgaggaatacatccacgacttcaacagacgccacacggagaagcagaaggagagcacattgaccagaacaaacaggacctctcccaacaatgctaggaaacaaatctccagatccaccaacagcaacttttctaagacctctcctaaggcactcgtgattgggaaagaccacgaatccaaaaacagccagctgtttgctgccagccagaagttcaggaagaacacagctccatctctctccagccggaagaacatggacctagcgaagtcaggtatcaagatcctcgtgcctaaaagccccgttaagagcaggaccgcagtggacggctttcagagcgagagccctgagaaactggaccccgtcgagcagggtcaggaggacacagtggcacccgaagtggcagcggaaaagccggtcggagctttattgggccccggtgccgagagggccaggatggggagcaggcccaggatacacccactagtgcctcaggtgcccggccctgtgactgcagccatggccacaggcttagctgttaacgggaaaggtacatctccgttcatggatgcattaacagccaatgggacaaccaacatacagacatctgttacaggagtgactgccagcaaaaggaaatttattgacgacagaagagaccagccttttgacaagcgattgcgtttcagcgtgaggcaaacagaaagtgcctacagatacagagatattgtggtcaggaagcaggatggcttcacccacatcttgttatccacaaagtcctcagagaataactcactaaatccagaggtaatgagagaagtccagagtgctctgagcacggccgctgccgatgacagcaagctggtactgctcagcgccgttggcagcgtcttctgttgtggacttgactttatttattttatacgacgtctgacagatgacaggaaaagagaaagcactaaaatggcagaagctatcagaaacttcgtgaatactttcattcaatttaagaagcccattattgtagcagtcaatggcccagccattggtctaggagcatctatattgcctctttgcgatgtggtttgggctaatgaaaaggcttggtttcaaacaccctataccaccttcggacagagtccagatggctgttctaccgttatgtttcccaagataatgggaggagcatctgcaaacgagatgctgctcagtggacggaagctgacagcgcaggaggcgtgtggcaagggcctggtctcccaggtgttttggcccgggacgttcactcaggaagtgatggttcgcattaaggagcttgcctcgtgcaatccagttgtgcttgaggaatccaaagccctcgtgcgctgcaacatgaagatggagctggagcaggccaacgagagggagtgtgaggtgctgaagaaaatctggggctcggcccaggggatggactccatgttaaagtacttgcagaggaagatcgatgagttctgagtgtcgggctgcccactggtgacaccgggatcgggctgagcaggagaacatcaccggctccagttcccctgatccattctcacagcctgaaacaagctcacccgtagcttacgcttggaagcaggactgggaacatccacgctatttattatcgaggagttttaaagtactgtaactttaaaataaataactacaaagcttctttgtccaaacgtcattattttatacttatatacacgcaggtgtaaaagtataaaggtgagcactagactgctcttagaagctctaatttttgttttctttggctagtactgtataaaaaacagaattgtgttttattggttttggatgacagaaaagtctggaataatgtttgttttcctcatttcttccttctagaacacagaatctaaaggggtgttagccagcctcgcctccctgccccacgtagagacacagagtgatgtgaggcgttggctttttctccaagaaggtacagatacctcagattcgggaaactcaaaatcaaaagacttagcttctaggataaatacttctgatgaaaaatccgctgaggagcataccccaaaccagacatatgcttaggattcatgctgagatatcaattggtttccccttctttttaaaatacgtccagttcttacccagttaacatgaagaaaccactgtctctagaagaaagcttgttttgcagtattagtgaatcactgaatagcttaagtatgactatctaagttataagttagtctttagtgggttttaaatagtttttctgacccttctgaaaaataactacataagtgcttcttgttgctgggtgagaaatactactttatagacagttttggttttctgtttgcagatatgattgatgtatttcaccaaaataaaatatttttatgtttataaagtgtaatttttaggttcacttagaatatattttatttaataagttaaaattcttttggcacactattaaatgcaaaaactcctttcaaaacaaaaaagaactaccttatattcaacatttaatgttcttggcctctgcttttatgtctatacaatatactgagttcagtatggtgtccaagagtgccctgtgtggatagacatgtgcactccttccaggagtgggtactgattccagactccagatgcctattattagttaggcttctgagcttgcaatcatattgaatgtatgaagagcgaaatcaaattcttatttttgtacagttttgaagtttatacttagaactgaccacctccccggccacgcggagagctgtacagtgtgtaaatctgcctttatcttggattgattggtacagtatttttgcatctgtgggacctaccttttcgttcagtagtttgaactatatataaactgtacaatctgtaaagtttttatagaataaatattcagctgtgaaaactggttaaataaaactaatatttcttaacacaaaaaaaat

SEQ ID NO: 319647 - DNA, 3475 bp, Homo sapiens
aggggagccgcgatccggccgcgccgcccgcacgccgccgcgcccgccccagcccgcccggccccgcggcggggcgcgatgagcccgagcgcgagccggcccgccggggagtgagcgcggggcgcccagggcgcgttgcgtagctgctcctgcgcacaaccccgccgcgccgccggcccgcactggccgcggagtgcaagaggctcgtccgtgcccagcgcccggccggccgcgggagcaggaagcgcaggccacgcaggacccaactgaaacaaagtgtcggccgcccggcgccggcgcccgccccgaccctgcccctcccgcccgcaactccgccgcccaccatggcttccgaggagctgtacgaggttgaaaggattgttgacaaaaggaaaaataaaaaagggaagacagagtatttggttcggtggaaaggctatgacagcgaggacgacacttgggagccggaacagcacctcgtgaactgtgaggaatacatccacgacttcaacagacgccacacggagaagcagaaggagagcacattgaccagaacaaacaggacctctcccaacaatgctaggaaacaaatctccagatccaccaacagcaacttttctaagacctctcctaaggcactcgtgattgggaaagaccacgaatccaaaaacagccagctgtttgctgccagccagaagttcaggaagaacacagctccatctctctccagccggaagaacatggacctagcgaagtcaggtatcaagatcctcgtgcctaaaagccccgttaagagcaggaccgcagtggacggctttcagagcgagagccctgagaaactggaccccgtcgagcagggtcaggaggacacagtggcacccgaagtggcagcggaaaagccggtcggagctttattgggccccggtgccgagagggccaggatggggagcaggcccaggatacacccactagtgcctcaggtgcccggccctgtgactgcagccatggccacaggcttagctgttaacgggaaaggtacatctccgttcatggatgcattaacagccaatgggacaaccaacatacagacatctgttacaggagtgactgccagcaaaaggaaatttattgacgacagaagagaccagccttttgacaagcgattgcgtttcagcgtgaggcaaacagaaagtgcctacagatacagagatattgtggtcaggaagcaggatggcttcacccacatcttgttatccacaaagtcctcagagaataactcactaaatccagaggtaatgagagaagtccagagtgctctgagcacggccgctgccgatgacagcaagctggtactgctcagcgccgttggcagcgtcttctgttgtggacttgactttatttattttatacgacgtctgacagatgacaggaaaagagaaagcactaaaatggcagaagctatcagaaacttcgtgaatactttcattcaatttaagaagcccattattgtagcagtcaatggcccagccattggtctaggagcatctatattgcctctttgcgatgtggtttgggctaatgaaaaggcttggtttcaaacaccctataccaccttcggacagagtccagatggctgttctaccgttatgtttcccaagataatgggaggagcatctgcaaacgagatgctgctcagtggacggaagctgacagcgcaggaggcgtgtggcaagggcctggtctcccaggtgttttggcccgggacgttcactcaggaagtgatggttcgcattaaggagcttgcctcgtgcaatccagttgtgcttgaggaatccaaagccctcgtgcgctgcaacatgaagatggagctggagcaggccaacgagagggagtgtgaggtgctgaagaaaatctggggctcggcccaggggatggactccatgttaaagtacttgcagaggaagatcgatgagttctgagtgtcgggctgcccactggtgacaccgggatcgggctgagcaggagaacatcaccggctccagttcccctgatccattctcacagcctgaaacaagctcacccgtagcttacgcttggaagcaggactgggaacatccacgctatttattatcgaggagttttaaagtactgtaactttaaaataaataactacaaagcttctttgtccaaacgtcattattttatacttatatacacgcaggtgtaaaagtataaaggtgagcactagactgctcttagaagctctaatttttgttttctttggctagtactgtataaaaaacagaattgtgttttattggttttggatgacagaaaagtctggaataatgtttgttttcctcatttcttccttctagaacacagaatctaaaggggtgttagccagcctcgcctccctgccccacgtagagacacagagtgatgtgaggcgttggctttttctccaagaaggtacagatacctcagattcgggaaactcaaaatcaaaagacttagcttctaggataaatacttctgatgaaaaatccgctgaggagcataccccaaaccagacatatgcttaggattcatgctgagatatcaattggtttccccttctttttaaaatacgtccagttcttacccagttaacatgaagaaaccactgtctctagaagaaagcttgttttgcagtattagtgaatcactgaatagcttaagtatgactatctaagttataagttagtctttagtgggttttaaatagtttttctgacccttctgaaaaataactacataagtgcttcttgttgctgggtgagaaatactactttatagacagttttggttttctgtttgcagatatgattgatgtatttcaccaaaataaaatatttttatgtttataaagtgtaatttttaggttcacttagaatatattttatttaataagttaaaattcttttggcacactattaaatgcaaaaactcctttcaaaacaaaaaagaactaccttatattcaacatttaatgttcttggcctctgcttttatgtctatacaatatactgagttcagtatggtgtccaagagtgccctgtgtggatagacatgtgcactccttccaggagtgggtactgattccagactccagatgcctattattagttaggcttctgagcttgcaatcatattgaatgtatgaagagcgaaatcaaattcttatttttgtacagttttgaagtttatacttagaactgaccacctccccggccacgcggagagctgtacagtgtgtaaatctgcctttatcttggattgattggtacagtatttttgcatctgtgggacctaccttttcgttcagtagtttgaactatatataaactgtacaatctgtaaagtttttatagaataaatattcagctgtgaaaactggttaaataaaactaatatttcttaacacaaaaaaaat

SEQ ID NO: 319648 - DNA, 2474 bp, Homo sapiens
cttaacctgcatagcctataaactgttttaagaggtacatctccgttcatggatgcattaacagccaatgggacaaccaacatacagacatctgttacaggagtgactgccagcaaaaggaaatttattgacgacagaagagaccagccttttgacaagcgattgcgtttcagcgtgaggcaaacagaaagtgcctacagatacagagatattgtggtcaggaagcaggatggcttcacccacatcttgttatccacaaagtcctcagagaataactcactaaatccagaggtaatgagagaagtccagagtgctctgagcacggccgctgccgatgacagcaagctggtactgctcagcgccgttggcagcgtcttctgttgtggacttgactttatttattttatacgacgtctgacagatgacaggaaaagagaaagcactaaaatggcagaagctatcagaaacttcgtgaatactttcattcaatttaagaagcccattattgtagcagtcaatggcccagccattggtctaggagcatctatattgcctctttgcgatgtggtttgggctaatgaaaaggcttggtttcaaacaccctataccaccttcggacagagtccagatggctgttctaccgttatgtttcccaagataatgggaggagcatctgcaaacgagatgctgctcagtggacggaagctgacagcgcaggaggcgtgtggcaagggcctggtctcccaggtgttttggcccgggacgttcactcaggaagtgatggttcgcattaaggagcttgcctcgtgcaatccagttgtgcttgaggaatccaaagccctcgtgcgctgcaacatgaagatggagctggagcaggccaacgagagggagtgtgaggtgctgaagaaaatctggggctcggcccaggggatggactccatgttaaagtacttgcagaggaagatcgatgagttctgagtgtcgggctgcccactggtgacaccgggatcgggctgagcaggagaacatcaccggctccagttcccctgatccattctcacagcctgaaacaagctcacccgtagcttacgcttggaagcaggactgggaacatccacgctatttattatcgaggagttttaaagtactgtaactttaaaataaataactacaaagcttctttgtccaaacgtcattattttatacttatatacacgcaggtgtaaaagtataaaggtgagcactagactgctcttagaagctctaatttttgttttctttggctagtactgtataaaaaacagaattgtgttttattggttttggatgacagaaaagtctggaataatgtttgttttcctcatttcttccttctagaacacagaatctaaaggggtgttagccagcctcgcctccctgccccacgtagagacacagagtgatgtgaggcgttggctttttctccaagaaggtacagatacctcagattcgggaaactcaaaatcaaaagacttagcttctaggataaatacttctgatgaaaaatccgctgaggagcataccccaaaccagacatatgcttaggattcatgctgagatatcaattggtttccccttctttttaaaatacgtccagttcttacccagttaacatgaagaaaccactgtctctagaagaaagcttgttttgcagtattagtgaatcactgaatagcttaagtatgactatctaagttataagttagtctttagtgggttttaaatagtttttctgacccttctgaaaaataactacataagtgcttcttgttgctgggtgagaaatactactttatagacagttttggttttctgtttgcagatatgattgatgtatttcaccaaaataaaatatttttatgtttataaagtgtaatttttaggttcacttagaatatattttatttaataagttaaaattcttttggcacactattaaatgcaaaaactcctttcaaaacaaaaaagaactaccttatattcaacatttaatgttcttggcctctgcttttatgtctatacaatatactgagttcagtatggtgtccaagagtgccctgtgtggatagacatgtgcactccttccaggagtgggtactgattccagactccagatgcctattattagttaggcttctgagcttgcaatcatattgaatgtatgaagagcgaaatcaaattcttatttttgtacagttttgaagtttatacttagaactgaccacctccccggccacgcggagagctgtacagtgtgtaaatctgcctttatcttggattgattggtacagtatttttgcatctgtgggacctaccttttcgttcagtagtttgaactatatataaactgtacaatctgtaaagtttttatagaataaatattcagctgtgaaaactggttaaataaaactaatatttcttaacacaaaaaaaat

SEQ ID NO: 319649 - DNA, 2290 bp, Homo sapiens
aattccagtgcagctcatggctgcatgttaccctgtggccttcacgtagggcctgtagtgacagccactacatgcgtgggctccaggctgtcaccaaacctttacaacacgtagtaaataagtctagggtccacaactgctggggaaggccttaaacaaatctcaagtcttcaggatttccgtagcatttacatcttggtaaattgaattccataatagacttttcctttgctcaaatatgcaatgttttgagtaattccccatttatttttcattttagaaacttcgtgaatactttcattcaatttaagaagcccattattgtagcagtcaatggcccagccattggtctaggagcatctatattgcctctttgcgatgtggtttgggctaatgaaaaggcttggtttcaaacaccctataccaccttcggacagagtccagatggctgttctaccgttatgtttcccaagataatgggaggagcatctgcaaacgagatgctgctcagtggacggaagctgacagcgcaggaggcgtgtggcaagggcctggtctcccaggtgttttggcccgggacgttcactcaggaagtgatggttcgcattaaggagcttgcctcgtgcaatccagttgtgcttgaggaatccaaagccctcgtgcgctgcaacatgaagatggagctggagcaggccaacgagagggagtgtgaggtgctgaagaaaatctggggctcggcccaggggatggactccatgttaaagtacttgcagaggaagatcgatgagttctgagtgtcgggctgcccactggtgacaccgggatcgggctgagcaggagaacatcaccggctccagttcccctgatccattctcacagcctgaaacaagctcacccgtagcttacgcttggaagcaggactgggaacatccacgctatttattatcgaggagttttaaagtactgtaactttaaaataaataactacaaagcttctttgtccaaacgtcattattttatacttatatacacgcaggtgtaaaagtataaaggtgagcactagactgctcttagaagctctaatttttgttttctttggctagtactgtataaaaaacagaattgtgttttattggttttggatgacagaaaagtctggaataatgtttgttttcctcatttcttccttctagaacacagaatctaaaggggtgttagccagcctcgcctccctgccccacgtagagacacagagtgatgtgaggcgttggctttttctccaagaaggtacagatacctcagattcgggaaactcaaaatcaaaagacttagcttctaggataaatacttctgatgaaaaatccgctgaggagcataccccaaaccagacatatgcttaggattcatgctgagatatcaattggtttccccttctttttaaaatacgtccagttcttacccagttaacatgaagaaaccactgtctctagaagaaagcttgttttgcagtattagtgaatcactgaatagcttaagtatgactatctaagttataagttagtctttagtgggttttaaatagtttttctgacccttctgaaaaataactacataagtgcttcttgttgctgggtgagaaatactactttatagacagttttggttttctgtttgcagatatgattgatgtatttcaccaaaataaaatatttttatgtttataaagtgtaatttttaggttcacttagaatatattttatttaataagttaaaattcttttggcacactattaaatgcaaaaactcctttcaaaacaaaaaagaactaccttatattcaacatttaatgttcttggcctctgcttttatgtctatacaatatactgagttcagtatggtgtccaagagtgccctgtgtggatagacatgtgcactccttccaggagtgggtactgattccagactccagatgcctattattagttaggcttctgagcttgcaatcatattgaatgtatgaagagcgaaatcaaattcttatttttgtacagttttgaagtttatacttagaactgaccacctccccggccacgcggagagctgtacagtgtgtaaatctgcctttatcttggattgattggtacagtatttttgcatctgtgggacctaccttttcgttcagtagtttgaactatatataaactgtacaatctgtaaagtttttatagaataaatattcagctgtgaaaactggttaaataaaactaatatttcttaacacaaaaaaaat

SEQ ID NO: 319650 - DNA, 906 bp, Homo sapiens
  misc_feature (11)..(11): n is a, c, g, or t
  misc_feature (15)..(15): n is a, c, g, or t
agctgactctngagnatccctataggcgctaggtgcgagagggccaggatggggagcaggccaggatacacccactagtgcctcaggtgcccggccctgtgactgcagccatggccacaggcttagctgttaacgggaagttgaaaggattgttgacaaaaggaaaaataaaaaagggaagacagagtatttggttcggtggaaaggctatgacagcgaggacgacacttgggagccggaacagcacctcgtgaactgtgaggaatacatccacgacttcaacagacgccacacggagaagcagaaggagagcacattgaccagaacaaacaggacctctcccaacaatgctaggaaacaaatctccagatccaccaacagcaacttttctaagacctctcctaaggcactcgtgattgggaaagaccacgaatccaaaaacagccagctgtttgctgccagccagaagttcaggaagaacacagctccatctctctccagccggaagaacatggacctagcgaagtcaggtatcaagatcctcgtgcctaaaagccccgttaagagcaggaccgcagtggacggctttcagagcgagagccctgagaaactggaccccgtcgagcagggtcaggaggacacagtggcacccgaagtggcagcggaaaagccggtcggagctttattgggccccggtgccgagagggccaggatggggagcaggcccaggatacacccactagtgcctcaggtgcccggccctgtgactgcagccatggccacaggcttagctgttaacgggaaagtgaaaggattgttgacaaaaggaaaaataaaaaagggaagacagagtatttggttcggtggaaaggctatgacagcgaggacgacacttggggcgctcgg

SEQ ID NO: 319651 - DNA, 1002 bp, Homo sapiens
cgtgcgcatgcgcgctcccctctcacgcagccaacatggctccagtggagcacgttgtggcggatgctggggctttcctgcggcatgcggctctgcaggacatcgggaagaacatttacaccatccgggaggtggtcactgagattcgggacaaggccacacgcaggcggctcgctgtcctgccctacgagctgcggttcaaggagcccttaccggaatacgtgcggctggtgactgagttttcaaagaaaacaggagactaccccagcctctctgccacggacatccaagtgcttgcactcacataccagttggaagcagagtttgttggggtgtctcacctaaaacaagaaccacagaaggttaaggtgagctcatcgattcagcacccagaaacacctctgcacatttctggtttccatctgccctacaagcctaaacccccacaagaaacagaaaaaggacactcagcttgtgagcctgagaacctggaatttagttccttcatgttctggagaaaccctttgcccaacatcgatcatgaactgcaggagctgctgattgacagaggtgaggacgttccaagtgaggaggaggaggaggaagaaaacgggtttgaagacagaaaagatgacagcgatgacgacgggggtggctggataacccccagtaacatcaagcagatccagcaggagctggagcagtgtgacgtccccgaggacgtgcgggttggctgcctgaccacagacttcgccatgcagaatgttctgctgcagatgggctggcgtgcggcgggaacggtgcggttcggagggccggtactttgggtgctggtgttcagaacacgtgatgagccggttggtccctgggcagaccgaagtctgcgcggaggcccgttcgtttccggccggggcccggcgcgggtctccggggggccccaggagctggtcggggagctccggtgtcacccgccgctccgtacgtgcgccgcctttgcttcgg

SEQ ID NO: 319652 - DNA, 1084 bp, Homo sapiens
aggttgtgatctatcactgtcattttgagcctcgcgttgtgccatgtgtggccagtgggagcctgtgttcttttgacagatcctggtctgtcaaactttatggcacaacaagaagttcccagagactcagccatctcctgcctgtgccccagaatccgccatttctctcaggagctctggttttttatgcaggatggtttttagaagtaaagatctggggactgggtgtgtctgttgtcctgcagtgtcattgcgtcttggctacaatggacagagctaggaaatacatacatgtgtgtgtaaatacacactggaatgttttgtatttctatttctgtattgtctttagctgaaggtatgtagtcaaaataccgtgttcggtttttcgtgtgtgaattgaggtgggaatcaggtgggaggcggcggcatgtcacacgtagcacatggtaggcagtcaattaccacccgctgtcatctgcctgcaccaggatctgcaaggtcggctgcaccttaccagccatggccttgtgtgactgtggctccccttcttctaatggcccttccttgtcttatttccagtactcgcttcccactcccaaagggggcaaatacgccatcaacccccatctcaccgaggatcagcgcttccctcagctgcgactctcccaaaaggccaggcagaaaaccaacgtgttcgcccctgactacatcgccggggtgtcaccctttgtcgagaatgacatctccagccgctcagctaccctgcaggtccgggacagcaccttgggagctgggcggagacgcttaaatcccaacgcttccagaaagaagtttgtgaagtgcaattgcataaaaacagaaagaacaacgccctggagccaatcttcaagaaaggaatttccaaaggataatatttttctaataaatgcggctgcaacctcctgtgcatttaattaaataggccaaatttttgctgcttaggtcatctcaaggctgatacttgagctgtgtgcccagagatcatgcatttagatttatatttttgccagaaaatacaaggttataataaaactaagaactacca

SEQ ID NO: 319653 - DNA, 1602 bp, Homo sapiens
cgtgcgcatgcgcgctcccctctcacgcagccaacatggctccagtggagcacgttgtggcggatgctggggctttcctgcggcatgcggctctgcaggacatcgggaagaacatttacaccatccgggaggtggtcactgagattcgggacaaggccacacgcaggcggctcgctgtcctgccctacgagctgcggttcaaggagcccttaccggaatacgtgcggctggtgactgagttttcaaagaaaacaggagactaccccagcctctctgccacggacatccaagtgcttgcactcacataccagttggaagcagagtttgttggggtgtctcacctaaaacaagaaccacagaaggttaaggtgagctcatcgattcagcacccagaaacacctctgcacatttctggtttccatctgccctacaagcctaaacccccacaagaaacagaaaaaggacactcagcttgtgagcctgagaacctggaatttagttccttcatgttctggagaaaccctttgcccaacatcgatcatgaactgcaggagctgctgattgacagaggtgaggacgttccaagtgaggaggaggaggaggaagaaaacgggtttgaagacagaaaagatgacagcgatgacgacgggggtggctggataacccccagtaacatcaagcagatccagcaggagctggagcagtgtgacgtccccgaggacgtgcgggttggctgcctgaccacagacttcgccatgcagaatgttctgctgcagatggggctgcacgtgctggcggtgaacggcatgctgattcgtgaggcccggagctacatcttgcgctgccatggctgtttcaagacaacgtctgacatgagccgagtgttctgctcacactgtgggaacaagaccctgaagaaagtgtccgtgaccgtcagcgacgacggcaccctgcacatgcacttctcccgcaaccccaaggtgctgaacccccgcggcctccggtactcgcttcccactcccaaagggggcaaatacgccatcaacccccatctcaccgaggatcagcgcttccctcagctgcgactctcccaaaaggccaggcagaaaaccaacgtgttcgcccctgactacatcgccggggtgtcaccctttgtcgagaatgacatctccagccgctcagctaccctgcaggtccgggacagcaccttgggagctgggcggagacgcttaaatcccaacgcttccagaaagaagtttgtgaagaaaaggtgaagagcgagttcccgcaggcaaattggatgggcgtctggccgccgtggagttccggtgacccatttccccagccgtgtcgtctccaggaccacccgatggaaataacaggcgggcttcacggtgcggctctgtccgcccatgccccgctgggtctgcagggaactggactgtcccatggcctgtgagcaccggagcgcctggctgcctgccaaggaagtgcaattgcataaaaacagaaagaacaacgccctggagccaatcttcaagaaaggaatttccaaaggataatatttttctaataaatgcggctgcaacctcctgtgcattt

SEQ ID NO: 319654 - DNA, 1509 bp, Homo sapiens
cgtgcgcatgcgcgctcccctctcacgcagccaacatggctccagtggagcacgttgtggcggatgctggggctttcctgcggcatgcggctctgcaggacatcgggaagaacatttacaccatccgggaggtggtcactgagattcgggacaaggccacacgcaggcggctcgctgtcctgccctacgagctgcggttcaaggagcccttaccggaatacgtgcggctggtgactgagttttcaaagaaaacaggagactaccccagcctctctgccacggacatccaagtgcttgcactcacataccagttggaagcagagtttgttggggtgtctcacctaaaacaagaaccacagaaggttaaggtgagctcatcgattcagcacccagaaacacctctgcacatttctggtttccatctgccctacaagcctaaacccccacaagaaacagaaaaaggacactcagcttgtgagcctgagaacctggaatttagttccttcatgttctggagaaaccctttgcccaacatcgatcatgaactgcaggagctgctgattgacagaggtgaggacgttccaagtgaggaggaggaggaggaagaaaacgggtttgaagacagaaaagatgacagcgatgacgacgggggtggctggataacccccagtaacatcaagcagatccagcaggagctggagcagtgtgacgtccccgaggacgtgcgggttggctgcctgaccacagacttcgccatgcagaatgttctgctgcagatggggctgcacgtgctggcggtgaacggcatgctgattcgtgaggcccggagctacatcttgcgctgccatggctgtttcaagacaacgtctgacatgagccgagtgttctgctcacactgtgggaacaagaccctgaagaaagtgtccgtgaccgtcagcgacgacggcaccctgcacatgcacttctcccgcaaccccaaggtgctgaacccccgcggcctccggtactcgcttcccactcccaaagggggcaaatacgccatcaacccccatctcaccgaggatcagcgcttccctcagctgcgactctcccaaaaggccaggcagaaaaccaacgtgttcgcccctgactacatcgccggggtgtcaccctttgtcgagaatgacatctccagccgctcagctaccctgcaggtccgggacagcaccttgggagctgggcggagacgcttaaatcccaacgcttccagaaagaagtttgtgaagtgcaattgcataaaaacagaaagaacaacgccctggagccaatcttcaagaaaggaatttccaaaggataatatttttctaataaatgcggctgcaacctcctgtgcatttaattaaataggccaaatttttgctgcttaggtcatctcaaggctgatacttgagctgtgtgcccagagatcatgcatttagatttatatttttgccagaaaatacaaggttataataaaactaagaactacca

SEQ ID NO: 319655 - DNA, 1425 bp, Homo sapiens
gagagagagagagatgagagagagagagagagagagagagagagagagagagagagagagagagagagagagacagcacccagaaacacctctgcacatttctggtttccatctgccctacaagcctaaacccccacaagaaacagaaaaaggacactcagcttgtgagcctgagaacctggaatttagttccttcatgttctggagaaaccctttgcccaacatcgatcatgaactgcaggagctgctgattgacagaggtgaggacgttccaagtgaggaggaggaggaggaagaaaacgggtttgaagacagaaaagatgacagcgatgacgacgggggtggctggataacccccagtaacatcaagcagatccagcaggagctggagcagtgtgacgtccccgaggacgtgcgggttggctgcctgaccacagacttcgccatgcagaatgttctgctgcagatggggctgcacgtgctggcggtgaacggcatgctgattcgtgaggcccggagctacatcttgcgctgccatggctgtttcaagacaacgtctgacatgagccgagtgttctgctcacactgtgggaacaagaccctgaagaaagtgtccgtgaccgtcagcgacgacggcaccctgcacatgcacttctcccgcaaccccaaggtgctgaacccccgcggcctccggtactcgcttcccactcccaaagggggcaaatacgccatcaacccccatctcaccgaggatcagcgcttccctcagctgcgactctcccaaaaggccaggcagaaaaccaacgtgttcgcccctgactacatcgccggggtgtcaccctttgtcgagaatgacatctccagccgctcagctaccctgcaggtccgggacagcaccttgggagctgggcggagacgcttaaatcccaacgcttccagaaagaagtttgtgaagaaaaggtgaagagcgagttcccgcaggcaaattggatgggcgtctggccgccgtggagttccggtgacccatttccccagccgtgtcgtctccaggaccacccgatggaaataacaggcgggcttcacggtgcggctctgtccgcccatgccccgctgggtctgcagggaactggactgtcccatggcctgtgagcaccggagcgcctggctgcctgccaaggaagtgcaattgcataaaaacagaaagaacaacgccctggagccaatcttcaagaaaggaatttccaaaggataatatttttctaataaatgcggctgcaacctcctgtgcatttaattaaataggccaaatttttgctgcttaggtcatctcaaggctgatacttgagctgtgtgcccagagatcatgcatttagatttatatttttgccagaaaatacaaggttataataaaactaagaactacca

SEQ ID NO: 319656 - DNA, 1839 bp, Homo sapiens
  misc_feature (561)..(561): n is a, c, g, or t
  misc_feature (569)..(569): n is a, c, g, or t
  misc_feature (571)..(571): n is a, c, g, or t
  misc_feature (610)..(610): n is a, c, g, or t
cgtgcgcatgcgcgctcccctctcacgcagccaacatggctccagtggagcacgttgtggcggatgctggggctttcctgcggcatgcggctctgcaggacatcgggaagaacatttacaccatccgggaggtggtcactgagattcgggacaaggccacacgcaggcggctcgctgtcctgccctacgagctgcggttcaaggagcccttaccggaatacgtgcggctggtgactgagttttcaaagaaaacaggagactaccccagcctctctgccacggacatccaagtgcttgcactcacataccagttggaagcagagtttgttggggtgtctcacctaaaacaagaaccacagaaggttaaggtgagctcatcgattcagcacccagaaacacctctgcacatttctggtttccatctgccctacaagcctaaacccccacaagaaacagaaaaaggacactcagcttgtgagcctgagaacctggaatttagttccttcatgttctggagaaaccctttgcccaacatcgatcatgaactgcaggagctgctgnatttgaancnaaaaaggggaaaggggttggagggaaaacgggttccaangtgagggaaaagggggggaaaaaggggtggaaaggggggggaaaccggggggggggaaaacaaagggaaaaaaaaaaaaaaaagcgggggtttggacaaaagggggaaaaaccccaagaaaaagatgacagcgatgacgacgggggtggctggataacccccagtaacatcaagcagatccagcaggagctggagcagtgtgacgtccccgaggacgtgcgggttggctgcctgaccacagacttcgccatgcagaatgttctgctgcagatggggctgcacgtgctggcggtgaacggcatgctgattcgtgaggcccggagctacatcttgcgctgccatggctgtttcaagacaacgtctgacatgagccgagtgttctgctcacactgtgggaacaagaccctgaagaaagtgtccgtgaccgtcagcgacgacggcaccctgcacatgcacttctcccgcaaccccaaggtgctgaacccccgcggcctccggtactcgcttcccactcccaaagggggcaaatacgccatcaacccccatctcaccgaggatcagcgcttccctcagctgcgactctcccaaaaggccaggcagaaaaccaacgtgttcgcccctgactacatcgccggggtgtcaccctttgtcgagaatgacatctccagccgctcagctaccctgcaggtccgggacagcaccttgggagctgggcggagacgcttaaatcccaacgcttccagaaagaagtttgtgaagaaaaggtgaagagcgagttcccgcaggcaaattggatgggcgtctggccgccgtggagttccggtgacccatttccccagccgtgtcgtctccaggaccacccgatggaaataacaggcgggcttcacggtgcggctctgtccgcccatgccccgctgggtctgcagggaactggactgtcccatggcctgtgagcaccggagcgcctggctgcctgccaaggaagtgcaattgcataaaaacagaaagaacaacgccctggagccaatcttcaagaaaggaatttccaaaggataatatttttctaataaatgcggctgcaacctcctgtgcatttaattaaataggccaaatttttgctgcttaggtcatctcaaggctgatacttgagctgtgtgcccagagatcatgcatttagatttatatttttgccagaaaatacaaggttataataaaactaagaactacca

SEQ ID NO: 319657 - DNA, 1310 bp, Homo sapiens
aggttgtgatctatcactgtcattttgagcctcgcgttgtgccatgtgtggccagtgggagcctgtgttcttttgacagatcctggtctgtcaaactttatggcacaacaagaagttcccagagactcagccatctcctgcctgtgccccagaatccgccatttctctcaggagctctggttttttatgcaggatggtttttagaagtaaagatctggggactgggtgtgtctgttgtcctgcagtgtcattgcgtcttggctacaatggacagagctaggaaatacatacatgtgtgtgtaaatacacactggaatgttttgtatttctatttctgtattgtctttagctgaaggtatgtagtcaaaataccgtgttcggtttttcgtgtgtgaattgaggtgggaatcaggtgggaggcggcggcatgtcacacgtagcacatggtaggcagtcaattaccacccgctgtcatctgcctgcaccaggatctgcaaggtcggctgcaccttaccagccatggccttgtgtgactgtggctccccttcttctaatggcccttccttgtcttatttccagtactcgcttcccactcccaaagggggcaaatacgccatcaacccccatctcaccgaggatcagcgcttccctcagctgcgactctcccaaaaggccaggcagaaaaccaacgtgttcgcccctgactacatcgccggggtgtcaccctttgtcgagaatgacatctccagccgctcagctaccctgcaggtccgggacagcaccttgggagctgggcggagacgcttaaatcccaacgcttccagaaagaagtttgtgaagaaaaggtgaagagcgagttcccgcaggcaaattggatgggcgtctggccgccgtggagttccggtgacccatttccccagccgtgtcgtctccaggaccacccgatggaaataacaggcgggcttcacggtgcggctctgtccgcccatgccccgctgggtctgcagggaactggactgtcccatggcctgtgagcaccggagcgcctggctgcctgccaaggaagtgcaattgcataaaaacagaaagaacaacgccctggagccaatcttcaagaaaggaatttccaaaggataatatttttctaataaatgcggctgcaacctcctgtgcatttaattaaataggccaaatttttgctgcttaggtcatctcaaggctgatacttgagctgtgtgcccagagatcatgcatttagatttatatttttgccagaaaatacaaggttataataaaactaagaactacca

SEQ ID NO: 319658 - DNA, 591 bp, Homo sapiens
ttcagtatatataatgccatgtggtcagtcaggttcttaacacagggagagagggttttcagcccagcaatgagtatatttggcccagacaaaataaaatgtctgttgagagagcttgctaatgacaggtcatggaaaatgacgaacacaggctccaggacggtgttagaaagacacctgggccttcgtcctcgtttacacatcttgagaggcctccccaggctgagtttccttcgcaaaagccaaggaatatgggcaaggcagggtttgtgaagttcccttaactgtaattacaaaatgaaatgtgaaaagaaaattgatttcttctttaacttgtggttgtagaatgttctgctgcagatggggctgcacgtgctggcggtgaacggcatgctgattcgtgaggcccggagctacatcttgcgctgccatggctgtttcaagtatgtagctggtgccctggccctggtgccctctgtggaacactcttcctgtttctttttttgttttgagaaacagtctcgctctgtcacctaggctggagtgcagtggtacaatctcagctcactgcaacctctgcctcctgggttc

SEQ ID NO: 319659 - DNA, 1735 bp, Homo sapiens
cgtgcgcatgcgcgctcccctctcacgcagccaacatggctccagtggagcacgttgtggcggatgctggggctttcctgcggcatgcggctctgcaggacatcgggaagaacatttacaccatccgggaggtggtcactgagattcgggacaaggccacacgcaggcggctcgctgtcctgccctacgagctgcggttcaaggagcccttaccggaatacgtgcggctggtgactgagttttcaaagaaaacaggagactaccccagcctctctgccacggacatccaagtgcttgcactcacataccagttggaagcagagtttgttggggtgtctcacctaaaacaagaaccacagaaggttaaggtgagctcatcgattcagcacccagaaacacctctgcacatttctggtttccatctgccctacaagcctaaacccccacaagaaacagaaaaaggacactcagcttgtgagcctgagaacctggaatttagttccttcatgttctggagaaaccctttgcccaacatcgatcatgaactgcaggagctgctgattgacagaggtgaggacgttccaagtgaggaggaggaggaggaagaaaacgggtttgaagacagaaaagatgacagcgatgacgacgggggtggctggataacccccagtaacatcaagcagatccagcaggagctggagcagtgtgacgtccccgaggacgtgcgggttggctgcctgaccacagacttcgccatgcagaatgttctgctgcagatggggctgcacgtgctggcggtgaacggcatgctgattcgtgaggcccggagctacatcttgcgctgccatggctgtttcaagacaacgtctgacatgagccgagtgttctgctcacactgtgggaacaagaccctgaagaaagtgtccgtgaccgtcagcgacgacggcaccctgcacatgcacttctcccgcaaccccaaggtgctgaacccccgcggcctccggtactcgcttcccactcccaaagggggcaaatacgccatcaacccccatctcaccgaggatcagcgcttccctcagctgcgactctcccaaaaggccaggcagaaaaccaacgtgttcgcccctgactacatcgccggggtgtcaccctttgtcgagaatgacatctccagccgctcagctaccctgcaggtccgggacagcaccttgggagctgggcggagacgcttaaatcccaacgcttccagaaagaagtttgtgaagaaaaggtgaagagcgagttcccgcaggcaaattggatgggcgtctggccgccgtggagttccggtgacccatttccccagccgtgtcgtctccaggaccacccgatggaaataacaggcgggcttcacggtgcggctctgtccgcccatgccccgctgggtctgcagggaactggactgtcccatggcctgtgagcaccggagcgcctggctgcctgccaaggaagtgcaattgcataaaaacagaaagaacaacgccctggagccaatcttcaagaaaggaatttccaaaggataatatttttctaataaatgcggctgcaacctcctgtgcatttaattaaataggccaaatttttgctgcttaggtcatctcaaggctgatacttgagctgtgtgcccagagatcatgcatttagatttatatttttgccagaaaatacaaggttataataaaactaagaactacca

SEQ ID NO: 319660 - DNA, 1426 bp, Homo sapiens
  misc_feature (1266)..(1266): n is a, c, g, or t
  misc_feature (1270)..(1271): n is a, c, g, or t
  misc_feature (1280)..(1280): n is a, c, g, or t
  misc_feature (1282)..(1282): n is a, c, g, or t
  misc_feature (1293)..(1293): n is a, c, g, or t
  misc_feature (1297)..(1297): n is a, c, g, or t
cgtgcgcatgcgcgctcccctctcacgcagccaacatggctccagtggagcacgttgtggcggatgctggggctttcctgcggcatgcggctctgcaggacatcgggaagaacatttacaccatccgggaggtggtcactgagattcgggacaaggccacacgcaggcggctcgctgtcctgccctacgagctgcggttcaaggagcccttaccggaatacgtgcggctggtgactgagttttcaaagaaaacaggagactaccccagcctctctgccacggacatccaagtgcttgcactcacataccagttggaagcagagtttgttggggtgtctcacctaaaacaagaaccacagaaggttaaggtgagctcatcgattcagcacccagaaacacctctgcacatttctggtttccatctgccctacaagcctaaacccccacaagaaacagaaaaaggacactcagcttgtgagcctgagaacctggaatttagttccttcatgttctggagaaaccctttgcccaacatcgatcatgaactgcaggagctgctgattgacagaggtgaggacgttccaagtgaggaggaggaggaggaagaaaacgggtttgaagacagaaaagatgacagcgatgacgacgggggtggctggataacccccagtaacatcaagcagatccagcaggagctggagcagtgtgacgtccccgaggacgtgcgggttggctgcctgaccacagacttcgccatgcagaatgttctgctgcagatggggctgcacgtgctggcggtgaacggcatgctgattcgtgaggcccggagctacatcttgcgctgccatggctgtttcaagacaacgtctgacatgagccgagtgttctgctcacactgtgggaacaagaccctgaagaaagtgtccgtgaccgtcagcgacgacggcaccctgcacatgcacttctcccgcaaccccaaggtgctgaacccccgcggcctccggtactcgcttcccactcccaaagggggcaaatacgccatcaacccccatctcaccgaggatcagcgcttccctcagctgcgactctcccaaaaggccaggcagaaaaccaacgtgttcgcccctgactacatcgccggggtgtcaccctttgtcgagaatgacatctccagccgctcagctaccctgcaggtccgggacagcaccttgggagctgggcggagacgcttaaatcccaacgcttccagaaagaagtttgtgaagngagnncgagtccgngnaatggtggcgnggcncggatccgggaccttcccgcggggttcggcccgggaaaaagggccggggcgcccacccggtgaagggccgtgacacgtgcggagggaaaaaccggcaaagataaggggaaggcgggagcaacagggtca

SEQ ID NO: 319661 - DNA, 1856 bp, Homo sapiens
cgtgcgcatgcgcgctcccctctcacgcagccaacatggctccagtggagcacgttgtggcggatgctggggctttcctgcggcatgcggctctgcaggtacggggagctccctccgggacgagagagatctgggctggccgcccctcccggagtgcgtggagtcgcgcggagcgttgcttggtgcgggtgggtctgagctggggcgttctgtccgcaggacatcgggaagaacatttacaccatccgggaggtggtcactgagattcgggacaaggccacacgcaggcggctcgctgtcctgccctacgagctgcggttcaaggagcccttaccggaatacgtgcggctggtgactgagttttcaaagaaaacaggagactaccccagcctctctgccacggacatccaagtgcttgcactcacataccagttggaagcagagtttgttggggtgtctcacctaaaacaagaaccacagaaggttaaggtgagctcatcgattcagcacccagaaacacctctgcacatttctggtttccatctgccctacaagcctaaacccccacaagaaacagaaaaaggacactcagcttgtgagcctgagaacctggaatttagttccttcatgttctggagaaaccctttgcccaacatcgatcatgaactgcaggagctgctgattgacagaggtgaggacgttccaagtgaggaggaggaggaggaagaaaacgggtttgaagacagaaaagatgacagcgatgacgacgggggtggctggataacccccagtaacatcaagcagatccagcaggagctggagcagtgtgacgtccccgaggacgtgcgggttggctgcctgaccacagacttcgccatgcagaatgttctgctgcagatggggctgcacgtgctggcggtgaacggcatgctgattcgtgaggcccggagctacatcttgcgctgccatggctgtttcaagacaacgtctgacatgagccgagtgttctgctcacactgtgggaacaagaccctgaagaaagtgtccgtgaccgtcagcgacgacggcaccctgcacatgcacttctcccgcaaccccaaggtgctgaacccccgcggcctccggtactcgcttcccactcccaaagggggcaaatacgccatcaacccccatctcaccgaggatcagcgcttccctcagctgcgactctcccaaaaggccaggcagaaaaccaacgtgttcgcccctgactacatcgccggggtgtcaccctttgtcgagaatgacatctccagccgctcagctaccctgcaggtccgggacagcaccttgggagctgggcggagacgcttaaatcccaacgcttccagaaagaagtttgtgaagaaaaggtgaagagcgagttcccgcaggcaaattggatgggcgtctggccgccgtggagttccggtgacccatttccccagccgtgtcgtctccaggaccacccgatggaaataacaggcgggcttcacggtgcggctctgtccgcccatgccccgctgggtctgcagggaactggactgtcccatggcctgtgagcaccggagcgcctggctgcctgccaaggaagtgcaattgcataaaaacagaaagaacaacgccctggagccaatcttcaagaaaggaatttccaaaggataatatttttctaataaatgcggctgcaacctcctgtgcatttaattaaataggccaaatttttgctgcttaggtcatctcaaggctgatacttgagctgtgtgcccagagatcatgcatttagatttatatttttgccagaaaatacaaggttataataaaactaagaactacca

SEQ ID NO: 319662 - DNA, 1337 bp, Homo sapiens
cgtgcgcatgcgcgctcccctctcacgcagccaacatggctccagtggagcacgttgtggcggatgctggggctttcctgcggcatgcggctctgcaggacatcgggaagaacatttacaccatccgggaggtggtcactgagattcgggacaaggccacacgcaggcggctcgctgtcctgccctacgagctgcggttcaaggagcccttaccggaatacgtgcggctggtgactgagttttcaaagaaaacaggagactaccccagcctctctgccacggacatccaagtgcttgcactcacataccagttggaagcagagtttgttggggtgtctcacctaaaacaagaaccacagaaggttaaggtgagctcatcgattcagcacccagaaacacctctgcacatttctggtttccatctgccctacaagcctaaacccccacaagaaacagaaaaaggacactcagcttgtgagcctgagaacctggaatttagttccttcatgttctggagaaaccctttgcccaacatcgatcatgaactgcaggagctgctgattgacagaggtgaggacgttccaagtgaggaggaggaggaggaagaaaacgggtttgaagacagaaaagatgacagcgatgacgacgggggtggctggataacccccagtaacatcaagcagatccagcaggagctggagcagtgtgacgtccccgaggacgtgcgggttggctgcctgaccacagacttcgccatgcagaatgttctgctgcagatggggctgcacgtgctggcggtgaacggcatgctgattcgtgaggcccggagctacatcttgcgctgccatggctgtttcaagacaacgtctgacatgagccgagtgttctgctcacactgtgggaacaagaccctgaagaaagtgtccgtgaccgtcagcgacgacggcaccctgcacatgcacttctcccgcaaccccaaggtgctgaacccccgcggcctccggtactcgcttcccactcccaaagggggcaaatacgccatcaacccccatggcctgtgagcaccggagcgcctggctgcctgccaaggaagtgcaattgcataaaaacagaaagaacaacgccctggagccaatcttcaagaaaggaatttccaaaggataatatttttctaataaatgcggctgcaacctcctgtgcatttaattaaataggccaaatttttgctgcttaggtcatctcaaggctgatacttgagctgtgtgcccagagatcatgcatttagatttatatttttgccagaaaatacaaggttataataaaactaagaactacca

SEQ ID NO: 319663 - DNA, 1604 bp, Homo sapiens
cgtgcgcatgcgcgctcccctctcacgcagccaacatggctccagtggagcacgttgtggcggatgctggggctttcctgcggcatgcggctctgcaggacatcgggaagaacatttacaccatccgggaggtggtcactgagattcgggacaaggccacacgcaggcggctcgctgtcctgccctacgagctgcggttcaaggagcccttaccggaatacgtgcggctgggttaaggtgagctcatcgattcagcacccagaaacacctctgcacatttctggtttccatctgccctacaagcctaaacccccacaagaaacagaaaaaggacactcagcttgtgagcctgagaacctggaatttagttccttcatgttctggagaaaccctttgcccaacatcgatcatgaactgcaggagctgctgattgacagaggtgaggacgttccaagtgaggaggaggaggaggaagaaaacgggtttgaagacagaaaagatgacagcgatgacgacgggggtggctggataacccccagtaacatcaagcagatccagcaggagctggagcagtgtgacgtccccgaggacgtgcgggttggctgcctgaccacagacttcgccatgcagaatgttctgctgcagatggggctgcacgtgctggcggtgaacggcatgctgattcgtgaggcccggagctacatcttgcgctgccatggctgtttcaagacaacgtctgacatgagccgagtgttctgctcacactgtgggaacaagaccctgaagaaagtgtccgtgaccgtcagcgacgacggcaccctgcacatgcacttctcccgcaaccccaaggtgctgaacccccgcggcctccggtactcgcttcccactcccaaagggggcaaatacgccatcaacccccatctcaccgaggatcagcgcttccctcagctgcgactctcccaaaaggccaggcagaaaaccaacgtgttcgcccctgactacatcgccggggtgtcaccctttgtcgagaatgacatctccagccgctcagctaccctgcaggtccgggacagcaccttgggagctgggcggagacgcttaaatcccaacgcttccagaaagaagtttgtgaagaaaaggtgaagagcgagttcccgcaggcaaattggatgggcgtctggccgccgtggagttccggtgacccatttccccagccgtgtcgtctccaggaccacccgatggaaataacaggcgggcttcacggtgcggctctgtccgcccatgccccgctgggtctgcagggaactggactgtcccatggcctgtgagcaccggagcgcctggctgcctgccaaggaagtgcaattgcataaaaacagaaagaacaacgccctggagccaatcttcaagaaaggaatttccaaaggataatatttttctaataaatgcggctgcaacctcctgtgcatttaattaaataggccaaatttttgctgcttaggtcatctcaaggctgatacttgagctgtgtgcccagagatcatgcatttagatttatatttttgccagaaaatacaaggttataataaaactaagaactacca

SEQ ID NO: 319664 - DNA, 1784 bp, Homo sapiens
cgtgcgcatgcgcgctcccctctcacgcagccaacatggctccagtggagcacgttgtggcggatgctggggctttcctgcggcatgcggctctgcaggtacggggagctccctccgggacgagagagatctgggctggccgcccctcccggagtgcgtggagtcgcgcggagcgttgcttggtgcgggtgggtctgagctggggcgttctgtccgcaggacatcgggaagaacatttacaccatccgggaggtggtcactgagattcgggacaaggccacacgcaggcggctcgctgtcctgccctacgagctgcggttcaaggagcccttaccggaatacgtgcggctggtgactgagttttcaaagaaaacaggagactaccccagcctctctgccacggacatccaagtgcttgcactcacataccagttggaagcagagtttgttggggtgtctcacctaaaacaagaaccacagaagcctaaacccccacaagaaacagaaaaaggacactcagcttgtgagcctgagaacctggaatttagttccttcatgttctggagaaaccctttgcccaacatcgatcatgaactgcaggagctgctgattgacagaggtgaggacgttccaagtgaggaggaggaggaggaagaaaacgggtttgaagacagaaaagatgacagcgatgacgacgggggtggctggataacccccagtaacatcaagcagatccagcaggagctggagcagtgtgacgtccccgaggacgtgcgggttggctgcctgaccacagacttcgccatgcagaatgttctgctgcagatggggctgcacgtgctggcggtgaacggcatgctgattcgtgaggcccggagctacatcttgcgctgccatggctgtttcaagacaacgtctgacatgagccgagtgttctgctcacactgtgggaacaagaccctgaagaaagtgtccgtgaccgtcagcgacgacggcaccctgcacatgcacttctcccgcaaccccaaggtgctgaacccccgcggcctccggtactcgcttcccactcccaaagggggcaaatacgccatcaacccccatctcaccgaggatcagcgcttccctcagctgcgactctcccaaaaggccaggcagaaaaccaacgtgttcgcccctgactacatcgccggggtgtcaccctttgtcgagaatgacatctccagccgctcagctaccctgcaggtccgggacagcaccttgggagctgggcggagacgcttaaatcccaacgcttccagaaagaagtttgtgaagaaaaggtgaagagcgagttcccgcaggcaaattggatgggcgtctggccgccgtggagttccggtgacccatttccccagccgtgtcgtctccaggaccacccgatggaaataacaggcgggcttcacggtgcggctctgtccgcccatgccccgctgggtctgcagggaactggactgtcccatggcctgtgagcaccggagcgcctggctgcctgccaaggaagtgcaattgcataaaaacagaaagaacaacgccctggagccaatcttcaagaaaggaatttccaaaggataatatttttctaataaatgcggctgcaacctcctgtgcatttaattaaataggccaaatttttgctgcttaggtcatctcaaggctgatacttgagctgtgtgcccagagatcatgcatttagatttatatttttgccagaaaatacaaggttataataaaactaagaactacca

SEQ ID NO: 319665 - DNA, 4730 bp, Homo sapiens
ggagggggcgtcgggaaagccccgacttcgcagccttacactcttcgtgggcggcgaccgcggccccactgacatcattcctcatgagggaggaggcacaaacagttctgggccgaccagaaaaaggacgactgggacttgactctgaatcgcaggatttgaagagatttctcctggcttcccaacgaggctggtgggaagcggtcctcctcccatacacgacctcccaccctcgcgaggcgtagaaaccagttctgactgtacagtaaagcgagggccagggctgaggtctggaagctaatgaaagcacagaaagtgtcgaaactggatgagcaggaagcgagtggcctcccctgtcatctgacgttttcccaggatgtaatttgcctgactgaaacagatcaggaccaacagggagagttttcgatttagtgtgaggaaaagagcactaaattgtagcaaaagaccttattgctcaaggcccagtcagaagatttcataaggaagctgtagaaagtcttaagaggaaatcagccgggcgtggtggcgggcacctgtaatcccagctactccggaggctgaggcaggagaatcgcttgaacccggggagcagaggttgcagtgagccgagatcgcgccactgtacgccagcctgggcgaaagaacgaaactccgtctccaaaaaaaaaaaaaacgaagaaaaagtccaaagagggtaaaggctgttctccccttaaaaaacagctaaagacctttgggggcgctgctccttgtaaatgtcaactacttccgcgggaaagaacgcgcaggcacttggccttgtgggcgctcacttgccccggaagtactgttgagttagcgcctcgccttccggggcggattgtctgtcgttgcagtagctgtaggaaggggaggccattttccgtttctgggaggagtgaggggcaacgggtcggagaaaaaggaaaaaagaagggctcagcgcctccccgccgggccgtggacagaggggcacagtttcggcaggcgggtgaggtcgctgagggcccgccggagatgttttccttgtcgagcacggtgcaaccccaggttacagttcctctgagtcatctcatcaatgccttccatacaccaaaaaacacttctgtttctctcagtggagtgtcagtttctcaaaaccagcatcgagatgtagttcctgagcatgaggctcccagcagtgagccttcacttaacttaagggaccttggattatctgaactaaaaattggacagattgatcagctggtagaaaatctacttcctggattttgtaaaggcaaaaacatttcttcccattggcatacatcccatgtctctgcacaatccttctttgaaaataaatatggtaacttagatatatttagtacattacgttcctcttgcttgtatcgacatcattcaagagctcttcaaagcatttgttcagatcttcagtactggccagttttcatacagtctcggggttttaaaactttgaaatcaaggacacgacgtctccagtctacctccgagagattagctgaaacacagaatatagcgccatcattcgtgaaggggtttcttttgcgggacagaggatcagatgttgagagtttggacaaactcatgaaaaccaaaaatatacctgaagctcaccaagatgcatttaaaactggttttgcggaaggttttctgaaagctcaagcactcacacaaaaaaccaatgattccctaaggcgaacccgtctgattctcttcgttctgctgctattcggcatttatggacttctaaaaaacccatttttatctgtccgcttccggacaacaacagggcttgattctgcagtagatcctgtccagatgaaaaatgtcacctttgaacatgttaaaggggtggaggaagctaaacaagaattacaggaagttgttgaattcttgaaaaatccacaaaaatttactattcttggaggtaaacttccaaaaggaattcttttagttggacccccagggactggaaagacacttcttgcccgagctgtggcgggagaagctgatgttcctttttattatgcttctggatccgaatttgatgagatgtttgtgggtgtgggagccagccgtatcagaaatctttttagggaagcaaaggcgaatgctccttgtgttatatttattgatgaattagattctgttggtgggaagagaattgaatctccaatgcatccatattcaaggcagaccataaatcaacttcttgctgaaatggatggttttaaacccaatgaaggagttatcataataggagccacaaacttcccagaggcattagataatgccttaatacgtcctggtcgttttgacatgcaagttacagttccaaggccagatgtaaaaggtcgaacagaaattttgaaatggtatctcaataaaataaagtttgatcaatccgttgatccagaaattatagctcgaggtactgttggcttttccggagcagagttggagaatcttgtgaaccaggctgcattaaaagcagctgttgatggaaaagaaatggttaccatgaaggagctggagttttccaaagacaaaattctaatggggcctgaaagaagaagtgtggaaattgataacaaaaacaaaaccatcacagcatatcatgaatctggtcatgccattattgcatattacacaaaagatgcaatgcctatcaacaaagctacaatcatgccacgggggccaacacttggacatgtgtccctgttacctgagaatgacagatggaatgaaactagagcccagctgcttgcacaaatggatgttagtatgggaggaagagtggcagaggagcttatatttggaaccgaccatattacaacaggtgcttccagtgattttgataatgccactaaaatagcaaagcggatggttaccaaatttggaatgagtgaaaagcttggagttatgacctacagtgatacagggaaactaagtccagaaacccaatctgccatcgaacaagaaataagaatccttctaagggactcatatgaacgagcaaaacatatcttgaaaactcatgcaaaggagcataagaatctcgcagaagctttattgacctatgagactttggatgccaaagagattcaaattgttcttgaggggaaaaagttggaagtgagatgataactctcttgatatggatgcttgctggttttattgcaagaatataagtagcattgcagtagtctacttttacaacgctttcccctcattcttgatgtggtgtaattgaagggtgtgaaatgctttgtcaatcatttgtcacatttatccagtttgggttattctcattatgacacctattgcaaattagcatcccatggcaaatatattttgaaaaaataaagaactatcaggattgaaaacagctcttttgaggaatgtcaattagttattaagttgaaagtaattaatgattttatgtttggttactctactagatttgataaaaattgtgcctttagccttctatatacatcagtggaaacttaagatgcagtaattatgttccagattgaccatgaataaaatattttttaatctaaatgtagagaagttgggattaaaagcagtctcggaaacacagagccaggaatatagccttttggcatggtgccatggctcacatctgtaatcccagcacttttggaggctgaggcgggtggattgcttgaggccaggagttcgagaccagcctggccaacgtggtgaaacgctgtctctactaaaatacaaaaaaatagggctgggcgcggttgctcacgcctgtaatcccagcacttttcagaggccaaggcgggcaaatcacctgaggtcaagagtttgagaccagcctggccaacatggtgaaaccccatctctactaaacatgcaaaaattacctgggcatggtggcaggtgcttataatcccagctactctgggggccaaggcaggagaattgcttgagcctgggagatggaggttgcagtgagctgagatcatgccactgcactccagcctgggcaacagagcaagactctgcctcaaaaaaaaattaaaataaatttaaatacaaaaaaaaatagccaggtgtggggtgcatgcctggaatcccagctacttgagaggctgaggcacgagaattgcttgaacccaggaggtggaggttgcagtgagccaagatcacaggagccactgcactccagcctgggtgacagagtgagactctgtctcaaaaaaaaattaaataaattattataacctttcagaaatgctgtgtgcattttcatgttcttttttttagcattactgtcactctccctaatgaaatgtacttcagagaagcagtattttgttaaataaatacataacctcattctgaataatgtccctcattttgactataactgtgcttggtttcaaaagcaaaattaaacaaaaatctcagtcccctccgaagtgaactttgtgttaccctgcgtcagaaatgccaagttgtgtttacttttcattcagattttgtgaatatgaacatgctgttataggatctacagatgaatatttaactcaatagaaaaattattttagaacacattgtattggtattacaaccagattatattcttgacgttgacttcattaaaattatctacaatttcctaataa

SEQ ID NO: 319666 - DNA, 4901 bp, Homo sapiens
ggagggggcgtcgggaaagccccgacttcgcagccttacactcttcgtgggcggcgaccgcggccccactgacatcattcctcatgagggaggaggcacaaacagttctgggccgaccagaaaaaggacgactgggacttgactctgaatcgcaggatttgaagagatttctcctggcttcccaacgaggctggtgggaagcggtcctcctcccatacacgacctcccaccctcgcgaggcgtagaaaccagttctgactgtacagtaaagcgagggccagggctgaggtctggaagctaatgaaagcacagaaagtgtcgaaactggatgagcaggaagcgagtggcctcccctgtcatctgacgttttcccaggatgtaatttgcctgactgaaacagatcaggaccaacagggagagttttcgatttagtgtgaggaaaagagcactaaattgtagcaaaagaccttattgctcaaggcccagtcagaagatttcataaggaagctgtagaaagtcttaagaggaaatcagccgggcgtggtggcgggcacctgtaatcccagctactccggaggctgaggcaggagaatcgcttgaacccggggagcagaggttgcagtgagccgagatcgcgccactgtacgccagcctgggcgaaagaacgaaactccgtctccaaaaaaaaaaaaaacgaagaaaaagtccaaagagggtaaaggctgttctccccttaaaaaacagctaaagacctttgggggcgctgctccttgtaaatgtcaactacttccgcgggaaagaacgcgcaggcacttggccttgtgggcgctcacttgccccggaagtactgttgagttagcgcctcgccttccggggcggattgtctgtcgttgcagtagctgtaggaaggggaggccattttccgtttctgggaggagtgaggggcaacgggtcggagaaaaaggaaaaaagaagggctcagcgcctccccgccgggccgtggacagaggggcacagtttcggcaggcgggtgaggtcgctgagggcccgccggagatgttttccttgtcgagcacggtgcaaccccaggttacagttcctctgagtcatctcatcaatgccttccatacaccaaaaaacacttctgtttctctcagtggagtgtcagtttctcaaaaccagcatcgagatgtagttcctgagcatgaggctcccagcagtgagtgtatgttcagtgacttcctgacgaagcttaacattgtttcaattggcaaaggaaaaatattcgaagggtacagatccatgttcatggagccagcaaaaaggatgaagaagagcttggacacaaccgataactggcacatccgtccagaacccttctccctctcaatccctccttcacttaacttaagggaccttggattatctgaactaaaaattggacagattgatcagctggtagaaaatctacttcctggattttgtaaaggcaaaaacatttcttcccattggcatacatcccatgtctctgcacaatccttctttgaaaataaatatggtaacttagatatatttagtacattacgttcctcttgcttgtatcgacatcattcaagagctcttcaaagcatttgttcagatcttcagtactggccagttttcatacagtctcggggttttaaaactttgaaatcaaggacacgacgtctccagtctacctccgagagattagctgaaacacagaatatagcgccatcattcgtgaaggggtttcttttgcgggacagaggatcagatgttgagagtttggacaaactcatgaaaaccaaaaatatacctgaagctcaccaagatgcatttaaaactggttttgcggaaggttttctgaaagctcaagcactcacacaaaaaaccaatgattccctaaggcgaacccgtctgattctcttcgttctgctgctattcggcatttatggacttctaaaaaacccatttttatctgtccgcttccggacaacaacagggcttgattctgcagtagatcctgtccagatgaaaaatgtcacctttgaacatgttaaaggggtggaggaagctaaacaagaattacaggaagttgttgaattcttgaaaaatccacaaaaatttactattcttggaggtaaacttccaaaaggaattcttttagttggacccccagggactggaaagacacttcttgcccgagctgtggcgggagaagctgatgttcctttttattatgcttctggatccgaatttgatgagatgtttgtgggtgtgggagccagccgtatcagaaatctttttagggaagcaaaggcgaatgctccttgtgttatatttattgatgaattagattctgttggtgggaagagaattgaatctccaatgcatccatattcaaggcagaccataaatcaacttcttgctgaaatggatggttttaaacccaatgaaggagttatcataataggagccacaaacttcccagaggcattagataatgccttaatacgtcctggtcgttttgacatgcaagttacagttccaaggccagatgtaaaaggtcgaacagaaattttgaaatggtatctcaataaaataaagtttgatcaatccgttgatccagaaattatagctcgaggtactgttggcttttccggagcagagttggagaatcttgtgaaccaggctgcattaaaagcagctgttgatggaaaagaaatggttaccatgaaggagctggagttttccaaagacaaaattctaatggggcctgaaagaagaagtgtggaaattgataacaaaaacaaaaccatcacagcatatcatgaatctggtcatgccattattgcatattacacaaaagatgcaatgcctatcaacaaagctacaatcatgccacgggggccaacacttggacatgtgtccctgttacctgagaatgacagatggaatgaaactagagcccagctgcttgcacaaatggatgttagtatgggaggaagagtggcagaggagcttatatttggaaccgaccatattacaacaggtgcttccagtgattttgataatgccactaaaatagcaaagcggatggttaccaaatttggaatgagtgaaaagcttggagttatgacctacagtgatacagggaaactaagtccagaaacccaatctgccatcgaacaagaaataagaatccttctaagggactcatatgaacgagcaaaacatatcttgaaaactcatgcaaaggagcataagaatctcgcagaagctttattgacctatgagactttggatgccaaagagattcaaattgttcttgaggggaaaaagttggaagtgagatgataactctcttgatatggatgcttgctggttttattgcaagaatataagtagcattgcagtagtctacttttacaacgctttcccctcattcttgatgtggtgtaattgaagggtgtgaaatgctttgtcaatcatttgtcacatttatccagtttgggttattctcattatgacacctattgcaaattagcatcccatggcaaatatattttgaaaaaataaagaactatcaggattgaaaacagctcttttgaggaatgtcaattagttattaagttgaaagtaattaatgattttatgtttggttactctactagatttgataaaaattgtgcctttagccttctatatacatcagtggaaacttaagatgcagtaattatgttccagattgaccatgaataaaatattttttaatctaaatgtagagaagttgggattaaaagcagtctcggaaacacagagccaggaatatagccttttggcatggtgccatggctcacatctgtaatcccagcacttttggaggctgaggcgggtggattgcttgaggccaggagttcgagaccagcctggccaacgtggtgaaacgctgtctctactaaaatacaaaaaaatagggctgggcgcggttgctcacgcctgtaatcccagcacttttcagaggccaaggcgggcaaatcacctgaggtcaagagtttgagaccagcctggccaacatggtgaaaccccatctctactaaacatgcaaaaattacctgggcatggtggcaggtgcttataatcccagctactctgggggccaaggcaggagaattgcttgagcctgggagatggaggttgcagtgagctgagatcatgccactgcactccagcctgggcaacagagcaagactctgcctcaaaaaaaaattaaaataaatttaaatacaaaaaaaaatagccaggtgtggggtgcatgcctggaatcccagctacttgagaggctgaggcacgagaattgcttgaacccaggaggtggaggttgcagtgagccaagatcacaggagccactgcactccagcctgggtgacagagtgagactctgtctcaaaaaaaaattaaataaattattataacctttcagaaatgctgtgtgcattttcatgttcttttttttagcattactgtcactctccctaatgaaatgtacttcagagaagcagtattttgttaaataaatacataacctcattctgaataatgtccctcattttgactataactgtgcttggtttcaaaagcaaaattaaacaaaaatctcagtcccctccgaagtgaactttgtgttaccctgcgtcagaaatgccaagttgtgtttacttttcattcagattttgtgaatatgaacatgctgttataggatctacagatgaatatttaactcaatagaaaaattattttagaacacattgtattggtattacaaccagattatattcttgacgttgacttcattaaaattatctacaatttcctaataa

SEQ ID NO: 319667 - DNA, 511 bp, Homo sapiens
agcggcgccctttttttataccatgggaatgagtgaaaagcttggagttatgacctacagtgatacagggaaactaagtccagaaacccaatctgccatcgaacaagaaataagaatccttctaagggactcatatgaacgagcaaaacatatcttgaaaactcatgcaaaggagcataagaatctcgcagaagctttattgacctatgagactttggatgccaaagagattcaaattgttcttgaggggaaaaagttggaagtgagatgataactctcttgatatggatgcttgctggttttattgcaagaatataagtagcattgcagtagtctacttttacaacgctttcccctcattcttgatgtggtgtaattgaagggtgtgaaatgctttgtcaatcatttgtcacatttatccagtttgggttattctcattatgacacctattgcaaattagcatcccatggcaaatatattttgaaaaaataaagaactatcaggattgaa

SEQ ID NO: 319668 - DNA, 1926 bp, Homo sapiens
ggagggggcgtcgggaaagccccgacttcgcagccttacactcttcgtgggcggcgaccgcggccccactgacatcattcctcatgagggaggaggcacaaacagttctgggccgaccagaaaaaggacgactgggacttgactctgaatcgcaggatttgaagagatttctcctggcttcccaacgaggctggtgggaagcggtcctcctcccatacacgacctcccaccctcgcgaggcgtagaaaccagttctgactgtacagtaaagcgagggccagggctgaggtctggaagctaatgaaagcacagaaagtgtcgaaactggatgagcaggaagcgagtggcctcccctgtcatctgacgttttcccaggatgtaatttgcctgactgaaacagatcaggaccaacagggagagttttcgatttagtgtgaggaaaagagcactaaattgtagcaaaagaccttattgctcaaggcccagtcagaagatttcataaggaagctgtagaaagtcttaagaggaaatcagccgggcgtggtggcgggcacctgtaatcccagctactccggaggctgaggcaggagaatcgcttgaacccggggagcagaggttgcagtgagccgagatcgcgccactgtacgccagcctgggcgaaagaacgaaactccgtctccaaaaaaaaaaaaaacgaagaaaaagtccaaagagggtaaaggctgttctccccttaaaaaacagctaaagacctttgggggcgctgctccttgtaaatgtcaactacttccgcgggaaagaacgcgcaggcacttggccttgtgggcgctcacttgccccggaagtactgttgagttagcgcctcgccttccggggcggattgtctgtcgttgcagtagctgtaggaaggggaggccattttccgtttctgggaggagtgaggggcaacgggtcggagaaaaaggaaaaaagaagggctcagcgcctccccgccgggccgtggacagaggggcacagtttcggcaggcgggtgaggtcgctgagggcccgccggagatgttttccttgtcgagcacggtgcaaccccaggttacagttcctctgagtcatctcatcaatgccttccatacaccaaaaaacacttctgtttctctcagtggagtgtcagtttctcaaaaccagcatcgagatgtagttcctgagcatgaggctcccagcagtgaggggtttcttttgcgggacagaggatcagatgttgagagtttggacaaactcatgaaaaccaaaaatatacctgaagctcaccaagatgcatttaaaactggttttgcggaaggttttctgaaagctcaagcactcacacaaaaaaccaatgattccctaaggcgaacccgtctgattctcttcgttctgctgctattcggcatttatggacttctaaaaaacccatttttatctgtccgcttccggacaacaacagggcttgattctgcagtagatcctgtccagatgaaaaatgtcacctttgaacatgttaaaggggtggaggaagctaaacaagaattacaggaagttgttgaattcttgaaaaatccacaaaaatttactattcttggaggtaaacttccaaaagattctttagttggaccccaggcacggcaagaaccttctggccgagctgggcgggagaactgatgtcctttatatgcgtcggaagcgaagtggtgacaggttggggggttgggaacagccggatcagaaaacattaagcgagccagggcgatgcgcacggggtcaataacggggacacacaaacgggaggggaacagaagagacccacagggtcacttaacgggcaacgaaataccgtcagaacacacgaggttacccagcagagcacccaaagaccaaaccgaggaaaagcca

SEQ ID NO: 319669 - DNA, 1349 bp, Homo sapiens
ggagggggcgtcgggaaagccccgacttcgcagccttacactcttcgtgggcggcgaccgcggccccactgacatcattcctcatgagggaggaggcacaaacagttctgggccgaccagaaaaaggacgactgggacttgactctgaatcgcaggatttgaagagatttctcctggcttcccaacgaggctggtgggaagcggtcctcctcccatacacgacctcccaccctcgcgaggcgtagaaaccagttctgactgtacagtaaagcgagggccagggctgaggtctggaagctaatgaaagcacagaaagtgtcgaaactggatgagcaggaagcgagtggcctcccctgtcatctgacgttttcccaggatgtaatttgcctgactgaaacagatcaggaccaacagggagagttttcgatttagtgtgaggaaaagagcactaaattgtagcaaaagaccttattgctcaaggcccagtcagaagatttcataaggaagctgtagaaagtcttaagaggaaatcagccgggcgtggtggcgggcacctgtaatcccagctactccggaggctgaggcaggagaatcgcttgaacccggggagcagaggttgcagtgagccgagatcgcgccactgtacgccagcctgggcgaaagaacgaaactccgtctccaaaaaaaaaaaaaacgaagaaaaagtccaaagagggtaaaggctgttctccccttaaaaaacagctaaagacctttgggggcgctgctccttgtaaatgtcaactacttccgcgggaaagaacgcgcaggcacttggccttgtgggcgctcacttgccccggaagtactgttgagttagcgcctcgccttccggggcggattgtctgtcgttgcagtagctgtaggaaggggaggccattttccgtttctgggaggagtgaggggcaacgggtcggagaaaaaggaaaaaagaagggctcagcgcctccccgccgggccgtggacagaggggcacagtttcggcaggcgggtgaggtcgctgagggcccgccggagatgttttccttgtcgagcacggtgcaaccccaggttacagttcctctgagtcatctcatcaatgccttccatacaccaaaaaacacttctgtttctctcagtggagtgtcagtttctcaaaaccagcatcgagatgtagttcctgagcatgaggctcccagcagtgaggtaacttagatatatttagtacattacgttcctcttgcttgtatcgacatcattcaagagctcttcaaagcatttgttcagatcttcagtactggccaggtatgaagcaacaaccataaattgtg

SEQ ID NO: 319670 - DNA, 1546 bp, Homo sapiens
atatagccttaaaaatattaataagggcatttaataacttgattcattaccttgatcccattaactattttccttgatagatcttatgttcctcaagtggggattctcttgccacagaatttggagagagaatatagtttatttgagtattaaattatgtttaatctcttctttattcctacagcttaaaattggaattatatctattattttgaccaaatatattttagtcttcttttagtacatggatattatctttcaagttctcttttaataaaccagccaagtctttttttaaccataaatttcattgaagtttaacaaattcacacaacagtgcacaaatccataaattttcacaaactgtctgtgttataagtacccagctcaagaaatagaaccttagcagaagcccagaacctccttgatgcctccttctggttactaacctagggacaatttcctgtctaataccatacatgaattttccctatttttgaattttagataaatgtaatccatatagaatatcctcttttgtatgaggcttcttttattcaacatgtttgtgagatccatctatgttacttggagttgaggtttatttatcctttattgcatagtatcccattataagaatactacaacacggtgcaattacactactttagggtggacatttatttctagtttttggttcaaatacagctggtgtgactatttttatacaagtctcttggtgaacatatgtacacgcttctcctggacctaggaatggacaaagctttgttttgtatttttttaaatactctgaaaagaaaatgctatgtttttaaccattaacttgattaaaacattattacatttttaattatttaatcagaataactttcaaagatcatttcaagtctaacaaaaaaacataactttgttctttaataagtgtaatatttcctggaaatatgcctgggaatttttcttgaaataataagcgaatcttgacattaattggacattttcagaatgccctttggcgtgaagctatgtttcatgttttagaatgctcctctctaggtactttctttttaaccctgtccaatgtacttgacttttgttttctcactgagaaaatgaaagttcagaatgatttttttggggatagtaaggagactttgcataatgggaaataatggtcaggggaaaaccctttgttttataaggggccatttttgtatgctttttttactgaaacagagaaggtcaggttaattccatatccaaattaaatttatgattttcaaaagggaagccttgataatctaaccaaacgtgtccattatctaaagttatttggaaaattgtgtcactttaggtggaggaagctaaacaagaattacaggaagttgttgaattcttgaaaaatccacaaaaatttactattcttggaggtaaacttccaaaaggtaagatatcttttctttatcatgatttgatggaaaaaacaaaaacaaagaaacaaacaaaaaaaacctatattacttattta

SEQ ID NO: 319671 - DNA, 439 bp, Homo sapiens
aatataattttttaacctatgtcaaacctcatatgactgatctcagtaaaacgaactgtgaaaatatttgcatcaatttatttttaaatattaaaaaaaggaaatatatttgttagacttttaaaatctgattgttttaactgataatatgtactccttaggttaaatatcttgataatattaatgcatacctggttgacccaatcttttacagccttcacttaacttaagggaccttggattatctgaactaaaaattggacagattgatcagctggtagaaaatctacttcctggattttgtaaaggcaaaaacatttcttcccattggcatacatcccatgtctctgcacaatccttctttgaaaataaatatggtatgttaatgtgttttttgttccaattaaatattttagcactattaataattatagatacc

SEQ ID NO: 319672 - DNA, 5078 bp, Homo sapiens
ggagggggcgtcgggaaagccccgacttcgcagccttacactcttcgtgggcggcgaccgcggccccactgacatcattcctcatgagggaggaggcacaaacagttctgggccgaccagaaaaaggacgactgggacttgactctgaatcgcaggatttgaagagatttctcctggcttcccaacgaggctggtgggaagcggtcctcctcccatacacgacctcccaccctcgcgaggcgtagaaaccagttctgactgtacagtaaagcgagggccagggctgaggtctggaagctaatgaaagcacagaaagtgtcgaaactggatgagcaggaagcgagtggcctcccctgtcatctgacgttttcccaggatgtaatttgcctgactgaaacagatcaggaccaacagggagagttttcgatttagtgtgaggaaaagagcactaaattgtagcaaaagaccttattgctcaaggcccagtcagaagatttcataaggaagctgtagaaagtcttaagaggaaatcagccgggcgtggtggcgggcacctgtaatcccagctactccggaggctgaggcaggagaatcgcttgaacccggggagcagaggttgcagtgagccgagatcgcgccactgtacgccagcctgggcgaaagaacgaaactccgtctccaaaaaaaaaaaaaacgaagaaaaagtccaaagagggtaaaggctgttctccccttaaaaaacagctaaagacctttgggggcgctgctccttgtaaatgtcaactacttccgcgggaaagaacgcgcaggcacttggccttgtgggcgctcacttgccccggaagtactgttgagttagcgcctcgccttccggggcggattgtctgtcgttgcagtagctgtaggaaggggaggccattttccgtttctgggaggagtgaggggcaacgggtcggagaaaaaggaaaaaagaagggctcagcgcctccccgccgggccgtggacagaggggcacagtttcggcaggcgggtgaggtcgctgagggcccgccggagatgttttccttgtcgagcacggtgcaaccccaggttacagttcctctgagtcatctcatcaatgccttccatacaccaaaaaacacttctgtttctctcagtggagtgtcagtttctcaaaaccagcatcgagatgtagttcctgagcatgaggctcccagcagtgagccttcacttaacttaagggaccttggattatctgaactaaaaattggacagattgatcagctggtagaaaatctacttcctggattttgtaaaggcaaaaacatttcttcccattggcatacatcccatgtctctgcacaatccttctttgaaaataaatatggtaacttagatatatttagtacattacgttcctcttgcttgtatcgacatcattcaagagctcttcaaagcatttgttcagatcttcagtactggccagttttcatacagtctcggggttttaaaactttgaaatcaaggacacgacgtctccagtctacctccgagagattagctgaaacacagaatatagcgccatcattcgtgaaggggtttcttttgcgggacagaggatcagatgttgagagtttggacaaactcatgaaaaccaaaaatatacctgaagctcaccaagatgcatttaaaactggttttgcggaaggttttctgaaagctcaagcactcacacaaaaaaccaatgattccctaaggcgaacccgtctgattctcttcgttctgctgctattcggcatttatggacttctaaaaaacccatttttatctgtccgcttccggacaacaacagggcttgattctgcagtagatcctgtccagatgaaaaatgtcacctttgaacatgttaaaggggtggaggaagctaaacaagaattacaggaagttgttgaattcttgaaaaatccacaaaaatttactattcttggaggtaaacttccaaaaggaattcttttagttggacccccagggactggaaagacacttcttgcccgagctgtggcgggagaagctgatgttcctttttattatgcttctggatccgaatttgatgagatgtttgtgggtgtgggagccagccgtatcagaaatctttttagggaagcaaaggcgaatgctccttgtgttatatttattgatgaattagattctgttggtgggaagagaattgaatctccaatgcatccatattcaaggcagaccataaatcaacttcttgctgaaatggatggttttaaacccaatgaaggagttatcataataggagccacaaacttcccagaggcattagataatgccttaatacgtcctggtcgttttgacatgcaagttacagttccaaggccagatgtaaaaggtcgaacagaaattttgaaatggtatctcaataaaataaagtttgatcaatccgttgatccagaaattatagctcgaggtactgttggcttttccggagcagagttggagaatcttgtgaaccaggctgcattaaaagcagctgttgatggaaaagaaatggttaccatgaaggagctggagttttccaaagacaaaattctaatggggcctgaaagaagaagtgtggaaattgataacaaaaacaaaaccatcacagcatatcatgaatctggtcatgccattattgcatattacacaaaagatgcaatgcctatcaacaaagctacaatcatgccacgggggccaacacttggacatgtgtccctgttacctgagaatgacagatggaatgaaactagagcccagctgcttgcacaaatggatgttagtatgggaggaagagtggcagaggagcttatatttggaaccgaccatattacaacaggtgcttccagtgattttgataatgccactaaaatagcaaagcggatggttaccaaatttggaatgagtgaaaagcttggagttatgacctacagtgatacagggaaactaagtccagaaacccaatctgccatcgaacaagaaataagaatccttctaagggactcatatgaacgagcaaaacatatcttgaaaactcatgcaaaggagcataagaatctcgcagaagctttattgacctatgagactttggatgccaaagagattcaaattgttcttgaggggaaaaagttggaagtgagatgataactctcttgatatggatgcttgctggttttattgcaagaatataagtagcattgcagtagtctacttttacaacgctttcccctcattcttgatgtggtgtaattgaagggtgtgaaatgctttgtcaatcatttgtcacatttatccagtttgggttattctcattatgacacctattgcaaattagcatcccatggcaaatatattttgaaaaaataaagaactatcaggattgaaaacagctcttttgaggaatgtcaattagttattaagttgaaagtaattaatgattttatgtttggttactctactagatttgataaaaattgtgcctttagccttctatatacatcagtggaaacttaagatgcagtaattatgttccagattgaccatgaataaaatattttttaatctaaatgtagagaagttgggattaaaagcagtctcggaaacacagagccaggaatatagccttttggcatggtgccatggctcacatctgtaatcccagcacttttggaggctgaggcgggtggattgcttgaggccaggagttcgagaccagcctggccaacgtggtgaaacgctgtctctactaaaatacaaaaaaatagggctgggcgcggttgctcacgcctgtaatcccagcacttttcagaggccaaggcgggcaaatcacctgaggtcaagagtttgagaccagcctggccaacatggtgaaaccccatctctactaaacatgcaaaaattacctgggcatggtggcaggtgcttataatcccagctactctgggggccaaggcaggagaattgcttgagcctgggagatggaggttgcagtgagctgagatcatgccactgcactccagcctgggcaacagagcaagactctgcctcaaaaaaaaattaaaataaatttaaatacaaaaaaaaatagccaggtgtggggtgcatgcctggaatcccagctacttgagaggctgaggcacgagaattgcttgaacccaggaggtggaggttgcagtgagccaagatcacaggagccactgcactccagcctgggtgacagagtgagactctgtctcaaaaaaaaattaaataaattattataacctttcagaaatgctgtgtgcattttcatgttcttttttttagcattactgtcactctccctaatgaaatgtacttcagagaagcagtattttgttaaataaatacataacctcattctgaataatgtccctcattttgactataactgtgcttggtttcaaaagcaaaattaaacaaaaatctcagtcccctccgaagtgaactttgtgttaccctgcgtcagaaatgccaagttgtgtttacttttcattcagattttgtgaatatgaacatgctgttataggatctacagatgaatatttaactcaatagaaaaattattttagaacacattgtattggtattacaaccagattatattcttgacgttgacttcattaaaattatctacaatttcctaataatttaagctgtatatggtcttcattgaaaaaagatagatattgttacaggaagcttgttacattatattcttgaccttttggttgataatcttaaatcttaatgtaatttcaaactggcagaaatgttgccagcataatacatggatgtctcatataccctgcatccagatttaccagttgttatcattctgcccgttttttattgccccaaacctgttctgtctccctctctgtatgtacatacatacacgtataaaatattgatgaagtcttatctgtcttaaatttttttacatatttgttgaggtataatttacatatgataaaattcattttaaatgtagagtt

SEQ ID NO: 319673 - DNA, 4750 bp, Homo sapiens
ggagggggcgtcgggaaagccccgacttcgcagccttacactcttcgtgggcggcgaccgcggccccactgacatcattcctcatgagggaggaggcacaaacagttctgggccgaccagaaaaaggacgactgggacttgactctgaatcgcaggatttgaagagatttctcctggcttcccaacgaggctggtgggaagcggtcctcctcccatacacgacctcccaccctcgcgaggcgtagaaaccagttctgactgtacagtaaagcgagggccagggctgaggtctggaagctaatgaaagcacagaaagtgtcgaaactggatgagcaggaagcgagtggcctcccctgtcatctgacgttttcccaggatgtaatttgcctgactgaaacagatcaggaccaacagggagagttttcgatttagtgtgaggaaaagagcactaaattgtagcaaaagaccttattgctcaaggcccagtcagaagatttcataaggaagctgtagaaagtcttaagaggaaatcagccgggcgtggtggcgggcacctgtaatcccagctactccggaggctgaggcaggagaatcgcttgaacccggggagcagaggttgcagtgagccgagatcgcgccactgtacgccagcctgggcgaaagaacgaaactccgtctccaaaaaaaaaaaaaacgaagaaaaagtccaaagagggtaaaggctgttctccccttaaaaaacagctaaagacctttgggggcgctgctccttgtaaatgtcaactacttccgcgggaaagaacgcgcaggcacttggccttgtgggcgctcacttgccccggaagtactgttgagttagcgcctcgccttccggggcggattgtctgtcgttgcagtagctgtaggaaggggaggccattttccgtttctgggaggagtgaggggcaacgggtcggagaaaaaggaaaaaagaagggctcagcgcctccccgccgggccgtggacagaggggcacagtttcggcaggcgggtgaggtcgctgagggcccgccggagatgttttccttgtcgagcacggtgcaaccccaggttacagttcctctgagtcatctcatcaatgccttccatacaccaaaaaacacttctgtttctctcagtggagtgtcagtttctcaaaaccagcatcgagatgtagttcctgagcatgaggctcccagcagtgagccttcacttaacttaagggaccttggattatctgaactaaaaattggacagattgatcagctggtagaaaatctacttcctggattttgtaaaggcaaaaacatttcttcccattggcatacatcccatgtctctgcacaatccttctttgaaaataaatatggtaacttagatatatttagtacattacgttcctcttgcttgtatcgacatcattcaagagctcttcaaagcatttgttcagatcttcagtactggccagttttcatacagtctcggggttttaaaactttgaaatcaaggacacgacgtctccagtctacctccgagagattagctgaaacacagaatatagcgccatcattcgtgaaggggtttcttttgcgggacagaggatcagatgttgagagtttggacaaactcatgaaaaccaaaaatatacctgaagctcaccaagatgcatttaaaactggttttgcggaaggttttctgaaagctcaagcactcacacaaaaaaccaatgattccctaaggcgaacccgtctgattctcttcgttctgctgctattcggcatttatggacttctaaaaaacccatttttatctgtccgcttccggacaacaacagggcttgattctgcagtagatcctgtccagatgaaaaatgtcacctttgaacatgttaaaggggtggaggaagctaaacaagaattacaggaagttgttgaattcttgaaaaatccacaaaaatttactattcttggaggtaaacttccaaaaggaattcttttagttggacccccagggactggaaagacacttcttgcccgagctgtggcgggagaagctgatgttcctttttattatgcttctggatccgaatttgatgagatgtttgtgggtgtgggagccagccgtatcagaaatctttttagggaagcaaaggcgaatgctccttgtgttatatttattgatgaattagattctgttggtgggaagagaattgaatctccaatgcatccatattcaaggcagaccataaatcaacttcttgctgaaatggatggttttaaacccaatgaaggagttatcataataggagccacaaacttcccagaggcattagataatgccttaatacgtcctggtcgttttgacatgcaagttacagttccaaggccagatgtaaaaggtcgaacagaaattttgaaatggtatctcaataaaataaagtttgatcaatccgttgatccagaaattatagctcgaggtactgttggcttttccggagcagagttggagaatcttgtgaaccaggctgcattaaaagcagctgttgatggaaaagaaatggttaccatgaaggagctggagttttccaaagacaaaattctaatggggcctgaaagaagaagtgtggaaattgataacaaaaacaaaaccatcacagcatatcatgaatctggtcatgccattattgcatattacacaaaagatgcaatgcctatcaacaaagctacaatcatgccacgggggccaacacttggacatgtgtccctgttacctgagaatgacagatggaatgaaactagagcccagctgcttgcacaaatggatgttagtatgggaggaagagtggcagaggagcttatatttggaaccgaccatattacaacaggtgcttccagtgattttgataatgccactaaaatagcaaagcggatggttaccaaatttggaatgagtgaaaagcttggagttatgacctacagtgatacagggaaactaagtccagaaacccaatctgccatcgaacaagaaataagaatccttctaagggactcatatgaacgagcaaaacatatcttgaaaactcatgcaaaggagcataagaatctcgcagaagctttattgacctatgagactttggatgccaaagagattcaaattgttcttgaggggaaaaagttggaagtgagatgataactctcttgatatggatgcttgctggttttattgcaagaatataagtagcattgcagtagtctacttttacaacgctttcccctcattcttgatgtggtgtaattgaagggtgtgaaatgctttgtcaatcatttgtcacatttatccagtttgggttattctcattatgacacctattgcaaattagcatcccatggcaaatatattttgaaaaaataaagaactatcaggattgaaaacagctcttttgaggaatgtcaattagttattaagttgaaagtaattaatgattttatgtttggttactctactagatttgataaaaattgtgcctttagccttctatatacatcagtggaaacttaagatgcagtaattatgttccagattgaccatgaataaaatattttttaatctaaatgtagagaagttgggattaaaagcagtctcggaaacacagagccaggaatatagccttttggcatggtgccatggctcacatctgtaatcccagcacttttggaggctgaggcgggtggattgcttgaggccaggagttcgagaccagcctggccaacgtggtgaaacgctgtctctactaaaatacaaaaaaatagggctgggcgcggttgctcacgcctgtaatcccagcacttttcagaggccaaggcgggcaaatcacctgaggtcaagagtttgagaccagcctggccaacatggtgaaaccccatctctactaaacatgcaaaaattacctgggcatggtggcaggtgcttataatcccagctactctgggggccaaggcaggagaattgcttgagcctgggagatggaggttgcagtgagctgagatcatgccactgcactccagcctgggcaacagagcaagactctgcctcaaaaaaaaattaaaataaatttaaatacaaaaaaaaatagccaggtgtggggtgcatgcctggaatcccagctacttgagaggctgaggcacgagaattgcttgaacccaggaggtggaggttgcagtgagccaagatcacaggagccactgcactccagcctgggtgacagagtgagactctgtctcaaaaaaaaattaaataaattattataacctttcagaaatgctgtgtgcattttcatgttcttttttttagcattactgtcactctccctaatgaaatgtacttcagagaagcagtattttgttaaataaatacataaccaaaaaaaaaaaaaaaaaaaaaaaaaaaatttttgggccgccgggccccgaaaaagtttttaaaccaatttcggtgttggggccgccgcggcccccatgtgtttatgtgaacagtggtgccaaaggggtgttcccaaggagaaaacccggtgctcctaggacactcgtgggcgtgggttttcttcccccatattaaaagaggcgccgtgtgggaaaccccgatggtttctgagaacaacccggaaggggatccggaggctatagaggggttctacaaagagggagctccagagagagtggatttaaattgcccg

SEQ ID NO: 319674 - DNA, 3645 bp, Homo sapiens
ggagggggcgtcgggaaagccccgacttcgcagccttacactcttcgtgggcggcgaccgcggccccactgacatcattcctcatgagggaggaggcacaaacagttctgggccgaccagaaaaaggacgactgggacttgactctgaatcgcaggatttgaagagatttctcctggcttcccaacgaggctggtgggaagcggtcctcctcccatacacgacctcccaccctcgcgaggcgtagaaaccagttctgactgtacagtaaagcgagggccagggctgaggtctggaagctaatgaaagcacagaaagtgtcgaaactggatgagcaggaagcgagtggcctcccctgtcatctgacgttttcccaggatgtaatttgcctgactgaaacagatcaggaccaacagggagagttttcgatttagtgtgaggaaaagagcactaaattgtagcaaaagaccttattgctcaaggcccagtcagaagatttcataaggaagctgtagaaagtcttaagaggaaatcagccgggcgtggtggcgggcacctgtaatcccagctactccggaggctgaggcaggagaatcgcttgaacccggggagcagaggttgcagtgagccgagatcgcgccactgtacgccagcctgggcgaaagaacgaaactccgtctccaaaaaaaaaaaaaacgaagaaaaagtccaaagagggtaaaggctgttctccccttaaaaaacagctaaagacctttgggggcgctgctccttgtaaatgtcaactacttccgcgggaaagaacgcgcaggcacttggccttgtgggcgctcacttgccccggaagtactgttgagttagcgcctcgccttccggggcggattgtctgtcgttgcagtagctgtaggaaggggaggccattttccgtttctgggaggagtgaggggcaacgggtcggagaaaaaggaaaaaagaagggctcagcgcctccccgccgggccgtggacagaggggcacagtttcggcaggcgggtgaggtcgctgagggcccgccggagatgttttccttgtcgagcacggtgcaaccccaggttacagttcctctgagtcatctcatcaatgccttccatacaccaaaaaacacttctgtttctctcagtggagtgtcagtttctcaaaaccagcatcgagatgtagttcctgagcatgaggctcccagcagtgagccttcacttaacttaagggaccttggattatctgaactaaaaattggacagattgatcagctggtagaaaatctacttcctggattttgtaaaggcaaaaacatttcttcccattggcatacatcccatgtctctgcacaatccttctttgaaaataaatatggtaacttagatatatttagtacattacgttcctcttgcttgtatcgacatcattcaagagctcttcaaagcatttgttcagatcttcagtactggccagttttcatacagtctcggggttttaaaactttgaaatcaaggacacgacgtctccagtctacctccgagagattagctgaaacacagaatatagcgccatcattcgtgaaggggtttcttttgcgggacagaggatcagatgttgagagtttggacaaactcatgaaaaccaaaaatatacctgaagctcaccaagatgcatttaaaactggttttgcggaaggttttctgaaagctcaagcactcacacaaaaaaccaatgattccctaaggcgaacccgtctgattctcttcgttctgctgctattcggcatttatggacttctaaaaaacccatttttatctgtccgcttccggacaacaacagggcttgattctgcagtagatcctgtccagatgaaaaatgtcacctttgaacatgttaaaggggtggaggaagctaaacaagaattacaggaagttgttgaattcttgaaaaatccacaaaaatttactattcttggaggtaaacttccaaaaggaattcttttagttggacccccagggactggaaagacacttcttgcccgagctgtggcgggagaagctgatgttcctttttattatgcttctggatccgaatttgatgagatgtttgtgggtgtgggagccagccgtatcagaaatctttttagggaagcaaaggcgaatgctccttgtgttatatttattgatgaattagattctgttggtgggaagagaattgaatctccaatgcatccatattcaaggcagaccataaatcaacttcttgctgaaatggatggttttaaacccaatgaaggagttatcataataggagccacaaacttcccagaggcattagataatgccttaatacgtcctggtcgttttgacatgcaagttacagttccaaggccagatgtaaaaggtcgaacagaaattttgaaatggtatctcaataaaataaagtttgatcaatccgttgatccagaaattatagctcgaggtactgttggcttttccggagcagagttggagaatcttgtgaaccaggctgcattaaaagcagctgttgatggaaaagaaatggttaccatgaaggagctggagttttccaaagacaaaattctaatggggcctgaaagaagaagtgtggaaattgataacaaaaacaaaaccatcacagcatatcatgaatctggtcatgccattattgcatattacacaaaagatgcaatgcctatcaacaaagctacaatcatgccacgggggccaacacttggacatgtgtccctgttacctgagaatgacagatggaatgaaactagagcccagctgcttgcacaaatggatgttagtatgggaggaagagtggcagaggagcttatatttggaaccgaccatattacaacaggtgcttccagtgattttgataatgccactaaaatagcaaagcggatggttaccaaatttggaatgagtgaaaagcttggagttatgacctacagtgatacagggaaactaagtccagaaacccaatctgccatcgaacaagaaataagaatccttctaagggactcatatgaacgagcaaaacatatcttgaaaactcatgcaaaggagcataagaatctcgcagaagctttattgacctatgagactttggatgccaaagagattcaaattgttcttgaggggaaaaagttggaagtgagatgataactctcttgatatggatgcttgctggttttattgcaagaatataagtagcattgcagtagtctacttttacaacgctttcccctcattcttgatgtggtgtaattgaagggtgtgaaatgctttgtcaatcatttgtcacatttatccagtttgggttattctcattatgacacctattgcaaattagcatcccatggcaaatatattttgaaaaaataaagaactatcaggattgaaaacagctcttttgaggaatgtcaattagttattaagttgaaagtaattaatgattttatgtttggttactctactagatttgataaaaattgtgcctttagccttctatatacatcagtggaaacttaagatgcggtgtttgagattgcggtgtttgggattgcggtgtttgagattgcggtggttggggtaccgagc

SEQ ID NO: 319675 - DNA, 4188 bp, Homo sapiens
atatagccttaaaaatattaataagggcatttaataacttgattcattaccttgatcccattaactattttccttgatagatcttatgttcctcaagtggggattctcttgccacagaatttggagagagaatatagtttatttgagtattaaattatgtttaatctcttctttattcctacagcttaaaattggaattatatctattattttgaccaaatatattttagtcttcttttagtacatggatattatctttcaagttctcttttaataaaccagccaagtctttttttaaccataaatttcattgaagtttaacaaattcacacaacagtgcacaaatccataaattttcacaaactgtctgtgttataagtacccagctcaagaaatagaaccttagcagaagcccagaacctccttgatgcctccttctggttactaacctagggacaatttcctgtctaataccatacatgaattttccctatttttgaattttagataaatgtaatccatatagaatatcctcttttgtatgaggcttcttttattcaacatgtttgtgagatccatctatgttacttggagttgaggtttatttatcctttattgcatagtatcccattataagaatactacaacacggtgcaattacactactttagggtggacatttatttctagtttttggttcaaatacagctggtgtgactatttttatacaagtctcttggtgaacatatgtacacgcttctcctggacctaggaatggacaaagctttgttttgtatttttttaaatactctgaaaagaaaatgctatgtttttaaccattaacttgattaaaacattattacatttttaattatttaatcagaataactttcaaagatcatttcaagtctaacaaaaaaacataactttgttctttaataagtgtaatatttcctggaaatatgcctgggaatttttcttgaaataataagcgaatcttgacattaattggacattttcagaatgccctttggcgtgaagctatgtttcatgttttagaatgctcctctctaggtactttctttttaaccctgtccaatgtacttgacttttgttttctcactgagaaaatgaaagttcagaatgatttttttggggatagtaaggagactttgcataatgggaaataatggtcaggggaaaaccctttgttttataaggggccatttttgtatgctttttttactgaaacagagaaggtcaggttaattccatatccaaattaaatttatgattttcaaaagggaagccttgataatctaaccaaacgtgtccattatctaaagttatttggaaaattgtgtcactttaggtggaggaagctaaacaagaattacaggaagttgttgaattcttgaaaaatccacaaaaatttactattcttggaggtaaacttccaaaaggaattcttttagttggacccccagggactggaaagacacttcttgcccgagctgtggcgggagaagctgatgttcctttttattatgcttctggatccgaatttgatgagatgtttgtgggtgtgggagccagccgtatcagaaatctttttagggaagcaaaggcgaatgctccttgtgttatatttattgatgaattagattctgttggtgggaagagaattgaatctccaatgcatccatattcaaggcagaccataaatcaacttcttgctgaaatggatggttttaaacccaatgaaggagttatcataataggagccacaaacttcccagaggcattagataatgccttaatacgtcctggtcgttttgacatgcaagttacagttccaaggccagatgtaaaaggtcgaacagaaattttgaaatggtatctcaataaaataaagtttgatcaatccgttgatccagaaattatagctcgaggtactgttggcttttccggagcagagttggagaatcttgtgaaccaggctgcattaaaagcagctgttgatggaaaagaaatggttaccatgaaggagctggagttttccaaagacaaaattctaatggggcctgaaagaagaagtgtggaaattgataacaaaaacaaaaccatcacagcatatcatgaatctggtcatgccattattgcatattacacaaaagatgcaatgcctatcaacaaagctacaatcatgccacgggggccaacacttggacatgtgtccctgttacctgagaatgacagatggaatgaaactagagcccagctgcttgcacaaatggatgttagtatgggaggaagagtggcagaggagcttatatttggaaccgaccatattacaacaggtgcttccagtgattttgataatgccactaaaatagcaaagcggatggttaccaaatttggaatgagtgaaaagcttggagttatgacctacagtgatacagggaaactaagtccagaaacccaatctgccatcgaacaagaaataagaatccttctaagggactcatatgaacgagcaaaacatatcttgaaaactcatgcaaaggagcataagaatctcgcagaagctttattgacctatgagactttggatgccaaagagattcaaattgttcttgaggggaaaaagttggaagtgagatgataactctcttgatatggatgcttgctggttttattgcaagaatataagtagcattgcagtagtctacttttacaacgctttcccctcattcttgatgtggtgtaattgaagggtgtgaaatgctttgtcaatcatttgtcacatttatccagtttgggttattctcattatgacacctattgcaaattagcatcccatggcaaatatattttgaaaaaataaagaactatcaggattgaaaacagctcttttgaggaatgtcaattagttattaagttgaaagtaattaatgattttatgtttggttactctactagatttgataaaaattgtgcctttagccttctatatacatcagtggaaacttaagatgcagtaattatgttccagattgaccatgaataaaatattttttaatctaaatgtagagaagttgggattaaaagcagtctcggaaacacagagccaggaatatagccttttggcatggtgccatggctcacatctgtaatcccagcacttttggaggctgaggcgggtggattgcttgaggccaggagttcgagaccagcctggccaacgtggtgaaacgctgtctctactaaaatacaaaaaaatagggctgggcgcggttgctcacgcctgtaatcccagcacttttcagaggccaaggcgggcaaatcacctgaggtcaagagtttgagaccagcctggccaacatggtgaaaccccatctctactaaacatgcaaaaattacctgggcatggtggcaggtgcttataatcccagctactctgggggccaaggcaggagaattgcttgagcctgggagatggaggttgcagtgagctgagatcatgccactgcactccagcctgggcaacagagcaagactctgcctcaaaaaaaaattaaaataaatttaaatacaaaaaaaaatagccaggtgtggggtgcatgcctggaatcccagctacttgagaggctgaggcacgagaattgcttgaacccaggaggtggaggttgcagtgagccaagatcacaggagccactgcactccagcctgggtgacagagtgagactctgtctcaaaaaaaaattaaataaattattataacctttcagaaatgctgtgtgcattttcatgttcttttttttagcattactgtcactctccctaatgaaatgtacttcagagaagcagtattttgttaaataaatacataacctcattctgaataatgtccctcattttgactataactgtgcttggtttcaaaagcaaaattaaacaaaaatctcagtcccctccgaagtgaactttgtgttaccctgcgtcagaaatgccaagttgtgtttacttttcattcagattttgtgaatatgaacatgctgttataggatctacagatgaatatttaactcaatagaaaaattattttagaacacattgtattggtattacaaccagattatattcttgacgttgacttcattaaaattatctacaatttcctaataa

SEQ ID NO: 319676 - DNA, 3447 bp, Homo sapiens
ggagggggcgtcgggaaagccccgacttcgcagccttacactcttcgtgggcggcgaccgcggccccactgacatcattcctcatgagggaggaggcacaaacagttctgggccgaccagaaaaaggacgactgggacttgactctgaatcgcaggatttgaagagatttctcctggcttcccaacgaggctggtgggaagcggtcctcctcccatacacgacctcccaccctcgcgaggcgtagaaaccagttctgactgtacagtaaagcgagggccagggctgaggtctggaagctaatgaaagcacagaaagtgtcgaaactggatgagcaggaagcgagtggcctcccctgtcatctgacgttttcccaggatgtaatttgcctgactgaaacagatcaggaccaacagggagagttttcgatttagtgtgaggaaaagagcactaaattgtagcaaaagaccttattgctcaaggcccagtcagaagatttcataaggaagctgtagaaagtcttaagaggaaatcagccgggcgtggtggcgggcacctgtaatcccagctactccggaggctgaggcaggagaatcgcttgaacccggggagcagaggttgcagtgagccgagatcgcgccactgtacgccagcctgggcgaaagaacgaaactccgtctccaaaaaaaaaaaaaacgaagaaaaagtccaaagagggtaaaggctgttctccccttaaaaaacagctaaagacctttgggggcgctgctccttgtaaatgtcaactacttccgcgggaaagaacgcgcaggcacttggccttgtgggcgctcacttgccccggaagtactgttgagttagcgcctcgccttccggggcggattgtctgtcgttgcagtagctgtaggaaggggaggccattttccgtttctgggaggagtgaggggcaacgggtcggagaaaaaggaaaaaagaagggctcagcgcctccccgccgggccgtggacagaggggcacagtttcggcaggcgggtgaggtcgctgagggcccgccggagatgttttccttgtcgagcacggtgcaaccccaggttacagttcctctgagtcatctcatcaatgccttccatacaccaaaaaacacttctgtttctctcagtggagtgtcagtttctcaaaaccagcatcgagatgtagttcctgagcatgaggctcccagcagtgagccttcacttaacttaagggaccttggattatctgaactaaaaattggacagattgatcagctggtagaaaatctacttcctggattttgtaaaggcaaaaacatttcttcccattggcatacatcccatgtctctgcacaatccttctttgaaaataaatatggtaacttagatatatttagtacattacgttcctcttgcttgtatcgacatcattcaagagctcttcaaagcatttgttcagatcttcagtactggccagttttcatacagtctcggggttttaaaactttgaaatcaaggacacgacgtctccagtctacctccgagagattagctgaaacacagaatatagcgccatcattcgtgaaggggtttcttttgcgggacagaggatcagatgttgagagtttggacaaactcatgaaaaccaaaaatatacctgaagctcaccaagatgcatttaaaactggttttgcggaaggttttctgaaagctcaagcactcacacaaaaaaccaatgattccctaaggcgaacccgtctgattctcttcgttctgctgctattcggcatttatggacttctaaaaaacccatttttatctgtccgcttccggacaacaacagggcttgattctgcagtagatcctgtccagatgaaaaatgtcacctttgaacatgttaaaggggtggaggaagctaaacaagaattacaggaagttgttgaattcttgaaaaatccacaaaaatttactattcttggaggtaaacttccaaaaggaattcttttagttggacccccagggactggaaagacacttcttgcccgagctgtggcgggagaagctgatgttcctttttattatgcttctggatccgaatttgatgagatgtttgtgggtgtgggagccagccgtatcagaaatctttttagggaagcaaaggcgaatgctccttgtgttatatttattgatgaattagattctgttggtgggaagagaattgaatctccaatgcatccatattcaaggcagaccataaatcaacttcttgctgaaatggatggttttaaacccaatgaaggagttatcataataggagccacaaacttcccagaggcattagataatgccttaatacgtcctggtcgttttgacatgcaagttacagttccaaggccagatgtaaaaggtcgaacagaaattttgaaatggtatctcaataaaataaagtttgatcaatccgttgatccagaaattatagctcgaggtactgttggcttttccggagcagagttggagaatcttgtgaaccaggctgcattaaaagcagctgttgatggaaaagaaatggttaccatgaaggagctggagttttccaaagacaaaattctaatggggcctgaaagaagaagtgtggaaattgataacaaaaacaaaaccatcacagcatatcatgaatctggtcatgccattattgcatattacacaaaagatgcaatgcctatcaacaaagctacaatcatgccacgggggccaacacttggacatgtgtccctgttacctgagaatgacagatggaatgaaactagagcccagctgcttgcacaaatggatgttagtatgggaggaagagtggcagaggagcttatatttggaaccgaccatattacaacaggtgcttccagtgattttgataatgccactaaaatagcaaagcggatggttaccaaatttggaatgagtgaaaagcttggagttatgacctacagtgatacagggaaactaagtccagaaacccaatctgccatcgaacaagaaataagaatccttctaagggactcatatgaacgagcaaaacatatcttgaaaactcatgcaaaggagcataagaatctcgcagaagctttattgacctatgagactttggatgccaaagagattcaaattgttcttgaggggaaaaagttggaagtgagatgataactctcttgatatggatgcttgctggttttattgcaagaatataagtagcattgcagtagtctacttttacaacgctttcccctcattcttgatgtggtgtaattgaagggtgtgaaatgctttgtcaatcatttgtcacatttatccagtttgggttattctcattatgacacctattgcaaattagcatcccatggcaaatatattttgaaaaaataaagaactatcaggattgaa

SEQ ID NO: 319677 - DNA, 2481 bp, Homo sapiens
acgttaatcacatccatgccagacaatgaattgtattaatggtcaggcatgaatattcgatgacttgagcatcaactccccatcagcgcttcaaatattgccgggatcaccctacggtcgtctggacagtgctacgttgactagtgcccaaggccgtcagttaaaaggtctcgagagtgagaagactctggctctcaataaaataaagtttgatcaatccgttgatccagaaattatagctcgaggtactgttggcttttccggagcagagttggagaatcttgtgaaccaggctgcattaaaagcagctgttgatggaaaagaaatggttaccatgaaggagctggagttttccaaagacaaaattctaatggggcctgaaagaagaagtgtggaaattgataacaaaaacaaaaccatcacagcatatcatgaatctggtcatgccattattgcatattacacaaaagatgcaatgcctatcaacaaagctacaatcatgccacgggggccaacacttggacatgtgtccctgttacctgagaatgacagatggaatgaaactagagcccagctgcttgcacaaatggatgttagtatgggaggaagagtggcagaggagcttatatttggaaccgaccatattacaacaggtgcttccagtgattttgataatgccactaaaatagcaaagcggatggttaccaaatttggaatgagtgaaaagcttggagttatgacctacagtgatacagggaaactaagtccagaaacccaatctgccatcgaacaagaaataagaatccttctaagggactcatatgaacgagcaaaacatatcttgaaaactcatgcaaaggagcataagaatctcgcagaagctttattgacctatgagactttggatgccaaagagattcaaattgttcttgaggggaaaaagttggaagtgagatgataactctcttgatatggatgcttgctggttttattgcaagaatataagtagcattgcagtagtctacttttacaacgctttcccctcattcttgatgtggtgtaattgaagggtgtgaaatgctttgtcaatcatttgtcacatttatccagtttgggttattctcattatgacacctattgcaaattagcatcccatggcaaatatattttgaaaaaataaagaactatcaggattgaaaacagctcttttgaggaatgtcaattagttattaagttgaaagtaattaatgattttatgtttggttactctactagatttgataaaaattgtgcctttagccttctatatacatcagtggaaacttaagatgcagtaattatgttccagattgaccatgaataaaatattttttaatctaaatgtagagaagttgggattaaaagcagtctcggaaacacagagccaggaatatagccttttggcatggtgccatggctcacatctgtaatcccagcacttttggaggctgaggcgggtggattgcttgaggccaggagttcgagaccagcctggccaacgtggtgaaacgctgtctctactaaaatacaaaaaaatagggctgggcgcggttgctcacgcctgtaatcccagcacttttcagaggccaaggcgggcaaatcacctgaggtcaagagtttgagaccagcctggccaacatggtgaaaccccatctctactaaacatgcaaaaattacctgggcatggtggcaggtgcttataatcccagctactctgggggccaaggcaggagaattgcttgagcctgggagatggaggttgcagtgagctgagatcatgccactgcactccagcctgggcaacagagcaagactctgcctcaaaaaaaaattaaaataaatttaaatacaaaaaaaaatagccaggtgtggggtgcatgcctggaatcccagctacttgagaggctgaggcacgagaattgcttgaacccaggaggtggaggttgcagtgagccaagatcacaggagccactgcactccagcctgggtgacagagtgagactctgtctcaaaaaaaaattaaataaattattataacctttcagaaatgctgtgtgcattttcatgttcttttttttagcattactgtcactctccctaatgaaatgtacttcagagaagcagtattttgttaaataaatacataacctcattctgaataatgtccctcattttgactataactgtgcttggtttcaaaagcaaaattaaacaaaaatctcagtcccctccgaagtgaactttgtgttaccctgcgtcagaaatgccaagttgtgtttacttttcattcagattttgtgaatatgaacatgctgttataggatctacagatgaatatttaactcaatagaaaaattattttagaacacattgtattggtattacaaccagattatattcttgacgttgacttcattaaaattatctacaatttcctaataa

SEQ ID NO: 319678 - DNA, 4707 bp, Homo sapiens
ggagggggcgtcgggaaagccccgacttcgcagccttacactcttcgtgggcggcgaccgcggccccactgacatcattcctcatgagggaggaggcacaaacagttctgggccgaccagaaaaaggacgactgggacttgactctgaatcgcaggatttgaagagatttctcctggcttcccaacgaggctggtgggaagcggtcctcctcccatacacgacctcccaccctcgcgaggcgtagaaaccagttctgactgtacagtaaagcgagggccagggctgaggtctggaagctaatgaaagcacagaaagtgtcgaaactggatgagcaggaagcgagtggcctcccctgtcatctgacgttttcccaggatgtaatttgcctgactgaaacagatcaggaccaacagggagagttttcgatttagtgtgaggaaaagagcactaaattgtagcaaaagaccttattgctcaaggcccagtcagaagatttcataaggaagctgtagaaagtcttaagaggaaatcagccgggcgtggtggcgggcacctgtaatcccagctactccggaggctgaggcaggagaatcgcttgaacccggggagcagaggttgcagtgagccgagatcgcgccactgtacgccagcctgggcgaaagaacgaaactccgtctccaaaaaaaaaaaaaacgaagaaaaagtccaaagagggtaaaggctgttctccccttaaaaaacagctaaagacctttgggggcgctgctccttgtaaatgtcaactacttccgcgggaaagaacgcgcaggcacttggccttgtgggcgctcacttgccccggaagtactgttgagttagcgcctcgccttccggggcggattgtctgtcgttgcagtagctgtaggaaggggaggccattttccgtttctgggaggagtgaggggcaacgggtcggagaaaaaggaaaaaagaagggctcagcgcctccccgccgggccgtggacagaggggcacagtttcggcaggcgggtgaggtcgctgagggcccgccggagatgttttccttgtcgagcacggtgcaaccccaggttacagttcctctgagtcatctcatcaatgccttccatacaccaaaaaacacttctgtttctctcagtggagtgtcagtttctcaaaaccagcatcgagatgtagttcctgagcatgaggctcccagcagtgagtgtatgttcagtgacttcctgacgaagcttaacattgtttcaattggcaaaggaaaaatattcgaagggtacagatccatgttcatggagccagcaaaaaggatgaagaagagcttggacacaaccgataactggcacatccgtccagaacccttctccctctcaatccctccttcacttaacttaagggaccttggattatctgaactaaaaattggacagattgatcagctggtagaaaatctacttcctggattttgtaaaggcaaaaacatttcttcccattggcatacatcccatgtctctgcacaatccttctttgaaaataaatatggtaacttagatatatttagtacattacgttcctcttgcttgtatcgacatcattcaagagctcttcaaagcatttgttcagatcttcagtactggccagttttcatacagtctcggggttttaaaactttgaaatcaaggacacgacgtctccagtctacctccgagagattagctgaaacacagaatatagcgccatcattcgtgaaggggtttcttttgcgggacagaggatcagatgttgagagtttggacaaactcatgaaaaccaaaaatatacctgaagctcaccaagatgcatttaaaactggttttgcggaaggttttctgaaagctcaagcactcacacaaaaaaccaatgattccctaaggcgaacccgtctgattctcttcgttctgctgctattcggcatttatggacttctaaaaaacccatttttatctgtccgcttccggacaacaacagggcttgattctgcagtagatcctgtccagatgaaaaatgtcacctttgaacatgttaaaggggtggaggaagctaaacaagaattacaggaagttgttgaattcttgaaaaatccacaaaaatttactattcttggaggtaaacttccaaaaggaattcttttagttggacccccagggactggaaagacacttcttgcccgagctgtggcgggagaagctgatgttcctttttattatgcttctggatccgaatttgatgagatgtttgtgggtgtgggagccagccgtatcagaaatctttttagggaagcaaaggcgaatgctccttgtgttatatttattgatgaattagattctgttggtgggaagagaattgaatctccaatgcatccatattcaaggcagaccataaatcaacttcttgctgaaatggatggttttaaacccaatgaaggagttatcataataggagccacaaacttcccagaggcattagataatgccttaatacgtcctggtcgttttgacatgcaagttacagttccaaggccagatgtaaaaggtcgaacagaaattttgaaatggtatctcaataaaataaagtttgatcaatccgttgatccagaaattatagctcgaggtactgttggcttttccggagcagagttggagaatcttgtgaaccaggctgcattaaaagcagctgttgatggaaaagaaatggttaccatgaaggagctggagttttccaaagacaaaattctaatggggcctgaaagaagaagtgtggaaattgataacaaaaacaaaaccatcacagcatatcatgaatctggtcatgccattattgcatattacacaaaagatgcaatgcctatcaacaaagctacaatcatgccacgggggccaacacttggacatgtgtccctgttacctgagaatgacagatggaatgaaactagagcccagctgcttgcacaaatggatgttagtatgggaggaagagtggcagaggagcttatatttggaaccgaccatattacaacaggtgcttccagtgattttgataatgccactaaaatagcaaagcggatggttaccaaatttggaatgagtgaaaagcttggagttatgacctacagtgatacagggaaactaagtccagaaacccaatctgccatcgaacaagaaataagaatccttctaagggactcatatgaacgagcaaaacatatcttgaaaactcattcttgatgtggtgtaattgaagggtgtgaaatgctttgtcaatcatttgtcacatttatccagtttgggttattctcattatgacacctattgcaaattagcatcccatggcaaatatattttgaaaaaataaagaactatcaggattgaaaacagctcttttgaggaatgtcaattagttattaagttgaaagtaattaatgattttatgtttggttactctactagatttgataaaaattgtgcctttagccttctatatacatcagtggaaacttaagatgcagtaattatgttccagattgaccatgaataaaatattttttaatctaaatgtagagaagttgggattaaaagcagtctcggaaacacagagccaggaatatagccttttggcatggtgccatggctcacatctgtaatcccagcacttttggaggctgaggcgggtggattgcttgaggccaggagttcgagaccagcctggccaacgtggtgaaacgctgtctctactaaaatacaaaaaaatagggctgggcgcggttgctcacgcctgtaatcccagcacttttcagaggccaaggcgggcaaatcacctgaggtcaagagtttgagaccagcctggccaacatggtgaaaccccatctctactaaacatgcaaaaattacctgggcatggtggcaggtgcttataatcccagctactctgggggccaaggcaggagaattgcttgagcctgggagatggaggttgcagtgagctgagatcatgccactgcactccagcctgggcaacagagcaagactctgcctcaaaaaaaaattaaaataaatttaaatacaaaaaaaaatagccaggtgtggggtgcatgcctggaatcccagctacttgagaggctgaggcacgagaattgcttgaacccaggaggtggaggttgcagtgagccaagatcacaggagccactgcactccagcctgggtgacagagtgagactctgtctcaaaaaaaaattaaataaattattataacctttcagaaatgctgtgtgcattttcatgttcttttttttagcattactgtcactctccctaatgaaatgtacttcagagaagcagtattttgttaaataaatacataacctcattctgaataatgtccctcattttgactataactgtgcttggtttcaaaagcaaaattaaacaaaaatctcagtcccctccgaagtgaactttgtgttaccctgcgtcagaaatgccaagttgtgtttacttttcattcagattttgtgaatatgaacatgctgttataggatctacagatgaatatttaactcaatagaaaaattattttagaacacattgtattggtattacaaccagattatattcttgacgttgacttcattaaaattatctacaatttcctaataa

SEQ ID NO: 319679 - DNA, 1794 bp, Homo sapiens
agcggcgccctttttttataccatgggaatgagtgaaaagcttggagttatgacctacagtgatacagggaaactaagtccagaaacccaatctgccatcgaacaagaaataagaatccttctaagggactcatatgaacgagcaaaacatatcttgaaaactcatgcaaaggagcataagaatctcgcagaagctttattgacctatgagactttggatgccaaagagattcaaattgttcttgaggggaaaaagttggaagtgagatgataactctcttgatatggatgcttgctggttttattgcaagaatataagtagcattgcagtagtctacttttacaacgctttcccctcattcttgatgtggtgtaattgaagggtgtgaaatgctttgtcaatcatttgtcacatttatccagtttgggttattctcattatgacacctattgcaaattagcatcccatggcaaatatattttgaaaaaataaagaactatcaggattgaaaacagctcttttgaggaatgtcaattagttattaagttgaaagtaattaatgattttatgtttggttactctactagatttgataaaaattgtgcctttagccttctatatacatcagtggaaacttaagatgcagtaattatgttccagattgaccatgaataaaatattttttaatctaaatgtagagaagttgggattaaaagcagtctcggaaacacagagccaggaatatagccttttggcatggtgccatggctcacatctgtaatcccagcacttttggaggctgaggcgggtggattgcttgaggccaggagttcgagaccagcctggccaacgtggtgaaacgctgtctctactaaaatacaaaaaaatagggctgggcgcggttgctcacgcctgtaatcccagcacttttcagaggccaaggcgggcaaatcacctgaggtcaagagtttgagaccagcctggccaacatggtgaaaccccatctctactaaacatgcaaaaattacctgggcatggtggcaggtgcttataatcccagctactctgggggccaaggcaggagaattgcttgagcctgggagatggaggttgcagtgagctgagatcatgccactgcactccagcctgggcaacagagcaagactctgcctcaaaaaaaaattaaaataaatttaaatacaaaaaaaaatagccaggtgtggggtgcatgcctggaatcccagctacttgagaggctgaggcacgagaattgcttgaacccaggaggtggaggttgcagtgagccaagatcacaggagccactgcactccagcctgggtgacagagtgagactctgtctcaaaaaaaaattaaataaattattataacctttcagaaatgctgtgtgcattttcatgttcttttttttagcattactgtcactctccctaatgaaatgtacttcagagaagcagtattttgttaaataaatacataacctcattctgaataatgtccctcattttgactataactgtgcttggtttcaaaagcaaaattaaacaaaaatctcagtcccctccgaagtgaactttgtgttaccctgcgtcagaaatgccaagttgtgtttacttttcattcagattttgtgaatatgaacatgctgttataggatctacagatgaatatttaactcaatagaaaaattattttagaacacattgtattggtattacaaccagattatattcttgacgttgacttcattaaaattatctacaatttcctaataa

SEQ ID NO: 319680 - DNA, 3023 bp, Homo sapiens
  misc_feature (1527)..(1527): n is a, c, g, or t
  misc_feature (2854)..(2854): n is a, c, g, or t
ggagggggcgtcgggaaagccccgacttcgcagccttacactcttcgtgggcggcgaccgcggccccactgacatcattcctcatgagggaggaggcacaaacagttctgggccgaccagaaaaaggacgactgggacttgactctgaatcgcaggatttgaagagatttctcctggcttcccaacgaggctggtgggaagcggtcctcctcccatacacgacctcccaccctcgcgaggcgtagaaaccagttctgactgtacagtaaagcgagggccagggctgaggtctggaagctaatgaaagcacagaaagtgtcgaaactggatgagcaggaagcgagtggcctcccctgtcatctgacgttttcccaggatgtaatttgcctgactgaaacagatcaggaccaacagggagagttttcgatttagtgtgaggaaaagagcactaaattgtagcaaaagaccttattgctcaaggcccagtcagaagatttcataaggaagctgtagaaagtcttaagaggaaatcagccgggcgtggtggcgggcacctgtaatcccagctactccggaggctgaggcaggagaatcgcttgaacccggggagcagaggttgcagtgagccgagatcgcgccactgtacgccagcctgggcgaaagaacgaaactccgtctccaaaaaaaaaaaaaacgaagaaaaagtccaaagagggtaaaggctgttctccccttaaaaaacagctaaagacctttgggggcgctgctccttgtaaatgtcaactacttccgcgggaaagaacgcgcaggcacttggccttgtgggcgctcacttgccccggaagtactgttgagttagcgcctcgccttccggggcggattgtctgtcgttgcagtagctgtaggaaggggaggccattttccgtttctgggaggagtgaggggcaacgggtcggagaaaaaggaaaaaagaagggctcagcgcctccccgccgggccgtggacagaggggcacagtttcggcaggcgggtgaggtcgctgagggcccgccggagatgttttccttgtcgagcacggtgcaaccccaggttacagttcctctgagtcatctcatcaatgccttccatacaccaaaaaacacttctgtttctctcagtggagtgtcagtttctcaaaaccagcatcgagatgtagttcctgagcatgaggctcccagcagtgagtgtatgttcagtgacttcctgacgaagcttaacattgtttcaattggcaaaggaaaaatattcgaagggtacagatccatgttcatggagccagcaaaaaggatgaagaagagcttggacacaaccgataactggcacatccgtccagaacccttctccctctcaatccctgtacactgcgggtttctccaaatgcctattgtctatgatttgttttgtccatcgttcttagtcacggcttagttcaggttcttgccatctttcacttgttccatcagccttctctctcatccagtctagttnctttgtttgtttgttttatcatttttaaattttttgtaaagacagggtcttgctttcttcaccaggctgatctcgaactcctggcctgaagcagtcctcccacctcagcctctcaaaagtgttgggattacaggctcgagccaccatgctaggccagtctatcttccttagttctccattttcttctataagacagaactaatcatgttacttagagaattaaattcaaacatggctcttcacagtttggccataacctatctctttaattttttctttccttgaattttttgagatattccagacccttggatggctttttgtttgcccccgtccctaagccgccttgatcatttttaatagcttaaaaagtacttttaagtattttatttcatcatgcctttaactgtcttttactatgtgctgtcatgttgtatgctaggatacgtagatgagtaaggcatgatctctgcctttgatccttactattaggaaataaggtgtattttatagttatgttagtattgagaaaatgaattctaagaatatgagttatagctaatttaaaaagtaccgtattcccagacatcagtccagagctatataatccgtgtccatgcctcttttaaaaaaaactttatttttagagacagggtctcccctttgtagcccaggctgaagtgcagtgatgctgtcatagctcactgcaacctccagctcctgggctcaaacatttctcctgagtagctggtgctgcgggtgcataccaccatgcccagctaatttttaaatttttcatcaagatgatgtcttaccatgttgctcaggctggtctcaaactcctggcctcaaacgatcttcccaccttagctgttttgggtttgagtaacatgtaattgttacttgcctttaagtgcctctctttcagctcatgtggacaagaaaataatccctatcctgttgtttaaaagtgggtatacacacatttttgtgatttttagacttttttgcctgattttcacacagttttgactttaattttcttctttattagaagatatgggtaactttagaacctctgagttcaaggaaggatctaagcaatgaggccagaggagtgagatgtcctatggtaaccaagcataccatttctttgtcaagtgggcttttgtttatggctgcttaggggcttaaaagctccatggactggtgaggattatcatttgaatggaatttccccaattcaagaaccttactattatcctccaatcagttctacactgttggggaaaatcccctggaccttatataacatactttgtaaccntgcagttagttactcttacactcttgtcattataaatgcttgatcaatagttgatagactagctcttgatcagagtacccttgtatggagagaaggaaaaaatgccatacatttcacttgattctgtgaaccataatgcttaggacagtagtggtttgggtttgattta

SEQ ID NO: 319681 - DNA, 4890 bp, Homo sapiens
ggagggggcgtcgggaaagccccgacttcgcagccttacactcttcgtgggcggcgaccgcggccccactgacatcattcctcatgagggaggaggcacaaacagttctgggccgaccagaaaaaggacgactgggacttgactctgaatcgcaggatttgaagagatttctcctggcttcccaacgaggctggtgggaagcggtcctcctcccatacacgacctcccaccctcgcgaggcgtagaaaccagttctgactgtacagtaaagcgagggccagggctgaggtctggaagctaatgaaagcacagaaagtgtcgaaactggatgagcaggaagcgagtggcctcccctgtcatctgacgttttcccaggatgtaatttgcctgactgaaacagatcaggaccaacagggagagttttcgatttagtgtgaggaaaagagcactaaattgtagcaaaagaccttattgctcaaggcccagtcagaagatttcataaggaagctgtagaaagtcttaagaggaaatcagccgggcgtggtggcgggcacctgtaatcccagctactccggaggctgaggcaggagaatcgcttgaacccggggagcagaggttgcagtgagccgagatcgcgccactgtacgccagcctgggcgaaagaacgaaactccgtctccaaaaaaaaaaaaaacgaagaaaaagtccaaagagggtaaaggctgttctccccttaaaaaacagctaaagacctttgggggcgctgctccttgtaaatgtcaactacttccgcgggaaagaacgcgcaggcacttggccttgtgggcgctcacttgccccggaagtactgttgagttagcgcctcgccttccggggcggattgtctgtcgttgcagtagctgtaggaaggggaggccattttccgtttctgggaggagtgaggggcaacgggtcggagaaaaaggaaaaaagaagggctcagcgcctccccgccgggccgtggacagaggggcacagtttcggcaggcgggtgaggtcgctgagggcccgccggagatgttttccttgtcgagcacggtgcaaccccaggttacagttcctctgagtcatctcatcaatgccttccatacaccaaaaaacacttctgtttctctcagtggagtgtcagtttctcaaaaccagcatcgagatgtagttcctgagcatgaggctcccagcagtgagccttcacttaacttaagggaccttggattatctgaactaaaaattggacagattgatcagctggtagaaaatctacttcctggattttgtaaaggcaaaaacatttcttcccattggcatacatcccatgtctctgcacaatccttctttgaaaataaatatggtaacttagatatatttagtacattacgttcctcttgcttgtatcgacatcattcaagagctcttcaaagcatttgttcagatcttcagtactggccagttttcatacagtctcggggttttaaaactttgaaatcaaggacacgacgtctccagtctacctccgagagattagctgaaacacagaatatagcgccatcattcgtgaaggggtttcttttgcgggacagaggatcagatgttgagagtttggacaaactcatgaaaaccaaaaatatacctgaagctcaccaagatgcatttaaaactggttttgcggaaggttttctgaaagctcaagcactcacacaaaaaaccaatgattccctaaggcgaacccgtctgattctcttcgttctgctgctattcggcatttatggacttctaaaaaacccatttttatctgtccgcttccggacaacaacagggcttgattctgcagtagatcctgtccagatgaaaaatgtcacctttgaacatgttaaaggggtggaggaagctaaacaagaattacaggaagttgttgaattcttgaaaaatccacaaaaatttactattcttggaggtaaacttccaaaaggaattcttttagttggacccccagggactggaaagacacttcttgcccgagctgtggcgggagaagctgatgttcctttttattatgcttctggatccgaatttgatgagatgtttgtgggtgtgggagccagccgtatcagaaatctttttagggaagcaaaggcgaatgctccttgtgttatatttattgatgaattagattctgttggtgggaagagaattgaatctccaatgcatccatattcaaggcagaccataaatcaacttcttgctgaaatggatggttttaaacccaatgaaggagttatcataataggagccacaaacttcccagaggcattagataatgccttaatacgtcctggtcgttttgacatgcaagttacagttccaaggccagatgtaaaaggtcgaacagaaattttgaaatggtatctcaataaaataaagtttgatcaatccgttgatccagaaattatagctcgaggtactgttggcttttccggagcagagttggagaatcttgtgaaccaggctgcattaaaagcagctgttgatggaaaagaaatggttaccatgaaggagctggagttttccaaagacaaaattctaatggggcctgaaagaagaagtgtggaaattgataacaaaaacaaaaccatcacagcatatcatgaatctggtcatgccattattgcatattacacaaaagatgcaatgcctatcaacaaagctacaatcatgccacgggggccaacacttggacatgtgtccctgttacctgagaatgacagatggaatgaaactagagcccagctgcttgcacaaatggatgttagtatgggaggaagagtggcagaggagcttatatttggaaccgaccatattacaacaggtgcttccagtgattttgataatgccactaaaatagcaaagcggatggttaccaaatttggaatgagtgaaaagcttggagttatgacctacagtgatacagggaaactaagtccagaaacccaatctgccatcgaacaagaaataagaatccttctaagggactcatatgaacgagcaaaacatatcttgaaaactcatgcaaaggagcataagaatctcgcagaagctttattgacctatgagactttggatgccaaagagattcaaattgttcttgaggggaaaaagttggaagtgagatgataactctcttgatatggatgcttgctggttttattgcaagaatataagtagcattgcagtagtctacttttacaacgctttcccctcattcttgatgtggtgtaattgaagggtgtgaaatgctttgtcaatcatttgtcacatttatccagtttgggttattctcattatgacacctattgcaaattagcatcccatggcaaatatattttgaaaaaataaagaactatcaggattgaaaacagctcttttgaggaatgtcaattagttattaagttgaaagtaattaatgattttatgtttggttactctactagatttgataaaaattgtgcctttagccttctatatacatcagtggaaacttaagatgcagtaattatgttccagattgaccatgaataaaatattttttaatctaaatgtagagaagttgggattaaaagcagtctcggaaacacagagccaggaatatagccttttggcatggtgccatggctcacatctgtaatcccagcacttttggaggctgaggcgggtggattgcttgaggccaggagttcgagaccagcctggccaacgtggtgaaacgctgtctctactaaaatacaaaaaaatagggctgggcgcggttgctcacgcctgtaatcccagcacttttcagaggccaaggcgggcaaatcacctgaggtcaagagtttgagaccagcctggccaacatggtgaaaccccatctctactaaacatgcaaaaattacctgggcatggtggcaggtgcttataatcccagctactctgggggccaaggcaggagaattgcttgagcctgggagatggaggttgcagtgagctgagatcatgccactgcactccagcctgggcaacagagcaagactctgcctcaaaaaaaaattaaaataaatttaaatacaaaaaaaaatagccaggtgtggggtgcatgcctggaatcccagctacttgagaggctgaggcacgagaattgcttgaacccaggaggtggaggttgcagtgagccaagatcacaggagccactgcactccagcctgggtgacagagtgagactctgtctcaaaaaaaaattaaataaattattataacctttcagaaatgctgtgtgcattttcatgttcttttttttagcattactgtcactctccctaatgaaatgtacttcagagaagcagtattttgttaaataaatacataacctcattctgaataatgtccctcattttgactataactgtgcttggtttcaaaagcaaaattaaacaaaaatctcagtcccctccgaagtgaactttgtgttaccctgcgtcagaaatgccaagttgtgtttacttttcattcagattttgtgaatatgaacatgctgttataggatctacagatgaatatttaactcaatagaaaaattattttagaacacattgtattggtattacaaccagattatattcttgacgttgacttcattaaaattatctacaatttcctaataaaaaaaaaaaaaaaaaaaaaaaaaaaaaaaataaaaggaaaaataagcccaaattaagacattatacataaatctgccgcaaggaggaggcctattgcgtttcatgacccctgacaggctagaagataatacttggacaactcattgggcaactgcattta

SEQ ID NO: 319682 - DNA, 4653 bp, Homo sapiens
  misc_feature (4653)..(4653): n is a, c, g, or t
ggagggggcgtcgggaaagccccgacttcgcagccttacactcttcgtgggcggcgaccgcggccccactgacatcattcctcatgagggaggaggcacaaacagttctgggccgaccagaaaaaggacgactgggacttgactctgaatcgcaggatttgaagagatttctcctggcttcccaacgaggctggtgggaagcggtcctcctcccatacacgacctcccaccctcgcgaggcgtagaaaccagttctgactgtacagtaaagcgagggccagggctgaggtctggaagctaatgaaagcacagaaagtgtcgaaactggatgagcaggaagcgagtggcctcccctgtcatctgacgttttcccaggatgtaatttgcctgactgaaacagatcaggaccaacagggagagttttcgatttagtgtgaggaaaagagcactaaattgtagcaaaagaccttattgctcaaggcccagtcagaagatttcataaggaagctgtagaaagtcttaagaggaaatcagccgggcgtggtggcgggcacctgtaatcccagctactccggaggctgaggcaggagaatcgcttgaacccggggagcagaggttgcagtgagccgagatcgcgccactgtacgccagcctgggcgaaagaacgaaactccgtctccaaaaaaaaaaaaaacgaagaaaaagtccaaagagggtaaaggctgttctccccttaaaaaacagctaaagacctttgggggcgctgctccttgtaaatgtcaactacttccgcgggaaagaacgcgcaggcacttggccttgtgggcgctcacttgccccggaagtactgttgagttagcgcctcgccttccggggcggattgtctgtcgttgcagtagctgtaggaaggggaggccattttccgtttctgggaggagtgaggggcaacgggtcggagaaaaaggaaaaaagaagggctcagcgcctccccgccgggccgtggacagaggggcacagtttcggcaggcgggtgaggtcgctgagggcccgccggagatgttttccttgtcgagcacggtgcaaccccaggttacagttcctctgagtcatctcatcaatgccttccatacaccaaaaaacacttctgtttctctcagtggagtgtcagtttctcaaaaccagcatcgagatgtagttcctgagcatgaggctcccagcagtgagccttcacttaacttaagggaccttggattatctgaactaaaaattggacagattgatcagctggtagaaaatctacttcctggattttgtaaaggcaaaaacatttcttcccattggcatacatcccatgtctctgcacaatccttctttgaaaataaatatggtaacttagatatatttagtacattacgttcctcttgcttgtatcgacatcattcaagagctcttcaaagcatttgttcagatcttcagtactggccagttttcatacagtctcggggttttaaaactttgaaatcaaggacacgacgtctccagtctacctccgagagattagctgaaacacagaatatagcgccatcattcgtgaaggggtttcttttgcgggacagaggatcagatgttgagagtttggacaaactcatgaaaaccaaaaatatacctgaagctcaccaagatgcatttaaaactggttttgcggaaggttttctgaaagctcaagcactcacacaaaaaaccaatgattccctaaggcgaacccgtctgattctcttcgttctgctgctattcggcatttatggacttctaaaaaacccatttttatctgtccgcttccggacaacaacagggcttgattctgcagtagatcctgtccagatgaaaaatgtcacctttgaacatgttaaaggggtggaggaagctaaacaagaattacaggaagttgttgaattcttgaaaaatccacaaaaatttactattcttggaggtaaacttccaaaaggaattcttttagttggacccccagggactggaaagacacttcttgcccgagctgtggcgggagaagctgatgttcctttttattatgcttctggatccgaatttgatgagatgtttgtgggtgtgggagccagccgtatcagaaatctttttagggaagcaaaggcgaatgctccttgtgttatatttattgatgaattagattctgttggtgggaagagaattgaatctccaatgcatccatattcaaggcagaccataaatcaacttcttgctgaaatggatggttttaaacccaatgaaggagttatcataataggagccacaaacttcccagaggcattagataatgccttaatacgtcctggtcgttttgacatgcaagttacagttccaaggccagatgtaaaaggtcgaacagaaattttgaaatggtatctcaataaaataaagtttgatcaatccgttgatccagaaattatagctcgaggtactgttggcttttccggagcagagttggagaatcttgtgaaccaggctgcattaaaagcagctgttgatggaaaagaaatggttaccatgaaggagctggagttttccaaagacaaaattctaatggggcctgaaagaagaagtgtggaaattgataacaaaaacaaaaccatcacagcatatcatgaatctggtcatgccattattgcatattacacaaaagatgcaatgcctatcaacaaagctacaatcatgccacgggggccaacacttggacatgtgtccctgttacctgagaatgacagatggaatgaaactagagcccagctgcttgcacaaatggatgttagtatgggaggaagagtggcagaggagcttatatttggaaccgaccatattacaacaggtgcttccagtgattttgataatgccactaaaatagcaaagcggatggttaccaaatttggaatgagtgaaaagcttggagttatgacctacagtgatacagggaaactaagtccagaaacccaatctgccatcgaacaagaaataagaatccttctaagggactcatatgaacgagcaaaacatatcttgaaaactcatgcaaaggagcataagaatctcgcagaagctttattgacctatgagactttggatgccaaagagattcaaattgttcttgaggggaaaaagttggaagtgagatgataactctcttgatatggatgcttgctggttttattgcaagaatataagtagcattgcagtagtctacttttacaacgctttcccctcattcttgatgtggtgtaattgaagggtgtgaaatgctttgtcaatcatttgtcacatttatccagtttgggttattctcattatgacacctattgcaaattagcatcccatggcaaatatattttgaaaaaataaagaactatcaggattgaaaacagctcttttgaggaatgtcaattagttattaagttgaaagtaattaatgattttatgtttggttactctactagatttgataaaaattgtgcctttagccttctatatacatcagtggaaacttaagatgcagtaattatgttccagattgaccatgaataaaatattttttaatctaaatgtagagaagttgggattaaaagcagtctcggaaacacagagccaggaatatagccttttggcatggtgccatggctcacatctgtaatcccagcacttttggaggctgaggcgggtggattgcttgaggccaggagttcgagaccagcctggccaacgtggtgaaacgctgtctctactaaaatacaaaaaaatagggctgggcgcggttgctcacgcctgtaatcccagcacttttcagaggccaaggcgggcaaatcacctgaggtcaagagtttgagaccagcctggccaacatggtgaaaccccatctctactaaacatgcaaaaattacctgggcatggtggcaggtgcttataatcccagctactctgggggccaaggcaggagaattgcttgagcctgggagatggaggttgcagtgagctgagatcatgccactgcactccagcctgggcaacagagcaagactctgcctcaaaaaaaaattaaaataaatttaaatacaaaaaaaaatagccaggtgtggggtgcatgcctggaatcccagctacttgagaggctgaggcacgagaattgcttgaacccaggaggtggaggttgcagtgagccaagatcacaggagccactgcactccagcctgggtgacagagtgagactctgtctcaaaaaaaaattaaataaattattataacctttcagaaatgctgtgtgcattttcatgttcttttttttagcattactgtcactctccctaatgaaatgtacttcagagaagcagtattttgttaaataaatacataacctcattctgaataatgtccctcattttgactataactgtgcttggtttcaaaagcaaaattaaacaaaaatctcagtcccctccgaagtgaactttgtgttaccctgcgtcagaaatgccaagttgtgtttacttttcattcagattttgtgaatatgaacatgctgttataggatctacagatgaataaatggttctttataagtgaaaaaaagan

SEQ ID NO: 319683 - DNA, 4529 bp, Homo sapiens
ggagggggcgtcgggaaagccccgacttcgcagccttacactcttcgtgggcggcgaccgcggccccactgacatcattcctcatgagggaggaggcacaaacagttctgggccgaccagaaaaaggacgactgggacttgactctgaatcgcaggatttgaagagatttctcctggcttcccaacgaggctggtgggaagcggtcctcctcccatacacgacctcccaccctcgcgaggcgtagaaaccagttctgactgtacagtaaagcgagggccagggctgaggtctggaagctaatgaaagcacagaaagtgtcgaaactggatgagcaggaagcgagtggcctcccctgtcatctgacgttttcccaggatgtaatttgcctgactgaaacagatcaggaccaacagggagagttttcgatttagtgtgaggaaaagagcactaaattgtagcaaaagaccttattgctcaaggcccagtcagaagatttcataaggaagctgtagaaagtcttaagaggaaatcagccgggcgtggtggcgggcacctgtaatcccagctactccggaggctgaggcaggagaatcgcttgaacccggggagcagaggttgcagtgagccgagatcgcgccactgtacgccagcctgggcgaaagaacgaaactccgtctccaaaaaaaaaaaaaacgaagaaaaagtccaaagagggtaaaggctgttctccccttaaaaaacagctaaagacctttgggggcgctgctccttgtaaatgtcaactacttccgcgggaaagaacgcgcaggcacttggccttgtgggcgctcacttgccccggaagtactgttgagttagcgcctcgccttccggggcggattgtctgtcgttgcagtagctgtaggaaggggaggccattttccgtttctgggaggagtgaggggcaacgggtcggagaaaaaggaaaaaagaagggctcagcgcctccccgccgggccgtggacagaggggcacagtttcggcaggcgggtgaggtcgctgagggcccgccggagatgttttccttgtcgagcacggtgcaaccccaggttacagttcctctgagtcatctcatcaatgccttccatacaccaaaaaacacttctgtttctctcagtggagtgtcagtttctcaaaaccagcatcgagatgtagttcctgagcatgaggctcccagcagtgagccttcacttaacttaagggaccttggattatctgaactaaaaattggacagattgatcagctggtagaaaatctacttcctggattttgtaaaggcaaaaacatttcttcccattggcatacatcccatgtctctgcacaatccttctttgaaaataaatatggtaacttagatatatttagtacattacgttcctcttgcttgtatcgacatcattcaagagctcttcaaagcatttgttcagatcttcagtactggccagttttcatacagtctcggggttttaaaactttgaaatcaaggacacgacgtctccagtctacctccgagagattagctgaaacacagaatatagcgccatcattcgtgaaggggtttcttttgcgggacagaggatcagatgttgagagtttggacaaactcatgaaaaccaaaaatatacctgaagctcaccaagatgcatttaaaactggttttgcggaaggttttctgaaagctcaagcactcacacaaaaaaccaatgattccctaaggcgaacccgtctgattctcttcgttctgctgctattcggcatttatggacttctaaaaaacccatttttatctgtccgcttccggacaacaacagggcttgattctgcagtagatcctgtccagatgaaaaatgtcacctttgaacatgttaaaggggtggaggaagctaaacaagaattacaggaagttgttgaattcttgaaaaatccacaaaaatttactattcttggaggtaaacttccaaaaggaattcttttagttggacccccagggactggaaagacacttcttgcccgagctgtggcgggagaagctgatgttcctttttattatgcttctggatccgaatttgatgagatgtttgtgggtgtgggagccagccgtatcagaaatctttttagggaagcaaaggcgaatgctccttgtgttatatttattgatgaattagattctgttggtgggaagagaattgaatctccaatgcatccatattcaaggcagaccataaatcaacttcttgctgaaatggatggttttaaacccaatgaaggagttatcataataggagccacaaacttcccagaggcattagataatgccttaatacgtcctggtcgttttgacatgcaagttacagttccaaggccagatgtaaaaggtcgaacagaaattttgaaatggtatctcaataaaataaagtttgatcaatccgttgatccagaaattatagctcgaggtactgttggcttttccggagcagagttggagaatcttgtgaaccaggctgcattaaaagcagctgttgatggaaaagaaatggttaccatgaaggagctggagttttccaaagacaaaattctaatggggcctgaaagaagaagtgtggaaattgataacaaaaacaaaaccatcacagcatatcatgaatctggtcatgccattattgcatattacacaaaagatgcaatgcctatcaacaaagctacaatcatgccacgggggccaacacttggacatcttggagttatgacctacagtgatacagggaaactaagtccagaaacccaatctgccatcgaacaagaaataagaatccttctaagggactcatatgaacgagcaaaacatatcttgaaaactcatgcaaaggagcataagaatctcgcagaagctttattgacctatgagactttggatgccaaagagattcaaattgttcttgaggggaaaaagttggaagtgagatgataactctcttgatatggatgcttgctggttttattgcaagaatataagtagcattgcagtagtctacttttacaacgctttcccctcattcttgatgtggtgtaattgaagggtgtgaaatgctttgtcaatcatttgtcacatttatccagtttgggttattctcattatgacacctattgcaaattagcatcccatggcaaatatattttgaaaaaataaagaactatcaggattgaaaacagctcttttgaggaatgtcaattagttattaagttgaaagtaattaatgattttatgtttggttactctactagatttgataaaaattgtgcctttagccttctatatacatcagtggaaacttaagatgcagtaattatgttccagattgaccatgaataaaatattttttaatctaaatgtagagaagttgggattaaaagcagtctcggaaacacagagccaggaatatagccttttggcatggtgccatggctcacatctgtaatcccagcacttttggaggctgaggcgggtggattgcttgaggccaggagttcgagaccagcctggccaacgtggtgaaacgctgtctctactaaaatacaaaaaaatagggctgggcgcggttgctcacgcctgtaatcccagcacttttcagaggccaaggcgggcaaatcacctgaggtcaagagtttgagaccagcctggccaacatggtgaaaccccatctctactaaacatgcaaaaattacctgggcatggtggcaggtgcttataatcccagctactctgggggccaaggcaggagaattgcttgagcctgggagatggaggttgcagtgagctgagatcatgccactgcactccagcctgggcaacagagcaagactctgcctcaaaaaaaaattaaaataaatttaaatacaaaaaaaaatagccaggtgtggggtgcatgcctggaatcccagctacttgagaggctgaggcacgagaattgcttgaacccaggaggtggaggttgcagtgagccaagatcacaggagccactgcactccagcctgggtgacagagtgagactctgtctcaaaaaaaaattaaataaattattataacctttcagaaatgctgtgtgcattttcatgttcttttttttagcattactgtcactctccctaatgaaatgtacttcagagaagcagtattttgttaaataaatacataacctcattctgaataatgtccctcattttgactataactgtgcttggtttcaaaagcaaaattaaacaaaaatctcagtcccctccgaagtgaactttgtgttaccctgcgtcagaaatgccaagttgtgtttacttttcattcagattttgtgaatatgaacatgctgttataggatctacagatgaatatttaactcaatagaaaaattattttagaacacattgtattggtattacaaccagattatattcttgacgttgacttcattaaaattatctacaatttcctaataa

SEQ ID NO: 319684 - DNA, 4526 bp, Homo sapiens
ggagggggcgtcgggaaagccccgacttcgcagccttacactcttcgtgggcggcgaccgcggccccactgacatcattcctcatgagggaggaggcacaaacagttctgggccgaccagaaaaaggacgactgggacttgactctgaatcgcaggatttgaagagatttctcctggcttcccaacgaggctggtgggaagcggtcctcctcccatacacgacctcccaccctcgcgaggcgtagaaaccagttctgactgtacagtaaagcgagggccagggctgaggtctggaagctaatgaaagcacagaaagtgtcgaaactggatgagcaggaagcgagtggcctcccctgtcatctgacgttttcccaggatgtaatttgcctgactgaaacagatcaggaccaacagggagagttttcgatttagtgtgaggaaaagagcactaaattgtagcaaaagaccttattgctcaaggcccagtcagaagatttcataaggaagctgtagaaagtcttaagaggaaatcagccgggcgtggtggcgggcacctgtaatcccagctactccggaggctgaggcaggagaatcgcttgaacccggggagcagaggttgcagtgagccgagatcgcgccactgtacgccagcctgggcgaaagaacgaaactccgtctccaaaaaaaaaaaaaacgaagaaaaagtccaaagagggtaaaggctgttctccccttaaaaaacagctaaagacctttgggggcgctgctccttgtaaatgtcaactacttccgcgggaaagaacgcgcaggcacttggccttgtgggcgctcacttgccccggaagtactgttgagttagcgcctcgccttccggggcggattgtctgtcgttgcagtagctgtaggaaggggaggccattttccgtttctgggaggagtgaggggcaacgggtcggagaaaaaggaaaaaagaagggctcagcgcctccccgccgggccgtggacagaggggcacagtttcggcaggcgggtgaggtcgctgagggcccgccggagatgttttccttgtcgagcacggtgcaaccccaggttacagttcctctgagtcatctcatcaatgccttccatacaccaaaaaacacttctgtttctctcagtggagtgtcagtttctcaaaaccagcatcgagatgtagttcctgagcatgaggctcccagcagtgagccttcacttaacttaagggaccttggattatctgaactaaaaattggacagattgatcagctggtagaaaatctacttcctggattttgtaaaggcaaaaacatttcttcccattggcatacatcccatgtctctgcacaatccttctttgaaaataaatatggtaacttagatatatttagtacattacgttcctcttgcttgtatcgacatcattcaagagctcttcaaagcatttgttcagatcttcagtactggccagttttcatacagtctcggggttttaaaactttgaaatcaaggacacgacgtctccagtctacctccgagagattagctgaaacacagaatatagcgccatcattcgtgaaggggtttcttttgcgggacagaggatcagatgttgagagtttggacaaactcatgaaaaccaaaaatatacctgaagctcaccaagatgcatttaaaactggttttgcggaaggttttctgaaagctcaagcactcacacaaaaaaccaatgattccctaaggcgaacccgtctgattctcttcgttctgctgctattcggcatttatggacttctaaaaaacccatttttatctgtccgcttccggacaacaacagggcttgattctgcagtagatcctgtccagatgaaaaatgtcacctttgaacatgttaaaggggtggaggaagctaaacaagaattacaggaagttgttgaattcttgaaaaatccacaaaaatttactattcttggaggtaaacttccaaaaggaattcttttagttggacccccagggactggaaagacacttcttgcccgagctgtggcgggagaagctgatgttcctttttattatgcttctggatccgaatttgatgagatgtttgtgggtgtgggagccagccgtatcagaaatctttttagggaagcaaaggcgaatgctccttgtgttatatttattgatgaattagattctgttggtgggaagagaattgaatctccaatgcatccatattcaaggcagaccataaatcaacttcttgctgaaatggatggttttaaacccaatgaaggagttatcataataggagccacaaacttcccagaggcattagataatgccttaatacgtcctggtcgttttgacatgcaagttacagttccaaggccagatgtaaaaggtcgaacagaaattttgaaatggtatctcaataaaataaagtttgatcaatccgttgatccagaaattatagctcgaggtactgttggcttttccggagcagagttggagaatcttgtgaaccaggctgcattaaaagcagctgttgatggaaaagaaatggttaccatgaaggagctggagttttccaaagacaaaattctaatggggcctgaaagaagaagtgtggaaattgataacaaaaacaaaaccatcacagcatatcatgaatctggtcatgccattattgcatattacacaaaagatgcaatgcctatcaacaaagctacaatcatgccacgggggccaacacttggacatgtgtccctgttacctgagaatgacagatggaatgaaactagagcccagctgcttgcacaaatggatgttagtatgggaggaagagtggcagaggagcttatatttggaaccgaccatattacaacaggtgcttccagtgattttgataatgccactaaaatagcaaagcggatggttaccaaatttggaatgagtgaaaagcttggagttatgacctacagtgatacagggaaactaagtccagaaacccaatctgccatcgaacaagaatataagtagcattgcagtagtctacttttacaacgctttcccctcattcttgatgtggtgtaattgaagggtgtgaaatgctttgtcaatcatttgtcacatttatccagtttgggttattctcattatgacacctattgcaaattagcatcccatggcaaatatattttgaaaaaataaagaactatcaggattgaaaacagctcttttgaggaatgtcaattagttattaagttgaaagtaattaatgattttatgtttggttactctactagatttgataaaaattgtgcctttagccttctatatacatcagtggaaacttaagatgcagtaattatgttccagattgaccatgaataaaatattttttaatctaaatgtagagaagttgggattaaaagcagtctcggaaacacagagccaggaatatagccttttggcatggtgccatggctcacatctgtaatcccagcacttttggaggctgaggcgggtggattgcttgaggccaggagttcgagaccagcctggccaacgtggtgaaacgctgtctctactaaaatacaaaaaaatagggctgggcgcggttgctcacgcctgtaatcccagcacttttcagaggccaaggcgggcaaatcacctgaggtcaagagtttgagaccagcctggccaacatggtgaaaccccatctctactaaacatgcaaaaattacctgggcatggtggcaggtgcttataatcccagctactctgggggccaaggcaggagaattgcttgagcctgggagatggaggttgcagtgagctgagatcatgccactgcactccagcctgggcaacagagcaagactctgcctcaaaaaaaaattaaaataaatttaaatacaaaaaaaaatagccaggtgtggggtgcatgcctggaatcccagctacttgagaggctgaggcacgagaattgcttgaacccaggaggtggaggttgcagtgagccaagatcacaggagccactgcactccagcctgggtgacagagtgagactctgtctcaaaaaaaaattaaataaattattataacctttcagaaatgctgtgtgcattttcatgttcttttttttagcattactgtcactctccctaatgaaatgtacttcagagaagcagtattttgttaaataaatacataacctcattctgaataatgtccctcattttgactataactgtgcttggtttcaaaagcaaaattaaacaaaaatctcagtcccctccgaagtgaactttgtgttaccctgcgtcagaaatgccaagttgtgtttacttttcattcagattttgtgaatatgaacatgctgttataggatctacagatgaatatttaactcaatagaaaaattattttagaacacattgtattggtattacaaccagattatattcttgacgttgacttcattaaaattatctacaatttcctaataa

SEQ ID NO: 319685 - DNA, 4105 bp, Homo sapiens
ggagggggcgtcgggaaagccccgacttcgcagccttacactcttcgtgggcggcgaccgcggccccactgacatcattcctcatgagggaggaggcacaaacagttctgggccgaccagaaaaaggacgactgggacttgactctgaatcgcaggatttgaagagatttctcctggcttcccaacgaggctggtgggaagcggtcctcctcccatacacgacctcccaccctcgcgaggcgtagaaaccagttctgactgtacagtaaagcgagggccagggctgaggtctggaagctaatgaaagcacagaaagtgtcgaaactggatgagcaggaagcgagtggcctcccctgtcatctgacgttttcccaggatgtaatttgcctgactgaaacagatcaggaccaacagggagagttttcgatttagtgtgaggaaaagagcactaaattgtagcaaaagaccttattgctcaaggcccagtcagaagatttcataaggaagctgtagaaagtcttaagaggaaatcagccgggcgtggtggcgggcacctgtaatcccagctactccggaggctgaggcaggagaatcgcttgaacccggggagcagaggttgcagtgagccgagatcgcgccactgtacgccagcctgggcgaaagaacgaaactccgtctccaaaaaaaaaaaaaacgaagaaaaagtccaaagagggtaaaggctgttctccccttaaaaaacagctaaagacctttgggggcgctgctccttgtaaatgtcaactacttccgcgggaaagaacgcgcaggcacttggccttgtgggcgctcacttgccccggaagtactgttgagttagcgcctcgccttccggggcggattgtctgtcgttgcagtagctgtaggaaggggaggccattttccgtttctgggaggagtgaggggcaacgggtcggagaaaaaggaaaaaagaagggctcagcgcctccccgccgggccgtggacagaggggcacagtttcggcaggcgggtgaggtcgctgagggcccgccggagatgttttccttgtcgagcacggtgcaaccccaggttacagttcctctgagtcatctcatcaatgccttccatacaccaaaaaacacttctgtttctctcagtggagtgtcagtttctcaaaaccagcatcgagatgtagttcctgagcatgaggctcccagcagtgagccttcacttaacttaagggaccttggattatctgaactaaaaattggacagattgatcagctggtagaaaatctacttcctggattttgtaaaggcaaaaacatttcttcccattggcatacatcccatgtctctgcacaatccttctttgaaaataaatatggtaacttagatatatttagtacattacgttcctcttgcttgtatcgacatcattcaagagctcttcaaagcatttgttcagatcttcagtactggccagttttcatacagtctcggggttttaaaactttgaaatcaaggacacgacgtctccagtctacctccgagagattagctgaaacacagaatatagcgccatcattcgtgaaggggtttcttttgcgggacagaggatcagatgttgagagtttggacaaactcatgaaaaccaaaaatatacctgaagctcaccaagatgcatttaaaactggttttgcggaaggttttctgaaagctcaagcactcacacaaaaaaccaatgattccctaaggcgaacccgtctgattctcttcgttctgctgctattcggcatttatggacttctaaaaaacccatttttatctgtccgcttccggacaacaacagggcttgattctgcagtagatcctgtccagatgaaaaatgtcacctttgaacatgttaaaggggtggaggaagctaaacaagaattacaggaagttgttgaattcttgaaaaatccacaaaaatttactattcttggaggtaaacttccaaaaggaattcttttagttggacccccagggactggaaagacacttcttgcccgagctgtggcgggagaagctgatgttcctttttattatgcttctggatccgaatttgatgagatgtttgtgggtgtgggagccagccgtatcagaaatctttttagggaagcaaaggcgaatgctccttgtgttatatttattgatgaattagattctgttggtgggaagagaattgaatctccaatgcatccatattcaaggcagaccataaatcaacttcttgctgaaatggatggttttaaacccaatgaaggagttatcataataggagccacaaacttcccagaggcattagataatgccttaatacgtcctggtcgttttgacatgcaagttacagttccaaggccagatgtaaaaggtcgaacagaaattttgaaatggactcatatgaacgagcaaaacatatcttgaaaactcatgcaaaggagcataagaatctcgcagaagctttattgacctatgagactttggatgccaaagagattcaaattgttcttgaggggaaaaagttggaagtgagatgataactctcttgatatggatgcttgctggttttattgcaagaatataagtagcattgcagtagtctacttttacaacgctttcccctcattcttgatgtggtgtaattgaagggtgtgaaatgctttgtcaatcatttgtcacatttatccagtttgggttattctcattatgacacctattgcaaattagcatcccatggcaaatatattttgaaaaaataaagaactatcaggattgaaaacagctcttttgaggaatgtcaattagttattaagttgaaagtaattaatgattttatgtttggttactctactagatttgataaaaattgtgcctttagccttctatatacatcagtggaaacttaagatgcagtaattatgttccagattgaccatgaataaaatattttttaatctaaatgtagagaagttgggattaaaagcagtctcggaaacacagagccaggaatatagccttttggcatggtgccatggctcacatctgtaatcccagcacttttggaggctgaggcgggtggattgcttgaggccaggagttcgagaccagcctggccaacgtggtgaaacgctgtctctactaaaatacaaaaaaatagggctgggcgcggttgctcacgcctgtaatcccagcacttttcagaggccaaggcgggcaaatcacctgaggtcaagagtttgagaccagcctggccaacatggtgaaaccccatctctactaaacatgcaaaaattacctgggcatggtggcaggtgcttataatcccagctactctgggggccaaggcaggagaattgcttgagcctgggagatggaggttgcagtgagctgagatcatgccactgcactccagcctgggcaacagagcaagactctgcctcaaaaaaaaattaaaataaatttaaatacaaaaaaaaatagccaggtgtggggtgcatgcctggaatcccagctacttgagaggctgaggcacgagaattgcttgaacccaggaggtggaggttgcagtgagccaagatcacaggagccactgcactccagcctgggtgacagagtgagactctgtctcaaaaaaaaattaaataaattattataacctttcagaaatgctgtgtgcattttcatgttcttttttttagcattactgtcactctccctaatgaaatgtacttcagagaagcagtattttgttaaataaatacataacctcattctgaataatgtccctcattttgactataactgtgcttggtttcaaaagcaaaattaaacaaaaatctcagtcccctccgaagtgaactttgtgttaccctgcgtcagaaatgccaagttgtgtttacttttcattcagattttgtgaatatgaacatgctgttataggatctacagatgaatatttaactcaatagaaaaattattttagaacacattgtattggtattacaaccagattatattcttgacgttgacttcattaaaattatctacaatttcctaataa

SEQ ID NO: 319686 - DNA, 6627 bp, Homo sapiens
cccaaatctattaaagcagcaccctgataccacttactctgttgcattgttatgaagacttaaggtaacagagctaaacaccagtgcactgcctgtaacagagtgagcacacaataacttacagctcttactgtttacagtgataaccagctacttaatacctggctcatgtttccatgtgccacttgtttcttggtaacaaacaagagtcatggaaatcatgggatgtacagtcagaatggtttcccttgtcctagaatttggataaacctaatgaaatataaaagcaagttgagtttccctagttctgggtggcagggtcctatttaagagagagaagggaatggggaagataagcccagcattactttccaccggctccatccaggagtaaggccaggtgactttggggatgccagttggtgggtagagagcagcgtggctgtgtgcagtgggtaccagcgtggcctggcaccctgggcttcatgctgtgcttcctctggaggcctgggctgagacagtgctcttggtatcctgtgctagattcctaacactgattagtagcatctcttctggcctctggtgtgcttggcttccctaggcatgcagtaccataagctgacagagcacttcgatgagaagcctttctcctgtgaagagtgtggggcgaagtttgcagccaattccaccctgaagaaccaccttcgccttcacaccggggaccgcccgttcatgtgcaagcactgcctcatgaccttcacccaggcctccgccctggcctatcacaccaagaagaagcactcagaagggaaaatgtatgcatgccagtactgtgatgctgtgtttgcccagtctattgagctgtcccgccacgtgaggacccacaccggggacaagccctatgtctgcagagactgtggcaagggcttccggcaagccaatggcctctccatccatctgcacacctttcacaacatagaagatccttatgactgcaagaagtgcaggatgagtttccccactcttcaggatcaccggaagcacatccatgaggtgcactccaaagagtaccacccctgccccacgtgtgggaagatcttcagtgccccgtccatgctggagcggcacatggtgacccacgttggagggaagcccttcagctgcgggatctgcaacaaggcctaccagcaattgtctggtttgtggtaccacaatcgaacccaccaccctgacgtatttgctgctcagaaccaccgatcttccaagttctcatcactccagtgcagctcctgtgacaaaaccttccccaacaccattgagcacaagaagcacatcaaagcagaacatgcagatatgaagttccatgaatgtgaccagtgtaaggagctcttccccacgccagccttgctgcaggttcatgtcaagtgccagcattcagggtcccagccattccggtgcttgtactgtgctgctactttccgttttcctggagcattgcagcaccatgtcaccacggagcacttcaagcagtcagagaccaccttcccctgtgagctctgtggggaactcttcacctcccaggcccagcttgacagtcacctggaatctgagcacccaaaggtgatgagcacggaaacccaggccgcagcctcacagatggcgcaggtgatccaaaccccagagccggtggccccgacagagcaggtgatcactttggaggagacccagcttgccgggtcgcaggtgtttgtgacgttgccagattctcaggcatctcaggccagctctgagctcgtggcggtgactgtggaggacttgctggatggcacagtgacgctgatctgtggtgaggccaaatgagcagcctttcatccggcagagccttcctgcgtttgcagcagagaggaggccccacagcttgccctttgccctccatccctggctgtcctgagtggtgagcatcttagcttagcaccaaccaacacagtctcacctagaaaacagatggaagcttcgttgttctcatagaaccaacagcatctgagccctcaacaccaacagcaccatcctctgtagcagacaggcctccctccccacaggcccgctgctgcggcctctatgacactgtccatccccaagtgacatgtggcttcagaagtagagtctgaaagagcagtgggatgggagctggtgaccagggtaccccaggaggcatgatgtgccgacagcgctcagtgggcagaatggcagttagatatgggacttggcccacagtgggggctgcaaatgctgccactgcctctggccatttaaagtgagaggggcaccaacagacaattcggggaccttaggccccttcctgaggcacacttggccccttcctcggtcctatcatcctaccctctgctggggttccccctccacccagtggccacgcccagcaccctattgatggctataggacaggtagccctcatttccatgcctgataaccccttgtcagttgtcagctcttcccaaaacaaagctctggagtttctgctggaagtgtttaatgtgaggcatcagctgctagacagtgtctgcctttccaggacattcttcttggtattccttacctgaagcctggttcccacagctcttccgtgtcatcttcatccccttcctttaatcaaaggctgaaatctctgcctgacctggcagcctggctccctctgggtcatatggtgcagactgtgaccagcaccaggcaggcagtcctgtctgcgtgtggaggagcagccgtgactgcccgtggctctgctgccgcccactccctgccttgtgagtggcctgctgcctcacctcccgcaggccgccacacttattgcaggtcagtgatcctttggagtttgaatttcacaaagctttttttatcttcagttcctaaaatataatctgataattaatggtttgtggaatccattatgaagtgcaattagatagatgtaggttcctgccgtttggagagaatgactagcatttatcttcttttccttccatgccaaaggttggagtctgctggtgcggtgtttacacaccaggcagggctgtctgccaccttgtgtggcttgaccccctgtggaggggagtgcctggttggatcccacactggcagagatggggccaccccttccttccaggcacatctcacattgccatgtacagaggcaggagtcacgtttggtcaccatggaagcttttattgctcccacatggtcaggtctcaccctgcttgaagcgcagaaggcacagccttactgaccagcacgcccactgactggcatctgccggctttgtgcaggcagccccgacggtttccacagcgagcgccagctccggccagcctgggacagctcatcccagccgactacacctgcttctggtcctgtccacattttgatacgcagatcacttgagcttgtcaattagggttctgccattctgaaataaatgaagtttctaaagcagagtcggcctcagaagccaaaaactgaccagaagatggtgctcaaacctttaagacttcatctccatgtgaagggctcactgtttctaccaaggctgtgcctgtattaaggcttttccgtcctgggaactgtcagtctgggagagctcttgatctgcaggtggcaaaatggcactgaatatccccttggcagcagagaaaacccactgaaagatcgtagagtggcacatgcttacagggcattggtgccaagtccagtggatgagaatccagcccctcacaagctgtgggatggggcttgggagttgcagtgaatgtcattaaaatttcttccaaaacaaaactagaaataattgctgagggcttatagggaagtgatttaaaaagaaaaaacaaacaacaacaaaaaaaactcttcggaataaagagggctgtaaattttgaattccagtgtcagatcctttcaagcactgagaaattctttctcaggtttctttttttgggggagacagggtcttgctctgtcacccagactggaacacagtggcacgatcttggctcactgcaacctctgcgggctcacgcaatcctcctgccacagcttcccaagtagctgggaccacaggcgtgagccaccactgctggccagtttttgtatttttttttttttttgtagagacagggtctcgccatgttgcccaggctggtttaaaactcctgagctcaagcagttctcccacctgggcctcccaaagtgctaggattacagacatgagccactacgcctggccaggtttctgttggagacccagattgtgacaagacatttgttttcttcggaatcaccagatttgcagcttactgtgccgagagtggactggctgccggggcccatcagatgccctctggcccatggcacactcagcagaaggcacaaacccagtgctggttctcatcaagaaagaggggaaggcccttcccgagtttactgtctgctctgagtgggctccgcactggctgactgattttatagtcttgctctctagagaagcccaggcatggatcttataggaaaactttctgactctgcttggccattttatccttttctcctacttctgcccaagagacctgaattgctgccatagaggacagtgtttgtgtggtctcctgagtccacatcgctcgcttccatggggtcccggtgttgtttttgcctcgttccccataggctgctgcccttatggcctctggactgaactctggggcctttggggtggtgtgaaggagtctgtgggcttcttggaacacatggatctgttcggtgggtccccagacctctgctcccagagctcatggcccaggtggtgaggagggaaaggcagtcagattccaggctggagtgtgattctgtgggaatactggggtcagttatggaacaggacttgcccatcataggtaagtgagacagcaaatagatgattcaagagcaaggattactgcgggaaggtgagactcctactgtccacgcgcatgagcagaacctggaaccagaggggcagggaccaggggtctttactcatttattttatgggtaaagagacatgaagagacagcctctctcttctgtctcagaagctctgtgtttgggaaactttgagcccagtgagtagcagggtctgcagtgtgagtaccaggtttccctggcaatccaggtctcctctgaggaagcattctgacttcccactgaccacggaaggcatgtcagcttcatgcctcgggctagagttctgataatcggggctgaggggtgaaaagaaatccagtcagacagacagtggggagacaggtccctgccctttatttgcgggatcaatcagggactcccagaaaggaaggagaatggtgagaagggccctaagagttcgtctctcacctgggggctggtgacgtggtcaccacaagctgaagacaggctaatggggtggcgggtgtgtgtttaaacctcacgtgcctggaagctgcacattgaccaaaggagggagggaagtgctaaccatgtatagagtgggcaggcggttccagggagacaagcagcatgttattaaattgggcctaggcagttggacgataatggagaaaaagcagggatgctataatgagtcctccccaagggtgagttcagcaccccagccctgttctgcttgtatcccagtgatacttgggaggtaggaagaaaatgggagtaagagaacaatttggggctgaagggagtgtcagaggcacgttgatccttgttttgttgtcatggaaacttcggggctggtgggacttaggccaaaagctcagaggcacagccaaaatttagaagcttgctactcctacgactcggcctataaggaagagagaagctgtctgtactttggggactacattgctgaaggaaaaaaatcactccctggctaattaagattgcttccaaattgggggaatgtgtgtcatttcctttaccaaggccagtcatccctgcttccacccatggtcaggacagtcagccactacgtgatgctgtataaattggattacaaaccatattcttgttcagcttgcactaatctatataaataaaatatgtactttgaaaaaaattaggctacatgagtttcaaatggactgtgatgttatagacctgctttctctttggttctgggccagtgtcagacggggacaggggtgataggcctggtgtcctaggggccatttgtgtaccttgaggccgtgttaacatggcctgggggaaagaaagctctcctgtcacttggagtctcattcctaaaccctccttcccagggagcaagtgtggggcagggtttcagagcacaggctttggtgtccagcctgggtacatccagctgtcccgctgtctaactgacattgtgtgagatgcttactctctctgagctccctcctcctggctcccaactttattataaaatggggaaaatgattgtgcttgccctacagaattgtagtatgaattaaaagtctggatttaatgtatttaatatagaaaattttagcttttattaataaaagtttttggcatacaaaaaaactat

SEQ ID NO: 319687 - DNA, 6278 bp, Homo sapiens
tctgtaaggcctgcgacaaaagcttccatttctactgccgcctaaaggtgcacatgaagcgctgccgggtggctaagagcaaacaggtgcagtgtaaggagtgcagtgagaccaaggattcaaagaaagagctggacaaacatcagctggaggcccatggtgcaggtggagagcccgatgcccccaagaagaagaagaagaggcttccagtgacatgtgacctctgtggcagagaatttgcccatgcctcaggcatgcagtaccataagctgacagagcacttcgatgagaagcctttctcctgtgaagagtgtggggcgaagtttgcagccaattccaccctgaagaaccaccttcgccttcacaccggggaccgcccgttcatgtgcaagcactgcctcatgaccttcacccaggcctccgccctggcctatcacaccaagaagaagcactcagaagggaaaatgtatgcatgccagtactgtgatgctgtgtttgcccagtctattgagctgtcccgccacgtgaggacccacaccggggacaagccctatgtctgcagagactgtggcaagggcttccggcaagccaatggcctctccatccatctgcacacctttcacaacatagaagatccttatgactgcaagaagtgcaggatgagtttccccactcttcaggatcaccggaagcacatccatgaggtgcactccaaagagtaccacccctgccccacgtgtgggaagatcttcagtgccccgtccatgctggagcggcacatggtgacccacgttggagggaagcccttcagctgcgggatctgcaacaaggcctaccagcaattgtctggtttgtggtaccacaatcgaacccaccaccctgacgtatttgctgctcagaaccaccgatcttccaagttctcatcactccagtgcagctcctgtgacaaaaccttccccaacaccattgagcacaagaagcacatcaaagcagaacatgcagatatgaagttccatgaatgtgaccagtgtaaggagctcttccccacgccagccttgctgcaggttcatgtcaagtgccagcattcagggtcccagccattccggtgcttgtactgtgctgctactttccgttttcctggagcattgcagcaccatgtcaccacggagcacttcaagcagtcagagaccaccttcccctgtgagctctgtggggaactcttcacctcccaggcccagcttgacagtcacctggaatctgagcacccaaaggtgatgagcacggaaacccaggccgcagcctcacagatggcgcaggtgatccaaaccccagagccggtggccccgacagagcaggtgatcactttggaggagacccagcttgccgggtcgcaggtgtttgtgacgttgccagattctcaggcatctcaggccagctctgagctcgtggcggtgactgtggaggacttgctggatggcacagtgacgctgatctgtggtgaggccaaatgagcagcctttcatccggcagagccttcctgcgtttgcagcagagaggaggccccacagcttgccctttgccctccatccctggctgtcctgagtggtgagcatcttagcttagcaccaaccaacacagtctcacctagaaaacagatggaagcttcgttgttctcatagaaccaacagcatctgagccctcaacaccaacagcaccatcctctgtagcagacaggcctccctccccacaggcccgctgctgcggcctctatgacactgtccatccccaagtgacatgtggcttcagaagtagagtctgaaagagcagtgggatgggagctggtgaccagggtaccccaggaggcatgatgtgccgacagcgctcagtgggcagaatggcagttagatatgggacttggcccacagtgggggctgcaaatgctgccactgcctctggccatttaaagtgagaggggcaccaacagacaattcggggaccttaggccccttcctgaggcacacttggccccttcctcggtcctatcatcctaccctctgctggggttccccctccacccagtggccacgcccagcaccctattgatggctataggacaggtagccctcatttccatgcctgataaccccttgtcagttgtcagctcttcccaaaacaaagctctggagtttctgctggaagtgtttaatgtgaggcatcagctgctagacagtgtctgcctttccaggacattcttcttggtattccttacctgaagcctggttcccacagctcttccgtgtcatcttcatccccttcctttaatcaaaggctgaaatctctgcctgacctggcagcctggctccctctgggtcatatggtgcagactgtgaccagcaccaggcaggcagtcctgtctgcgtgtggaggagcagccgtgactgcccgtggctctgctgccgcccactccctgccttgtgagtggcctgctgcctcacctcccgcaggccgccacacttattgcaggtcagtgatcctttggagtttgaatttcacaaagctttttttatcttcagttcctaaaatataatctgataattaatggtttgtggaatccattatgaagtgcaattagatagatgtaggttcctgccgtttggagagaatgactagcatttatcttcttttccttccatgccaaaggttggagtctgctggtgcggtgtttacacaccaggcagggctgtctgccaccttgtgtggcttgaccccctgtggaggggagtgcctggttggatcccacactggcagagatggggccaccccttccttccaggcacatctcacattgccatgtacagaggcaggagtcacgtttggtcaccatggaagcttttattgctcccacatggtcaggtctcaccctgcttgaagcgcagaaggcacagccttactgaccagcacgcccactgactggcatctgccggctttgtgcaggcagccccgacggtttccacagcgagcgccagctccggccagcctgggacagctcatcccagccgactacacctgcttctggtcctgtccacattttgatacgcagatcacttgagcttgtcaattagggttctgccattctgaaataaatgaagtttctaaagcagagtcggcctcagaagccaaaaactgaccagaagatggtgctcaaacctttaagacttcatctccatgtgaagggctcactgtttctaccaaggctgtgcctgtattaaggcttttccgtcctgggaactgtcagtctgggagagctcttgatctgcaggtggcaaaatggcactgaatatccccttggcagcagagaaaacccactgaaagatcgtagagtggcacatgcttacagggcattggtgccaagtccagtggatgagaatccagcccctcacaagctgtgggatggggcttgggagttgcagtgaatgtcattaaaatttcttccaaaacaaaactagaaataattgctgagggcttatagggaagtgatttaaaaagaaaaaacaaacaacaacaaaaaaaactcttcggaataaagagggctgtaaattttgaattccagtgtcagatcctttcaagcactgagaaattctttctcaggtttctttttttgggggagacagggtcttgctctgtcacccagactggaacacagtggcacgatcttggctcactgcaacctctgcgggctcacgcaatcctcctgccacagcttcccaagtagctgggaccacaggcgtgagccaccactgctggccagtttttgtatttttttttttttttgtagagacagggtctcgccatgttgcccaggctggtttaaaactcctgagctcaagcagttctcccacctgggcctcccaaagtgctaggattacagacatgagccactacgcctggccaggtttctgttggagacccagattgtgacaagacatttgttttcttcggaatcaccagatttgcagcttactgtgccgagagtggactggctgccggggcccatcagatgccctctggcccatggcacactcagcagaaggcacaaacccagtgctggttctcatcaagaaagaggggaaggcccttcccgagtttactgtctgctctgagtgggctccgcactggctgactgattttatagtcttgctctctagagaagcccaggcatggatcttataggaaaactttctgactctgcttggccattttatccttttctcctacttctgcccaagagacctgaattgctgccatagaggacagtgtttgtgtggtctcctgagtccacatcgctcgcttccatggggtcccggtgttgtttttgcctcgttccccataggctgctgcccttatggcctctggactgaactctggggcctttggggtggtgtgaaggagtctgtgggcttcttggaacacatggatctgttcggtgggtccccagacctctgctcccagagctcatggcccaggtggtgaggagggaaaggcagtcagattccaggctggagtgtgattctgtgggaatactggggtcagttatggaacaggacttgcccatcataggtaagtgagacagcaaatagatgattcaagagcaaggattactgcgggaaggtgagactcctactgtccacgcgcatgagcagaacctggaaccagaggggcagggaccaggggtctttactcatttattttatgggtaaagagacatgaagagacagcctctctcttctgtctcagaagctctgtgtttgggaaactttgagcccagtgagtagcagggtctgcagtgtgagtaccaggtttccctggcaatccaggtctcctctgaggaagcattctgacttcccactgaccacggaaggcatgtcagcttcatgcctcgggctagagttctgataatcggggctgaggggtgaaaagaaatccagtcagacagacagtggggagacaggtccctgccctttatttgcgggatcaatcagggactcccagaaaggaaggagaatggtgagaagggccctaagagttcgtctctcacctgggggctggtgacgtggtcaccacaagctgaagacaggctaatggggtggcgggtgtgtgtttaaacctcacgtgcctggaagctgcacattgaccaaaggagggagggaagtgctaaccatgtatagagtgggcaggcggttccagggagacaagcagcatgttattaaattgggcctaggcagttggacgataatggagaaaaagcagggatgctataatgagtcctccccaagggtgagttcagcaccccagccctgttctgcttgtatcccagtgatacttgggaggtaggaagaaaatgggagtaagagaacaatttggggctgaagggagtgtcagaggcacgttgatccttgttttgttgtcatggaaacttcggggctggtgggacttaggccaaaagctcagaggcacagccaaaatttagaagcttgctactcctacgactcggcctataaggaagagagaagctgtctgtactttggggactacattgctgaaggaaaaaaatcactccctggctaattaagattgcttccaaattgggggaatgtgtgtcatttcctttaccaaggccagtcatccctgcttccacccatggtcaggacagtcagccactacgtgatgctgtataaattggattacaaaccatattcttgttcagcttgcactaatctatataaataaaatatgtactttgaaaaaaattaggctacatgagtttcaaatggactgtgatgttatagacctgctttctctttggttctgggccagtgtcagacggggacaggggtgataggcctggtgtcctaggggccatttgtgtaccttgaggccgtgttaacatggcctgggggaaagaaagctctcctgtcacttggagtctcattcctaaaccctccttcccagggagcaagtgtggggcagggtttcagagcacaggctttggtgtccagcctgggtacatccagctgtcccgctgtctaactgacattgtgtgagatgcttactctctctgagctccctcctcctggctcccaactttattataaaatggggaaaatgattgtgcttgccctacagaattgtagtatgaattaaaagtctggatttaatgtatttaatatagaaaattttagcttttattaataaaagtttttggcatacaaaaaaactat

SEQ ID NO: 319688 - DNA, 6231 bp, Homo sapiens
tctgtaaggcctgcgacaaaagcttccatttctactgccgcctaaaggtgcacatgaagcgctgccgggtggctaagagcaaacaggtgcagtgtaaggagtgcagtgagaccaaggattcaaagaaagagctggacaaacatcagctggaggcccatggtgcaggtggagagcccgatgcccccaagaagaagaagaagaggcttccagtgacatgtgacctctgtggcagagaatttgcccatgcctcaggcatgcagtaccataagctgacagagcacttcgatgagaagcctttctcctgtgaagagtgtggggcgaagtttgcagccaattccaccctgaagaaccaccttcgccttcacaccggggaccgcccgttcatgtgcaagcactgcctcatgaccttcacccaggcctccgccctggcctatcacaccaagaagaagcactcagaagggaaaatgtatgcatgccagtactgtgatgctgtgtttgcccagtctattgagctgtcccgccacgtgaggacccacaccggggacaagccctatgtctgcagagactgtggcaagggcttccggcaagccaatggcctctccatccatctgcacacctttcacaacatagaagatccttatgactgcaagaagtgcaggatgagtttccccactcttcaggatcaccggaagcacatccatgaggtgcactccaaagagtaccacccctgccccacgtgtgggaagatcttcagtgccccgtccatgctggagcggcacatggtgacccacgttggagggaagcccttcagctgcgggatctgcaacaaggcctaccagcaattgtctggtttgtggtaccacaatcgaacccaccaccctgacgtatttgctgctcagaaccaccgatcttccaagttctcatcactccagtgcagctcctgtgacaaaaccttccccaacaccattgagcacaagaagcacatcaaagcagaacatgcagatatgaagttccatgaatgtgaccagtgtaaggagctcttccccacgccagccttgctgcaggttcatgtcaagtgccagcattcagggtcccagccattccggtgcttgtactgtgctgctactttccgttttcctggagcattgcagcaccatgtcaccacggagcacttcaagcagtcagagaccaccttcccctgtgagctctgtggggaactcttcacctcccaggcccagcttgacagtcacctggaatctgagcacccaaaggtgatgagcacggaaacccaggccgcagcctcacagatggcgcagtttggaggagacccagcttgccgggtcgcaggtgtttgtgacgttgccagattctcaggcatctcaggccagctctgagctcgtggcggtgactgtggaggacttgctggatggcacagtgacgctgatctgtggtgaggccaaatgagcagcctttcatccggcagagccttcctgcgtttgcagcagagaggaggccccacagcttgccctttgccctccatccctggctgtcctgagtggtgagcatcttagcttagcaccaaccaacacagtctcacctagaaaacagatggaagcttcgttgttctcatagaaccaacagcatctgagccctcaacaccaacagcaccatcctctgtagcagacaggcctccctccccacaggcccgctgctgcggcctctatgacactgtccatccccaagtgacatgtggcttcagaagtagagtctgaaagagcagtgggatgggagctggtgaccagggtaccccaggaggcatgatgtgccgacagcgctcagtgggcagaatggcagttagatatgggacttggcccacagtgggggctgcaaatgctgccactgcctctggccatttaaagtgagaggggcaccaacagacaattcggggaccttaggccccttcctgaggcacacttggccccttcctcggtcctatcatcctaccctctgctggggttccccctccacccagtggccacgcccagcaccctattgatggctataggacaggtagccctcatttccatgcctgataaccccttgtcagttgtcagctcttcccaaaacaaagctctggagtttctgctggaagtgtttaatgtgaggcatcagctgctagacagtgtctgcctttccaggacattcttcttggtattccttacctgaagcctggttcccacagctcttccgtgtcatcttcatccccttcctttaatcaaaggctgaaatctctgcctgacctggcagcctggctccctctgggtcatatggtgcagactgtgaccagcaccaggcaggcagtcctgtctgcgtgtggaggagcagccgtgactgcccgtggctctgctgccgcccactccctgccttgtgagtggcctgctgcctcacctcccgcaggccgccacacttattgcaggtcagtgatcctttggagtttgaatttcacaaagctttttttatcttcagttcctaaaatataatctgataattaatggtttgtggaatccattatgaagtgcaattagatagatgtaggttcctgccgtttggagagaatgactagcatttatcttcttttccttccatgccaaaggttggagtctgctggtgcggtgtttacacaccaggcagggctgtctgccaccttgtgtggcttgaccccctgtggaggggagtgcctggttggatcccacactggcagagatggggccaccccttccttccaggcacatctcacattgccatgtacagaggcaggagtcacgtttggtcaccatggaagcttttattgctcccacatggtcaggtctcaccctgcttgaagcgcagaaggcacagccttactgaccagcacgcccactgactggcatctgccggctttgtgcaggcagccccgacggtttccacagcgagcgccagctccggccagcctgggacagctcatcccagccgactacacctgcttctggtcctgtccacattttgatacgcagatcacttgagcttgtcaattagggttctgccattctgaaataaatgaagtttctaaagcagagtcggcctcagaagccaaaaactgaccagaagatggtgctcaaacctttaagacttcatctccatgtgaagggctcactgtttctaccaaggctgtgcctgtattaaggcttttccgtcctgggaactgtcagtctgggagagctcttgatctgcaggtggcaaaatggcactgaatatccccttggcagcagagaaaacccactgaaagatcgtagagtggcacatgcttacagggcattggtgccaagtccagtggatgagaatccagcccctcacaagctgtgggatggggcttgggagttgcagtgaatgtcattaaaatttcttccaaaacaaaactagaaataattgctgagggcttatagggaagtgatttaaaaagaaaaaacaaacaacaacaaaaaaaactcttcggaataaagagggctgtaaattttgaattccagtgtcagatcctttcaagcactgagaaattctttctcaggtttctttttttgggggagacagggtcttgctctgtcacccagactggaacacagtggcacgatcttggctcactgcaacctctgcgggctcacgcaatcctcctgccacagcttcccaagtagctgggaccacaggcgtgagccaccactgctggccagtttttgtatttttttttttttttgtagagacagggtctcgccatgttgcccaggctggtttaaaactcctgagctcaagcagttctcccacctgggcctcccaaagtgctaggattacagacatgagccactacgcctggccaggtttctgttggagacccagattgtgacaagacatttgttttcttcggaatcaccagatttgcagcttactgtgccgagagtggactggctgccggggcccatcagatgccctctggcccatggcacactcagcagaaggcacaaacccagtgctggttctcatcaagaaagaggggaaggcccttcccgagtttactgtctgctctgagtgggctccgcactggctgactgattttatagtcttgctctctagagaagcccaggcatggatcttataggaaaactttctgactctgcttggccattttatccttttctcctacttctgcccaagagacctgaattgctgccatagaggacagtgtttgtgtggtctcctgagtccacatcgctcgcttccatggggtcccggtgttgtttttgcctcgttccccataggctgctgcccttatggcctctggactgaactctggggcctttggggtggtgtgaaggagtctgtgggcttcttggaacacatggatctgttcggtgggtccccagacctctgctcccagagctcatggcccaggtggtgaggagggaaaggcagtcagattccaggctggagtgtgattctgtgggaatactggggtcagttatggaacaggacttgcccatcataggtaagtgagacagcaaatagatgattcaagagcaaggattactgcgggaaggtgagactcctactgtccacgcgcatgagcagaacctggaaccagaggggcagggaccaggggtctttactcatttattttatgggtaaagagacatgaagagacagcctctctcttctgtctcagaagctctgtgtttgggaaactttgagcccagtgagtagcagggtctgcagtgtgagtaccaggtttccctggcaatccaggtctcctctgaggaagcattctgacttcccactgaccacggaaggcatgtcagcttcatgcctcgggctagagttctgataatcggggctgaggggtgaaaagaaatccagtcagacagacagtggggagacaggtccctgccctttatttgcgggatcaatcagggactcccagaaaggaaggagaatggtgagaagggccctaagagttcgtctctcacctgggggctggtgacgtggtcaccacaagctgaagacaggctaatggggtggcgggtgtgtgtttaaacctcacgtgcctggaagctgcacattgaccaaaggagggagggaagtgctaaccatgtatagagtgggcaggcggttccagggagacaagcagcatgttattaaattgggcctaggcagttggacgataatggagaaaaagcagggatgctataatgagtcctccccaagggtgagttcagcaccccagccctgttctgcttgtatcccagtgatacttgggaggtaggaagaaaatgggagtaagagaacaatttggggctgaagggagtgtcagaggcacgttgatccttgttttgttgtcatggaaacttcggggctggtgggacttaggccaaaagctcagaggcacagccaaaatttagaagcttgctactcctacgactcggcctataaggaagagagaagctgtctgtactttggggactacattgctgaaggaaaaaaatcactccctggctaattaagattgcttccaaattgggggaatgtgtgtcatttcctttaccaaggccagtcatccctgcttccacccatggtcaggacagtcagccactacgtgatgctgtataaattggattacaaaccatattcttgttcagcttgcactaatctatataaataaaatatgtactttgaaaaaaattaggctacatgagtttcaaatggactgtgatgttatagacctgctttctctttggttctgggccagtgtcagacggggacaggggtgataggcctggtgtcctaggggccatttgtgtaccttgaggccgtgttaacatggcctgggggaaagaaagctctcctgtcacttggagtctcattcctaaaccctccttcccagggagcaagtgtggggcagggtttcagagcacaggctttggtgtccagcctgggtacatccagctgtcccgctgtctaactgacattgtgtgagatgcttactctctctgagctccctcctcctggctcccaactttattataaaatggggaaaatgattgtgcttgccctacagaattgtagtatgaattaaaagtctggatttaatgtatttaatatagaaaattttagcttttattaataaaagtttttggcatacaaaaaaactat

SEQ ID NO: 319689 - DNA, 262 bp, Homo sapiens
aatggagggaggaaaaaatcaaggttttgctccagaagcctgaagtcctcccaggagggagtgaggcgtctctatccacacagagagcatctgcagacaggagccatgggggagtagtggtgagtatcctaaaaactcaattccagccaaggactgccacctccacttaaccctctgggtcccctggcaggtgggactatggctccatgtttcagaggggacaagcagggctgggggtcacctctgctccaggatatcctcc

SEQ ID NO: 319690 - DNA, 766 bp, Homo sapiens
tgattagcagccccaactaatgggtccaacctcagctccagacaccgctgcgctggtcgcccatccgccatcactgttgatgccagggtggttcttcccttcactgttgatgcccttggactctggtgaggcgcaggggaggggggaccgccactggcccctttccccggagtttctgggtggcacacagccccacagctcggcctctatctgtctgacccgtggtcctttgtgtgcacacagcactgggcagtgtggagggagcctggaggccactgccctcttccagtccccttgccagtctcggggtaccaggtgtctgggtgctggcagagccggcactgatgttttctggggtcaccagaaagccctggtttcaccacaaattgtgactgtcaggacacagtgctgctatggtcaggattcctttccatatgctgcttcagcctcagacctcggtgggccttaagagtaggggctgctcagccaggcgcagtggctcacgcctgtaatcccagcactttgggaggcagaggcgggtgggtcacctgaggtcgggagatcgagaccagcctgaccaatatggagaaaccctgtctctactaaatatacaaaattagccgggtgtggtggcatgtgcctgtaatcccagctacttaggaggctgaggcaggagaatcgcttgaacccaggaggcggaggttgcggtgagccaagatcgcaccattgcactccagcctgggcaacaagagcgaaactccgtctc

SEQ ID NO: 319691 - DNA, 142 bp, Homo sapiens
aattcaagcttctaacgatgtacggggacatgggtttttgttttactgctgtgcttgatgtacatgaagtattgtgtataaaaaaagagataagatttaaccaacatcaacaaaataaaaacccaaaatagtgctgtgttgg

SEQ ID NO: 319692 - DNA, 4263 bp, Homo sapiens
  misc_feature (2999)..(2999): n is a, c, g, or t
  misc_feature (3063)..(3063): n is a, c, g, or t
  misc_feature (3149)..(3149): n is a, c, g, or t
ggcgctgggcgggcggctgtgagcggcgctcggggcgcgctaggcggggagccgagccgggctggcggcaggcggacggggcgggcgcgtgcggcgcgagccgggcgctgaggacaagggccgctggtagggccggccggccggcgggcggagcgccgccgccgacgcacacgaggtgaccaggcattgatgcacccccaggaaggccacgcgctcaggaggcccccccgccccgctggctgctgctcacatggtgtctgggcccttggcactccgttcatgcgggagatggcaggggctggcacatgacagtggagcagaaatttggcctgttttctgctgagataaaggaagcagaccccctggctgcctcggaagcaagtcaacccaaaccctgtccccccgaagtgaccccccactacatctggatcgacttcctggtgcagcggtttgagatcgccaagtactgcagctctgaccaagtggagatcttctccagcctgctgcagcgctccatgtccctgaacatcggcagggccaaggggagcatgaaccggcacgtggcggccatcgggccccgcttcaagctgctgaccctggggctgtccctcctgcatgccgatgtggttccaaatgcaaccatccgcaatgtgcttcgcgagaagatctactccactgcctttgactacttcagctgtcccccaaagtttcctactcaaggagagaagcggctgcgtgaagacataagcatcatgattaaattttggaccgccatgttctcagataagaagtacctgaccgccagccagcttgttcccccagctgacatcggcgacctcctggagcagttagtagaggagaacacaggctccttgtcgggcccagcgaaggacttttaccagcgggagtttgatttctttaacaagatcaccaacgtgtcggctatcatcaagccctaccctaaaggcgacgagagaaagaaggcttgtctgtcggccctgtctgaagtgacggtgcagccaggctgctccctgcccagcaaccccgaagccattgtgctggacgtcgactacaagtctgggaccccgatgcagagtgctgcaaaagccccatatctggccaagttcaaggtgaagcgatgtggagttagtgaacttgaaaaagaaggtctgcggtgccgctcagactctgaggatgagtgcagcacgcaggaggccgacggccagaagatctcctggcaggcagccatcttcaaactgggagacgactgccggcaggacatgctggccctgcagatcatcgacctcttcaagaacatcttccagctggtcggcctggacctctttgtttttccctaccgcgtggtggccactgcccctgggtgcggggtgatcgagtgcatccccgactgcacctcccgggaccagctgggccgccagacagacttcggcatgtacgactacttcacacgccagtacggggatgagtccactctggccttccagcaggtagccagggtggccacaggccggggaaagtcgtgtgtgctccaccctaccccagccacccatacccagcctctacccacaccctgctctcctcagtcatcctttgttaagggttaaaaccagggcacctgggctgggcacggtggctcacgcctgtaatcctagcactttgggaggccgaggcgggcagatcacgaggtcaagagatcaaaaccatcctggccaaaatggtgaaccctgtctctactaaaaatacaaaaattagctgggcatagtggcacgcgcctgcagtcccagctactcaggaagctgaggcaggagaatcgcttgaacccaggaggcagaggttgctgtgagccgagattgcatgccactgcactccagcctggcgacagagcgagactccatttaaaaaaaaaaacaccagggcatctgtaagccactttgggagtcaaaagaatgtagagctgggctggactccttagaagaaagttaagttctgagtgtgggaggaagtgcctgcacccccacatccagacagcccgtcactcctgctgccgaagactgacttgctgattcgggctctgcctccatagtgggggcacagagccagggagagtgcccacaggcccagggatcctgggtgtgggaccagggagaatgcccacaggccccagggcctttttgagcccagggcgctctctgcacaggcccgctacaacttcatccgaagcatggccgcctacagcctcctgctgttcctgctgcagatcaaggacagacacaacggcaacattatgctggacaagaagggccatatcatccacatcggtcagccagccacagcgccaccctcctctcccttcaccccggcacccaggggtggatagggatccccaccccacagagaggagaatgcccaggaccaccctgccaggagtgtcagggtccagctctgaggtccgaactgtcggccaccaagctgttctgctgtagagggtgcctggccccggccccagggagctggggcgagagccgccattgctctgagtcagaagctggagctgggcggagtggggctcgtccaggttcagtgccccagcttggctccttcctccacttcctcccttctctttctctgcctgctgccccaccacccaccccatcactgtctccaagaaaacacaacctgccttttgggggtggagggggtgctcctgttgcagagtccttttccactcctcaaaacagaccactcgtccttgcccgccctggctcctacccagtcacaggcagctctttggggttttgcagactttggcttcatgtttgaaagctcgccgggcggcaatctcggctgggaacccgacatcaagctgacggatgagatggtgatgatcatggggggcaagatggaggccacacccttcaagtggttcatggagatgtgtgtccgaggctacctggctgtgcggtgagcctgggtgaggnccagggtggaggcggagggggtgtgtggaacgttctgagatcccctttaggatgaagggaatcnggttccagagagtgaggtaggtgctagcagccacctgctgacctacacctgtcctttggtcacctctgtctgcccacctgtgccantaaattcttgctctgggcatctaattccaaccaccttccccacaatcctgcccacgccttcagccatgggctctccctttctgggcatcccatccaccctgtcaccaaagcctgagcacctgccaccccacaggctacgtgccaaagatgggctttgtcccagtttcatatacaggtcacttggccaaggccacagtccaacctgggttcatccccactgccccgcagagaaaggcaggtcagcgtgtctgcatcccacccaggtgcagaagccatggccggcagccttatgtgggggacagggcaggacactcagcctgtccagagtgcgtatgggcagcccttgcctgggcagtacgggtgaccgagtgcagcagatcgaaagttgcctcggggatgtgcaagatgtggcaggcgaggtgggtggcaggagcccacacctgaggctgttggcatcagccagtccacaggactacaggcagggccaccacctaggctggcctcagcccaccgctccctcctgtctctccccaggccctacatggatgtggtcgtctccctggtcactatcatgttggacacgggcctgccctgttttcgcggccagacaatcaagttcttgaagcacaggtttagccccaacatgactgagcgcgaggctgcaaatttcatcatgaaggtcatccagagctgcttcctcagcaacaggagccggacctacaacatgatccagtactatcagaatgacatcccctactgaggaggggaccttcgagggcctctgccccatgtgcccttgaagctgccccacaatcatggagccctgcgacctacccgccctgccgccacatgcagtggaggagaggcctgtggcccgaagagcctggtagcgcctcctggggcagcacgtgggtggcgcaggcttagtaacgccgtggactgcagcgacaatcagtggatggtgctgtctatgcacaggtgtgagtcctctgtttgcactggacatattccctacctgttttatttcataggtacatgaagtattgtgtataaaaaaagagataagatttaaccaacatcaacaaaataaaaacccaaaatagtgctgtgttgg

SEQ ID NO: 319693 - DNA, 3560 bp, Homo sapiens
ggcgctgggcgggcggctgtgagcggcgctcggggcgcgctaggcggggagccgagccgggctggcggcaggcggacggggcgggcgcgtgcggcgcgagccgggcgctgaggacaagggccgctggtagggccggccggccggcgggcggagcgccgccgccgacgcacacgaggtgaccaggcattgatgcacccccaggaaggccacgcgctcaggaggcccccccgccccgctggctgctgctcacatggtgtctgggcccttggcactccgttcatgcgggagatggcaggggctggcacatgacagtggagcagaaatttggcctgttttctgctgagataaaggaagcagaccccctggctgcctcggaagcaagtcaacccaaaccctgtccccccgaagtgaccccccactacatctggatcgacttcctggtgcagcggtttgagatcgccaagtactgcagctctgaccaagtggagatcttctccagcctgctgcagcgctccatgtccctgaacatcggcagggccaaggggagcatgaaccggcacgtggcggccatcgggccccgcttcaagctgctgaccctggggctgtccctcctgcatgccgatgtggttccaaatgcaaccatccgcaatgtgcttcgcgagaagatctactccactgcctttgactacttcagctgtcccccaaagtttcctactcaaggagagaagcggctgcgtgaagacataagcatcatgattaaattttggaccgccatgttctcagataagaagtacctgaccgccagccagcttgttcccccagctgacatcggcgacctcctggagcagttagtagaggagaacacaggctccttgtcgggcccagcgaaggacttttaccagcgggagtttgatttctttaacaagatcaccaacgtgtcggctatcatcaagccctaccctaaaggcgacgagagaaagaaggcttgtctgtcggccctgtctgaagtgacggtgcagccaggctgctccctgcccagcaaccccgaagccattgtgctggacgtcgactacaagtctgggaccccgatgcagagtgctgcaaaagccccatatctggccaagttcaaggtgaagcgatgtggagttagtgaacttgaaaaagaaggtctgcggtgccgctcagactctgaggatgagtgcagcacgcaggaggccgacggccagaagatctcctggcaggcagccatcttcaaactgggagacgactgccggcaggacatgctggccctgcagatcatcgacctcttcaagaacatcttccagctggtcggcctggacctctttgtttttccctaccgcgtggtggccactgcccctgggtgcggggtgatcgagtgcatccccgactgcacctcccgggaccagctgggccgccagacagacttcggcatgtacgactacttcacacgccagtacggggatgagtccactctggccttccagcaggtagccagggtggccacaggccggggaaagtcgtgtgtgctccaccctaccccagccacccatacccagcctctacccacaccctgctctcctcagtcatcctttgttaagggttaaaaccagggcacctgggctgggcacggtggctcacgcctgtaatcctagcactttgggaggccgaggcgggcagatcacgaggtcaagagatcaaaaccatcctggccaaaatggtgaaccctgtctctactaaaaatacaaaaattagctgggcatagtggcacgcgcctgcagtcccagctactcaggaagctgaggcaggagaatcgcttgaacccaggaggcagaggttgcagtgagccaagatcgtgccactgcactccagcctggcgacagagcgagactccatttaaaaaaaaaaacaccagggcatctgtaagccactttgggagtcaaaagaatgtagagctgggctggactccttagaagaaagttaagttctgagtgtgggaggaagtgcctgcacccccacatccagacagcccgtcactcctgctgccgaagactgacttgctgattcgggctctgcctccatagtgggggcacagagccagggagagtgcccacaggcccagggatcctgggtgtgggaccagggagaatgcccacaggccccagggcctttttgagcccagggcgctctctgcacaggcccgctacaacttcatccgaagcatggccgcctacagcctcctgctgttcctgctgcagatcaaggacagacacaacggcaacattatgctggacaagaagggccatatcatccacatcggtcagccagccacagcgccaccctcctctcccttcaccccggcacccaggggtggatagggatccccaccccacagagaggagaatgcccaggaccaccctgccaggagtgtcagggtccagctctgaggtccgaactgtcggccaccaagctgttctgctgtagagggtgcctggccccggccccagggagctggggcgagagccgccattgctctgagtcagaagctggagctgggcggagtggggctcgtccaggttcagtgccccagcttggctccttcctccacttcctcccttctctttctctgcctgctgccccaccacccaccccatcactgtctccaagaaaacacaacctgccttttgggggtggagggggtgctcctgttgcagagtccttttccactcctcaaaacagaccactcgtccttgcccgccctggctcctacccagtcacaggcagctctttggggttttgcagactttggcttcatgtttgaaagctcgccgggcggcaatctcggctgggaacccgacatcaagctgacggatgagatggtgatgatcatggggggcaagatggaggccacacccttcaagtggttcatggagatgtgtgtccgaggctacctggctgtgcggccctacatggatgtggtcgtctccctggtcactatcatgttggacacgggcctgccctgttttcgcggccagacaatcaagttcttgaagcacaggtttagccccaacatgactgagcgcgaggctgcaaatttcatcatgaaggtcatccagagctgcttcctcagcaacaggagccggacctacaacatgatccagtactatcagaatgacatcccctactgaggaggggaccttcgagggcctctgccccatgtgcccttgaagctgccccacaatcatggagccctgcgacctacccgccctgccgccacatgcagtggaggagaggcctgtggcccgaagagcctggtagcgcctcctggggcagcacgtgggtggcgcaggcttagtaacgccgtggactgcagcgacaatcagtggatggtgctgtctatgcacaggtgtgagtcctctgtttgcactggacatattccctacctgttttatttcataggtacatgaagtattgtgtataaaaaaagagataagatttaaccaacatcaacaaaataaaaacccaaaatagtgctgtgttgg

SEQ ID NO: 319694 - DNA, 2907 bp, Homo sapiens
  misc_feature (1643)..(1643): n is a, c, g, or t
  misc_feature (1707)..(1707): n is a, c, g, or t
  misc_feature (1793)..(1793): n is a, c, g, or t
gcctcagaactggcctttcctcctagtgcggggtgatcgagtgcatccccgactgcacctcccgggaccagctgggccgccagacagacttcggcatgtacgactacttcacacgccagtacggggatgagtccactctggccttccagcaggtagccagggtggccacaggccggggaaagtcgtgtgtgctccaccctaccccagccacccatacccagcctctacccacaccctgctctcctcagtcatcctttgttaagggttaaaaccagggcacctgggctgggcacggtggctcacgcctgtaatcctagcactttgggaggccgaggcgggcagatcacgaggtcaagagatcaaaaccatcctggccaaaatggtgaaccctgtctctactaaaaatacaaaaattagctgggcatagtggcacgcgcctgcagtcccagctactcaggaagctgaggcaggagaatcgcttgaacccaggaggcagaggttgctgtgagccgagattgcatgccactgcactccagcctggcgacagagcgagactccatttaaaaaaaaaaacaccagggcatctgtaagccactttgggagtcaaaagaatgtagagctgggctggactccttagaagaaagttaagttctgagtgtgggaggaagtgcctgcacccccacatccagacagcccgtcactcctgctgccgaagactgacttgctgattcgggctctgcctccatagtgggggcacagagccagggagagtgcccacaggcccagggatcctgggtgtgggaccagggagaatgcccacaggccccagggcctttttgagcccagggcgctctctgcacaggcccgctacaacttcatccgaagcatggccgcctacagcctcctgctgttcctgctgcagatcaaggacagacacaacggcaacattatgctggacaagaagggccatatcatccacatcggtcagccagccacagcgccaccctcctctcccttcaccccggcacccaggggtggatagggatccccaccccacagagaggagaatgcccaggaccaccctgccaggagtgtcagggtccagctctgaggtccgaactgtcggccaccaagctgttctgctgtagagggtgcctggccccggccccagggagctggggcgagagccgccattgctctgagtcagaagctggagctgggcggagtggggctcgtccaggttcagtgccccagcttggctccttcctccacttcctcccttctctttctctgcctgctgccccaccacccaccccatcactgtctccaagaaaacacaacctgccttttgggggtggagggggtgctcctgttgcagagtccttttccactcctcaaaacagaccactcgtccttgcccgccctggctcctacccagtcacaggcagctctttggggttttgcagactttggcttcatgtttgaaagctcgccgggcggcaatctcggctgggaacccgacatcaagctgacggatgagatggtgatgatcatggggggcaagatggaggccacacccttcaagtggttcatggagatgtgtgtccgaggctacctggctgtgcggtgagcctgggtgaggnccagggtggaggcggagggggtgtgtggaacgttctgagatcccctttaggatgaagggaatcnggttccagagagtgaggtaggtgctagcagccacctgctgacctacacctgtcctttggtcacctctgtctgcccacctgtgccantaaattcttgctctgggcatctaattccaaccaccttccccacaatcctgcccacgccttcagccatgggctctccctttctgggcatcccatccaccctgtcaccaaagcctgagcacctgccaccccacaggctacgtgccaaagatgggctttgtcccagtttcatatacaggtcacttggccaaggccacagtccaacctgggttcatccccactgccccgcagagaaaggcaggtcagcgtgtctgcatcccacccaggtgcagaagccatggccggcagccttatgtgggggacagggcaggacactcagcctgtccagagtgcgtatgggcagcccttgcctgggcagtacgggtgaccgagtgcagcagatcgaaagttgcctcggggatgtgcaagatgtggcaggcgaggtgggtggcaggagcccacacctgaggctgttggcatcagccagtccacaggactacaggcagggccaccacctaggctggcctcagcccaccgctccctcctgtctctccccaggccctacatggatgtggtcgtctccctggtcactatcatgttggacacgggcctgccctgttttcgcggccagacaatcaagttcttgaagcacaggtttagccccaacatgactgagcgcgaggctgcaaatttcatcatgaaggtcatccagagctgcttcctcagcaacaggagccggacctacaacatgatccagtactatcagaatgacatcccctactgaggaggggaccttcgagggcctctgccccatgtgcccttgaagctgccccacaatcatggagccctgcgacctacccgccctgccgccacatgcagtggaggagaggcctgtggcccgaagagcctggtagcgcctcctggggcagcacgtgggtggcgcaggcttagtaacgccgtggactgcagcgacaatcagtggatggtgctgtctatgcacaggtgtgagtcctctgtttgcactggacatattccctacctgttttatttcataggtacatgaagtattgtgtataaaaaaagagataagatttaaccaacatcaacaaaataaaaacccaaaatagtgctgtgttgg

SEQ ID NO: 319695 - DNA, 2852 bp, Homo sapiens
ggcgctgggcgggcggctgtgagcggcgctcggggcgcgctaggcggggagccgagccgggctggcggcaggcggacggggcgggcgcgtgcggcgcgagccgggcgctgaggacaagggccgctggtagggccggccggccggcgggcggagcgccgccgccgacgcacacgaggtgaccaggcattgatgcacccccaggaaggccacgcgctcaggaggcccccccgccccgctggctgctgctcacatggtgtctgggcccttggcactccgttcatgcgggagatggcaggggctggcacatgacagtggagcagaaatttggcctgttttctgctgagataaaggaagcagaccccctggctgcctcggaagcaagtcaacccaaaccctgtccccccgaagtgaccccccactacatctggatcgacttcctggtgcagcggtttgagatcgccaagtactgcagctctgaccaagtggagatcttctccagcctgctgcagcgctccatgtccctgaacatcggcagggccaaggggagcatgaaccggcacgtggcggccatcgggccccgcttcaagctgctgaccctggggctgtccctcctgcatgccgatgtggttccaaatgcaaccatccgcaatgtgcttcgcgagaagatctactccactgcctttgactacttcagctgtcccccaaagtttcctactcaaggagagaagcggctgcgtgaagacataagcatcatgattaaattttggaccgccatgttctcagataagaagtacctgaccgccagccagcttgttcccccagctgacatcggcgacctcctggagcagttagtagaggagaacacaggctccttgtcgggcccagcgaaggacttttaccagcgggagtttgatttctttaacaagatcaccaacgtgtcggctatcatcaagccctaccctaaaggcgacgagagaaagaaggcttgtctgtcggccctgtctgaagtgacggtgcagccaggctgctccctgcccagcaaccccgaagccattgtgctggacgtcgactacaagtctgggaccccgatgcagagtgctgcaaaagccccatatctggccaagttcaaggtgaagcgatgtggagttagtgaacttgaaaaagaaggtctgcggtgccgctcagactctgaggatgagtgcagcacgcaggaggccgacggccagaagatctcctggcaggcagccatcttcaaactgggagacgactgccggcaggacatgctggccctgcagatcatcgacctcttcaagaacatcttccagctggtcggcctggacctctttgtttttccctaccgcgtggtggccactgcccctgggtgcggggtgatcgagtgcatccccgactgcacctcccgggaccagctgggccgccagacagacttcggcatgtacgactacttcacacgccagtacggggatgagtccactctggccttccagcaggcccgctacaacttcatccgaagcatggccgcctacagcctcctgctgttcctgctgcagatcaaggacagacacaacggcaacattatgctggacaagaagggccatatcatccacatcggtcagccagccacagcgccaccctcctctcccttcaccccggcacccaggggtggatagggatccccaccccacagagaggagaatgcccaggaccaccctgccaggagtgtcagggtccagctctgaggtccgaactgtcggccaccaagctgttctgctgtagagggtgcctggccccggccccagggagctggggcgagagccgccattgctctgagtcagaagctggagctgggcggagtggggctcgtccaggttcagtgccccagcttggctccttcctccacttcctcccttctctttctctgcctgctgccccaccacccaccccatcactgtctccaagaaaacacaacctgccttttgggggtggagggggtgctcctgttgcagagtccttttccactcctcaaaacagaccactcgtccttgcccgccctggctcctacccagtcacaggcagctctttggggttttgcagactttggcttcatgtttgaaagctcgccgggcggcaatctcggctgggaacccgacatcaagctgacggatgagatggtgatgatcatggggggcaagatggaggccacacccttcaagtggttcatggagatgtgtgtccgaggctacctggctgtgcggccctacatggatgtggtcgtctccctggtcactatcatgttggacacgggcctgccctgttttcgcggccagacaatcaagttcttgaagcacaggtttagccccaacatgactgagcgcgaggctgcaaatttcatcatgaaggtcatccagagctgcttcctcagcaacaggagccggacctacaacatgatccagtactatcagaatgacatcccctactgaggaggggaccttcgagggcctctgccccatgtgcccttgaagctgccccacaatcatggagccctgcgacctacccgccctgccgccacatgcagtggaggagaggcctgtggcccgaagagcctggtagcgcctcctggggcagcacgtgggtggcgcaggcttagtaacgccgtggactgcagcgacaatcagtggatggtgctgtctatgcacaggtgtgagtcctctgtttgcactggacatattccctacctgttttatttcataggtacatgaagtattgtgtataaaaaaagagataagatttaaccaacatcaacaaaataaaaacccaaaatagtgctgtgttgg

SEQ ID NO: 319696 - DNA, 2248 bp, Homo sapiens
ggcgctgggcgggcggctgtgagcggcgctcggggcgcgctaggcggggagccgagccgggctggcggcaggcggacggggcgggcgcgtgcggcgcgagccgggcgctgaggacaagggccgctggtagggccggccggccggcgggcggagcgccgccgccgacgcacacgaggtgaccaggcattgatgcacccccaggaaggccacgcgctcaggaggcccccccgccccgctggctgctgctcacatggtgtctgggcccttggcactccgttcatgcgggagatggcaggggctggcacatgacagtggagcagaaatttggcctgttttctgctgagataaaggaagcagaccccctggctgcctcggaagcaagtcaacccaaaccctgtccccccgaagtgaccccccactacatctggatcgacttcctggtgcagcggtttgagatcgccaagtactgcagctctgaccaagtggagatcttctccagcctgctgcagcgctccatgtccctgaacatcggcagggccaaggggagcatgaaccggcacgtggcggccatcgggccccgcttcaagctgctgaccctggggctgtccctcctgcatgccgatgtggttccaaatgcaaccatccgcaatgtgcttcgcgagaagatctactccactgcctttgactacttcagctgtcccccaaagtttcctactcaaggagagaagcggctgcgtgaagacataagcatcatgattaaattttggaccgccatgttctcagataagaagtacctgaccgccagccagcttgttcccccagctgacatcggcgacctcctggagcagttagtagaggagaacacaggctccttgtcgggcccagcgaaggacttttaccagcgggagtttgatttctttaacaagatcaccaacgtgtcggctatcatcaagccctaccctaaaggcgacgagagaaagaaggcttgtctgtcggccctgtctgaagtgacggtgcagccaggctgctccctgcccagcaaccccgaagccattgtgctggacgtcgactacaagtctgggaccccgatgcagagtgctgcaaaagccccatatctggccaagttcaaggtgaagcgatgtggagttagtgaacttgaaaaagaaggtctgcggtgccgctcagactctgaggatgagtgcagcacgcaggaggccgacggccagaagatctcctggcaggcagccatcttcaaactgggagacgactgccggcaggacatgctggccctgcagatcatcgacctcttcaagaacatcttccagctggtcggcctggacctctttgtttttccctaccgcgtggtggccactgcccctgggtgcggggtgatcgagtgcatccccgactgcacctcccgggaccagctgggccgccagacagacttcggcatgtacgactacttcacacgccagtacggggatgagtccactctggccttccagcagactttggcttcatgtttgaaagctcgccgggcggcaatctcggctgggaacccgacatcaagctgacggatgagatggtgatgatcatggggggcaagatggaggccacacccttcaagtggttcatggagatgtgtgtccgaggctacctggctgtgcggccctacatggatgtggtcgtctccctggtcactatcatgttggacacgggcctgccctgttttcgcggccagacaatcaagttcttgaagcacaggtttagccccaacatgactgagcgcgaggctgcaaatttcatcatgaaggtcatccagagctgcttcctcagcaacaggagccggacctacaacatgatccagtactatcagaatgacatcccctactgaggaggggaccttcgagggcctctgccccatgtgcccttgaagctgccccacaatcatggagccctgcgacctacccgccctgccgccacatgcagtggaggagaggcctgtggcccgaagagcctggtagcgcctcctggggcagcacgtgggtggcgcaggcttagtaacgccgtggactgcagcgacaatcagtggatggtgctgtctatgcacaggtgtgagtcctctgtttgcactggacatattccctacctgttttatttcataggtacatgaagtattgtgtataaaaaaagagataagatttaaccaacatcaacaaaataaaaacccaaaatagtgctgtgttgg

SEQ ID NO: 319697 - DNA, 1987 bp, Homo sapiens
ggcgctgggcgggcggctgtgagcggcgctcggggcgcgctaggcggggagccgagccgggctggcggcaggcggacggggcgggcgcgtgcggcgcgagccgggcgctgaggacaagggccgctggtagggccggccggccggcgggcggagcgccgccgccgacgcacacgaggtgaccaggcattgatgcacccccaggaaggccacgcgctcaggaggcccccccgccccgctggctgctgctcacatggtgtctgggcccttggcactccgttcatgcgggagatggcaggggctggcacatgacagtggagcagaaatttggcctgttttctgctgagataaaggaagcagaccccctggctgcctcggaagcaagtcaacccaaaccctgtccccccgaagtgaccccccactacatctggatcgacttcctggtgcagcggtttgagatcgccaagtactgcagctctgaccaagtggagatcttctccagcctgctgcagcgctccatgtccctgaacatcggcagggccaaggggagcatgaaccggcacgtggcggccatcgggccccgcttcaagctgctgaccctggggctgtccctcctgcatgccgatgtggttccaaatgcaaccatccgcaatgtgcttcgcgagaagatctactccactgcctttgactacttcagctgtcccccaaagtttcctactcaaggagagaagcggctgcgtgaagacataagcatcatgattaaattttggaccgccatgttctcagataagaagtacctgaccgccagccagcttgttcccccagctgacatcggcgacctcctggagcagttagtagaggagaacacaggctccttgtcgggcccagcgaaggacttttaccagcgggagtttgatttctttaacaagatcaccaacgtgtcggctatcatcaagccctaccctaaaggcgacgagagaaagaaggcttgtctgtcggccctgtctgaagtgacggtgcagccaggctgctccctgcccagcaaccccgaagccattgtgctggacgtcgactacaagtctgggaccccgatgcagagtgctgcaaaagccccatatctggccaagttcaaggtgaagcgatgtggagttagtgaacttgaaaaagaaggtctgcggtgccgctcagactctgaggatgagtgcagcacgcaggaggccgacggccagaagatctcctggcaggcagccatcttcaaactgggagacgactgccggcaggacatgctggccctgcagatcatcgacctcttcaagaacatcttccagctggtcggcctggacctctttgtttttccctaccgcgtggtggccactgcccctgggtgcggggtgatcgagtgcatccccgactgcacctcccgggaccagctgggccgccagacagacttcggcatgtacgactacttcacacgccagtacggggatgagtccactctggccttccagcaggtagccagggtggccacaggccggggaaagtcgtgtgtgctccaccctaccccagccacccatacccagcctctacccacaccctgctctcctcagtcatcctttgttaagggttaaaaccagggcacctgggctgggcacggtggctcacgcctgtaatcctagcactttgggaggccgaggcgggcagatcacgaggtcaagagatcaaaaccatcctggccaaaatggtgaaccctgtctctactaaaaatacaaaaattagctgggcatagtggcacgcgcctgcagtcccagctactcaggaagctgaggcaggagaatcgcttgaacccaggaggcagaggttgctgtgagccgagattgcaccactgcactccagcctgggcaacagagtgagactccatctgaaaaaaaaaaaaaaccctattcatatcacctgtcgtccgccttggcccagtcgattctagacttggcgc

SEQ ID NO: 319698 - DNA, 472 bp, Homo sapiens
agggcagggaagagagtccataaggtgaacttggccccaggccaggctcctgctctgaccgggtccggggctccctcacaggctgctgaccctggggctgtccctcctgcatgccgatgtggttccaaatgcaaccatccgcaatgtgcttcgcgagaagatctactccactgcctttgactacttcaggtactcccccaagatgtgctgtgcagcatccagggacggcccagcccctccaagtgctccatcgccccagacccccaggaagtcactcacaggaatacacagttgcccagttgtgctcaccaacctcctccttcagtatccctggccctgtggatttaaatacctttcagccctgtgcatgtgtcccgtgtacttagagctagcctcccagcgagatgtaggcaaattttccctcagttcaactgatttaggagattaagtgcgtccatttaatttccctgtt

SEQ ID NO: 319699 - DNA, 319 bp, Homo sapiens
  misc_feature (313)..(313): n is a, c, g, or t
ccaggcgtggccttcacagcaccccatcttccaacatgtggaccccaaaggtacatttccagggcatggctctcagctgaagtccgtccccatggaagaccctcctcccactgggccagggagccagcacggccctgcccatggcagccctgacacagcctctcctccaggcacaggtttagccccaacatgactgagcgcgaggctgcaaatttcatcatgaaggtcatccagagctgcttcctcagcaacaggagccggaccgttctgattgctcaggctggagtgcaatggcgtgatctcggctcaccanaaactc

SEQ ID NO: 319700 - DNA, 4482 bp, Homo sapiens
  misc_feature (3218)..(3218): n is a, c, g, or t
  misc_feature (3282)..(3282): n is a, c, g, or t
  misc_feature (3368)..(3368): n is a, c, g, or t
cctcggctccatgggccttcctaatctggttagcgggatgaaggtatcgggtagggtctgtgtggggtggagaggaggagccaggccctggatccagaaccctcttctgcccttgccagctcagcagcccacagaggggtcttcccgctcacagccacagagggttatcagggttatagagaagagtcacctacccagtgcctgtcagggcatcaggtacatcccgggtgctgccacctcacacctgcaatgtccacacggtgaaccgggttgaacagaatgcagcctcgagaggctggagaaaatacaccaagcactgacacagatgaccctgggatgtgggactataggcgatcttcaattttttcttcatacttttcttggtttctaaatcttattcagtgagcacgtgttcctttttttaattagagaaaacttgacagtagcccctttttgtgtttcacagaggagctaacattccttctgtacctgtagttcatgcgggagatggcaggggctggcacatgacagtggagcagaaatttggcctgttttctgctgagataaaggaagcagaccccctggctgcctcggaagcaagtcaacccaaaccctgtccccccgaagtgaccccccactacatctggatcgacttcctggtgcagcggtttgagatcgccaagtactgcagctctgaccaagtggagatcttctccagcctgctgcagcgctccatgtccctgaacatcggcagggccaaggggagcatgaaccggcacgtggcggccatcgggccccgcttcaagctgctgaccctggggctgtccctcctgcatgccgatgtggttccaaatgcaaccatccgcaatgtgcttcgcgagaagatctactccactgcctttgactacttcagctgtcccccaaagtttcctactcaaggagagaagcggctgcgtgaagacataagcatcatgattaaattttggaccgccatgttctcagataagaagtacctgaccgccagccagcttgttcccccagctgacatcggcgacctcctggagcagttagtagaggagaacacaggctccttgtcgggcccagcgaaggacttttaccagcgggagtttgatttctttaacaagatcaccaacgtgtcggctatcatcaagccctaccctaaaggcgacgagagaaagaaggcttgtctgtcggccctgtctgaagtgacggtgcagccaggctgctccctgcccagcaaccccgaagccattgtgctggacgtcgactacaagtctgggaccccgatgcagagtgctgcaaaagccccatatctggccaagttcaaggtgaagcgatgtggagttagtgaacttgaaaaagaaggtctgcggtgccgctcagactctgaggatgagtgcagcacgcaggaggccgacggccagaagatctcctggcaggcagccatcttcaaactgggagacgactgccggcaggacatgctggccctgcagatcatcgacctcttcaagaacatcttccagctggtcggcctggacctctttgtttttccctaccgcgtggtggccactgcccctgggtgcggggtgatcgagtgcatccccgactgcacctcccgggaccagctgggccgccagacagacttcggcatgtacgactacttcacacgccagtacggggatgagtccactctggccttccagcaggtagccagggtggccacaggccggggaaagtcgtgtgtgctccaccctaccccagccacccatacccagcctctacccacaccctgctctcctcagtcatcctttgttaagggttaaaaccagggcacctgggctgggcacggtggctcacgcctgtaatcctagcactttgggaggccgaggcgggcagatcacgaggtcaagagatcaaaaccatcctggccaaaatggtgaaccctgtctctactaaaaatacaaaaattagctgggcatagtggcacgcgcctgcagtcccagctactcaggaagctgaggcaggagaatcgcttgaacccaggaggcagaggttgctgtgagccgagattgcatgccactgcactccagcctggcgacagagcgagactccatttaaaaaaaaaaacaccagggcatctgtaagccactttgggagtcaaaagaatgtagagctgggctggactccttagaagaaagttaagttctgagtgtgggaggaagtgcctgcacccccacatccagacagcccgtcactcctgctgccgaagactgacttgctgattcgggctctgcctccatagtgggggcacagagccagggagagtgcccacaggcccagggatcctgggtgtgggaccagggagaatgcccacaggccccagggcctttttgagcccagggcgctctctgcacaggcccgctacaacttcatccgaagcatggccgcctacagcctcctgctgttcctgctgcagatcaaggacagacacaacggcaacattatgctggacaagaagggccatatcatccacatcggtcagccagccacagcgccaccctcctctcccttcaccccggcacccaggggtggatagggatccccaccccacagagaggagaatgcccaggaccaccctgccaggagtgtcagggtccagctctgaggtccgaactgtcggccaccaagctgttctgctgtagagggtgcctggccccggccccagggagctggggcgagagccgccattgctctgagtcagaagctggagctgggcggagtggggctcgtccaggttcagtgccccagcttggctccttcctccacttcctcccttctctttctctgcctgctgccccaccacccaccccatcactgtctccaagaaaacacaacctgccttttgggggtggagggggtgctcctgttgcagagtccttttccactcctcaaaacagaccactcgtccttgcccgccctggctcctacccagtcacaggcagctctttggggttttgcagactttggcttcatgtttgaaagctcgccgggcggcaatctcggctgggaacccgacatcaagctgacggatgagatggtgatgatcatggggggcaagatggaggccacacccttcaagtggttcatggagatgtgtgtccgaggctacctggctgtgcggtgagcctgggtgaggnccagggtggaggcggagggggtgtgtggaacgttctgagatcccctttaggatgaagggaatcnggttccagagagtgaggtaggtgctagcagccacctgctgacctacacctgtcctttggtcacctctgtctgcccacctgtgccantaaattcttgctctgggcatctaattccaaccaccttccccacaatcctgcccacgccttcagccatgggctctccctttctgggcatcccatccaccctgtcaccaaagcctgagcacctgccaccccacaggctacgtgccaaagatgggctttgtcccagtttcatatacaggtcacttggccaaggccacagtccaacctgggttcatccccactgccccgcagagaaaggcaggtcagcgtgtctgcatcccacccaggtgcagaagccatggccggcagccttatgtgggggacagggcaggacactcagcctgtccagagtgcgtatgggcagcccttgcctgggcagtacgggtgaccgagtgcagcagatcgaaagttgcctcggggatgtgcaagatgtggcaggcgaggtgggtggcaggagcccacacctgaggctgttggcatcagccagtccacaggactacaggcagggccaccacctaggctggcctcagcccaccgctccctcctgtctctccccaggccctacatggatgtggtcgtctccctggtcactatcatgttggacacgggcctgccctgttttcgcggccagacaatcaagttcttgaagcacaggtttagccccaacatgactgagcgcgaggctgcaaatttcatcatgaaggtcatccagagctgcttcctcagcaacaggagccggacctacaacatgatccagtactatcagaatgacatcccctactgaggaggggaccttcgagggcctctgccccatgtgcccttgaagctgccccacaatcatggagccctgcgacctacccgccctgccgccacatgcagtggaggagaggcctgtggcccgaagagcctggtagcgcctcctggggcagcacgtgggtggcgcaggcttagtaacgccgtggactgcagcgacaatcagtggatggtgctgtctatgcacaggtgtgagtcctctgtttgcactggacatattccctacctgttttatttcataggtacatgaagtattgtgtataaaaaaagagataagatttaaccaacatcaacaaaataaaaacccaaaatagtgctgtgttgg

SEQ ID NO: 319701 - DNA, 3718 bp, Homo sapiens
  misc_feature (2454)..(2454): n is a, c, g, or t
  misc_feature (2518)..(2518): n is a, c, g, or t
  misc_feature (2604)..(2604): n is a, c, g, or t
gggccagatcatccttgctaatgactggctttgggctgaccttttgtcattaagaaattgtctgcatcaccttctcactgctttgtgtgactggcctctagtccctgactccagacactcagccgttgtcctcttatggttgtttgaagctgtcccccaaagtttcctactcaaggagagaagcggctgcgtgaagacataagcatcatgattaaattttggaccgccatgttctcagataagaagtacctgaccgccagccagcttgttcccccagctgacatcggcgacctcctggagcagttagtagaggagaacacaggctccttgtcgggcccagcgaaggacttttaccagcgggagtttgatttctttaacaagatcaccaacgtgtcggctatcatcaagccctaccctaaaggcgacgagagaaagaaggcttgtctgtcggccctgtctgaagtgacggtgcagccaggctgctccctgcccagcaaccccgaagccattgtgctggacgtcgactacaagtctgggaccccgatgcagagtgctgcaaaagccccatatctggccaagttcaaggtgaagcgatgtggagttagtgaacttgaaaaagaaggtctgcggtgccgctcagactctgaggatgagtgcagcacgcaggaggccgacggccagaagatctcctggcaggcagccatcttcaaactgggagacgactgccggcaggacatgctggccctgcagatcatcgacctcttcaagaacatcttccagctggtcggcctggacctctttgtttttccctaccgcgtggtggccactgcccctgggtgcggggtgatcgagtgcatccccgactgcacctcccgggaccagctgggccgccagacagacttcggcatgtacgactacttcacacgccagtacggggatgagtccactctggccttccagcaggtagccagggtggccacaggccggggaaagtcgtgtgtgctccaccctaccccagccacccatacccagcctctacccacaccctgctctcctcagtcatcctttgttaagggttaaaaccagggcacctgggctgggcacggtggctcacgcctgtaatcctagcactttgggaggccgaggcgggcagatcacgaggtcaagagatcaaaaccatcctggccaaaatggtgaaccctgtctctactaaaaatacaaaaattagctgggcatagtggcacgcgcctgcagtcccagctactcaggaagctgaggcaggagaatcgcttgaacccaggaggcagaggttgctgtgagccgagattgcatgccactgcactccagcctggcgacagagcgagactccatttaaaaaaaaaaacaccagggcatctgtaagccactttgggagtcaaaagaatgtagagctgggctggactccttagaagaaagttaagttctgagtgtgggaggaagtgcctgcacccccacatccagacagcccgtcactcctgctgccgaagactgacttgctgattcgggctctgcctccatagtgggggcacagagccagggagagtgcccacaggcccagggatcctgggtgtgggaccagggagaatgcccacaggccccagggcctttttgagcccagggcgctctctgcacaggcccgctacaacttcatccgaagcatggccgcctacagcctcctgctgttcctgctgcagatcaaggacagacacaacggcaacattatgctggacaagaagggccatatcatccacatcggtcagccagccacagcgccaccctcctctcccttcaccccggcacccaggggtggatagggatccccaccccacagagaggagaatgcccaggaccaccctgccaggagtgtcagggtccagctctgaggtccgaactgtcggccaccaagctgttctgctgtagagggtgcctggccccggccccagggagctggggcgagagccgccattgctctgagtcagaagctggagctgggcggagtggggctcgtccaggttcagtgccccagcttggctccttcctccacttcctcccttctctttctctgcctgctgccccaccacccaccccatcactgtctccaagaaaacacaacctgccttttgggggtggagggggtgctcctgttgcagagtccttttccactcctcaaaacagaccactcgtccttgcccgccctggctcctacccagtcacaggcagctctttggggttttgcagactttggcttcatgtttgaaagctcgccgggcggcaatctcggctgggaacccgacatcaagctgacggatgagatggtgatgatcatggggggcaagatggaggccacacccttcaagtggttcatggagatgtgtgtccgaggctacctggctgtgcggtgagcctgggtgaggnccagggtggaggcggagggggtgtgtggaacgttctgagatcccctttaggatgaagggaatcnggttccagagagtgaggtaggtgctagcagccacctgctgacctacacctgtcctttggtcacctctgtctgcccacctgtgccantaaattcttgctctgggcatctaattccaaccaccttccccacaatcctgcccacgccttcagccatgggctctccctttctgggcatcccatccaccctgtcaccaaagcctgagcacctgccaccccacaggctacgtgccaaagatgggctttgtcccagtttcatatacaggtcacttggccaaggccacagtccaacctgggttcatccccactgccccgcagagaaaggcaggtcagcgtgtctgcatcccacccaggtgcagaagccatggccggcagccttatgtgggggacagggcaggacactcagcctgtccagagtgcgtatgggcagcccttgcctgggcagtacgggtgaccgagtgcagcagatcgaaagttgcctcggggatgtgcaagatgtggcaggcgaggtgggtggcaggagcccacacctgaggctgttggcatcagccagtccacaggactacaggcagggccaccacctaggctggcctcagcccaccgctccctcctgtctctccccaggccctacatggatgtggtcgtctccctggtcactatcatgttggacacgggcctgccctgttttcgcggccagacaatcaagttcttgaagcacaggtttagccccaacatgactgagcgcgaggctgcaaatttcatcatgaaggtcatccagagctgcttcctcagcaacaggagccggacctacaacatgatccagtactatcagaatgacatcccctactgaggaggggaccttcgagggcctctgccccatgtgcccttgaagctgccccacaatcatggagccctgcgacctacccgccctgccgccacatgcagtggaggagaggcctgtggcccgaagagcctggtagcgcctcctggggcagcacgtgggtggcgcaggcttagtaacgccgtggactgcagcgacaatcagtggatggtgctgtctatgcacaggtgtgagtcctctgtttgcactggacatattccctacctgttttatttcataggtacatgaagtattgtgtataaaaaaagagataagatttaaccaacatcaacaaaataaaaacccaaaatagtgctgtgttgg

SEQ ID NO: 319702 - DNA, 2369 bp, Homo sapiens
ggcgctgggcgggcggctgtgagcggcgctcggggcgcgctaggcggggagccgagccgggctggcggcaggcggacggggcgggcgcgtgcggcgcgagccgggcgctgaggacaagggccgctggtagggccggccggccggcgggcggagcgccgccgccgacgcacacgaggtgaccaggcattgatgcacccccaggaaggccacgcgctcaggaggcccccccgccccgctggctgctgctcacatggtgtctgggcccttggcactccgttcatgcgggagatggcaggggctggcacatgacagtggagcagaaatttggcctgttttctgctgagataaaggaagcagaccccctggctgcctcggaagcaagtcaacccaaaccctgtccccccgaagtgaccccccactacatctggatcgacttcctggtgcagcggtttgagatcgccaagtactgcagctctgaccaagtggagatcttctccagcctgctgcagcgctccatgtccctgaacatcggcagggccaaggggagcatgaaccggcacgtggcggccatcgggccccgcttcaagctgctgaccctggggctgtccctcctgcatgccgatgtggttccaaatgcaaccatccgcaatgtgcttcgcgagaagatctactccactgcctttgactacttcagctgtcccccaaagtttcctactcaaggagagaagcggctgcgtgaagacataagcatcatgattaaattttggaccgccatgttctcagataagaagtacctgaccgccagccagcttgttcccccagctgacatcggcgacctcctggagcagttagtagaggagaacacaggctccttgtcgggcccagcgaaggacttttaccagcgggagtttgatttctttaacaagatcaccaacgtgtcggctatcatcaagccctaccctaaaggcgacgagagaaagaaggcttgtctgtcggccctgtctgaagtgacggtgcagccaggctgctccctgcccagcaaccccgaagccattgtgctggacgtcgactacaagtctgggaccccgatgcagagtgctgcaaaagccccatatctggccaagttcaaggtgaagcgatgtggagttagtgaacttgaaaaagaaggtctgcggtgccgctcagactctgaggatgagtgcagcacgcaggaggccgacggccagaagatctcctggcaggcagccatcttcaaactgggagacgactgccggcaggacatgctggccctgcagatcatcgacctcttcaagaacatcttccagctggtcggcctggacctctttgtttttccctaccgcgtggtggccactgcccctgggtgcggggtgatcgagtgcatccccgactgcacctcccgggaccagctgggccgccagacagacttcggcatgtacgactacttcacacgccagtacggggatgagtccactctggccttccagcaggcccgctacaacttcatccgaagcatggccgcctacagcctcctgctgttcctgctgcagatcaaggacagacacaacggcaacattatgctggacaagaagggccatatcatccacatcgactttggcttcatgtttgaaagctcgccgggcggcaatctcggctgggaacccgacatcaagctgacggatgagatggtgatgatcatggggggcaagatggaggccacacccttcaagtggttcatggagatgtgtgtccgaggctacctggctgtgcggccctacatggatgtggtcgtctccctggtcactatcatgttggacacgggcctgccctgttttcgcggccagacaatcaagttcttgaagcacaggtttagccccaacatgactgagcgcgaggctgcaaatttcatcatgaaggtcatccagagctgcttcctcagcaacaggagccggacctacaacatgatccagtactatcagaatgacatcccctactgaggaggggaccttcgagggcctctgccccatgtgcccttgaagctgccccacaatcatggagccctgcgacctacccgccctgccgccacatgcagtggaggagaggcctgtggcccgaagagcctggtagcgcctcctggggcagcacgtgggtggcgcaggcttagtaacgccgtggactgcagcgacaatcagtggatggtgctgtctatgcacaggtgtgagtcctctgtttgcactggacatattccctacctgttttatttcataggtacatgaagtattgtgtataaaaaaagagataagatttaaccaacatcaacaaaataaaaacccaaaatagtgctgtgttgg

SEQ ID NO: 319703 - DNA, 2152 bp, Homo sapiens
  misc_feature (2152)..(2152): n is a, c, g, or t
ggcgctgggcgggcggctgtgagcggcgctcggggcgcgctaggcggggagccgagccgggctggcggcaggcggacggggcgggcgcgtgcggcgcgagccgggcgctgaggacaagggccgctggtagggccggccggccggcgggcggagcgccgccgccgacgcacacgaggtgaccaggcattgatgcacccccaggaaggccacgcgctcaggaggcccccccgccccgctggctgctgctcacatggtgtctgggcccttggcactccgttcatgcgggagatggcaggggctggcacatgacagtggagcagaaatttggcctgttttctgctgagataaaggaagcagaccccctggctgcctcggaagcaagtcaacccaaaccctgtccccccgaagtgaccccccactacatctggatcgacttcctggtgcagcggtttgagatcgccaagtactgcagctctgaccaagtggagatcttctccagcctgctgcagcgctccatgtccctgaacatcggcagggccaaggggagcatgaaccggcacgtggcggccatcgggccccgcttcaagctgctgaccctggggctgtccctcctgcatgccgatgtggttccaaatgcaaccatccgcaatgtgcttcgcgagaagatctactccactgcctttgactacttcagctgtcccccaaagtttcctactcaaggagagaagcggctgcgtgaagacataagcatcatgattaaattttggaccgccatgttctcagataagaagtacctgaccgccagccagcttgttcccccagctgacatcggcgacctcctggagcagttagtagaggagaacacaggctccttgtcgggcccagcgaaggacttttaccagcgggagtttgatttctttaacaagatcaccaacgtgtcggctatcatcaagccctaccctaaaggcgacgagagaaagaaggcttgtctgtcggccctgtctgaagtgacggtgcagccaggctgctccctgcccagcaaccccgaagccattgtgctggacgtcgactacaagtctgggaccccgatgcagagtgctgcaaaagccccatatctggccaagttcaaggtgaagcgatgtggagttagtgaacttgaaaaagaaggtctgcggtgccgctcagactctgaggatgagtgcagcacgcaggaggccgacggccagaagatctcctggcaggcagccatcttcaaactgggagacgactgccggcaggacatgctggccctgcagatcatcgacctcttcaagaacatcttccagctggtcggcctggacctctttgtttttccctaccgcgtggtggccactgcccctgggtgcggggtgatcgagtgcatccccgactgcacctcccgggaccagctgggccgccagacagacttcggcatgtacgactacttcacacgccagtacggggatgagtccactctggccttccagcaggtagccagggtggccacaggccggggaaagtcgtgtgtgctccaccctaccccagccacccatacccagcctctacccacaccctgctctcctcagtcatcctttgttaagggttaaaaccagggcacctgggctgggcacggtggctcacgcctgtaatcctagcactttgggaggccgaggcgggcagatcacgaggtcaagagatcaaaaccatcctggccaaaatggtgaaccctgtctctactaaaaatacaaaaattagctgggcatagtggcacgcgcctgcagtcccagctactcaggaagctgaggcaggagaatcgcttgaacccaggaggcagaggttgctgtgagccgagattgcaccactgcactccagcctgggcaacagagtgagactccatctgaaaaaaaaaaaaaagggaggccaaggcgggcagatcatgaggtcaagagatcgagaccatcctgaccaacatggtgaaaccccatctctactaacaaatacctcccctccctatatcacatggcggcccgccttggcccaaccgactttagacttcgcgcaggtttatgcacgcgggcccgaattcggggctcaatcggccaatttcgccctgggggccggattacattctgcn

SEQ ID NO: 319704 - DNA, 1430 bp, Homo sapiens
ggcgctgggcgggcggctgtgagcggcgctcggggcgcgctaggcggggagccgagccgggctggcggcaggcggacggggcgggcgcgtgcggcgcgagccgggcgctgaggacaagggccgctggtagggccggccggccggcgggcggagcgccgccgccgacgcacacgaggtgaccaggcattgatgcacccccaggaaggccacgcgctcaggaggcccccccgccccgctggctgctgctcacatggtgtctgggcccttggcactccgttcatgcgggagatggcaggggctggcacatgacagtggagcagaaatttggcctgttttctgctgagataaaggaagcagaccccctggctgcctcggaagcaagtcaacccaaaccctgtccccccgaagtgaccccccactacatctggatcgacttcctggtgcagcggtttgagatcgccaagtactgcagctctgaccaagtggagatcttctccagcctgctgcagcgctccatgtccctgaacatcggcagggccaaggggagcatgaaccggcacgtggcggccatcgggccccgcttcaagctgctgaccctggggctgtccctcctgcatgccgatgtggttccaaatgcaaccatccgcaatgtgcttcgcgagaagatctactccactgcctttgactacttcagctgtcccccaaagtttcctactcaaggagagaagcggctgcgtgaagacataagcatcatgattaaattttggaccgccatgttctcagataagaagtacctgaccgccagccagcttgttcccccagctgacatcggcgacctcctggagcagttagtagaggagaacacaggctccttgtcgggcccagcgaaggacttttaccagcgggagtttgatttctttaacaagatcaccaacgtgtcggctatcatcaagccctaccctaaaggcgacgagagaaagaaggcttgtctgtcggccctgtctgaagtgacggtgcagccaggctgctccctgcccagcaaccccgaagccattgtgctggacgtcgactacaagtctgggaccccgatgcagagtgctgcaaaagccccatatctggccaagttcaaggtgaagcgatgtggagttagtgaacttgaaaaagaaggtctgcggtgccgctcagactctgaggatgagtgcagcacgcaggaggccgacggccagaagatctcctggcaggcagccatcttcaaactgggagacgactgccggcaggtaagcagggtcaggcctcaagtaggcttggggactgggcttgctgctccccaaggctccaggcccaccagagtccaatctcatatgcagaaatgtgaatcttttccttctcttacatggttcaggtgccacggggtaaattagggcttctgc

SEQ ID NO: 319705 - DNA, 404 bp, Homo sapiens
gtgacatctcccctggacacccagctttaaaatttctctgttttgtactctgtccctttatttctcagaccagccaacatttagggaaaatagaaaagaacctatgtgaaatattgggggtgaattttgcccgatatctgactgaatttcccatgataaccactctccaagttttcctacctctctcatcacttcttatttgccttttcagttccccattcagttccagttcttctttctccatcatgctttaagtcctacattcctttctatgttctcatcctttggaggtggtctcatgtactcccacggcttcggataccatgtatttattgacaacagtgaaacttatgtctccagtgtacatgagtcctgaacctcaaaccccaatgatatctccaata

SEQ ID NO: 319706 - DNA, 428 bp, Homo sapiens
caggcacttcaaaatgcacataccctaaaccaaactccaaatcttcccctactcccaagcctgctccactccgacagttgctcaggccagatcaacggggctcatgctgactcctcttgctctcgccctacgtccagttggtcagcagaccctattggctctaccttcagtctgcatccagaacacccctgctcactttctccccttctctcataagccgctggaccagggtccctgcgtctgccctgcaccctggcattttctcctccactctacaggcagagggagcctttaacatgcaaatcaggtcttatgcccccggcttaaaaccctccagtggctccctccttgctctaaggaaaagggtcttcaggatggccttaggtcctgcttgacaatcaccccacccctactgtcaccactgacct

SEQ ID NO: 319707 - DNA, 3280 bp, Homo sapiens
gaggtcgtgcactgagggtggacgtagaggccaggagtagcaggcggccggggaaaagaggtggagaaaggaaaaaagaggagaaaagtggaggagggcgagtaggggggtggggcagagaggggcgggcccgagtgcgccccccgcccccagccccgctctgccagctccctcccagcccagccggctacatctggcggctgccctcccttgtttccgctgcatccagacttcctcaggcggtggctggaggctgcgcatctggggctttaaacatacaaagggattgccaggacctgcggcggcggcggcggcggcgggggctggggcgcgggggccggaccatgagccgctgagccgggcaaaccccaggccaccgagccagcggaccctcggagcgcagccctgcgccgcggagcaggctccaaccaggcggcgaggcggccacacgcaccgagccagcgacccccgggcgacgcgcggggccagggagcgctacgatggaggcgctaatggcccggggcgcgctcacgggtcccctgagggcgctctgtctcctgggctgcctgctgagccacgccgccgccgcgccgtcgcccatcatcaagttccccggcgatgtcgcccccaaaacggacaaagagttggcagtgcaatacctgaacaccttctatggctgccccaaggagagctgcaacctgtttgtgctgaaggacacactaaagaagatgcagaagttctttggactgccccagacaggtgatcttgaccagaataccatcgagaccatgcggaagccacgctgcggcaacccagatgtggccaactacaacttcttccctcgcaagcccaagtgggacaagaaccagatcacatacaggatcattggctacacacctgatctggacccagagacagtggatgatgcctttgctcgtgccttccaagtctggagcgatgtgaccccactgcggttttctcgaatccatgatggagaggcagacatcatgatcaactttggccgctgggagcatggcgatggatacccctttgacggtaaggacggactcctggctcatgccttcgccccaggcactggtgttgggggagactcccattttgatgacgatgagctatggaccttgggagaaggccaagtggtccgtgtgaagtatggcaacgccgatggggagtactgcaagttccccttcttgttcaatggcaaggagtacaacagctgcactgataccggccgcagcgatggcttcctctggtgctccaccacctacaactttgagaaggatggcaagtacggcttctgtccccatgaagccctgttcaccatgggcggcaacgctgaaggacagccctgcaagtttccattccgcttccagggcacatcctatgacagctgcaccactgagggccgcacggatggctaccgctggtgcggcaccactgaggactacgaccgcgacaagaagtatggcttctgccctgagaccgccatgtccactgttggtgggaactcagaaggtgccccctgtgtcttccccttcactttcctgggcaacaaatatgagagctgcaccagcgccggccgcagtgacggaaagatgtggtgtgcgaccacagccaactacgatgacgaccgcaagtggggcttctgccctgaccaagggtacagcctgttcctcgtggcagcccacgagtttggccacgccatggggctggagcactcccaagaccctggggccctgatggcacccatttacacctacaccaagaacttccgtctgtcccaggatgacatcaagggcattcaggagctctatggggcctctcctgacattgaccttggcaccggccccacccccacactgggccctgtcactcctgagatctgcaaacaggacattgtatttgatggcatcgctcagatccgtggtgagatcttcttcttcaaggaccggttcatttggcggactgtgacgccacgtgacaagcccatggggcccctgctggtggccacattctggcctgagctcccggaaaagattgatgcggtatacgaggccccacaggaggagaaggctgtgttctttgcagggaatgaatactggatctactcagccagcaccctggagcgagggtaccccaagccactgaccagcctgggactgccccctgatgtccagcgagtggatgccgcctttaactggagcaaaaacaagaagacatacatctttgctggagacaaattctggagatacaatgaggtgaagaagaaaatggatcctggcttccccaagctcatcgcagatgcctggaatgccatccccgataacctggatgccgtcgtggacctgcagggcggcggtcacagctacttcttcaagggtgcctattacctgaagctggagaaccaaagtctgaagagcgtgaagtttggaagcatcaaatccgactggctaggctgctgagctggccctggctcccacaggcccttcctctccactgccttcgatacaccgggcctggagaactagagaaggacccggaggggcctggcagccgtgccttcagctctacagctaatcagcattctcactcctacctggtaatttaagattccagagagtggctcctcccggtgcccaagaatagatgctgactgtactcctcccaggcgccccttccccctccaatcccaccaaccctcagagccacccctaaagagatactttgatattttcaacgcagccctgctttgggctgccctggtgctgccacacttcaggctcttctcctttcacaaccttctgtggctcacagaacccttggagccaatggagactgtctcaagagggcactggtggcccgacagcctggcacagggcagtgggacagggcatggccaggtggccactccagacccctggcttttcactgctggctgccttagaacctttcttacattagcagtttgctttgtatgcactttgtttttttctttgggtcttgttttttttttccacttagaaattgcatttcctgacagaaggactcaggttgtctgaagtcactgcacagtgcatctcagcccacatagtgatggttcccctgttcactctacttagcatgtccctaccgagtctcttctccactggatggaggaaaaccaagccgtggcttcccgctcagccctccctgcccctcccttcaaccattccccatgggaaatgtcaacaagtatgaataaagacacctactgagtggc

SEQ ID NO: 319708 - DNA, 460 bp, Homo sapiens
  misc_feature (31)..(31): n is a, c, g, or t
aagcgatggcttcctctggtgctccaccacntacaactttgagaaggatggcaagtacggcttctgtccccaaaacggacaaagagttggcagtgcaatacctgaacaccttctatggctgccccaaggagagctgcaacctgtttgtgctgaaggacacactaaagaagatgcagaagttctttggactgccccagacaggtgatcttgaccagaataccatcgagaccatgcggaagccacgctgcggcaacccagatgtggccaactacaacttcttccctcgcaagcccaagtgggacaagaaccagatcacatacaggatcattggctacacacctgatctggacccagagacaaaccaagccgtggcttcccgctcagccctccctgcccctcccttcaaccattccccatgggaaatgtcaacaagtatgaataaagacacctactgagtggc

SEQ ID NO: 319709 - DNA, 2984 bp, Homo sapiens
gaggtcgtgcactgagggtggacgtagaggccaggagtagcaggcggccggggaaaagaggtggagaaaggaaaaaagaggagaaaagtggaggagggcgagtaggggggtggggcagagaggggcgggcccgagtgcgccccccgcccccagccccgctctgccagctccctcccagcccagccggctacatctggcggctgccctcccttgtttccgctgcatccagacttcctcaggcggtggctggaggctgcgcatctggggctttaaacatacaaagccgccgccgcgccgtcgcccatcatcaagttccccggcgatgtcgcccccaaaacggacaaagagttggcagtgcaatacctgaacaccttctatggctgccccaaggagagctgcaacctgtttgtgctgaaggacacactaaagaagatgcagaagttctttggactgccccagacaggtgatcttgaccagaataccatcgagaccatgcggaagccacgctgcggcaacccagatgtggccaactacaacttcttccctcgcaagcccaagtgggacaagaaccagatcacatacaggatcattggctacacacctgatctggacccagagacagtggatgatgcctttgctcgtgccttccaagtctggagcgatgtgaccccactgcggttttctcgaatccatgatggagaggcagacatcatgatcaactttggccgctgggagcatggcgatggatacccctttgacggtaaggacggactcctggctcatgccttcgccccaggcactggtgttgggggagactcccattttgatgacgatgagctatggaccttgggagaaggccaagtggtccgtgtgaagtatggcaacgccgatggggagtactgcaagttccccttcttgttcaatggcaaggagtacaacagctgcactgataccggccgcagcgatggcttcctctggtgctccaccacctacaactttgagaaggatggcaagtacggcttctgtccccatgaagccctgttcaccatgggcggcaacgctgaaggacagccctgcaagtttccattccgcttccagggcacatcctatgacagctgcaccactgagggccgcacggatggctaccgctggtgcggcaccactgaggactacgaccgcgacaagaagtatggcttctgccctgagaccgccatgtccactgttggtgggaactcagaaggtgccccctgtgtcttccccttcactttcctgggcaacaaatatgagagctgcaccagcgccggccgcagtgacggaaagatgtggtgtgcgaccacagccaactacgatgacgaccgcaagtggggcttctgccctgaccaagggtacagcctgttcctcgtggcagcccacgagtttggccacgccatggggctggagcactcccaagaccctggggccctgatggcacccatttacacctacaccaagaacttccgtctgtcccaggatgacatcaagggcattcaggagctctatggggcctctcctgacattgaccttggcaccggccccacccccacactgggccctgtcactcctgagatctgcaaacaggacattgtatttgatggcatcgctcagatccgtggtgagatcttcttcttcaaggaccggttcatttggcggactgtgacgccacgtgacaagcccatggggcccctgctggtggccacattctggcctgagctcccggaaaagattgatgcggtatacgaggccccacaggaggagaaggctgtgttctttgcagggaatgaatactggatctactcagccagcaccctggagcgagggtaccccaagccactgaccagcctgggactgccccctgatgtccagcgagtggatgccgcctttaactggagcaaaaacaagaagacatacatctttgctggagacaaattctggagatacaatgaggtgaagaagaaaatggatcctggcttccccaagctcatcgcagatgcctggaatgccatccccgataacctggatgccgtcgtggacctgcagggcggcggtcacagctacttcttcaagggtgcctattacctgaagctggagaaccaaagtctgaagagcgtgaagtttggaagcatcaaatccgactggctaggctgctgagctggccctggctcccacaggcccttcctctccactgccttcgatacaccgggcctggagaactagagaaggacccggaggggcctggcagccgtgccttcagctctacagctaatcagcattctcactcctacctggtaatttaagattccagagagtggctcctcccggtgcccaagaatagatgctgactgtactcctcccaggcgccccttccccctccaatcccaccaaccctcagagccacccctaaagagatactttgatattttcaacgcagccctgctttgggctgccctggtgctgccacacttcaggctcttctcctttcacaaccttctgtggctcacagaacccttggagccaatggagactgtctcaagagggcactggtggcccgacagcctggcacagggcagtgggacagggcatggccaggtggccactccagacccctggcttttcactgctggctgccttagaacctttcttacattagcagtttgctttgtatgcactttgtttttttctttgggtcttgttttttttttccacttagaaattgcatttcctgacagaaggactcaggttgtctgaagtcactgcacagtgcatctcagcccacatagtgatggttcccctgttcactctacttagcatgtccctaccgagtctcttctccactggatggaggaaaaccaagccgtggcttcccgctcagccctccctgcccctcccttcaaccattccccatgggaaatgtcaacaagtatgaataaagacacctactgagtggc

SEQ ID NO: 319710 - DNA, 2685 bp, Homo sapiens
tgtaaacaacttttggacacatctgggcagttgctaagggctcttgccaagcgtctagcaatacctgaacaccttctatggctgccccaaggagagctgcaacctgtttgtgctgaaggacacactaaagaagatgcagaagttctttggactgccccagacaggtgatcttgaccagaataccatcgagaccatgcggaagccacgctgcggcaacccagatgtggccaactacaacttcttccctcgcaagcccaagtgggacaagaaccagatcacatacaggatcattggctacacacctgatctggacccagagacagtggatgatgcctttgctcgtgccttccaagtctggagcgatgtgaccccactgcggttttctcgaatccatgatggagaggcagacatcatgatcaactttggccgctgggagcatggcgatggatacccctttgacggtaaggacggactcctggctcatgccttcgccccaggcactggtgttgggggagactcccattttgatgacgatgagctatggaccttgggagaaggccaagtggtccgtgtgaagtatggcaacgccgatggggagtactgcaagttccccttcttgttcaatggcaaggagtacaacagctgcactgataccggccgcagcgatggcttcctctggtgctccaccacctacaactttgagaaggatggcaagtacggcttctgtccccatgaagccctgttcaccatgggcggcaacgctgaaggacagccctgcaagtttccattccgcttccagggcacatcctatgacagctgcaccactgagggccgcacggatggctaccgctggtgcggcaccactgaggactacgaccgcgacaagaagtatggcttctgccctgagaccgccatgtccactgttggtgggaactcagaaggtgccccctgtgtcttccccttcactttcctgggcaacaaatatgagagctgcaccagcgccggccgcagtgacggaaagatgtggtgtgcgaccacagccaactacgatgacgaccgcaagtggggcttctgccctgaccaagggtacagcctgttcctcgtggcagcccacgagtttggccacgccatggggctggagcactcccaagaccctggggccctgatggcacccatttacacctacaccaagaacttccgtctgtcccaggatgacatcaagggcattcaggagctctatggggcctctcctgacattgaccttggcaccggccccacccccacactgggccctgtcactcctgagatctgcaaacaggacattgtatttgatggcatcgctcagatccgtggtgagatcttcttcttcaaggaccggttcatttggcggactgtgacgccacgtgacaagcccatggggcccctgctggtggccacattctggcctgagctcccggaaaagattgatgcggtatacgaggccccacaggaggagaaggctgtgttctttgcagggaatgaatactggatctactcagccagcaccctggagcgagggtaccccaagccactgaccagcctgggactgccccctgatgtccagcgagtggatgccgcctttaactggagcaaaaacaagaagacatacatctttgctggagacaaattctggagatacaatgaggtgaagaagaaaatggatcctggcttccccaagctcatcgcagatgcctggaatgccatccccgataacctggatgccgtcgtggacctgcagggcggcggtcacagctacttcttcaagggtgcctattacctgaagctggagaaccaaagtctgaagagcgtgaagtttggaagcatcaaatccgactggctaggctgctgagctggccctggctcccacaggcccttcctctccactgccttcgatacaccgggcctggagaactagagaaggacccggaggggcctggcagccgtgccttcagctctacagctaatcagcattctcactcctacctggtaatttaagattccagagagtggctcctcccggtgcccaagaatagatgctgactgtactcctcccaggcgccccttccccctccaatcccaccaaccctcagagccacccctaaagagatactttgatattttcaacgcagccctgctttgggctgccctggtgctgccacacttcaggctcttctcctttcacaaccttctgtggctcacagaacccttggagccaatggagactgtctcaagagggcactggtggcccgacagcctggcacagggcagtgggacagggcatggccaggtggccactccagacccctggcttttcactgctggctgccttagaacctttcttacattagcagtttgctttgtatgcactttgtttttttctttgggtcttgttttttttttccacttagaaattgcatttcctgacagaaggactcaggttgtctgaagtcactgcacagtgcatctcagcccacatagtgatggttcccctgttcactctacttagcatgtccctaccgagtctcttctccactggatggaggaaaaccaagccgtggcttcccgctcagccctccctgcccctcccttcaaccattccccatgggaaatgtcaacaagtatgaataaagacacctactgagtggc

SEQ ID NO: 319711 - DNA, 2678 bp, Homo sapiens
cagcccgggcttggagtgcagtggggcaatgctcgggtcgctgcgacctccgcctcctgggttcaggtgattctctggcctcagtctcccgagtagctgggatttacaggcacccgccgccacgcctggctaatttttgtatttttagtagagacaggtgatcttgaccagaataccatcgagaccatgcggaagccacgctgcggcaacccagatgtggccaactacaacttcttccctcgcaagcccaagtgggacaagaaccagatcacatacaggatcattggctacacacctgatctggacccagagacagtggatgatgcctttgctcgtgccttccaagtctggagcgatgtgaccccactgcggttttctcgaatccatgatggagaggcagacatcatgatcaactttggccgctgggagcatggcgatggatacccctttgacggtaaggacggactcctggctcatgccttcgccccaggcactggtgttgggggagactcccattttgatgacgatgagctatggaccttgggagaaggccaagtggtccgtgtgaagtatggcaacgccgatggggagtactgcaagttccccttcttgttcaatggcaaggagtacaacagctgcactgataccggccgcagcgatggcttcctctggtgctccaccacctacaactttgagaaggatggcaagtacggcttctgtccccatgaagccctgttcaccatgggcggcaacgctgaaggacagccctgcaagtttccattccgcttccagggcacatcctatgacagctgcaccactgagggccgcacggatggctaccgctggtgcggcaccactgaggactacgaccgcgacaagaagtatggcttctgccctgagaccgccatgtccactgttggtgggaactcagaaggtgccccctgtgtcttccccttcactttcctgggcaacaaatatgagagctgcaccagcgccggccgcagtgacggaaagatgtggtgtgcgaccacagccaactacgatgacgaccgcaagtggggcttctgccctgaccaagggtacagcctgttcctcgtggcagcccacgagtttggccacgccatggggctggagcactcccaagaccctggggccctgatggcacccatttacacctacaccaagaacttccgtctgtcccaggatgacatcaagggcattcaggagctctatggggcctctcctgacattgaccttggcaccggccccacccccacactgggccctgtcactcctgagatctgcaaacaggacattgtatttgatggcatcgctcagatccgtggtgagatcttcttcttcaaggaccggttcatttggcggactgtgacgccacgtgacaagcccatggggcccctgctggtggccacattctggcctgagctcccggaaaagattgatgcggtatacgaggccccacaggaggagaaggctgtgttctttgcagggaatgaatactggatctactcagccagcaccctggagcgagggtaccccaagccactgaccagcctgggactgccccctgatgtccagcgagtggatgccgcctttaactggagcaaaaacaagaagacatacatctttgctggagacaaattctggagatacaatgaggtgaagaagaaaatggatcctggcttccccaagctcatcgcagatgcctggaatgccatccccgataacctggatgccgtcgtggacctgcagggcggcggtcacagctacttcttcaagggtgcctattacctgaagctggagaaccaaagtctgaagagcgtgaagtttggaagcatcaaatccgactggctaggctgctgagctggccctggctcccacaggcccttcctctccactgccttcgatacaccgggcctggagaactagagaaggacccggaggggcctggcagccgtgccttcagctctacagctaatcagcattctcactcctacctggtaatttaagattccagagagtggctcctcccggtgcccaagaatagatgctgactgtactcctcccaggcgccccttccccctccaatcccaccaaccctcagagccacccctaaagagatactttgatattttcaacgcagccctgctttgggctgccctggtgctgccacacttcaggctcttctcctttcacaaccttctgtggctcacagaacccttggagccaatggagactgtctcaagagggcactggtggcccgacagcctggcacagggcagtgggacagggcatggccaggtggccactccagacccctggcttttcactgctggctgccttagaacctttcttacattagcagtttgctttgtatgcactttgtttttttctttgggtcttgttttttttttccacttagaaattgcatttcctgacagaaggactcaggttgtctgaagtcactgcacagtgcatctcagcccacatagtgatggttcccctgttcactctacttagcatgtccctaccgagtctcttctccactggatggaggaaaaccaagccgtggcttcccgctcagccctccctgcccctcccttcaaccattccccatgggaaatgtcaacaagtatgaataaagacacctactgagtggc

SEQ ID NO: 319712 - DNA, 2233 bp, Homo sapiens
gggcagccatagaaggtgttcaggtattgcactgccaactctttgtccgttttgggggcgacatcgccggggaacttgatgatgggcgacggcgcggcggcgaaggccaagtggtccgtgtgaagtatggcaacgccgatggggagtactgcaagttccccttcttgttcaatggcaaggagtacaacagctgcactgataccggccgcagcgatggcttcctctggtgctccaccacctacaactttgagaaggatggcaagtacggcttctgtccccatgaagccctgttcaccatgggcggcaacgctgaaggacagccctgcaagtttccattccgcttccagggcacatcctatgacagctgcaccactgagggccgcacggatggctaccgctggtgcggcaccactgaggactacgaccgcgacaagaagtatggcttctgccctgagaccgccatgtccactgttggtgggaactcagaaggtgccccctgtgtcttccccttcactttcctgggcaacaaatatgagagctgcaccagcgccggccgcagtgacggaaagatgtggtgtgcgaccacagccaactacgatgacgaccgcaagtggggcttctgccctgaccaagggtacagcctgttcctcgtggcagcccacgagtttggccacgccatggggctggagcactcccaagaccctggggccctgatggcacccatttacacctacaccaagaacttccgtctgtcccaggatgacatcaagggcattcaggagctctatggggcctctcctgacattgaccttggcaccggccccacccccacactgggccctgtcactcctgagatctgcaaacaggacattgtatttgatggcatcgctcagatccgtggtgagatcttcttcttcaaggaccggttcatttggcggactgtgacgccacgtgacaagcccatggggcccctgctggtggccacattctggcctgagctcccggaaaagattgatgcggtatacgaggccccacaggaggagaaggctgtgttctttgcagggaatgaatactggatctactcagccagcaccctggagcgagggtaccccaagccactgaccagcctgggactgccccctgatgtccagcgagtggatgccgcctttaactggagcaaaaacaagaagacatacatctttgctggagacaaattctggagatacaatgaggtgaagaagaaaatggatcctggcttccccaagctcatcgcagatgcctggaatgccatccccgataacctggatgccgtcgtggacctgcagggcggcggtcacagctacttcttcaagggtgcctattacctgaagctggagaaccaaagtctgaagagcgtgaagtttggaagcatcaaatccgactggctaggctgctgagctggccctggctcccacaggcccttcctctccactgccttcgatacaccgggcctggagaactagagaaggacccggaggggcctggcagccgtgccttcagctctacagctaatcagcattctcactcctacctggtaatttaagattccagagagtggctcctcccggtgcccaagaatagatgctgactgtactcctcccaggcgccccttccccctccaatcccaccaaccctcagagccacccctaaagagatactttgatattttcaacgcagccctgctttgggctgccctggtgctgccacacttcaggctcttctcctttcacaaccttctgtggctcacagaacccttggagccaatggagactgtctcaagagggcactggtggcccgacagcctggcacagggcagtgggacagggcatggccaggtggccactccagacccctggcttttcactgctggctgccttagaacctttcttacattagcagtttgctttgtatgcactttgtttttttctttgggtcttgttttttttttccacttagaaattgcatttcctgacagaaggactcaggttgtctgaagtcactgcacagtgcatctcagcccacatagtgatggttcccctgttcactctacttagcatgtccctaccgagtctcttctccactggatggaggaaaaccaagccgtggcttcccgctcagccctccctgcccctcccttcaaccattccccatgggaaatgtcaacaagtatgaataaagacacctactgagtggc

SEQ ID NO: 319713 - DNA, 3734 bp, Homo sapiens
gaggtcgtgcactgagggtggacgtagaggccaggagtagcaggcggccggggaaaagaggtggagaaaggaaaaaagaggagaaaagtggaggagggcgagtaggggggtggggcagagaggggcgggcccgagtgcgccccccgcccccagccccgctctgccagctccctcccagcccagccggctacatctggcggctgccctcccttgtttccgctgcatccagacttcctcaggcggtggctggaggctgcgcatctggggctttaaacatacaaagggattgccaggacctgcggcggcggcggcggcggcgggggctggggcgcgggggccggaccatgagccgctgagccgggcaaaccccaggccaccgagccagcggaccctcggagcgcagccctgcgccgcggagcaggctccaaccaggcggcgaggcggccacacgcaccgagccagcgacccccgggcgacgcgcggggccagggagcgctacgatggaggcgctaatggcccggggcgcgctcacgggtcccctgagggcgctctgtctcctgggctgcctgctgagccacgccgccgccgcgccgtcgcccatcatcaagttccccggcgatgtcgcccccaaaacggacaaagagttggcagtgcaatacctgaacaccttctatggctgccccaaggagagctgcaacctgtttgtgctgaaggacacactaaagaagatgcagaagttctttggactgccccagacaggtgatcttgaccagaataccatcgagaccatgcggaagccacgctgcggcaacccagatgtggccaactacaacttcttccctcgcaagcccaagtgggacaagaaccagatcacatacaggatcattggctacacacctgatctggacccagagacagtggatgatgcctttgctcgtgccttccaagtctggagcgatgtgaccccactgcggttttctcgaatccatgatggagaggcagacatcatgatcaactttggccgctgggagcatggcgatggatacccctttgacggtaaggacggactcctggctcatgccttcgccccaggcactggtgttgggggagactcccattttgatgacgatgagctatggaccttgggagaaggccaagtggtccgtgtgaagtatggcaacgccgatggggagtactgcaagttccccttcttgttcaatggcaaggagtacaacagctgcactgataccggccgcagcgatggcttcctctggtgctccaccacctacaactttgagaaggatggcaagtacggcttctgtccccatgaagccctgttcaccatgggcggcaacgctgaaggacagccctgcaagtttccattccgcttccagggcacatcctatgacagctgcaccactgagggccgcacggatggctaccgctggtgcggcaccactgaggactacgaccgcgacaagaagtatggcttctgccctgagaccgccatgtccactgttggtgggaactcagaaggtgccccctgtgtcttccccttcactttcctgggcaacaaatatgagagctgcaccagcgccggccgcagtgacggaaagatgtggtgtgcgaccacagccaactacgatgacgaccgcaagtggggcttctgccctgaccaagggtacagcctgttcctcgtggcagcccacgagtttggccacgccatggggctggagcactcccaagaccctggggccctgatggcacccatttacacctacaccaagaacttccgtctgtcccaggatgacatcaagggcattcaggagctctatggggcctctcctgacattgaccttggcaccggccccacccccacactgggccctgtcactcctgagatctgcaaacaggacattgtatttgatggcatcgctcagatccgtggtgagatcttcttcttcaaggaccggttcatttggcggactgtgacgccacgtgacaagcccatggggcccctgctggtggccacattctggcctgagctcccggaaaagattgatgcggtatacgaggccccacaggaggagaaggctgtgttctttgcagggaatgaatactggatctactcagccagcaccctggagcgagggtaccccaagccactgaccagcctgggactgccccctgatgtccagcgagtggatgccgcctttaactggagcaaaaacaagaagacatacatctttgctggagacaaattctggagatacaatgaggtgaagaagaaaatggatcctggcttccccaagctcatcgcagatgcctggaatgccatccccgataacctggatgccgtcgtggacctgcagggcggcggtcacagctacttcttcaagggtgcctattacctgaagctggagaaccaaagtctgaagagcgtgaagtttggaagcatcaaatccgactggctaggctgctgagctggccctggctcccacaggcccttcctctccactgccttcgatacaccgggcctggagaactagagaaggacccggaggggcctggcagccgtgccttcagctctacagctaatcagcattctcactcctacctggtaatttaagattccagagagtggctcctcccggtgcccaagaatagatgctgactgtactcctcccaggcgccccttccccctccaatcccaccaaccctcagagccacccctaaagagatactttgatattttcaacgcagccctgctttgggctgccctggtgctgccacacttcaggctcttctcctttcacaaccttctgtggctcacagaacccttggagccaatggagactgtctcaagagggcactggtggcccgacagcctggcacagggcagtgggacagggcatggccaggtggccactccagacccctggcttttcactgctggctgccttagaacctttcttacattagcagtttgctttgtatgcactttgtttttttctttgggtcttgttttttttttccacttagaaattgcatttcctgacagaaggactcaggttgtctgaagtcactgcacagtgcatctcagcccacatagtgatggttcccctgttcactctacttagcatgtccctaccgagtctcttctccactggatggaggaaaaccaagccgtggcttcccgctcagccctccctgcccctcccttcaaccattccccatgggaaatgtcaacaagtatgaataaagacacctactgagtggccgtgtttgccatctgttttagcagagcctagacaagggccacagacccagccagaagcggaaacttaaaaagtccgaatctctgctccctgcagggcacaggtgatggtgtctgctggaaaggtcagagcttccaaagtaaacagcaagagaacctcagggagagtaagctctagtccctctgtcctgtagaaagagccctgaagaatcagcaattttgttgctttattgtggcatctgttcgaggtttgcttcctctttaagtctgtttcttcattagcaatcatatcagttttaatgctactactaacaatgaacagtaacaataatatccccctcaattaatagagtgctttctatgtgcaaggcacttttcacgtgtcacctattttaacctttccaaccacataaataaaaaaggccattattagttgaatcttattgatgaagagact

SEQ ID NO: 319714 - DNA, 3285 bp, Homo sapiens
gaggtcgtgcactgagggtggacgtagaggccaggagtagcaggcggccggggaaaagaggtggagaaaggaaaaaagaggagaaaagtggaggagggcgagtaggggggtggggcagagaggggcgggcccgagtgcgccccccgcccccagccccgctctgccagctccctcccagcccagccggctacatctggcggctgccctcccttgtttccgctgcatccagacttcctcaggcggtggctggaggctgcgcatctggggctttaaacatacaaagggattgccaggacctgcggcggcggcggcggcggcgggggctggggcgcgggggccggaccatgagccgctgagccgggcaaaccccaggccaccgagccagcggaccctcggagcgcagccctgcgccgcggagcaggctccaaccaggcggcgaggcggccacacgcaccgagccagcgacccccgggcgacgcgcggggccagggagcgctacgatggaggcgctaatggcccggggcgcgctcacgggtcccctgagggcgctctgtctcctgggctgcctgctgagccacgccgccgccgcgccgtcgcccatcatcaagttccccggcgatgtcgcccccaaaacggacaaagagttggcagtgcaatacctgaacaccttctatggctgccccaaggagagctgcaacctgtttgtgctgaaggacacactaaagaagatgcagaagttctttggactgccccagacaggtgatcttgaccagaataccatcgagaccatgcggaagccacgctgcggcaacccagatgtggccaactacaacttcttccctcgcaagcccaagtgggacaagaaccagatcacatacaggatcattggctacacacctgatctggacccagagacagtggatgatgcctttgctcgtgccttccaagtctggagcgatgtgaccccactgcggttttctcgaatccatgatggagaggcagacatcatgatcaactttggccgctgggagcatggcgatggatacccctttgacggtaaggacggactcctggctcatgccttcgccccaggcactggtgttgggggagactcccattttgatgacgatgagctatggaccttgggagaaggccaagtggtccgtgtgaagtatggcaacgccgatggggagtactgcaagttccccttcttgttcaatggcaaggagtacaacagctgcactgataccggccgcagcgatggcttcctctggtgctccaccacctacaactttgagaaggatggcaagtacggcttctgtccccatgaagccctgttcaccatgggcggcaacgctgaaggacagccctgcaagtttccattccgcttccagggcacatcctatgacagctgcaccactgagggccgcacggatggctaccgctggtgcggcaccactgaggactacgaccgcgacaagaagtatggcttctgccctgagaccgccatgtccactgttggtgggaactcagaaggtgccccctgtgtcttccccttcactttcctgggcaacaaatatgagagctgcaccagcgccggccgcagtgacggaaagatgtggtgtgcgaccacagccaactacgatgacgaccgcaagtggggcttctgccctgaccaagggtacagcctgttcctcgtggcagcccacgagtttggccacgccatggggctggagcactcccaagaccctggggccctgatggcacccatttacacctacaccaagaacttccgtctgtcccaggatgacatcaagggcattcaggagctctatggggcctctcctgacattgaccttggcaccggccccacccccacactgggccctgtcactcctgagatctgcaaacaggacattgtatttgatggcatcgctcagatccgtggtgagatcttcttcttcaaggaccggttcatttggcggactgtgacgccacgtgacaagcccatggggcccctgctggtggccacattctggcctgagctcccggaaaagattgatgcggtatacgaggccccacaggaggagaaggctgtgttctttgcagggaatgaatactggatctactcagccagcaccctggagcgagggtaccccaagccactgaccagcctgggactgccccctgatgtccagcgagtggatgccgcctttaactggagcaaaaacaagaagacatacatctttgctggagacaaattctggagatacaatgaggtgaagaagaaaatggatcctggcttccccaagctcatcgcagatgcctggaatgccatccccgataacctggatgccgtcgtggacctgcagggcggcggtcacagctacttcttcaagggtgcctattacctgaagctggagaaccaaagtctgaagagcgtgaagtttggaagcatcaaatccgactggctaggctgctgagctggccctggctcccacaggcccttcctctccactgccttcgatacaccgggcctggagaactagagaaggacccggaggggcctggcagccgtgccttcagctctacagctaatcagcattctcactcctacctggtaatttaagattccagagagtggctcctcccggtgcccaagaatagatgctgactgtactcctcccaggcgccccttccccctccaatcccaccaaccctcagagccacccctaaagagatactttgatattttcaacgcagccctgctttgggctgccctggtgctgccacacttcaggctcttctcctttcacaaccttctgtggctcacagaacccttggagccaatggagactgtctcaagagggcactggtggcccgacagcctggcacagggcagtgggacagggcatggccaggtggccactccagacccctggcttttcactgctggctgccttagaacctttcttacattagcagtttgctttgtatgcactttgtttttttctttgggtcttgttttttttttccacttagaaattgcatttcctgacagaaggactcaggttgtctgaagtcactgcacagtgcatctcagcccacatagtgatggttcccctgttcactctacttagcatgtccctaccgagtctcttctccactggatggaggaatactctagagctggctctagaggatgagccctctctgcttctcccctcacacgtaaataatgggttttgtcaatccgtatgtatatatacatattcttggttaaaa

SEQ ID NO: 319715 - DNA, 2862 bp, Homo sapiens
gaggtcgtgcactgagggtggacgtagaggccaggagtagcaggcggccggggaaaagaggtggagaaaggaaaaaagaggagaaaagtggaggagggcgagtaggggggtggggcagagaggggcgggcccgagtgcgccccccgcccccagccccgctctgccagctccctcccagcccagccggctacatctggcggctgccctcccttgtttccgctgcatccagacttcctcaggcggtggctggaggctgcgcatctggggctttaaacatacaaagggattgccaggacctgcggcggcggcggcggcggcgggggctggggcgcgggggccggaccatgagccgctgagccgggcaaaccccaggccaccgagccagcggaccctcggagcgcagccctgcgccgcggagcaggctccaaccaggcggcgaggcggccacacgcaccgagccagcgacccccgggcgacgcgcggggccagggagcgctacgatggaggcgctaatggcccggggcgcgctcacgggtcccctgagggcgctctgtctcctgggctgcctgctgagccacgccgccgccgcgccgtcgcccatcatcaagttccccggcgatgtcgcccccaaaacggacaaagagttggcagtgcaatacctgaacaccttctatggctgccccaaggagagctgcaacctgtttgtgctgaaggacacactaaagaagatgcagaagttctttggactgccccagacaggtgatcttgaccagaataccatcgagaccatgcggaagccacgctgcggcaacccagatgtggccaactacaacttcttccctcgcaagcccaagtgggacaagaaccagatcacatacaggatcattggctacacacctgatctggacccagagacagtggatgatgcctttgctcgtgccttccaagtctggagcgatgtgaccccactgcggttttctcgaatccatgatggagaggcagacatcatgatcaactttggccgctgggagcatggcgatggatacccctttgacggtaaggacggactcctggctcatgccttcgccccaggcactggtgttgggggagactcccattttgatgacgatgagctatggaccttgggagaaggccaagtggtccgtgtgaagtatggcaacgccgatggggagtactgcaagttccccttcttgttcaatggcaaggagtacaacagctgcactgataccggccgcagcgatggcttcctctggtgctccaccacctacaactttgagaaggatggcaagtacggcttctgtccccatgaagccctgttcaccatgggcggcaacgctgaaggacagccctgcaagtttccattccgcttccagggcacatcctatgacagctgcaccactgagggccgcacggatggctaccgctggtgcggcaccactgaggactacgaccgcgacaagaagtatggcttctgccctgagaccgccatgtccactgttggtgggaactcagaaggtgccccctgtgtcttccccttcactttcctgggcaacaaatatgagagctgcaccagcgccggccgcagtgacggaaagatgtggtgtgcgaccacagccaactacgatgacgaccgcaagtggggcttctgccctgaccaagggtacagcctgttcctcgtggcagcccacgagtttggccacgccatggggctggagcactcccaagaccctggggccctgatggcacccatttacacctacaccaagaacttccgtctgtcccaggatgacatcaagggcattcaggagctctatggggcctctcctgacattgaccttggcaccggccccacccccacactgggccctgtcactcctgagatctgcaaacaggacattgtatttgatggcatcgctcagatccgtggtgagatcttcttcttcaaggaccggttcatttggcggactgtgacgccacgtgacaagcccatggggcccctgctggtggccacattctggcctgagctcccggaaaagattgatgcggtatacgaggccccacaggaggagaaggctgtgttctttgcagggaatgaatactggatctactcagccagcaccctggagcgagggtaccccaagccactgaccagcctgggactgccccctgatgtccagcgagtggatgccgcctttaactggagcaaaaacaagaagacatacatctttgctggagacaaattctggagatacaatgaggtgaagaagaaaatggatcctggcttccccaagctcatcgcagatgcctggaatgccatccccgataacctggatgccgtcgtggacctgcagggcggcggtcacagctacttcttcaagggtgcctattacctgaagctggagaaccaaagtctgaagagcgtgaagtttggaagcatcaaatccgactggctaggctgctgagctggccctggctcccacaggcccttcctctccactgccttcgatacaccgggcctggagaactagagaaggacccggaggggcctggcagccgtgccttcagctctacagctaatcagcattctcactcctacctgttagaaattgcatttcctgacagaaggactcaggttgtctgaagtcactgcacagtgcatctcagcccacatagtgatggttcccctgttcactctacttagcatgtccctaccgagtctcttctccactggatggaggaaaaccaagccgtggcttcccgctcagccctccctgcccctcccttcaaccattccccatgggaaatgtcaacaagtatgaataaagacacctactgagtggc

SEQ ID NO: 319716 - DNA, 3316 bp, Homo sapiens
gaggtcgtgcactgagggtggacgtagaggccaggagtagcaggcggccggggaaaagaggtggagaaaggaaaaaagaggagaaaagtggaggagggcgagtaggggggtggggcagagaggggcgggcccgagtgcgccccccgcccccagccccgctctgccagctccctcccagcccagccggctacatctggcggctgccctcccttgtttccgctgcatccagacttcctcaggcggtggctggaggctgcgcatctggggctttaaacatacaaagggattgccaggacctgcggcggcggcggcggcggcgggggctggggcgcgggggccggaccatgagccgctgagccgggcaaaccccaggccaccgagccagcggaccctcggagcgcagccctgcgccgcggagcaggctccaaccaggcggcgaggcggccacacgcaccgagccagcgacccccgggcgacgcgcggggccagggagcgctacgatggaggcgctaatggcccggggcgcgctcacgggtcccctgagggcgctctgtctcctgggctgcctgctgagccacgccgccgccgcgccgtcgcccatcatcaagttccccggcgatgtcgcccccaaaacggacaaagagttggcagtgcaatacctgaacaccttctatggctgccccaaggagagctgcaacctgtttgtgctgaaggacacactaaagaagatgcagaagttctttggactgccccagacaggtgatcttgaccagaataccatcgagaccatgcggaagccacgctgcggcaacccagatgtggccaactacaacttcttccctcgcaagcccaagtgggacaagaaccagatcacatacaggatcattggctacacacctgatctggacccagagacagtggatgatgcctttgctcgtgccttccaagtctggagcgatgtgaccccactgcggttttctcgaatccatgatggagaggcagacatcatgatcaactttggccgctgggagcatggcgatggatacccctttgacggtaaggacggactcctggctcatgccttcgccccaggcactggtgttgggggagactcccattttgatgacgatgagctatggaccttgggagaaggccaagtggtccgtgtgaagtatggcaacgccgatggggagtactgcaagttccccttcttgttcaatggcaaggagtacaacagctgcactgataccggccgcagcgatggcttcctctggtgctccaccacctacaactttgagaaggatggcaagtacggcttctgtccccatgaagccctgttcaccatgggcggcaacgctgaaggacagccctgcaagtttccattccgcttccagggcacatcctatgacagctgcaccactgagggccgcacggatggctaccgctggtgcggcaccactgaggactacgaccgcgacaagaagtatggcttctgccctgagaccgccatgtccactgttggtgggaactcagaaggtgccccctgtgtcttccccttcactttcctgggcaacaaatatgagagctgcaccagcgccggccgcagtgacggaaagatgtggtgtgcgaccacagccaactacgatgacgaccgcaagtggggcttctgccctgaccaagggtacagcctgttcctcgtggcagcccacgagtttggccacgccatggggctggagcactcccaagaccctggggccctgatggcacccatttacacctacaccaagaacttccgtctgtcccaggatgacatcaagggcattcaggagctctatggggcctctcctgacattgaccttggcaccggccccacccccacactgggccctgtcactcctgagatctgcaaacaggacattgtatttgatggcatcgctcagatccgtggtgagatcttcttcttcaaggaccggttcatttggcggactgtgacgccacgtgacaagcccatggggcccctgctggtggccacattctggcctgagctcccggaaaagattgatgcggtatacgaggccccacaggaggagaaggctgtgttctttgcagggaatgaatactggatctactcagccagcaccctggagcgagggtaccccaagccactgaccagcctgggactgccccctgatgtccagcgagtggatgccgcctttaactggagcaaaaacaagaagacatacatctttgctggagacaaattctggagatacaatgaggtgaagaagaaaatggatcctggcttccccaagctcatcgcagatgcctggaatgccatccccgataacctggatgccgtcgtggacctgcagggcggcggtcacagctacttcttcaagggtgcctattacctgaagctggagaaccaaagtctgaagagcgtgaagtttggaagcatcaaatccgactggctaggctgctgagctggccctggctcccacaggcccttcctctccactgccttcgatacaccgggcctggagaactagagaaggacccggaggggcctggcagccgtgccttcagctctacagctaatcagcattctcactcctacctgttagaaattgcatttcctgacagaaggactcaggttgtctgaagtcactgcacagtgcatctcagcccacatagtgatggttcccctgttcactctacttagcatgtccctaccgagtctcttctccactggatggaggaaaaccaagccgtggcttcccgctcagccctccctgcccctcccttcaaccattccccatgggaaatgtcaacaagtatgaataaagacacctactgagtggccgtgtttgccatctgttttagcagagcctagacaagggccacagacccagccagaagcggaaacttaaaaagtccgaatctctgctccctgcagggcacaggtgatggtgtctgctggaaaggtcagagcttccaaagtaaacagcaagagaacctcagggagagtaagctctagtccctctgtcctgtagaaagagccctgaagaatcagcaattttgttgctttattgtggcatctgttcgaggtttgcttcctctttaagtctgtttcttcattagcaatcatatcagttttaatgctactactaacaatgaacagtaacaataatatccccctcaattaatagagtgctttctatgtgcaaggcacttttcacgtgtcacctattttaacctttccaaccacataaataaaaaaggccattattagttgaatcttattgatgaagagact

SEQ ID NO: 319717 - DNA, 2293 bp, Homo sapiens
gaggtcgtgcactgagggtggacgtagaggccaggagtagcaggcggccggggaaaagaggtggagaaaggaaaaaagaggagaaaagtggaggagggcgagtaggggggtggggcagagaggggcgggcccgagtgcgccccccgcccccagccccgctctgccagctccctcccagcccagccggctacatctggcggctgccctcccttgtttccgctgcatccagacttcctcaggcggtggctggaggctgcgcatctggggctttaaacatacaaagggattgccaggacctgcggcggcggcggcggcggcgggggctggggcgcgggggccggaccatgagccgctgagccgggcaaaccccaggccaccgagccagcggaccctcggagcgcagccctgcgccgcggagcaggctccaaccaggcggcgaggcggccacacgcaccgagccagcgacccccgggcgacgcgcggggccagggagcgctacgatggaggcgctaatggcccggggcgcgctcacgggtcccctgagggcgctctgtctcctgggctgcctgctgagccacgccgccgccgcgccgtcgcccatcatcaagttccccggcgatgtcgcccccaaaacggacaaagagttggcagtgcaatacctgaacaccttctatggctgccccaaggagagctgcaacctgtttgtgctgaaggacacactaaagaagatgcagaagttctttggactgccccagacaggtgatcttgaccagaataccatcgagaccatgcggaagccacgctgcggcaacccagatgtggccaactacaacttcttccctcgcaagcccaagtgggacaagaaccagatcacatacaggatcattggctacacacctgatctggacccagagacagtggatgatgcctttgctcgtgccttccaagtctggagcgatgtgaccccactgcggttttctcgaatccatgatggagaggcagacatcatgatcaactttggccgctgggagcatggcgatggatacccctttgacggtaaggacggactcctggctcatgccttcgccccaggcactggtgttgggggagactcccattttgatgacgatgagctatggaccttgggagaaggccaagtggtccgtgtgaagtatggcaacgccgatggggagtactgcaagttccccttcttgttcaatggcaaggagtacaacagctgcactgataccggccgcagcgatggcttcctctggtgctccaccacctacaactttgagaaggatggcaagtacggcttctgtccccatgaagccctgttcaccatgggcggcaacgctgaaggacagccctgcaagtttccattccgcttccagggcacatcctatgacagctgcaccactgagggccgcacggatggctaccgctggtgcggcaccactgaggactacgaccgcgacaagaagtatggcttctgccctgagaccgccatgtccactgttggtgggaactcagaaggtgccccctgtgtcttccccttcactttcctgggcaacaaatatgagagctgcaccagcgccggccgcagtgacggaaagatgtggtgtgcgaccacagccaactacgatgacgaccgcaagtggggcttctgccctgaccaagggtacagcctgttcctcgtggcagcccacgagtttggccacgccatggggctggagcactcccaagaccctggggccctgatggcacccatttacacctacaccaagaacttccgtctgtcccaggatgacatcaagggcattcaggagctctatggggcctctcctgacattgaccttggcaccggccccacccccacactgggccctgtcactcctgagatctgcaaacaggacattgtatttgatggcatcgctcagatccgtggtgagatcttcttcttcaaggaccggttcatttggcggactgtgacgccacgtgacaagcccatggggcccctgctggtggccacattctggcctgagctcccggaaaagattgatgcggtatacgaggccccacaggaggagaaggctgtgttctttgcagggaatgaatactggatctactcagccagcaccctggagcgagggtaccccaagccactgaccagcctgggactgccccctgatgtccagcgagtggatgccgcctttaactggagcaaaaacaagaagacatacatctttgctggagacaaattctggaggtaagggagggcggtgggtaggac

SEQ ID NO: 319718 - DNA, 1634 bp, Homo sapiens
gaggtcgtgcactgagggtggacgtagaggccaggagtagcaggcggccggggaaaagaggtggagaaaggaaaaaagaggagaaaagtggaggagggcgagtaggggggtggggcagagaggggcgggcccgagtgcgccccccgcccccagccccgctctgccagctccctcccagcccagccggctacatctggcggctgccctcccttgtttccgctgcatccagacttcctcaggcggtggctggaggctgcgcatctggggctttaaacatacaaagggattgccaggacctgcggcggcggcggcggcggcgggggctggggcgcgggggccggaccatgagccgctgagccgggcaaaccccaggccaccgagccagcggaccctcggagcgcagccctgcgccgcggagcaggctccaaccaggcggcgaggcggccacacgcaccgagccagcgacccccgggcgacgcgcggggccagggagcgctacgatggaggcgctaatggcccggggcgcgctcacgggtcccctgagggcgctctgtctcctgggctgcctgctgagccacgccgccgccgcgccgtcgcccatcatcaagttccccggcgatgtcgcccccaaaacggacaaagagttggcagtgcaatacctgaacaccttctatggctgccccaaggagagctgcaacctgtttgtgctgaaggacacactaaagaagatgcagaagttctttggactgccccagacaggtgatcttgaccagaataccatcgagaccatgcggaagccacgctgcggcaacccagatgtggccaactacaacttcttccctcgcaagcccaagtgggacaagaaccagatcacatacaggatcattggctacacacctgatctggacccagagacagtggatgatgcctttgctcgtgccttccaagtctggagcgatgtgaccccactgcggttttctcgaatccatgatggagaggcagacatcatgatcaactttggccgctgggagcatggcgatggatacccctttgacggtaaggacggactcctggctcatgccttcgccccaggcactggtgttgggggagactcccattttgatgacgatgagctatggaccttgggagaaggccaagtggtccgtgtgaagtatggcaacgccgatggggagtactgcaagttccccttcttgttcaatggcaaggagtacaacagctgcactgataccggccgcagcgatggcttcctctggtgctccaccacctacaactttgagaaggatggcaagtacggcttctgtccccatgaagccctgttcaccatgggcggcaacgctgaaggacagccctgcaagtttccattccgcttccagggcacatcctatgacagctgcaccactgagggccgcacggatggctaccgctggtgcggcaccactgaggactacgaccgcgacaagaagtatggcttctgccctgagaccgccatgtccactgttggtgggaactcagaaggtgccccctgtgtcttccccttcactttcctgggcaacaaatatgagagctgcaccagcgccggccgcagcggcccgccgcacctcgtgccggtccga

SEQ ID NO: 319719 - DNA, 1246 bp, Homo sapiens
gaggtcgtgcactgagggtggacgtagaggccaggagtagcaggcggccggggaaaagaggtggagaaaggaaaaaagaggagaaaagtggaggagggcgagtaggggggtggggcagagaggggcgggcccgagtgcgccccccgcccccagccccgctctgccagctccctcccagcccagccggctacatctggcggctgccctcccttgtttccgctgcatccagacttcctcaggcggtggctggaggctgcgcatctggggctttaaacatacaaagggattgccaggacctgcggcggcggcggcggcggcgggggctggggcgcgggggccggaccatgagccgctgagccgggcaaaccccaggccaccgagccagcggaccctcggagcgcagccctgcgccgcggagcaggctccaaccaggcggcgaggcggccacacgcaccgagccagcgacccccgggcgacgcgcggggccagggagcgctacgatggaggcgctaatggcccggggcgcgctcacgggtcccctgagggcgctctgtctcctgggctgcctgctgagccacgccgccgccgcgccgtcgcccatcatcaagttccccggcgatgtcgcccccaaaacggacaaagagttggcagtgcaatacctgaacaccttctatggctgccccaaggagagctgcaacctgtttgtgctgaaggacacactaaagaagatgcagaagttctttggactgccccagacaggtgatcttgaccagaataccatcgagaccatgcggaagccacgctgcggcaacccagatgtggccaactacaacttcttccctcgcaagcccaagtgggacaagaaccagatcacatacaggatcattggctacacacctgatctggacccagagacagtggatgatgcctttgctcgtgccttccaagtctggagcgatgtgaccccactgcggttttctcgaatccatgatggagaggcagacatcatgatcaactttggccgctgggagcatggcgatggatacccctttgacggtaaggacggactcctggctcatgccttcgcccctgttcactctacttagcatgtccctaccgagtctcttctccactggatggaggaaaaccaagccgtggcttcccgctcagccctccctgcccctcccttcaaccattccccatgggaaatgtcaacaagtatgaataaagacacctactgagtggc

SEQ ID NO: 319720 - DNA, 1097 bp, Homo sapiens
  misc_feature (22)..(22): n is a, c, g, or t
taagggctagtacgaggcctgnggttggctgggagcatggcgatggatacccctttgacggtaaggacggactcctggctcatgccttcgccccaggcactggtgttgggggagactcccattttgatgacgatgagctatggaccttgggagaaggccaagtggtccgtgtgaagtatggcaacgccgatggggagtactgcaagttccccttcttgttcaatggcaaggagtacaacagctgcactgataccggccgcagcgatggcttcctctggtgctccaccacctacaactttgagaaggatggcaagtacggcttctgtccccatgaagccctgttcaccatgggcggcaacgctgaaggacagccctgcaagtttccattccgcttccagggcacatcctatgacagctgcaccactgagggccgcacggatggctaccgctggtgcggcaccactgaggactacgaccgcgacaagaagtatggcttctgccctgagaccgccatgtccactgttggtgggaactcagaaggtgccccctgtgtcttccccttcactttcctgggcaacaaatatgagagctgcaccagcgccggccgcagtgacggaaagatgtggtgtgcgaccacagccaactacgatgacgaccgcaagtggggcttctgccctgaccaagggtacagcctgttcctcgtggcagcccacgagtttggccacgccatggggctggagcactcccaagaccccctggcttttcactgctggctgccttagaacctttcttacattagcagtttgctttgtatgcactttgtttttttctttgggtcttgttttttttttccacttagaaattgcatttcctgacagaaggactcaggttgtctgaagtcactgcacagtgcatctcagcccacatagtgatggttcccctgttcactctacttagcatgtccctaccgagtctcttctccactggatggaggaaaaccaagccgtggcttcccgctcagccctccctgcccctcccttcaaccattccccatgggaaatgtcaacaagtatgaataaagacacctactgagtggc

SEQ ID NO: 319721 - DNA, 950 bp, Homo sapiens
  misc_feature (823)..(823): n is a, c, g, or t
  misc_feature (826)..(826): n is a, c, g, or t
  misc_feature (843)..(844): n is a, c, g, or t
  misc_feature (874)..(874): n is a, c, g, or t
  misc_feature (876)..(876): n is a, c, g, or t
  misc_feature (884)..(884): n is a, c, g, or t
  misc_feature (887)..(887): n is a, c, g, or t
  misc_feature (910)..(910): n is a, c, g, or t
gaggtcgtgcactgagggtggacgtagaggccaggagtagcaggcggccggggaaaagaggtggagaaaggaaaaaagaggagaaaagtggaggagggcgagtaggggggtggggcagagaggggcgggcccgagtgcgccccccgcccccagccccgctctgccagctccctcccagcccagccggctacatctggcggctgccctcccttgtttccgctgcatccagacttcctcaggcggtggctggaggctgcgcatctggggctttaaacatacaaagggattgccaggacctgcggcggcggcggcggcggcgggggctggggcgcgggggccggaccatgagccgctgagccgggcaaaccccaggccaccgagccagcggaccctcggagcgcagccctgcgccgcggagcaggctccaaccaggcggcgaggcggccacacgcaccgagccagcgacccccgggcgacgcgcggggccagggagcgctacgatggaggcgctaatggcccggggcgcgctcacgggtcccctgagggcgctctgtctcctgggctgcctgctgagccacgccgccgccgcgccgtcgcccatcatcaagttccccggcgatgtcgcccccaaaacggacaaagagttggcagtgcaatacctgaacaccttctatggctgccccaaggagagctgcaacctgtttgtgctgaaggacacactaaagaagatgcagaagttctttggactgccccagacaggtgatcttgaccagaataccatcgagaccatgcggaagcgagggtgggggaaggcgagaagatntgnaagtagacaattgttgnntgtgaaagggcaatatttagaaaaaagcanangagaacancantatgattttgtacagcacgcgtnatcgctttaggcgcatcatagcaataattatatattgcgc

SEQ ID NO: 319722 - DNA, 738 bp, Homo sapiens
  misc_feature (679)..(679): n is a, c, g, or t
  misc_feature (683)..(683): n is a, c, g, or t
ttgtagagaccctggccagaatacaaagaaacagacctgctaatactttttcaaggacgattactttgccaaaaaaaatgaagaaagaaaacaaaataaagtggaagctaaattaagagctaaacaggagcaagaagcaaaacaaaagttagaagaagatgctatctggggctttaaacatacaaagggattggccgccgccgcgccgtcgcccatcatcaagttccccggcgatgtcgcccccaaaacggacaaagagttggcagtgcaatacctgaacaccttctatggctgccccaaggagagctgcaacctgtttgtgctgaaggacacactaaagaagatgcagaagttctttggactgccccagacaggtgatcttgaccagaataccatcgagaccatgcggaagccacgctgcggcaacccagatgtggccaactacaacttcttccctcgcaagcccaagtgggacaagaaccagatcacatacaggatcattggctacacacctgatctggacccagagacagtggatgatgcctttgctcgtgccttccaagtctggagcgatgtgaccccactgcggttttctcgaatccatgatggagaggcagacatcatgatcaactttggccgctggggaagcattgggcgaatggggaatacccccttttgnaacnggttaagggaaccgggaacttccctggggcttcattggcctttccgcccccaagg

SEQ ID NO: 319723 - DNA, 3200 bp, Homo sapiens
gaggtcgtgcactgagggtggacgtagaggccaggagtagcaggcggccggggaaaagaggtggagaaaggaaaaaagaggagaaaagtggaggagggcgagtaggggggtggggcagagaggggcgggcccgagtgcgccccccgcccccagccccgctctgccagctccctcccagcccagccggctacatctggcggctgccctcccttgtttccgctgcatccagacttcctcaggcggtggctggaggctgcgcatctggggctttaaacatacaaacaaaccccaggccaccgagccagcggaccctcggagcgcagccctgcgccgcggagcaggctccaaccaggcggcgaggcggccacacgcaccgagccagcgacccccgggcgacgcgcggggccagggagcgctacgatggaggcgctaatggcccggggcgcgctcacgggtcccctgagggcgctctgtctcctgggctgcctgctgagccacgccgccgccgcgccgtcgcccatcatcaagttccccggcgatgtcgcccccaaaacggacaaagagttggcagtgcaatacctgaacaccttctatggctgccccaaggagagctgcaacctgtttgtgctgaaggacacactaaagaagatgcagaagttctttggactgccccagacaggtgatcttgaccagaataccatcgagaccatgcggaagccacgctgcggcaacccagatgtggccaactacaacttcttccctcgcaagcccaagtgggacaagaaccagatcacatacaggatcattggctacacacctgatctggacccagagacagtggatgatgcctttgctcgtgccttccaagtctggagcgatgtgaccccactgcggttttctcgaatccatgatggagaggcagacatcatgatcaactttggccgctgggagcatggcgatggatacccctttgacggtaaggacggactcctggctcatgccttcgccccaggcactggtgttgggggagactcccattttgatgacgatgagctatggaccttgggagaaggccaagtggtccgtgtgaagtatggcaacgccgatggggagtactgcaagttccccttcttgttcaatggcaaggagtacaacagctgcactgataccggccgcagcgatggcttcctctggtgctccaccacctacaactttgagaaggatggcaagtacggcttctgtccccatgaagccctgttcaccatgggcggcaacgctgaaggacagccctgcaagtttccattccgcttccagggcacatcctatgacagctgcaccactgagggccgcacggatggctaccgctggtgcggcaccactgaggactacgaccgcgacaagaagtatggcttctgccctgagaccgccatgtccactgttggtgggaactcagaaggtgccccctgtgtcttccccttcactttcctgggcaacaaatatgagagctgcaccagcgccggccgcagtgacggaaagatgtggtgtgcgaccacagccaactacgatgacgaccgcaagtggggcttctgccctgaccaagggtacagcctgttcctcgtggcagcccacgagtttggccacgccatggggctggagcactcccaagaccctggggccctgatggcacccatttacacctacaccaagaacttccgtctgtcccaggatgacatcaagggcattcaggagctctatggggcctctcctgacattgaccttggcaccggccccacccccacactgggccctgtcactcctgagatctgcaaacaggacattgtatttgatggcatcgctcagatccgtggtgagatcttcttcttcaaggaccggttcatttggcggactgtgacgccacgtgacaagcccatggggcccctgctggtggccacattctggcctgagctcccggaaaagattgatgcggtatacgaggccccacaggaggagaaggctgtgttctttgcagggaatgaatactggatctactcagccagcaccctggagcgagggtaccccaagccactgaccagcctgggactgccccctgatgtccagcgagtggatgccgcctttaactggagcaaaaacaagaagacatacatctttgctggagacaaattctggagatacaatgaggtgaagaagaaaatggatcctggcttccccaagctcatcgcagatgcctggaatgccatccccgataacctggatgccgtcgtggacctgcagggcggcggtcacagctacttcttcaagggtgcctattacctgaagctggagaaccaaagtctgaagagcgtgaagtttggaagcatcaaatccgactggctaggctgctgagctggccctggctcccacaggcccttcctctccactgccttcgatacaccgggcctggagaactagagaaggacccggaggggcctggcagccgtgccttcagctctacagctaatcagcattctcactcctacctggtaatttaagattccagagagtggctcctcccggtgcccaagaatagatgctgactgtactcctcccaggcgccccttccccctccaatcccaccaaccctcagagccacccctaaagagatactttgatattttcaacgcagccctgctttgggctgccctggtgctgccacacttcaggctcttctcctttcacaaccttctgtggctcacagaacccttggagccaatggagactgtctcaagagggcactggtggcccgacagcctggcacagggcagtgggacagggcatggccaggtggccactccagacccctggcttttcactgctggctgccttagaacctttcttacattagcagtttgctttgtatgcactttgtttttttctttgggtcttgttttttttttccacttagaaattgcatttcctgacagaaggactcaggttgtctgaagtcactgcacagtgcatctcagcccacatagtgatggttcccctgttcactctacttagcatgtccctaccgagtctcttctccactggatggaggaaaaccaagccgtggcttcccgctcagccctccctgcccctcccttcaaccattccccatgggaaatgtcaacaagtatgaataaagacacctactgagtggc

SEQ ID NO: 319724 - DNA, 2895 bp, Homo sapiens
ttgtagagaccctggccagaatacaaagaaacagacctgctaatactttttcaaggacgattactttgccaaaaaaaatgaagaaagaaaacaaaataaagtggaagctaaattaagagctaaacaggagcaagaagcaaaacaaaagttagaagaagatgctatctggggctttaaacatacaaagggattggccgccgccgcgccgtcgcccatcatcaagttccccggcgatgtcgcccccaaaacggacaaagagttggcagtgcaatacctgaacaccttctatggctgccccaaggagagctgcaacctgtttgtgctgaaggacacactaaagaagatgcagaagttctttggactgccccagacaggtgatcttgaccagaataccatcgagaccatgcggaagccacgctgcggcaacccagatgtggccaactacaacttcttccctcgcaagcccaagtgggacaagaaccagatcacatacaggatcattggctacacacctgatctggacccagagacagtggatgatgcctttgctcgtgccttccaagtctggagcgatgtgaccccactgcggttttctcgaatccatgatggagaggcagacatcatgatcaactttggccgctgggagcatggcgatggatacccctttgacggtaaggacggactcctggctcatgccttcgccccaggcactggtgttgggggagactcccattttgatgacgatgagctatggaccttgggagaaggccaagtggtccgtgtgaagtatggcaacgccgatggggagtactgcaagttccccttcttgttcaatggcaaggagtacaacagctgcactgataccggccgcagcgatggcttcctctggtgctccaccacctacaactttgagaaggatggcaagtacggcttctgtccccatgaagccctgttcaccatgggcggcaacgctgaaggacagccctgcaagtttccattccgcttccagggcacatcctatgacagctgcaccactgagggccgcacggatggctaccgctggtgcggcaccactgaggactacgaccgcgacaagaagtatggcttctgccctgagaccgccatgtccactgttggtgggaactcagaaggtgccccctgtgtcttccccttcactttcctgggcaacaaatatgagagctgcaccagcgccggccgcagtgacggaaagatgtggtgtgcgaccacagccaactacgatgacgaccgcaagtggggcttctgccctgaccaagggtacagcctgttcctcgtggcagcccacgagtttggccacgccatggggctggagcactcccaagaccctggggccctgatggcacccatttacacctacaccaagaacttccgtctgtcccaggatgacatcaagggcattcaggagctctatggggcctctcctgacattgaccttggcaccggccccacccccacactgggccctgtcactcctgagatctgcaaacaggacattgtatttgatggcatcgctcagatccgtggtgagatcttcttcttcaaggaccggttcatttggcggactgtgacgccacgtgacaagcccatggggcccctgctggtggccacattctggcctgagctcccggaaaagattgatgcggtatacgaggccccacaggaggagaaggctgtgttctttgcagggaatgaatactggatctactcagccagcaccctggagcgagggtaccccaagccactgaccagcctgggactgccccctgatgtccagcgagtggatgccgcctttaactggagcaaaaacaagaagacatacatctttgctggagacaaattctggagatacaatgaggtgaagaagaaaatggatcctggcttccccaagctcatcgcagatgcctggaatgccatccccgataacctggatgccgtcgtggacctgcagggcggcggtcacagctacttcttcaagggtgcctattacctgaagctggagaaccaaagtctgaagagcgtgaagtttggaagcatcaaatccgactggctaggctgctgagctggccctggctcccacaggcccttcctctccactgccttcgatacaccgggcctggagaactagagaaggacccggaggggcctggcagccgtgccttcagctctacagctaatcagcattctcactcctacctggtaatttaagattccagagagtggctcctcccggtgcccaagaatagatgctgactgtactcctcccaggcgccccttccccctccaatcccaccaaccctcagagccacccctaaagagatactttgatattttcaacgcagccctgctttgggctgccctggtgctgccacacttcaggctcttctcctttcacaaccttctgtggctcacagaacccttggagccaatggagactgtctcaagagggcactggtggcccgacagcctggcacagggcagtgggacagggcatggccaggtggccactccagacccctggcttttcactgctggctgccttagaacctttcttacattagcagtttgctttgtatgcactttgtttttttctttgggtcttgttttttttttccacttagaaattgcatttcctgacagaaggactcaggttgtctgaagtcactgcacagtgcatctcagcccacatagtgatggttcccctgttcactctacttagcatgtccctaccgagtctcttctccactggatggaggaaaaccaagccgtggcttcccgctcagccctccctgcccctcccttcaaccattccccatgggaaatgtcaacaagtatgaataaagacacctactgagtggc

SEQ ID NO: 319725 - DNA, 2284 bp, Homo sapiens
  misc_feature (22)..(22): n is a, c, g, or t
taagggctagtacgaggcctgnggttggctgggagcatggcgatggatacccctttgacggtaaggacggactcctggctcatgccttcgccccaggcactggtgttgggggagactcccattttgatgacgatgagctatggaccttgggagaaggccaagtggtccgtgtgaagtatggcaacgccgatggggagtactgcaagttccccttcttgttcaatggcaaggagtacaacagctgcactgataccggccgcagcgatggcttcctctggtgctccaccacctacaactttgagaaggatggcaagtacggcttctgtccccatgaagccctgttcaccatgggcggcaacgctgaaggacagccctgcaagtttccattccgcttccagggcacatcctatgacagctgcaccactgagggccgcacggatggctaccgctggtgcggcaccactgaggactacgaccgcgacaagaagtatggcttctgccctgagaccgccatgtccactgttggtgggaactcagaaggtgccccctgtgtcttccccttcactttcctgggcaacaaatatgagagctgcaccagcgccggccgcagtgacggaaagatgtggtgtgcgaccacagccaactacgatgacgaccgcaagtggggcttctgccctgaccaagggtacagcctgttcctcgtggcagcccacgagtttggccacgccatggggctggagcactcccaagaccctggggccctgatggcacccatttacacctacaccaagaacttccgtctgtcccaggatgacatcaagggcattcaggagctctatggggcctctcctgacattgaccttggcaccggccccacccccacactgggccctgtcactcctgagatctgcaaacaggacattgtatttgatggcatcgctcagatccgtggtgagatcttcttcttcaaggaccggttcatttggcggactgtgacgccacgtgacaagcccatggggcccctgctggtggccacattctggcctgagctcccggaaaagattgatgcggtatacgaggccccacaggaggagaaggctgtgttctttgcagggaatgaatactggatctactcagccagcaccctggagcgagggtaccccaagccactgaccagcctgggactgccccctgatgtccagcgagtggatgccgcctttaactggagcaaaaacaagaagacatacatctttgctggagacaaattctggagatacaatgaggtgaagaagaaaatggatcctggcttccccaagctcatcgcagatgcctggaatgccatccccgataacctggatgccgtcgtggacctgcagggcggcggtcacagctacttcttcaagggtgcctattacctgaagctggagaaccaaagtctgaagagcgtgaagtttggaagcatcaaatccgactggctaggctgctgagctggccctggctcccacaggcccttcctctccactgccttcgatacaccgggcctggagaactagagaaggacccggaggggcctggcagccgtgccttcagctctacagctaatcagcattctcactcctacctggtaatttaagattccagagagtggctcctcccggtgcccaagaatagatgctgactgtactcctcccaggcgccccttccccctccaatcccaccaaccctcagagccacccctaaagagatactttgatattttcaacgcagccctgctttgggctgccctggtgctgccacacttcaggctcttctcctttcacaaccttctgtggctcacagaacccttggagccaatggagactgtctcaagagggcactggtggcccgacagcctggcacagggcagtgggacagggcatggccaggtggccactccagacccctggcttttcactgctggctgccttagaacctttcttacattagcagtttgctttgtatgcactttgtttttttctttgggtcttgttttttttttccacttagaaattgcatttcctgacagaaggactcaggttgtctgaagtcactgcacagtgcatctcagcccacatagtgatggttcccctgttcactctacttagcatgtccctaccgagtctcttctccactggatggaggaaaaccaagccgtggcttcccgctcagccctccctgcccctcccttcaaccattccccatgggaaatgtcaacaagtatgaataaagacacctactgagtggc

SEQ ID NO: 319726 - DNA, 2755 bp, Homo sapiens
gaggtcgtgcactgagggtggacgtagaggccaggagtagcaggcggccggggaaaagaggtggagaaaggaaaaaagaggagaaaagtggaggagggcgagtaggggggtggggcagagaggggcgggcccgagtgcgccccccgcccccagccccgctctgccagctccctcccagcccagccggctacatctggcggctgccctcccttgtttccgctgcatccagacttcctcaggcggtggctggaggctgcgcatctggggctttaaacatacaaagggattgccaggacctgcggcggcggcggcggcggcgggggctggggcgcgggggccggaccatgagccgctgagccgggcaaaccccaggccaccgagccagcggaccctcggagcgcagccctgcgccgcggagcaggctccaaccaggcggcgaggcggccacacgcaccgagccagcgacccccgggcgacgcgcggggccagggagcgctacgatggaggcgctaatggcccggggcgcgctcacgggtcccctgagggcgctctgtctcctgggctgcctgctgagccacgccgccgccgcgccgtcgcccatcatcaagttccccggcgatgtcgcccccaaaacggacaaagagttggcagtgcaatacctgaacaccttctatggctgccccaaggagagctgcaacctgtttgtgctgaaggacacactaaagaagatgcagaagttctttggactgccccagacaggtgatcttgaccagaataccatcgagaccatgcggaagccacgctgcggcaacccagatgtggccaactacaacttcttccctcgcaagcccaagtgggacaagaaccagatcacatacaggatcattggctacacacctgatctggacccagagacagtggatgatgcctttgctcgtgccttccaagtctggagcgatgtgaccccactgcggttttctcgaatccatgatggagaggcagacatcatgatcaactttggccgctgggagcatggcgatggatacccctttgacggtaaggacggactcctggctcatgccttcgccccaggcactggtgttgggggagactcccattttgatgacgatgagctatggaccttgggagaaggccaagtggtccgtgtgaagtatggcaacgccgatggggagtactgcaagttccccttcttgttcaatggcaaggagtacaacagctgcactgataccggccgcagcgatggcttcctctggtgctccaccacctacaactttgagaaggatggcaagtacggcttctgtccccatgaagccctgttcaccatgggcggcaacgctgaaggacagccctgcaagtttccattccgcttccagggcacatcctatgacagctgcaccactgagggccgcacggatggctaccgctggtgcggcaccactgaggactacgaccgcgacaagaagtatggcttctgccctgagaccgccatgtccactgttggtgggaactcagaaggtgccccctgtgtcttccccttcactttcctgggcaacaaatatgagagctgcaccagcgccggccgcagtgacggaaagatgtggtgtgcgaccacagccaactacgatgacgaccgcaagtggggcttctgccctgaccaagggtacagcctgttcctcgtggcagcccacgagtttggccacgccatggggctggagcactcccaagaccctggggccctgatggcacccatttacacctacaccaagaacttccgtctgtcccaggatgacatccccgataacctggatgccgtcgtggacctgcagggcggcggtcacagctacttcttcaagggtgcctattacctgaagctggagaaccaaagtctgaagagcgtgaagtttggaagcatcaaatccgactggctaggctgctgagctggccctggctcccacaggcccttcctctccactgccttcgatacaccgggcctggagaactagagaaggacccggaggggcctggcagccgtgccttcagctctacagctaatcagcattctcactcctacctggtaatttaagattccagagagtggctcctcccggtgcccaagaatagatgctgactgtactcctcccaggcgccccttccccctccaatcccaccaaccctcagagccacccctaaagagatactttgatattttcaacgcagccctgctttgggctgccctggtgctgccacacttcaggctcttctcctttcacaaccttctgtggctcacagaacccttggagccaatggagactgtctcaagagggcactggtggcccgacagcctggcacagggcagtgggacagggcatggccaggtggccactccagacccctggcttttcactgctggctgccttagaacctttcttacattagcagtttgctttgtatgcactttgtttttttctttgggtcttgttttttttttccacttagaaattgcatttcctgacagaaggactcaggttgtctgaagtcactgcacagtgcatctcagcccacatagtgatggttcccctgttcactctacttagcatgtccctaccgagtctcttctccactggatggaggaaaaccaagccgtggcttcccgctcagccctccctgcccctcccttcaaccattccccatgggaaatgtcaacaagtatgaataaagacacctactgagtggc

SEQ ID NO: 319727 - DNA, 3492 bp, Homo sapiens
gaggtcgtgcactgagggtggacgtagaggccaggagtagcaggcggccggggaaaagaggtggagaaaggaaaaaagaggagaaaagtggaggagggcgagtaggggggtggggcagagaggggcgggcccgagtgcgccccccgcccccagccccgctctgccagctccctcccagcccagccggctacatctggcggctgccctcccttgtttccgctgcatccagacttcctcaggcggtggctggaggctgcgcatctggggctttaaacatacaaagggattgccaggacctgcggcggcggcggcggcggcgggggctggggcgcgggggccggaccatgagccgctgagccgggcaaaccccaggccaccgagccagcggaccctcggagcgcagccctgcgccgcggagcaggctccaaccaggcggcgaggcggccacacgcaccgagccagcgacccccgggcgacgcgcggggccagggagcgctacgatggaggcgctaatggcccggggcgcgctcacgggtcccctgagggcgctctgtctcctgggctgcctgctgagccacgccgccgccgcgccgtcgcccatcatcaagttccccggcgatgtcgcccccaaaacggacaaagagttggcagtgcaatacctgaacaccttctatggctgccccaaggagagctgcaacctgtttgtgctgaaggacacactaaagaagatgcagaagttctttggactgccccagacaggtgatcttgaccagaataccatcgagaccatgcggaagccacgctgcggcaacccagatgtggccaactacaacttcttccctcgcaagcccaagtgggacaagaaccagatcacatacaggatcattggctacacacctgatctggacccagagacagtggatgatgcctttgctcgtgccttccaagtctggagcgatgtgaccccactgcggttttctcgaatccatgatggagaggcagacatcatgatcaactttggccgctgggagcatggcgatggatacccctttgacggtaaggacggactcctggctcatgccttcgccccaggcactggtgttgggggagactcccattttgatgacgatgagctatggaccttgggagaaggccaagtggtccgtgtgaagtatggcaacgccgatggggagtactgcaagttccccttcttgttcaatggcaaggagtacaacagctgcactgataccggccgcagcgatggcttcctctggtgctccaccacctacaactttgagaaggatggcaagtacggcttctgtccccatgaagccctgttcaccatgggcggcaacgctgaaggacagccctgcaagtttccattccgcttccagggcacatcctatgacagctgcaccactgagggccgcacggatggctaccgctggtgcggcaccactgaggactacgaccgcgacaagaagtatggcttctgccctgagaccgccatgtccactgttggtgggaactcagaaggtgccccctgtgtcttccccttcactttcctgggcaacaaatatgagagctgcaccagcgccggccgcagtgacggaaagatgtggtgtgcgaccacagccaactacgatgacgaccgcaagtggggcttctgccctgaccaagggtacagcctgttcctcgtggcagcccacgagtttggccacgccatggggctggagcactcccaagaccctggggccctgatggcacccatttacacctacaccaagaacttccgtctgtcccaggatgacatcaagggcattcaggagctctatggggcctctcctgacattgaccttggcaccggccccacccccacactgggccctgtcactcctgagatctgcaaacaggacattgtatttgatggcatcgctcagatccgtggtgagatcttcttcttcaaggaccggttcatttggcggactgtgacgccacgtgacaagcccatggggcccctgctggtggccacattctggcctgagctcccggaaaagattgatgcggtatacgaggccccacaggaggagaaggctgtgttctttgcagggaatgaatactggatctactcagccagcaccctggagcgagggtaccccaagccactgaccagcctgggactgccccctgatgtccagcgagtggatgccgcctttaactggagcaaaaacaagaagacatacatctttgctggagacaaattctggagatacaatgaggtgaagaagaaaatggatcctggcttccccaagctcatcgcagatgcctggaatgccatccccgataacctggatgccgtcgtggacctgcagggcggcggtcacagctacttcttcaagggtgcctattacctgaagctggagaaccaaagtctgaagagcgtgaagtttggaagcatcaaatccgactggctaggctgctgagctggccctggctcccacaggcccttcctctccactgccttcgatacaccgggcctggagaactagagaaggacccggaggggcctggcagccgtgccttcagctctacagctaatcagcattctcactcctacctggtaatttaagattccagagagtggctcctcccggtgcccaagaatagatgctgactgtactcctcccaggcgccccttccccctccaatcccaccaaccctcagagccacccctaaagagatactttgatattttcaacgcagccctgctttgggctgccctggtgctgccacacttcaggctcttctcctttcacaaccttctgtggctcacagaacccttggagccaatggagactgtctcaagagggcactggtggcccgacagcctggcacagggcagtgggacagggcatggccaggtggccactccagacccctggcttttcactgctggctgccttagaacctttcttacattagcagtttgctttgtatgcactttgtttttttctttgggtcttgttttttttttccacttagaaattgcatttcctgacagaaggactcaggttgtctgaagtcactgcacagtgcatctcagcccacatagtgatggttcccctgttcactctacttagcatgtccctaccgagtctcttctccactggatggaggaaaaccaagccgtggcttcccgctcagccctccctgcccctcccttcaaccattccccatgggaaatgtcaacaagtatgaataaagacacctactgagtggcaacaaaacaaacacacaaaaaaacaaacaaaaaaaaaaaaacaaaacacacacacaaaacggaacgaggaagaaagaagagaagaaaggaagagcgcagagaccggcagagcaccgagaggagaccgcgggagcgagaagagaccgcgagagagagtgaagagaggacgaaaggaagcgagatgaaggaaggagacagggggagaggcccgt

SEQ ID NO: 319728 - DNA, 1241 bp, Homo sapiens
agggtcgtgccaattacatttcatttgcatggattttggttttcatgctctgtcctcccctcctttgcagggaatgaatactggatctactcagccagcaccctggagcgagggtaccccaagccactgaccagcctgggactgccccctgatgtccagcgagtggatgccgcctttaactggagcaaaaacaagaagacatacatctttgctggagacaaattctggagatacaatgaggtgaagaagaaaatggatcctggcttccccaagctcatcgcagatgcctggaatgccatccccgataacctggatgccgtcgtggacctgcagggcggcggtcacagctacttcttcaagggtgcctattacctgaagctggagaaccaaagtctgaagagcgtgaagtttggaagcatcaaatccgactggctaggctgctgagctggccctggctcccacaggcccttcctctccactgccttcgatacaccgggcctggagaactagagaaggacccggaggggcctggcagccgtgccttcagctctacagctaatcagcattctcactcctacctggtaatttaagattccagagagtggctcctcccggtgcccaagaatagatgctgactgtactcctcccaggcgccccttccccctccaatcccaccaaccctcagagccacccctaaagagatactttgatattttcaacgcagccctgctttgggctgccctggtgctgccacacttcaggctcttctcctttcacaaccttctgtggctcacagaacccttggagccaatggagactgtctcaagagggcactggtggcccgacagcctggcacagggcagtgggacagggcatggccaggtggccactccagacccctggcttttcactgctggctgccttagaacctttcttacattagcagtttgctttgtatgcactttgtttttttctttgggtcttgttttttttttccacttagaaattgcatttcctgacagaaggactcaggttgtctgaagtcactgcacagtgcatctcagcccacatagtgatggttcccctgttcactctacttagcatgtccctaccgagtctcttctccactggatggaggaaaaccaagccgtggcttcccgctcagccctccctgcccctcccttcaaccattccccatgggaaatgtcaacaagtatgaataaagacacctactgagtggc

SEQ ID NO: 319729 - DNA, 3139 bp, Homo sapiens
gaggtcgtgcactgagggtggacgtagaggccaggagtagcaggcggccggggaaaagaggtggagaaaggaaaaaagaggagaaaagtggaggagggcgagtaggggggtggggcagagaggggcgggcccgagtgcgccccccgcccccagccccgctctgccagctccctcccagcccagccggctacatctggcggctgccctcccttgtttccgctgcatccagacttcctcaggcggtggctggaggctgcgcatctggggctttaaacatacaaagggattgccaggacctgcggcggcggcggcggcggcgggggctggggcgcgggggccggaccatgagccgctgagccgggcaaaccccaggccaccgagccagcggaccctcggagcgcagccctgcgccgcggagcaggctccaaccaggcggcgaggcggccacacgcaccgagccagcgacccccgggcgacgcgcggggccagggagcgctacgatggaggcgctaatggcccggggcgcgctcacgggtcccctgagggcgctctgtctcctgggctgcctgctgagccacgccgccgccgcgccgtcgcccatcatcaagttccccggcgatgtcgcccccaaaacggacaaagagttggcagtgcaatacctgaacaccttctatggctgccccaaggagagctgcaacctgtttgtgctgaaggacacactaaagaagatgcagaagttctttggactgccccagacaggtgatcttgaccagaataccatcgagaccatgcggaagccacgctgcggcaacccagatgtggccaactacaacttcttccctcgcaagcccaagtgggacaagaaccagatcacatacaggatcattggctacacacctgatctggacccagagacagtggatgatgcctttgctcgtgccttccaagtctggagcgatgtgaccccactgcggttttctcgaatccatgatggagaggcagacatcatgatcaactttggccgctgggagcatggcgatggatacccctttgacggtaaggacggactcctggctcatgccttcgccccaggcactggtgttgggggagactcccattttgatgacgatgagctatggaccttgggagaaggccaagtggtccgtgtgaagtatggcaacgccgatggggagtactgcaagttccccttcttgttcaatggcaaggagtacaacagctgcactgataccggccgcagcgatggcttcctctggtgctccaccacctacaactttgagaaggatggcaagtacggcttctgtccccatgaagccctgttcaccatgggcggcaacgctgaaggacagccctgcaagtttccattccgcttccagggcacatcctatgacagctgcaccactgagggccgcacggatggctaccgctggtgcggcaccactgaggactacgaccgcgacaagaagtatggcttctgccctgagaccgccatgtccactgttggtgggaactcagaaggtgccccctgtgtcttccccttcactttcctgggcaacaaatatgagagctgcaccagcgccggccgcagtgacggaaagatgtggtgtgcgaccacagccaactacgatgacgaccgcaagtggggcttctgccctgaccaagggtacagcctgttcctcgtggcagcccacgagtttggccacgccatggggctggagcactcccaagaccctggggccctgatggcacccatttacacctacaccaagaacttccgtctgtcccaggatgacatcaagggcattcaggagctctatggggcctctcctgacattgaccttggcaccggccccacccccacactgggccctgtcactcctgagatctgcaaacaggacattgtatttgatggcatcgctcagatccgtggtgagatcttcttcttcaaggaccggttcatttggcggactgtgacgccacgtgacaagcccatggggcccctgctggtggccacattctggcctgagctcccggaaaagattgatgcggtatacgaggccccacaggaggagaaggctgtgttctttgcagggaatgaatactggatctactcagccagcaccctggagcgagggtaccccaagccactgaccagcctgggactgccccctgatgtccagcgagtggatgccgcctttaactggagcaaaaacaagaagacatacatctttgctggagacaaattctggagatacaatgaggtgaagaagaaaatggatcctggcttccccaagctcatcgcagatgcctggaatgccatccccgataacctggatgccgtcgtggacctgcagggcggcggtcacagctacttcttcaagggtgcctattacctgaagctggagaaccaaagtctgaagagcgtgaagtttggaagcatcaaatccgactggctaggctgctgagctggccctggctcccacaggcccttcctctccactgccttcgatacaccgggcctggagaactagagaaggacccggaggggcctggcagccgtgccttcagctctacagctaatcagcattctcactcctacctggtaatttaagattccagagagtggctcctcccggtgcccaagaatagatgctgactgtactcctcccaggcgccccttccccctccaatcccaccaaccctcagagccacccctaaagagatactttgatattttcaacgcagccctgctttgggctgccctggtgctgccacacttcaggctcttctcctttcacaaccttctgtggctcacagaacccttggagccaatggagactgtctcaagagggcactggtggcccgacagcctggcacagggcagtgggacagggcatggccaggtggccactccagacccctggcttttcactgctggctgccttagaacctttcttacattagcagtttgctttgtatgcactttgtttttttctttgggtcttgttttttttttccacaaccaagccgtggcttcccgctcagccctccctgcccctcccttcaaccattccccatgggaaatgtcaacaagtatgaataaagacacctactgagtggc

SEQ ID NO: 319730 - DNA, 2742 bp, Homo sapiens
gaggtcgtgcactgagggtggacgtagaggccaggagtagcaggcggccggggaaaagaggtggagaaaggaaaaaagaggagaaaagtggaggagggcgagtaggggggtggggcagagaggggcgggcccgagtgcgccccccgcccccagccccgctctgccagctccctcccagcccagccggctacatctggcggctgccctcccttgtttccgctgcatccagacttcctcaggcggtggctggaggctgcgcatctggggctttaaacatacaaagggattgccaggacctgcggcggcggcggcggcggcgggggctggggcgcgggggccggaccatgagccgctgagccgggcaaaccccaggccaccgagccagcggaccctcggagcgcagccctgcgccgcggagcaggctccaaccaggcggcgaggcggccacacgcaccgagccagcgacccccgggcgacgcgcggggccagggagcgctacgatggaggcgctaatggcccggggcgcgctcacgggtcccctgagggcgctctgtctcctgggctgcctgctgagccacgccgccgccgcgccgtcgcccatcatcaagttccccggcgatgtcgcccccaaaacggacaaagagttggcagtgcaatacctgaacaccttctatggctgccccaaggagagctgcaacctgtttgtgctgaaggacacactaaagaagatgcagaagttctttggactgccccagacaggtgatcttgaccagaataccatcgagaccatgcggaagccacgctgcggcaacccagatgtggccaactacaacttcttccctcgcaagcccaagtgggacaagaaccagatcacatacaggatcattggctacacacctgatctggacccagagacagtggatgatgcctttgctcgtgccttccaagtctggagcgatgtgaccccactgcggttttctcgaatccatgatggagaggcagacatcatgatcaactttggccgctgggagcatggcgatggatacccctttgacggtaaggacggactcctggctcatgccttcgccccaggcactggtgttgggggagactcccattttgatgacgatgagctatggaccttgggagaaggccaagtggtccgtgtgaagtatggcaacgccgatggggagtactgcaagttccccttcttgttcaatggcaaggagtacaacagctgcactgataccggccgcagcgatggcttcctctggtgctccaccacctacaactttgagaaggatggcaagtacggcttctgtccccatgaagccctgttcaccatgggcggcaacgctgaaggacagccctgcaagtttccattccgcttccagggcacatcctatgacagctgcaccactgagggccgcacggatggctaccgctggtgcggcaccactgaggactacgaccgcgacaagaagtatggcttctgccctgagaccgccatgtccactgttggtgggaactcagaaggtgccccctgtgtcttccccttcactttcctgggcaacaaatatgagagctgcaccagcgccggccgcagtgacggaaagatgtggtgtgcgaccacagccaactacgatgacgaccgcaagtggggcttctgccctgaccaagggtacagcctgttcctcgtggcagcccacgagtttggccacgccatggggctggagcactcccaagaccctggggccctgatggcacccatttacacctacaccaagaacttccgtctgtcccaggatgacatcaagggcattcaggagctctatggggcctctcctgacattgaccttggcaccggccccacccccacactgggccctgtcactcctgagatctgcaaacaggacattgtatttgatggcatcgctcagatccgtggtgagatcttcttcttcaaggaccggttcatttggcggactgtgacgccacgtgacaagcccatggggcccctgctggtggccacattctggcctgagctcccggaaaagattgatgcggtatacgaggccccacaggaggagaaggctgtgttctttgcagggaatgaatactggatctactcagccagcaccctggagcgagggtaccccaagccactgaccagcctgggactgccccctgatgtccagcgagtggatgccgcctttaactggagcaaaaacaagaagacatacatctttgctggagacaaattctggagatacaatgaggtgaagaagaaaatggatcctggcttccccaagctcatcgcagatgcctggaatgccatccccgataacctggatgccgtcgtggacctgcagggcggcggtcacagctacttcttcaagggtgcctattacctgaagctggagaactagagaaggacccggaggggcctggcagccgtgccttcagctctacagctaatcagcattctcactcctacctgttagaaattgcatttcctgacagaaggactcaggttgtctgaagtcactgcacagtgcatctcagcccacatagtgatggttcccctgttcactctacttagcatgtccctaccgagtctcttctccactggatggaggaaaaccaagccgtggcttcccgctcagccctccctgcccctcccttcaaccattccccatgggaaatgtcaacaagtatgaataaagacacctactgagtggc

SEQ ID NO: 319731 - DNA, 2093 bp, Homo sapiens
gaggtcgtgcactgagggtggacgtagaggccaggagtagcaggcggccggggaaaagaggtggagaaaggaaaaaagaggagaaaagtggaggagggcgagtaggggggtggggcagagaggggcgggcccgagtgcgccccccgcccccagccccgctctgccagctccctcccagcccagccggctacatctggcggctgccctcccttgtttccgctgcatccagacttcctcaggcggtggctggaggctgcgcatctggggctttaaacatacaaagggattgccaggacctgcggcggcggcggcggcggcgggggctggggcgcgggggccggaccatgagccgctgagccgggcaaaccccaggccaccgagccagcggaccctcggagcgcagccctgcgccgcggagcaggctccaaccaggcggcgaggcggccacacgcaccgagccagcgacccccgggcgacgcgcggggccagggagcgctacgatggaggcgctaatggcccggggcgcgctcacgggtcccctgagggcgctctgtctcctgggctgcctgctgagccacgccgccgccgcgccgtcgcccatcatcaagttccccggcgatgtcgcccccaaaacggacaaagagttggcagtgcaatacctgaacaccttctatggctgccccaaggagagctgcaacctgtttgtgctgaaggacacactaaagaagatgcagaagttctttggactgccccagacaggtgatcttgaccagaataccatcgagaccatgcggaagccacgctgcggcaacccagatgtggccaactacaacttcttccctcgcaagcccaagtgggacaagaaccagatcacatacaggatcattggctacacacctgatctggacccagagacagtggatgatgcctttgctcgtgccttccaagtctggagcgatgtgaccccactgcggttttctcgaatccatgatggagaggcagacatcatgatcaactttggccgctgggagcatggcgatggatacccctttgacggtaaggacggactcctggctcatgccttcgccccaggcactggtgttgggggagactcccattttgatgacgatgagctatggaccttgggagaaggccaagtggtccgtgtgaagtatggcaacgccgatggggagtactgcaagttccccttcttgttcaatggcaaggagtacaacagctgcactgataccggccgcagcgatggcttcctctggtgctccaccacctacaactttgagaaggatggcaagtacggcttctgtccccatgaagccctgttcaccatgggcggcaacgctgaaggacagccctgcaagtttccattccgcttccagggcacatcctatgacagctgcaccactgagggccgcacggatggctaccgctggtgcggcaccactgaggactacgaccgcgacaagaagtatggcttctgccctgagaccgccatgtccactgttggtgggaactcagaaggtgccccctgtgtcttccccttcactttcctgggcaacaaatatgagagctgcaccagcgccggccgcagtgacggaaagatgtggtgtgcgaccacagccaactacgatgacgaccgcaagtggggcttctgccctgaccaagggtacagcctgttcctcgtggcagcccacgagtttggccacgccatggggctggagcactcccaagaccccctggcttttcactgctggctgccttagaacctttcttacattagcagtttgctttgtatgcactttgtttttttctttgggtcttgttttttttttccacttagaaattgcatttcctgacagaaggactcaggttgtctgaagtcactgcacagtgcatctcagcccacatagtgatggttcccctgttcactctacttagcatgtccctaccgagtctcttctccactggatggaggaaaaccaagccgtggcttcccgctcagccctccctgcccctcccttcaaccattccccatgggaaatgtcaacaagtatgaataaagacacctactgagtggc

SEQ ID NO: 319732 - DNA, 1419 bp, Homo sapiens
gaggtcgtgcactgagggtggacgtagaggccaggagtagcaggcggccggggaaaagaggtggagaaaggaaaaaagaggagaaaagtggaggagggcgagtaggggggtggggcagagaggggcgggcccgagtgcgccccccgcccccagccccgctctgccagctccctcccagcccagccggctacatctggcggctgccctcccttgtttccgctgcatccagacttcctcaggcggtggctggaggctgcgcatctggggctttaaacatacaaagggattgccaggacctgcggcggcggcggcggcggcgggggctggggcgcgggggccggaccatgagccgctgagccgggcaaaccccaggccaccgagccagcggaccctcggagcgcagccctgcgccgcggagcaggctccaaccaggcggcgaggcggccacacgcaccgagccagcgacccccgggcgacgcgcggggccagggagcgctacgatggaggcgctaatggcccggggcgcgctcacgggtcccctgagggcgctctgtctcctgggctgcctgctgagccacgccgccgccgcgccgtcgcccatcatcaagttccccggcgatgtcgcccccaaaacggacaaagagttggcagtgcaatacctgaacaccttctatggctgccccaaggagagctgcaacctgtttgtgctgaaggacacactaaagaagatgcagaagttctttggactgccccagacaggtgatcttgaccagaataccatcgagaccatgcggaagccacgctgcggcaacccagatgtggccaactacaacttcttccctcgcaagcccaagtgggacaagaaccagatcacatacaggatcattggctacacacctgatctggacccagagacagtggatgatgcctttgctcgtgccttccaagtctggagcgatgtgaccccactgcggttttctcgaatccatgatggagaggcagacatcatgatcaactttggccgctgggagcatggcgatggatacccctttgacggtaaggacggactcctggctcatgccttcgccccaggcactggtgttgggggagactcccattttgatgacgatgagctatggaccttgggagaaggccaagtggtccgtgtgaagtatggcaacgccgatggggagtactgcaagttccccttcttgttcaatggcaaggagtacaacagctgcactgataccggccgcagcgatggcttgcgtctttcaactgcggttgaagccagctcctctttctttctttctcttggctcattacattcctcattttccatctgggtggtatgagtcttgtcagattcttccagcatcaggtcttttttacctctgacaaccgcagttgaaagacgca

SEQ ID NO: 319733 - DNA, 1018 bp, Homo sapiens
gaggtcgtgcactgagggtggacgtagaggccaggagtagcaggcggccggggaaaagaggtggagaaaggaaaaaagaggagaaaagtggaggagggcgagtaggggggtggggcagagaggggcgggcccgagtgcgccccccgcccccagccccgctctgccagctccctcccagcccagccggctacatctggcggctgccctcccttgtttccgctgcatccagacttcctcaggcggtggctggaggctgcgcatctggggctttaaacatacaaagggattgccaggacctgcggcggcggcggcggcggcgggggctggggcgcgggggccggaccatgagccgctgagccgggcaaaccccaggccaccgagccagcggaccctcggagcgcagccctgcgccgcggagcaggctccaaccaggcggcgaggcggccacacgcaccgagccagcgacccccgggcgacgcgcggggccagggagcgctacgatggaggcgctaatggcccggggcgcgctcacgggtcccctgagggcgctctgtctcctgggctgcctgctgagccacgccgccgccgcgccgtcgcccatcatcaagttccccggcgatgtcgcccccaaaacggacaaagagttggcagtgcaatacctgaacaccttctatggctgccccaaggagagctgcaacctgtttgtgctgaaggacacactaaagaagatgcagaagttctttggactgccccagacaggtgatcttgaccagaataccatcgagaccatgcggaagccacgctgcggcaacccagatgtggccaactacaacttcttccctcgcaagcccaagtgggacaagaaccagatcacatacaggatcattggctacacacctgatctggacccagagacaaaccaagccgtggcttcccgctcagccctccctgcccctcccttcaaccattccccatgggaaatgtcaacaagtatgaataaagacacctactgagtggc

SEQ ID NO: 319734 - DNA, 947 bp, Homo sapiens
  misc_feature (878)..(878): n is a, c, g, or t
  misc_feature (880)..(880): n is a, c, g, or t
  misc_feature (901)..(901): n is a, c, g, or t
  misc_feature (923)..(923): n is a, c, g, or t
accgcccccccctcacccgctccctcccgcctccccgcccgccccacttctcattcacttggctcgcacggcgcagacagaccgcgcagggagcacacaccgccagtctgtgcgctgagtcggagccagaggccgcggggacaccgggccatgcacgcccccaactgaagctgcatctcaaagccgaagattccagcagcccaggggatttcaaagagctcagactcagaggaacatctgcggagagacccccgaagccctctccagggcagtcctcatccagacgctccgctagtgcagacaggagcgcgcagtggccccggctcgccgcgccatggagcggatccccagcgcgcaaccaccccccgcctgcctgcccaaagcaccgggactggagcacggagacctaccagggatgtaccctgcccacatgtaccaagtgtacaagtcaagacggggaataaagcggagcgaggacagcaaggagacctacaaattgccgcaccggctcatcgagaaaaagagacgtgaccggattaacgagtgcatcgcccagctgaaggatctcctacccgaacatctcaaacttacaactttgggtcacttggaaaaagcagtggttcttgaacttaccttgaagcatgtgaaagcactaacaaacctaattgatcagcagcagcagaaaatcattgccctgcagagtggtttacaagctggtgagctgtcagggagaaatgtcgaaacaggtcaagagatgttctgctcaggtttccagacatgtgcccgggaggtgcttcagtatctggccaagcacgagaacactcgggacctgaagtcttcgcagcttgtcacccacctccccccgggcttgacttgtngnagggaccttcaggaagcctanaaccacttccaagggaggattnaggaaaacccgttttcgccaaggg

SEQ ID NO: 319735 - DNA, 1437 bp, Homo sapiens
tggaagttctgaaagggtgtaaggaaagaagtagggaaagcctcttggctgccagacgtaatagaggtccctctctgagttgacaccactgcaggaaaatgttatctctggattcccctgagttaaggtcggcagaggctgctggagaaatttatctgtcaaaggattttcctgaggtagttgcagcttccaaaatgcctccaaagacaggtggcacccgtttttttaaattatttaattatatatatatattatatatatatacacacacacacacacacacacacacacatatatgagtgtatctgtctatctttttaaaagcatgacctacagacttaaaacagccaaccaggaaacactattccacttttttttttcttttctcatttctcattgctaataaatgtcccaaaggtgggacttctctgacctcaccgctgactaaggctcttttccttccagactttgggtcacttggaaaaagcagtggttcttgaacttaccttgaagcatgtgaaagcactaacaaacctaattgatcagcagcagcagaaaatcattgccctgcagagtggtttacaagctggtgagtgctgattctggctatgctctctttaagagtttgagtgcaaatagagagcccgtgggctcaacatctgatgtaataaacattactgcaacaaattgcttatgcacgttcattgggggagatgcagttttatctttcctaaaaggtcagacttttcatttgaaatgcattgtgccacctggcatgaatacgtattagtgaaatgataagatattcctgtggcattttagcttgagagtctctgggttctgggagatttccctactcccttttaaaatgccaaggcacctataatttgcattgtgggtgttttacagttggtcttcttagccctctttcattggagaagaaatcatgggtatgccccagcgttttcctgtttctttgcttccttgtcacttggtgtgtggtgtgatcctggcaggatacagcaggagtttttcctgcatttcatgtggttccctgaatagccactaggtatcttggtgaattgcacaatctagcgaaaccactgaagtttcatcattcgtttctactgacttccagataatcggagtcaaccttctaaccttctagtctcacttcttccaaataatactgtacagactggggagaattattctacccactccctcatttcatgcttgtctgccttcctctcgaaggctcgtatgatgaaaattgcaaaaacccagctagtgcttctgcctgtttcctcattcaaaataggaagatggtcatacctaatgtcttgaggatcatggatagaatatgtggagaagacatagaaatagcctaattaaaggtcacagcatgactgcaacttttacaaatcattgaaaata

SEQ ID NO: 319736 - DNA, 205 bp, Homo sapiens
ggctttatcgtatcatattttgtttttatagcagaccgggtcaaagtttgtgtttaacccttcccctctaccactccccccaccttttttgttgttgttgtcaaataaggggacttgctttggtgtgtgatttttacggcctgtcctttcttgacagtagccctcggctacttcgcagcctttggttggggaaatggaaaaaaaa

SEQ ID NO: 319737 - DNA, 3512 bp, Homo sapiens
accgcccccccctcacccgctccctcccgcctccccgcccgccccacttctcattcacttggctcgcacggcgcagacagaccgcgcagggagcacacaccgccagtctgtgcgctgagtcggagccagaggccgcggggacaccgggccatgcacgcccccaactgaagctgcatctcaaagccgaagattccagcagcccaggggatttcaaagagctcagactcagaggaacatctgcggagagacccccgaagccctctccagggcagtcctcatccagacgctccgctagtgcagacaggagcgcgcagtggccccggctcgccgcgccatggagcggatccccagcgcgcaaccaccccccgcctgcctgcccaaagcaccgggactggagcacggagacctaccagggatgtaccctgcccacatgtaccaagtgtacaagtcaagacggggaataaagcggagcgaggacagcaaggagacctacaaattgccgcaccggctcatcgagaaaaagagacgtgaccggattaacgagtgcatcgcccagctgaaggatctcctacccgaacatctcaaacttacaactttgggtcacttggaaaaagcagtggttcttgaacttaccttgaagcatgtgaaagcactaacaaacctaattgatcagcagcagcagaaaatcattgccctgcagagtggtttacaagctggtgagctgtcagggagaaatgtcgaaacaggtcaagagatgttctgctcaggtttccagacatgtgcccgggaggtgcttcagtatctggccaagcacgagaacactcgggacctgaagtcttcgcagcttgtcacccacctccaccgggtggtctcggagctgctgcagggtggtacctccaggaagccatcagacccagctcccaaagtgatggacttcaaggaaaaacccagctctccggccaaaggttcggaaggtcctgggaaaaactgcgtgccagtcatccagcggactttcgctcactcgagtggggagcagagcggcagcgacacggacacagacagtggctatggaggagaatcggagaagggcgacttgcgcagtgagcagccgtgcttcaaaagtgaccacggacgcaggttcacgatgggagaaaggatcggcgcaattaagcaagagtccgaagaaccccccacaaaaaagaaccggatgcagctttcggatgatgaaggccatttcactagcagtgacctgatcagctccccgttcctgggcccacacccacaccagcctcctttctgcctgcccttctacctgatcccaccttcagcgactgcctacctgcccatgctggagaagtgctggtatcccacctcagtgccagtgctatacccaggcctcaacgcctctgccgcagccctctctagcttcatgaacccagacaagatctcggctcccttgctcatgccccagagactcccttctcccttgccagctcatccgtccgtcgactcttctgtcttgctccaagctctgaagccaatcccccctttaaacttagaaaccaaagactaaactctctaggggatcctgctgctttgctttccttcctcgctacttcctaaaaagcaacaaaaaagtttttgtgaatgctgcaagattgttgcattgtgtatactgagataatctgaggcatggagagcagattcagggtgtgtgtgtgtgtgtgtgtgtgtgtgtgtatgtgcgtgtgcgtgcacatgtgtgcctgcgtgttggtataggactttaaagctccttttggcatagggaagtcacgaaggattgcttgacatcaggagacttgggggggattgtagcagacgtctgggcttttccccacccagagaatagcccccttcgatacacatcagctggattttcaaaagcttcaaagtcttggtctgtgagtcactcttcagtttgggagctgggtctgtggctttgatcagaaggtactttcaaaagagggctttccagggctcagctcccaaccagctgttaggaccccacccttttgcctttattgtcgacgtgactcaccagacgtcggggagagagagcagtcagaccgagctttctgctaacatggggaggtagcaggcactggcatagcacggtagtggtttggggaggtttccgcaggtctgctccccacccctgcctcggaagaataaagagaatgtagttccctactcaggctttcgtagtgattagcttactaaggaactgaaaatgggccccttgtacaagctgagctgccccggagggagggaggagttccctgggcttctggcacctgtttctaggcctaaccattagtacttactgtgcagggaaccaaaccaaggtctgagaaatgcggacaccccgagcgagcaccccaaagtgcacaaagctgagtaaaaagctgcccccttcaaacagaactagactcagttttcaattccatcctaaaactccttttaaccaagcttagcttctcaaaggcctaaccaagccttggcaccgccagatcctttctgtaggctaattcctcttgcccaacggcatatggagtgtccttattgctaaaaaggattccgtctccttcaaagaagttttatttttggtccagagtacttgttttcccgatgtgtccagccagctccgcagcagcttttcaaaatgcactatgcctgattgctgatcgtgttttaactttttcttttcctgtttttattttggtattaagtcgttgcctttatttgtaaagctgttataaatatatattatataaatatattaaaaaggaaaatgtttcagatgtttatttgtataattacttgattcacacagtgagaaaaaatgaatgtattcctgtttttgaagagaagaataattttttttttctctagggagaggtacagtgtttatattttggagccttcctgaaggtgtaaaattgtaaatatttttatctatgagtaaatgttaagtagttgttttaaaatacttaataaaataattcttttcctgtggaaaaaaaaaaaaaaaaaaaaaaaaaaaaaaaaaaaaaaaacaaaaaagaaaaaaaaaaaaaaaaaaaaaaaaagaaaaaaaaaaaaagaaaaaaaaacagaaaagaaagcctccaaggatcaacgcaacactacaccaagaccacaagaaaggcgaaacaacagcgaaagccggaccacatacaggcccgacccgcccgagcggaccagtcacagcaacagccaacaggcgaactggcggagggagcgacagaacgcccgcaagaacaagagaaatagaacaagacgccacacacagacacggcaaatagagatcagaaaccgcggcggaaccagaacaaacgagcgggacacagacggcaagaaggcccgaacacaaagccagcaaaccaacaaggaggagacaggaagagacaaacaacagagaaccagagcaaacaaccgcagcaaaccgc

SEQ ID NO: 319738 - DNA, 2715 bp, Homo sapiens
  misc_feature (21)..(21): n is a, c, g, or t
  misc_feature (32)..(32): n is a, c, g, or t
ttcccagtggtctttggtacnccacgcagtantggatatcgtcgaccacgcctcgcggagacctagcaggatgtaccctgcccacatgtaccaagtgtacaagtcaagacggggaataaagcggagcgaggacagcaaggagacctacaaattgccgcaccggctcatcgagaaaaagagacgtgaccggattaacgagtgcatcgcccagctgaaggatctcctacccgaacatctcaaacttacaactttgggtcacttggaaaaagcagtggttcttgaacttaccttgaagcatgtgaaagcactaacaaacctaattgatcagcagcagcagaaaatcattgccctgcagagtggtttacaagctggtgagctgtcagggagaaatgtcgaaacaggtcaagagatgttctgctcaggtttccagacatgtgcccgggaggtgcttcagtatctggccaagcacgagaacactcgggacctgaagtcttcgcagcttgtcacccacctccaccgggtggtctcggagctgctgcagggtggtacctccaggaagccatcagacccagctcccaaagtgatggacttcaaggaaaaacccagctctccggccaaaggttcggaaggtcctgggaaaaactgcgtgccagtcatccagcggactttcgctcactcgagtggggagcagagcggcagcgacacggacacagacagtggctatggaggagaatcggagaagggcgacttgcgcagtgagcagccgtgcttcaaaagtgaccacggacgcaggttcacgatgggagaaaggatcggcgcaattaagcaagagtccgaagaaccccccacaaaaaagaaccggatgcagctttcggatgatgaaggccatttcactagcagtgacctgatcagctccccgttcctgggcccacacccacaccagcctcctttctgcctgcccttctacctgatcccaccttcagcgactgcctacctgcccatgctggagaagtgctggtatcccacctcagtgccagtgctatacccaggcctcaacgcctctgccgcagccctctctagcttcatgaacccagacaagatctcggctcccttgctcatgccccagagactcccttctcccttgccagctcatccgtccgtcgactcttctgtcttgctccaagctctgaagccaatcccccctttaaacttagaaaccaaagactaaactctctaggggatcctgctgctttgctttccttcctcgctacttcctaaaaagcaacaaaaaagtttttgtgaatgctgcaagattgttgcattgtgtatactgagataatctgaggcatggagagcagattcagggtgtgtgtgtgtgtgtgtgtgtgtgtgtgtatgtgcgtgtgcgtgcacatgtgtgcctgcgtgttggtataggactttaaagctccttttggcatagggaagtcacgaaggattgcttgacatcaggagacttgggggggattgtagcagacgtctgggcttttccccacccagagaatagcccccttcgatacacatcagctggattttcaaaagcttcaaagtcttggtctgtgagtcactcttcagtttgggagctgggtctgtggctttgatcagaaggtactttcaaaagagggctttccagggctcagctcccaaccagctgttaggaccccacccttttgcctttattgtcgacgtgactcaccagacgtcggggagagagagcagtcagaccgagctttctgctaacatggggaggtagcaggcactggcatagcacggtagtggtttggggaggtttccgcaggtctgctccccacccctgcctcggaagaataaagagaatgtagttccctactcaggctttcgtagtgattagcttactaaggaactgaaaatgggccccttgtacaagctgagctgccccggagggagggaggagttccctgggcttctggcacctgtttctaggcctaaccattagtacttactgtgcagggaaccaaaccaaggtctgagaaatgcggacaccccgagcgagcaccccaaagtgcacaaagctgagtaaaaagctgcccccttcaaacagaactagactcagttttcaattccatcctaaaactccttttaaccaagcttagcttctcaaaggcctaaccaagccttggcaccgccagatcctttctgtaggctaattcctcttgcccaacggcatatggagtgtccttattgctaaaaaggattccgtctccttcaaagaagttttatttttggtccagagtacttgttttcccgatgtgtccagccagctccgcagcagcttttcaaaatgcactatgcctgattgctgatcgtgttttaactttttcttttcctgtttttattttggtattaagtcgttgcctttatttgtaaagctgttataaatatatattatataaatatattaaaaaggaaaatgtttcagatgtttatttgtataattacttgattcacacagtgagaaaaaatgaatgtattcctgtttttgaagagaagaataattttttttttctctagggagaggtacagtgtttatattttggagccttcctgaaggtgtaaaattgtaaatatttttatctatgagtaaatgttaagtagttgttttaaaatacttaataaaataattcttttcctgtggaa

SEQ ID NO: 319739 - DNA, 3329 bp, Homo sapiens
accgcccccccctcacccgctccctcccgcctccccgcccgccccacttctcattcacttggctcgcacggcgcagacagaccgcgcagggagcacacaccgccagtctgtgcgctgagtcggagccagaggccgcggggacaccgggccatgcacgcccccaactgaagctgcatctcaaagccgaagattccagcagcccaggggatttcaaagagctcagactcagaggaacatctgcggagagacccccgaagccctctccagggcagtcctcatccagacgctccgctagtgcagacaggagcgcgcagtggccccggctcgccgcgccatggagcggatccccagcgcgcaaccaccccccgcctgcctgcccaaagcaccgggactggagcacggagacctaccagggatgtaccctgcccacatgtaccaagtgtacaagtcaagacggggaataaagcggagcgaggacagcaaggtaagcaagtgcacccctagggaccctgcgctcagcccctcgcgcgcgctgagtttccaagaaaagttttctcgctttgaggttggcgaggggatgcagggtgtgggctcggtgcctcttctgagtgacttggaaaagaaagggcagacgatggttctgggtgctactctgctactctgctcctctgccggactgttgctgcggggctgggaggataggcttctcatctccttccccaagcgcccaccgcctccccgtgcgtcttgcaggagacctacaaattgccgcaccggctcatcgagaaaaagagacgtgaccggattaacgagtgcatcgcccagctgaaggatctcctacccgaacatctcaaacttacaactttgggtcacttggaaaaagcagtggttcttgaacttaccttgaagcatgtgaaagcactaacaaacctaattgatcagcagcagcagaaaatcattgccctgcagagtggtttacaagctggtgagctgtcagggagaaatgtcgaaacaggtcaagagatgttctgctcaggtttccagacatgtgcccgggaggtgcttcagtatctggccaagcacgagaacactcgggacctgaagtcttcgcagcttgtcacccacctccaccgggtggtctcggagctgctgcagggtggtacctccaggaagccatcagacccagctcccaaagtgatggacttcaaggaaaaacccagctctccggccaaaggttcggaaggtcctgggaaaaactgcgtgccagtcatccagcggactttcgctcactcgagtggggagcagagcggcagcgacacggacacagacagtggctatggaggagaatcggagaagggcgacttgcgcagtgagcagccgtgcttcaaaagtgaccacggacgcaggttcacgatgggagaaaggatcggcgcaattaagcaagagtccgaagaaccccccacaaaaaagaaccggatgcagctttcggatgatgaaggccatttcactagcagtgacctgatcagctccccgttcctgggcccacacccacaccagcctcctttctgcctgcccttctacctgatcccaccttcagcgactgcctacctgcccatgctggagaagtgctggtatcccacctcagtgccagtgctatacccaggcctcaacgcctctgccgcagccctctctagcttcatgaacccagacaagatctcggctcccttgctcatgccccagagactcccttctcccttgccagctcatccgtccgtcgactcttctgtcttgctccaagctctgaagccaatcccccctttaaacttagaaaccaaagactaaactctctaggggatcctgctgctttgctttccttcctcgctacttcctaaaaagcaacaaaaaagtttttgtgaatgctgcaagattgttgcattgtgtatactgagataatctgaggcatggagagcagattcagggtgtgtgtgtgtgtgtgtgtgtgtgtgtgtatgtgcgtgtgcgtgcacatgtgtgcctgcgtgttggtataggactttaaagctccttttggcatagggaagtcacgaaggattgcttgacatcaggagacttgggggggattgtagcagacgtctgggcttttccccacccagagaatagcccccttcgatacacatcagctggattttcaaaagcttcaaagtcttggtctgtgagtcactcttcagtttgggagctgggtctgtggctttgatcagaaggtactttcaaaagagggctttccagggctcagctcccaaccagctgttaggaccccacccttttgcctttattgtcgacgtgactcaccagacgtcggggagagagagcagtcagaccgagctttctgctaacatggggaggtagcaggcactggcatagcacggtagtggtttggggaggtttccgcaggtctgctccccacccctgcctcggaagaataaagagaatgtagttccctactcaggctttcgtagtgattagcttactaaggaactgaaaatgggccccttgtacaagctgagctgccccggagggagggaggagttccctgggcttctggcacctgtttctaggcctaaccattagtacttactgtgcagggaaccaaaccaaggtctgagaaatgcggacaccccgagcgagcaccccaaagtgcacaaagctgagtaaaaagctgcccccttcaaacagaactagactcagttttcaattccatcctaaaactccttttaaccaagcttagcttctcaaaggcctaaccaagccttggcaccgccagatcctttctgtaggctaattcctcttgcccaacggcatatggagtgtccttattgctaaaaaggattccgtctccttcaaagaagttttatttttggtccagagtacttgttttcccgatgtgtccagccagctccgcagcagcttttcaaaatgcactatgcctgattgctgatcgtgttttaactttttcttttcctgtttttattttggtattaagtcgttgcctttatttgtaaagctgttataaatatatattatataaatatattaaaaaggaaaatgtttcagatgtttatttgtataattacttgattcacacagtgagaaaaaatgaatgtattcctgtttttgaagagaagaataattttttttttctctagggagaggtacagtgtttatattttggagccttcctgaaggtgtaaaattgtaaatatttttatctatgagtaaatgttaagtagttgttttaaaatacttaataaaataattcttttcctgtggaa

SEQ ID NO: 319740 - DNA, 3003 bp, Homo sapiens
accgcccccccctcacccgctccctcccgcctccccgcccgccccacttctcattcacttggctcgcacggcgcagacagaccgcgcagggagcacacaccgccagtctgtgcgctgagtcggagccagaggccgcggggacaccgggccatgcacgcccccaactgaagctgcatctcaaagccgaagattccagcagcccaggggatttcaaagagctcagactcagaggaacatctgcggagagacccccgaagccctctccagggcagtcctcatccagacgctccgctagtgcagacaggagcgcgcagtggccccggctcgccgcgccatggagcggatccccagcgcgcaaccaccccccgcctgcctgcccaaagcaccgggactggagcacggagacctaccagggatgtaccctgcccacatgtaccaagtgtacaagtcaagacggggaataaagcggagcgaggacagcaaggagacctacaaattgccgcaccggctcatcgagaaaaagagacgtgaccggattaacgagtgcatcgcccagctgaaggatctcctacccgaacatctcaaacttacaactttgggtcacttggaaaaagcagtggttcttgaacttaccttgaagcatgtgaaagcactaacaaacctaattgatcagcagcagcagaaaatcattgccctgcagagtggtttacaagctggtgagctgtcagggagaaatgtcgaaacaggtcaagagatgttctgctcaggtttccagacatgtgcccgggaggtgcttcagtatctggccaagcacgagaacactcgggacctgaagtcttcgcagcttgtcacccacctccaccgggtggtctcggagctgctgcagggtggtacctccaggaagccatcagacccagctcccaaagtgatggacttcaaggaaaaacccagctctccggccaaaggttcggaaggtcctgggaaaaactgcgtgccagtcatccagcggactttcgctcactcgagtggggagcagagcggcagcgacacggacacagacagtggctatggaggagaatcggagaagggcgacttgcgcagtgagcagccgtgcttcaaaagtgaccacggacgcaggttcacgatgggagaaaggatcggcgcaattaagcaagagtccgaagaaccccccacaaaaaagaaccggatgcagctttcggatgatgaaggccatttcactagcagtgacctgatcagctccccgttcctgggcccacacccacaccagcctcctttctgcctgcccttctacctgatcccaccttcagcgactgcctacctgcccatgctggagaagtgctggtatcccacctcagtgccagtgctatacccaggcctcaacgcctctgccgcagccctctctagcttcatgaacccagacaagatctcggctcccttgctcatgccccagagactcccttctcccttgccagctcatccgtccgtcgactcttctgtcttgctccaagctctgaagccaatcccccctttaaacttagaaaccaaagactaaactctctaggggatcctgctgctttgctttccttcctcgctacttcctaaaaagcaacaaaaaagtttttgtgaatgctgcaagattgttgcattgtgtatactgagataatctgaggcatggagagcagattcagggtgtgtgtgtgtgtgtgtgtgtgtgtgtgtatgtgcgtgtgcgtgcacatgtgtgcctgcgtgttggtataggactttaaagctccttttggcatagggaagtcacgaaggattgcttgacatcaggagacttgggggggattgtagcagacgtctgggcttttccccacccagagaatagcccccttcgatacacatcagctggattttcaaaagcttcaaagtcttggtctgtgagtcactcttcagtttgggagctgggtctgtggctttgatcagaaggtactttcaaaagagggctttccagggctcagctcccaaccagctgttaggaccccacccttttgcctttattgtcgacgtgactcaccagacgtcggggagagagagcagtcagaccgagctttctgctaacatggggaggtagcaggcactggcatagcacggtagtggtttggggaggtttccgcaggtctgctccccacccctgcctcggaagaataaagagaatgtagttccctactcaggctttcgtagtgattagcttactaaggaactgaaaatgggccccttgtacaagctgagctgccccggagggagggaggagttccctgggcttctggcacctgtttctaggcctaaccattagtacttactgtgcagggaaccaaaccaaggtctgagaaatgcggacaccccgagcgagcaccccaaagtgcacaaagctgagtaaaaagctgcccccttcaaacagaactagactcagttttcaattccatcctaaaactccttttaaccaagcttagcttctcaaaggcctaaccaagccttggcaccgccagatcctttctgtaggctaattcctcttgcccaacggcatatggagtgtccttattgctaaaaaggattccgtctccttcaaagaagttttatttttggtccagagtacttgttttcccgatgtgtccagccagctccgcagcagcttttcaaaatgcactatgcctgattgctgatcgtgttttaactttttcttttcctgtttttattttggtattaagtcgttgcctttatttgtaaagctgttataaatatatattatataaatatattaaaaaggaaaatgtttcagatgtttatttgtataattacttgattcacacagtgagagaggtacagtgtttatattttggagccttcctgaaggtgtaaaattgtaaatatttttatctatgagtaaatgttaagtagttgttttaaaatacttaataaaataattcttttcctgtggaa

SEQ ID NO: 319741 - DNA, 2440 bp, Homo sapiens
ttaacaaaaactaaagcacctggttttttggagtatagtttccaggtgcgccacaggccttctgaaacgttttccttcggatttttctttccccaggtgagctgtcagggagaaatgtcgaaacaggtcaagagatgttctgctcaggtttccagacatgtgcccgggaggtgcttcagtatctggccaagcacgagaacactcgggacctgaagtcttcgcagcttgtcacccacctccaccgggtggtctcggagctgctgcagggtggtacctccaggaagccatcagacccagctcccaaagtgatggacttcaaggaaaaacccagctctccggccaaaggttcggaaggtcctgggaaaaactgcgtgccagtcatccagcggactttcgctcactcgagtggggagcagagcggcagcgacacggacacagacagtggctatggaggagaatcggagaagggcgacttgcgcagtgagcagccgtgcttcaaaagtgaccacggacgcaggttcacgatgggagaaaggatcggcgcaattaagcaagagtccgaagaaccccccacaaaaaagaaccggatgcagctttcggatgatgaaggccatttcactagcagtgacctgatcagctccccgttcctgggcccacacccacaccagcctcctttctgcctgcccttctacctgatcccaccttcagcgactgcctacctgcccatgctggagaagtgctggtatcccacctcagtgccagtgctatacccaggcctcaacgcctctgccgcagccctctctagcttcatgaacccagacaagatctcggctcccttgctcatgccccagagactcccttctcccttgccagctcatccgtccgtcgactcttctgtcttgctccaagctctgaagccaatcccccctttaaacttagaaaccaaagactaaactctctaggggatcctgctgctttgctttccttcctcgctacttcctaaaaagcaacaaaaaagtttttgtgaatgctgcaagattgttgcattgtgtatactgagataatctgaggcatggagagcagattcagggtgtgtgtgtgtgtgtgtgtgtgtgtgtgtatgtgcgtgtgcgtgcacatgtgtgcctgcgtgttggtataggactttaaagctccttttggcatagggaagtcacgaaggattgcttgacatcaggagacttgggggggattgtagcagacgtctgggcttttccccacccagagaatagcccccttcgatacacatcagctggattttcaaaagcttcaaagtcttggtctgtgagtcactcttcagtttgggagctgggtctgtggctttgatcagaaggtactttcaaaagagggctttccagggctcagctcccaaccagctgttaggaccccacccttttgcctttattgtcgacgtgactcaccagacgtcggggagagagagcagtcagaccgagctttctgctaacatggggaggtagcaggcactggcatagcacggtagtggtttggggaggtttccgcaggtctgctccccacccctgcctcggaagaataaagagaatgtagttccctactcaggctttcgtagtgattagcttactaaggaactgaaaatgggccccttgtacaagctgagctgccccggagggagggaggagttccctgggcttctggcacctgtttctaggcctaaccattagtacttactgtgcagggaaccaaaccaaggtctgagaaatgcggacaccccgagcgagcaccccaaagtgcacaaagctgagtaaaaagctgcccccttcaaacagaactagactcagttttcaattccatcctaaaactccttttaaccaagcttagcttctcaaaggcctaaccaagccttggcaccgccagatcctttctgtaggctaattcctcttgcccaacggcatatggagtgtccttattgctaaaaaggattccgtctccttcaaagaagttttatttttggtccagagtacttgttttcccgatgtgtccagccagctccgcagcagcttttcaaaatgcactatgcctgattgctgatcgtgttttaactttttcttttcctgtttttattttggtattaagtcgttgcctttatttgtaaagctgttataaatatatattatataaatatattaaaaaggaaaatgtttcagatgtttatttgtataattacttgattcacacagtgagaaaaaatgaatgtattcctgtttttgaagagaagaataattttttttttctctagggagaggtacagtgtttatattttggagccttcctgaaggtgtaaaattgtaaatatttttatctatgagtaaatgttaagtagttgttttaaaatacttaataaaataattcttttcctgtggaa

SEQ ID NO: 319742 - DNA, 2710 bp, Homo sapiens
accgcccccccctcacccgctccctcccgcctccccgcccgccccacttctcattcacttggctcgcacggcgcagacagaccgcgcagggagcacacaccgccagtctgtgcgctgagtcggagccagaggccgcggggacaccgggccatgcacgcccccaactgaagctgcatctcaaagccgaagattccagcagcccaggggatttcaaagagctcagactcagaggaacatctgcggagagacccccgaagccctctccagggcagtcctcatccagacgctccgctagtgcagacaggagcgcgcagtggccccggctcgccgcgccatggagcggatccccagcgcgcaaccaccccccgcctgcctgcccaaagcaccgggactggagcacggagacctaccagggatgtaccctgcccacatgtaccaagtgtacaagtcaagacggggaataaagcggagcgaggacagcaaggagacctacaaattgccgcaccggctcatcgagaaaaagagacgtgaccggattaacgagtgcatcgcccagctgaaggatctcctacccgaacatctcaaacttacaactttgggtcacttggaaaaagcagtggttcttgaacttaccttgaagcatgtgaaagcactaacaaacctaattgatcagcagcagcagaaaatcattgccctgcagagtggtttacaagctggtgagctgtcagggagaaatgtcgaaacaggtcaagagatgttctgctcaggtttccagacatgtgcccgggaggtgcttcagtatctggccaagcacgagaacactcgggacctgaagtcttcgcagcttgtcacccacctccaccgggtggtctcggagctgctgcagggtggtacctccaggaagccatcagacccagctcccaaagtgatggacttcaaggaaaaacccagctctccggccaaaggttcggaaggtcctgggaaaaactgcgtgccagtcatccagcggactttcgctcactcgagtggggagcagagcggcagcgacacggacacagacagtggctatggaggagaatcggagaagggcgacttgcgcagtgagcagccgtgcttcaaaagtgaccacggacgcaggttcacgatgggagaaaggatcggcgcaattaagcaagagtccgaagaaccccccacaaaaaagaaccggatgcagctttcggatgatgaaggccatttcactagcagtgacctgatcagctccccgttcctgggcccacacccacaccagcctcctttctgcctgcccttctacctgatcccaccttcagcgactgcctacctgcccatgctggagaagtgctggtatcccacctcagtgccagtgctatacccaggcctcaacgcctctgccgcagccctctctagcttcatgaacccagacaagatctcggctcccttgctcatgccccagagactcccttctcccttgccagctcatccgtccgtcgactcttctgtcttgctccaagctctgaagccaatcccccctttaaacttagaaaccaaagactaaactctctaggggatcctgctgctttgctttccttcctcgctacttcctaaaaagcaacaaaaaagtttttgtgaatgctgcaagattgttgcattgtgtatactgagataatctgaggcatggagagcagattcagggtgtgtgtgtgtgtgtgtgtgtgtgtgtgtatgtgcgtgtgcgtgcacatgtgtgcctgcgtgttggtataggactttaaagctccttttggcatagggaagtcacgaaggattgcttgacatcaggagacttgggggggattgtagcagacgtctgggcttttccccacccagagaatagcccccttcgatacacatcagctggattttcaaaagcttcaaagtcttggtctgtgagtcactcttcagtttgggagctgggtctgtggctttgatcagaaggtactttcaaaagagggctttccagggctcagctcccaaccagctgttaggaccccacccttttgcctttattgtcgacgtgactcaccagacgtcggggagagagagcagtcagaccgagctttctgctaacatggggaggtagcaggcactggcatagcacggtagtggtttggggaggtttccgcaggtctgctccccacccctgcctcggaagaataaagagaatgtagttccctactcaggctttcgtagtgattagcttactaaggaactgaaaatgggccccttgtacaagctgagctgccccggagggagggaggagttccctgggcttctggcacctgtttctaggcctaaccattagtacttactgtgcagggaaccaaaccaaggtctgagaaatgcggacaccccgagcgagcaccccaaagtgcacaaagctgagtaaaaagctgcccccttcaaacagaactagactcagttttcaattccatcctaaaactccttttaaccaagcttagcttctcaaaggcctaaccaagccttggcaccgccagatcctttctgtaggctaattcctcttgcccaacggcatatggagtgtccttattgctaaaaaggattccgtctccttcaaagaagttttatttttggtccagagtacttgttttcccgatgtgtccagccagaaccacaaatatcggggtacgagctc

SEQ ID NO: 319743 - DNA, 1652 bp, Homo sapiens
ctagctaccttgaatccggatgcagtggccggcaagccagagccttatatgcctgttacagttgttcactcagttccttcaggactgccctgtccactcgactcttctgtcttgctccaagctctgaagccaatcccccctttaaacttagaaaccaaagactaaactctctaggggatcctgctgctttgctttccttcctcgctacttcctaaaaagcaacaaaaaagtttttgtgaatgctgcaagattgttgcattgtgtatactgagataatctgaggcatggagagcagattcagggtgtgtgtgtgtgtgtgtgtgtgtgtgtgtatgtgcgtgtgcgtgcacatgtgtgcctgcgtgttggtataggactttaaagctccttttggcatagggaagtcacgaaggattgcttgacatcaggagacttgggggggattgtagcagacgtctgggcttttccccacccagagaatagcccccttcgatacacatcagctggattttcaaaagcttcaaagtcttggtctgtgagtcactcttcagtttgggagctgggtctgtggctttgatcagaaggtactttcaaaagagggctttccagggctcagctcccaaccagctgttaggaccccacccttttgcctttattgtcgacgtgactcaccagacgtcggggagagagagcagtcagaccgagctttctgctaacatggggaggtagcaggcactggcatagcacggtagtggtttggggaggtttccgcaggtctgctccccacccctgcctcggaagaataaagagaatgtagttccctactcaggctttcgtagtgattagcttactaaggaactgaaaatgggccccttgtacaagctgagctgccccggagggagggaggagttccctgggcttctggcacctgtttctaggcctaaccattagtacttactgtgcagggaaccaaaccaaggtctgagaaatgcggacaccccgagcgagcaccccaaagtgcacaaagctgagtaaaaagctgcccccttcaaacagaactagactcagttttcaattccatcctaaaactccttttaaccaagcttagcttctcaaaggcctaaccaagccttggcaccgccagatcctttctgtaggctaattcctcttgcccaacggcatatggagtgtccttattgctaaaaaggattccgtctccttcaaagaagttttatttttggtccagagtacttgttttcccgatgtgtccagccagctccgcagcagcttttcaaaatgcactatgcctgattgctgatcgtgttttaactttttcttttcctgtttttattttggtattaagtcgttgcctttatttgtaaagctgttataaatatatattatataaatatattaaaaaggaaaatgtttcagatgtttatttgtataattacttgattcacacagtgagaaaaaatgaatgtattcctgtttttgaagagaagaataattttttttttctctagggagaggtacagtgtttatattttggagccttcctgaaggtgtaaaattgtaaatatttttatctatgagtaaatgttaagtagttgttttaaaatacttaataaaataattcttttcctgtggaa

SEQ ID NO: 319744 - DNA, 1408 bp, Homo sapiens
tgtttccctttgtctgttttaagtctgtaggtcatgcttttaaaaagatagacagatacactcatagtgtgtgtgtgtgtgtgtgtgtatgtgcgtgtgcgtgcacatgtgtgcctgcgtgttggtataggactttaaagctccttttggcatagggaagtcacgaaggattgcttgacatcaggagacttgggggggattgtagcagacgtctgggcttttccccacccagagaatagcccccttcgatacacatcagctggattttcaaaagcttcaaagtcttggtctgtgagtcactcttcagtttgggagctgggtctgtggctttgatcagaaggtactttcaaaagagggctttccagggctcagctcccaaccagctgttaggaccccacccttttgcctttattgtcgacgtgactcaccagacgtcggggagagagagcagtcagaccgagctttctgctaacatggggaggtagcaggcactggcatagcacggtagtggtttggggaggtttccgcaggtctgctccccacccctgcctcggaagaataaagagaatgtagttccctactcaggctttcgtagtgattagcttactaaggaactgaaaatgggccccttgtacaagctgagctgccccggagggagggaggagttccctgggcttctggcacctgtttctaggcctaaccattagtacttactgtgcagggaaccaaaccaaggtctgagaaatgcggacaccccgagcgagcaccccaaagtgcacaaagctgagtaaaaagctgcccccttcaaacagaactagactcagttttcaattccatcctaaaactccttttaaccaagcttagcttctcaaaggcctaaccaagccttggcaccgccagatcctttctgtaggctaattcctcttgcccaacggcatatggagtgtccttattgctaaaaaggattccgtctccttcaaagaagttttatttttggtccagagtacttgttttcccgatgtgtccagccagctccgcagcagcttttcaaaatgcactatgcctgattgctgatcgtgttttaactttttcttttcctgtttttattttggtattaagtcgttgcctttatttgtaaagctgttataaatatatattatataaatatattaaaaaggaaaatgtttcagatgtttatttgtataattacttgattcacacagtgagaaaaaatgaatgtattcctgtttttgaagagaagaataattttttttttctctagggagaggtacagtgtttatattttggagccttcctgaaggtgtaaaattgtaaatatttttatctatgagtaaatgttaagtagttgttttaaaatacttaataaaataattcttttcctgtggaa

SEQ ID NO: 319745 - DNA, 1447 bp, Homo sapiens
acagtttaacttttccctctgtgcgggtttgcttttcacccttccctgccactggggttgagcccaagaacacttccttgtgagagagagagagagagagcacgagtgtgtgtgtgtgtgtgtgtgtatgtgcgtgtgcgtgcacatgtgtgcctgcgtgttggtataggactttaaagctccttttggcatagggaagtcacgaaggattgcttgacatcaggagacttgggggggattgtagcagacgtctgggcttttccccacccagagaatagcccccttcgatacacatcagctggattttcaaaagcttcaaagtcttggtctgtgagtcactcttcagtttgggagctgggtctgtggctttgatcagaaggtactttcaaaagagggctttccagggctcagctcccaaccagctgttaggaccccacccttttgcctttattgtcgacgtgactcaccagacgtcggggagagagagcagtcagaccgagctttctgctaacatggggaggtagcaggcactggcatagcacggtagtggtttggggaggtttccgcaggtctgctccccacccctgcctcggaagaataaagagaatgtagttccctactcaggctttcgtagtgattagcttactaaggaactgaaaatgggccccttgtacaagctgagctgccccggagggagggaggagttccctgggcttctggcacctgtttctaggcctaaccattagtacttactgtgcagggaaccaaaccaaggtctgagaaatgcggacaccccgagcgagcaccccaaagtgcacaaagctgagtaaaaagctgcccccttcaaacagaactagactcagttttcaattccatcctaaaactccttttaaccaagcttagcttctcaaaggcctaaccaagccttggcaccgccagatcctttctgtaggctaattcctcttgcccaacggcatatggagtgtccttattgctaaaaaggattccgtctccttcaaagaagttttatttttggtccagagtacttgttttcccgatgtgtccagccagctccgcagcagcttttcaaaatgcactatgcctgattgctgatcgtgttttaactttttcttttcctgtttttattttggtattaagtcgttgcctttatttgtaaagctgttataaatatatattatataaatatattaaaaaggaaaatgtttcagatgtttatttgtataattacttgattcacacagtgagaaaaaatgaatgtattcctgtttttgaagagaagaataattttttttttctctagggagaggtacagtgtttatattttggagccttcctgaaggtgtaaaattgtaaatatttttatctatgagtaaatgttaagtagttgttttaaaatacttaataaaataattcttttcctgtggaa

SEQ ID NO: 319746 - DNA, 1559 bp, Homo sapiens
accgcccccccctcacccgctccctcccgcctccccgcccgccccacttctcattcacttggctcgcacggcgcagacagaccgcgcagggagcacacaccgccagtctgtgcgctgagtcggagccagaggccgcggggacaccgggccatgcacgcccccaactgaagctgcatctcaaagccgaagattccagcagcccaggggatttcaaagagctcagactcagaggaacatctgcggagagacccccgaagccctctccagggcagtcctcatccagacgctccgctagtgcagacaggagcgcgcagtggccccggctcgccgcgccatggagcggatccccagcgcgcaaccaccccccgcctgcctgcccaaagcaccgggactggagcacggagacctaccagggatgtaccctgcccacatgtaccaagtgtacaagtcaagacggggaataaagcggagcgaggacagcaaggagacctacaaattgccgcaccggctcatcgagaaaaagagacgtgaccggattaacgagtgcatcgcccagctgaaggatctcctacccgaacatctcaaacttacaactttgggtcacttggaaaaagcagtggttcttgaacttaccttgaagcatgtgaaagcactaacaaacctaattgatcagcagcagcagaaaatcattgccctgcagagtggtttacaagctggtgagctgtcagggagaaatgtcgaaacaggtcaagagatgttctgctcaggtttccagacatgtgcccgggaggtgcttcagtatctggccaagcacgagaacactcgggacctgaagtcttcgcagcttgtcacccacctccaccgggtggtctcggagctgctgcagggtggtacctccaggaagccatcagacccagctcccaaagtgatggacttcaaggaaaaacccagctctccggccaaaggttcggaaggtcctgggaaaaactgcgtgccagtcatccagcggactttcgctcactcgagtggggagcagagcggcagcgacacggacacagacagtggctatggaggagaatcggagaagggcgacttgcgcagtgagcagccgtgcttcaaaagtgaccacggacgcaggttcacgatgggagaaaggatcggcgcaattaagcaagagtccgaagaaccccccacaaaaaagaaccggatgcagctttcggatgatgaaggccatttcactagcagtgacctgatcagctccccgttcctgggcccacacccacaccagcctcctttctgcctgcccttctacctgatcccaccttcagcgactgcctacctgcccatgctggagaagtgctggtatcccacctcagtgccagtgctatacccaggcctcaacgcctctgccgcagccctctctagcttcatgaacccagacaagatctcggctcccttgctcatgccccagagactcccttctcccttgccagctcatccgtccgatactctcttcttgtacatctcgtctcttctaagctaggtgccgagctcgatcc

SEQ ID NO: 319747 - DNA, 2112 bp, Homo sapiens
accgcccccccctcacccgctccctcccgcctccccgcccgccccacttctcattcacttggctcgcacggcgcagacagaccgcgcagggagcacacaccgccagtctgtgcgctgagtcggagccagaggccgcggggacaccgggccatgcacgcccccaactgaagctgcatctcaaagccgaagattccagcagcccaggggatttcaaagagctcagactcagaggaacatctgcggagagacccccgaagccctctccagggcagtcctcatccagacgctccgctagtgcagacaggagcgcgcagtggccccggctcgccgcgccatggagcggatccccagcgcgcaaccaccccccgcctgcctgcccaaagcaccgggactggagcacggagacctaccagggatgtaccctgcccacatgtaccaagtgtacaagtcaagacggggaataaagcggagcgaggacagcaaggagacctacaaattgccgcaccggctcatcgagaaaaagagacgtgaccggattaacgagtgcatcgcccagctgaaggatctcctacccgaacatctcaaacttacaactttgggtcacttggaaaaagcagtggttcttgaacttaccttgaagcatgtgaaagcactaacaaacctaattgatcagcagcagcagaaaatcattgccctgcagagtggtttacaagctggtgagctgtcagggagaaatgtcgaaacaggtcaagagatgttctgctcaggtttccagacatgtgcccgggaggtgcttcagtatctggccaagcacgagaacactcgggacctgaagtcttcgcagcttgtcacccacctccaccgggtggtctcggagctgctgcagggtggtacctccaggaagccatcagacccagctcccaaagtgatggacttcaaggaaaaacccagctctccggccaaaggttcggaaggtcctgggaaaaactgcgtgccagtcatccagcggactttcgctcactcgagtggggagcagagcggcagcgacacggacacagacagtggctatggaggagaatcggagaagggcgacttgcgcagtgagcagccgtgcttcaaaagtgaccacggacgcaggttcacgatgggagaaaggatcggcgcaattaagcaagagtccgaagaaccccccacaaaaaagaaccggatgcagctttcggatgatgaaggccatttcactagcagtgacctgatcagctccccgttcctgggcccacacccacacacacacacgaacagacacagacacacgtcactcactctctctctctctcctctcccaccgcggatgtcaacgtggaaaataagagagacacacacacacacacaagactgatgatgacagcagacgtggcgacgaccaaggagctcggcgcccacgtccgcgcacacgagaagaaccacgacgactcaggggcgcgcgaggacaggccaacaactccgaacagcgcggcaacaacgagcaacgcaccacgcactactgaccaacagcaaacgcagcacacgcaaccacgcggcggcctcatacaaaacctcacagcagactgagaaacacacacagccacccaccagccacccgctcctcaccaacggaacgcgcaacgggggacaacactcactaagactaacagacatactacaccacacccacacaacacacaaacaaaacgatggcgaatgcggacaagcacaccgagcgcagccaactcccacaccacagcagggcacccccaacagcagcagacaaaacgagacaacccgacacgcacaatacgaggagacaacacaaaaagcgagcagcacgcacccaccactacacacgtacacccacaaaccaaaccacaccaacacacaaacgagatagaacggaaacacggaggacatgccacacacactgtaccccacgcacgcggggcggccaacacgagcgcaaaaacacacacacgacgaacaatccgacgaccacacagaaggccagccagcaaacaaccacaggtcgcgaggcgcgacaaccaataaagcgggggcagacaacactggatccacacacag

SEQ ID NO: 319748 - DNA, 1564 bp, Homo sapiens
accgcccccccctcacccgctccctcccgcctccccgcccgccccacttctcattcacttggctcgcacggcgcagacagaccgcgcagggagcacacaccgccagtctgtgcgctgagtcggagccagaggccgcggggacaccgggccatgcacgcccccaactgaagctgcatctcaaagccgaagattccagcagcccaggggatttcaaagagctcagactcagaggaacatctgcggagagacccccgaagccctctccagggcagtcctcatccagacgctccgctagtgcagacaggagcgcgcagtggccccggctcgccgcgccatggagcggatccccagcgcgcaaccaccccccgcctgcctgcccaaagcaccgggactggagcacggagacctaccagggatgtaccctgcccacatgtaccaagtgtacaagtcaagacggggaataaagcggagcgaggacagcaaggagacctacaaattgccgcaccggctcatcgagaaaaagagacgtgaccggattaacgagtgcatcgcccagctgaaggatctcctacccgaacatctcaaacttacaactttgggtcacttggaaaaagcagtggttcttgaacttaccttgaagcatgtgaaagcactaacaaacctaattgatcagcagcagcagaaaatcattgccctgcagagtggtttacaagctggtgagtgctgattctggctatgctctctttaagagtttgagtgcaaatagagagcccgtgggctcaacatctgatgtaataaacattactgcaacaaattgcttatgcacgttcattgggggagatgcagttttatctttcctaaaaggtcagacttttcatttgaaatgcattgtgccacctggcatgaatacgtattagtgaaatgataagatattcctgtggcattttagcttgagagtctctgggttctgggagatttccctactcccttttaaaatgccaaggcacctataatttgcattgtgggtgttttacagttggtcttcttagccctctttcattggagaagaaatcatgggtatgccccagcgttttcctgtttctttgcttccttgtcacttggtgtgtggtgtgatcctggcaggatacagcaggagtttttcctgcatttcatgtggttccctgaatagccactaggtatcttggtgaattgcacaatctagcgaaaccactgaagtttcatcattcgtttctactgacttccagataatcggagtcaaccttctaaccttctagtctcacttcttccaaataatactgtacagactggggagaattattctacccactccctcatttcatgcttgtctgccttcctctcgaaggctcgtatgatgaaaattgcaaaaacccagctagtgcttctgcctgtttcctcattcaaaataggaagatggtcatacctaatgtcttgaggatcatggatagaatatgtggagaagacatagaaatagcctaattaaaggtcacagcatgactgcaacttttacaaatcattgaaaata

SEQ ID NO: 319749 - DNA, 1833 bp, Homo sapiens
accgcccccccctcacccgctccctcccgcctccccgcccgccccacttctcattcacttggctcgcacggcgcagacagaccgcgcagggagcacacaccgccagtctgtgcgctgagtcggagccagaggccgcggggacaccgggccatgcacgcccccaactgaagctgcatctcaaagccgaagattccagcagcccaggggatttcaaagagctcagactcagaggaacatctgcggagagacccccgaagccctctccagggcagtcctcatccagacgctccgctagtgcagacaggagcgcgcagtggccccggctcgccgcgccatggagcggatccccagcgcgcaaccaccccccgcctgcctgcccaaagcaccgggactggagcacggagacctaccagggatgtaccctgcccacatgtaccaagtgtacaagtcaagacggggaataaagcggagcgaggacagcaaggtaagcaagtgcacccctagggaccctgcgctcagcccctcgcgcgcgctgagtttccaagaaaagttttctcgctttgaggttggcgaggggatgcagggtgtgggctcggtgcctcttctgagtgacttggaaaagaaagggcagacgatggttctgggtgctactctgctactctgctcctctgccggactgttgctgcggggctgggaggataggcttctcatctccttccccaagcgcccaccgcctccccgtgcgtcttgcaggagacctacaaattgccgcaccggctcatcgagaaaaagagacgtgaccggattaacgagtgcatcgcccagctgaaggatctcctacccgaacatctcaaacttacaactttgggtcacttggaaaaagcagtggttcttgaacttaccttgaagcatgtgaaagcactaacaaacctaattgatcagcagcagcagaaaatcattgccctgcagagtggtttacaagctggtgagtgctgattctggctatgctctctttaagagtttgagtgcaaatagagagcccgtgggctcaacatctgatgtaataaacattactgcaacaaattgcttatgcacgttcattgggggagatgcagttttatctttcctaaaaggtcagacttttcatttgaaatgcattgtgccacctggcatgaatacgtattagtgaaatgataagatattcctgtggcattttagcttgagagtctctgggttctgggagatttccctactcccttttaaaatgccaaggcacctataatttgcattgtgggtgttttacagttggtcttcttagccctctttcattggagaagaaatcatgggtatgccccagcgttttcctgtttctttgcttccttgtcacttggtgtgtggtgtgatcctggcaggatacagcaggagtttttcctgcatttcatgtggttccctgaatagccactaggtatcttggtgaattgcacaatctagcgaaaccactgaagtttcatcattcgtttctactgacttccagataatcggagtcaaccttctaaccttctagtctcacttcttccaaataatactgtacagactggggagaattattctacccactccctcatttcatgcttgtctgccttcctctcgaaggctcgtatgatgaaaattgcaaaaacccagctagtgcttctgcctgtttcctcattcaaaataggaagatggtcatacctaatgtcttgaggatcatggatagaatatgtggagaagacatagaaatagcctaattaaaggtcacagcatgactgcaacttttacaaatcattgaaaata

SEQ ID NO: 319750 - DNA, 392 bp, Homo sapiens
  misc_feature (33)..(33): n is a, c, g, or t
  misc_feature (42)..(42): n is a, c, g, or t
aagtaaagtgaaatacaaagtaccatagagagnaaaaaatanccctggaattcagggagcatcatgtacccttctgttgagaggcatgaaaattagaaaaggatcgttgcctttatttgtaaagctgttataaatatatattatataaatatattaaaaaggaaaatgtttcagatgtttatttgtataattacttgattcacacagtgagaaaaaatgaatgtattcctgtttttgaagagaagaataattttttttttctctagggagaggtacagtgtttatattttggagccttcctgaaggtgtaaaattgtaaatatttttatctatgagtaaatgttaagtagttgttttaaaatacttaataaaataattcttttcctgtggaa

SEQ ID NO: 319751 - DNA, 3060 bp, Homo sapiens
accgcccccccctcacccgctccctcccgcctccccgcccgccccacttctcattcacttggctcgcacggcgcagacagaccgcgcagggagcacacaccgccagtctgtgcgctgagtcggagccagaggccgcggggacaccgggccatgcacgcccccaactgaagctgcatctcaaagccgaagattccagcagcccaggggatttcaaagagctcagactcagaggaacatctgcggagagacccccgaagccctctccagggcagtcctcatccagacgctccgctagtgcagacaggagcgcgcagtggccccggctcgccgcgccatggagcggatccccagcgcgcaaccaccccccgcctgcctgcccaaagcaccgggactggagcacggagacctaccagggatgtaccctgcccacatgtaccaagtgtacaagtcaagacggggaataaagcggagcgaggacagcaaggagacctacaaattgccgcaccggctcatcgagaaaaagagacgtgaccggattaacgagtgcatcgcccagctgaaggatctcctacccgaacatctcaaacttacaactttgggtcacttggaaaaagcagtggttcttgaacttaccttgaagcatgtgaaagcactaacaaacctaattgatcagcagcagcagaaaatcattgccctgcagagtggtttacaagctggtgagctgtcagggagaaatgtcgaaacaggtcaagagatgttctgctcaggtttccagacatgtgcccgggaggtgcttcagtatctggccaagcacgagaacactcgggacctgaagtcttcgcagcttgtcacccacctccaccgggtggtctcggagctgctgcagggtggtacctccaggaagccatcagacccagctcccaaagtgatggacttcaaggaaaaacccagctctccggccaaaggttcggaaggtcctgggaaaaactgcgtgccagtcatccagcggactttcgctcactcgagtggggagcagagcggcagcgacacggacacagacagtggctatggaggagaatcggagaagggcgacttgcgcagtgagcagccgtgcttcaaaagtgaccacggacgcaggttcacgatgggagaaaggatcggcgcaattaagcaagagtccgaagaaccccccacaaaaaagaaccggatgcagctttcggatgatgaaggccatttcactagcagtgacctgatcagctccccgttcctgggcccacacccacaccagcctcctttctgcctgcccttctacctgatcccaccttcagcgactgcctacctgcccatgctggagaagtgctggtatcccacctcagtgccagtgctatacccaggcctcaacgcctctgccgcagccctctctagcttcatgaacccagacaagatctcggctcccttgctcatgccccagagactcccttctcccttgccagctcatccgtccgtcgactcttctgtcttgctccaagctctgaagccaatcccccctttaaacttagaaaccaaagactaaactctctaggggatcctgctgctttgctttccttcctcgctacttcctaaaaagcaacaaaaaagtttttgtgaatgctgcaagattgttgcattgtgtatactgagataatctgaggcatggagagcagattcagggtgtgtgtgtgtgtgtgtgtgtgtgtgtgtatgtgcgtgtgcgtgcacatgtgtgcctgcgtgttggtataggactttaaagctccttttggcatagggaagtcacgaaggattgcttgacatcaggagacttgggggggattgtagcagacgtctgggcttttccccacccagagaatagcccccttcgatacacatcagctggattttcaaaagcttcaaagtcttggtctgtgagtcactcttcagtttgggagctgggtctgtggctttgatcagaaggtactttcaaaagagggctttccagggctcagctcccaaccagctgttaggaccccacccttttgcctttattgtcgacgtgactcaccagacgtcggggagagagagcagtcagaccgagctttctgctaacatggggaggtagcaggcactggcatagcacggtagtggtttggggaggtttccgcaggtctgctccccacccctgcctcggaagaataaagagaatgtagttccctactcaggctttcgtagtgattagcttactaaggaactgaaaatgggccccttgtacaagctgagctgccccggagggagggaggagttccctgggcttctggcacctgtttctaggcctaaccattagtacttactgtgcagggaaccaaaccaaggtctgagaaatgcggacaccccgagcgagcaccccaaagtgcacaaagctgagtaaaaagctgcccccttcaaacagaactagactcagttttcaattccatcctaaaactccttttaaccaagcttagcttctcaaaggcctaaccaagccttggcaccgccagatcctttctgtaggctaattcctcttgcccaacggcatatggagtgtccttattgctaaaaaggattccgtctccttcaaagaagttttatttttggtccagagtacttgttttcccgatgtgtccagccagctccgcagcagcttttcaaaatgcactatgcctgattgctgatcgtgttttaactttttcttttcctgtttttattttggtattaagtcgttgcctttatttgtaaagctgttataaatatatattatataaatatattaaaaaggaaaatgtttcagatgtttatttgtataattacttgattcacacagtgagaaaaaatgaatgtattcctgtttttgaagagaagaataattttttttttctctagggagaggtacagtgtttatattttggagccttcctgaaggtgtaaaattgtaaatatttttatctatgagtaaatgttaagtagttgttttaaaatacttaataaaataattcttttcctgtggaa

SEQ ID NO: 319752 - DNA, 695 bp, Homo sapiens
accgcccccccctcacccgctccctcccgcctccccgcccgccccacttctcattcacttggctcgcacggcgcagacagaccgcgcagggagcacacaccgccagtctgtgcgctgagtcggagccagaggccgcggggacaccgggccatgcacgcccccaactgaagctgcatctcaaagccgaagattccagcagcccaggggatttcaaagagctcagactcagaggaacatctgcggagagacccccgaagccctctccagggcagtcctcatccagacgctccgctagtgcagacaggagcgcgcagtggccccggctcgccgcgccatggagcggatccccagcgcgcaaccacccccccagtcctggcgttttctggctgactcatgcaaatgaggcgagaaccacttggacctctccaagttggctccaacaccaactggccttccttttcaggagtttaacttctggtgattttcaggattccctagtttttctcacttaaaggaacacgccaagaaacacacacattttatttaccccttcccctctaccactccccccaccttttttgttgttgttgtcaaataaggggacttgctttggtgtgtgatttttacggcctgtcctttcttgacagtagccctcggctacttcgcagcctttggttggggaaatggaaaaaaaa

SEQ ID NO: 319753 - DNA, 3277 bp, Homo sapiens
  misc_feature (3277)..(3277): n is a, c, g, or t
accgcccccccctcacccgctccctcccgcctccccgcccgccccacttctcattcacttggctcgcacggcgcagacagaccgcgcagggagcacacaccgccagtctgtgcgctgagtcggagccagaggccgcggggacaccgggccatgcacgcccccaactgaagctgcatctcaaagccgaagattccagcagcccaggggatttcaaagagctcagactcagaggaacatctgcggagagacccccgaagccctctccagggcagtcctcatccagacgctccgctagtgcagacaggagcgcgcagtggccccggctcgccgcgccatggagcggatccccagcgcgcaaccaccccccgcctgcctgcccaaagcaccgggactggagcacggagacctaccagggatgtaccctgcccacatgtaccaagtgtacaagtcaagacggggaataaagcggagcgaggacagcaaggagacctacaaattgccgcaccggctcatcgagaaaaagagacgtgaccggattaacgagtgcatcgcccagctgaaggatctcctacccgaacatctcaaacttacaactttgggtcacttggaaaaagcagtggttcttgaacttaccttgaagcatgtgaaagcactaacaaacctaattgatcagcagcagcagaaaatcattgccctgcagagtggtttacaagctggtgagctgtcagggagaaatgtcgaaacaggtcaagagatgttctgctcaggtttccagacatgtgcccgggaggtgcttcagtatctggccaagcacgagaacactcgggacctgaagtcttcgcagcttgtcacccacctccaccgggtggtctcggagctgctgcagggtggtacctccaggaagccatcagacccagctcccaaagtgatggacttcaaggaaaaacccagctctccggccaaaggttcggaaggtcctgggaaaaactgcgtgccagtcatccagcggactttcgctcactcgagtggggagcagagcggcagcgacacggacacagacagtggctatggaggagaatcggagaagggcgacttgcgcagtgagcagccgtgcttcaaaagtgaccacggacgcaggttcacgatgggagaaaggatcggcgcaattaagcaagagtccgaagaaccccccacaaaaaagaaccggatgcagctttcggatgatgaaggccatttcactagcagtgacctgatcagctccccgttcctgggcccacacccacaccagcctcctttctgcctgcccttctacctgatcccaccttcagcgactgcctacctgcccatgctggagaagtgctggtatcccacctcagtgccagtgctatacccaggcctcaacgcctctgccgcagccctctctagcttcatgaacccagacaagatctcggctcccttgctcatgccccagagactcccttctcccttgccagctcatccgtccgtcgactcttctgtcttgctccaagctctgaagccaatcccccctttaaacttagaaaccaaagactaaactctctaggggatcctgctgctttgctttccttcctcgctacttcctaaaaagcaacaaaaaagtttttgtgaatgctgcaagattgttgcattgtgtatactgagataatctgaggcatggagagcagattcagggtgtgtgtgtgtgtgtgtgtgtgtgtgtgtatgtgcgtgtgcgtgcacatgtgtgcctgcgtgttggtataggactttaaagctccttttggcatagggaagtcacgaaggattgcttgacatcaggagacttgggggggattgtagcagacgtctgggcttttccccacccagagaatagcccccttcgatacacatcagctggattttcaaaagcttcaaagtcttggtctgtgagtcactcttcagtttgggagctgggtctgtggctttgatcagaaggtactttcaaaagagggctttccagggctcagctcccaaccagctgttaggaccccacccttttgcctttattgtcgacgtgactcaccagacgtcggggagagagagcagtcagaccgagctttctgctaacatggggaggtagcaggcactggcatagcacggtagtggtttggggaggtttccgcaggtctgctccccacccctgcctcggaagaataaagagaatgtagttccctactcaggctttcgtagtgattagcttactaaggaactgaaaatgggccccttgtacaagctgagctgccccggagggagggaggagttccctgggcttctggcacctgtttctaggcctaaccattagtacttactgtgcagggaaccaaaccaaggtctgagaaatgcggacaccccgagcgagcaccccaaagtgcacaaagctgagtaaaaagctgcccccttcaaacagaactagactcagttttcaattccatcctaaaactccttttaaccaagcttagcttctcaaaggcctaaccaagccttggcaccgccagatcctttctgtaggctaattcctcttgcccaacggcatatggagtgtccttattgctaaaaaggattccgtctccttcaaagaagttttatttttggtccagagtacttgttttcccgatgtgtccagccagctccgcagcagcttttcaaaatgcactatgcctgattgctgatcgtgttttaactttttcttttcctgtttttattttggtattaagtcgttgcctttatttgtaaagctgttataaatatatattatataaatatattaaaaaggaaaatgtttcagatgtttatttgtataattacttgattcacacagtgagaaaaaatgaatgtattcctgtttttgaagagaagaataattttttttttctctagggagaggtacagtgtttatattttggagccttcctgaaggtgtaaaattgtaaatatttttatctatgagtaaatgttaagtagttgttttaaaatacttaataaaataattcttttcctgtggaaaaaaaaaaaaaagggggccaaaaaaaccacaagggccaacttatcgatccatttgtgcaaggccacagaggcgacaaaaaaggcaggcgcggtaacacgcgcggaacgactggactgtgacgacacttgggcaaggaaccacaaagacggaaaaacgatggacacacgcgagtgtatatatataaacgcagacaaaaaaacacgacagacgaaatan

SEQ ID NO: 319754 - DNA, 3304 bp, Homo sapiens
accgcccccccctcacccgctccctcccgcctccccgcccgccccacttctcattcacttggctcgcacggcgcagacagaccgcgcagggagcacacaccgccagtctgtgcgctgagtcggagccagaggccgcggggacaccgggccatgcacgcccccaactgaagctgcatctcaaagccgaagattccagcagcccaggggatttcaaagagctcagactcagaggaacatctgcggagagacccccgaagccctctccagggcagtcctcatccagacgctccgctagtgcagacaggagcgcgcagtggccccggctcgccgcgccatggagcggatccccagcgcgcaaccaccccccgcctgcctgcccaaagcaccgggactggagcacggagacctaccagggatgtaccctgcccacatgtaccaagtgtacaagtcaagacggggaataaagcggagcgaggacagcaaggagacctacaaattgccgcaccggctcatcgagaaaaagagacgtgaccggattaacgagtgcatcgcccagctgaaggatctcctacccgaacatctcaaacttacaactttgggtcacttggaaaaagcagtggttcttgaacttaccttgaagcatgtgaaagcactaacaaacctaattgatcagcagcagcagaaaatcattgccctgcagagtggtttacaagctggtgagctgtcagggagaaatgtcgaaacaggtcaagagatgttctgctcaggtttccagacatgtgcccgggaggtgcttcagtatctggccaagcacgagaacactcgggacctgaagtcttcgcagcttgtcacccacctccaccgggtggtctcggagctgctgcagggtggtacctccaggaagccatcagacccagctcccaaagtgatggacttcaaggaaaaacccagctctccggccaaaggttcggaaggtcctgggaaaaactgcgtgccagtcatccagcggactttcgctcactcgagtggggagcagagcggcagcgacacggacacagacagtggctatggaggagaatcggagaagggcgacttgcgcagtgagcagccgtgcttcaaaagtgaccacggacgcaggttcacgatgggagaaaggatcggcgcaattaagcaagagtccgaagaaccccccacaaaaaagaaccggatgcagctttcggatgatgaaggccatttcactagcagtgacctgatcagctccccgttcctgggcccacacccacaccagcctcctttctgcctgcccttctacctgatcccaccttcagcgactgcctacctgcccatgctggagaagtgctggtatcccacctcagtgccagtgctatacccaggcctcaacgcctctgccgcagccctctctagcttcatgaacccagacaagatctcggctcccttgctcatgccccagagactcccttctcccttgccagctcatccgtccgtcgactcttctgtcttgctccaagctctgaagccaatcccccctttaaacttagaaaccaaagactaaactctctaggggatcctgctgctttgctttccttcctcgctacttcctaaaaagcaacaaaaaagtttttgtgaatgctgcaagattgttgcattgtgtatactgagataatctgaggcatggagagcagattcagggtgtgtgtgtgtgtgtgtgtgtgtgtgtgtatgtgcgtgtgcgtgcacatgtgtgcctgcgtgttggtataggactttaaagctccttttggcatagggaagtcacgaaggattgcttgacatcaggagacttgggggggattgtagcagacgtctgggcttttccccacccagagaatagcccccttcgatacacatcagctggattttcaaaagcttcaaagtcttggtctgtgagtcactcttcagtttgggagctgggtctgtggctttgatcagaaggtactttcaaaagagggctttccagggctcagctcccaaccagctgttaggaccccacccttttgcctttattgtcgacgtgactcaccagacgtcggggagagagagcagtcagaccgagctttctgctaacatggggaggtagcaggcactggcatagcacggtagtggtttggggaggtttccgcaggtctgctccccacccctgcctcggaagaataaagagaatgtagttccctactcaggctttcgtagtgattagcttactaaggaactgaaaatgggccccttgtacaagctgagctgccccggagggagggaggagttccctgggcttctggcacctgtttctaggcctaaccattagtacttactgtgcagggaaccaaaccaaggtctgagaaatgcggacaccccgagcgagcaccccaaagtgcacaaagctgagtaaaaagctgcccccttcaaacagaactagactcagttttcaattccatcctaaaactccttttaaccaagcttagcttctcaaaggcctaaccaagccttggcaccgccagatcctttctgtaggctaattcctcttgcccaacggcatatggagtgtccttattgctaaaaaggattccgtctccttcaaagaagttttatttttggtccagagtacttgttttcccgatgtgtccagccagctccgcagcagcttttcaaaatgcactatgcctgattgctgatcgtgttttaactttttcttttcctgtttttattttggtattaagtcgttgcctttatttgtaaagctgttataaatatatattatataaatatattaaaaaggaaaatgtttcagatgtttatttgtataattacttgattcacacagtgagaaaaaatgaatgtattcctgtttttgaagagaagaataattttttttttctctagggagaggtacagtgtttatattttggagccttcctgaaggtgtaaaattgtaaatatttttatctatgagtaaatgttaagtagttgttttaaaatacttaataaaataattcttttcctgtggaaaaaaaaaatattatattattaataataattttatttatattataattataaactctaaaatattttattatcttcttcattcctttcataaatgaattgcccgtgtttttacacctacttctcggtaccctggggttccccaatttaattcctttgatacaattccctctttccacattgggtttttcttatagtgcccttccttattgcctttccagttggccatcctttatggctaatggct

SEQ ID NO: 319755 - DNA, 3003 bp, Homo sapiens
accgcccccccctcacccgctccctcccgcctccccgcccgccccacttctcattcacttggctcgcacggcgcagacagaccgcgcagggagcacacaccgccagtctgtgcgctgagtcggagccagaggccgcggggacaccgggccatgcacgcccccaactgaagctgcatctcaaagccgaagattccagcagcccaggggatttcaaagagctcagactcagaggaacatctgcggagagacccccgaagccctctccagggcagtcctcatccagacgctccgctagtgcagacaggagcgcgcagtggccccggctcgccgcgccatggagcggatccccagcgcgcaaccaccccccgcctgcctgcccaaagcaccgggactggagcacggagacctaccagggatgtaccctgcccacatgtaccaagtgtacaagtcaagacggggaataaagcggagcgaggacagcaaggagacctacaaattgccgcaccggctcatcgagaaaaagagacgtgaccggattaacgagtgcatcgcccagctgaaggatctcctacccgaacatctcaaacttacaactttgggtcacttggaaaaagcagtggttcttgaacttaccttgaagcatgtgaaagcactaacaaacctaattgatcagcagcagcagaaaatcattgccctgcagagtggtttacaagctggtgagctgtcagggagaaatgtcgaaacaggtcaagagatgttctgctcaggtttccagacatgtgcccgggaggtgcttcagtatctggccaagcacgagaacactcgggacctgaagtcttcgcagcttgtcacccacctccaccgggtggtctcggagctgctgcagggtggtacctccaggaagccatcagacccagctcccaaagtgatggacttcaaggaaaaacccagctctccggccaaaggttcggaaggtcctgggaaaaactgcgtgccagtcatccagcggactttcgctcactcgagtggggagcagagcggcagcgacacggacacagacagtggctatggaggagaatcggagaagggcgacttgcgcagtgagcagccgtgcttcaaaagtgaccacggacgcaggttcacgatgggagaaaggatcggcgcaattaagcaagagtccgaagaaccccccacaaaaaagaaccggatgcagctttcggatgatgaaggccatttcactagcagtgacctgatcagctccccgttcctgggcccacacccacaccagcctcctttctgcctgcccttctacctgatcccaccttcagcgactgcctacctgcccatgctggagaagtgctggtatcccacctcagtgccagtgctatacccaggcctcaacgcctctgccgcagccctctctagcttcatgaacccagacaagatctcggctcccttgctcatgccccagagactcccttctcccttgccagctcatccgtccgtcgactcttctgtcttgctccaagctctgaagccaatcccccctttaaacttagaaaccaaagactaaactctctaggggatcctgctgctttgctttccttcctcgctacttcctaaaaagcaacaaaaaagtttttgtgaatgctgcaagattgttgcattgtgtatactgagataatctgaggcatggagagcagattcagggtgtgtgtgtgtgtgtgtgtgtgtgtgtgtatgtgcgtgtgcgtgcacatgtgtgcctgcgtgttggtataggactttaaagctccttttggcatagggaagtcacgaaggattgcttgacatcaggagacttgggggggattgtagcagacgtctgggcttttccccacccagagaatagcccccttcgatacacatcactgggtctgtggctttgatcagaaggtactttcaaaagagggctttccagggctcagctcccaaccagctgttaggaccccacccttttgcctttattgtcgacgtgactcaccagacgtcggggagagagagcagtcagaccgagctttctgctaacatggggaggtagcaggcactggcatagcacggtagtggtttggggaggtttccgcaggtctgctccccacccctgcctcggaagaataaagagaatgtagttccctactcaggctttcgtagtgattagcttactaaggaactgaaaatgggccccttgtacaagctgagctgccccggagggagggaggagttccctgggcttctggcacctgtttctaggcctaaccattagtacttactgtgcagggaaccaaaccaaggtctgagaaatgcggacaccccgagcgagcaccccaaagtgcacaaagctgagtaaaaagctgcccccttcaaacagaactagactcagttttcaattccatcctaaaactccttttaaccaagcttagcttctcaaaggcctaaccaagccttggcaccgccagatcctttctgtaggctaattcctcttgcccaacggcatatggagtgtccttattgctaaaaaggattccgtctccttcaaagaagttttatttttggtccagagtacttgttttcccgatgtgtccagccagctccgcagcagcttttcaaaatgcactatgcctgattgctgatcgtgttttaactttttcttttcctgtttttattttggtattaagtcgttgcctttatttgtaaagctgttataaatatatattatataaatatattaaaaaggaaaatgtttcagatgtttatttgtataattacttgattcacacagtgagaaaaaatgaatgtattcctgtttttgaagagaagaataattttttttttctctagggagaggtacagtgtttatattttggagccttcctgaaggtgtaaaattgtaaatatttttatctatgagtaaatgttaagtagttgttttaaaatacttaataaaataattcttttcctgtggaa

SEQ ID NO: 319756 - DNA, 2933 bp, Homo sapiens
tggaagttctgaaagggtgtaaggaaagaagtagggaaagcctcttggctgccagacgtaatagaggtccctctctgagttgacaccactgcaggaaaatgttatctctggattcccctgagttaaggtcggcagaggctgctggagaaatttatctgtcaaaggattttcctgaggtagttgcagcttccaaaatgcctccaaagacaggtggcacccgtttttttaaattatttaattatatatatatattatatatatatacacacacacacacacacacacacacacatatatgagtgtatctgtctatctttttaaaagcatgacctacagacttaaaacagccaaccaggaaacactattccacttttttttttcttttctcatttctcattgctaataaatgtcccaaaggtgggacttctctgacctcaccgctgactaaggctcttttccttccagactttgggtcacttggaaaaagcagtggttcttgaacttaccttgaagcatgtgaaagcactaacaaacctaattgatcagcagcagcagaaaatcattgccctgcagagtggtttacaagctggtgagctgtcagggagaaatgtcgaaacaggtcaagagatgttctgctcaggtttccagacatgtgcccgggaggtgcttcagtatctggccaagcacgagaacactcgggacctgaagtcttcgcagcttgtcacccacctccaccgggtggtctcggagctgctgcagggtggtacctccaggaagccatcagacccagctcccaaagtgatggacttcaaggaaaaacccagctctccggccaaaggttcggaaggtcctgggaaaaactgcgtgccagtcatccagcggactttcgctcactcgagtggggagcagagcggcagcgacacggacacagacagtggctatggaggagaatcggagaagggcgacttgcgcagtgagcagccgtgcttcaaaagtgaccacggacgcaggttcacgatgggagaaaggatcggcgcaattaagcaagagtccgaagaaccccccacaaaaaagaaccggatgcagctttcggatgatgaaggccatttcactagcagtgacctgatcagctccccgttcctgggcccacacccacaccagcctcctttctgcctgcccttctacctgatcccaccttcagcgactgcctacctgcccatgctggagaagtgctggtatcccacctcagtgccagtgctatacccaggcctcaacgcctctgccgcagccctctctagcttcatgaacccagacaagatctcggctcccttgctcatgccccagagactcccttctcccttgccagctcatccgtccgtcgactcttctgtcttgctccaagctctgaagccaatcccccctttaaacttagaaaccaaagactaaactctctaggggatcctgctgctttgctttccttcctcgctacttcctaaaaagcaacaaaaaagtttttgtgaatgctgcaagattgttgcattgtgtatactgagataatctgaggcatggagagcagattcagggtgtgtgtgtgtgtgtgtgtgtgtgtgtgtatgtgcgtgtgcgtgcacatgtgtgcctgcgtgttggtataggactttaaagctccttttggcatagggaagtcacgaaggattgcttgacatcaggagacttgggggggattgtagcagacgtctgggcttttccccacccagagaatagcccccttcgatacacatcagctggattttcaaaagcttcaaagtcttggtctgtgagtcactcttcagtttgggagctgggtctgtggctttgatcagaaggtactttcaaaagagggctttccagggctcagctcccaaccagctgttaggaccccacccttttgcctttattgtcgacgtgactcaccagacgtcggggagagagagcagtcagaccgagctttctgctaacatggggaggtagcaggcactggcatagcacggtagtggtttggggaggtttccgcaggtctgctccccacccctgcctcggaagaataaagagaatgtagttccctactcaggctttcgtagtgattagcttactaaggaactgaaaatgggccccttgtacaagctgagctgccccggagggagggaggagttccctgggcttctggcacctgtttctaggcctaaccattagtacttactgtgcagggaaccaaaccaaggtctgagaaatgcggacaccccgagcgagcaccccaaagtgcacaaagctgagtaaaaagctgcccccttcaaacagaactagactcagttttcaattccatcctaaaactccttttaaccaagcttagcttctcaaaggcctaaccaagccttggcaccgccagatcctttctgtaggctaattcctcttgcccaacggcatatggagtgtccttattgctaaaaaggattccgtctccttcaaagaagttttatttttggtccagagtacttgttttcccgatgtgtccagccagctccgcagcagcttttcaaaatgcactatgcctgattgctgatcgtgttttaactttttcttttcctgtttttattttggtattaagtcgttgcctttatttgtaaagctgttataaatatatattatataaatatattaaaaaggaaaatgtttcagatgtttatttgtataattacttgattcacacagtgagaaaaaatgaatgtattcctgtttttgaagagaagaataattttttttttctctagggagaggtacagtgtttatattttggagccttcctgaaggtgtaaaattgtaaatatttttatctatgagtaaatgttaagtagttgttttaaaatacttaataaaataattcttttcctgtggaa

SEQ ID NO: 319757 - DNA, 2999 bp, Homo sapiens
accgcccccccctcacccgctccctcccgcctccccgcccgccccacttctcattcacttggctcgcacggcgcagacagaccgcgcagggagcacacaccgccagtctgtgcgctgagtcggagccagaggccgcggggacaccgggccatgcacgcccccaactgaagctgcatctcaaagccgaagattccagcagcccaggggatttcaaagagctcagactcagaggaacatctgcggagagacccccgaagccctctccagggcagtcctcatccagacgctccgctagtgcagacaggagcgcgcagtggccccggctcgccgcgccatggagcggatccccagcgcgcaaccaccccccgcctgcctgcccaaagcaccgggactggagcacggagacctaccagggatgtaccctgcccacatgtaccaagtgtacaagtcaagacggggaataaagcggagcgaggacagcaaggagacctacaaattgccgcaccggctcatcgagaaaaagagacgtgaccggattaacgagtgcatcgcccagctgaaggatctcctacccgaacatctcaaacttacaactttgggtcacttggaaaaagcagtggttcttgaacttaccttgaagcatgtgaaagcactaacaaacctaattgatcagcagcagcagaaaatcattgccctgcagagtggtttacaagctggtgagctgtcagggagaaatgtcgaaacaggtcaagagatgttctgctcaggtttccagacatgtgcccgggaggtgcttcagtatctggccaagcacgagaacactcgggacctgaagtcttcgcagcttgtcacccacctccaccgggtggtctcggagctgctgcagggtggtacctccaggaagccatcagacccagctcccaaagtgatggacttcaaggaaaaacccagctctccggccaaaggttcggaaggtcctgggaaaaactgcgtgccagtcatccagcggactttcgctcactcgagtggggagcagagcggcagcgacacggacacagacagtggctatggaggagaatcggagaagggcgacttgcgcagtgagcagccgtgcttcaaaagtgaccacggacgcaggttcacgatgggagaaaggatcggcgcaattaagcaagagtccgaagaaccccccacaaaaaagaaccggatgcagctttcggatgatgaaggccatttcactagcagtgacctgatcagctccccgttcctgggcccacacccacaccagcctcctttctgcctgcccttctacctgatcccaccttcagcgactgcctacctgcccatgctggagaagtgctggtatcccacctcagtgccagtgctatacccaggcctcaacgcctctgccgcagccctctctagcttcatgaacccagacaagatctcggctcccttgctcatgccccagagactcccttctcccttgccagctcatccgtccgtcgactcttctgtcttgctccaagctctgaagccaatcccccctttaaacttagaaaccaaagactaaactctctaggggatcctgctgctttgctttccttcctcgctacttcctaaaaagaggcatggagagcagattcagggtgtgtgtgtgtgtgtgtgtgtgtgtgtgtatgtgcgtgtgcgtgcacatgtgtgcctgcgtgttggtataggactttaaagctccttttggcatagggaagtcacgaaggattgcttgacatcaggagacttgggggggattgtagcagacgtctgggcttttccccacccagagaatagcccccttcgatacacatcagctggattttcaaaagcttcaaagtcttggtctgtgagtcactcttcagtttgggagctgggtctgtggctttgatcagaaggtactttcaaaagagggctttccagggctcagctcccaaccagctgttaggaccccacccttttgcctttattgtcgacgtgactcaccagacgtcggggagagagagcagtcagaccgagctttctgctaacatggggaggtagcaggcactggcatagcacggtagtggtttggggaggtttccgcaggtctgctccccacccctgcctcggaagaataaagagaatgtagttccctactcaggctttcgtagtgattagcttactaaggaactgaaaatgggccccttgtacaagctgagctgccccggagggagggaggagttccctgggcttctggcacctgtttctaggcctaaccattagtacttactgtgcagggaaccaaaccaaggtctgagaaatgcggacaccccgagcgagcaccccaaagtgcacaaagctgagtaaaaagctgcccccttcaaacagaactagactcagttttcaattccatcctaaaactccttttaaccaagcttagcttctcaaaggcctaaccaagccttggcaccgccagatcctttctgtaggctaattcctcttgcccaacggcatatggagtgtccttattgctaaaaaggattccgtctccttcaaagaagttttatttttggtccagagtacttgttttcccgatgtgtccagccagctccgcagcagcttttcaaaatgcactatgcctgattgctgatcgtgttttaactttttcttttcctgtttttattttggtattaagtcgttgcctttatttgtaaagctgttataaatatatattatataaatatattaaaaaggaaaatgtttcagatgtttatttgtataattacttgattcacacagtgagaaaaaatgaatgtattcctgtttttgaagagaagaataattttttttttctctagggagaggtacagtgtttatattttggagccttcctgaaggtgtaaaattgtaaatatttttatctatgagtaaatgttaagtagttgttttaaaatacttaataaaataattcttttcctgtggaa

SEQ ID NO: 319758 - DNA, 1803 bp, Homo sapiens
accgcccccccctcacccgctccctcccgcctccccgcccgccccacttctcattcacttggctcgcacggcgcagacagaccgcgcagggagcacacaccgccagtctgtgcgctgagtcggagccagaggccgcggggacaccgggccatgcacgcccccaactgaagctgcatctcaaagccgaagattccagcagcccaggggatttcaaagagctcagactcagaggaacatctgcggagagacccccgaagccctctccagggcagtcctcatccagacgctccgctagtgcagacaggagcgcgcagtggccccggctcgccgcgccatggagcggatccccagcgcgcaaccaccccccgcctgcctgcccaaagcaccgggactggagcacggagacctaccagggatgtaccctgcccacatgtaccaagtgtacaagtcaagacggggaataaagcggagcgaggacagcaaggagacctacaaattgccgcaccggctcatcgagaaaaagagacgtgaccggattaacgagtgcatcgcccagctgaaggatctcctacccgaacatctcaaacttacaactttgggtcacttggaaaaagcagtggttcttgaacttaccttgaagcatgtgaaagcactaacaaacctaattgatcagcagcagcagaaaatcattgccctgcagagtggtttacaagctggtgagctgtcagggagaaatgtcgaaacaggtcaagagatgttctgctcaggtttccagacatgtgcccgggaggtgcttcagtatctggccaagcacgagaacactcgggacctgaagtcttcgcagcttgtcacccacctccaccgggtggtctcggagctgctgcagggtggtacctccaggaagccatcagacccagctcccaaagtgatggacttcaaggaaaaacccagctctccggccaaaggttcggaaggtcctgggaaaaactgcgtgccagtcatccagcggactttcgctcactcgagtggggagcagagcggcagcgacacggacacagacagtggctatggaggagaatcggagaagggcgacttgcgcagtgagcagccgtgcttcaaaagtgaccacggacgcaggttcacgatgggagaaaggatcggcgcaattaagcaagagtccgaagaaccccccacaaaaaagaaccggatgcagctttcggatgatgaaggccatttcactagcagtgacctgatcagctccccgttcctgggcccacacccacaccagcctcctttctgcctgcccttctacctgatcccaccttcagcgactgcctacctgcccatgctggagaagtgctggtatcccacctcagtgccagtgctatacccaggcctcaacgcctctgccgcagccctctctagcttcatgaacccagacaagatctcggctcccttgctcatgccccagagactcccttctcccttgccagctcatccgtccgtcgactcttctgtcttgctccaagctctgaagccaatcccccctttaaacttagaaaccaaagactaaactctctaggggatcctgctgctttgctttccttcctcgctacttcctaaaaagcaacaaaaaagtttttgtgaatgctgcaagattgttgcattgtgtatactgagataatctgaggcatggagagcagattcagggtgtgtgtggtcctcagcgtgtgcagtatggggacttcggcgtgtgcagggctaccgagtgctcgaatttcgtaagtcgatggatcattagct

SEQ ID NO: 319759 - DNA, 1048 bp, Homo sapiens
accgcccccccctcacccgctccctcccgcctccccgcccgccccacttctcattcacttggctcgcacggcgcagacagaccgcgcagggagcacacaccgccagtctgtgcgctgagtcggagccagaggccgcggggacaccgggccatgcacgcccccaactgaagctgcatctcaaagccgaagattccagcagcccaggggatttcaaagagctcagactcagaggaacatctgcggagagacccccgaagccctctccagggcagtcctcatccagacgctccgctagtgcagacaggagcgcgcagtggccccggctcgccgcgccatggagcggatccccagcgcgcaaccaccccccgcctgcctgcccaaagcaccgggactggagcacggagacctaccagggatgtaccctgcccacatgtaccaagtgtacaagtcaagacggggaataaagcggagcgaggacagcaaggagacctacaaattgccgcaccggctcatcgagaaaaagagacgtgaccggattaacgagtgcatcgcccagctgaaggatctcctacccgaacatctcaaacttacaactttgggtcacttggaaaaagcagtggttcttgaacttaccttgaagcatgtgaaagcactaacaaacctaattgatcactccgcagcagcttttcaaaatgcactatgcctgattgctgatcgtgttttaactttttcttttcctgtttttattttggtattaagtcgttgcctttatttgtaaagctgttataaatatatattatataaatatattaaaaaggaaaatgtttcagatgtttatttgtataattacttgattcacacagtgagaaaaaatgaatgtattcctgtttttgaagagaagaataattttttttttctctagggagaggtacagtgtttatattttggagccttcctgaaggtgtaaaattgtaaatatttttatctatgagtaaatgttaagtagttgttttaaaatacttaataaaataattcttttcctgtggaa

SEQ ID NO: 319760 - DNA, 1335 bp, Homo sapiens
accgcccccccctcacccgctccctcccgcctccccgcccgccccacttctcattcacttggctcgcacggcgcagacagaccgcgcagggagcacacaccgccagtctgtgcgctgagtcggagccagaggccgcggggacaccgggccatgcacgcccccaactgaagctgcatctcaaagccgaagattccagcagcccaggggatttcaaagagctcagactcagaggaacatctgcggagagacccccgaagccctctccagggcagtcctcatccagacgctccgctagtgcagacaggagcgcgcagtggccccggctcgccgcgccatggagcggatccccagcgcgcaaccaccccccgcctgcctgcccaaagcaccgggactggagcacggagacctaccagggatgtaccctgcccacatgtaccaagtgtacaagtcaagacggggaataaagcggagcgaggacagcaaggtaagcaagtgcacccctagggaccctgcgctcagcccctcgcgcgcgctgagtttccaagaaaagttttctcgctttgaggttggcgaggggatgcagggtgtgggctcggtgcctcttctgagtgacttggaaaagaaagggcagacgatggttctgggtgctactctgctactctgctcctctgccggactgttgctgcggggctgggaggataggcttctcatctccttccccaagcgcccaccgcctccccgtgcgtcttgcaggagacctacaaattgccgcaccggctcatcgagaaaaagagacgtgaccggattaacgagtgcatcgcccagctgaaggatctcctacccgaacatctcaaacttacagtaagtgagaagctggcccctttccaacccagtcctttgcccagagggcgggcgggtcactcgccgcctgcaggttccgcggggaactgcagaccagactggcggatcagagctggcgggtggctctgcggtggggtcctcctccacagtcctggcgttttctggctgactcatgcaaatgaggcgagaaccacttggacctctccaagttggctccaacaccaactggccttccttttcaggagtttaacttctggtgattttcaggattccctagtttttctcacttaaaggaacacgccaagaaacacacacattttatttaccccttcccctctaccactccccccaccttttttgttgttgttgtcaaataaggggacttgctttggtgtgtgatttttacggcctgtcctttcttgacagtagccctcggctacttcgcagcctttggttggggaaatggaaaaaaaa

SEQ ID NO: 319761 - DNA, 353 bp, Homo sapiens
aggccgcggggacaccgggccatgcacgcccccaactgaagctgcatctcaaagccgaagattccagcagcccaggggatttcaaagagctcagactcagaggaacatctgcggagagacccccgaagccctctccagggcagtcctcatccagacgctccgctagtgcagacaggagcgcgcagtggccccggctcgccgcgccatggagcggatccccagcgcgcaaccaccccccgcctgcctgcccaaagcaccgggactggagcacggagacctaccagggtaagttggcactccttggcccttcaagcctcaactgcagccccatgttatgcgccactctcaacttg

SEQ ID NO: 319762 - DNA, 5115 bp, Homo sapiens
  misc_feature (1179)..(1179): n is a, c, g, or t
  misc_feature (1181)..(1181): n is a, c, g, or t
  misc_feature (2427)..(2427): n is a, c, g, or t
  misc_feature (3039)..(3039): n is a, c, g, or t
  misc_feature (3291)..(3291): n is a, c, g, or t
  misc_feature (3327)..(3327): n is a, c, g, or t
agtacccctatctgaaatgcttgagaccagaagtgttttggagttcagattttcttttggattttggaatatttgcagaatacctactgattgagcatatctaacctggaaatccaaagtgctccggtgaacattttctttgagcatcatgtcaatcaatggtcaaaaagttcaggattttggagcttcttggattatgggtgctcaacctgtataggaaacgtggagatggagcatgaatcagttgtatttgatacttgctggggaaaggatttccagaccaccagagaagaaggatcacccatttaacttggtgtatccagtgccatatcagagccttttcttccattttaacctcaccagtagtctttagatttgtggtttatgatcaagaaattaaatcctagaatacagattagtagagcaaagttgaggcttttgattatctatttcttttaaggtttttcgctttaacactttacagaagaatttctagactgtctgagaagaatactccaggtatttgtcccagtcttaaaatggttcaacaaaaagttcataatcactttttagaacccttttcccaaagaactgtgatcctacgtgtaacttaaaaaaagaaaacacacaaatgcttgcatcttttttcacatatttatctgtattcagcaatcaagaatagctggtactgatggatatctttacatgatttttcgttatttatctgaaaataatatatattgggtcattatttggcttttcaacctcagtaattcagtaactttctttcagttaattttgttgacctgttttggacacttttcaaaatattcttagcatgattttactgggaagaacacattattacaagagttaggcagtctgagtccacctccatttgtgtccatcctctctcgtttgtttattgaatgccttcacctgtgctctgaattgcatctctttccttctcaggaaattttatacattgtcaattattccttctctctaacttcaacctcgccttctttgctgagtctgacccatcaacagttaaacatgatcaagtcttccgatttaaaagtccctctttcttgacacagctcatttatagccaaacttctttctgaagagtagtctacattcattttctttttctccctcacttctgataatattgancnaactccattttagtttctgtccctatcattcctctaaattgattaaggtctccagaatattcctctgtatttacgggcattattcactgctcttcttatttgactactcagcaagcatttaacttttgatcagtttttccttaaaatactttacttggcttccttgacatcatggtttttgttcagatctctgtggttatttctgtctcctttgctgccttctcctcttggtccttgaattttagaattcttcaaatttcagttctagacaatcttctgttcttactcttagctttccctatgtggtctcatcatttctcatgtggacatagtagtctccccacttttatttttgccaccttacaattttatccacagagcagctagagtagtctataaattctttttaaaatacgtaaaatcactcactgcttagacactacataatctagtccttggctgcttctctgaccctgtcttataccagtctgcatttactacagtccatctatactggcctctttgaactgttcttcagatatgataagcttgtccttgctaaaagctctaactgttatttctgcttggaatgctcttctcgtctactcttcctatgcctagcattttcttaatgtttaggtctcacctgagatgtcactttcactgtagtactagtagttgatgttactactgattcgttggcagtattcctgaaatagaatataggataaatgaggacatgtttattttgttcacagctgtgtccacaaaatctaaacagtgcctgtagtactgtaggagctcattaagtagtcggctgattgatttttgtacctaatggttctattaacaatattgacccccaaatgtattttcttcataaccttctcctctgaactccagtctgtatatttaactgtctacctgacatttccacttctaagcttaaaagctcctccaattgaacctgtgatctctttaaatctgggactccaggatttcctgccacagtgaatggatttaccttttatctatctctgtaagctagaaagttgagagtcttcttcaatgccttctttccccctcatattcaatccatcaaatggattctatggactttgccacctgaatatctcttgaatctgttcctacattttaaactaccatcatttgatggattttcacacagtgagtgtatctatataattaatacccaggtcaggaaatacgatattactagcacctnagaagctccttgtgccctctctctgtcagagtgatctttttaaagggaaaatgtgatcatgcttaatgcctttcagttgcttcccattgctcttagaataaagaccagaaatcataatgtgatatttaagatcctggatgatgttactgtttttcctatgcaacttcatgttttttaaattatttttctcactttctgtattccagccctgataaccacctctcaattccttgaatgtggtatgctgttccctcttgctaaaaaattctatgtacacataccccttccgttcttgtccttcagatttgagctcttcaaagttttcttggacatagcaagcttgatgaggtcccaaatacatcttatgtgctctcatatgctttattcatttgtatattattatttcccttatttttaagctaatgagtcaggtattacacctgttttgctcactgttgcttggtcatcagctagcatggtggctgggaaagattagtattcaatattcatacaataagtgaatatgagtagtttgggtttgttatgggatgaattatccatccccaccccccactcccacacacagacacccaactgatacactgaagattnaaattctaactgtagaacctagaatgtaactgtatttggagatggggcctttaaaaaggtaatgaagataaaatgaagtcatatgggtggactccaattccatatgagtggtttccattaagaagagattaggacacagacacacagaaaggtaagaccatgtgaagacactggaggaagatggccatctacaagccaaagagatctacaggctttagaagaaaccaacactgctgacaccttgatcttggncttctagaagtgtgagaaaataaattctgttctttnaactacccaatctgtgatactttgctatggaagccctagtaaacttatatggattttggtattgggaaagtggggtgctggtgtaattaatacctaaaaatgtggaattggctttagaactagataatgggtagaggccagaagaagtatttgttagaaaaagcatagactgccttgaagagattgttggtagacatatggatgttgaaggtgattctggtgaagcttagaaaataggagagctgttgagaaagcttctgtcatcttagaggtatacatatgtcaccttgaataaatattggtagaaatatgaatgttaaaggtgtttctggtaggaactcaaacaaatgaggaatatattgttggaaactgagggaaaggcaatgcttattataatgtggcaaatagccaaattgtgttttgtggaaagtggatgaacttacaaagtgatgaacttgaatgtttagctgagatttctaagcaatgcattaaagatatggcctggtttcttcttgctgcttaaagtaagatgcaagaggagagagagaaatttaagaaggaattattaagccaaaagcaaccagagcctgaagattcggaaaattctcagtctatccatattgcaaaaatttagcatgttctggagggaacatcaaagttgttgcaagacaaccatttcctaaagcaattagggatatgtgacttgtggatccaatcagccatcttggcagcaactagcagaagccaggatagagatggggttatacctatggaaatgctgctggctggtaccgaagggaacagagggataaaaatgaaggaagtctgttggatttcttgagattctataaaatgggtcagtagagctatctggctgtgaacatgtgttcttcaagaagagggaagaatgaccctgaagatgattgagaaggcaaaggggctactattgctaccacaggaccagagggctcaggcctgaggagtcaaggtaggctacttcttagggctgagggaggtgggctaccacactggtgggctcagaagacagggctgccacccctgttaggtgggaagatggagaatgaagctgaagaagattattcttgagccttaaaatctaatgggatttgcctttatacgtttcagacctgcttaggatccatcaccccttctttctgatttttttggaataggaatgtttatcctatgcctgtctcaccagtggtgtattttggaagcaaataacttgtctagtttcacaggttcatgctggagaagaattttgcctcagggtgaaaccttgagtatgcctgtacctgatctaaatgatatttagatgagatttggggcttagagttgatactgaagtgggtcaagactttggggctgttgggatggagtggatgtgttttgtgtctgagaaggacatgaattttgaggggccagatggcagaattttaggggttgaattgtatgctctccaaatgtatataagttaaagtcctaactcctagtacctagaatgtgaccatatttggagatggggcctttaaaaaggtaattaagataaaatgacgttatacatatgagccctaatccaatatgaatggtgtctttgtaagaggttaggacaaacacaaagggaagatcatgtgatgacactggagaaagaaggccatctacaaactgaggagggaggcctgagaagagataaaccctgtggacatcttaatcttggacatctagccttcagaagtgtgggaaaataaatttctattgtttaagcca

SEQ ID NO: 319763 - DNA, 802 bp, Homo sapiens
acttccccaaagtggaactttcctaagtcaaattgcaataagggtctgtctcttctcctttcagatccctggaacatcatctgtagttcagagaaaatggaagcccctgcagcctgtttcacagcctcgagggccaggacagccaacgaagtcccggatgagcgctgtggcggctgaaataaagcagatccgagccagaaggaaaacagcccggatgttgatggttgtgcttttggtatttgcaatttgctatctaccaattagcatcctcaatgtgctaaagagagtatttgggatgtttgcccatactgaagacagagagactgtgtatgcctggtttaccttttcacactggcttgtatatgccaatagtgctgcgaatccaattatttataattttctcagtggaaaatttcgagaggaatttaaagctgcgttttcttgctgttgccttggagttcaccatcgccaggaggatcggctcaccaggggacgaactagcacagagagccggaagtccttgaccactcaaatcagcaactttgataacatatcaaaactttctgagcaagttgtgctcactagcataagcacactcccagcagccaatggagcaggaccacttcaaaactggtagaatatttattcatatgacaaggatacctgagtaaaactatcctttttaaaatcactgggaacagaaattttattatcctatgatgtgaagctaaaattacttgtggatcttttttttttttaatctattgctctttggaaataaaaaaaaagtcagtttaaaatg

SEQ ID NO: 319764 - DNA, 1859 bp, Homo sapiens
ctactactactaggccacgcgtcgactagtacgggggggggggggtaattgagcttcagctgagccggacgtagctttctcctcctggtgtcattgctgcagcctccagtgccgggtccctagttcctcagctgcctatcttcccggtgcaacatcgcctgtaaagacagcaaagccaccgcagaagttgcccggcagaagactccggaggcattggctcagtaacttttcacgtcattttctgctcgggagccccttctagcctctccgcgcagcctttcccaccgcaaatcaccagtgctcatggggcaggcggagaggagcttgcagcattgagcggaaccggacttgagcccgtgatgtccggcaccaaattggaggactcccccccttgtcgcaactggtcatctgcttcggagctgaatgaaactcaagagccctttttaaaccccaccgactatgacgacgaggaattcctgcggtacctgtggagggaatacctgcacccgaaagaatatgagtgggtcctgatcgccgggtacatcatcgtgttcgtcgtggctctcattgggaacgtcctggtttgtgtggcagtgtggaagaaccaccacatgaggacggtaaccaactacttcatagtcaatctttctctggctgatgtgctcgtgaccatcacctgccttccagccacactggtcgtggatatcactgagacctggttttttggacagtccctttgcaaagtgattccttatctacagaccgtgtcggtgtctgtgtctgtcctcacactgagctgtatcgccttggatcggtggtatgcaatctgtcaccctttgatgtttaagagcacagcaaagcgggcccgtaacagcattgtcatcatctggattgtctcctgcattataatgattcctcaggccatcgtcatggagtgcagcaccgtgttcccaggcttagccaataaaaccaccctctttacggtgtgtgatgagcgctggggtggtgaaatttatcccaagatgtaccacatctgtttctttctggtgacatacatggcaccactgtgtctcatggtgttggcttatctgcaaatatttcgcaaactctggtgtcgacagatccctggaacatcatctgtagttcagagaaaatggaagcccctgcagcctgtttcacagcctcgagggccaggacagccaacgaagtcccggatgagcgctgtggcggctgaaataaagcagatccgagccagaaggaaaacagcccggatgttgatggttgtgcttttggtatttgcaatttgctatctaccaattagcatcctcaatgtgctaaagagagtatttgggatgtttgcccatactgaagacagagagactgtgtatgcctggtttaccttttcacactggcttgtatatgccaatagtgctgcgaatccaattatttataattttctcagtggaaaatttcgagaggaatttaaagctgcgttttcttgctgttgccttggagttcaccatcgccaggaggatcggctcaccaggggacgaactagcacagagagccggaagtccttgaccactcaaatcagcaactttgataacatatcaaaactttctgagcaagttgtgctcactagcataagcacactcccagcagccaatggagcaggaccacttcaaaactggtagaatatttattcatatgacaaggatacctgagtaaaactatcctttttaaaatcactgggaacagaaattttattatcctatgatgtgaagctaaaattacttgtggatcttttttttttttaatctattgctctttggaaataaaaaaaaagtcagtttaaaatg

SEQ ID NO: 319765 - DNA, 241 bp, Homo sapiens
ttgcctcatcctacagagagactaagtaacttttacccaaggctacatagctgggagcagagtggggcttttgcctttcttccacagtgcctcttaccataacatacctttgttcaaggccttcagtcatctgcagttcccttttggggccccctttcccattgtacttttttgtttttttgagcactaacaaacgggaactactaatgttcagttatttgttgctatcttacaaaaccat

SEQ ID NO: 319766 - DNA, 754 bp, Homo sapiens
  misc_feature (754)..(754): n is a, c, g, or t
agtgacttactatacatgttgaagtgctctgatggaaggaacagaaacctctgaaaggaagccgtcaaagtaggaactgccaacaaaaatgtgttatatgagtctacactgtgatgaaatggggagtgattgaggattggggcctaataaaaagcacctgtctggaagccatggcacctgatgtttctgaggtgtcacaggaatagagtagaatcacgaaaagagagagaacctcctcgcatccggcagcacacctaacgttcattggcacagtggcctcatcagcacctctgacgtgatctaactatccctgtcttcttgtttccttcaagtccttctggaatctcctttctaagatgggagtaaagatacaaaggaaatcgcaaaaaaaaaaaaaaaaaaaaaaaaaaaaaacatttgttggggggccgtgggcccttggaaaaggtttttaaaacctttggttggggggggggggcccgtggggttatgtggaaagtgggccaaaacaggggtttaccgagaggaaaaacacgcgggcgccgaggaaccagcggcgctgggggatattccctcacccaaattaaaaaaaaagcgcgccggggcgggaaacacgcgaacggtttgtgggaaacacaatctcgcgagaggggagctccgggagaagcacaaagaggagggactctaaccacgagggggacccaagagcgaagttcggaaatagaaaattgccgggcgccggccgggggcagcn

SEQ ID NO: 319767 - DNA, 296 bp, Homo sapiens
aagctgaatttatcctcctgcttaaacaagaggaaaacagaacaaaacctgtgactggttttcagacattaaacaacaggcaatgtgagactgtgatgtcaagaagatagtaactggctacaattggtgagagccattttcaggctgtaggacggggaggatgaatccaaacacagaccagcagttctattgagttgcggagtcagagactagagatcagagaagccaaggcagctaaaacttgaggggcagagaaaccaggagcaaaaggattatatacacagagagaactccag

SEQ ID NO: 319768 - DNA, 1586 bp, Homo sapiens
agtccctcttgcgtcgaggctgcaaaatggttccattcgccaggagacgctcctgagagaagggcgcgcgcggcacaggggccttccttgcacctcggagcaaagcagctcggatagcgccacacgtctgcgccctgcgtgggaagggcagggctgacagcacttcctccccggggcagagacctggagcccgggtgcggcagtctgcaccgcgcgtcgctttcccggccggagtctcgccgccttcccgcgccccgcagcgccccgcagagcagtcgagatgggtgagtcaagtgaagacatagaccaaatgttcagcactttgctgggagagatggatcttctgactcagagtttaggagttgacactctccctcctcctgaccctaatccacccagagctgaatttaactacagtgtggggtttaaagatttaaatgagtccttaaatgcactggaagaccaagatttagatgctctcatggcagatctggtagcagacataagtgaggctgagcagaggacaatccaggcacagaaagagtccttgcagaatcaacatcattcagcatctctacaagcatcaattttcagtggtgcagcctctcttggttatggaacaaatgttgctgccactggtatcagccaatatgaggatgacttaccacctccaccagccgatcctgtgttagaccttccactgccaccaccacctcctgaacctctctctcaggaagaggaagaagcccaagccaaggctgataaaattaagctggcgctggaaaaactgaaggaggccaaggttaagaagctcgtcgtcaaggtgcacatgaatgataacagcacaaagtcactgatggtggatgagcggcagctggcccgagatgttctggacaaccttttcgagaaaactcattgtgactgcaatgtagactggtgtctttatgaaatctacccggaactacaaattgagaggttttttgaagaccatgaaaatgttgttgaagtcttatcagactggacaagagacacagaaaataaaatactatttttggagaaagaattcagaaggagtcccagtatatcaagtatctctgctgtgatgacacaagaacccttaaccagtgggtcatgggaatacggatagccaagtatgggaagactctctatgataactaccagcgggctgtggcaaaggctggacttgcctctcggtggacaaacttggggacagtcaatgcagctgcaccagctcagccatctacaggacctaaaacaggcaccacccagcccaatggacagattccccaggctacacattctgtcagtgctgttctccaagaggcccagagacatgctgaaacatcgaaggtaaaaccagcaagcagctgacccctataagccatgttctaaaccattcacattattccagtaactgctcttttaaaaagagaaaataagctgagtgcagtagctcacacctgtagtcccggaactttgggaggctgaggcaggaggatcacttgagcttcagtttgagaccagactggacaatatagcgagagcttgtctctactaaaaaaaaa

SEQ ID NO: 319769 - DNA, 1308 bp, Homo sapiens
agtccctcttgcgtcgaggctgcaaaatggttccattcgccaggagacgctcctgagagaagggcgcgcgcggcacaggggccttccttgcacctcggagcaaagcagctcggatagcgccacacgtctgcgccctgcgtgggaagggcagggctgacagcacttcctccccggggcagagacctggagcccgggtgcggcagtctgcaccgcgcgtcgctttcccggccggagtctcgccgccttcccgcgccccgcagcgccccgcagagcagtcgagatgggtgagtcaagtgaagacatagaccaaatgttcagcactttgctgggagagatggatcttctgactcagagtttaggagttgacactctccctcctcctgaccctaatccacccagagctgaatttaactacagtgtggggtttaaagatttaaatgagtccttaaatgcactggaagaccaagatttagatgctctcatggcagatctggtagcagacataagtgaggctgagcagaggacaatccaggcacagaaagagtccttgcagaatcaacatcattcagcatctctacaagcatcaattttcagtggtgcagcctctcttggttatggaacaaatgttgctgccactggtatcagccaatatgaggatgacttaccacctccaccagccgatcctgtgttagaccttccactgccaccaccacctcctgaacctctctctcaggaagaggaagaagcccaagccaaggctgataaaattaagctggcgctggaaaaactgaaggaggccaaggttaagaagctcgtcgtcaaggtgcacatgaatgataacagcacaaagtcactgatggtggatgagcggcagctggcccgagatgttctggacaaccttttcgagaaaactcattgtgactgcaatgtagactggtgtctttatgaaatctacccggaactacaaattgagaggttttttgaagaccatgaaaatgttgttgaagtcttatcagactggacaagagacacagaaaataaaatactatttttggagaaagaggagaaatatgctgtatttaaaaacccccagaatttctacttggataacagaggaaaaaaagaaagcaaggaaactaatgagaaaatgaatgctaagaacaaggaatccttacttgaggaaagtttctgtggaacatctatcattgtaccagaactggaaggagctctttatttgaaagaagatggaaagaaatcctggaaaaggcgctattttcttttacgggcttctggaatttattatgtacc

SEQ ID NO: 319770 - DNA, 1108 bp, Homo sapiens
agtccctcttgcgtcgaggctgcaaaatggttccattcgccaggagacgctcctgagagaagggcgcgcgcggcacaggggccttccttgcacctcggagcaaagcagctcggatagcgccacacgtctgcgccctgcgtgggaagggcagggctgacagcacttcctccccggggcagagacctggagcccgggtgcggcagtctgcaccgcgcgtcgctttcccggccggagtctcgccgccttcccgcgccccgcagcgccccgcagagcagtcgagatgggtgagtcaagtgaagacatagaccaaatgttcagcactttgctgggagagatggatcttctgactcagagtttaggagttgacactctccctcctcctgaccctaatccacccagagctgaatttaactacagtgtggggtttaaagatttaaatgagtccttaaatgcactggaagaccaagatttagatgctctcatggcagatctggtagcagacataagtgaggctgagcagaggacaatccaggcacagaaagagtccttgcagaatcaacatcattcagcatctctacaagcatcaattttcagtggtgcagcctctcttggttatggaacaaatgttgctgccactggtatcagccaatatgaggatgacttaccacctccaccagccgatcctgtgttagaccttccactgccaccaccacctcctgaacctctctctcagctcgtcgtcaaggtgcacatgaatgataacagcacaaagtcactgatggtggatgagcggcagctggcccgagatgttctggacaaccttttcgagaaaactcattgtgactgcaatgtagactggtgtctttatgaaatctacccggaactacaaattgaatttctacttggataacagaggaaaaaaagaaagcaaggaaactaatgagaaaatgaatgctaagaacaaggaatccttacttgaggaaagtttctgtggaacatctatcattgtaccagaactggaaggagctctttatttgaaagaagatggaaagaaatcctggaaaaggcgctattttcttttacgggcttctggaatttattatgtacc

SEQ ID NO: 319771 - DNA, 1561 bp, Homo sapiens
agtccctcttgcgtcgaggctgcaaaatggttccattcgccaggagacgctcctgagagaagggcgcgcgcggcacaggggccttccttgcacctcggagcaaagcagctcggatagcgccacacgtctgcgccctgcgtgggaagggcagggctgacagcacttcctccccggggcagagacctggagcccgggtgcggcagtctgcaccgcgcgtcgctttcccggccggagtctcgccgccttcccgcgccccgcagcgccccgcagagcagtcgagatgggtgagtcaagtgaagacatagaccaaatgttcagcactttgctgggagagatggatcttctgactcagagtttaggagttgacactctccctcctcctgaccctaatccacccagagctgaatttaactacagtgtggggtttaaagatttaaatgagtccttaaatgcactggaagaccaagatttagatgctctcatggcagatctggtagcagacataagtgaggctgagcagaggacaatccaggcacagaaagagtccttgcagaatcaacatcattcagcatctctacaagcatcaattttcagtggtgcagcctctcttggttatggaacaaatgttgctgccactggtatcagccaatatgaggatgacttaccacctccaccagccgatcctgtgttagaccttccactgccaccaccacctcctgaacctctctctcaggaagaggaagaagcccaagccaaggctgataaaattaagctggcgctggaaaaactgaaggaggccaaggttaagaagctcgtcgtcaaggtgcacatgaatgataacagcacaaagtcactgatggtggatgagcggcagctggcccgagatgttctggacaaccttttcgagaaaactcattgtgactgcaatgtagactggtgtctttatgaaatctacccggaactacaaattgagaggttttttgaagaccatgaaaatgttgttgaagtcttatcagactggacaagagacacagaaaataaaatactatttttggagaaagaattcagaaggagtcccagtatatcaagtatctctgctgtgatgacacaagaacccttaaccagtgggtcatgggaatacggatagccaagtatgggaagactctctatgataactaccagcgggctgtggcaaaggctggacttgcctctcggtggacaaacttggggacagtcaatgcagctgcaccagctcagccatctacaggacctaaaacaggcaccacccagcccaatggacagattccccaggctacacattctgtcagtgctgttctccaagaggcccagagacatgctgaaacatcgaaggataagaagccagccctcgggaaccaccacgacccggcagtgccccgggccccgcacgcccccaagtccagcctgcccccgcgacctccggtgcggaggtcctccgacaccagcggcagtcccgccacgcccctcaaggccaagggcacaggcggcgggggcttgcccgccccacccgacgacttcctgc

SEQ ID NO: 319772 - DNA, 4465 bp, Homo sapiens
ctaggagcgaagcgtgcacgccttgtctttctccacctttcgtctttggtcacagcgccatctcatggttagctgaaactttgaaagaggattcattcttcagaggcaaggaatcggagtcctatgtctttctcgcgccttgaaggttacttagctaaagctaagatagcgagaaacagtacttttcaggtccttccatgatctacattcgtccttgttctcggaggacccagactctatggttaatgatgaagaggggcctctattcgttcagcgcttgcgcatgcgaggaggttccgcatgcgcggtggagtgagcgaagcgcacgctgaggaggatcggcggccggtgagggggaagcaagtctggtctctgtgattgaagaagtcggctctgggctccagtgcgggaatcacacacatacctcagaatgccgggtctaagttgtagattttatcaacacaaatttcctgaggtggaagatgtagtgatggtgaatgtcagatccattgctgaaatgggggcttatgtcagcttgctggaatacaacaacattgaaggcatgattcttcttagtgaattatccagaaggcgtatccgttctatcaacaaactcatccgaattggcaggaatgagtgtgtggttgtcattagggtggacaaagaaaaaggatatattgatttgtcaaaaagaagagtttctccagaggaagcaatcaaatgtgaagacaaattcacaaaatccaaaactgtttatagcattcttcgtcatgttgctgaggtgttagaatacaccaaggatgagcagctggaaagcctattccagaggactgcctgggtctttgatgacaagtacaagagacctggatatggtgcctatgatgcatttaagcatgcagtctcagacccatctattttggatagtttagatttgaatgaagatgaacgggaagtactcattaataatattaataggcgcttgaccccacaggctgtcaaaattcgagcagatattgaagtggcttgttatggttatgaaggcattgatgctgtaaaagaagccctaagagcaggtttgaattgttctacagaaaacatgcccattaagattaatctaatagctcctcctcggtatgtaatgactacgacaaccctggagagaacagaaggcctttctgtcctcagtcaagctatggctgttatcaaagagaagattgaggaaaagaggggtgtgttcaatgttcaaatggagcccaaagtggtcacagatacagatgagactgaacttgcgaggcagatggagaggcttgaaagagaaaatgccgaagtggatggagatgatgatgcagaagaaatggaagccaaagctgaagattaactttgtgggaaacagagtccaatttaaggaacacagagcagcgcttcctggctgtaaatcctagacttgaaagttttccagtattgaaaacttcaaagctgaatattttttatttctaagtatttaaatgttctaacagatcagaacatgaaatgccctcctaaatgtcagctgttgtcacacagtagctccaacactttgagcatttttaagggagtggcctcatttcactagagacaaatctttaagaatagttctaaaattgggcttgtgatttccatttctgatgtctccagattggcacccctttctagttcaatgcctcacgagatttgccaggggcatccaaggcaaacaatcccaatctttctatataaaatgtattcaagcaaacatcaaataaatttctgggatatttaactataggcttcttccttcttgtcaccagttaaaagcattttaatactaagaccctaattcttttatctttattttagtcttgatgtggaactgtaggagcaggtgaataaaggatctctataacagatcctttcaaaagaagagttttagagaaaataaatttaactttaaccacagtgaaagttgacccttagcgggacaaagccttaaaatgcattgaaagaattagatcggttctgtgccttttatctatttgagattgatgacaacctgtgtgagagaatttatcacaccacgtccttattggaataataagctacttgccttgagtttataattcagggtggtaaagtatgtttttaaattttaaaaagcagctgcattttttatttagttggaatatcacccaattttttatttttattgctattaaaatatccactagatgccacctagagctccagttctttataacaaaacagggatctgtttgaacacttactgttgtttttttttttttacatgtttccatcatttctgtctttaagaactaattcgtacataataagtttcataggtaacacattatttgaagttacagctacagtagtcaggtgtagaaaatcttgagttgctttggtctgcttgtcttcataaatttattctcttatgatacttgaggtaccagttgtatttaattttattcattatccctagatagctattaagatacttagattagacctaacccaccatagtcaatccaagactagactactcaatattaaagggtctggaaaatagaagagtgtgttgggcaggtagtttgtaccatttatgaaggtttgttcctttgttaaatttagcagcctgtactagcttttgaaatccagaagttttaacttccagtggctggtttctgagagagtgccatgattgctagccagcattccatattgggaatatgtagaggagaacctggatgtacttaagagtggcatataattttcacttctgtctgttgaggcatcaaaaaaacaagtttagaaagctggcaacatgaagaatgcattcaaaatataacaggtgcttctttgttgtacgcagaggaattttttcttttgattttgtttactgaaatttgttatacttcaaaagccataacttgaaaaatactggtggcgtcgatggtgagtgatttttatcccacgtgggccttttgctcagttccatggcaattttgtaaattgaccctagccagagaatagatcagtatttcactgataccacgaggaaaagaacaaacaaaacttaaaagtattcatacaccttgctaacctaaaagacagcagggacaagatacatatgaggacaaggtatacacccagttctgaataacttgaagaacaggcttggcaaagaagtaagtttatccaaatcttgaatttctgccaggcatggtagctcatgcctgtaaccctggcacttaaggggccaaggcaggaggatcacttgaggccagtgagctgtgatcactccagtgcactcgagcctgggtgacagggcaagaccctgtctcaaaaaaaaaaaaaaaaaccaaaaatcttgaatctcccatcaaagccttttcattaaaaatacaatttcatctactccctactgtacctttcactgatgtcaagtggctatcaattcatatagctgaaaattagtgatagtttgggtctcatttatgcataaattaattgaaaatcagtaatggccaggaagaaatatgaatattcaaaccacttttttctttttttttttttttttttggcaaatggtgttatattgcctgggcaggtctcgaaatcctgggctcaagctatcctcctgcctctgcctctgtaagagtgtgagccaccatgccccacccaaaccatttttcatatcagttatagcaaaacaagacaaaccagttcttaataatgttcaaagttggacccatagagacatgctaagcactacatcatgctaagaagaacagttattactcagctgccatacttcagccattctacttttacaccaagaacaaaatggctagagatttttttaaaaatacaaatgccagtaccttgccgagacttgttcactgatttgccccaaccccaaggtaatggtcatctactttgcaacctatggagatcctgatagctcccatacaaagtgaggtacactgttgccaatttggaggcaggaagccatcaaactaaacgtagtttaattcagatgaacacctatcgatattcaaaaggcaaaacaaaaaaactaattccagggacattagaccttggtgaaatgccaaatggaaaatggtgctttaaaaggtagtctcttaccatataaggaataagtaaaacattagcttgtgatttctcattattcaggtcaatgttttagacacgactaacaagggacagttcaaactattaaagagaacaaatttttacttaagcactttgaggtatccactccccttaaatgtaagttatgtattttatctgttgattaaggggaggtccaagcatttgtacttggcaggaatgctggcaatagcttgtgccagattactgtataaacttgaaagtaataaaaatgttctttaaaagtaaaaaaaaaaaa

SEQ ID NO: 319773 - DNA, 4393 bp, Homo sapiens
ctaggagcgaagcgtgcacgccttgtctttctccacctttcgtctttggtcacagcgccatctcatggttagctgaaactttgaaagaggattcattcttcagaggcaaggaatcggagtcctatgtctttctcgcgccttgaaggttacttagctaaagctaagatagcgagaaacagtacttttcaggtccttccatgatctacattcgtccttgttctcggaggacccagactctatggttaatgatgaagaggggcctctattcgttcagcgcttgcgcatgcgaggaggttccgcatgcgcggtggagtgagcgaagcgcacgctgaggaggatcggcggccggtgagggggaagcaagtctggtctctgtgattgaagaagtcggctctgggctccagtgcgggaatcacacacatacctcagaatgccgggtctaagttgtagattttatcaacacaaatttcctgaggtggaagatgtagtgatggtgaatgtcagatccattgctgaaatgggggcttatgtcagcttgctggaatacaacaacattgaaggcatgattcttcttagtgaattatccagaaggcgtatccgttctatcaacaaactcatccgaattggcaggaatgagtgtgtggttgtcattagggtggacaaagaaaaaggatatattgatttgtcaaaaagaagagtttctccagaggaagcaatcaaatgtgaagacaaattcacaaaatccaaaactgtttatagcattcttcgtcatgttgctgaggtgttagaatacaccaaggatgagcagctggaaagcctattccagaggactgcctgggtctttgatgacaagtacaagagacctggatatggtgcctatgatgcatttaagcatgcagtctcagacccatctattttggatagtttagatttgaatgaagatgaacgggaagtactcattaataatattaataggcgcttgaccccacaggctgtcaaaattcgagcagatattgaagtggcttgttatggttatgaaggcattgatgctgtaaaagaagccctaagagcaggtttgaattgttctacagaaaacatgcccattaagattaatctaatagctcctcctcggtatgtaatgactacgacaaccctggagagaacagaaggcctttctgtcctcagtcaagctatggctgttatcaaagagaagattgaggaaaagaggggtgtgttcaatgttcaaatggagcccaaagtggtcacagatacagatgagactgaacttgcgaggcagatggagaggcttgaaagagaaaatgccgaagtggatggagatgatgatgcagaagaaatggaagccaaagctgaagattaactttgtgggaaacagagtccaatttaaggaacacagagcagcgcttcctggctgtaaatcctagacttgaaagttttccagtattgaaaacttcaaagctgaatattttttatttctaagtatttaaatgttctaacagatcagaacatgaaatgccctcctaaatgtcagctgttgtcacacagtagctccaacactttgagcatttttaagggagtggcctcatttcactagagacaaatctttaagaatagttctaaaattgggcttgtgatttccatttctgatgtctccagattggcacccctttctagttcaatgcctcacgagatttgccaggggcatccaaggcaaacaatcccaatctttctatataaaatgtattcaagcaaacatcaaataaatttctgggatatttaactataggcttcttccttcttgtcaccagttaaaagcattttaatactaagaccctaattcttttatctttattttagtcttgatgtggaactgtaggagcaggtgaataaaggatctctataacagatcctttcaaaagaagagttttagagaaaataaatttaactttaaccacagtgaaagttgacccttagcgggacaaagccttaaaatgcattgaaagaattagatcggttctgtgccttttatctatttgagattgatgacaacctgtgtgagagaatttatcacaccacgtccttattggaataataagctacttgccttgagtttataattcagggtggtaaagtatgtttttaaattttaaaaagcagctgcattttttatttagttggaatatcacccaattttttatttttattgctattaaaatatccactagatgccacctagagctccagttctttataacaaaacagggatctgtttgaacacttactgttgtttttttttttttacatgtttccatcatttctgtctttaagaactaattcgtacataataagtttcataggtaacacattatattctcttatgatacttgaggtaccagttgtatttaattttattcattatccctagatagctattaagatacttagattagacctaacccaccatagtcaatccaagactagactactcaatattaaagggtctggaaaatagaagagtgtgttgggcaggtagtttgtaccatttatgaaggtttgttcctttgttaaatttagcagcctgtactagcttttgaaatccagaagttttaacttccagtggctggtttctgagagagtgccatgattgctagccagcattccatattgggaatatgtagaggagaacctggatgtacttaagagtggcatataattttcacttctgtctgttgaggcatcaaaaaaacaagtttagaaagctggcaacatgaagaatgcattcaaaatataacaggtgcttctttgttgtacgcagaggaattttttcttttgattttgtttactgaaatttgttatacttcaaaagccataacttgaaaaatactggtggcgtcgatggtgagtgatttttatcccacgtgggccttttgctcagttccatggcaattttgtaaattgaccctagccagagaatagatcagtatttcactgataccacgaggaaaagaacaaacaaaacttaaaagtattcatacaccttgctaacctaaaagacagcagggacaagatacatatgaggacaaggtatacacccagttctgaataacttgaagaacaggcttggcaaagaagtaagtttatccaaatcttgaatttctgccaggcatggtagctcatgcctgtaaccctggcacttaaggggccaaggcaggaggatcacttgaggccagtgagctgtgatcactccagtgcactcgagcctgggtgacagggcaagaccctgtctcaaaaaaaaaaaaaaaaaccaaaaatcttgaatctcccatcaaagccttttcattaaaaatacaatttcatctactccctactgtacctttcactgatgtcaagtggctatcaattcatatagctgaaaattagtgatagtttgggtctcatttatgcataaattaattgaaaatcagtaatggccaggaagaaatatgaatattcaaaccacttttttctttttttttttttttttttggcaaatggtgttatattgcctgggcaggtctcgaaatcctgggctcaagctatcctcctgcctctgcctctgtaagagtgtgagccaccatgccccacccaaaccatttttcatatcagttatagcaaaacaagacaaaccagttcttaataatgttcaaagttggacccatagagacatgctaagcactacatcatgctaagaagaacagttattactcagctgccatacttcagccattctacttttacaccaagaacaaaatggctagagatttttttaaaaatacaaatgccagtaccttgccgagacttgttcactgatttgccccaaccccaaggtaatggtcatctactttgcaacctatggagatcctgatagctcccatacaaagtgaggtacactgttgccaatttggaggcaggaagccatcaaactaaacgtagtttaattcagatgaacacctatcgatattcaaaaggcaaaacaaaaaaactaattccagggacattagaccttggtgaaatgccaaatggaaaatggtgctttaaaaggtagtctcttaccatataaggaataagtaaaacattagcttgtgatttctcattattcaggtcaatgttttagacacgactaacaagggacagttcaaactattaaagagaacaaatttttacttaagcactttgaggtatccactccccttaaatgtaagttatgtattttatctgttgattaaggggaggtccaagcatttgtacttggcaggaatgctggcaatagcttgtgccagattactgtataaacttgaaagtaataaaaatgttctttaaaagtaaaaaaaaaaaa

SEQ ID NO: 319774 - DNA, 4219 bp, Homo sapiens
ctaggagcgaagcgtgcacgccttgtctttctccacctttcgtctttggtcacagcgccatctcatggttagctgaaactttgaaagaggattcattcttcagaggcaaggaatcggagtcctatgtctttctcgcgccttgaaggttacttagctaaagctaagatagcgagaaacagtacttttcaggtccttccatgatctacattcgtccttgttctcggaggacccagactctatggttaatgatgaagaggggcctctattcgttcagcgcttgcgcatgcgaggaggttccgcatgcgcggtggagtgagcgaagcgcacgctgaggaggatcggcggccggtgagggggaagcaagtctggtctctgtgattgaagaagtcggctctgggctccagtgcgggaatcacacacatacctcagaatgccgggtctaagttgtagattttatcaacacaaatttcctgaggtggaagatgtagtgatggtgaatgtcagatccattgctgaaatgggggcttatgtcagcttgctggaatacaacaacattgaaggcatgattcttcttagtgaattatccagaaggcgtatccgttctatcaacaaactcatccgaattggcaggaatgagtgtgtggttgtcattagggtggacaaagaaaaaggatatattgatttgtcaaaaagaagagtttctccagaggaagcaatcaaatgtgaagacaaattcacaaaatccaaaactgtttatagcattcttcgtcatgttgctgaggtgttagaatacaccaaggatgagcagctggaaagcctattccagaggactgcctgggtctttgatgacaagtacaagagacctggatatggtgcctatgatgcatttaagcatgcagtctcagacccatctattttggatagtttagatttgaatgaagatgaacgggaagtactcattaataatattaataggcgcttgaccccacaggctgtcaaaattcgagcagatattgaagtggcttgttatggttatgaaggcattgatgctgtaaaagaagccctaagagcaggtttgaattgttctacagaaaacatgcccattaagattaatctaatagctcctcctcggtatgtaatgactacgacaaccctggagagaacagaaggcctttctgtcctcagtcaagctatggctgttatcaaagagaagattgaggaaaagaggggtgtgttcaatgttcaaatggagcccaaagtggtcacagatacagatgagactgaacttgcgaggcagatggagaggcttgaaagagaaaatgccgaagtggatggagatgatgatgcagaagaaatggaagccaaagctgaagattaactttgtgggaaacagagtccaatttaaggaacacagagcagcgcttcctggctgtaaatcctagacttgaaagttttccagtattgaaaacttcaaagctgaatattttttatttctaagtatttaaatgttctaacagatcagaacatgaaatgccctcctaaatgtcagctgttgtcacacagtagctccaacactttgagcatttttaagggagtggcctcatttcactagagacaaatctttaagaatagttctaaaattgggcttgtgatttccatttctgatgtctccagattggcacccctttctagttcaatgcctcacgagatttgccaggggcatccaaggcaaacaatcccaatctttctatataaaatgtattcaagcaaacatcaaataaatttctgggatatttaactataggcttcttccttcttgtcaccagttaaaagcattttaatactaagaccctaattcttttatctttattttagtcttgatgtggaactgtaggagcaggtgaataaaggatctctataacagatcctttcaaaagaagagttttagagaaaataaatttaactttaaccacagtgaaagttgacccttagcgggacaaagccttaaaatgcattgaaagaattagatcggttctgtgccttttatctatttgagattgatgacaacctgtgtgagagaatttatcacaccacgtccttattggaataataagctacttgccttgagtttataattcagggtggtaaagtatgtttttaaattttaaaaagcagctgcattttttatttagttggaatatcacccaattttttatttttattgctattaaaatatccactagatgccacctagagctccagttctttataacaaaacagggatctgtttgaacacttactgttgtttttttttttttacatgtttccatcatttctgtctttaagaactaattcgtacataataagtttcataggtaacacattatattctcttatgatacttgaggtaccagttgtatttaattttattcattatccctagatagctattaagatacttagattagacctaacccaccatagtcaatccaagactagactactcaatattaaagggtctggaaaatagaagagtgtgttgggcaggtagtttgtaccatttatgaaggtttgttcctttgttaaatttagcagcctgtactagcttttgaaatccagaagttttaacttccagtggctggtttctgagagagtgccatgattgctagccagcattccatattgggaatatgtagaggagaacctggatgtacttaagagtggcatataattttcacttctgtctgttgaggcatcaaaaaaacaagtttagaaagctggcaacatgaagaatgcattcaaaatataacaggtgcttctttgttgtacgcagaggaattttttcttttgattttgtttactgaaatttgttatacttcaaaagccataacttgaaaaatactggtggcgtcgatggtgagtgatttttatcccacgtgggccttttgctcagttccatggcaattttgtaaattgaccctagccagagaatagatcagtatttcactgataccacgaggaaaagaacaaacaaaacttaaaagtattcatacaccttgctaacctaaaagacagcagggacaagatacatatgaggacaaggtatacacccagttctgaataacttgaagaacaggcttggcaaagaagtaagtttatccaaatcttgaatttctgccaggcatggtagctcatgcctgtaaccctggcacttaaggggccaaggcaggaggatcacttgaggccagtgagctgtgatcactccagtgcactcgagcctgggtgacagggcaagaccctgtctcaaaaaaaaaaaaaaaaaccaaaaatcttgaatctcccatcaaagccttttcattaaaaatacaatttcatctactccctactgtacctttcactgatgtcaagtggctatcaattcatatagctgaaaattagtgatagtttgggtctcatttatgcataaattaattgaaaatcagtaatggccaggaagaaatatgaatattcaaaccacttttttctttttttttttttttttttggcaaatggtgttatattgcctgggcaggtctcgaaatcctgggctcaagctatcctcctgcctctgcctctgtaagagtgtgagccaccatgccccacccaaaccatttttcatatcagttatagcaaaacaagacaaaccagttcttaataatgttcaaagttggacccatagagacatgctaagcactacatcatgctaagaagaacagttattactcagctgccatacttcagccattctacttttacaccaagaacaaaatggctagagatttttttaaaaatacaaatgccagtaccttgccgagacttgttcactgatttgccccaaccccaaggtaatggtcatctactttgcaacctatggagatcctgatagctcccatacaaagtgaggtacactgttgccaatttggaggcaggaagccatcaaactaaacgtagtttaattcagatgaacacctatcgatattcaaaaggcaaaacaaaaaaactaattccagggacattagaccttggtgaaatgccaaatggaaaatggtgctttaaaaggtagtctcttaccatataaggaataagtaaaacattagcttgtgatttctcattatcgaagggtttcagatcagacgagatagaacagtgtcaaattattagaagtagacgaaaggttatc

SEQ ID NO: 319775 - DNA, 4114 bp, Homo sapiens
  misc_feature (3542)..(3542): n is a, c, g, or t
  misc_feature (3557)..(3557): n is a, c, g, or t
ctaggagcgaagcgtgcacgccttgtctttctccacctttcgtctttggtcacagcgccatctcatggttagctgaaactttgaaagaggattcattcttcagaggcaaggaatcggagtcctatgtctttctcgcgccttgaaggttacttagctaaagctaagatagcgagaaacagtacttttcaggtccttccatgatctacattcgtccttgttctcggaggacccagactctatggttaatgatgaagaggggcctctattcgttcagcgcttgcgcatgcgaggaggttccgcatgcgcggtggagtgagcgaagcgcacgctgaggaggatcggcggccggtgagggggaagcaagtctggtctctgtgattgaagaagtcggctctgggctccagtgcgggaatcacacacatacctcagaatgccgggtctaagttgtagattttatcaacacaaatttcctgaggtggaagatgtagtgatggtgaatgtcagatccattgctgaaatgggggcttatgtcagcttgctggaatacaacaacattgaaggcatgattcttcttagtgaattatccagaaggcgtatccgttctatcaacaaactcatccgaattggcaggaatgagtgtgtggttgtcattagggtggacaaagaaaaaggatatattgatttgtcaaaaagaagagtttctccagaggaagcaatcaaatgtgaagacaaattcacaaaatccaaaactgtttatagcattcttcgtcatgttgctgaggtgttagaatacaccaaggatgagcagctggaaagcctattccagaggactgcctgggtctttgatgacaagtacaagagacctggatatggtgcctatgatgcatttaagcatgcagtctcagacccatctattttggatagtttagatttgaatgaagatgaacgggaagtactcattaataatattaataggcgcttgaccccacaggctgtcaaaattcgagcagatattgaagtggcttgttatggttatgaaggcattgatgctgtaaaagaagccctaagagcaggtttgaattgttctacagaaaacatgcccattaagattaatctaatagctcctcctcggtatgtaatgactacgacaaccctggagagaacagaaggcctttctgtcctcagtcaagctatggctgttatcaaagagaagattgaggaaaagaggggtgtgttcaatgttcaaatggagcccaaagtggtcacagatacagatgagactgaacttgcgaggcagatggagaggcttgaaagagaaaatgccgaagtggatggagatgatgatgcagaagaaatggaagccaaagctgaagattaactttgtgggaaacagagtccaatttaaggaacacagagcagcgcttcctggctgtaaatcctagacttgaaagttttccagtattgaaaacttcaaagctgaatattttttatttctaagtatttaaatgttctaacagatcagaacatgaaatgccctcctaaatgtcagctgttgtcacacagtagctccaacactttgagcatttttaagggagtggcctcatttcactagagacaaatctttaagaatagttctaaaattgggcttgtgatttccatttctgatgtctccagattggcacccctttctagttcaatgcctcacgagatttgccaggggcatccaaggcaaacaatcccaatctttctatataaaatgtattcaagcaaacatcaaataaatttctgggatatttaactataggcttcttccttcttgtcaccagttaaaagcattttaatactaagaccctaattcttttatctttattttagtcttgatgtggaactgtaggagcaggtgaataaaggatctctataacagatcctttcaaaagaagagttttagagaaaataaatttaactttaaccacagtgaaagttgacccttagcgggacaaagccttaaaatgcattgaaagaattagatcggttctgtgccttttatctatttgagattgatgacaacctgtgtgagagaatttatcacaccacgtccttattggaataataagctacttgccttgagtttataattcagggtggtaaagtatgtttttaaattttaaaaagcagctgcattttttatttagttggaatatcacccaattttttatttttattgctattaaaatatccactagatgccacctagagctccagttctttataacaaaacagggatctgtttgaacacttactgttgtttttttttttttacatgtttccatcatttctgtctttaagaactaattcgtacataataagtttcataggtaacacattatattctcttatgatacttgaggtaccagttgtatttaattttattcattatccctagatagctattaagatacttagattagacctaacccaccatagtcaatccaagactagactactcaatattaaagggtctggaaaatagaagagtgtgttgggcaggtagtttgtaccatttatgaaggtttgttcctttgttaaatttagcagcctgtactagcttttgaaatccagaagttttaacttccagtggctggtttctgagagagtgccatgattgctagccagcattccatattgggaatatgtagaggagaacctggatgtacttaagagtggcatataattttcacttctgtctgttgaggcatcaaaaaaacaagtttagaaagctggcaacatgaagaatgcattcaaaatataacaggtgcttctttgttgtacgcagaggaattttttcttttgattttgtttactgaaatttgttatacttcaaaagccataacttgaaaaatactggtggcgtcgatggtgagtgatttttatcccacgtgggccttttgctcagttccatggcaattttgtaaattgaccctagccagagaatagatcagtatttcactgataccacgaggaaaagaacaaacaaaacttaaaagtattcatacaccttgctaacctaaaagacagcagggacaagatacatatgaggacaaggtatacacccagttctgaataacttgaagaacaggcttggcaaagaagtaagtttatccaaatcttgaatttctgccaggcatggtagctcatgcctgtaaccctggcacttaaggggccaaggcaggaggatcacttgaggccagtgagctgtgatcactccagtgcactcgagcctgggtgacagggcaagaccctgtctcaaaaaaaaaaaaaacccaaaatattctgggatattcctcccctataaaagcctcttttcctattaaaaatatacacattttctattctaatctccctctaagtggtactctttccattggtatggtccaggtgggcttattcaattcctataaattaggctggaaaaattagtggataagttgggggtcctccatttttatggccattaatttcattgggaacactccagtatgggnccgaggaaggaattnatgcatttttacaaaccacttttttccttttttcttttttctttcggggggacaagcgggcgtgtcaattgtggccgggggaggggtcctccaaaaccgcggggcccaaagctatatctccgcgggcgttgcggcctcccttgtaaaaagtgtgttgagcccaactgtgggccccccacccgaagaacacttttcttctccttctacccggtttttgcgcaaacacgaagaaccaccccggttctattactggtgcccgaggtggggccctgggagatgtggtggcgccctattcttggttcagaggaccggtttttcaccagcggcatcatgctgctcctttctagttttcccaggcaccagggcctggcgagttctacacttcaatgcgctcctctgccgaagtgttccgggtgtgccccgccagggtgtgtctctggcccttgggatcttggccccaggggcggggcctgggggcccaccactgtttctcgacctgttcgcggaatcggccttggcggcggggtccccacgcttcttctacggatggatgctcg

SEQ ID NO: 319776 - DNA, 4235 bp, Homo sapiens
ctaggagcgaagcgtgcacgccttgtctttctccacctttcgtctttggtcacagcgccatctcatggttagctgaaactttgaaagaggattcattcttcagaggcaaggaatcggagtcctatgtctttctcgcgccttgaaggttacttagctaaagctaagatagcgagaaacagtacttttcaggtccttccatgatctacattcgtccttgttctcggaggacccagactctatggttaatgatgaagaggggcctctattcgttcagcgcttgcgcatgcgaggaggttccgcatgcgcggtggagtgagcgaagcgcacgctgaggaggatcggcggccggtgagggggaagcaagtctggtctctgtgattgaagaagtcggctctgggctccagtgcgggaatcacacacatacctcagaatgccgggtctaagttgtagattttatcaacacaaatttcctgaggtggaagatgtagtgatggtgaatgtcagatccattgctgaaatgggggcttatgtcagcttgctggaatacaacaacattgaaggcatgattcttcttagtgaattatccagaaggcgtatccgttctatcaacaaactcatccgaattggcaggaatgagtgtgtggttgtcattagggtggacaaagaaaaaggatatattgatttgtcaaaaagaagagtttctccagaggaagcaatcaaatgtgaagacaaattcacaaaatccaaaactgtttatagcattcttcgtcatgttgctgaggtgttagaatacaccaaggatgagcagctggaaagcctattccagaggactgcctgggtctttgatgacaagtacaagagacctggatatggtgcctatgatgcatttaagcatgcagtctcagacccatctattttggatagtttagatttgaatgaagatgaacgggaagtactcattaataatattaataggcgcttgaccccacaggctgtcaaaattcgagcagatattgaagtggcttgttatggttatgaaggcattgatgctgtaaaagaagccctaagagcaggtttgaattgttctacagaaaacatgcccattaagattaatctaatagctcctcctcggtatgtaatgactacgacaaccctggagagaacagaaggcctttctgtcctcagtcaagctatggctgttatcaaagagaagattgaggaaaagaggggtgtgttcaatgttcaaatggagcccaaagtggtcacagatacagatgagactgaacttgcgaggcagatggagaggcttgaaagagaaaatgccgaagtggactcctaaatgtcagctgttgtcacacagtagctccaacactttgagcatttttaagggagtggcctcatttcactagagacaaatctttaagaatagttctgatgtctccagattggcacccctttctagttcaatgcctcacgagatttgccaggggcatccaaggcaaacaatcccaatctttctatataaaatgtattcaagcaaacatcaaataaatttctgggatatttaactataggcttcttccttcttgtcaccagttaaaagcattttaatactaagaccctaattcttttatctttattttagtcttgatgtggaactgtaggagcaggtgaataaaggatctctataacagatcctttcaaaagaagagttttagagaaaataaatttaactttaaccacagtgaaagttgacccttagcgggacaaagccttaaaatgcattgaaagaattagatcggttctgtgccttttatctatttgagattgatgacaacctgtgtgagagaatttatcacaccacgtccttattggaataataagctacttgccttgagtttataattcagggtggtaaagtatgtttttaaattttaaaaagcagctgcattttttatttagttggaatatcacccaattttttatttttattgctattaaaatatccactagatgccacctagagctccagttctttataacaaaacagggatctgtttgaacacttactgttgtttttttttttttacatgtttccatcatttctgtctttaagaactaattcgtacataataagtttcataggtaacacattatttgaagttacagctacagtagtcaggtgtagaaaatcttgagttgctttggtctgcttgtcttcataaatttattctcttatgatacttgaggtaccagttgtatttaattttattcattatccctagatagctattaagatacttagattagacctaacccaccatagtcaatccaagactagactactcaatattaaagggtctggaaaatagaagagtgtgttgggcaggtagtttgtaccatttatgaaggtttgttcctttgttaaatttagcagcctgtactagcttttgaaatccagaagttttaacttccagtggctggtttctgagagagtgccatgattgctagccagcattccatattgggaatatgtagaggagaacctggatgtacttaagagtggcatataattttcacttctgtctgttgaggcatcaaaaaaacaagtttagaaagctggcaacatgaagaatgcattcaaaatataacaggtgcttctttgttgtacgcagaggaattttttcttttgattttgtttactgaaatttgttatacttcaaaagccataacttgaaaaatactggtggcgtcgatggtgagtgatttttatcccacgtgggccttttgctcagttccatggcaattttgtaaattgaccctagccagagaatagatcagtatttcactgataccacgaggaaaagaacaaacaaaacttaaaagtattcatacaccttgctaacctaaaagacagcagggacaagatacatatgaggacaaggtatacacccagttctgaataacttgaagaacaggcttggcaaagaagtaagtttatccaaatcttgaatttctgccaggcatggtagctcatgcctgtaaccctggcacttaaggggccaaggcaggaggatcacttgaggccagtgagctgtgatcactccagtgcactcgagcctgggtgacagggcaagaccctgtctcaaaaaaaaaaaaaaaaaccaaaaatcttgaatctcccatcaaagccttttcattaaaaatacaatttcatctactccctactgtacctttcactgatgtcaagtggctatcaattcatatagctgaaaattagtgatagtttgggtctcatttatgcataaattaattgaaaatcagtaatggccaggaagaaatatgaatattcaaaccacttttttctttttttttttttttttttggcaaatggtgttatattgcctgggcaggtctcgaaatcctgggctcaagctatcctcctgcctctgcctctgtaagagtgtgagccaccatgccccacccaaaccatttttcatatcagttatagcaaaacaagacaaaccagttcttaataatgttcaaagttggacccatagagacatgctaagcactacatcatgctaagaagaacagttattactcagctgccatacttcagccattctacttttacaccaagaacaaaatggctagagatttttttaaaaatacaaatgccagtaccttgccgagacttgttcactgatttgccccaaccccaaggtaatggtcatctactttgcaacctatggagatcctgatagctcccatacaaagtgaggtacactgttgccaatttggaggcaggaagccatcaaactaaacgtagtttaattcagatgaacacctatcgatattcaaaaggcaaaacaaaaaaactaattccagggacattagaccttggtgaaatgccaaatggaaaatggtgctttaaaaggtagtctcttaccatataaggaataagtaaaacattagcttgtgatttctcattattcaggtcaatgttttagacacgactaacaagggacagttcaaactattaaagagaacaaatttttacttaagcactttgaggtatccactccccttaaatgtaagttatgtattttatctgttgattaaggggaggtccaagcatttgtacttggcaggaatgctggcaatagcttgtgccagattactgtataaacttgaaagtaataaaaatgttctttaaaagtaaaaaaaaaaaa

SEQ ID NO: 319777 - DNA, 3779 bp, Homo sapiens
cgggcgtagtttacagaggatggcacactcagactgtcaagacaacattcacaaaatccaaaactgtttatagcattcttcgtcatgttgctgaggtgttagaatacaccaaggatgagcagctggaaagcctattccagaggactgcctgggtctttgatgacaagtacaagagacctggatatggtgcctatgatgcatttaagcatgcagtctcagacccatctattttggatagtttagatttgaatgaagatgaacgggaagtactcattaataatattaataggcgcttgaccccacaggctgtcaaaattcgagcagatattgaagtggcttgttatggttatgaaggcattgatgctgtaaaagaagccctaagagcaggtttgaattgttctacagaaaacatgcccattaagattaatctaatagctcctcctcggtatgtaatgactacgacaaccctggagagaacagaaggcctttctgtcctcagtcaagctatggctgttatcaaagagaagattgaggaaaagaggggtgtgttcaatgttcaaatggagcccaaagtggtcacagatacagatgagactgaacttgcgaggcagatggagaggcttgaaagagaaaatgccgaagtggatggagatgatgatgcagaagaaatggaagccaaagctgaagattaactttgtgggaaacagagtccaatttaaggaacacagagcagcgcttcctggctgtaaatcctagacttgaaagttttccagtattgaaaacttcaaagctgaatattttttatttctaagtatttaaatgttctaacagatcagaacatgaaatgccctcctaaatgtcagctgttgtcacacagtagctccaacactttgagcatttttaagggagtggcctcatttcactagagacaaatctttaagaatagttctaaaattgggcttgtgatttccatttctgatgtctccagattggcacccctttctagttcaatgcctcacgagatttgccaggggcatccaaggcaaacaatcccaatctttctatataaaatgtattcaagcaaacatcaaataaatttctgggatatttaactataggcttcttccttcttgtcaccagttaaaagcattttaatactaagaccctaattcttttatctttattttagtcttgatgtggaactgtaggagcaggtgaataaaggatctctataacagatcctttcaaaagaagagttttagagaaaataaatttaactttaaccacagtgaaagttgacccttagcgggacaaagccttaaaatgcattgaaagaattagatcggttctgtgccttttatctatttgagattgatgacaacctgtgtgagagaatttatcacaccacgtccttattggaataataagctacttgccttgagtttataattcagggtggtaaagtatgtttttaaattttaaaaagcagctgcattttttatttagttggaatatcacccaattttttatttttattgctattaaaatatccactagatgccacctagagctccagttctttataacaaaacagggatctgtttgaacacttactgttgtttttttttttttacatgtttccatcatttctgtctttaagaactaattcgtacataataagtttcataggtaacacattatttgaagttacagctacagtagtcaggtgtagaaaatcttgagttgctttggtctgcttgtcttcataaatttattctcttatgatacttgaggtaccagttgtatttaattttattcattatccctagatagctattaagatacttagattagacctaacccaccatagtcaatccaagactagactactcaatattaaagggtctggaaaatagaagagtgtgttgggcaggtagtttgtaccatttatgaaggtttgttcctttgttaaatttagcagcctgtactagcttttgaaatccagaagttttaacttccagtggctggtttctgagagagtgccatgattgctagccagcattccatattgggaatatgtagaggagaacctggatgtacttaagagtggcatataattttcacttctgtctgttgaggcatcaaaaaaacaagtttagaaagctggcaacatgaagaatgcattcaaaatataacaggtgcttctttgttgtacgcagaggaattttttcttttgattttgtttactgaaatttgttatacttcaaaagccataacttgaaaaatactggtggcgtcgatggtgagtgatttttatcccacgtgggccttttgctcagttccatggcaattttgtaaattgaccctagccagagaatagatcagtatttcactgataccacgaggaaaagaacaaacaaaacttaaaagtattcatacaccttgctaacctaaaagacagcagggacaagatacatatgaggacaaggtatacacccagttctgaataacttgaagaacaggcttggcaaagaagtaagtttatccaaatcttgaatttctgccaggcatggtagctcatgcctgtaaccctggcacttaaggggccaaggcaggaggatcacttgaggccagtgagctgtgatcactccagtgcactcgagcctgggtgacagggcaagaccctgtctcaaaaaaaaaaaaaaaaaccaaaaatcttgaatctcccatcaaagccttttcattaaaaatacaatttcatctactccctactgtacctttcactgatgtcaagtggctatcaattcatatagctgaaaattagtgatagtttgggtctcatttatgcataaattaattgaaaatcagtaatggccaggaagaaatatgaatattcaaaccacttttttctttttttttttttttttttggcaaatggtgttatattgcctgggcaggtctcgaaatcctgggctcaagctatcctcctgcctctgcctctgtaagagtgtgagccaccatgccccacccaaaccatttttcatatcagttatagcaaaacaagacaaaccagttcttaataatgttcaaagttggacccatagagacatgctaagcactacatcatgctaagaagaacagttattactcagctgccatacttcagccattctacttttacaccaagaacaaaatggctagagatttttttaaaaatacaaatgccagtaccttgccgagacttgttcactgatttgccccaaccccaaggtaatggtcatctactttgcaacctatggagatcctgatagctcccatacaaagtgaggtacactgttgccaatttggaggcaggaagccatcaaactaaacgtagtttaattcagatgaacacctatcgatattcaaaaggcaaaacaaaaaaactaattccagggacattagaccttggtgaaatgccaaatggaaaatggtgctttaaaaggtagtctcttaccatataaggaataagtaaaacattagcttgtgatttctcattattcaggtcaatgttttagacacgactaacaagggacagttcaaactattaaagagaacaaatttttacttaagcactttgaggtatccactccccttaaatgtaagttatgtattttatctgttgattaaggggaggtccaagcatttgtacttggcaggaatgctggcaatagcttgtgccagattactgtataaacttgaaagtaataaaaatgttctttaaaagtaaaaaaaaaaaa

SEQ ID NO: 319778 - DNA, 3735 bp, Homo sapiens
ccaaaatactgagagcactttaaaaaagagtaacactttcttctatctgtacacatacaagttttatgaggtttgatcagaatctttcattagtgataaaattaactggatggctgtaactcagaaggattcttccatcagtttagttcagagacaaattatccattatactgatgataattgcagttagtttagccaccaaagatacacggaaatgataattctttctattcagtatcgcagtgaactgtttatactattgcattagatccctgtgttgatttggttaatacagcagattaataaaatctcaagcatcctaatagttgtgggttctgtaggtacattcataaatgaatttttgtctttctcttttagattaatctaatagctcctcctcggtatgtaatgactacgacaaccctggagagaacagaaggcctttctgtcctcagtcaagctatggctgttatcaaagagaagattgaggaaaagaggggtgtgttcaatgttcaaatggagcccaaagtggtcacagatacagatgagactgaacttgcgaggcagatggagaggcttgaaagagaaaatgccgaagtggatggagatgatgatgcagaagaaatggaagccaaagctgaagattaactttgtgggaaacagagtccaatttaaggaacacagagcagcgcttcctggctgtaaatcctagacttgaaagttttccagtattgaaaacttcaaagctgaatattttttatttctaagtatttaaatgttctaacagatcagaacatgaaatgccctcctaaatgtcagctgttgtcacacagtagctccaacactttgagcatttttaagggagtggcctcatttcactagagacaaatctttaagaatagttctaaaattgggcttgtgatttccatttctgatgtctccagattggcacccctttctagttcaatgcctcacgagatttgccaggggcatccaaggcaaacaatcccaatctttctatataaaatgtattcaagcaaacatcaaataaatttctgggatatttaactataggcttcttccttcttgtcaccagttaaaagcattttaatactaagaccctaattcttttatctttattttagtcttgatgtggaactgtaggagcaggtgaataaaggatctctataacagatcctttcaaaagaagagttttagagaaaataaatttaactttaaccacagtgaaagttgacccttagcgggacaaagccttaaaatgcattgaaagaattagatcggttctgtgccttttatctatttgagattgatgacaacctgtgtgagagaatttatcacaccacgtccttattggaataataagctacttgccttgagtttataattcagggtggtaaagtatgtttttaaattttaaaaagcagctgcattttttatttagttggaatatcacccaattttttatttttattgctattaaaatatccactagatgccacctagagctccagttctttataacaaaacagggatctgtttgaacacttactgttgtttttttttttttacatgtttccatcatttctgtctttaagaactaattcgtacataataagtttcataggtaacacattatttgaagttacagctacagtagtcaggtgtagaaaatcttgagttgctttggtctgcttgtcttcataaatttattctcttatgatacttgaggtaccagttgtatttaattttattcattatccctagatagctattaagatacttagattagacctaacccaccatagtcaatccaagactagactactcaatattaaagggtctggaaaatagaagagtgtgttgggcaggtagtttgtaccatttatgaaggtttgttcctttgttaaatttagcagcctgtactagcttttgaaatccagaagttttaacttccagtggctggtttctgagagagtgccatgattgctagccagcattccatattgggaatatgtagaggagaacctggatgtacttaagagtggcatataattttcacttctgtctgttgaggcatcaaaaaaacaagtttagaaagctggcaacatgaagaatgcattcaaaatataacaggtgcttctttgttgtacgcagaggaattttttcttttgattttgtttactgaaatttgttatacttcaaaagccataacttgaaaaatactggtggcgtcgatggtgagtgatttttatcccacgtgggccttttgctcagttccatggcaattttgtaaattgaccctagccagagaatagatcagtatttcactgataccacgaggaaaagaacaaacaaaacttaaaagtattcatacaccttgctaacctaaaagacagcagggacaagatacatatgaggacaaggtatacacccagttctgaataacttgaagaacaggcttggcaaagaagtaagtttatccaaatcttgaatttctgccaggcatggtagctcatgcctgtaaccctggcacttaaggggccaaggcaggaggatcacttgaggccagtgagctgtgatcactccagtgcactcgagcctgggtgacagggcaagaccctgtctcaaaaaaaaaaaaaaaaaccaaaaatcttgaatctcccatcaaagccttttcattaaaaatacaatttcatctactccctactgtacctttcactgatgtcaagtggctatcaattcatatagctgaaaattagtgatagtttgggtctcatttatgcataaattaattgaaaatcagtaatggccaggaagaaatatgaatattcaaaccacttttttctttttttttttttttttttggcaaatggtgttatattgcctgggcaggtctcgaaatcctgggctcaagctatcctcctgcctctgcctctgtaagagtgtgagccaccatgccccacccaaaccatttttcatatcagttatagcaaaacaagacaaaccagttcttaataatgttcaaagttggacccatagagacatgctaagcactacatcatgctaagaagaacagttattactcagctgccatacttcagccattctacttttacaccaagaacaaaatggctagagatttttttaaaaatacaaatgccagtaccttgccgagacttgttcactgatttgccccaaccccaaggtaatggtcatctactttgcaacctatggagatcctgatagctcccatacaaagtgaggtacactgttgccaatttggaggcaggaagccatcaaactaaacgtagtttaattcagatgaacacctatcgatattcaaaaggcaaaacaaaaaaactaattccagggacattagaccttggtgaaatgccaaatggaaaatggtgctttaaaaggtagtctcttaccatataaggaataagtaaaacattagcttgtgatttctcattattcaggtcaatgttttagacacgactaacaagggacagttcaaactattaaagagaacaaatttttacttaagcactttgaggtatccactccccttaaatgtaagttatgtattttatctgttgattaaggggaggtccaagcatttgtacttggcaggaatgctggcaatagcttgtgccagattactgtataaacttgaaagtaataaaaatgttctttaaaagtaaaaaaaaaaaa

SEQ ID NO: 319779 - DNA, 3302 bp, Homo sapiens
gagagaaaacattaggcagtaatagtattgaaattaaatttgtatagtatttactacttcagtttgaaattatacctctgcttccacagcccaaagtggtcacagatacagatgagactgaacttgcgaggcagatggagaggcttgaaagagaaaatgccgaagtggatggagatgatgatgcagaagaaatggaagccaaagctgaagattaactttgtgggaaacagagtccaatttaaggaacacagagcagcgcttcctggctgtaaatcctagacttgaaagttttccagtattgaaaacttcaaagctgaatattttttatttctaagtatttaaatgttctaacagatcagaacatgaaatgccctcctaaatgtcagctgttgtcacacagtagctccaacactttgagcatttttaagggagtggcctcatttcactagagacaaatctttaagaatagttctaaaattgggcttgtgatttccatttctgatgtctccagattggcacccctttctagttcaatgcctcacgagatttgccaggggcatccaaggcaaacaatcccaatctttctatataaaatgtattcaagcaaacatcaaataaatttctgggatatttaactataggcttcttccttcttgtcaccagttaaaagcattttaatactaagaccctaattcttttatctttattttagtcttgatgtggaactgtaggagcaggtgaataaaggatctctataacagatcctttcaaaagaagagttttagagaaaataaatttaactttaaccacagtgaaagttgacccttagcgggacaaagccttaaaatgcattgaaagaattagatcggttctgtgccttttatctatttgagattgatgacaacctgtgtgagagaatttatcacaccacgtccttattggaataataagctacttgccttgagtttataattcagggtggtaaagtatgtttttaaattttaaaaagcagctgcattttttatttagttggaatatcacccaattttttatttttattgctattaaaatatccactagatgccacctagagctccagttctttataacaaaacagggatctgtttgaacacttactgttgtttttttttttttacatgtttccatcatttctgtctttaagaactaattcgtacataataagtttcataggtaacacattatttgaagttacagctacagtagtcaggtgtagaaaatcttgagttgctttggtctgcttgtcttcataaatttattctcttatgatacttgaggtaccagttgtatttaattttattcattatccctagatagctattaagatacttagattagacctaacccaccatagtcaatccaagactagactactcaatattaaagggtctggaaaatagaagagtgtgttgggcaggtagtttgtaccatttatgaaggtttgttcctttgttaaatttagcagcctgtactagcttttgaaatccagaagttttaacttccagtggctggtttctgagagagtgccatgattgctagccagcattccatattgggaatatgtagaggagaacctggatgtacttaagagtggcatataattttcacttctgtctgttgaggcatcaaaaaaacaagtttagaaagctggcaacatgaagaatgcattcaaaatataacaggtgcttctttgttgtacgcagaggaattttttcttttgattttgtttactgaaatttgttatacttcaaaagccataacttgaaaaatactggtggcgtcgatggtgagtgatttttatcccacgtgggccttttgctcagttccatggcaattttgtaaattgaccctagccagagaatagatcagtatttcactgataccacgaggaaaagaacaaacaaaacttaaaagtattcatacaccttgctaacctaaaagacagcagggacaagatacatatgaggacaaggtatacacccagttctgaataacttgaagaacaggcttggcaaagaagtaagtttatccaaatcttgaatttctgccaggcatggtagctcatgcctgtaaccctggcacttaaggggccaaggcaggaggatcacttgaggccagtgagctgtgatcactccagtgcactcgagcctgggtgacagggcaagaccctgtctcaaaaaaaaaaaaaaaaaccaaaaatcttgaatctcccatcaaagccttttcattaaaaatacaatttcatctactccctactgtacctttcactgatgtcaagtggctatcaattcatatagctgaaaattagtgatagtttgggtctcatttatgcataaattaattgaaaatcagtaatggccaggaagaaatatgaatattcaaaccacttttttctttttttttttttttttttggcaaatggtgttatattgcctgggcaggtctcgaaatcctgggctcaagctatcctcctgcctctgcctctgtaagagtgtgagccaccatgccccacccaaaccatttttcatatcagttatagcaaaacaagacaaaccagttcttaataatgttcaaagttggacccatagagacatgctaagcactacatcatgctaagaagaacagttattactcagctgccatacttcagccattctacttttacaccaagaacaaaatggctagagatttttttaaaaatacaaatgccagtaccttgccgagacttgttcactgatttgccccaaccccaaggtaatggtcatctactttgcaacctatggagatcctgatagctcccatacaaagtgaggtacactgttgccaatttggaggcaggaagccatcaaactaaacgtagtttaattcagatgaacacctatcgatattcaaaaggcaaaacaaaaaaactaattccagggacattagaccttggtgaaatgccaaatggaaaatggtgctttaaaaggtagtctcttaccatataaggaataagtaaaacattagcttgtgatttctcattattcaggtcaatgttttagacacgactaacaagggacagttcaaactattaaagagaacaaatttttacttaagcactttgaggtatccactccccttaaatgtaagttatgtattttatctgttgattaaggggaggtccaagcatttgtacttggcaggaatgctggcaatagcttgtgccagattactgtataaacttgaaagtaataaaaatgttctttaaaagtaaaaaaaaaaaa

SEQ ID NO: 319780 - DNA, 3143 bp, Homo sapiens
tcccaagatgagaaactggttggcacacgccagctaaataatttttagtgaattaactttgtgggaaacagagtccaatttaaggaacacagagcagcgcttcctggctgtaaatcctagacttgaaagttttccagtattgaaaacttcaaagctgaatattttttatttctaagtatttaaatgttctaacagatcagaacatgaaatgccctcctaaatgtcagctgttgtcacacagtagctccaacactttgagcatttttaagggagtggcctcatttcactagagacaaatctttaagaatagttctaaaattgggcttgtgatttccatttctgatgtctccagattggcacccctttctagttcaatgcctcacgagatttgccaggggcatccaaggcaaacaatcccaatctttctatataaaatgtattcaagcaaacatcaaataaatttctgggatatttaactataggcttcttccttcttgtcaccagttaaaagcattttaatactaagaccctaattcttttatctttattttagtcttgatgtggaactgtaggagcaggtgaataaaggatctctataacagatcctttcaaaagaagagttttagagaaaataaatttaactttaaccacagtgaaagttgacccttagcgggacaaagccttaaaatgcattgaaagaattagatcggttctgtgccttttatctatttgagattgatgacaacctgtgtgagagaatttatcacaccacgtccttattggaataataagctacttgccttgagtttataattcagggtggtaaagtatgtttttaaattttaaaaagcagctgcattttttatttagttggaatatcacccaattttttatttttattgctattaaaatatccactagatgccacctagagctccagttctttataacaaaacagggatctgtttgaacacttactgttgtttttttttttttacatgtttccatcatttctgtctttaagaactaattcgtacataataagtttcataggtaacacattatttgaagttacagctacagtagtcaggtgtagaaaatcttgagttgctttggtctgcttgtcttcataaatttattctcttatgatacttgaggtaccagttgtatttaattttattcattatccctagatagctattaagatacttagattagacctaacccaccatagtcaatccaagactagactactcaatattaaagggtctggaaaatagaagagtgtgttgggcaggtagtttgtaccatttatgaaggtttgttcctttgttaaatttagcagcctgtactagcttttgaaatccagaagttttaacttccagtggctggtttctgagagagtgccatgattgctagccagcattccatattgggaatatgtagaggagaacctggatgtacttaagagtggcatataattttcacttctgtctgttgaggcatcaaaaaaacaagtttagaaagctggcaacatgaagaatgcattcaaaatataacaggtgcttctttgttgtacgcagaggaattttttcttttgattttgtttactgaaatttgttatacttcaaaagccataacttgaaaaatactggtggcgtcgatggtgagtgatttttatcccacgtgggccttttgctcagttccatggcaattttgtaaattgaccctagccagagaatagatcagtatttcactgataccacgaggaaaagaacaaacaaaacttaaaagtattcatacaccttgctaacctaaaagacagcagggacaagatacatatgaggacaaggtatacacccagttctgaataacttgaagaacaggcttggcaaagaagtaagtttatccaaatcttgaatttctgccaggcatggtagctcatgcctgtaaccctggcacttaaggggccaaggcaggaggatcacttgaggccagtgagctgtgatcactccagtgcactcgagcctgggtgacagggcaagaccctgtctcaaaaaaaaaaaaaaaaaccaaaaatcttgaatctcccatcaaagccttttcattaaaaatacaatttcatctactccctactgtacctttcactgatgtcaagtggctatcaattcatatagctgaaaattagtgatagtttgggtctcatttatgcataaattaattgaaaatcagtaatggccaggaagaaatatgaatattcaaaccacttttttctttttttttttttttttttggcaaatggtgttatattgcctgggcaggtctcgaaatcctgggctcaagctatcctcctgcctctgcctctgtaagagtgtgagccaccatgccccacccaaaccatttttcatatcagttatagcaaaacaagacaaaccagttcttaataatgttcaaagttggacccatagagacatgctaagcactacatcatgctaagaagaacagttattactcagctgccatacttcagccattctacttttacaccaagaacaaaatggctagagatttttttaaaaatacaaatgccagtaccttgccgagacttgttcactgatttgccccaaccccaaggtaatggtcatctactttgcaacctatggagatcctgatagctcccatacaaagtgaggtacactgttgccaatttggaggcaggaagccatcaaactaaacgtagtttaattcagatgaacacctatcgatattcaaaaggcaaaacaaaaaaactaattccagggacattagaccttggtgaaatgccaaatggaaaatggtgctttaaaaggtagtctcttaccatataaggaataagtaaaacattagcttgtgatttctcattattcaggtcaatgttttagacacgactaacaagggacagttcaaactattaaagagaacaaatttttacttaagcactttgaggtatccactccccttaaatgtaagttatgtattttatctgttgattaaggggaggtccaagcatttgtacttggcaggaatgctggcaatagcttgtgccagattactgtataaacttgaaagtaataaaaatgttctttaaaagtaaaaaaaaaaaa

SEQ ID NO: 319781 - DNA, 1704 bp, Homo sapiens
ctaggagcgaagcgtgcacgccttgtctttctccacctttcgtctttggtcacagcgccatctcatggttagctgaaactttgaaagaggattcattcttcagaggcaaggaatcggagtcctatgtctttctcgcgccttgaaggttacttagctaaagctaagatagcgagaaacagtacttttcaggtccttccatgatctacattcgtccttgttctcggaggacccagactctatggttaatgatgaagaggggcctctattcgttcagcgcttgcgcatgcgaggaggttccgcatgcgcggtggagtgagcgaagcgcacgctgaggaggatcggcggccggtgagggggaagcaagtctggtctctgtgattgaagaagtcggctctgggctccagtgcgggaatcacacacatacctcagaatgccgggtctaagttgtagattttatcaacacaaatttcctgaggtggaagatgtagtgatggtgaatgtcagatccattgctgaaatgggggcttatgtcagcttgctggaatacaacaacattgaaggcatgattcttcttagtgaattatccagaaggcgtatccgttctatcaacaaactcatccgaattggcaggaatgagtgtgtggttgtcattagggtggacaaagaaaaaggatatattgatttgtcaaaaagaagagtttctccagaggaagcaatcaaatgtgaagacaaattcacaaaatccaaaactgtttatagcattcttcgtcatgttgctgaggtgttagaatacaccaaggatgagcagctggaaagcctattccagaggactgcctgggtctttgatgacaagtacaagagacctggatatggtgcctatgatgcatttaagcatgcagtctcagacccatctattttggatagtttagatttgaatgaagatgaacgggaagtactcattaataatattaataggcgcttgaccccacaggctgtcaaaattcgagcagatattgaagtggcttgttatggttatgaaggcattgatgctgtaaaagaagccctaagagcaggtttgaattgttctacagaaaacatgcccattaagattaatctaatagctcctcctcggtatgtaatgactacgacaaccctggagagaacagaaggcctttctgtcctcagtcaagctatggctgttatcaaagagaagattgaggaaaagaggggtgtgttcaatgttcaaatggagcccaaagtggtcacagatacagatgagactgaacttgcgaggcagatggagaggcttgaaagagaaaatgccgaagtggactggctgtaaatcctagacttgaaagttttccagtattgaaaacttcaaagctgaatattttttatttctaagtatttaaatgttctaacagatcagaacatgaaatgccctcctaaatgtcagctgttgtcacacagtagctccaacactttgagcatttttaagggagtggcctcatttcactagagacaaatctttaagaatagttctaaaattgggcttgtgatttccatttctgatgtctccagattggcacccctttctagttcaatgcctcacgagatttgccaggggcatccaaggcaaacaatcccaatctttctatataaaatgtattcaagcaaacatcaaataaatttctgggatattta

SEQ ID NO: 319782 - DNA, 2641 bp, Homo sapiens
cgagtatgggctatcgtcgaccacggcctcgcttttatcttagagtctcagtcttgatgtggaactgtaggagcaggtgaataaaggatctctataacagatcctttcaaaagaagagttttagagaaaataaatttaactttaaccacagtgaaagttgacccttagcgggacaaagccttaaaatgcattgaaagaattagatcggttctgtgccttttatctatttgagattgatgacaacctgtgtgagagaatttatcacaccacgtccttattggaataataagctacttgccttgagtttataattcagggtggtaaagtatgtttttaaattttaaaaagcagctgcattttttatttagttggaatatcacccaattttttatttttattgctattaaaatatccactagatgccacctagagctccagttctttataacaaaacagggatctgtttgaacacttactgttgtttttttttttttacatgtttccatcatttctgtctttaagaactaattcgtacataataagtttcataggtaacacattatttgaagttacagctacagtagtcaggtgtagaaaatcttgagttgctttggtctgcttgtcttcataaatttattctcttatgatacttgaggtaccagttgtatttaattttattcattatccctagatagctattaagatacttagattagacctaacccaccatagtcaatccaagactagactactcaatattaaagggtctggaaaatagaagagtgtgttgggcaggtagtttgtaccatttatgaaggtttgttcctttgttaaatttagcagcctgtactagcttttgaaatccagaagttttaacttccagtggctggtttctgagagagtgccatgattgctagccagcattccatattgggaatatgtagaggagaacctggatgtacttaagagtggcatataattttcacttctgtctgttgaggcatcaaaaaaacaagtttagaaagctggcaacatgaagaatgcattcaaaatataacaggtgcttctttgttgtacgcagaggaattttttcttttgattttgtttactgaaatttgttatacttcaaaagccataacttgaaaaatactggtggcgtcgatggtgagtgatttttatcccacgtgggccttttgctcagttccatggcaattttgtaaattgaccctagccagagaatagatcagtatttcactgataccacgaggaaaagaacaaacaaaacttaaaagtattcatacaccttgctaacctaaaagacagcagggacaagatacatatgaggacaaggtatacacccagttctgaataacttgaagaacaggcttggcaaagaagtaagtttatccaaatcttgaatttctgccaggcatggtagctcatgcctgtaaccctggcacttaaggggccaaggcaggaggatcacttgaggccagtgagctgtgatcactccagtgcactcgagcctgggtgacagggcaagaccctgtctcaaaaaaaaaaaaaaaaaccaaaaatcttgaatctcccatcaaagccttttcattaaaaatacaatttcatctactccctactgtacctttcactgatgtcaagtggctatcaattcatatagctgaaaattagtgatagtttgggtctcatttatgcataaattaattgaaaatcagtaatggccaggaagaaatatgaatattcaaaccacttttttctttttttttttttttttttggcaaatggtgttatattgcctgggcaggtctcgaaatcctgggctcaagctatcctcctgcctctgcctctgtaagagtgtgagccaccatgccccacccaaaccatttttcatatcagttatagcaaaacaagacaaaccagttcttaataatgttcaaagttggacccatagagacatgctaagcactacatcatgctaagaagaacagttattactcagctgccatacttcagccattctacttttacaccaagaacaaaatggctagagatttttttaaaaatacaaatgccagtaccttgccgagacttgttcactgatttgccccaaccccaaggtaatggtcatctactttgcaacctatggagatcctgatagctcccatacaaagtgaggtacactgttgccaatttggaggcaggaagccatcaaactaaacgtagtttaattcagatgaacacctatcgatattcaaaaggcaaaacaaaaaaactaattccagggacattagaccttggtgaaatgccaaatggaaaatggtgctttaaaaggtagtctcttaccatataaggaataagtaaaacattagcttgtgatttctcattattcaggtcaatgttttagacacgactaacaagggacagttcaaactattaaagagaacaaatttttacttaagcactttgaggtatccactccccttaaatgtaagttatgtattttatctgttgattaaggggaggtccaagcatttgtacttggcaggaatgctggcaatagcttgtgccagattactgtataaacttgaaagtaataaaaatgttctttaaaagtaaaaaaaaaaaa

SEQ ID NO: 319783 - DNA, 1088 bp, Homo sapiens
ctaggagcgaagcgtgcacgccttgtctttctccacctttcgtctttggtcacagcgccatctcatggttagctgaaactttgaaagaggattcattcttcagaggcaaggaatcggagtcctatgtctttctcgcgccttgaaggttacttagctaaagctaagatagcgagaaacagtacttttcaggtccttccatgatctacattcgtccttgttctcggaggacccagactctatggttaatgatgaagaggggcctctattcgttcagcgcttgcgcatgcgaggaggttccgcatgcgcggtggagtgagcgaagcgcacgctgaggaggatcggcggccggtgagggggaagcaagtctggtctctgtgattgaagaagtcggctctgggctccagtgcgggaatcacacacatacctcagaatgccgggtctaagttgtagattttatcaacacaaatttcctgaggtggaagatgtagtgatggtgaatgtcagatccattgctgaaatgggggcttatgtcagcttgctggaatacaacaacattgaaggcatgattcttcttagtgaattatccagaaggcgtatccgttctatcaacaaactcatccgaattggcaggaatgagtgtgtggttgtcattagggtggacaaagaaaaaggatatattgatttgtcaaaaagaagagtttctccagaggaagcaatcaaatgtgaagacaaattcacaaaatccaaaactgtttatagcattcttcgtcatgttgctgaggtgttagaatacaccaaggatgagcagctggaaagcctattccagaggactgcctgggtctttgatgacaagtacaagagacctggatatggtgcctatgatgcatttaagcatgcagtctcagacccatctattttggatagtttagatttgaatgaagatgaacgggaagtactcattaataatattaataggcgcttgaccccacaggctgtcaaaattcgagcagaacgcgcctaatacgcagacgcgcctatacgcagacgcgcctataccgacgcgcctataccgacgcgccttatgtccg

SEQ ID NO: 319784 - DNA, 642 bp, Homo sapiens
ccaaaatactgagagcactttaaaaaagagtaacactttcttctatctgtacacatacaagttttatgaggtttgatcagaatctttcattagtgataaaattaactggatggctgtaactcagaaggattcttccatcagtttagttcagagacaaattatccattatactgatgataattgcagttagtttagccaccaaagatacacggaaatgataattctttctattcagtatcgcagtgaactgtttatactattgcattagatccctgtgttgatttggttaatacagcagattaataaaatctcaagcatcctaatagttgtgggttctgtaggtacattcataaatgaatttttgtctttctcttttagattaatctaatagctcctcctcggtatgtaatgactacgacaaccctggagagaacagaaggcctttctgtcctcagtcaagctatggctgttatcaaagagaagattgaggaaaagaggggtgtgttcaatgttcaaatggaggtgagatcaatagattcatttttaataatgactcaggaggttcctaaaaggagttcttgtaggtaaataagagctgtcggccttggaatgtcatattgtaggatggtcattcaggccttt

SEQ ID NO: 319785 - DNA, 789 bp, Homo sapiens
  misc_feature (10)..(10): n is a, c, g, or t
  misc_feature (27)..(28): n is a, c, g, or t
  misc_feature (708)..(708): n is a, c, g, or t
  misc_feature (770)..(770): n is a, c, g, or t
  misc_feature (774)..(774): n is a, c, g, or t
ttgtgttggncccggaattcggccctnntggccgggaagcttggataacgcagagtggcttttggcgggggaagcgcacgctgaggaggatcggcggccggtgagggggaagcaagtctggtctctgtgattgaagaagtcggctctgggctccagtgcgggaatcacacacatacctcagaatgccgggtctaagttgtagattttggcactatatttaattggaaggtaaaatattgtacatgtgatccagagtaaatgagaagtctctatctgagctggtcagttactggagtacatgttactaatctgggtttaaagtttacttcattatctgctagtgtcatccacagcagttcatcctcatccacactaagccatcctgttagcttttaaaggaagttaatttaattaacattaatatactctatgggctccctctcccacctgtctgcatagaaaggcagaattagacatagcatgctttggaaaagcaaataggaattgttgggaatgatttaatcttgttgttgttgttgttgttgttcacttgtggttctacattcctggtgaatgatgaatgttgctgtcaaagggctgccccctaccttataagggttgctgggcatttgaaggcaggaagatttttaaagatagattgaggttggtttaaaattattcctgtaaaccaacaataaagcaaagaanaagttcatttttgttaataacactggtttcaaataatgatgttagacttaacctaatttatnaacnagaaattatatctcc

SEQ ID NO: 319786 - DNA, 4217 bp, Homo sapiens
  misc_feature (10)..(10): n is a, c, g, or t
  misc_feature (27)..(28): n is a, c, g, or t
ttgtgttggncccggaattcggccctnntggccgggaagcttggataacgcagagtggcttttggcgggggaagcgcacgctgaggaggatcggcggccggtgagggggaagcaagtctggtctctgtgattgaagaagtcggctctgggctccagtgcgggaatcacacacatacctcagaatgccgggtctaagttgtagattttatcaacacaaatttcctgaggtggaagatgtagtgatggtgaatgtcagatccattgctgaaatgggggcttatgtcagcttgctggaatacaacaacattgaaggcatgattcttcttagtgaattatccagaaggcgtatccgttctatcaacaaactcatccgaattggcaggaatgagtgtgtggttgtcattagggtggacaaagaaaaaggatatattgatttgtcaaaaagaagagtttctccagaggaagcaatcaaatgtgaagacaaattcacaaaatccaaaactgtttatagcattcttcgtcatgttgctgaggtgttagaatacaccaaggatgagcagctggaaagcctattccagaggactgcctgggtctttgatgacaagtacaagagacctggatatggtgcctatgatgcatttaagcatgcagtctcagacccatctattttggatagtttagatttgaatgaagatgaacgggaagtactcattaataatattaataggcgcttgaccccacaggctgtcaaaattcgagcagatattgaagtggcttgttatggttatgaaggcattgatgctgtaaaagaagccctaagagcaggtttgaattgttctacagaaaacatgcccattaagattaatctaatagctcctcctcggtatgtaatgactacgacaaccctggagagaacagaaggcctttctgtcctcagtcaagctatggctgttatcaaagagaagattgaggaaaagaggggtgtgttcaatgttcaaatggagcccaaagtggtcacagatacagatgagactgaacttgcgaggcagatggagaggcttgaaagagaaaatgccgaagtggatggagatgatgatgcagaagaaatggaagccaaagctgaagattaactttgtgggaaacagagtccaatttaaggaacacagagcagcgcttcctggctgtaaatcctagacttgaaagttttccagtattgaaaacttcaaagctgaatattttttatttctaagtatttaaatgttctaacagatcagaacatgaaatgccctcctaaatgtcagctgttgtcacacagtagctccaacactttgagcatttttaagggagtggcctcatttcactagagacaaatctttaagaatagttctaaaattgggcttgtgatttccatttctgatgtctccagattggcacccctttctagttcaatgcctcacgagatttgccaggggcatccaaggcaaacaatcccaatctttctatataaaatgtattcaagcaaacatcaaataaatttctgggatatttaactataggcttcttccttcttgtcaccagttaaaagcattttaatactaagaccctaattcttttatctttattttagtcttgatgtggaactgtaggagcaggtgaataaaggatctctataacagatcctttcaaaagaagagttttagagaaaataaatttaactttaaccacagtgaaagttgacccttagcgggacaaagccttaaaatgcattgaaagaattagatcggttctgtgccttttatctatttgagattgatgacaacctgtgtgagagaatttatcacaccacgtccttattggaataataagctacttgccttgagtttataattcagggtggtaaagtatgtttttaaattttaaaaagcagctgcattttttatttagttggaatatcacccaattttttatttttattgctattaaaatatccactagatgccacctagagctccagttctttataacaaaacagggatctgtttgaacacttactgttgtttttttttttttacatgtttccatcatttctgtctttaagaactaattcgtacataataagtttcataggtaacacattatttgaagttacagctacagtagtcaggtgtagaaaatcttgagttgctttggtctgcttgtcttcataaatttattctcttatgatacttgaggtaccagttgtatttaattttattcattatccctagatagctattaagatacttagattagacctaacccaccatagtcaatccaagactagactactcaatattaaagggtctggaaaatagaagagtgtgttgggcaggtagtttgtaccatttatgaaggtttgttcctttgttaaatttagcagcctgtactagcttttgaaatccagaagttttaacttccagtggctggtttctgagagagtgccatgattgctagccagcattccatattgggaatatgtagaggagaacctggatgtacttaagagtggcatataattttcacttctgtctgttgaggcatcaaaaaaacaagtttagaaagctggcaacatgaagaatgcattcaaaatataacaggtgcttctttgttgtacgcagaggaattttttcttttgattttgtttactgaaatttgttatacttcaaaagccataacttgaaaaatactggtggcgtcgatggtgagtgatttttatcccacgtgggccttttgctcagttccatggcaattttgtaaattgaccctagccagagaatagatcagtatttcactgataccacgaggaaaagaacaaacaaaacttaaaagtattcatacaccttgctaacctaaaagacagcagggacaagatacatatgaggacaaggtatacacccagttctgaataacttgaagaacaggcttggcaaagaagtaagtttatccaaatcttgaatttctgccaggcatggtagctcatgcctgtaaccctggcacttaaggggccaaggcaggaggatcacttgaggccagtgagctgtgatcactccagtgcactcgagcctgggtgacagggcaagaccctgtctcaaaaaaaaaaaaaaaaaccaaaaatcttgaatctcccatcaaagccttttcattaaaaatacaatttcatctactccctactgtacctttcactgatgtcaagtggctatcaattcatatagctgaaaattagtgatagtttgggtctcatttatgcataaattaattgaaaatcagtaatggccaggaagaaatatgaatattcaaaccacttttttctttttttttttttttttttggcaaatggtgttatattgcctgggcaggtctcgaaatcctgggctcaagctatcctcctgcctctgcctctgtaagagtgtgagccaccatgccccacccaaaccatttttcatatcagttatagcaaaacaagacaaaccagttcttaataatgttcaaagttggacccatagagacatgctaagcactacatcatgctaagaagaacagttattactcagctgccatacttcagccattctacttttacaccaagaacaaaatggctagagatttttttaaaaatacaaatgccagtaccttgccgagacttgttcactgatttgccccaaccccaaggtaatggtcatctactttgcaacctatggagatcctgatagctcccatacaaagtgaggtacactgttgccaatttggaggcaggaagccatcaaactaaacgtagtttaattcagatgaacacctatcgatattcaaaaggcaaaacaaaaaaactaattccagggacattagaccttggtgaaatgccaaatggaaaatggtgctttaaaaggtagtctcttaccatataaggaataagtaaaacattagcttgtgatttctcattattcaggtcaatgttttagacacgactaacaagggacagttcaaactattaaagagaacaaatttttacttaagcactttgaggtatccactccccttaaatgtaagttatgtattttatctgttgattaaggggaggtccaagcatttgtacttggcaggaatgctggcaatagcttgtgccagattactgtataaacttgaaagtaataaaaatgttctttaaaagtaaaaaaaaaaaa

SEQ ID NO: 319787 - DNA, 3911 bp, Homo sapiens
ctaggagcgaagcgtgcacgccttgtctttctccacctttcgtctttggtcacagcgccatctcatggttagctgaaactttgaaagaggattcattcttcagaggcaaggaatcggagtcctatgtctttctcgcgccttgaaggttacttagctaaagctaagatagcgagaaacagtacttttcaggtccttccatgatctacattcgtccttgttctcggaggacccagactctatggttaatgatgaagaggggcctctattcgttcagcgcttgcgcatgcgaggaggttccgcatgcgcggtggagtgagcgaagcgcacgctgaggaggatcggcggccggtgagggggaagcaagtctggtctctgtgattgaagaagtcggctctgggctccagtgcgggaatcacacacatacctcagaatgccgggtctaagttgtagattttatcaacacaaatttcctgaggtggaagatgtagtgatggtgaatgtcagatccattgctgaaatgggggcttatgtcagcttgctggaatacaacaacattgaaggcatgattcttcttagtgaattatccagaaggcgtatccgttctatcaacaaactcatccgaattggcaggaatgagtgtgtggttgtcattagggtggacaaagaaaaaggatatattgatttgtcaaaaagaagagtttctccagaggaagcaatcaaatgtgaagacaaattcacaaaatccaaaactgtttatagcattcttcgtcatgttgctgaggtgttagaatacaccaaggatgagcagctggaaagcctattccagaggactgcctgggtctttgatgacaagtacaagagacctggatatggtgcctatgatgcatttaagcatgcagtctcagacccatctattttggatagtttagatttgaatgaagatgaacgggaagtactcattaataatattaataggcgcttgaccccacaggctgtcaaaattcgagcagatattgaagtggcttgttatggttatgaaggcattgatgctgtaaaagaagccctaagagcaggtttgaattgttctacagaaaacatgcccattaagattaatctaatagctcctcctcggtatgtaatgactacgacaaccctggagagaacagaaggcctttctgtcctcagtcaagctatggctgttatcaaagagaagattgaggaaaagaggggtgtgttcaatgttcaaatggagcccaaagtggtcacagatacagatgagactgaacttgcgaggcagatggagaggcttgaaagagaaaatgccgaagtggatggagatgatgatgcagaagaaatggaagccaaagctgaagattaactttgtgggaaacagagtccaatttaaggaacacagagcagcgcttcctggctgtaaatcctagacttgaaagttttccagtattgaaaacttcaaagctgaatattttttatttctaagtatttaaatgttctaacagatcagaacatgaaatgccctcctaaatgtcagctgttgtcacacagtagctccaacactttgagcatttttaagggagtggcctcatttcactagagacaaatctttaagaatagttctaaaattgggcttgtgatttccatttctgatgtctccagattggcacccctttctagttcaatgcctcacgagatttgccaggggcatccaaggcaaacaatcccaatctttctatataaaatgtattcaagcaaacatcaaataaatttctgggatatttaactataggcttcttccttcttgtcaccagttaaaagcattttaatactaagaccctaattcttttatctttattttagtcttgatgtggaactgtaggagcaggtgaataaaggatctctataacagatcctttcaaaagaagagttttagagaaaataaatttaactttaaccacagtgaaagttgacccttagcgggacaaagccttaaaatgcattgaaagaattagatcggttctgtgccttttatctatttgagattgatgacaacctgtgtgagagaatttatcacaccacgtccttattggaataataagctacttgccttgagtttataattcagggtggtaaagtatgtttttaaattttaaaaagcagctgcattttttatttagttggaatatcacccaattttttatttttattgctattaaaatatccactagatgccacctagagctccagttctttataacaaaacagggatctgtttgaacacttactgttgtttttttttttttacatgtttccatcatttctgtctttaagaactaattcgtacataataagtttcataggtaacacattatattctcttatgatacttgaggtaccagttgtatttaattttattcattatccctagatagctattaagatacttagattagacctaacccaccatagtcaatccaagactagactactcaatattaaagggtctggaaaatagaagagtgtgttgggcaggtagtttgtaccatttatgaaggtttgttcctttgttaaatttagcagcctgtactagcttttgaaatccagaagttttaacttccagtggctggtttctgagagagtgccatgattgctagccagcattccatattgggaatatgtagaggagaacctggatgtacttaagagtggcatataattttcacttctgtctgttgaggcatcaaaaaaacaagtttagaaagctggcaacatgaagaatgcattcaaaatataacaggtgcttctttgttgtacgcagaggaattttttcttttgattttgtttactgaaatttgttatacttcaaaagccataacttgaaaaatactggtggcgtcgatggtgagtgatttttatcccacgtgggccttttgctcagttccatggcaattttgtaaattgaccctagccagagaatagatcagtatttcactgataccacgaggaaaagaacaaacaaaacttaaaagtattcatacaccttgctaacctaaaagacagcagggacaagatacatatgaggacaaggtatacacccagttctgaataacttgaagaacaggcttggcaaagaagtaagtttatccaaatcttgaatttctgccaggcatggtagctcatgcctgtaaccctggcacttaaggggccaaggcaggaggatcacttgaggccagtgagctgtgatcactccagtgcactcgagcctgggtgacagggcaagaccctgtctcaaaaaaaaaaaaaaaaaccaaaaatcttgaatctcccatcaaagccttttcattaaaaatacaatttcatctactccctactgtacctttcactgatgtcaagtggctatcaattcatatagctgaaaattagtgatagtttgggtctcatttatgcataaattaattgaaaatcagtaatggccaggaagaaatatgaatattcaaaccacttttttctttttttttttttttttttggcaaatggtgttatattgcctgggcaggtctcgaaatcctgggctcaagctatcctcctgcctctgcctctgtaagagtgtgagccaccatgccccacccaaaccatttttcatatcagttatagcaaaacaagacaaaccagttcttaataatgttcaaagttggacccatagagacatgctaagcactacatcatgctaagaagaacagttattactcagctgccatacttcagccattctacttttacaccaagaacaaaatggctagagatttttttaaaaatacaaatgccagtaccttgccgagacttgttcactgattgcctaattgcctaaatgaagtgtacacaggaacagctatgca

SEQ ID NO: 319788 - DNA, 1797 bp, Homo sapiens
ctaggagcgaagcgtgcacgccttgtctttctccacctttcgtctttggtcacagcgccatctcatggttagctgaaactttgaaagaggattcattcttcagaggcaaggaatcggagtcctatgtctttctcgcgccttgaaggttacttagctaaagctaagatagcgagaaacagtacttttcaggtccttccatgatctacattcgtccttgttctcggaggacccagactctatggttaatgatgaagaggggcctctattcgttcagcgcttgcgcatgcgaggaggttccgcatgcgcggtggagtgagcgaagcgcacgctgaggaggatcggcggccggtgagggggaagcaagtctggtctctgtgattgaagaagtcggctctgggctccagtgcgggaatcacacacatacctcagaatgccgggtctaagttgtagattttatcaacacaaatttcctgaggtggaagatgtagtgatggtgaatgtcagatccattgctgaaatgggggcttatgtcagcttgctggaatacaacaacattgaaggcatgattcttcttagtgaattatccagaaggcgtatccgttctatcaacaaactcatccgaattggcaggaatgagtgtgtggttgtcattagggtggacaaagaaaaaggatatattgatttgtcaaaaagaagagtttctccagaggaagcaatcaaatgtgaagacaaattcacaaaatccaaaactgtttatagcattcttcgtcatgttgctgaggtgttagaatacaccaaggatgagcagctggaaagcctattccagaggactgcctgggtctttgatgacaagtacaagagacctggatatggtgcctatgatgcatttaagcatgcagtctcagacccatctattttggatagtttagatttgaatgaagatgaacgggaagtactcattaataatattaataggcgcttgaccccacaggctgtcaaaattcgagcagatattgaagtggcttgttatggttatgaaggcattgatgctgtaaaagaagccctaagagcaggtttgaattgttctacagaaaacatgcccattaagattaatctaatagctcctcctcggtatgtaatgactacgacaaccctggagagaacagaaggcctttctgtcctcagtcaagctatggctgttatcaaagagaagattgaggaaaagaggggtgtgttcaatgttcaaatggagcccaaagtggtcacagatacagatgagactgaacttgcgaggcagatggagaggcttgaaagagaaaatgccgaagtggatggagatgatgatgcagaagaaatggaagccaaagctgaagattaactttgtgggaaacagagtccaatttaaggaacacagagcagcgcttcctggctgtaaatcctagacttgaaagttttccagtattgaaaacttcaaagctgaatattttttatttctaagtatttaaatgttctaacagatcagaacatgaaatgccctcctaaatgtcagctgttgtcacacagtagctccaacactttgagcatttttaagggagtggcctcatttcactagagacaaatctttaagaatagttctaaaattgggcttgtgatttccatttctgatgtctccagattggcacccctttctagttcaatgcctcacgagatttgccaggggcatccaaggcaaacaatcccaatctttctatataaaatgtattcaagcaaacatcaaataaatttctgggatattta

SEQ ID NO: 319789 - DNA, 1710 bp, Homo sapiens
ctaggagcgaagcgtgcacgccttgtctttctccacctttcgtctttggtcacagcgccatctcatggttagctgaaactttgaaagaggattcattcttcagaggcaaggaatcggagtcctatgtctttctcgcgccttgaaggttacttagctaaagctaagatagcgagaaacagtacttttcaggtccttccatgatctacattcgtccttgttctcggaggacccagactctatggttaatgatgaagaggggcctctattcgttcagcgcttgcgcatgcgaggaggttccgcatgcgcggtggagtgagcgaagcgcacgctgaggaggatcggcggccggtgagggggaagcaagtctggtctctgtgattgaagaagtcggctctgggctccagtgcgggaatcacacacatacctcagaatgccgggtctaagttgtagattttatcaacacaaatttcctgaggtggaagatgtagtgatggtgaatgtcagatccattgctgaaatgggggcttatgtcagcttgctggaatacaacaacattgaaggcatgattcttcttagtgaattatccagaaggcgtatccgttctatcaacaaactcatccgaattggcaggaatgagtgtgtggttgtcattagggtggacaaagaaaaaggatatattgatttgtcaaaaagaagagtttctccagaggaagcaatcaaatgtgaagacaaattcacaaaatccaaaactgtttatagcattcttcgtcatgttgctgaggtgttagaatacaccaaggatgagcagctggaaagcctattccagaggactgcctgggtctttgatgacaagtacaagagacctggatatggtgcctatgatgcatttaagcatgcagtctcagacccatctattttggatagtttagatttgaatgaagatgaacgggaagtactcattaataatattaataggcgcttgaccccacaggctgtcaaaattcgagcagatattgaagtggcttgttatggttatgaaggcattgatgctgtaaaagaagccctaagagcaggtttgaattgttctacagaaaacatgcccattaagattaatctaatagctcctcctcggtatgtaatgactacgacaaccctggagagaacagaaggcctttctgtcctcagtcaagctatggctgttatcaaagagaagattgaggaaaagaggggtgtgttcaatgttcaaatggagcccaaagtggtcacagatacagatgagactgaacttgcgaggcagatggagaggcttgaaagagaaaatgccgaagtggatggagatgatgatgcagaagaaatggaagccaaagctgaagattaactttgtgggaaacagagtccaatttaaggaacacagagcagcgcttcctggctgtaaatcctagacttgaaagttttccagtattgaaaacttcaaagctgaatattttttatttctaagtatttaaatgttctaacagatcagaacatgaaatgccctcctaaatgtcagctgttgtcacacagtagctccaacactttgagcatttttaagggagtggcctcatttcactagagacaaatctttaagaatagacgagatagcgtcgccgcgatggtgtcgttggagagcgagcagttcctgacggagctgaccagacttttccagaagtg

SEQ ID NO: 319790 - DNA, 1309 bp, Homo sapiens
ctaggagcgaagcgtgcacgccttgtctttctccacctttcgtctttggtcacagcgccatctcatggttagctgaaactttgaaagaggattcattcttcagaggcaaggaatcggagtcctatgtctttctcgcgccttgaaggttacttagctaaagctaagatagcgagaaacagtacttttcaggtccttccatgatctacattcgtccttgttctcggaggacccagactctatggttaatgatgaagaggggcctctattcgttcagcgcttgcgcatgcgaggaggttccgcatgcgcggtggagtgagcgaagcgcacgctgaggaggatcggcggccggtgagggggaagcaagtctggtctctgtgattgaagaagtcggctctgggctccagtgcgggaatcacacacatacctcagaatgccgggtctaagttgtagattttatcaacacaaatttcctgaggtggaagatgtagtgatggtgaatgtcagatccattgctgaaatgggggcttatgtcagcttgctggaatacaacaacattgaaggcatgattcttcttagtgaattatccagaaggcgtatccgttctatcaacaaactcatccgaattggcaggaatgagtgtgtggttgtcattagggtggacaaagaaaaaggatatattgatttgtcaaaaagaagagtttctccagaggaagcaatcaaatgtgaagacaaattcacaaaatccaaaactgtttatagcattcttcgtcatgttgctgaggtgttagaatacaccaaggatgagcagctggaaagcctattccagaggactgcctgggtctttgatgacaagtacaagagacctggatatggtgcctatgatgcatttaagcatgcagtctcagacccatctattttggatagtttagatttgaatgaagatgaacgggaagtactcattaataatattaataggcgcttgaccccacaggctgtcaaaattcgagcagatattgaagtggcttgttatggttatgaaggcattgatgctgtaaaagaagccctaagagcaggtttgaattgttctacagaaaacatgcccattaagattaatctaatagctcctcctcggtatgtaatgactacgacaaccctggagagaacagaaggcctttctgtcctcagtcaagctatggctgttatcaaagagaagattgaggaaaagaggggtgtgttcaatgttcaaatggagcccaagtggtcacagatacagatgagacgcatatcgggatcctctagatcacctcac

SEQ ID NO: 319791 - DNA, 933 bp, Homo sapiens
actcccagaaagtcgacgggcgtggcgggggaggggacgctgagggcccatgtgctgaaaatccgaagtgccgcggaaagtggaggtgagggccgcccgccctagaggtgcccgtccgagaggcagagctgacaaggaaggtttcgagcgttttgctggcaaagggatttcttacaacctccaggcatgcgtctttctgccctgctggccttggcatccaaggtcactctgcccccccattaccgctatgggatgagccccccaggctctgttgcagacaagaggaagaaccccccatggatcaggcggcgcccagtggttgtggaacccatctctgatgaagactggtatctgttctgtggggacacggtggagatcctagaaggcaaggatgccgggaagcagggcaaagtggttcaagttatccggcagcgaaactgggtggtcgtgggagggctgaacacacattaccgctacattggcaagaccatggattaccggggaaccatgatccctagtgaagcccccttgctccaccgccaggtcaaacttgtggatcctatggacaggaaacccactgagatcgagtggagatttactgaagcaggagagcgggtacgagtctccacacgatcagggagaattatccctaaacccgaatttcccagagctgatggcatcgtccctgaaacgtggattgatggccccaaagacacatcagtggaagatgctttagaaagaacctatgtgccctgtctaaagacactgcaggaggaggtgatggaggccatggggatcaaggagacccggaaatacaagaaggtctattggtattgagcctggggcagagcagctcctccccaacttctgtcccagccttgaaggctgaggcacttctttttcagatgccaataaagagcactttatgagtcc

SEQ ID NO: 319792 - DNA, 894 bp, Homo sapiens
actcccagaaagtcgacgggcgtggcgggggaggggacgctgagggcccatgtgctgaaaatccgaagtgccgcggaaagtggaggtagctgacaaggaaggtttcgagcgttttgctggcaaagggatttcttacaacctccaggcatgcgtctttctgccctgctggccttggcatccaaggtcactctgcccccccattaccgctatgggatgagccccccaggctctgttgcagacaagaggaagaaccccccatggatcaggcggcgcccagtggttgtggaacccatctctgatgaagactggtatctgttctgtggggacacggtggagatcctagaaggcaaggatgccgggaagcagggcaaagtggttcaagttatccggcagcgaaactgggtggtcgtgggagggctgaacacacattaccgctacattggcaagaccatggattaccggggaaccatgatccctagtgaagcccccttgctccaccgccaggtcaaacttgtggatcctatggacaggaaacccactgagatcgagtggagatttactgaagcaggagagcgggtacgagtctccacacgatcagggagaattatccctaaacccgaatttcccagagctgatggcatcgtccctgaaacgtggattgatggccccaaagacacatcagtggaagatgctttagaaagaacctatgtgccctgtctaaagacactgcaggaggaggtgatggaggccatggggatcaaggagacccggaaatacaagaaggtctattggtattgagcctggggcagagcagctcctccccaacttctgtcccagccttgaaggctgaggcacttctttttcagatgccaataaagagcactttatgagtcc

SEQ ID NO: 319793 - DNA, 555 bp, Homo sapiens
actcccagaaagtcgacgggcgtggcgggggaggggacgctgagggcccatgtgctgaaaatccgaagtgccgcggaaagtggaggtcattaccgctacattggcaagaccatggattaccggggaaccatgatccctagtgaagcccccttgctccaccgccaggtcaaacttgtggatcctatggacaggaaacccactgagatcgagtggagatttactgaagcaggagagcgggtacgagtctccacacgatcagggagaattatccctaaacccgaatttcccagagctgatggcatcgtccctgaaacgtggattgatggccccaaagacacatcagtggaagatgctttagaaagaacctatgtgccctgtctaaagacactgcaggaggaggtgatggaggccatggggatcaaggagacccggaaatacaagaaggtctattggtattgagcctggggcagagcagctcctccccaacttctgtcccagccttgaaggctgaggcacttctttttcagatgccaataaagagcactttatgagtcc

SEQ ID NO: 319794 - DNA, 790 bp, Homo sapiens
actcccagaaagtcgacgggcgtggcgggggaggggacgctgagggcccatgtgctgaaaatccgaagtgccgcggaaagtggaggtagctgacaaggaaggtttcgagcgttttgctggcaaagggatttcttacaacctccaggcatgcgtctttctgccctgctggccttggcatccaaggtcactctgcccccccattaccgctatgggatgagccccccaggctctgttgcagacaagaggaagaaccccccatggatcaggcggcgcccagtggttgtggaacccatctctgatgaagactggtatctgttctgtggggacacggtggagatcctagaaggcaaggatgccgggaagcagggcaaagtggttcaagttatccggcagcgaaactgggtggtcgtgggagggctgaacacagaaacccactgagatcgagtggagatttactgaagcaggagagcgggtacgagtctccacacgatcagggagaattatccctaaacccgaatttcccagagctgatggcatcgtccctgaaacgtggattgatggccccaaagacacatcagtggaagatgctttagaaagaacctatgtgccctgtctaaagacactgcaggaggaggtgatggaggccatggggatcaaggagacccggaaatacaagaaggtctattggtattgagcctggggcagagcagctcctccccaacttctgtcccagccttgaaggctgaggcacttctttttcagatgccaataaagagcactttatgagtcc

SEQ ID NO: 319795 - DNA, 297 bp, Homo sapiens
actcccagaaagtcgacgggcgtggcgggggaggggacgctgagggcccatgtgctgaaaatccgaagtgccgcggaaagtggaggtagctgacaaggaaggtttcgagcgttttgctggcaaagggatttcttacaacctccaggtggagatcctagaaggcaaggatgccgggaagcagggcaaagtggttcaagttatccggcagcgaaactgggtggtcgtgggagggctgaacacacattaccgctacatggcaagaccatggccatcggacgggcatggccatcgacggga

SEQ ID NO: 319796 - DNA, 991 bp, Homo sapiens
cttgtctgtaaaagggactttacgatgcatctggcaacctcaccttcctcactgggcaatgtgaagaccaaatgccggcaatgaaattcccagcattaggtttgtcatatagtagtcctctctaagcatttgttgaatactcacaggaacacttaggccagtcagcattaattgaaaataacagagctgacaaggaaggtttcgagcgttttgctggcaaagggatttcttacaacctccaggcatgcgtctttctgccctgctggccttggcatccaaggtcactctgcccccccattaccgctatgggatgagccccccaggctctgttgcagacaagaggaagaaccccccatggatcaggcggcgcccagtggttgtggaacccatctctgatgaagactggtatctgttctgtggggacacggtggagatcctagaaggcaaggatgccgggaagcagggcaaagtggttcaagttatccggcagcgaaactgggtggtcgtgggagggctgaacacacattaccgctacattggcaagaccatggattaccggggaaccatgatccctagtgaagcccccttgctccaccgccaggtcaaacttgtggatcctatggacaggaaacccactgagatcgagtggagatttactgaagcaggagagcgggtacgagtctccacacgatcagggagaattatccctaaacccgaatttcccagagctgatggcatcgtccctgaaacgtggattgatggccccaaagacacatcagtggaagatgctttagaaagaacctatgtgccctgtctaaagacactgcaggaggaggtgatggaggccatggggatcaaggagacccggaaatacaagaaggtctattggtattgagcctggggcagagcagctcctccccaacttctgtcccagccttgaaggctgaggcacttctttttcagatgccaataaagagcactttatgagtcc

SEQ ID NO: 319797 - DNA, 1021 bp, Homo sapiens
actcccagaaagtcgacgggcgtggcgggggaggggacgctgagggcccatgtgctgaaaatccgaagtgccgcggaaagtggaggtgagggccgcccgccctagaggtgcccgtccgagaggcagagctgacaaggaaggtttcgagcgttttgctggcaaagggatttcttacaacctccaggcatgcgtctttctgccctgctggccttggcatccaaggtcactctgcccccccattaccgctatgggatgagccccccaggctctgttgcagacaagaggaagaaccccccatggatcaggcggcgcccagtggttgtggaacccatctctgatgaagactggtatctgttctgtggggacacggtggagatcctagaaggcaaggatgccgggaagcagggcaaagtggttcaagttatccggcagcgaaactgggtggtcgtgggagggctgaacacacattaccgctacattggcaagaccatggattaccggggaaccatgatccctagtgaagcccccttgctccaccgccaggtcaaacttgtggatcctatggacaggaaacccactgagatcgagtggagatttactgaagcaggagagcgggtacgagtctccacacgatcagggagaattatccctaaacccgaatttcccagagctgatggcatcgtccctgaaacgtggattgatggccccaaagacacatcagtggaagatgctttagaaagaacctatgtgccctgtctaaagacactgcaggaggaggtgatggaggccatggggatcaaggagacccggaaatacaagaaggtctattggtattgagcctggggcagagcagctcctccccaacttctgtcccagccttgaaggctgaggcacttctttttcagatgccaataaagagcactttatgagtccaaaaaaaaaaaaaaaacccggcttttcgggggaaaagtaaggccggtcttctcccttttaaggaagcgccaaagggaatacggaaaaa

SEQ ID NO: 319798 - DNA, 848 bp, Homo sapiens
actcccagaaagtcgacgggcgtggcgggggaggggacgctgagggcccatgtgctgaaaatccgaagtgccgcggaaagtggaggtgagggccgcccgccctagaggtgcccgtccgagaggcagagctgacaaggaaggtttcgagcgttttgctggcaaagggatttcttacaacctccaggcatgcgtctttctgccctgctggccttggcatccaaggtcactctgcccccccattaccgctatgggatgagccccccaggctctgttgcagacaagaggaagaaccccccatggatcaggcggcgcccagtggttgtggaacccatctctgatgaagactggtatctgttctgtggggacacggtggagatcctagaaggcaaggatgccgggaagcagggcaaagtggttcaagttatccggcagcgaaactgggtggtcgtgggagggctgaacacacattaccgctacattggcaagaccatggattaccggggaaccatgatccctagtgaagcccccttgctccaccgccaggtcaaacttgtggatcctatggacaggaaacccactgagatcgagtggagatttactgaagcaggagagcggatggccccaaagacacatcagtggaagatgctttagaaagaacctatgtgccctgtctaaagacactgcaggaggaggtgatggaggccatggggatcaaggagacccggaaatacaagaaggtctattggtattgagcctggggcagagcagctcctccccaacttctgtcccagccttgaaggctgaggcacttctttttcagatgccaataaagagcactttatgagtcc

SEQ ID NO: 319799 - DNA, 1494 bp, Homo sapiens
taggctgacctagaggacccgcgcgtgttgttacagagagaaatatgtgagtccttgcagaagaagagactgttaactcatcgttaaagatggccgttgtctcttctaacagctactgatgatgtcccactttaaaaataaaacccccaaacatcactactttaaggaaaaaaaaaatgtagtccaatattgatgctttcttatggctttttattttaatttggctggataagttgtttcaaataactgttaaagatattacttacaattgaatgtttgaaataagaaagtactttaagcaatagagttcatctcctgctgtgttatccaacctcgatgtatacttacagcatctcaggtcaccctttttatttcagttatttaattatgaaaccataaagaagcatgtggaaatagtgtttattgctctttgaagaaaaaccaccaactatttctggatattttggctgtacctactactaaagtcattagtctttaatacataatacatatttgaaaagtaaacatattatatagattatgtgagggacttaatcatgaaaccagtttcacagtccaagtaccaactcttctggtagcaggtgcacaagcttgggtgtttaaaaacaacctgtgtagggtatgcccagcaaatgaggacaaatgtgtagacagtacttactggatcttatttaacttttagctacattaactaactttcttatttaaaaacaagaaagggagactaaacatctgcttaacttgtacacattttcagaattctttttaaaagtctagttaaagatgtttcttagaagttggagactgttaacaacttccataaaatagatccaggtttttcagttccctgaagcagcattcagtagcatctatataaataaaggcaccttctgagaataaaactattttatggagtgtgtgaacacacttgttctgtcacctgggttcatcttgttgtgaagcacattaggtccaggtccttccctctgggagtctgactgtgaaactctttaacccaacaactcaattagcccctgtagataagacatgcttcccagagtgagatttttgaaatccccttttcatccagaactatatttacccacctattgtaactattcaaatagagcaaaattaggaggcttgataaatactaagaatttagtaccacagaaattatttattattttccctgtagtccacaattagtgataacgaatcctatttttgttaactgtgacataactttgatgtcatatgttgtcctatgtggttcttcctaagtaaactctgtactgattatatactgacttagcaatgtggccttggaatgctgagcaaaatgtggatgtactggttgtaaatgtttatatattgtacagtacctttatatatacacttgaggttctgattagagaaagatctgtaaattgctcattattttttatatagatatttaaacaataaaaaaaa

SEQ ID NO: 319800 - DNA, 519 bp, Homo sapiens
  misc_feature (390)..(390): n is a, c, g, or t
  misc_feature (425)..(425): n is a, c, g, or t
ggtaccccaaaagtgcactcttctatatctactctcacatggcagtactgggtacacgttaggtattttacaaacgaaagaatcacttagcaaggttgaatggctcaagagctgacaaaagcagaatttacaaaggatgcatagtttcatgttgttcctgtgaatgttctctgtctaggttggtgaccagattgttgaaatcaatggggaacctacacaaggaatcacacatactcgagcaattgagctcattcaggctggtggaaataaagttcttcttcttttgaggccaggaactggcttgatacctgaccatggtaagtaaagtagcccactagtaatatagagggcacttttcaaaggcactcttctatatctacgaccgtacangcgagacctgatcagtttatatgcaaaatttagtntccctttataatgcttatcatatctcagagtcagtctatcatccaagaaaagtgtttaacctcttcggttgttcgtagatatagagaagccggc

SEQ ID NO: 319801 - DNA, 7161 bp, Homo sapiens
  misc_feature (507)..(507): n is a, c, g, or t
  misc_feature (619)..(619): n is a, c, g, or t
cgaattcccccctcccctccccataacatgcccactgccccaaataaaaaaaaaaccaactatgggagagcagccgagacagcaactaggggcaggggaaagagacatggaactcgagggcagcggtgaagagaccatgcgtgtgctgggagggcccagaggcagcggcggcacaaacagcgcaggtacgagtctctgtgtcttccccggggttatgtataaatatagagagatgaggccttctctcccctgctctcccttccgctccgtgctgctcgccgcggtcccagctcctctttccacatgagggcgaagggaaggggggatgaacaagtcatcaccgaattgcaatcagacccacatccatcagcttctggatcttctgtgctattacaggattctttaagtgttcgctgagtgcctgctcctggggacaattcccttttcctttcttcagcctaacccgcggtggccctcgcggagtccggtcagccccggggagcgcanccgggaggggcgtccaaggggcgtctcgcgtctgggaacggccgggcccccagcgggctgtggtcgcggggtgggggccggagcggcgaggccccccttaccgggctgcgcnggccgcccagggcccccgggctgagacggggccggagcggcgccccggccgcccgcgcggggtctcccccatggtgcagcggggttcgggatgtcgaagacgctgaagaagaagaagcactggctcagcaaggtgcaggagtgcgccgtgtcctgggccgggcccccgggcgacttcggcgcggagatccgcggtggcgcggagcgtggcgagttcccctacctggggcggctccgcgaggagcccggcgggggcacctgctgcgtcgtctcgggcaaggcgcccagcccaggcgatgtgctgctggaggtaaacgggacgcctgtcagcgggctcaccaaccgggacaccctggctgtcatccgccacttccgcgagcccatccgtctcaagactgtgaaaccaggcaaagtcattaataaagatttgcggcattacctaagtcttcagtttcaaaaaggatcaattgaccacaaactgcagcaagtgatcagagataatctctacttgagaaccattccatgcactacaagggcccccagggatggagaagtaccaggagtggattataatttcatttccgttgaacagttcaaagcactggaagagagtggagcattgttagaaagtgggacatatgatggaaacttctatggaactcccaagcctccagcagaacccagcccttttcagccagatccagttgatcaagtcctctttgataatgagtttgatgcagaatctcaaagaaaacgaacgacatctgtcagcaagatggaaagaatggatagctctcttcctgaagaggaagaagatgaggacaaggaagctattaatggcagtggaaacgcagaaaacagagagaggcattctgagtcatctgactggatgaagactgttccaagttacaaccaaacaaatagctccatggactttagaaattatatgatgagagatgagactctggaaccactgcccaaaaactgggaaatggcctacactgacacagggatgatctacttcattgaccacaataccaagacaaccacctggttggatcctcgtctttgtaagaaagccaaagcccctgaagactgtgaagatggagagcttccttatggctgggagaaaatagaggaccctcagtatgggacatactatgttgatcaccttaaccagaaaacccagtttgaaaatccagtggaggaagccaaaaggaaaaagcagttaggacaggttgaaattgggtcttcaaaaccagatatggaaaaatcacacttcacaagagatccatcccagcttaaaggtgtccttgttcgagcatcactgaaaaaaagcacaatgggatttggttttactattattggtggagatagacctgatgagttcctacaagtgaaaaatgtgctgaaagatggtcccgcagctcaggatgggaaaattgcaccaggcgatgttattgtagacatcaatggcaactgtgtcctcggtcacactcatgcagatgttgtccagatgtttcaattggtacctgtcaatcagtatgtaaacctcactttatgtcgtggttatccacttcctgatgacagtgaagatcctgttgtggacattgttgctgctacccctgtcatcaatggacagtcattaaccaagggagagacttgcatgaatcctcaggattttaagccaggagcaatggttctggagcagaatggaaaatcgggacacactttgactggtgatggtctcaatggaccatcagatgcaagtgagcagagagtatccatggcatcgtcaggcagctcccagcctgaactagtgactatccctttgattaagggccctaaagggtttgggtttgcaattgctgacagccctactggacagaaggtgaaaatgatactggatagtcagtggtgtcaaggccttcagaaaggagatataattaaggaaatataccatcaaaatgtgcagaatttaacacatctccaagtggtagaggtgctaaagcagtttccagtaggtgctgatgtaccattgcttatcttaagaggaggtcctccttcaccaaccaaaactgccaaaatgaaaacagataaaaaggaaaatgcaggaagtttggaggccataaatgagcctattcctcagcctatgccttttccaccgagcattatcaggtcaggatccccaaaattggatccttctgaggtctacctgaaatctaagactttatatgaagataaaccaccaaacaccaaagatttggatgtttttcttcgaaaacaagagtcagggtttggcttcagggtgctaggaggagatggacctgaccagtctatatatattggggctattattcccctgggagcagctgagaaagatggtcggctccgcgcagctgatgaactaatgtgcattgatggaattcctgttaaagggaaatcacacaaacaagtcttggacctcatgacaactgctgctcgaaatggccatgtgttactaactgtcagacggaagatcttctatggagaaaaacaacccgaggacgacagctctcaggccttcatttcaacacagaatggatctccccgcctgaaccgggcagaggtcccagccaggcctgcaccccaggagccctatgatgttgtcttgcaacgaaaagaaaatgaaggatttggctttgtcatcctcacctccaaaaacaaaccacctccaggagttattcctcataaaattggccgagtcatagaaggaagtccggctgaccgctgtggaaaactgaaagttggagatcatatctctgcagtgaatgggcagtccattgttgaactgtctcatgataacattgttcagctgatcaaagatgctggtgtcaccgtcacactaacggtcattgctgaagaagagcatcatggtccaccatcaggaacaaactcagccaggcaaagcccagccctgcagcacaggcccatgggacagtcacaggccaaccacatacctggggacagaagtgccctagaaggtgaaattggaaaagatgtctccacttcttacagacattcttggtcagaccacaagcaccttgcacagcctgacaccgcagtaatttcagttgtaggcagtcggcacaatcagaaccttggttgttatccagtagagctggagagaggcccccggggctttggattcagcctccgaggggggaaggagtacaacatggggctgttcatccttcgtcttgctgaagatggtcctgccatcaaagatggcagaattcatgttggtgaccagattgttgaaatcaatggggaacctacacaaggaatcacacatactcgagcaattgagctcattcaggctggtggaaataaagttcttcttcttttgaggccaggaactggcttgatacctgaccatggtttggctccttccggtctgtgctcctacgtgaaacccgagcaacattaaggctttcagggcttttcttggtctttccttaaaaagacttggtgattgggatattaataatccttcgtcttcaaatgtgatttatgatgaacagtcaccattacccccatcttcacattttgcttccatatttgaagagtctcacgtgccagtaattgaagaatctttgagagttcagatatgtgaaaaggcagaagaattaaaggacattgtgcctgaaaagaaaagcactttaaatgaaaatcagcctgagataaagcatcagtctcttctccagaaaaatgtgagtaagagggatccacccagcagtcatgggcacagtaacaagaaaaatctattaaaagtagaaaatggtgttacacgaagaggtagatcggttagtcccaaaaagccagccagtcaacattcagaggaacatttggataagattcctagtcctctaaaaaataaccccaaaagaagacccagagatcaatccctcagccccagcaaaggggaaaataaaagttgtcaggtcagcaccagggcaggctctggacaagatcagtgcagaaaaagcagaggtcggtcggccagcccaaaaaaagcagcaaaaaattgaaggaagcaaagctccatcaaatgctgaggccaaattattagagggtaagagtcgaagaatagcaggctatacgggcagtaatgctgagcagatcccagatgggaaggaaaaatcagacgtcatcaggaaagatgcaaagcagaatcagttggaaaaaagcagaacaaggtctccagagaaaaaaatcaaaagaatggttgagaaatctcttccatccaaaatgactaataagactacaagtaaagaagtatctgaaaatgaaaaaggaaagaaagtaaccacaggagaaacaagttctagtaacgataaaataggagaaaatgtccagctatcagaaaagaggctgaagcaagaacctgaagagaaggtagtttcaaacaaaacagaagatcacaaagggaaagaactagaggcagctgacaaaaacaaagagactggaaggttcaaaccggaaagcagttctccagttaagaaaacactgataactccagggccctggaaggttccaagtggaaataaagtcacaggcactattggtatggctgagaaacggcagtaacctttagtataaaacaaagaaaaacaagttgtaatcttttcttacagcagcatttttccagaaaaagcctttttttttttttcagatattctgaaacagataagtacatgttaatgtgagcctcaagttacctaggctgcatgaagggcctttaggattgctaagaaccaactgtccccctggccggctgccctccctcgctctcaggaaggagctgcatccacatgctcatctgacccgccctgctcaggctgcccagctcgtcttcatgagtgtctgaacaaatgacatatgttgatattaacaatgtggtcacaactcactttgtatttgtgccaagttatctactgtatcatgtctgtttttatcctttttgttcagctgtttccacagtaatgaaaaagttaggtttggcttggaagttgatgatctcaatagcatgttgcatgtttacagagagaaatatgtgagtccttgcagaagaagagactgttaactcatcgttaaagatggccgttgtctcttctaacagctactgatgatgtcccactttaaaaataaaacccccaaacatcactactttaaggaaaaaaaaaatgtagtccaatattgatgctttcttatggctttttattttaatttggctggataagttgtttcaaataactgttaaagatattacttacaattgaatgtttgaaataagaaagtactttaagcaatagagttcatctcctgctgtgttatccaacctcgatgtatacttacagcatctcaggtcaccctttttatttcagttatttaattatgaaaccataaagaagcatgtggaaatagtgtttattgctctttgaagaaaaaccaccaactatttctggatattttggctgtacctactactaaagtcattagtctttaatacataatacatatttgaaaagtaaacatattatatagattatgtgagggacttaatcatgaaaccagtttcacagtccaagtaccaactcttctggtagcaggtgcacaagcttgggtgtttaaaaacaacctgtgtagggtatgcccagcaaatgaggacaaatgtgtagacagtacttactggatcttatttaacttttagctacattaactaactttcttatttaaaaacaagaaagggagactaaacatctgcttaacttgtacacattttcagaattctttttaaaagtctagttaaagatgtttcttagaagttggagactgttaacaacttccataaaatagatccaggtttttcagttccctgaagcagcattcagtagcatctatataaataaaggcaccttctgagaataaaactattttatggagtgtgtgaacacacttgttctgtcacctgggttcatcttgttgtgaagcacattaggtccaggtccttccctctgggagtctgactgtgaaactctttaacccaacaactcaattagcccctgtagataagacatgcttcccagagtgagatttttgaaatccccttttcatccagaactatatttacccacctattgtaactattcaaatagagcaaaattaggaggcttgataaatactaagaatttagtaccacagaaattatttattattttccctgtagtccacaattagtgataacgaatcctatttttgttaactgtgacataactttgatgtcatatgttgtcctatgtggttcttcctaagtaaactctgtactgattatatactgacttagcaatgtggccttggaatgctgagcaaaatgtggatgtactggttgtaaatgtttatatattgtacagtacctttatatatacacttgaggttctgattagagaaagatctgtaaattgctcattattttttatatagatatttaaacaataaaaaaaa

SEQ ID NO: 319802 - DNA, 4213 bp, Homo sapiens
  misc_feature (507)..(507): n is a, c, g, or t
  misc_feature (619)..(619): n is a, c, g, or t
cgaattcccccctcccctccccataacatgcccactgccccaaataaaaaaaaaaccaactatgggagagcagccgagacagcaactaggggcaggggaaagagacatggaactcgagggcagcggtgaagagaccatgcgtgtgctgggagggcccagaggcagcggcggcacaaacagcgcaggtacgagtctctgtgtcttccccggggttatgtataaatatagagagatgaggccttctctcccctgctctcccttccgctccgtgctgctcgccgcggtcccagctcctctttccacatgagggcgaagggaaggggggatgaacaagtcatcaccgaattgcaatcagacccacatccatcagcttctggatcttctgtgctattacaggattctttaagtgttcgctgagtgcctgctcctggggacaattcccttttcctttcttcagcctaacccgcggtggccctcgcggagtccggtcagccccggggagcgcanccgggaggggcgtccaaggggcgtctcgcgtctgggaacggccgggcccccagcgggctgtggtcgcggggtgggggccggagcggcgaggccccccttaccgggctgcgcnggccgcccagggcccccgggctgagacggggccggagcggcgccccggccgcccgcgcggggtctcccccatggtgcagcggggttcgggatgtcgaagacgctgaagaagaagaagcactggctcagcaaggtgcaggagtgcgccgtgtcctgggccgggcccccgggcgacttcggcgcggagatccgcggtggcgcggagcgtggcgagttcccctacctggggcggctccgcgaggagcccggcgggggcacctgctgcgtcgtctcgggcaaggcgcccagcccaggcgatgtgctgctggaggtaaacgggacgcctgtcagcgggctcaccaaccgggacaccctggctgtcatccgccacttccgcgagcccatccgtctcaagactgtgaaaccaggcaaagtcattaataaagatttgcggcattacctaagtcttcagtttcaaaaaggatcaattgaccacaaactgcagcaagtgatcagagataatctctacttgagaaccattccatgcactacaagggcccccagggatggagaagtaccaggagtggattataatttcatttccgttgaacagttcaaagcactggaagagagtggagcattgttagaaagtgggacatatgatggaaacttctatggaactcccaagcctccagcagaacccagcccttttcagccagatccagttgatcaagtcctctttgataatgagtttgatgcagaatctcaaagaaaacgaacgacatctgtcagcaagatggaaagaatggatagctctcttcctgaagaggaagaagatgaggacaaggaagctattaatggcagtggaaacgcagaaaacagagagaggcattctgagtcatctgactggatgaagactgttccaagttacaaccaaacaaatagctccatggactttagaaattatatgatgagagatgagactctggaaccactgcccaaaaactgggaaatggcctacactgacacagggatgatctacttcattgaccacaataccaagacaaccacctggttggatcctcgtctttgtaagaaagccaaagcccctgaagactgtgaagatggagagcttccttatggctgggagaaaatagaggaccctcagtatgggacatactatgttgatcaccttaaccagaaaacccagtttgaaaatccagtggaggaagccaaaaggaaaaagcagttaggacaggttgaaattgggtcttcaaaaccagatatggaaaaatcacacttcacaagagatccatcccagcttaaaggtgtccttgttcgagcatcactgaaaaaaagcacaatgggatttggttttactattattggtggagatagacctgatgagttcctacaagtgaaaaatgtgctgaaagatggtcccgcagctcaggatgggaaaattgcaccaggcgatgttattgtagacatcaatggcaactgtgtcctcggtcacactcatgcagatgttgtccagatgtttcaattggtacctgtcaatcagtatgtaaacctcactttatgtcgtggttatccacttcctgatgacagtgaagatcctgttgtggacattgttgctgctacccctgtcatcaatggacagtcattaaccaagggagagacttgcatgaatcctcaggattttaagccaggagcaatggttctggagcagaatggaaaatcgggacacactttgactggtgatggtctcaatggaccatcagatgcaagtgagcagagagtatccatggcatcgtcaggcagctcccagcctgaactagtgactatccctttgattaagggccctaaagggtttgggtttgcaattgctgacagccctactggacagaaggtgaaaatgatactggatagtcagtggtgtcaaggccttcagaaaggagatataattaaggaaatataccatcaaaatgtgcagaatttaacacatctccaagtggtagaggtgctaaagcagtttccagtaggtgctgatgtaccattgcttatcttaagaggaggtcctccttcaccaaccaaaactgccaaaatgaaaacagataaaaaggaaaatgcaggaagtttggaggccataaatgagcctattcctcagcctatgccttttccaccgagcattatcaggtcaggatccccaaaattggatccttctgaggtctacctgaaatctaagactttatatgaagataaaccaccaaacaccaaagatttggatgtttttcttcgaaaacaagagtcagggtttggcttcagggtgctaggaggagatggacctgaccagtctatatatattggggctattattcccctgggagcagctgagaaagatggtcggctccgcgcagctgatgaactaatgtgcattgatggaattcctgttaaagggaaatcacacaaacaagtcttggacctcatgacaactgctgctcgaaatggccatgtgttactaactgtcagacggaagatcttctatggagaaaaacaacccgaggacgacagctctcaggccttcatttcaacacagaatggatctccccgcctgaaccgggcagaggtcccagccaggcctgcaccccaggagccctatgatgttgtcttgcaacgaaaagaaaatgaaggatttggctttgtcatcctcacctccaaaaacaaaccacctccaggagttattcctcataaaattggccgagtcatagaaggaagtccggctgaccgctgtggaaaactgaaagttggagatcatatctctgcagtgaatgggcagtccattgttgaactgtctcatgataacattgttcagctgatcaaagatgctggtgtcaccgtcacactaacggtcattgctgaagaagagcatcatggtccaccatcaggaacaaactcagccaggcaaagcccagccctgcagcacaggcccatgggacagtcacaggccaaccacatacctggggacagaagtgccctagaaggtgaaattggaaaagatgtctccacttcttacagacattcttggtcagaccacaagcaccttgcacagcctgacaccgcagtaatttcagttgtaggcagtcggcacaatcagaaccttggttgttatccagtagagctggagagaggcccccggggctttggattcagcctccgaggggggaaggagtacaacatggggctgttcatccttcgtcttgctgaagatggtcctgccatcaaagatggcagaattcatgttggtgaccagattgttgaaatcaatggggaacctacacaaggaatcacacatactcgagcaattgagctcattcaggctggtggaaataaagttcttcttcttttgaggccaggaactggcttgatacctgaccatggtttggctccttccggtctgtgctcctacgtgaaacccgagcaacattaaggctttcagggcttttcttggtctttccttaaaaagacttggtaaatttgcatgtcttgtaaatcactttcttcttttgttttcttttaaattaaaaatgatgctattaaatacatctatttctat

SEQ ID NO: 319803 - DNA, 5743 bp, Homo sapiens
  misc_feature (507)..(507): n is a, c, g, or t
  misc_feature (619)..(619): n is a, c, g, or t
cgaattcccccctcccctccccataacatgcccactgccccaaataaaaaaaaaaccaactatgggagagcagccgagacagcaactaggggcaggggaaagagacatggaactcgagggcagcggtgaagagaccatgcgtgtgctgggagggcccagaggcagcggcggcacaaacagcgcaggtacgagtctctgtgtcttccccggggttatgtataaatatagagagatgaggccttctctcccctgctctcccttccgctccgtgctgctcgccgcggtcccagctcctctttccacatgagggcgaagggaaggggggatgaacaagtcatcaccgaattgcaatcagacccacatccatcagcttctggatcttctgtgctattacaggattctttaagtgttcgctgagtgcctgctcctggggacaattcccttttcctttcttcagcctaacccgcggtggccctcgcggagtccggtcagccccggggagcgcanccgggaggggcgtccaaggggcgtctcgcgtctgggaacggccgggcccccagcgggctgtggtcgcggggtgggggccggagcggcgaggccccccttaccgggctgcgcnggccgcccagggcccccgggctgagacggggccggagcggcgccccggccgcccgcgcggggtctcccccatggtgcagcggggttcgggatgtcgaagacgctgaagaagaagaagcactggctcagcaaggtgcaggagtgcgccgtgtcctgggccgggcccccgggcgacttcggcgcggagatccgcggtggcgcggagcgtggcgagttcccctacctggggcggctccgcgaggagcccggcgggggcacctgctgcgtcgtctcgggcaaggcgcccagcccaggcgatgtgctgctggaggtaaacgggacgcctgtcagcgggctcaccaaccgggacaccctggctgtcatccgccacttccgcgagcccatccgtctcaagactgtgaaaccaggcaaagtcattaataaagatttgcggcattacctaagtcttcagtttcaaaaaggatcaattgaccacaaactgcagcaagtgatcagagataatctctacttgagaaccattccatgcactacaagggcccccagggatggagaagtaccaggagtggattataatttcatttccgttgaacagttcaaagcactggaagagagtggagcattgttagaaagtgggacatatgatggaaacttctatggaactcccaagcctccagcagaacccagcccttttcagccagatccagttgatcaagtcctctttgataatgagtttgatgcagaatctcaaagaaaacgaacgacatctgtcagcaagatggaaagaatggatagctctcttcctgaagaggaagaagatgaggacaaggaagctattaatggcagtggaaacgcagaaaacagagagaggcattctgagtcatctgactggatgaagactgttccaagttacaaccaaacaaatagctccatggactttagaaattatatgatgagagatgagactctggaaccactgcccaaaaactgggaaatggcctacactgacacagggatgatctacttcattgaccacaataccaagacaaccacctggttggatcctcgtctttgtaagaaagccaaagcccctgaagactgtgaagatggagagcttccttatggctgggagaaaatagaggaccctcagtatgggacatactatgttgatcaccttaaccagaaaacccagtttgaaaatccagtggaggaagccaaaaggaaaaagcagttaggacaggttgaaattgggtcttcaaaaccagatatggaaaaatcacacttcacaagagatccatcccagcttaaaggtgtccttgttcgagcatcactgaaaaaaagcacaatgggatttggttttactattattggtggagatagacctgatgagttcctacaagtgaaaaatgtgctgaaagatggtcccgcagctcaggatgggaaaattgcaccaggcgatgttattgtagacatcaatggcaactgtgtcctcggtcacactcatgcagatgttgtccagatgtttcaattggtacctgtcaatcagtatgtaaacctcactttatgtcgtggttatccacttcctgatgacagtgaagatcctgttgtggacattgttgctgctacccctgtcatcaatggacagtcattaaccaagggagagacttgcatgaatcctcaggattttaagccaggagcaatggttctggagcagaatggaaaatcgggacacactttgactggtgatggtctcaatggaccatcagatgcaagtgagcagagagtatccatggcatcgtcaggcagctcccagcctgaactagtgactatccctttgattaagggccctaaagggtttgggtttgcaattgctgacagccctactggacagaaggtgaaaatgatactggatagtcagtggtgtcaaggccttcagaaaggagatataattaaggaaatataccatcaaaatgtgcagaatttaacacatctccaagtggtagaggtgctaaagcagtttccagtaggtgctgatgtaccattgcttatcttaagaggaggtcctccttcaccaaccaaaactgccaaaatgaaaacagataaaaaggaaaatgcaggaagtttggaggccataaatgagcctattcctcagcctatgccttttccaccgagcattatcaggtcaggatccccaaaattggatccttctgaggtctacctgaaatctaagactttatatgaagataaaccaccaaacaccaaagatttggatgtttttcttcgaaaacaagagtcagggtttggcttcagggtgctaggaggagatggacctgaccagtctatatatattggggctattattcccctgggagcagctgagaaagatggtcggctccgcgcagctgatgaactaatgtgcattgatggaattcctgttaaagggaaatcacacaaacaagtcttggacctcatgacaactgctgctcgaaatggccatgtgttactaactgtcagacggaagatcttctatggagaaaaacaacccgaggacgacagctctcaggccttcatttcaacacagaatggatctccccgcctgaaccgggcagaggtcccagccaggcctgcaccccaggagccctatgatgttgtcttgcaacgaaaagaaaatgaaggatttggctttgtcatcctcacctccaaaaacaaaccacctccaggagttattcctcataaaattggccgagtcatagaaggaagtccggctgaccgctgtggaaaactgaaagttggagatcatatctctgcagtgaatgggcagtccattgttgaactgtctcatgataacattgttcagctgatcaaagatgctggtgtcaccgtcacactaacggtcattgctgaagaagagcatcatggtccaccatcaggaacaaactcagccaggcaaagcccagccctgcagcacaggcccatgggacagtcacaggccaaccacatacctggggacagaagtgccctagaaggtgaaattggaaaagatgtctccacttcttacagacattcttggtcagaccacaagcaccttgcacagcctgacaccgcagtaatttcagttgtaggcagtcggcacaatcagaaccttggttgttatccagtagagctggagagaggcccccggggctttggattcagcctccgaggggggaaggagtacaacatggggctgttcatccttcgtcttgctgaagatggtcctgccatcaaagatggcagaattcatgttggtgaccagattgttgaaatcaatggggaacctacacaaggaatcacacatactcgagcaattgagctcattcaggctggtggaaataaagttcttcttcttttgaggccaggaactggcttgatacctgaccatggtgattgggatattaataatccttcgtcttcaaatgtgatttatgatgaacagtcaccattacccccatcttcacattttgcttccatatttgaagagtctcacgtgccagtaattgaagaatctttgagagttcagatatgtgaaaaggcagaagaattaaaggacattgtgcctgaaaagaaaagcactttaaatgaaaatcagcctgagataaagcatcagtctcttctccagaaaaatgtgagtaagagggatccacccagcagtcatgggcacagtaacaagaaaaatctattaaaagtagaaaatggtgttacacgaagaggtagatcggttagtcccaaaaagccagccagtcaacattcagaggaacatttggataagattcctagtcctctaaaaaataaccccaaaagaagacccagagatcaatccctcagccccagcaaaggggaaaataaaagttgtcaggtcagcaccagggcaggctctggacaagatcagtgcagaaaaagcagaggtcggtcggccagcccaaaaaaagcagcaaaaaattgaaggaagcaaagctccatcaaatgctgaggccaaattattagagggtaagagtcgaagaatagcaggctatacgggcagtaatgctgagcagatcccagatgggaaggaaaaatcagacgtcatcaggaaagatgcaaagcagaatcagttggaaaaaagcagaacaaggtctccagagaaaaaaatcaaaagaatggttgagaaatctcttccatccaaaatgactaataagactacaagtaaagaagtatctgaaaatgaaaaaggaaagaaagtaaccacaggagaaacaagttctagtaacgataaaataggagaaaatgtccagctatcagaaaagaggctgaagcaagaacctgaagagaaggtagtttcaaacaaaacagaagatcacaaagggaaagaactagaggcagctgacaaaaacaaagagactggaaggttcaaaccggaaagcagttctccagttaagaaaacactgataactccagggccctggaaggttccaagtggaaataaagtcacaggcactattggtatggctgagaaacggcagtaacctttagtataaaacaaagaaaaacaagttgtaatcttttcttacagcagcatttttccagaaaaagcctttttttttttttcagatattctgaaacagataagtacatgttaatgtgagcctcaagttacctaggctgcatgaagggcctttaggattgctaagaaccaactgtccccctggccggctgccctccctcgctctcaggaaggagctgcatccacatgctcatctgacccgccctgctcaggctgcccagctcgtcttcatgagtgtctgaacaaatgacatatgttgatattaacaatgtggtcacaactcactttgtatttgtgccaagttatctactgtatcatgtctgtttttatcctttttgttcagctgtttccacagtaatgaaaaagttaggtttggcttggaagttgatgatctcaatagcatgttgcatgtttacagagagaaatatgtgagtccttgcagaagaagagactgttaactcatcgttaaagatggccgttgtctcttctaacagctactgatgatgtcccactttaaaaataaaacccccaaacatcactactttaagg

SEQ ID NO: 319804 - DNA, 3441 bp, Homo sapiens
ggtaccccaaaagtgcactcttctatatctactctcacatggcagtactgggtacacgttaggtattttacaaacgaaagaatcacttagcaaggttgaatggctcaagagctgacaaaagcagaatttacaaaggatgcatagtttcatgttgttcctgtgaatgttctctgtctaggttggtgaccagattgttgaaatcaatggggaacctacacaaggaatcacacatactcgagcaattgagctcattcaggctggtggaaataaagttcttcttcttttgaggccaggaactggcttgatacctgaccatggtttggctccttccggtctgtgctcctacgtgaaacccgagcaacattaaggctttcagggcttttcttggtctttccttaaaaagacttggtgattgggatattaataatccttcgtcttcaaatgtgatttatgatgaacagtcaccattacccccatcttcacattttgcttccatatttgaagagtctcacgtgccagtaattgaagaatctttgagagttcagatatgtgaaaaggcagaagaattaaaggacattgtgcctgaaaagaaaagcactttaaatgaaaatcagcctgagataaagcatcagtctcttctccagaaaaatgtgagtaagagggatccacccagcagtcatgggcacagtaacaagaaaaatctattaaaagtagaaaatggtgttacacgaagaggtagatcggttagtcccaaaaagccagccagtcaacattcagaggaacatttggataagattcctagtcctctaaaaaataaccccaaaagaagacccagagatcaatccctcagccccagcaaaggggaaaataaaagttgtcaggtcagcaccagggcaggctctggacaagatcagtgcagaaaaagcagaggtcggtcggccagcccaaaaaaagcagcaaaaaattgaaggaagcaaagctccatcaaatgctgaggccaaattattagagggtaagagtcgaagaatagcaggctatacgggcagtaatgctgagcagatcccagatgggaaggaaaaatcagacgtcatcaggaaagatgcaaagcagaatcagttggaaaaaagcagaacaaggtctccagagaaaaaaatcaaaagaatggttgagaaatctcttccatccaaaatgactaataagactacaagtaaagaagtatctgaaaatgaaaaaggaaagaaagtaaccacaggagaaacaagttctagtaacgataaaataggagaaaatgtccagctatcagaaaagaggctgaagcaagaacctgaagagaaggtagtttcaaacaaaacagaagatcacaaagggaaagaactagaggcagctgacaaaaacaaagagactggaaggttcaaaccggaaagcagttctccagttaagaaaacactgataactccagggccctggaaggttccaagtggaaataaagtcacaggcactattggtatggctgagaaacggcagtaacctttagtataaaacaaagaaaaacaagttgtaatcttttcttacagcagcatttttccagaaaaagcctttttttttttttcagatattctgaaacagataagtacatgttaatgtgagcctcaagttacctaggctgcatgaagggcctttaggattgctaagaaccaactgtccccctggccggctgccctccctcgctctcaggaaggagctgcatccacatgctcatctgacccgccctgctcaggctgcccagctcgtcttcatgagtgtctgaacaaatgacatatgttgatattaacaatgtggtcacaactcactttgtatttgtgccaagttatctactgtatcatgtctgtttttatcctttttgttcagctgtttccacagtaatgaaaaagttaggtttggcttggaagttgatgatctcaatagcatgttgcatgtttacagagagaaatatgtgagtccttgcagaagaagagactgttaactcatcgttaaagatggccgttgtctcttctaacagctactgatgatgtcccactttaaaaataaaacccccaaacatcactactttaaggaaaaaaaaaatgtagtccaatattgatgctttcttatggctttttattttaatttggctggataagttgtttcaaataactgttaaagatattacttacaattgaatgtttgaaataagaaagtactttaagcaatagagttcatctcctgctgtgttatccaacctcgatgtatacttacagcatctcaggtcaccctttttatttcagttatttaattatgaaaccataaagaagcatgtggaaatagtgtttattgctctttgaagaaaaaccaccaactatttctggatattttggctgtacctactactaaagtcattagtctttaatacataatacatatttgaaaagtaaacatattatatagattatgtgagggacttaatcatgaaaccagtttcacagtccaagtaccaactcttctggtagcaggtgcacaagcttgggtgtttaaaaacaacctgtgtagggtatgcccagcaaatgaggacaaatgtgtagacagtacttactggatcttatttaacttttagctacattaactaactttcttatttaaaaacaagaaagggagactaaacatctgcttaacttgtacacattttcagaattctttttaaaagtctagttaaagatgtttcttagaagttggagactgttaacaacttccataaaatagatccaggtttttcagttccctgaagcagcattcagtagcatctatataaataaaggcaccttctgagaataaaactattttatggagtgtgtgaacacacttgttctgtcacctgggttcatcttgttgtgaagcacattaggtccaggtccttccctctgggagtctgactgtgaaactctttaacccaacaactcaattagcccctgtagataagacatgcttcccagagtgagatttttgaaatccccttttcatccagaactatatttacccacctattgtaactattcaaatagagcaaaattaggaggcttgataaatactaagaatttagtaccacagaaattatttattattttccctgtagtccacaattagtgataacgaatcctatttttgttaactgtgacataactttgatgtcatatgttgtcctatgtggttcttcctaagtaaactctgtactgattatatactgacttagcaatgtggccttggaatgctgagcaaaatgtggatgtactggttgtaaatgtttatatattgtacagtacctttatatatacacttgaggttctgattagagaaagatctgtaaattgctcattattttttatatagatatttaaacaataaaaaaaa

SEQ ID NO: 319805 - DNA, 2519 bp, Homo sapiens
  misc_feature (50)..(50): n is a, c, g, or t
acagtaacctttagtataaaacaaaaaaaaacaagttgtaatcttttctnacagcagcatttttccaaaaaaagccttttttttttttcaaatattctgaaacagataagtacatgttaatgtgagcctcaagttacctaggctgcatgaaggaaaaatcagacgtcatcaggaaagatgcaaagcagaatcagttggaaaaaagcagaacaaggtctccagagaaaaaaatcaaaagaatggttgagaaatctcttccatccaaaatgactaataagactacaagtaaagaagtatctgaaaatgaaaaaggaaagaaagtaaccacaggagaaacaagttctagtaacgataaaataggagaaaatgtccagctatcagaaaagaggctgaagcaagaacctgaagagaaggtagtttcaaacaaaacagaagatcacaaagggaaagaactagaggcagctgacaaaaacaaagagactggaaggttcaaaccggaaagcagttctccagttaagaaaacactgataactccagggccctggaaggttccaagtggaaataaagtcacaggcactattggtatggctgagaaacggcagtaacctttagtataaaacaaagaaaaacaagttgtaatcttttcttacagcagcatttttccagaaaaagcctttttttttttttcagatattctgaaacagataagtacatgttaatgtgagcctcaagttacctaggctgcatgaagggcctttaggattgctaagaaccaactgtccccctggccggctgccctccctcgctctcaggaaggagctgcatccacatgctcatctgacccgccctgctcaggctgcccagctcgtcttcatgagtgtctgaacaaatgacatatgttgatattaacaatgtggtcacaactcactttgtatttgtgccaagttatctactgtatcatgtctgtttttatcctttttgttcagctgtttccacagtaatgaaaaagttaggtttggcttggaagttgatgatctcaatagcatgttgcatgtttacagagagaaatatgtgagtccttgcagaagaagagactgttaactcatcgttaaagatggccgttgtctcttctaacagctactgatgatgtcccactttaaaaataaaacccccaaacatcactactttaaggaaaaaaaaaatgtagtccaatattgatgctttcttatggctttttattttaatttggctggataagttgtttcaaataactgttaaagatattacttacaattgaatgtttgaaataagaaagtactttaagcaatagagttcatctcctgctgtgttatccaacctcgatgtatacttacagcatctcaggtcaccctttttatttcagttatttaattatgaaaccataaagaagcatgtggaaatagtgtttattgctctttgaagaaaaaccaccaactatttctggatattttggctgtacctactactaaagtcattagtctttaatacataatacatatttgaaaagtaaacatattatatagattatgtgagggacttaatcatgaaaccagtttcacagtccaagtaccaactcttctggtagcaggtgcacaagcttgggtgtttaaaaacaacctgtgtagggtatgcccagcaaatgaggacaaatgtgtagacagtacttactggatcttatttaacttttagctacattaactaactttcttatttaaaaacaagaaagggagactaaacatctgcttaacttgtacacattttcagaattctttttaaaagtctagttaaagatgtttcttagaagttggagactgttaacaacttccataaaatagatccaggtttttcagttccctgaagcagcattcagtagcatctatataaataaaggcaccttctgagaataaaactattttatggagtgtgtgaacacacttgttctgtcacctgggttcatcttgttgtgaagcacattaggtccaggtccttccctctgggagtctgactgtgaaactctttaacccaacaactcaattagcccctgtagataagacatgcttcccagagtgagatttttgaaatccccttttcatccagaactatatttacccacctattgtaactattcaaatagagcaaaattaggaggcttgataaatactaagaatttagtaccacagaaattatttattattttccctgtagtccacaattagtgataacgaatcctatttttgttaactgtgacataactttgatgtcatatgttgtcctatgtggttcttcctaagtaaactctgtactgattatatactgacttagcaatgtggccttggaatgctgagcaaaatgtggatgtactggttgtaaatgtttatatattgtacagtacctttatatatacacttgaggttctgattagagaaagatctgtaaattgctcattattttttatatagatatttaaacaataaaaaaaa

SEQ ID NO: 319806 - DNA, 669 bp, Homo sapiens
tacaccctcagttttcccacctagaaaatggggctaataataaatgttagctcttaattattttcctttaaaatgctatcattttgcaaaactaggctaggtaagtagttcatatggaatacttttctgagagaaaggtattagcttgagagcaggaataaggtattttacaggcactctatacagcagtgcctgtacagatttaatgtaccttacccaagtgttaacttaggtcatttgcacctgtcaaatatcaaactcaagtttgatcattctgaattcaacattgttatattgattggacagcattagaagttaatggcagtgtaatactgagtatatggaagtgagagtaaatgtttctaaacagtcttcatacagttttgtttagagctcaaaacgaggatttatagttgaattgtgtgtgtgtgttacactcttgtgcaaattttccatattaaaaagttctgagattatagtttattgagttactctataatatcctactaaatactgaactttgttttgttttaatccttttaaaataaatcatagtatttatattttctgattttcctcagcaccaaacaccaaagatttggatgtttttcttcgaaaacaagagtcagggtttggcttcagggtgctaggaggagatggacctgacca

SEQ ID NO: 319807 - DNA, 293 bp, Homo sapiens
cacatagtcctaggctttttctcttccctcttcaggtttggctccttccggtctgtgctcctacgtgaaacccgagcaacattaaggctttcagggcttttcttggtctttccttaaaaagacttggtaaatttgcatgtcttgtaaatcactttcttcttttgttttcttttaaattaaaaatgatgctattaaatacatctatttctatcttctgcacttttcagtcttcttttgacattaaatttgacagcttaatgcaagagaattattacaaatgcccatgagcctca

SEQ ID NO: 319808 - DNA, 466 bp, Homo sapiens
ttcattttctcagttcagagagtgacttgatttctctctcttgtagaagtgccctagaaggtgaaattggaaaagatgtctccacttcttacagacattcttggtcagaccacaagcaccttgcacagcctgacaccgcagtaatttcagttgtaggcagtcggcacaatcaggtaaacaaacatttccccagatggggagtgatattttgagttgccataccactggcattggtgaatttttattgcaaatcagttcagataaatttgtttccaaaactaataattctcgaagacctgccatgtgtttggcattctgctggcattcataggagaatgttaggagtgaaagaaaagtttcccctacagcaggagagctttgaacccttggttaagtacttagaagtaaatagtattttagataatcaaattcaggtttttttgtttgttacttgtttgtttccagg

SEQ ID NO: 319809 - DNA, 4288 bp, Homo sapiens
  misc_feature (507)..(507): n is a, c, g, or t
  misc_feature (619)..(619): n is a, c, g, or t
cgaattcccccctcccctccccataacatgcccactgccccaaataaaaaaaaaaccaactatgggagagcagccgagacagcaactaggggcaggggaaagagacatggaactcgagggcagcggtgaagagaccatgcgtgtgctgggagggcccagaggcagcggcggcacaaacagcgcaggtacgagtctctgtgtcttccccggggttatgtataaatatagagagatgaggccttctctcccctgctctcccttccgctccgtgctgctcgccgcggtcccagctcctctttccacatgagggcgaagggaaggggggatgaacaagtcatcaccgaattgcaatcagacccacatccatcagcttctggatcttctgtgctattacaggattctttaagtgttcgctgagtgcctgctcctggggacaattcccttttcctttcttcagcctaacccgcggtggccctcgcggagtccggtcagccccggggagcgcanccgggaggggcgtccaaggggcgtctcgcgtctgggaacggccgggcccccagcgggctgtggtcgcggggtgggggccggagcggcgaggccccccttaccgggctgcgcnggccgcccagggcccccgggctgagacggggccggagcggcgccccggccgcccgcgcggggtctcccccatggtgcagcggggttcgggatgtcgaagacgctgaagaagaagaagcactggctcagcaaggtgcaggagtgcgccgtgtcctgggccgggcccccgggcgacttcggcgcggagatccgcggtggcgcggagcgtggcgagttcccctacctggggcggctccgcgaggagcccggcgggggcacctgctgcgtcgtctcgggcaaggcgcccagcccaggcgatgtgctgctggaggtaaacgggacgcctgtcagcgggctcaccaaccgggacaccctggctgtcatccgccacttccgcgagcccatccgtctcaagactgtgaaaccaggcaaagtcattaataaagatttgcggcattacctaagtcttcagtttcaaaaaggatcaattgaccacaaactgcagcaagtgatcagagataatctctacttgagaaccattccatgcactacaagggcccccagggatggagaagtaccaggagtggattataatttcatttccgttgaacagttcaaagcactggaagagagtggagcattgttagaaagtgggacatatgatggaaacttctatggaactcccaagcctccagcagaacccagcccttttcagccagatccagttgatcaagtcctctttgataatgagtttgatgcagaatctcaaagaaaacgaacgacatctgtcagcaagatggaaagaatggatagctctcttcctgaagaggaagaagatgaggacaaggaagctattaatggcagtggaaacgcagaaaacagagagaggcattctgagtcatctgactggatgaagactgttccaagttacaaccaaacaaatagctccatggactttagaaattatatgatgagagatgagactctggaaccactgcccaaaaactgggaaatggcctacactgacacagggatgatctacttcattgaccacaataccaagacaaccacctggttggatcctcgtctttgtaagaaagccaaagcccctgaagactgtgaagatggagagcttccttatggctgggagaaaatagaggaccctcagtatgggacatactatgttgatttcactcttgtcgcccaagctggagtgcaatggcatgatctcggctcactgcaacctccgcctcctgggttcaatcaccttaaccagaaaacccagtttgaaaatccagtggaggaagccaaaaggaaaaagcagttaggacaggttgaaattgggtcttcaaaaccagatatggaaaaatcacacttcacaagagatccatcccagcttaaaggtgtccttgttcgagcatcactgaaaaaaagcacaatgggatttggttttactattattggtggagatagacctgatgagttcctacaagtgaaaaatgtgctgaaagatggtcccgcagctcaggatgggaaaattgcaccaggcgatgttattgtagacatcaatggcaactgtgtcctcggtcacactcatgcagatgttgtccagatgtttcaattggtacctgtcaatcagtatgtaaacctcactttatgtcgtggttatccacttcctgatgacagtgaagatcctgttgtggacattgttgctgctacccctgtcatcaatggacagtcattaaccaagggagagacttgcatgaatcctcaggattttaagccaggagcaatggttctggagcagaatggaaaatcgggacacactttgactggtgatggtctcaatggaccatcagatgcaagtgagcagagagtatccatggcatcgtcaggcagctcccagcctgaactagtgactatccctttgattaagggccctaaagggtttgggtttgcaattgctgacagccctactggacagaaggtgaaaatgatactggatagtcagtggtgtcaaggccttcagaaaggagatataattaaggaaatataccatcaaaatgtgcagaatttaacacatctccaagtggtagaggtgctaaagcagtttccagtaggtgctgatgtaccattgcttatcttaagaggaggtcctccttcaccaaccaaaactgccaaaatgaaaacagataaaaaggaaaatgcaggaagtttggaggccataaatgagcctattcctcagcctatgccttttccaccgagcattatcaggtcaggatccccaaaattggatccttctgaggtctacctgaaatctaagactttatatgaagataaaccaccaaacaccaaagatttggatgtttttcttcgaaaacaagagtcagggtttggcttcagggtgctaggaggagatggacctgaccagtctatatatattggggctattattcccctgggagcagctgagaaagatggtcggctccgcgcagctgatgaactaatgtgcattgatggaattcctgttaaagggaaatcacacaaacaagtcttggacctcatgacaactgctgctcgaaatggccatgtgttactaactgtcagacggaagatcttctatggagaaaaacaacccgaggacgacagctctcaggccttcatttcaacacagaatggatctccccgcctgaaccgggcagaggtcccagccaggcctgcaccccaggagccctatgatgttgtcttgcaacgaaaagaaaatgaaggatttggctttgtcatcctcacctccaaaaacaaaccacctccaggagttattcctcataaaattggccgagtcatagaaggaagtccggctgaccgctgtggaaaactgaaagttggagatcatatctctgcagtgaatgggcagtccattgttgaactgtctcatgataacattgttcagctgatcaaagatgctggtgtcaccgtcacactaacggtcattgctgaagaagagcatcatggtccaccatcaggaacaaactcagccaggcaaagcccagccctgcagcacaggcccatgggacagtcacaggccaaccacatacctggggacagaagtgccctagaaggtgaaattggaaaagatgtctccacttcttacagacattcttggtcagaccacaagcaccttgcacagcctgacaccgcagtaatttcagttgtaggcagtcggcacaatcagaaccttggttgttatccagtagagctggagagaggcccccggggctttggattcagcctccgaggggggaaggagtacaacatggggctgttcatccttcgtcttgctgaagatggtcctgccatcaaagatggcagaattcatgttggtgaccagattgttgaaatcaatggggaacctacacaaggaatcacacatactcgagcaattgagctcattcaggctggtggaaataaagttcttcttcttttgaggccaggaactggcttgatacctgaccatggtttggctccttccggtctgtgctcctacgtgaaacccgagcaacattaaggctttcagggcttttcttggtctttccttaaaaagacttggtaaatttgcatgtcttgtaaatcactttcttcttttgttttcttttaaattaaaaatgatgctattaaatacatctatttctat

SEQ ID NO: 319810 - DNA, 7070 bp, Homo sapiens
  misc_feature (507)..(507): n is a, c, g, or t
  misc_feature (619)..(619): n is a, c, g, or t
cgaattcccccctcccctccccataacatgcccactgccccaaataaaaaaaaaaccaactatgggagagcagccgagacagcaactaggggcaggggaaagagacatggaactcgagggcagcggtgaagagaccatgcgtgtgctgggagggcccagaggcagcggcggcacaaacagcgcaggtacgagtctctgtgtcttccccggggttatgtataaatatagagagatgaggccttctctcccctgctctcccttccgctccgtgctgctcgccgcggtcccagctcctctttccacatgagggcgaagggaaggggggatgaacaagtcatcaccgaattgcaatcagacccacatccatcagcttctggatcttctgtgctattacaggattctttaagtgttcgctgagtgcctgctcctggggacaattcccttttcctttcttcagcctaacccgcggtggccctcgcggagtccggtcagccccggggagcgcanccgggaggggcgtccaaggggcgtctcgcgtctgggaacggccgggcccccagcgggctgtggtcgcggggtgggggccggagcggcgaggccccccttaccgggctgcgcnggccgcccagggcccccgggctgagacggggccggagcggcgccccggccgcccgcgcggggtctcccccatggtgcagcggggttcgggatgtcgaagacgctgaagaagaagaagcactggctcagcaaggtgcaggagtgcgccgtgtcctgggccgggcccccgggcgacttcggcgcggagatccgcggtggcgcggagcgtggcgagttcccctacctggggcggctccgcgaggagcccggcgggggcacctgctgcgtcgtctcgggcaaggcgcccagcccaggcgatgtgctgctggaggtaaacgggacgcctgtcagcgggctcaccaaccgggacaccctggctgtcatccgccacttccgcgagcccatccgtctcaagactgtgaaaccaggcaaagtcattaataaagatttgcggcattacctaagtcttcagtttcaaaaaggatcaattgaccacaaactgcagcaagtgatcagagataatctctacttgagaaccattccatgcactacaagggcccccagggatggagaagtaccaggagtggattataatttcatttccgttgaacagttcaaagcactggaagagagtggagcattgttagaaagtgggacatatgatggaaacttctatggaactcccaagcctccagcagaacccagcccttttcagccagatccagttgatcaagtcctctttgataatgagtttgatgcagaatctcaaagaaaacgaacgacatctgtcagcaagatggaaagaatggatagctctcttcctgaagaggaagaagatgaggacaaggaagctattaatggcagtggaaacgcagaaaacagagagaggcattctgagtcatctgactggatgaagactgttccaagttacaaccaaacaaatagctccatggactttagaaattatatgatgagagatgagactctggaaccactgcccaaaaactgggaaatggcctacactgacacagggatgatctacttcattgaccacaataccaagacaaccacctggttggatcctcgtctttgtaagaaagccaaagcccctgaagactgtgaagatggagagcttccttatggctgggagaaaatagaggaccctcagtatgggacatactatgttgatcaccttaaccagaaaacccagtttgaaaatccagtggaggaagccaaaaggaaaaagcagttaggacaggttgaaattgggtcttcaaaaccagatatggaaaaatcacacttcacaagagatccatcccagcttaaaggtgtccttgttcgagcatcactgaaaaaaagcacaatgggatttggttttactattattggtggagatagacctgatgagttcctacaagtgaaaaatgtgctgaaagatggtcccgcagctcaggatgggaaaattgcaccaggcgatgttattgtagacatcaatggcaactgtgtcctcggtcacactcatgcagatgttgtccagatgtttcaattggtacctgtcaatcagtatgtaaacctcactttatgtcgtggttatccacttcctgatgacagtgaagatcctgttgtggacattgttgctgctacccctgtcatcaatggacagtcattaaccaagggagagacttgcatgaatcctcaggattttaagccaggagcaatggttctggagcagaatggaaaatcgggacacactttgactggtgatggtctcaatggaccatcagatgcaagtgagcagagagtatccatggcatcgtcaggcagctcccagcctgaactagtgactatccctttgattaagggccctaaagggtttgggtttgcaattgctgacagccctactggacagaaggtgaaaatgatactggatagtcagtggtgtcaaggccttcagaaaggagatataattaaggaaatataccatcaaaatgtgcagaatttaacacatctccaagtggtagaggtgctaaagcagtttccagtaggtgctgatgtaccattgcttatcttaagaggaggtcctccttcaccaaccaaaactgccaaaatgaaaacagataaaaaggaaaatgcaggaagtttggaggccataaatgagcctattcctcagcctatgccttttccaccgagcattatcaggtcaggatccccaaaattggatccttctgaggtctacctgaaatctaagactttatatgaagataaaccaccaaacaccaaagatttggatgtttttcttcgaaaacaagagtcagggtttggcttcagggtgctaggaggagatggacctgaccagtctatatatattggggctattattcccctgggagcagctgagaaagatggtcggctccgcgcagctgatgaactaatgtgcattgatggaattcctgttaaagggaaatcacacaaacaagtcttggacctcatgacaactgctgctcgaaatggccatgtgttactaactgtcagacggaagatcttctatggagaaaaacaacccgaggacgacagctctcaggccttcatttcaacacagaatggatctccccgcctgaaccgggcagaggtcccagccaggcctgcaccccaggagccctatgatgttgtcttgcaacgaaaagaaaatgaaggatttggctttgtcatcctcacctccaaaaacaaaccacctccaggagttattcctcataaaattggccgagtcatagaaggaagtccggctgaccgctgtggaaaactgaaagttggagatcatatctctgcagtgaatgggcagtccattgttgaactgtctcatgataacattgttcagctgatcaaagatgctggtgtcaccgtcacactaacggtcattgctgaagaagagcatcatggtccaccatcaggaacaaactcagccaggcaaagcccagccctgcagcacaggcccatgggacagtcacaggccaaccacatacctggggacagaagtgccctagaaggtgaaattggaaaagatgtctccacttcttacagacattcttggtcagaccacaagcaccttgcacagcctgacaccgcagtaatttcagttgtaggcagtcggcacaatcagaaccttggttgttatccagtagagctggagagaggcccccggggctttggattcagcctccgaggggggaaggagtacaacatggggctgttcatccttcgtcttgctgaagatggtcctgccatcaaagatggcagaattcatgttggtgaccagattgttgaaatcaatggggaacctacacaaggaatcacacatactcgagcaattgagctcattcaggctggtggaaataaagttcttcttcttttgaggccaggaactggcttgatacctgaccatggtgattgggatattaataatccttcgtcttcaaatgtgatttatgatgaacagtcaccattacccccatcttcacattttgcttccatatttgaagagtctcacgtgccagtaattgaagaatctttgagagttcagatatgtgaaaaggcagaagaattaaaggacattgtgcctgaaaagaaaagcactttaaatgaaaatcagcctgagataaagcatcagtctcttctccagaaaaatgtgagtaagagggatccacccagcagtcatgggcacagtaacaagaaaaatctattaaaagtagaaaatggtgttacacgaagaggtagatcggttagtcccaaaaagccagccagtcaacattcagaggaacatttggataagattcctagtcctctaaaaaataaccccaaaagaagacccagagatcaatccctcagccccagcaaaggggaaaataaaagttgtcaggtcagcaccagggcaggctctggacaagatcagtgcagaaaaagcagaggtcggtcggccagcccaaaaaaagcagcaaaaaattgaaggaagcaaagctccatcaaatgctgaggccaaattattagagggtaagagtcgaagaatagcaggctatacgggcagtaatgctgagcagatcccagatgggaaggaaaaatcagacgtcatcaggaaagatgcaaagcagaatcagttggaaaaaagcagaacaaggtctccagagaaaaaaatcaaaagaatggttgagaaatctcttccatccaaaatgactaataagactacaagtaaagaagtatctgaaaatgaaaaaggaaagaaagtaaccacaggagaaacaagttctagtaacgataaaataggagaaaatgtccagctatcagaaaagaggctgaagcaagaacctgaagagaaggtagtttcaaacaaaacagaagatcacaaagggaaagaactagaggcagctgacaaaaacaaagagactggaaggttcaaaccggaaagcagttctccagttaagaaaacactgataactccagggccctggaaggttccaagtggaaataaagtcacaggcactattggtatggctgagaaacggcagtaacctttagtataaaacaaagaaaaacaagttgtaatcttttcttacagcagcatttttccagaaaaagcctttttttttttttcagatattctgaaacagataagtacatgttaatgtgagcctcaagttacctaggctgcatgaagggcctttaggattgctaagaaccaactgtccccctggccggctgccctccctcgctctcaggaaggagctgcatccacatgctcatctgacccgccctgctcaggctgcccagctcgtcttcatgagtgtctgaacaaatgacatatgttgatattaacaatgtggtcacaactcactttgtatttgtgccaagttatctactgtatcatgtctgtttttatcctttttgttcagctgtttccacagtaatgaaaaagttaggtttggcttggaagttgatgatctcaatagcatgttgcatgtttacagagagaaatatgtgagtccttgcagaagaagagactgttaactcatcgttaaagatggccgttgtctcttctaacagctactgatgatgtcccactttaaaaataaaacccccaaacatcactactttaaggaaaaaaaaaatgtagtccaatattgatgctttcttatggctttttattttaatttggctggataagttgtttcaaataactgttaaagatattacttacaattgaatgtttgaaataagaaagtactttaagcaatagagttcatctcctgctgtgttatccaacctcgatgtatacttacagcatctcaggtcaccctttttatttcagttatttaattatgaaaccataaagaagcatgtggaaatagtgtttattgctctttgaagaaaaaccaccaactatttctggatattttggctgtacctactactaaagtcattagtctttaatacataatacatatttgaaaagtaaacatattatatagattatgtgagggacttaatcatgaaaccagtttcacagtccaagtaccaactcttctggtagcaggtgcacaagcttgggtgtttaaaaacaacctgtgtagggtatgcccagcaaatgaggacaaatgtgtagacagtacttactggatcttatttaacttttagctacattaactaactttcttatttaaaaacaagaaagggagactaaacatctgcttaacttgtacacattttcagaattctttttaaaagtctagttaaagatgtttcttagaagttggagactgttaacaacttccataaaatagatccaggtttttcagttccctgaagcagcattcagtagcatctatataaataaaggcaccttctgagaataaaactattttatggagtgtgtgaacacacttgttctgtcacctgggttcatcttgttgtgaagcacattaggtccaggtccttccctctgggagtctgactgtgaaactctttaacccaacaactcaattagcccctgtagataagacatgcttcccagagtgagatttttgaaatccccttttcatccagaactatatttacccacctattgtaactattcaaatagagcaaaattaggaggcttgataaatactaagaatttagtaccacagaaattatttattattttccctgtagtccacaattagtgataacgaatcctatttttgttaactgtgacataactttgatgtcatatgttgtcctatgtggttcttcctaagtaaactctgtactgattatatactgacttagcaatgtggccttggaatgctgagcaaaatgtggatgtactggttgtaaatgtttatatattgtacagtacctttatatatacacttgaggttctgattagagaaagatctgtaaattgctcattattttttatatagatatttaaacaataaaaaaaa

SEQ ID NO: 319811 - DNA, 3599 bp, Homo sapiens
ccccgactagcccgacaggatactaatatccagaatttactaagaactcaacaacaaacaaacaaaacataacaaaaaaacaacaacaaaaaatctcattaacagtaagcacaggcccatgggacagtcacaggccaaccacatacctggggacagaagtgccctagaaggtgaaattggaaaagatgtctccacttcttacagacattcttggtcagaccacaagcaccttgcacagcctgacaccgcagtaatttcagttgtaggcagtcggcacaatcagaaccttggttgttatccagtagagctggagagaggcccccggggctttggattcagcctccgaggggggaaggagtacaacatggggctgttcatccttcgtcttgctgaagatggtcctgccatcaaagatggcagaattcatgttggtgaccagattgttgaaatcaatggggaacctacacaaggaatcacacatactcgagcaattgagctcattcaggctggtggaaataaagttcttcttcttttgaggccaggaactggcttgatacctgaccatggtgattgggatattaataatccttcgtcttcaaatgtgatttatgatgaacagtcaccattacccccatcttcacattttgcttccatatttgaagagtctcacgtgccagtaattgaagaatctttgagagttcagatatgtgaaaaggcagaagaattaaaggacattgtgcctgaaaagaaaagcactttaaatgaaaatcagcctgagataaagcatcagtctcttctccagaaaaatgtgagtaagagggatccacccagcagtcatgggcacagtaacaagaaaaatctattaaaagtagaaaatggtgttacacgaagaggtagatcggttagtcccaaaaagccagccagtcaacattcagaggaacatttggataagattcctagtcctctaaaaaataaccccaaaagaagacccagagatcaatccctcagccccagcaaaggggaaaataaaagttgtcaggtcagcaccagggcaggctctggacaagatcagtgcagaaaaagcagaggtcggtcggccagcccaaaaaaagcagcaaaaaattgaaggaagcaaagctccatcaaatgctgaggccaaattattagagggtaagagtcgaagaatagcaggctatacgggcagtaatgctgagcagatcccagatgggaaggaaaaatcagacgtcatcaggaaagatgcaaagcagaatcagttggaaaaaagcagaacaaggtctccagagaaaaaaatcaaaagaatggttgagaaatctcttccatccaaaatgactaataagactacaagtaaagaagtatctgaaaatgaaaaaggaaagaaagtaaccacaggagaaacaagttctagtaacgataaaataggagaaaatgtccagctatcagaaaagaggctgaagcaagaacctgaagagaaggtagtttcaaacaaaacagaagatcacaaagggaaagaactagaggcagctgacaaaaacaaagagactggaaggttcaaaccggaaagcagttctccagttaagaaaacactgataactccagggccctggaaggttccaagtggaaataaagtcacaggcactattggtatggctgagaaacggcagtaacctttagtataaaacaaagaaaaacaagttgtaatcttttcttacagcagcatttttccagaaaaagcctttttttttttttcagatattctgaaacagataagtacatgttaatgtgagcctcaagttacctaggctgcatgaagggcctttaggattgctaagaaccaactgtccccctggccggctgccctccctcgctctcaggaaggagctgcatccacatgctcatctgacccgccctgctcaggctgcccagctcgtcttcatgagtgtctgaacaaatgacatatgttgatattaacaatgtggtcacaactcactttgtatttgtgccaagttatctactgtatcatgtctgtttttatcctttttgttcagctgtttccacagtaatgaaaaagttaggtttggcttggaagttgatgatctcaatagcatgttgcatgtttacagagagaaatatgtgagtccttgcagaagaagagactgttaactcatcgttaaagatggccgttgtctcttctaacagctactgatgatgtcccactttaaaaataaaacccccaaacatcactactttaaggaaaaaaaaaatgtagtccaatattgatgctttcttatggctttttattttaatttggctggataagttgtttcaaataactgttaaagatattacttacaattgaatgtttgaaataagaaagtactttaagcaatagagttcatctcctgctgtgttatccaacctcgatgtatacttacagcatctcaggtcaccctttttatttcagttatttaattatgaaaccataaagaagcatgtggaaatagtgtttattgctctttgaagaaaaaccaccaactatttctggatattttggctgtacctactactaaagtcattagtctttaatacataatacatatttgaaaagtaaacatattatatagattatgtgagggacttaatcatgaaaccagtttcacagtccaagtaccaactcttctggtagcaggtgcacaagcttgggtgtttaaaaacaacctgtgtagggtatgcccagcaaatgaggacaaatgtgtagacagtacttactggatcttatttaacttttagctacattaactaactttcttatttaaaaacaagaaagggagactaaacatctgcttaacttgtacacattttcagaattctttttaaaagtctagttaaagatgtttcttagaagttggagactgttaacaacttccataaaatagatccaggtttttcagttccctgaagcagcattcagtagcatctatataaataaaggcaccttctgagaataaaactattttatggagtgtgtgaacacacttgttctgtcacctgggttcatcttgttgtgaagcacattaggtccaggtccttccctctgggagtctgactgtgaaactctttaacccaacaactcaattagcccctgtagataagacatgcttcccagagtgagatttttgaaatccccttttcatccagaactatatttacccacctattgtaactattcaaatagagcaaaattaggaggcttgataaatactaagaatttagtaccacagaaattatttattattttccctgtagtccacaattagtgataacgaatcctatttttgttaactgtgacataactttgatgtcatatgttgtcctatgtggttcttcctaagtaaactctgtactgattatatactgacttagcaatgtggccttggaatgctgagcaaaatgtggatgtactggttgtaaatgtttatatattgtacagtacctttatatatacacttgaggttctgattagagaaagatctgtaaattgctcattattttttatatagatatttaaacaataaaaaaaa

SEQ ID NO: 319812 - DNA, 1831 bp, Homo sapiens
  misc_feature (507)..(507): n is a, c, g, or t
  misc_feature (619)..(619): n is a, c, g, or t
cgaattcccccctcccctccccataacatgcccactgccccaaataaaaaaaaaaccaactatgggagagcagccgagacagcaactaggggcaggggaaagagacatggaactcgagggcagcggtgaagagaccatgcgtgtgctgggagggcccagaggcagcggcggcacaaacagcgcaggtacgagtctctgtgtcttccccggggttatgtataaatatagagagatgaggccttctctcccctgctctcccttccgctccgtgctgctcgccgcggtcccagctcctctttccacatgagggcgaagggaaggggggatgaacaagtcatcaccgaattgcaatcagacccacatccatcagcttctggatcttctgtgctattacaggattctttaagtgttcgctgagtgcctgctcctggggacaattcccttttcctttcttcagcctaacccgcggtggccctcgcggagtccggtcagccccggggagcgcanccgggaggggcgtccaaggggcgtctcgcgtctgggaacggccgggcccccagcgggctgtggtcgcggggtgggggccggagcggcgaggccccccttaccgggctgcgcnggccgcccagggcccccgggctgagacggggccggagcggcgccccggccgcccgcgcggggtctcccccatggtgcagcggggttcgggatgtcgaagacgctgaagaagaagaagcactggctcagcaaggtgcaggagtgcgccgtgtcctgggccgggcccccgggcgacttcggcgcggagatccgcggtggcgcggagcgtggcgagttcccctacctggggcggctccgcgaggagcccggcgggggcacctgctgcgtcgtctcgggcaaggcgcccagcccaggcgatgtgctgctggaggtaaacgggacgcctgtcagcgggctcaccaaccgggacaccctggctgtcatccgccacttccgcgagcccatccgtctcaagactgtgaaaccagttcaaagctggagactggatactgacatgttcatgaccttgtgtacaagctgaaagctgctgaaagctacaggccaatggggctctgctttacttctgccttccatatcttgtgtcctgcatcttaatggtggaatcagatttgcatccagaatactagctataaaggagtctggaaaagacagtttttagttttccaacttctgcgtttcaggaaggcatactacaaggaggaagtcgctgagtgatagctgatcctttcccaggcactcatcttcttaaacatagtatattaattacaatttagcccattcttgatggctcattgtcatttctgtgagcttctcttttcataatggcctgtagttggaataatcatagggccaagggattttaacatctgtagtaactttttgtcctaggttagcttgtatctctcccacctcccataactgctgctgagacatctatgtttgatatcatttgacgtcaacctcccctgcaagccacaggcagggagagcacctcacccaaagcaaccagtttattggctggtcagcaacctgtgatttctgtagcttaaaaagatgagtggggcttattgtcttttgaactaagacaaaaaggaaagaatttccaattaagggtgggagcttcagctgagaggttttgaagtgagttggctgtattcttttgcaagaccaattgttaaattttcaagaattttgtgagttgtcaaacagccatttttaagaattaagttgcataataatttaataaaaacaaagataaatactcaaaaaaaat

SEQ ID NO: 319813 - DNA, 3052 bp, Homo sapiens
taaacggagcgcatttttctcatttgttaatatcaccacctaaatcatctcttgcctaaaacaaggagtagaaagtgaatgaaggaaggaacaggtgatggtcagtgtcctttctacgcctcaaaatttaagagtttatgtgaaaattcataaatattaatctcaatccaggttaagcaaaattttttgctctcctctttagaaatttctggttgccaaagttccagaaattgcttcctcattcctgagcctttcattttctcgatttctccattatgtaacggggagctggagctttgggccgaatttccaattaaagatgatttttacagtcaatgagccacgtcagggagcgatggcacccgcaggcggtatcaactgatgcaagtgttcaagcgaatctcaactcgttttttccggtgactcattcccggccctgcttggcagcgctgcaccctttaacttaaacctcggccggccgcccgccgggggcacagagtgtgcgccgggccgcgcggcaattggtccccgcgccgacctccgcccgcgagcgccgccgcttcccttccccgccccgcgtccctccccctcggccccgcgcgtcgcctgtcctccgagccagtcgctgacagccgcggcgccgcgagcttctcctctcctcacgaccgaggcagagcagtcattatggcgaaccttggctgctggatgctggttctctttgtggccacatggagtgacctgggcctctgcaagaagcgcccgaagcctggaggatggaacactgggggcagccgatacccggggcagggcagccctggaggcaaccgctacccacctcagggcggtggtggctgggggcagcctcatggtggtggctgggggcagcctcatggtggtggctgggggcagccccatggtggtggctggggacagcctcatggtggtggctggggtcaaggaggtggcacccacagtcagtggaacaagccgagtaagccaaaaaccaacatgaagcacatggctggtgctgcagcagctggggcagtggtggggggccttggcggctacgtgctgggaagtgccatgagcaggcccatcatacatttcggcagtgactatgaggaccgttactatcgtgaaaacatgcaccgttaccccaaccaagtgtactacaggcccatggatgagtacagcaaccagaacaactttgtgcacgactgcgtcaatatcacaatcaagcagcacacggtcaccacaaccaccaagggggagaacttcaccgagaccgacgttaagatgatggagcgcgtggttgagcagatgtgtatcacccagtacgagagggaatctcaggcctattaccagagaggatcgagcatggtcctcttctcctctccacctgtgatcctcctgatctctttcctcatcttcctgatagtgggatgaggaaggtcttcctgttttcaccatctttctaatctttttccagcttgagggaggcggtatccacctgcagcccttttagtggtggtgtctcactctttcttctctctttgtcccggataggctaatcaatacccttggcactgatgggcactggaaaacatagagtagacctgagatgctggtcaagccccctttgattgagttcatcatgagccgttgctaatgccaggccagtaaaagtataacagcaaataaccattggttaatctggacttatttttggacttagtgcaacaggttgaggctaaaacaaatctcagaacagtctgaaatacctttgcctggatacctctggctccttcagcagctagagctcagtatactaatgccctatcttagtagagatttcatagctatttagagatattttccattttaagaaaacccgacaacatttctgccaggtttgttaggaggccacatgatacttattcaaaaaaatcctagagattcttagctcttgggatgcaggctcagcccgctggagcatgagctctgtgtgtaccgagaactggggtgatgttttacttttcacagtatgggctacacagcagctgttcaacaagagtaaatattgtcacaacactgaacctctggctagaggacatattcacagtgaacataactgtaacatatatgaaaggcttctgggacttgaaatcaaatgtttgggaatggtgcccttggaggcaacctcccattttagatgtttaaaggaccctatatgtggcattcctttctttaaactataggtaattaaggcagctgaaaagtaaattgccttctagacactgaaggcaaatctcctttgtccatttacctggaaaccagaatgattttgacatacaggagagctgcagttgtgaaagcaccatcatcatagaggatgatgtaattaaaaaatggtcagtgtgcaaagaaaagaactgcttgcatttctttatttctgtctcataattgtcaaaaaccagaattaggtcaagttcatagtttctgtaattggcttttgaatcaaagaatagggagacaatctaaaaaatatcttaggttggagatgacagaaatatgattgatttgaagtggaaaaagaaattctgttaatgttaattaaagtaaaattattccctgaattgtttgatattgtcacctagcagatatgtattacttttctgcaatgttattattggcttgcactttgtgagtattctatgtaaaaatatatatgtatataaaatatatattgcataggacagacttaggagttttgtttagagcagttaacatctgaagtgtctaatgcattaacttttgtaaggtactgaatacttaatatgtgggaaacccttttgcgtggtccttaggcttacaatgtgcactgaatcgtttcatgtaagaatccaaagtggacaccattaacaggtctttgaaatatgcatgtactttatattttctatatttgtaactttgcatgttcttgttttgttatataaaaaaattgtaaatgtttaatatctgactgaaattaaacgagcgaagatgagcacca

SEQ ID NO: 319814 - DNA, 1030 bp, Homo sapiens
taaacggagcgcatttttctcatttgttaatatcaccacctaaatcatctcttgcctaaaacaaggagtagaaagtgaatgaaggaaggaacaggtgatggtcagtgtcctttctacgcctcaaaatttaagagtttatgtgaaaattcataaatattaatctcaatccaggttaagcaaaattttttgctctcctctttagaaatttctggttgccaaagttccagaaattgcttcctcattcctgagcctttcattttctcgatttctccattatgtaacggggagctggagctttgggccgaatttccaattaaagatgatttttacagtcaatgagccacgtcagggagcgatggcacccgcaggcggtatcaactgatgcaagtgttcaagcgaatctcaactcgttttttccggtgactcattcccggccctgcttggcagcgctgcaccctttaacttaaacctcggccggccgcccgccgggggcacagagtgtgcgccgggccgcgcggcaattggtccccgcgccgacctccgcccgcgagcgccgccgcttcccttccccgccccgcgtccctccccctcggccccgcgcgtcgcctgtcctccgagccagtcgctgacagccgcggcgccgcgagcttctcctctcctcacgaccgaggcagagcagtcattatggcgaaccttggctgctggatgctggttctctttgtggccacatggagtgacctgggcctctgcaagaagcgcccgaagcctggaggatggaacactgggggccagaacttcaattgtgtccctaatgggaaaccttgctgggatcatgtggtctacagcacaaggttgctaaagcatcttctgccagaattctgtgagtatctggttaggtgggtctggaatatactgagtttaaaaaagttaaataggtttctttactgcaagatgtttcagagactttaatatgctactctgctgtatgaatctccaggcaggaaatcttataaaatgtgtttctgaaatg

SEQ ID NO: 319815 - DNA, 1349 bp, Homo sapiens
taaacggagcgcatttttctcatttgttaatatcaccacctaaatcatctcttgcctaaaacaaggagtagaaagtgaatgaaggaaggaacaggtgatggtcagtgtcctttctacgcctcaaaatttaagagtttatgtgaaaattcataaatattaatctcaatccaggttaagcaaaattttttgctctcctctttagaaatttctggttgccaaagttccagaaattgcttcctcattcctgagcctttcattttctcgatttctccattatgtaacggggagctggagctttgggccgaatttccaattaaagatgatttttacagtcaatgagccacgtcagggagcgatggcacccgcaggcggtatcaactgatgcaagtgttcaagcgaatctcaactcgttttttccggtgactcattcccggccctgcttggcagcgctgcaccctttaacttaaacctcggccggccgcccgccgggggcacagagtgtgcgccgggccgcgcggcaattggtccccgcgccgacctccgcccgcgagcgccgccgcttcccttccccgccccgcgtccctccccctcggccccgcgcgtcgcctgtcctccgagccagtcgctgacagccgcggcgccgcgagcttctcctctcctcacgaccgaggcagagcagtcattatggcgaaccttggctgctggatgctggttctctttgtggccacatggagtgacctgggcctctgcaagaagcgcccgaagcctggaggatggaacactgggggccagaacttcaattgtgtccctaatgggaaaccttgctgggatcatgtggtctacagcacaaggttgctaaagcatcttctgccagaattctgtgagtatctggttaggtgggtctggaatatactgagtttaaaaaagttaaataggtttctttactgcaagatgtttcagagactttaatatgctactctgctgtatgaatctccaggcaggaaatcttataaaatgtgtttctgaaatgacaaaaaaaaacaacacacaacagttttcaaaaaaaagaagaaaaacaatcagaagcacccgaccagacataccaaacgagccagaccaacacacgtgccgttggggccgcgcggcgccgcagaagaaagggtttttaacacaccgcgtgggagcagccgccacaaggatgacaaccaccgtgcctcactcgtggtccaacgaaagcccgcgggcaactcgcgcgtgggtaccccaaaaaaaaccgcgcggaacgccgtcttaaagccaggggcacgcccacaggcacgaagacgcagcgctaatccccgccggggggc

SEQ ID NO: 319816 - DNA, 2998 bp, Homo sapiens
taaacggagcgcatttttctcatttgttaatatcaccacctaaatcatctcttgcctaaaacaaggagtagaaagtgaatgaaggaaggaacaggtgatggtcagtgtcctttctacgcctcaaaatttaagagtttatgtgaaaattcataaatattaatctcaatccaggttaagcaaaattttttgctctcctctttagaaatttctggttgccaaagttccagaaattgcttcctcattcctgagcctttcattttctcgatttctccattatgtaacggggagctggagctttgggccgaatttccaattaaagatgatttttacagtcaatgagccacgtcagggagcgatggcacccgcaggcggtatcaactgatgcaagtgttcaagcgaatctcaactcgttttttccggtgactcattcccggccctgcttggcagcgctgcaccctttaacttaaacctcggccggccgcccgccgggggcacagagtgtgcgccgggccgcgcggcaattggtccccgcgccgacctccgcccgcgagcgccgccgcttcccttccccgccccgcgtccctccccctcggccccgcgcgtcgcctgtcctccgagccagtcgctgacagccgcggcgccgcgagcttctcctctcctcacgaccgaggcagagcagtcattatggcgaaccttggctgctggatgctggttctctttgtggccacatggagtgacctgggcctctgcaagaagcgcccgaagcctggaggatggaacactgggggcagccgatacccggggcagggcagccctggaggcaaccgctacccacctcagggcggtggtggctgggggcagcctcatggtggtggctgggggcagcctcatggtggtggctgggggcagccccatggtggtggctggggacagcctcatggtggtggctggggtcaaggaggtggcacccacagtcagtggaacaagccgagtaagccaaaaaccaacatgaagcacatggctggtgctgcagcagctggggcagtggtggggggccttggcggctacgtgctgggaagtgccatgagcaggcccatcatacatttcggcagtgactatgaggaccgttactatcgtgaaaacatgcaccgttaccccaaccaagtgtactacaggcccatggatgagtacagcaaccagaacaactttgtgcacgactgcgtcaatatcacaatcaagcagcacacggtcaccacaaccaccaagggggagaacttcaccgagaccgacgttaagatgatggagcgcgtggttgagcagatgtgtatcacccagtacgagagggaatctcaggcctattaccagagaggatcgagcatggtcctcttctcctctccacctgtgatcctcctgatctctttcctcatcttcctgatagtgggatgaggaaggtcttcctgttttcaccatctttctaatctttttccagcttgagggaggcggtatccacctgcagcccttttagtggtggtgtctcactctttcttctctctttgtcccggataggctaatcaatacccttggcactgatgggcactggaaaacatagagtagacctgagatgctggtcaagccccctttgattgagttcatcatgagccgttgctaatgccaggccagtaaaagtataacagcaaataaccattggttaatctggacttatttttggacttagtgcaacaggttgaggcttcagcagctagagctcagtatactaatgccctatcttagtagagatttcatagctatttagagatattttccattttaagaaaacccgacaacatttctgccaggtttgttaggaggccacatgatacttattcaaaaaaatcctagagattcttagctcttgggatgcaggctcagcccgctggagcatgagctctgtgtgtaccgagaactggggtgatgttttacttttcacagtatgggctacacagcagctgttcaacaagagtaaatattgtcacaacactgaacctctggctagaggacatattcacagtgaacataactgtaacatatatgaaaggcttctgggacttgaaatcaaatgtttgggaatggtgcccttggaggcaacctcccattttagatgtttaaaggaccctatatgtggcattcctttctttaaactataggtaattaaggcagctgaaaagtaaattgccttctagacactgaaggcaaatctcctttgtccatttacctggaaaccagaatgattttgacatacaggagagctgcagttgtgaaagcaccatcatcatagaggatgatgtaattaaaaaatggtcagtgtgcaaagaaaagaactgcttgcatttctttatttctgtctcataattgtcaaaaaccagaattaggtcaagttcatagtttctgtaattggcttttgaatcaaagaatagggagacaatctaaaaaatatcttaggttggagatgacagaaatatgattgatttgaagtggaaaaagaaattctgttaatgttaattaaagtaaaattattccctgaattgtttgatattgtcacctagcagatatgtattacttttctgcaatgttattattggcttgcactttgtgagtattctatgtaaaaatatatatgtatataaaatatatattgcataggacagacttaggagttttgtttagagcagttaacatctgaagtgtctaatgcattaacttttgtaaggtactgaatacttaatatgtgggaaacccttttgcgtggtccttaggcttacaatgtgcactgaatcgtttcatgtaagaatccaaagtggacaccattaacaggtctttgaaatatgcatgtactttatattttctatatttgtaactttgcatgttcttgttttgttatataaaaaaattgtaaatgtttaatatctgactgaaattaaacgagcgaagatgagcacca

SEQ ID NO: 319817 - DNA, 3592 bp, Homo sapiens
taaacggagcgcatttttctcatttgttaatatcaccacctaaatcatctcttgcctaaaacaaggagtagaaagtgaatgaaggaaggaacaggtgatggtcagtgtcctttctacgcctcaaaatttaagagtttatgtgaaaattcataaatattaatctcaatccaggttaagcaaaattttttgctctcctctttagaaatttctggttgccaaagttccagaaattgcttcctcattcctgagcctttcattttctcgatttctccattatgtaacggggagctggagctttgggccgaatttccaattaaagatgatttttacagtcaatgagccacgtcagggagcgatggcacccgcaggcggtatcaactgatgcaagtgttcaagcgaatctcaactcgttttttccggtgactcattcccggccctgcttggcagcgctgcaccctttaacttaaacctcggccggccgcccgccgggggcacagagtgtgcgccgggccgcgcggcaattggtccccgcgccgacctccgcccgcgagcgccgccgcttcccttccccgccccgcgtccctccccctcggccccgcgcgtcgcctgtcctccgagccagtcgctgacagccgcggcgccgcgagcttctcctctcctcacgaccgaggcagagcagtcattatggcgaaccttggctgctggatgctggttctctttgtggccacatggagtgacctgggcctctgcaagaagcgcccgaagcctggaggatggaacactgggggcagccgatacccggggcagggcagccctggaggcaaccgctacccacctcagggcggtggtggctgggggcagcctcatggtggtggctgggggcagcctcatggtggtggctgggggcagccccatggtggtggctggggacagcctcatggtggtggctggggtcaaggaggtggcacccacagtcagtggaacaagccgagtaagccaaaaaccaacatgaagcacatggctggtgctgcagcagctggggcagtggtggggggccttggcggctacgtgctgggaagtgccatgagcaggcccatcatacatttcggcagtgactatgaggaccgttactatcgtgaaaacatgcaccgttaccccaaccaagtgtactacaggcccatggatgagtacagcaaccagaacaactttgtgcacgactgcgtcaatatcacaatcaagcagcacacggtcaccacaaccaccaagggggagaacttcaccgagaccgacgttaagatgatggagcgcgtggttgagcagatgtgtatcacccagtacgagagggaatctcaggcctattaccagagaggatcgagcatggtcctcttctcctctccacctgtgatcctcctgatctctttcctcatcttcctgatagtgggatgaggaaggtcttcctgttttcaccatctttctaatctttttccagcttgagggaggcggtatccacctgcagcccttttagtggtggtgtctcactctttcttctctctttgtcccggataggctaatcaatacccttggcactgatgggcactggaaaacatagagtagacctgagatgctggtcaagccccctttgattgagttcatcatgagccgttgctaatgccaggccagtaaaagtataacagcaaataaccattggttaatctggacttatttttggacttagtgcaacaggttgaggctaaaacaaatctcagaacagtctgaaatacctttgcctggatacctctggctccttcagcagctagagctcagtatactaatgccctatcttagtagagatttcatagctatttagagatattttccattttaagaaaacccgacaacatttctgccaggtttgttaggaggccacatgatacttattcaaaaaaatcctagagattcttagctcttgggatgcaggctcagcccgctggagcatgagctctgtgtgtaccgagaactggggtgatgttttacttttcacagtatgggctacacagcagctgttcaacaagagtaaatattgtcacaacactgaacctctggctagaggacatattcacagtgaacataactgtaacatatatgaaaggcttctgggacttgaaatcaaatgtttgggaatggtgcccttggaggcaacctcccattttagatgtttaaaggaccctatatgtggcattcctttctttaaactataggtaattaaggcagctgaaaagtaaattgccttctagacactgaaggcaaatctcctttgtccatttacctggaaaccagaatgattttgacatacaggagagctgcagttgtgaaagcaccatcatcatagaggatgatgtaattaaaaaatggtcagtgtgcaaagaaaagaactgcttgcatttctttatttctgtctcataattgtcaaaaaccagaattaggtcaagttcatagtttctgtaattggcttttgaatcaaagaatagggagacaatctaaaaaatatcttaggttggagatgacagaaatatgattgatttgaagtggaaaaagaaattctgttaatgttaattaaagtaaaattattccctgaattgtttgatattgtcacctagcagatatgtattacttttctgcaatgttattattggcttgcactttgtgagtattctatgtaaaaatatatatgtatataaaatatatattgcataggacagacttaggagttttgtttagagcagttaacatctgaagtgtctaatgcattaacttttgtaaggtactgaatacttaatatgtgggaaacccttttgcgtggtccttaggcttacaatgtgcactgaatcgtttcatgtaagaatccaaagtggacaccattaacaggtctttgaaatatgcatgtactttatattttctatatttgtaactttgcatgttcttgttttgttatataaaaaaattgtaaatgtttaatatctgactgaaattaaacgagcgaagatgagcaccaaaaaaacagagcagaaagacgacacagttgacgcaacaaccaaacatagcaacgaggccactggagcactcacaaacaataatcaacgcgctacaggccgtcaacccggaacacaaatgaccaacctaaccacgcatcgacagggccgcgcccccttcaacatcgcatcatccctgagcggagcacaccgtggactctccggcgctcccccactacttccaccagcatcgtgaccgaactctataccgacgatgagtattacgtgatgggcccggcaccatagaaagccagaccaaggacagacagaaacaacaacgggtggcaggactggagagacaccgactgacccgggcggcgaaggagcgcgccggacaagcactgaggaacacagcggccacgatactacacaatggtgtgatcggcaaaaccccgcgagccgcgcgaaacggcgcggcgatgcatccagaattcgcggcccagagaaatggccgaaggcgccccgcgccacacgagcgcggcgcgagcggacgacacagccca

SEQ ID NO: 319818 - DNA, 3083 bp, Homo sapiens
  misc_feature (2826)..(2826): n is a, c, g, or t
  misc_feature (2831)..(2831): n is a, c, g, or t
  misc_feature (2839)..(2839): n is a, c, g, or t
  misc_feature (2903)..(2903): n is a, c, g, or t
  misc_feature (2912)..(2914): n is a, c, g, or t
  misc_feature (2940)..(2940): n is a, c, g, or t
  misc_feature (2949)..(2949): n is a, c, g, or t
  misc_feature (2952)..(2952): n is a, c, g, or t
  misc_feature (2975)..(2975): n is a, c, g, or t
  misc_feature (2977)..(2977): n is a, c, g, or t
  misc_feature (2980)..(2980): n is a, c, g, or t
  misc_feature (2984)..(2984): n is a, c, g, or t
  misc_feature (2996)..(2996): n is a, c, g, or t
  misc_feature (3000)..(3000): n is a, c, g, or t
taaacggagcgcatttttctcatttgttaatatcaccacctaaatcatctcttgcctaaaacaaggagtagaaagtgaatgaaggaaggaacaggtgatggtcagtgtcctttctacgcctcaaaatttaagagtttatgtgaaaattcataaatattaatctcaatccaggttaagcaaaattttttgctctcctctttagaaatttctggttgccaaagttccagaaattgcttcctcattcctgagcctttcattttctcgatttctccattatgtaacggggagctggagctttgggccgaatttccaattaaagatgatttttacagtcaatgagccacgtcagggagcgatggcacccgcaggcggtatcaactgatgcaagtgttcaagcgaatctcaactcgttttttccggtgactcattcccggccctgcttggcagcgctgcaccctttaacttaaacctcggccggccgcccgccgggggcacagagtgtgcgccgggccgcgcggcaattggtccccgcgccgacctccgcccgcgagcgccgccgcttcccttccccgccccgcgtccctccccctcggccccgcgcgtcgcctgtcctccgagccagtcgctgacagccgcggcgccgcgagcttctcctctcctcacgaccgaggcagagcagtcattatggcgaaccttggctgctggatgctggttctctttgtggccacatggagtgacctgggcctctgcaagaagcgcccgaagcctggaggatggaacactgggggcagccgatacccggggcagggcagccctggaggcaaccgctacccacctcagggcggtggtggctgggggcagcctcatggtggtggctgggggcagcctcatggtggtggctgggggcagccccatggtggtggctggggacagcctcatggtggtggctggggtcaaggaggtggcacccacagtcagtggaacaagccgagtaagccaaaaaccaacatgaagcacatggctggtgctgcagcagctggggcagtggtggggggccttggcggctacgtgctgggaagtgccatgagcaggcccatcatacatttcggcagtgactatgaggaccgttactatcgtgaaaacatgcaccgttaccccaaccaagtgtactacaggcccatggatgagtacagcaaccagaacaactttgtgcacgactgcgtcaatatcacaatcaagcagcacacggtcaccacaaccaccaagggggagaacttcaccgagaccgacgttaagatgatggagcgcgtggttgagcagatgtgtatcacccagtacgagagggaatctcaggcctattaccagagaggatcgagcatggtcctcttctcctctccacctgtgatcctcctgatctctttcctcatcttcctgatagtgggatgaggaaggtcttcctgttttcaccatctttctaatctttttccagcttgagggaggcggtatccacctgcagcccttttagtggtggtgtctcactctttcttctctctttgtcccggataggctaatcaatacccttggcactgatgggcactggaaaacatagagtagacctgagatgctggtcaagccccctttgattgagttcatcatgagccgttgctaatgccaggccagtaaaagtataacagcaaataaccattggttaatctggacttatttttggacttagtgcaacaggttgaggctaaaacaaatctcagaacagtctgaaatacctttgcctggatacctctggctccttcagcagctagagctcagtatactaatgccctatcttagtagagatttcatagctatttagagatattttccattttaagaaaacccgacaacatttctgccaggtttgttaggaggccacatgatacttattcaaaaaaatcctagagattcttagctcttgggatgcaggctcagcccgctggagcatgagctctgtgtgtaccgagaactggggtgatgttttacttttcacagtatgggctacacagcagctgttcaacaagagtaaatattgtcacaacactgaacctctggctagaggacatattcacagtgaacataactgtaacatatatgaaaggcttctgggacttgaaatcaaatgtttgggaatggtgcccttggaggcaacctcccattttagatgtttaaaggaccctatatgtggcattcctttctttaaactataggtaattaaggcagctgaaaagtaaattgccttctagacactgaaggcaaatctcctttgtccatttacctggaaaccagaatgattttgacatacaggagagctgcagttgtgaaagcaccatcatcatagaggatgatgtaattaaaaaatggtcagtgtgcaaagaaaagaactgcttgcatttctttatttctgtctcataattgtcaaaaaccagaattaggtcaagttcatagtttctgtaattggcttttgaatcaaagaatagggagacaatctaaaaaatatcttaggttggagatgacagaaatatgattgatttgaagtggaaaaagaaattctgttaatgttaattaaagtaaaattattccctgaattgtttgatattgtcacctagcagatatgtattacttttctgcaatgttattattggcttgcactttgtgagtattctatgtaaaaatatatatgtatataaaatatatattgcataggacagacttaggagttttgtttagagcagttaacatctgaagtgtcaacgtacgttgacacttcagctcctnctgcnaagcaacnaaggatgggagtacagggttgggagggtctggctgttgagaccctcaggtttgctcagactctnctgaccctnnnaggccacactcaccacgagtctgtgnaggaagggnaantttagtgcagctcccactgctcntnctntccngctgtccttccntctnttttggaataacgcctcatccttcagaactaacctgcagtgtccacagttctcctcgaccacctgaagtgtcacgtgagatcc

SEQ ID NO: 319819 - DNA, 2016 bp, Homo sapiens
taaacggagcgcatttttctcatttgttaatatcaccacctaaatcatctcttgcctaaaacaaggagtagaaagtgaatgaaggaaggaacaggtgatggtcagtgtcctttctacgcctcaaaatttaagagtttatgtgaaaattcataaatattaatctcaatccaggttaagcaaaattttttgctctcctctttagaaatttctggttgccaaagttccagaaattgcttcctcattcctgagcctttcattttctcgatttctccattatgtaacggggagctggagctttgggccgaatttccaattaaagatgatttttacagtcaatgagccacgtcagggagcgatggcacccgcaggcggtatcaactgatgcaagtgttcaagcgaatctcaactcgttttttccggtgactcattcccggccctgcttggcagcgctgcaccctttaacttaaacctcggccggccgcccgccgggggcacagagtgtgcgccgggccgcgcggcaattggtccccgcgccgacctccgcccgcgagcgccgccgcttcccttccccgccccgcgtccctccccctcggccccgcgcgtcgcctgtcctccgagccagtcgctgacagccgcggcgccgcgagcttctcctctcctcacgaccgaggcagagcagtcattatggcgaaccttggctgctggatgctggttctctttgtggccacatggagtgacctgggcctctgcaagaagcgcccgaagcctggaggatggaacactgggggcagccgatacccggggcagggcagccctggaggcaaccgctacccacctcagggcggtggtggctgggggcagcctcatggtggtggctgggggcagcctcatggtggtggctgggggcagccccatggtggtggctggggacagcctcatggtggtggctggggtcaaggaggtggcacccacagtcagtggaacaagccgagtaagccaaaaaccaacatgaagcacatggctggtgctgcagcagctggggcagtggtggggggccttggcggctacgtgctgggaagtgccatgagcaggcccatcatacatttcggcagtgactatgaggaccgttactatcgtgaaaacatgcaccgttaccccaaccaagtgtactacaggcccatggatgagtacagcaaccagaacaactttgtgcacgactgcgtcaatatcacaatcaagcagcacacggtcaccacaaccaccaagggggagaacttcaccgagaccgacgttaagatgatggagcgcgtggttgagcagatgtgtatcacccagtacgagagggaatctcaggcctattaccagagaggatcgagcatggtcctcttctcctctccacctgtgatcctcctgatctctttcctcatcttcctgatagtgggatgaggaaggtcttcctgttttcaccatctttctaatctttttccagcttgagggaggcggtatccacctgcagcccttttagtggtggtgtctcactctttcttctctctttgtcccggataggctaatcaatacccttggcactgatgggcactggaaaacatagagtagacctgagatgctggtcaagccccctttgattgagttcatcatgagccgttgctaatgccaggccagtaaaagtataacagcaaataaccattggttaatctggacttatttttggacttagtgcaacaggttgaggctaaaacaaatctcagaacagtctgaaatacctttgcctggatacctctggctccttcagcagctagagctcagtatactaatgccctatcttagtagagatttcatagctatttagagatattttccattttaagaaaacgaaatttgcccgtgtgggcctggttttcaaaactaagttttgccggggaggcccggacgagccgggccgcagggtgtcagggcgccggcaaattacccggggaacgaaaaaaagggaagggggca

SEQ ID NO: 319820 - DNA, 2969 bp, Homo sapiens
taaacggagcgcatttttctcatttgttaatatcaccacctaaatcatctcttgcctaaaacaaggagtagaaagtgaatgaaggaaggaacaggtgatggtcagtgtcctttctacgcctcaaaatttaagagtttatgtgaaaattcataaatattaatctcaatccaggttaagcaaaattttttgctctcctctttagaaatttctggttgccaaagttccagaaattgcttcctcattcctgagcctttcattttctcgatttctccattatgtaacggggagctggagctttgggccgaatttccaattaaagatgatttttacagtcaatgagccacgtcagggagcgatggcacccgcaggcggtatcaactgatgcaagtgttcaagcgaatctcaactcgttttttccggtgactcattcccggccctgcttggcagcgctgcaccctttaacttaaacctcggccggccgcccgccgggggcacagagtgtgcgccgggccgcgcggcaattggtccccgcgccgacctccgcccgcgagcgccgccgcttcccttccccgccccgcgtccctccccctcggccccgcgcgtcgcctgtcctccgagccagtcgctgacagccgcggcgccgcgagcttctcctctcctcacgaccgaggcagagcagtcattatggcgaaccttggctgctggatgctggttctctttgtggccacatggagtgacctgggcctctgcaagaagcgcccgaagcctggaggatggaacactgggggcagccgatacccggggcagggcagccctggaggcaaccgctacccacctcagggcggtggtggctggtggtggtggctggggtcaaggaggtggcacccacagtcagtggaacaagccgagtaagccaaaaaccaacatgaagcacatggctggtgctgcagcagctggggcagtggtggggggccttggcggctacgtgctgggaagtgccatgagcaggcccatcatacatttcggcagtgactatgaggaccgttactatcgtgaaaacatgcaccgttaccccaaccaagtgtactacaggcccatggatgagtacagcaaccagaacaactttgtgcacgactgcgtcaatatcacaatcaagcagcacacggtcaccacaaccaccaagggggagaacttcaccgagaccgacgttaagatgatggagcgcgtggttgagcagatgtgtatcacccagtacgagagggaatctcaggcctattaccagagaggatcgagcatggtcctcttctcctctccacctgtgatcctcctgatctctttcctcatcttcctgatagtgggatgaggaaggtcttcctgttttcaccatctttctaatctttttccagcttgagggaggcggtatccacctgcagcccttttagtggtggtgtctcactctttcttctctctttgtcccggataggctaatcaatacccttggcactgatgggcactggaaaacatagagtagacctgagatgctggtcaagccccctttgattgagttcatcatgagccgttgctaatgccaggccagtaaaagtataacagcaaataaccattggttaatctggacttatttttggacttagtgcaacaggttgaggctaaaacaaatctcagaacagtctgaaatacctttgcctggatacctctggctccttcagcagctagagctcagtatactaatgccctatcttagtagagatttcatagctatttagagatattttccattttaagaaaacccgacaacatttctgccaggtttgttaggaggccacatgatacttattcaaaaaaatcctagagattcttagctcttgggatgcaggctcagcccgctggagcatgagctctgtgtgtaccgagaactggggtgatgttttacttttcacagtatgggctacacagcagctgttcaacaagagtaaatattgtcacaacactgaacctctggctagaggacatattcacagtgaacataactgtaacatatatgaaaggcttctgggacttgaaatcaaatgtttgggaatggtgcccttggaggcaacctcccattttagatgtttaaaggaccctatatgtggcattcctttctttaaactataggtaattaaggcagctgaaaagtaaattgccttctagacactgaaggcaaatctcctttgtccatttacctggaaaccagaatgattttgacatacaggagagctgcagttgtgaaagcaccatcatcatagaggatgatgtaattaaaaaatggtcagtgtgcaaagaaaagaactgcttgcatttctttatttctgtctcataattgtcaaaaaccagaattaggtcaagttcatagtttctgtaattggcttttgaatcaaagaatagggagacaatctaaaaaatatcttaggttggagatgacagaaatatgattgatttgaagtggaaaaagaaattctgttaatgttaattaaagtaaaattattccctgaattgtttgatattgtcacctagcagatatgtattacttttctgcaatgttattattggcttgcactttgtgagtattctatgtaaaaatatatatgtatataaaatatatattgcataggacagacttaggagttttgtttagagcagttaacatctgaagtgtctaatgcattaacttttgtaaggtactgaatacttaatatgtgggaaacccttttgcgtggtccttaggcttacaatgtgcactgaatcgtttcatgtaagaatccaaagtggacaccattaacaggtctttgaaatatgcatgtactttatattttctatatttgtaactttgcatgttcttgttttgttatataaaaaaattgtaaatgtttaatatctgactgaaattaaacgagcgaagatgagcacca

SEQ ID NO: 319821 - DNA, 2903 bp, Homo sapiens
taaacggagcgcatttttctcatttgttaatatcaccacctaaatcatctcttgcctaaaacaaggagtagaaagtgaatgaaggaaggaacaggtgatggtcagtgtcctttctacgcctcaaaatttaagagtttatgtgaaaattcataaatattaatctcaatccaggttaagcaaaattttttgctctcctctttagaaatttctggttgccaaagttccagaaattgcttcctcattcctgagcctttcattttctcgatttctccattatgtaacggggagctggagctttgggccgaatttccaattaaagatgatttttacagtcaatgagccacgtcagggagcgatggcacccgcaggcggtatcaactgatgcaagtgttcaagcgaatctcaactcgttttttccggtgactcattcccggccctgcttggcagcgctgcaccctttaacttaaacctcggccggccgcccgccgggggcacagagtgtgcgccgggccgcgcggcaattggtccccgcgccgacctccgcccgcgagcgccgccgcttcccttccccgccccgcgtccctccccctcggccccgcgcgtcgcctgtcctccgagccagtcgctgacagccgcggcgccgcgagcttctcctctcctcacgaccgaggcagagcagtcattatggcgaaccttggctgctggatgctggttctctttgtggccacatggagtgacctgggcctctgcaagaagcgcccgaagcctggaggatggaacactgggggctggtggtggctggggtcaaggaggtggcacccacagtcagtggaacaagccgagtaagccaaaaaccaacatgaagcacatggctggtgctgcagcagctggggcagtggtggggggccttggcggctacgtgctgggaagtgccatgagcaggcccatcatacatttcggcagtgactatgaggaccgttactatcgtgaaaacatgcaccgttaccccaaccaagtgtactacaggcccatggatgagtacagcaaccagaacaactttgtgcacgactgcgtcaatatcacaatcaagcagcacacggtcaccacaaccaccaagggggagaacttcaccgagaccgacgttaagatgatggagcgcgtggttgagcagatgtgtatcacccagtacgagagggaatctcaggcctattaccagagaggatcgagcatggtcctcttctcctctccacctgtgatcctcctgatctctttcctcatcttcctgatagtgggatgaggaaggtcttcctgttttcaccatctttctaatctttttccagcttgagggaggcggtatccacctgcagcccttttagtggtggtgtctcactctttcttctctctttgtcccggataggctaatcaatacccttggcactgatgggcactggaaaacatagagtagacctgagatgctggtcaagccccctttgattgagttcatcatgagccgttgctaatgccaggccagtaaaagtataacagcaaataaccattggttaatctggacttatttttggacttagtgcaacaggttgaggctaaaacaaatctcagaacagtctgaaatacctttgcctggatacctctggctccttcagcagctagagctcagtatactaatgccctatcttagtagagatttcatagctatttagagatattttccattttaagaaaacccgacaacatttctgccaggtttgttaggaggccacatgatacttattcaaaaaaatcctagagattcttagctcttgggatgcaggctcagcccgctggagcatgagctctgtgtgtaccgagaactggggtgatgttttacttttcacagtatgggctacacagcagctgttcaacaagagtaaatattgtcacaacactgaacctctggctagaggacatattcacagtgaacataactgtaacatatatgaaaggcttctgggacttgaaatcaaatgtttgggaatggtgcccttggaggcaacctcccattttagatgtttaaaggaccctatatgtggcattcctttctttaaactataggtaattaaggcagctgaaaagtaaattgccttctagacactgaaggcaaatctcctttgtccatttacctggaaaccagaatgattttgacatacaggagagctgcagttgtgaaagcaccatcatcatagaggatgatgtaattaaaaaatggtcagtgtgcaaagaaaagaactgcttgcatttctttatttctgtctcataattgtcaaaaaccagaattaggtcaagttcatagtttctgtaattggcttttgaatcaaagaatagggagacaatctaaaaaatatcttaggttggagatgacagaaatatgattgatttgaagtggaaaaagaaattctgttaatgttaattaaagtaaaattattccctgaattgtttgatattgtcacctagcagatatgtattacttttctgcaatgttattattggcttgcactttgtgagtattctatgtaaaaatatatatgtatataaaatatatattgcataggacagacttaggagttttgtttagagcagttaacatctgaagtgtctaatgcattaacttttgtaaggtactgaatacttaatatgtgggaaacccttttgcgtggtccttaggcttacaatgtgcactgaatcgtttcatgtaagaatccaaagtggacaccattaacaggtctttgaaatatgcatgtactttatattttctatatttgtaactttgcatgttcttgttttgttatataaaaaaattgtaaatgtttaatatctgactgaaattaaacgagcgaagatgagcacca

SEQ ID NO: 319822 - DNA, 3027 bp, Homo sapiens
taaacggagcgcatttttctcatttgttaatatcaccacctaaatcatctcttgcctaaaacaaggagtagaaagtgaatgaaggaaggaacaggtgatggtcagtgtcctttctacgcctcaaaatttaagagtttatgtgaaaattcataaatattaatctcaatccaggttaagcaaaattttttgctctcctctttagaaatttctggttgccaaagttccagaaattgcttcctcattcctgagcctttcattttctcgatttctccattatgtaacggggagctggagctttgggccgaatttccaattaaagatgatttttacagtcaatgagccacgtcagggagcgatggcacccgcaggcggtatcaactgatgcaagtgttcaagcgaatctcaactcgttttttccggtgactcattcccggccctgcttggcagcgctgcaccctttaacttaaacctcggccggccgcccgccgggggcacagagtgtgcgccgggccgcgcggcaattggtccccgcgccgacctccgcccgcgagcgccgccgcttcccttccccgccccgcgtccctccccctcggccccgcgcgtcgcctgtcctccgagccagtcgctgacagccgcggcgccgcgagcttctcctctcctcacgaccgaggcagagcagtcattatggcgaaccttggctgctggatgctggttctctttgtggccacatggagtgacctgggcctctgcaagaagcgcccgaagcctggaggatggaacactgggggcagccgatacccggggcagggcagccctggaggcaaccgctacccacctcagggcggtggtggctgggggcagcctcatggtggtggctgggggcagcctcatggtggtggctgggggcagccccatggtggtggctggggacagcctcatggtggtggctggggtcaaggaggtggcacccacagtcagtggaacaagccgagtaagccaaaaaccaacatgaagcacatggctggtgctgcagcagctggggcagtggtggggggccttggcggctacgtgctgggaagtgccatgagcaggcccatcatacatttcggcagtgactatgaggaccgttactatcgtgaaaacatgcaccgttaccccaaccaagtgtactacaggcccatggatgagtacagcaaccagaacaactttgtgcacgactgcgtcaatatcacaacaccaagggggagaacttcaccgagaccgacgttaagatgatggagcgcgtggttgagcagatgtgtatcacccagtacgagagggaatctcaggcctattaccagagaggatcgagcatggtcctcttctcctctccacctgtgatcctcctgatctctttcctcatcttcctgatagtgggatgaggaaggtcttcctgttttcaccatctttctaatctttttccagcttgagggaggcggtatccacctgcagcccttttagtggtggtgtctcactctttcttctctctttgtcccggataggctaatcaatacccttggcactgatgggcactggaaaacatagagtagacctgagatgctggtcaagccccctttgattgagttcatcatgagccgttgctaatgccaggccagtaaaagtataacagcaaataaccattggttaatctggacttatttttggacttagtgcaacaggttgaggctaaaacaaatctcagaacagtctgaaatacctttgcctggatacctctggctccttcagcagctagagctcagtatactaatgccctatcttagtagagatttcatagctatttagagatattttccattttaagaaaacccgacaacatttctgccaggtttgttaggaggccacatgatacttattcaaaaaaatcctagagattcttagctcttgggatgcaggctcagcccgctggagcatgagctctgtgtgtaccgagaactggggtgatgttttacttttcacagtatgggctacacagcagctgttcaacaagagtaaatattgtcacaacactgaacctctggctagaggacatattcacagtgaacataactgtaacatatatgaaaggcttctgggacttgaaatcaaatgtttgggaatggtgcccttggaggcaacctcccattttagatgtttaaaggaccctatatgtggcattcctttctttaaactataggtaattaaggcagctgaaaagtaaattgccttctagacactgaaggcaaatctcctttgtccatttacctggaaaccagaatgattttgacatacaggagagctgcagttgtgaaagcaccatcatcatagaggatgatgtaattaaaaaatggtcagtgtgcaaagaaaagaactgcttgcatttctttatttctgtctcataattgtcaaaaaccagaattaggtcaagttcatagtttctgtaattggcttttgaatcaaagaatagggagacaatctaaaaaatatcttaggttggagatgacagaaatatgattgatttgaagtggaaaaagaaattctgttaatgttaattaaagtaaaattattccctgaattgtttgatattgtcacctagcagatatgtattacttttctgcaatgttattattggcttgcactttgtgagtattctatgtaaaaatatatatgtatataaaatatatattgcataggacagacttaggagttttgtttagagcagttaacatctgaagtgtctaatgcattaacttttgtaaggtactgaatacttaatatgtgggaaacccttttgcgtggtccttaggcttacaatgtgcactgaatcgtttcatgtaagaatccaaagtggacaccattaacaggtctttgaaatatgcatgtactttatattttctatatttgtaactttgcatgttcttgttttgttatataaaaaaattgtaaatgtttaatatctgactgaaattaaacgagcgaagatgagcacca

SEQ ID NO: 319823 - DNA, 2954 bp, Homo sapiens
taaacggagcgcatttttctcatttgttaatatcaccacctaaatcatctcttgcctaaaacaaggagtagaaagtgaatgaaggaaggaacaggtgatggtcagtgtcctttctacgcctcaaaatttaagagtttatgtgaaaattcataaatattaatctcaatccaggttaagcaaaattttttgctctcctctttagaaatttctggttgccaaagttccagaaattgcttcctcattcctgagcctttcattttctcgatttctccattatgtaacggggagctggagctttgggccgaatttccaattaaagatgatttttacagtcaatgagccacgtcagggagcgatggcacccgcaggcggtatcaactgatgcaagtgttcaagcgaatctcaactcgttttttccggtgactcattcccggccctgcttggcagcgctgcaccctttaacttaaacctcggccggccgcccgccgggggcacagagtgtgcgccgggccgcgcggcaattggtccccgcgccgacctccgcccgcgagcgccgccgcttcccttccccgccccgcgtccctccccctcggccccgcgcgtcgcctgtcctccgagccagtcgctgacagccgcggcgccgcgagcttctcctctcctcacgaccgaggcagagcagtcattatggcgaaccttggctgctggatgctggttctctttgtggccacatggagtgacctgggcctctgcaagaagcgcccgaagcctggaggatggaacactgggggcagccgatacccggggcagggcagccctggaggcaaccgctacccacctcagggcggtggtggctgggggcagcctcatggtggtggctgggggcagcctcatggtggtggctgggggcagccccatggtggtggctggggacagcctcactggggcagtggtggggggccttggcggctacgtgctgggaagtgccatgagcaggcccatcatacatttcggcagtgactatgaggaccgttactatcgtgaaaacatgcaccgttaccccaaccaagtgtactacaggcccatggatgagtacagcaaccagaacaactttgtgcacgactgcgtcaatatcacaatcaagcagcacacggtcaccacaaccaccaagggggagaacttcaccgagaccgacgttaagatgatggagcgcgtggttgagcagatgtgtatcacccagtacgagagggaatctcaggcctattaccagagaggatcgagcatggtcctcttctcctctccacctgtgatcctcctgatctctttcctcatcttcctgatagtgggatgaggaaggtcttcctgttttcaccatctttctaatctttttccagcttgagggaggcggtatccacctgcagcccttttagtggtggtgtctcactctttcttctctctttgtcccggataggctaatcaatacccttggcactgatgggcactggaaaacatagagtagacctgagatgctggtcaagccccctttgattgagttcatcatgagccgttgctaatgccaggccagtaaaagtataacagcaaataaccattggttaatctggacttatttttggacttagtgcaacaggttgaggctaaaacaaatctcagaacagtctgaaatacctttgcctggatacctctggctccttcagcagctagagctcagtatactaatgccctatcttagtagagatttcatagctatttagagatattttccattttaagaaaacccgacaacatttctgccaggtttgttaggaggccacatgatacttattcaaaaaaatcctagagattcttagctcttgggatgcaggctcagcccgctggagcatgagctctgtgtgtaccgagaactggggtgatgttttacttttcacagtatgggctacacagcagctgttcaacaagagtaaatattgtcacaacactgaacctctggctagaggacatattcacagtgaacataactgtaacatatatgaaaggcttctgggacttgaaatcaaatgtttgggaatggtgcccttggaggcaacctcccattttagatgtttaaaggaccctatatgtggcattcctttctttaaactataggtaattaaggcagctgaaaagtaaattgccttctagacactgaaggcaaatctcctttgtccatttacctggaaaccagaatgattttgacatacaggagagctgcagttgtgaaagcaccatcatcatagaggatgatgtaattaaaaaatggtcagtgtgcaaagaaaagaactgcttgcatttctttatttctgtctcataattgtcaaaaaccagaattaggtcaagttcatagtttctgtaattggcttttgaatcaaagaatagggagacaatctaaaaaatatcttaggttggagatgacagaaatatgattgatttgaagtggaaaaagaaattctgttaatgttaattaaagtaaaattattccctgaattgtttgatattgtcacctagcagatatgtattacttttctgcaatgttattattggcttgcactttgtgagtattctatgtaaaaatatatatgtatataaaatatatattgcataggacagacttaggagttttgtttagagcagttaacatctgaagtgtctaatgcattaacttttgtaaggtactgaatacttaatatgtgggaaacccttttgcgtggtccttaggcttacaatgtgcactgaatcgtttcatgtaagaatccaaagtggacaccattaacaggtctttgaaatatgcatgtactttatattttctatatttgtaactttgcatgttcttgttttgttatataaaaaaattgtaaatgtttaatatctgactgaaattaaacgagcgaagatgagcacca

SEQ ID NO: 319824 - DNA, 2961 bp, Homo sapiens
taaacggagcgcatttttctcatttgttaatatcaccacctaaatcatctcttgcctaaaacaaggagtagaaagtgaatgaaggaaggaacaggtgatggtcagtgtcctttctacgcctcaaaatttaagagtttatgtgaaaattcataaatattaatctcaatccaggttaagcaaaattttttgctctcctctttagaaatttctggttgccaaagttccagaaattgcttcctcattcctgagcctttcattttctcgatttctccattatgtaacggggagctggagctttgggccgaatttccaattaaagatgatttttacagtcaatgagccacgtcagggagcgatggcacccgcaggcggtatcaactgatgcaagtgttcaagcgaatctcaactcgttttttccggtgactcattcccggccctgcttggcagcgctgcaccctttaacttaaacctcggccggccgcccgccgggggcacagagtgtgcgccgggccgcgcggcaattggtccccgcgccgacctccgcccgcgagcgccgccgcttcccttccccgccccgcgtccctccccctcggccccgcgcgtcgcctgtcctccgagccagtcgctgacagccgcggcgccgcgagcttctcctctcctcacgaccgaggcagagcagtcattatggcgaaccttggctgctggatgctggttctctttgtggccacatggagtgacctgggcctctgcaagaagcgcccgaagcctggaggatggaacactgggggcagccgatacccggggcagggcagccctggaggcaaccgctacccacctcagggcggtggtggctgggggcagcctcatggtggtggctgggggcagcctcatggtggtggctgggggcagccccatggtggtggctggggacagcctcatggtggtggctggggtcaaggaggtggcacccacagtcagtggaacaagccgagtaagccaaaaaccaacatgatttcggcagtgactatgaggaccgttactatcgtgaaaacatgcaccgttaccccaaccaagtgtactacaggcccatggatgagtacagcaaccagaacaactttgtgcacgactgcgtcaatatcacaatcaagcagcacacggtcaccacaaccaccaagggggagaacttcaccgagaccgacgttaagatgatggagcgcgtggttgagcagatgtgtatcacccagtacgagagggaatctcaggcctattaccagagaggatcgagcatggtcctcttctcctctccacctgtgatcctcctgatctctttcctcatcttcctgatagtgggatgaggaaggtcttcctgttttcaccatctttctaatctttttccagcttgagggaggcggtatccacctgcagcccttttagtggtggtgtctcactctttcttctctctttgtcccggataggctaatcaatacccttggcactgatgggcactggaaaacatagagtagacctgagatgctggtcaagccccctttgattgagttcatcatgagccgttgctaatgccaggccagtaaaagtataacagcaaataaccattggttaatctggacttatttttggacttagtgcaacaggttgaggctaaaacaaatctcagaacagtctgaaatacctttgcctggatacctctggctccttcagcagctagagctcagtatactaatgccctatcttagtagagatttcatagctatttagagatattttccattttaagaaaacccgacaacatttctgccaggtttgttaggaggccacatgatacttattcaaaaaaatcctagagattcttagctcttgggatgcaggctcagcccgctggagcatgagctctgtgtgtaccgagaactggggtgatgttttacttttcacagtatgggctacacagcagctgttcaacaagagtaaatattgtcacaacactgaacctctggctagaggacatattcacagtgaacataactgtaacatatatgaaaggcttctgggacttgaaatcaaatgtttgggaatggtgcccttggaggcaacctcccattttagatgtttaaaggaccctatatgtggcattcctttctttaaactataggtaattaaggcagctgaaaagtaaattgccttctagacactgaaggcaaatctcctttgtccatttacctggaaaccagaatgattttgacatacaggagagctgcagttgtgaaagcaccatcatcatagaggatgatgtaattaaaaaatggtcagtgtgcaaagaaaagaactgcttgcatttctttatttctgtctcataattgtcaaaaaccagaattaggtcaagttcatagtttctgtaattggcttttgaatcaaagaatagggagacaatctaaaaaatatcttaggttggagatgacagaaatatgattgatttgaagtggaaaaagaaattctgttaatgttaattaaagtaaaattattccctgaattgtttgatattgtcacctagcagatatgtattacttttctgcaatgttattattggcttgcactttgtgagtattctatgtaaaaatatatatgtatataaaatatatattgcataggacagacttaggagttttgtttagagcagttaacatctgaagtgtctaatgcattaacttttgtaaggtactgaatacttaatatgtgggaaacccttttgcgtggtccttaggcttacaatgtgcactgaatcgtttcatgtaagaatccaaagtggacaccattaacaggtctttgaaatatgcatgtactttatattttctatatttgtaactttgcatgttcttgttttgttatataaaaaaattgtaaatgtttaatatctgactgaaattaaacgagcgaagatgagcacca

SEQ ID NO: 319825 - DNA, 1970 bp, Homo sapiens
accccaaacaagtgtccgtacagggcgccgactggactgagtacaggtaaagctcgagacaactggcttctatgatgctactgtatctgtcagtgagaatatctagcgaatctagaagctaagtagcacgggctcctacacaccaactcaaagggagggcaccaggtgcgaccagagaccgtcgtgaagatgatggagaccgcggatgtgctgagcgatcgatgtgtgtcatctcaatctaacgaaggaggtccatcgtcgaggctctgattatccagatgtaggactcgcaggcatggtcctcttctcctctccacctgtgatcctcctgatctctttcctcatcttcctgatagtgggatgaggaaggtcttcctgttttcaccatctttctaatctttttccagcttgagggaggcggtatccacctgcagcccttttagtggtggtgtctcactctttcttctctctttgtcccggataggctaatcaatacccttggcactgatgggcactggaaaacatagagtagacctgagatgctggtcaagccccctttgattgagttcatcatgagccgttgctaatgccaggccagtaaaagtataacagcaaataaccattggttaatctggacttatttttggacttagtgcaacaggttgaggctaaaacaaatctcagaacagtctgaaatacctttgcctggatacctctggctccttcagcagctagagctcagtatactaatgccctatcttagtagagatttcatagctatttagagatattttccattttaagaaaacccgacaacatttctgccaggtttgttaggaggccacatgatacttattcaaaaaaatcctagagattcttagctcttgggatgcaggctcagcccgctggagcatgagctctgtgtgtaccgagaactggggtgatgttttacttttcacagtatgggctacacagcagctgttcaacaagagtaaatattgtcacaacactgaacctctggctagaggacatattcacagtgaacataactgtaacatatatgaaaggcttctgggacttgaaatcaaatgtttgggaatggtgcccttggaggcaacctcccattttagatgtttaaaggaccctatatgtggcattcctttctttaaactataggtaattaaggcagctgaaaagtaaattgccttctagacactgaaggcaaatctcctttgtccatttacctggaaaccagaatgattttgacatacaggagagctgcagttgtgaaagcaccatcatcatagaggatgatgtaattaaaaaatggtcagtgtgcaaagaaaagaactgcttgcatttctttatttctgtctcataattgtcaaaaaccagaattaggtcaagttcatagtttctgtaattggcttttgaatcaaagaatagggagacaatctaaaaaatatcttaggttggagatgacagaaatatgattgatttgaagtggaaaaagaaattctgttaatgttaattaaagtaaaattattccctgaattgtttgatattgtcacctagcagatatgtattacttttctgcaatgttattattggcttgcactttgtgagtattctatgtaaaaatatatatgtatataaaatatatattgcataggacagacttaggagttttgtttagagcagttaacatctgaagtgtctaatgcattaacttttgtaaggtactgaatacttaatatgtgggaaacccttttgcgtggtccttaggcttacaatgtgcactgaatcgtttcatgtaagaatccaaagtggacaccattaacaggtctttgaaatatgcatgtactttatattttctatatttgtaactttgcatgttcttgttttgttatataaaaaaattgtaaatgtttaatatctgactgaaattaaacgagcgaagatgagcacca

SEQ ID NO: 319826 - DNA, 2442 bp, Homo sapiens
cgagcagccaaggttcgccataatgactgctctcggtcgtgaggagaggagaagctcgcggcgcagcagtcattatggcgaaccttggctgctggatgctggttctctttgtggccacatggagtgacctgggcctctgcaagaagcgcccgaagcctggaggatggaacactgggggcagccgatacccggggcagggcagccctggaggcaaccgctacccacctcagggcggtggtggctgggggcagcctcatggtggtggctgggggcagcctcatggtggtggctgggggcagccccatggtggtggctggggacagcctcatggtggtggctggggtcaaggaggtggcacccacagtcagtggaacaagccgagtaagccaaaaaccaacatgaagcacatggctggtgctgcagcagctggggcagtggtggggggccttggcggctacgtgctgggaagtgccatgagcaggcccatcatacatttcggcagtgactatgaggaccgttactatcgtgaaaacatgcaccgttaccccaaccaagtgtactacaggcccatggatgagtacagcaaccagaacaactttgtgcacgactgcgtcaatatcacaatcaagcagcacacggtcaccacaaccaccaagggggagaacttcaccgagaccgacgttaagatgatggagcgcgtggttgagcagatgtgtatcacccagtacgagagggaatctcaggcctattaccagagaggatcgagcatggtcctcttctcctctccacctgtgatcctcctgatctctttcctcatcttcctgatagtgggatgaggaaggtcttcctgttttcaccatctttctaatctttttccagcttgagggaggcggtatccacctgcagcccttttagtggtggtgtctcactctttcttctctctttgtcccggataggctaatcaatacccttggcactgatgggcactggaaaacatagagtagacctgagatgctggtcaagccccctttgattgagttcatcatgagccgttgctaatgccaggccagtaaaagtataacagcaaataaccattggttaatctggacttatttttggacttagtgcaacaggttgaggctaaaacaaatctcagaacagtctgaaatacctttgcctggatacctctggctccttcagcagctagagctcagtatactaatgccctatcttagtagagatttcatagctatttagagatattttccattttaagaaaacccgacaacatttctgccaggtttgttaggaggccacatgatacttattcaaaaaaatcctagagattcttagctcttgggatgcaggctcagcccgctggagcatgagctctgtgtgtaccgagaactggggtgatgttttacttttcacagtatgggctacacagcagctgttcaacaagagtaaatattgtcacaacactgaacctctggctagaggacatattcacagtgaacataactgtaacatatatgaaaggcttctgggacttgaaatcaaatgtttgggaatggtgcccttggaggcaacctcccattttagatgtttaaaggaccctatatgtggcattcctttctttaaactataggtaattaaggcagctgaaaagtaaattgccttctagacactgaaggcaaatctcctttgtccatttacctggaaaccagaatgattttgacatacaggagagctgcagttgtgaaagcaccatcatcatagaggatgatgtaattaaaaaatggtcagtgtgcaaagaaaagaactgcttgcatttctttatttctgtctcataattgtcaaaaaccagaattaggtcaagttcatagtttctgtaattggcttttgaatcaaagaatagggagacaatctaaaaaatatcttaggttggagatgacagaaatatgattgatttgaagtggaaaaagaaattctgttaatgttaattaaagtaaaattattccctgaattgtttgatattgtcacctagcagatatgtattacttttctgcaatgttattattggcttgcactttgtgagtattctatgtaaaaatatatatgtatataaaatatatattgcataggacagacttaggagttttgtttagagcagttaacatctgaagtgtctaatgcattaacttttgtaaggtactgaatacttaatatgtgggaaacccttttgcgtggtccttaggcttacaatgtgcactgaatcgtttcatgtaagaatccaaagtggacaccattaacaggtctttgaaatatgcatgtactttatattttctatatttgtaactttgcatgttcttgttttgttatataaaaaaattgtaaatgtttaatatctgactgaaattaaacgagcgaagatgagcacca

SEQ ID NO: 319827 - DNA, 3081 bp, Homo sapiens
  misc_feature (3058)..(3058): n is a, c, g, or t
taaacggagcgcatttttctcatttgttaatatcaccacctaaatcatctcttgcctaaaacaaggagtagaaagtgaatgaaggaaggaacaggtgatggtcagtgtcctttctacgcctcaaaatttaagagtttatgtgaaaattcataaatattaatctcaatccaggttaagcaaaattttttgctctcctctttagaaatttctggttgccaaagttccagaaattgcttcctcattcctgagcctttcattttctcgatttctccattatgtaacggggagctggagctttgggccgaatttccaattaaagatgatttttacagtcaatgagccacgtcagggagcgatggcacccgcaggcggtatcaactgatgcaagtgttcaagcgaatctcaactcgttttttccggtgactcattcccggccctgcttggcagcgctgcaccctttaacttaaacctcggccggccgcccgccgggggcacagagtgtgcgccgggccgcgcggcaattggtccccgcgccgacctccgcccgcgagcgccgccgcttcccttccccgccccgcgtccctccccctcggccccgcgcgtcgcctgtcctccgagccagtcgctgacagccgcggcgccgcgagcttctcctctcctcacgaccgaggcagagcagtcattatggcgaaccttggctgctggatgctggttctctttgtggccacatggagtgacctgggcctctgcaagaagcgcccgaagcctggaggatggaacactgggggcagccgatacccggggcagggcagccctggaggcaaccgctacccacctcagggcggtggtggctgggggcagcctcatggtggtggctgggggcagcctcatggtggtggctgggggcagccccatggtggtggctggggacagcctcatggtggtggctggggtcaaggaggtggcacccacagtcagtggaacaagccgagtaagccaaaaaccaacatgaagcacatggctggtgctgcagcagctggggcagtggtggggggccttggcggctacgtgctgggaagtgccatgagcaggcccatcatacatttcggcagtgactatgaggaccgttactatcgtgaaaacatgcaccgttaccccaaccaagtgtactacaggcccatggatgagtacagcaaccagaacaactttgtgcacgactgcgtcaatatcacaatcaagcagcacacggtcaccacaaccaccaagggggagaacttcaccgagaccgacgttaagatgatggagcgcgtggttgagcagatgtgtatcacccagtacgagagggaatctcaggcctattaccagagaggatcgagcatggtcctcttctcctctccacctgtgatcctcctgatctctttcctcatcttcctgatagtgggatgaggaaggtcttcctgttttcaccatctttctaatctttttccagcttgagggaggcggtatccacctgcagcccttttagtggtggtgtctcactctttcttctctctttgtcccggataggctaatcaatacccttggcactgatgggcactggaaaacatagagtagacctgagatgctggtcaagccccctttgattgagttcatcatgagccgttgctaatgccaggccagtaaaagtataacagcaaataaccattggttaatctggacttatttttggacttagtgcaacaggttgaggctaaaacaaatctcagaacagtctgaaatacctttgcctggatacctctggctccttcagcagctagagctcagtatactaatgccctatcttagtagagatttcatagctatttagagatattttccattttaagaaaacccgacaacatttctgccaggtttgttaggaggccacatgatacttattcaaaaaaatcctagagattcttagctcttgggatgcaggctcagcccgctggagcatgagctctgtgtgtaccgagaactggggtgatgttttacttttcacagtatgggctacacagcagctgttcaacaagagtaaatattgtcacaacactgaacctctggctagaggacatattcacagtgaacataactgtaacatatatgaaaggcttctgggacttgaaatcaaatgtttgggaatggtgcccttggaggcaacctcccattttagatgtttaaaggaccctatatgtggcattcctttctttaaactataggtaattaaggcagctgaaaagtaaattgccttctagacactgaaggcaaatctcctttgtccatttacctggaaaccagaatgattttgacatacaggagagctgcagttgtgaaagcaccatcatcatagaggatgatgtaattaaaaaatggtcagtgtgcaaagaaaagaactgcttgcatttctttatttctgtctcataattgtcaaaaaccagaattaggtcaagttcatagtttctgtaattggcttttgaatcaaagaatagggagacaatctaaaaaatatcttaggttggagatgacagaaatatgattgatttgaagtggaaaaagaaattctgttaatgttaattaaagtaaaattattccctgaattgtttgatattgtcacctagcagatatgtattacttttctgcaatgttattattggcttgcactttgtgagtattctatgtaaaaatatatatgtatataaaatatatattgcataggacagacttaggagttttgtttagagcagttaacatctgaagtgtctaatgcattaacttttgtaaggtactgaatacttaatatgtgggaaacccttttgcgtggtccttaggcttacaatgtgcactgaatcgtttcatgtaagaatccaaagtggacaccattaacaggtctttgaaatatgcatgtactttatattttctatatttgtaactttgcatgttcttgttttgttatataaaaaaattgtaaatgtttaatatctgactgaaattaaacgagcgaagatgagcaccaaaaaancaaaaaacacaccaccaaacact

SEQ ID NO: 319828 - DNA, 3518 bp, Homo sapiens
taaacggagcgcatttttctcatttgttaatatcaccacctaaatcatctcttgcctaaaacaaggagtagaaagtgaatgaaggaaggaacaggtgatggtcagtgtcctttctacgcctcaaaatttaagagtttatgtgaaaattcataaatattaatctcaatccaggttaagcaaaattttttgctctcctctttagaaatttctggttgccaaagttccagaaattgcttcctcattcctgagcctttcattttctcgatttctccattatgtaacggggagctggagctttgggccgaatttccaattaaagatgatttttacagtcaatgagccacgtcagggagcgatggcacccgcaggcggtatcaactgatgcaagtgttcaagcgaatctcaactcgttttttccggtgactcattcccggccctgcttggcagcgctgcaccctttaacttaaacctcggccggccgcccgccgggggcacagagtgtgcgccgggccgcgcggcaattggtccccgcgccgacctccgcccgcgagcgccgccgcttcccttccccgccccgcgtccctccccctcggccccgcgcgtcgcctgtcctccgagccagtcgctgacagccgcggcgccgcgagcttctcctctcctcacgaccgaggcagagcagtcattatggcgaaccttggctgctggatgctggttctctttgtggccacatggagtgacctgggcctctgcaagaagcgcccgaagcctggaggatggaacactgggggcagccgatacccggggcagggcagccctggaggcaaccgctacccacctcagggcggtggtggctgggggcagcctcatggtggtggctgggggcagcctcatggtggtggctgggggcagccccatggtggtggctggggacagcctcatggtggtggctggggtcaaggaggtggcacccacagtcagtggaacaagccgagtaagccaaaaaccaacatgaagcacatggctggtgctgcagcagctggggcagtggtggggggccttggcggctacgtgctgggaagtgccatgagcaggcccatcatacatttcggcagtgactatgaggaccgttactatcgtgaaaacatgcaccgttaccccaaccaagtgtactacaggcccatggatgagtacagcaaccagaacaactttgtgcacgactgcgtcaatatcacaatcaagcagcacacggtcaccacaaccaccaagggggagaacttcaccgagaccgacgttaagatgatggagcgcgtggttgagcagatgtgtatcacccagtacgagagggaatctcaggcctattaccagagaggatcgagcatggtcctcttctcctctccacctgtgatcctcctgatctctttcctcatcttcctgatagtgggatgaggaaggtcttcctgttttcaccatctttctaatctttttccagcttgagggaggcggtatccacctgcagcccttttagtggtggtgtctcactctttcttctctctttgtcccggataggctaatcaatacccttggcactgatgggcactggaaaacatagagtagacctgagatgctggtcaagccccctttgattgagttcatcatgagccgttgctaatgccaggccagtaaaagtataacagcaaataaccattggttaatctggacttatttttggacttagtgcaacaggttgaggctaaaacaaatctcagaacagtctgaaatacctttgcctggatacctctggctccttcagcagctagagctcagtatactaatgccctatcttagtagagatttcatagctatttagagatattttccattttaagaaaacccgacaacatttctgccaggtttgttaggaggccacatgatacttattcaaaaaaatcctagagattcttagctcttgggatgcaggctcagcccgctggagcatgagctctgtgtgtaccgagaactggggtgatgttttacttttcacagtatgggctacacagcagctgttcaacaagagtaaatattgtcacaacactgaacctctggctagaggacatattcacagtgaacataactgtaacatatatgaaaggcttctgggacttgaaatcaaatgtttgggaatggtgcccttggaggcaacctcccattttagatgtttaaaggaccctatatgtggcattcctttctttaaactataggtaattaaggcagctgaaaagtaaattgccttctagacactgaaggcaaatctcctttgtccatttacctggaaaccagaatgattttgacatacaggagagctgcagttgtgaaagcaccatcatcatagaggatgatgtaattaaaaaatggtcagtgtgcaaagaaaagaactgcttgcatttctttatttctgtctcataattgtcaaaaaccagaattaggtcaagttcatagtttctgtaattggcttttgaatcaaagaatagggagacaatctaaaaaatatcttaggttggagatgacagaaatatgattgatttgaagtggaaaaagaaattctgttaatgttaattaaagtaaaattattccctgaattgtttgatattgtcacctagcagatatgtattacttttctgcaatgttattattggcttgcactttgtgagtattctatgtaaaaatatatatgtatataaaatatatattgcataggacagacttaggagttttgtttagagcagttaacatctgaagtgtctaatgcattaacttttgtaaggtactgaatacttaatatgtgggaaacccttttgcgtggtccttaggcttacaatgtgcactgaatcgtttcatgtaagaatccaaagtggacaccattaacaggtctttgaaatatgcatgtactttatattttctatatttgtaactttgcatgttcttgttttgttatataaaaaaattgtaaatgtttaatatctgactgaaattaaacgagcgaagatgagcaccaaaaaaaaaaaaaaaaaaaaaaaaaaaaaaaaaaaaaaaaaaaaaaaaaaaaaaaaaaaaaaaaaaaaaaaaaaaaggaaaaaaaaaaaaaaaaaaaaaaaaaaaaaccttttggcccctttggcccaagtcaattttaaattggacaaagtttttccttggggccaaatttggggctaattggccaaattccccttatggggggccgtttaaaattaaatgggccgggttttaaaaacgtggaaattggaaaaaccttgggtttcccaaattaaatccctttgaaaaaaatccccttttcccaagttggggaattaccaaaagggcccgacccgttggcctttccaaaaattggccaaccttaatgggcaattggaattgtgaagcgtaaatttttggtaaaatttcggtaaaattttgtgaaaaacgccattttttaacccaatgggccaaaattgccctttttt

SEQ ID NO: 319829 - DNA, 2577 bp, Homo sapiens
agcgggggggcaggtgagccgcgggggccgagtgaggaccccgggcctcgggtcccaggcgcaagggtgcccggccgggcggggtcgggaccccagtgaggaggggccgggggctgccccgcgggcgcgtgacgcgtctcgggcctgcccggctgcgctggtctccgctcgggtgaggcggcttggcttcgcttttcagagcagtcattatggcgaaccttggctgctggatgctggttctctttgtggccacatggagtgacctgggcctctgcaagaagcgcccgaagcctggaggatggaacactgggggcagccgatacccggggcagggcagccctggaggcaaccgctacccacctcagggcggtggtggctgggggcagcctcatggtggtggctgggggcagcctcatggtggtggctgggggcagccccatggtggtggctggggacagcctcatggtggtggctggggtcaaggaggtggcacccacagtcagtggaacaagccgagtaagccaaaaaccaacatgaagcacatggctggtgctgcagcagctggggcagtggtggggggccttggcggctacgtgctgggaagtgccatgagcaggcccatcatacatttcggcagtgactatgaggaccgttactatcgtgaaaacatgcaccgttaccccaaccaagtgtactacaggcccatggatgagtacagcaaccagaacaactttgtgcacgactgcgtcaatatcacaatcaagcagcacacggtcaccacaaccaccaagggggagaacttcaccgagaccgacgttaagatgatggagcgcgtggttgagcagatgtgtatcacccagtacgagagggaatctcaggcctattaccagagaggatcgagcatggtcctcttctcctctccacctgtgatcctcctgatctctttcctcatcttcctgatagtgggatgaggaaggtcttcctgttttcaccatctttctaatctttttccagcttgagggaggcggtatccacctgcagcccttttagtggtggtgtctcactctttcttctctctttgtcccggataggctaatcaatacccttggcactgatgggcactggaaaacatagagtagacctgagatgctggtcaagccccctttgattgagttcatcatgagccgttgctaatgccaggccagtaaaagtataacagcaaataaccattggttaatctggacttatttttggacttagtgcaacaggttgaggctaaaacaaatctcagaacagtctgaaatacctttgcctggatacctctggctccttcagcagctagagctcagtatactaatgccctatcttagtagagatttcatagctatttagagatattttccattttaagaaaacccgacaacatttctgccaggtttgttaggaggccacatgatacttattcaaaaaaatcctagagattcttagctcttgggatgcaggctcagcccgctggagcatgagctctgtgtgtaccgagaactggggtgatgttttacttttcacagtatgggctacacagcagctgttcaacaagagtaaatattgtcacaacactgaacctctggctagaggacatattcacagtgaacataactgtaacatatatgaaaggcttctgggacttgaaatcaaatgtttgggaatggtgcccttggaggcaacctcccattttagatgtttaaaggaccctatatgtggcattcctttctttaaactataggtaattaaggcagctgaaaagtaaattgccttctagacactgaaggcaaatctcctttgtccatttacctggaaaccagaatgattttgacatacaggagagctgcagttgtgaaagcaccatcatcatagaggatgatgtaattaaaaaatggtcagtgtgcaaagaaaagaactgcttgcatttctttatttctgtctcataattgtcaaaaaccagaattaggtcaagttcatagtttctgtaattggcttttgaatcaaagaatagggagacaatctaaaaaatatcttaggttggagatgacagaaatatgattgatttgaagtggaaaaagaaattctgttaatgttaattaaagtaaaattattccctgaattgtttgatattgtcacctagcagatatgtattacttttctgcaatgttattattggcttgcactttgtgagtattctatgtaaaaatatatatgtatataaaatatatattgcataggacagacttaggagttttgtttagagcagttaacatctgaagtgtctaatgcattaacttttgtaaggtactgaatacttaatatgtgggaaacccttttgcgtggtccttaggcttacaatgtgcactgaatcgtttcatgtaagaatccaaagtggacaccattaacaggtctttgaaatatgcatgtactttatattttctatatttgtaactttgcatgttcttgttttgttatataaaaaaattgtaaatgtttaatatctgactgaaattaaacgagcgaagatgagcacca

SEQ ID NO: 319830 - DNA, 3028 bp, Homo sapiens
taaacggagcgcatttttctcatttgttaatatcaccacctaaatcatctcttgcctaaaacaaggagtagaaagtgaatgaaggaaggaacaggtgatggtcagtgtcctttctacgcctcaaaatttaagagtttatgtgaaaattcataaatattaatctcaatccaggttaagcaaaattttttgctctcctctttagaaatttctggttgccaaagttccagaaattgcttcctcattcctgagcctttcattttctcgatttctccattatgtaacggggagctggagctttgggccgaatttccaattaaagatgatttttacagtcaatgagccacgtcagggagcgatggcacccgcaggcggtatcaactgatgcaagtgttcaagcgaatctcaactcgttttttccggtgactcattcccggccctgcttggcagcgctgcaccctttaacttaaacctcggccggccgcccgccgggggcacagagtgtgcgccgggccgcgcggcaattggtccccgcgccgacctccgcccgcgagcgccgccgcttcccttccccgccccgcgtccctccccctcggccccgcgcgtcgcctgtcctccgagccagtcgctgacagccgcggcgccgcgagcttctcctctcctcacgaccgaggcagagcagtcattatggcgaaccttggctgctggatgctggttctctttgtggccacatggagtgacctgggcctctgcaagaagcgcccgaagcctggaggatggaacactgggggcagccgatacccggggcagggcagccctggaggcaaccgctacccacctcagggcggtggtggctgggggcagcctcatggtggtggctgggggcagccccatggtggtggctggggacagcctcatggtggtggctggggtcaaggaggtggcacccacagtcagtggaacaagccgagtaagccaaaaaccaacatgaagcacatggctggtgctgcagcagctggggcagtggtggggggccttggcggctacgtgctgggaagtgccatgagcaggcccatcatacatttcggcagtgactatgaggaccgttactatcgtgaaaacatgcaccgttaccccaaccaagtgtactacaggcccatggatgagtacagcaaccagaacaactttgtgcacgactgcgtcaatatcacaatcaagcagcacacggtcaccacaaccaccaagggggagaacttcaccgagaccgacgttaagatgatggagcgcgtggttgagcagatgtgtatcacccagtacgagagggaatctcaggcctattaccagagaggatcgagcatggtcctcttctcctctccacctgtgatcctcctgatctctttcctcatcttcctgatagtgggatgaggaaggtcttcctgttttcaccatctttctaatctttttccagcttgagggaggcggtatccacctgcagcccttttagtggtggtgtctcactctttcttctctctttgtcccggataggctaatcaatacccttggcactgatgggcactggaaaacatagagtagacctgagatgctggtcaagccccctttgattgagttcatcatgagccgttgctaatgccaggccagtaaaagtataacagcaaataaccattggttaatctggacttatttttggacttagtgcaacaggttgaggctaaaacaaatctcagaacagtctgaaatacctttgcctggatacctctggctccttcagcagctagagctcagtatactaatgccctatcttagtagagatttcatagctatttagagatattttccattttaagaaaacccgacaacatttctgccaggtttgttaggaggccacatgatacttattcaaaaaaatcctagagattcttagctcttgggatgcaggctcagcccgctggagcatgagctctgtgtgtaccgagaactggggtgatgttttacttttcacagtatgggctacacagcagctgttcaacaagagtaaatattgtcacaacactgaacctctggctagaggacatattcacagtgaacataactgtaacatatatgaaaggcttctgggacttgaaatcaaatgtttgggaatggtgcccttggaggcaacctcccattttagatgtttaaaggaccctatatgtggcattcctttctttaaactataggtaattaaggcagctgaaaagtaaattgccttctagacactgaaggcaaatctcctttgtccatttacctggaaaccagaatgattttgacatacaggagagctgcagttgtgaaagcaccatcatcatagaggatgatgtaattaaaaaatggtcagtgtgcaaagaaaagaactgcttgcatttctttatttctgtctcataattgtcaaaaaccagaattaggtcaagttcatagtttctgtaattggcttttgaatcaaagaatagggagacaatctaaaaaatatcttaggttggagatgacagaaatatgattgatttgaagtggaaaaagaaattctgttaatgttaattaaagtaaaattattccctgaattgtttgatattgtcacctagcagatatgtattacttttctgcaatgttattattggcttgcactttgtgagtattctatgtaaaaatatatatgtatataaaatatatattgcataggacagacttaggagttttgtttagagcagttaacatctgaagtgtctaatgcattaacttttgtaaggtactgaatacttaatatgtgggaaacccttttgcgtggtccttaggcttacaatgtgcactgaatcgtttcatgtaagaatccaaagtggacaccattaacaggtctttgaaatatgcatgtactttatattttctatatttgtaactttgcatgttcttgttttgttatataaaaaaattgtaaatgtttaatatctgactgaaattaaacgagcgaagatgagcacca

SEQ ID NO: 319831 - DNA, 2769 bp, Homo sapiens
taaacggagcgcatttttctcatttgttaatatcaccacctaaatcatctcttgcctaaaacaaggagtagaaagtgaatgaaggaaggaacaggtgatggtcagtgtcctttctacgcctcaaaatttaagagtttatgtgaaaattcataaatattaatctcaatccaggttaagcaaaattttttgctctcctctttagaaatttctggttgccaaagttccagaaattgcttcctcattcctgagcctttcattttctcgatttctccattatgtaacggggagctggagctttgggccgaatttccaattaaagatgatttttacagtcaatgagccacgtcagggagcgatggcacccgcaggcggtatcaactgatgcaagtgttcaagcgaatctcaactcgttttttccggtgactcattcccggccctgcttggcagcgctgcaccctttaacttaaacctcggccggccgcccgccgggggcacagagtgtgcgccgggccgcgcggcaattggtccccgcgccgacctccgcccgcgagcgccgccgcttcccttccccgccccgcgtccctccccctcggccccgcgcgtcgcctgtcctccgagccagtcgctgacagccgcggcgccgcgagcttctcctctcctcacgaccgaggcagagcagtcattatggcgaaccttggctgctggatgctggttctctttgtggccacaagcacatggctggtgctgcagcagctggggcagtggtggggggccttggcggctacgtgctgggaagtgccatgagcaggcccatcatacatttcggcagtgactatgaggaccgttactatcgtgaaaacatgcaccgttaccccaaccaagtgtactacaggcccatggatgagtacagcaaccagaacaactttgtgcacgactgcgtcaatatcacaatcaagcagcacacggtcaccacaaccaccaagggggagaacttcaccgagaccgacgttaagatgatggagcgcgtggttgagcagatgtgtatcacccagtacgagagggaatctcaggcctattaccagagaggatcgagcatggtcctcttctcctctccacctgtgatcctcctgatctctttcctcatcttcctgatagtgggatgaggaaggtcttcctgttttcaccatctttctaatctttttccagcttgagggaggcggtatccacctgcagcccttttagtggtggtgtctcactctttcttctctctttgtcccggataggctaatcaatacccttggcactgatgggcactggaaaacatagagtagacctgagatgctggtcaagccccctttgattgagttcatcatgagccgttgctaatgccaggccagtaaaagtataacagcaaataaccattggttaatctggacttatttttggacttagtgcaacaggttgaggctaaaacaaatctcagaacagtctgaaatacctttgcctggatacctctggctccttcagcagctagagctcagtatactaatgccctatcttagtagagatttcatagctatttagagatattttccattttaagaaaacccgacaacatttctgccaggtttgttaggaggccacatgatacttattcaaaaaaatcctagagattcttagctcttgggatgcaggctcagcccgctggagcatgagctctgtgtgtaccgagaactggggtgatgttttacttttcacagtatgggctacacagcagctgttcaacaagagtaaatattgtcacaacactgaacctctggctagaggacatattcacagtgaacataactgtaacatatatgaaaggcttctgggacttgaaatcaaatgtttgggaatggtgcccttggaggcaacctcccattttagatgtttaaaggaccctatatgtggcattcctttctttaaactataggtaattaaggcagctgaaaagtaaattgccttctagacactgaaggcaaatctcctttgtccatttacctggaaaccagaatgattttgacatacaggagagctgcagttgtgaaagcaccatcatcatagaggatgatgtaattaaaaaatggtcagtgtgcaaagaaaagaactgcttgcatttctttatttctgtctcataattgtcaaaaaccagaattaggtcaagttcatagtttctgtaattggcttttgaatcaaagaatagggagacaatctaaaaaatatcttaggttggagatgacagaaatatgattgatttgaagtggaaaaagaaattctgttaatgttaattaaagtaaaattattccctgaattgtttgatattgtcacctagcagatatgtattacttttctgcaatgttattattggcttgcactttgtgagtattctatgtaaaaatatatatgtatataaaatatatattgcataggacagacttaggagttttgtttagagcagttaacatctgaagtgtctaatgcattaacttttgtaaggtactgaatacttaatatgtgggaaacccttttgcgtggtccttaggcttacaatgtgcactgaatcgtttcatgtaagaatccaaagtggacaccattaacaggtctttgaaatatgcatgtactttatattttctatatttgtaactttgcatgttcttgttttgttatataaaaaaattgtaaatgtttaatatctgactgaaattaaacgagcgaagatgagcacca

SEQ ID NO: 319832 - DNA, 1626 bp, Homo sapiens
taaacggagcgcatttttctcatttgttaatatcaccacctaaatcatctcttgcctaaaacaaggagtagaaagtgaatgaaggaaggaacaggtgatggtcagtgtcctttctacgcctcaaaatttaagagtttatgtgaaaattcataaatattaatctcaatccaggttaagcaaaattttttgctctcctctttagaaatttctggttgccaaagttccagaaattgcttcctcattcctgagcctttcattttctcgatttctccattatgtaacggggagctggagctttgggccgaatttccaattaaagatgatttttacagtcaatgagccacgtcagggagcgatggcacccgcaggcggtatcaactgatgcaagtgttcaagcgaatctcaactcgttttttccggtgactcattcccggccctgcttggcagcgctgcaccctttaacttaaacctcggccggccgcccgccgggggcacagagtgtgcgccgggccgcgcggcaattggtccccgcgccgacctccgcccgcgagcgccgccgcttcccttccccgccccgcgtccctccccctcggccccgcgcgtcgcctgtcctccgagccagtcgctgacagccgcggcgccgcgagcttctcctctcctcacgaccgaggcagagcagtcattatggcgaaccttggctgctggatgctggttctctttgtggccacatggagtgacctgggcctctgcaagaagcgcccgaagcctggaggatggaacactgggggcagccgatacccggggcagggcagccctggaggcaaccgctacccacctcagggcggtggtggctgggggcagcctcatggtggtggctgggggcagcctcatggtggtggctgggggcagccccatggtggtggctggggacagcctcatggtggtggctggggtcaaggaggtggcacccacagtcagtggaacaagccgagtaagccaaaaaccaacatgaagcacatggctggtgctgcagcagctggggcagtggtggggggccttggcggctacgtgctgggaagtgccatgagcaggcccatcatacatttcggcagtgactatgaggaccgttactatcgtgaaaacatgcaccgttaccccaaccaagtgtactacaggcccatggatgagtacagcaaccagaacaactttgtgcacgactgcgtcaatatcacaatcaagcagcacacggtcaccacaaccaccaagggggagaacttcaccgagaccgacgttaagatgatggagcgcgtggttgagcagatgtgtatcacccagtacgagagggaatctcaggcctattaccagagaggatcgagcatggtcctcttctcctctccacctgtgatcctcctgatctctttcctcatcttcctgatagtgggatgaggaaggtcttcctgttttcaccatctttctaatctttttccagcttgagggaggcggtatccacctgcagcccttttagtggtggtgtctcactctttcttctctctttgtcccggataggctaatcaatacccttggcactgacactgacacggcctgagatcctggagatcacctcac

SEQ ID NO: 319833 - DNA, 2998 bp, Homo sapiens
taaacggagcgcatttttctcatttgttaatatcaccacctaaatcatctcttgcctaaaacaaggagtagaaagtgaatgaaggaaggaacaggtgatggtcagtgtcctttctacgcctcaaaatttaagagtttatgtgaaaattcataaatattaatctcaatccaggttaagcaaaattttttgctctcctctttagaaatttctggttgccaaagttccagaaattgcttcctcattcctgagcctttcattttctcgatttctccattatgtaacggggagctggagctttgggccgaatttccaattaaagatgatttttacagtcaatgagccacgtcagggagcgatggcacccgcaggcggtatcaactgatgcaagtgttcaagcgaatctcaactcgttttttccggtgactcattcccggccctgcttggcagcgctgcaccctttaacttaaacctcggccggccgcccgccgggggcacagagtgtgcgccgggccgcgcggcaattggtccccgcgccgacctccgcccgcgagcgccgccgcttcccttccccgccccgcgtccctccccctcggccccgcgcgtcgcctgtcctccgagccagtcgctgacagccgcggcgccgcgagcttctcctctcctcacgaccgaggcagagcagtcattatggcgaaccttggctgctggatgctggttctctttgtggccacatggagtgacctgggcctctgcaagaagcgcccgaagcctggaggatggaacactgggggcagccgatacccggggcagggcagccctggaggcaaccgctacccacctcagggcggtggtggctgggggcagcctcatggtggtggctgggggcagcctcatggtggtggctgggggcagccccatggtggtggctggggacagcctcatggtggtggctggggtcaaggaggtggcacccacagtcagtggaacaagccgagtaagccaaaaaccaacatgaagcacatggctggtgctgcagcagctggggcagtggtggggggccttggcggctacgtgctgggaagtgccatgagcaggcccatcatacatttcggcagtgactatgaggaccgttactatcgtggcaaccagaacaactttgtgcacgactgcgtcaatatcacaatcaagcagcacacggtcaccacaaccaccaagggggagaacttcaccgagaccgacgttaagatgatggagcgcgtggttgagcagatgtgtatcacccagtacgagagggaatctcaggcctattaccagagaggatcgagcatggtcctcttctcctctccacctgtgatcctcctgatctctttcctcatcttcctgatagtgggatgaggaaggtcttcctgttttcaccatctttctaatctttttccagcttgagggaggcggtatccacctgcagcccttttagtggtggtgtctcactctttcttctctctttgtcccggataggctaatcaatacccttggcactgatgggcactggaaaacatagagtagacctgagatgctggtcaagccccctttgattgagttcatcatgagccgttgctaatgccaggccagtaaaagtataacagcaaataaccattggttaatctggacttatttttggacttagtgcaacaggttgaggctaaaacaaatctcagaacagtctgaaatacctttgcctggatacctctggctccttcagcagctagagctcagtatactaatgccctatcttagtagagatttcatagctatttagagatattttccattttaagaaaacccgacaacatttctgccaggtttgttaggaggccacatgatacttattcaaaaaaatcctagagattcttagctcttgggatgcaggctcagcccgctggagcatgagctctgtgtgtaccgagaactggggtgatgttttacttttcacagtatgggctacacagcagctgttcaacaagagtaaatattgtcacaacactgaacctctggctagaggacatattcacagtgaacataactgtaacatatatgaaaggcttctgggacttgaaatcaaatgtttgggaatggtgcccttggaggcaacctcccattttagatgtttaaaggaccctatatgtggcattcctttctttaaactataggtaattaaggcagctgaaaagtaaattgccttctagacactgaaggcaaatctcctttgtccatttacctggaaaccagaatgattttgacatacaggagagctgcagttgtgaaagcaccatcatcatagaggatgatgtaattaaaaaatggtcagtgtgcaaagaaaagaactgcttgcatttctttatttctgtctcataattgtcaaaaaccagaattaggtcaagttcatagtttctgtaattggcttttgaatcaaagaatagggagacaatctaaaaaatatcttaggttggagatgacagaaatatgattgatttgaagtggaaaaagaaattctgttaatgttaattaaagtaaaattattccctgaattgtttgatattgtcacctagcagatatgtattacttttctgcaatgttattattggcttgcactttgtgagtattctatgtaaaaatatatatgtatataaaatatatattgcataggacagacttaggagttttgtttagagcagttaacatctgaagtgtctaatgcattaacttttgtaaggtactgaatacttaatatgtgggaaacccttttgcgtggtccttaggcttacaatgtgcactgaatcgtttcatgtaagaatccaaagtggacaccattaacaggtctttgaaatatgcatgtactttatattttctatatttgtaactttgcatgttcttgttttgttatataaaaaaattgtaaatgtttaatatctgactgaaattaaacgagcgaagatgagcacca

SEQ ID NO: 319834 - DNA, 238 bp, Homo sapiens
cgtaccatcaatctagcaccaaaaacagaaacctgagagacaaaatcaattccttctgttttatacccccctccacgtatcacccaatccttttaaatttatctccaaaataccctgaaatcatttatatctctcatctctacaacaccatcttagtccaaggtgccattatttcttggcaaaatactgtgatgactagctgactgaatggatacacacacacacacacacacacaca

SEQ ID NO: 319835 - DNA, 509 bp, Homo sapiens
cggacgcgtgggtgaccccgccgccgagtcgcgcggaggcggaggcttgggtgcgttcaagattcagcttcacccgtaacccaccgccatggccgaggaaggcattgctgctggaggtgtaatggacgttaatactgctttacaagaggttctgaagactgccctcatccacgatggcctagcacgtggaattcgcgaagctgccaaagccttagacaagcgccaagcccatctttgtgtgcttgcatccaactgtgatgagcctatgtatgtcaagttggtggaggccctttgtgctgaacaccaaatcaacctaattaaggttgatgacaacaagaaactaggagaatgggtaggcctttgtaaaattgacagagaggggaaaccccgtaaagtggttggttgcagttgtgtagtagttaaggactatggcaaggagtctcaggccaaggatgtcattgaagagtatttcaaatgcaagaaatgaagaaataaatctttggctcaca

SEQ ID NO: 319836 - DNA, 859 bp, Homo sapiens
  misc_feature (50)..(50): n is a, c, g, or t
  misc_feature (96)..(96): n is a, c, g, or t
  misc_feature (106)..(106): n is a, c, g, or t
  misc_feature (117)..(117): n is a, c, g, or t
  misc_feature (120)..(120): n is a, c, g, or t
  misc_feature (160)..(160): n is a, c, g, or t
  misc_feature (172)..(172): n is a, c, g, or t
  misc_feature (241)..(241): n is a, c, g, or t
  misc_feature (245)..(245): n is a, c, g, or t
  misc_feature (280)..(280): n is a, c, g, or t
  misc_feature (291)..(291): n is a, c, g, or t
  misc_feature (295)..(296): n is a, c, g, or t
  misc_feature (303)..(303): n is a, c, g, or t
  misc_feature (315)..(315): n is a, c, g, or t
  misc_feature (343)..(343): n is a, c, g, or t
  misc_feature (347)..(347): n is a, c, g, or t
  misc_feature (371)..(371): n is a, c, g, or t
acatcgagtgccaaggggactccagtatggcatcgcatgacagacagcanccccgaaacaaagtattttacccccaaatatattctttagcatatnttgaaatggncctgcaaagcngcntcttgtgggggaaattacattctatagaggattcccttcnctttgatttcanacattttagggagacacaagacatcaagcgatatatgtgaggtatgcactggttcagtctggaaaggangganaactcaaagctgaagtttgggggtggtggccttanaggtcacaagngganncaaagantttctgattggnaactagttgaaagagtttatctaaaggnctgnagtcaatagaaagaggtgtctggntatgattccgcgcggaggcggaggcttgggtgcgttcaagattcagcttcacccgtaacccaccgccatggccgaggaaggcattgctgctggaggtgtaatggacgttaatactgctttacaagaggttctgaagactgccctcatccacgatggcctagcacgtggaattcgcgaagctgccaaagccttagacaagcgccaagcccatctttgtgtgcttgcatccaactgtgatgagcctatgtatgtcaagttggtggaggccctttgtgctgaacaccaaatcaacctaattaaggttgatgacaacaagaaactaggagaatgggtaggcctttgtaaaattgacagagaggggaaaccccgtaaagtggttggttgcagttgtgtagtagttaaggactatggcaaggagtctcaggccaaggatgtcattgaagagtatttcaaatgcaagaaatgaagaaataaatctttggctcaca

SEQ ID NO: 319837 - DNA, 932 bp, Homo sapiens
cggacgcgttgggcggacgcgtgggcgccgcgagtcgcgcggaggcggaggcttgggtgcgttcaagattcagcttcacccgtaacccaccgccatggccgaggaaggcattgctgctggaggtgtaatggacgttaatactgctttacaagaggttctgaagactgccctcatccacgatggcctagcacgtggaattcgcgaagctgccaaagccttagacaagcgccaagcccatctttgtgtgcttgcatccaactgtgatgagcctatgtatgtcaagttggtggaggccctttgtgctgaacaccaaatcaacctaattaaggttgatgacaacaagaaactaggagaatgggtaggcctttgtaaaattgacagagaggggaaaccccgtaaagtggttggttgcagttgtgtagtagttaaggactatggcaaggagtctcaggccaaggatgtcattgaagagtatttcaaatgcaagaaatgaagaaataaatctttggctcacaaaaaaaaaaaaaaaaaaaacaaaaaacccggggttttttttgggggggggaaaaaggggtttggaatgggcctggtgcatagggtttcggacccgttttttggtcaagggggaaatcggggggaccccccaaaagggaggcgaataaattcgaataagccggttaaccgggtaaacgcgcgggaaagcccgcgggatattacccggctaatgaaggggctaatttgtgacaccaagacctcctttgaaaaccatccacgggaggaaccgcgggtcacacaagaatccgcgctacagggggtgtagctgcgcggcaccgaggctcaactctttcacggatagcggctgcagcgcatcacaaactgctagtacggagagggccatctaactgtccaggatatacgcgacaggcacggcg

SEQ ID NO: 319838 - DNA, 668 bp, Homo sapiens
cggacgcgtgggtgaccccgccgccgagtcgcgcggaggcggaggcttgggtgcgttcaagattcagcttcacccgtaacccaccgccatggccgaggaaggcattgctgctggaggtgtaatggacgttaatactgctttacaagaggttctgaagactgccctcatccacgatggcctagcacgtggaattcgcgaagctgccaaagccttagacaagcgccaagcccatctttgtgtgcttgcatccaactgtgatgagcctatgtatgtcaagttggtggaggccctttgtgctgaacaccaaatcaacctaattaaggttgatgacaacaagaaactaggagaatgggtaggcctttgtaaaattgacagagaggggaaaccccgtaaagtggttggttgcagttgtgtagtagttaaggactatggcaaggagtctcaggccaaggatgtcattgaagagtatttcaaatgcaagaaatgaagaaataaatctttggctcacaaaaaaatcattatttctttctcttcctcctctctttccctcttcttcttctctttcccacccctaattaatgggccgtctttaaacacgcggcatgggaaatccctgggcttccccaacttatcaccttggatctctacccttttccccaggtgggcct

SEQ ID NO: 319839 - DNA, 703 bp, Homo sapiens
  misc_feature (686)..(686): n is a, c, g, or t
  misc_feature (692)..(692): n is a, c, g, or t
  misc_feature (694)..(694): n is a, c, g, or t
aagcggaaaataccggcatgcgtgcggatgaggcctctttccctgccgccgccgagtcgcgcggaggcggaggcttgggtgcgttcaagattcagcttcacccgtaacccaccgccatggccgaggaaggcattgctgctggaggtgtaatggacgttaatactgctttacaagaggttctgaagactgccctcatccacgatggcctagcacgtggaattcgcgaagctgccaaagccttagacaagtacgtgtatcagtctcaatactgtgggttcttgcaaccggaacaaaactgccacccaagggaagaaggcatggagttcatggtgttagcgcaaaagttctgaatggcatccgtcctaccggaaacctaggaaaaggcgccaagcccatctttgtgtgcttgcatccaactgtgatgagcctatgtatgtcaagttggtggaggccctttgtgctgaacaccaaatcaacctaattaaggttgatgacaacaagaaactaggagaatgggtaggcctttgtaaaattgacagagaggggaaaccccgtaaagtggttggttgcagttgtgtagtagttaaggactatggcaaggagtctcaggccaaggatgtcattgaagagtatttcaaatgcaagaaatgaagaaataaatctttggctcacattctatgcattcnatgtgncngtaccggct

SEQ ID NO: 319840 - DNA, 686 bp, Homo sapiens
tcccccgggctgcaggcgccgccgagtcgcgcggaggcggaggcttgggtgcgttcaagattcagcttcacccgtaacccaccgccatggccgaggaaggcattgctgctggaggtgtaatggacgttaatactgctttacaagaggttctgaagactgccctcatccacgatggcctagcacgtggaattcgcgaagctgccaaagccttagacaagtacgtgtatcagtctcaatactgtgggttcttgcaaccggaacaaaactgccacccaagggaagaaggcatggagttcatggtgttagcgcaaaagttctgaatggcatccgtcctaccggaaacctaggaaaaggcgccaagcccatctttgtgtgcttgcatccaactgtgatgagcctatgtatgtcaagttggtggaggccctttgtgctgaacaccaaatcaacctaattaaggttgatgacaacaagaaactaggagaatgggtaggcctttgtaaaattgacagagaggggaaaccccgtaaagtggttggttgcagttgtgtagtagttaaggactatggcaaggagtctcaggccaaggatgtcattgaagagtatttcaaatgcaagaaatgaagaaataaatctttggctcacaaaaaaaaaaagtcgacgcggccgcgaatttagtagtagtaggc

SEQ ID NO: 319841 - DNA, 673 bp, Homo sapiens
aagcggaaaataccggcatgcgtgcggatgaggcctctttccctgccgccgccgagtcgcgcggaggcggaggcttgggtgcgttcaagattcagcttcacccgtaacccaccgccatggccgaggaaggcattgctgctggaggtgtaatggacgttaatactgctttacaagaggttctgaagactgccctcatccacgatggcctagcacgtggaattcgcgaagctgccaaagccttagacaagtacgtgtatcagtctcaatactgtgggttcttgcaaccggaacaaaactgccacccaagggaagaaggcatggagttcatggtgttagcgcaaaagttctgaatggcatccgtcctaccggaaacctaggaaaaggcgccaagcccatctttgtgtgcttgcatccaactgtgatgagcctatgtatgtcaagttggtggaggccctttgtgctgaacaccaaatcaacctaattaaggttgatgacaacaagaaactaggagaatgggtaggcctttgtaaaattgacagagaggggaaaccccgtaaagtggttggttgcagttgtgtagtagttaaggactatggcaaggagtctcaggccaaggatgtcattgaagagtatttcaaatgcaagaaatgaagaaataaatctttggctcaca

SEQ ID NO: 319842 - DNA, 537 bp, Homo sapiens
aagcggaaaataccggcatgcgtgcggatgaggcctctttccctgccgccgccgagtcgcgcggaggcggaggcttgggtgcgttcaagattcagcttcacccgtaacccaccgccatggccgaggaaggcattgctgctggaggtgtaatggacgttaatactgctttacaagaggttctgaagactgccctcatccacgatggcctagcacgtggaattcgcgaagctgccaaagccttagacaagcgccaagcccatctttgtgtgcttgcatccaactgtgatgagcctatgtatgtcaagttggtggaggccctttgtgctgaacaccaaatcaacctaattaaggttgatgacaacaagaaactaggagaatgggtaggcctttgtaaaattgacagagaggggaaaccccgtaaagtggttggttgcagttgtgtagtagttaaggactatggcaaggagtctcaggccaaggatgtcattgaagagtatttcaaatgcaagaaatgaagaaataaatctttggctcaca

SEQ ID NO: 319843 - DNA, 411 bp, Homo sapiens
  misc_feature (21)..(21): n is a, c, g, or t
ggccgcactgagaaaatgaanagctgatgcatactgcctcgtgccgaacggcactgaagactgccctcatccacgatggcctagcacgtggaattcgcgaagctgccaaagccttagacaagcgccaagcccatctttgtgtgcttgcatccaactgtgatgagcctatgtatgtcaagttggtggaggccctttgtgctgaacaccaaatcaacctaattaaggttgatgacaacaagaaactaggagaatgggtaggcctttgtaaaattgacagagaggggaaaccccgtaaagtggttggttgcagttgtgtagtagttaaggactatggcaaggagtctcaggccaaggatgtcattgaagagtatttcaaatgcaagaaatgaagaaataaatctttggctcaca

SEQ ID NO: 319844 - DNA, 145 bp, Homo sapiens
aaaattgacagagaggggaaaccccgtaaagtggttggttgcagttgtgtagtagttaaggactatggcaaggagtctcaggccaaggatgtcattgaagagtatttcaaatgcaagaaatgaagaaataaatctttggctcaca

SEQ ID NO: 319845 - DNA, 285 bp, Homo sapiens
  misc_feature (9)..(11): n is a, c, g, or t
ttcagacannncagcctttattttagaaaataattctgtagcttccactttctttcatgaaactgaggtcaggcaagaaacaaaaatccaccaagtcctctccatcctgccatggcgtcctggcctgtgaggacatggggcgcctgggagcgggcggggaggctgggcagcactgggccagagggtccgtagtagttaaggactatggcaaggagtctcaggccaaggatgtcattgaagagtatttcaaatgcaagaaatgaagaaataaatctttggctcaca

SEQ ID NO: 319846 - DNA, 515 bp, Homo sapiens
cggacgcgttgggcggacgcgtgggcgccgcgagtcgcgcggaggcggaggcttgggtgcgttcaagattcagcttcacccgtaacccaccgccatggccgaggaaggcattgctgctggaggtgtaatggacgttaatactgctttacaagaggttctgaagactgccctcatccacgatggcctagcacgtggaattcgcgaagctgccaaagccttagacaagcgccaagcccatctttgtgtgcttgcatccaactgtgatgagcctatgtatgtcaagttggtggaggccctttgtgctgaacaccaaatcaacctaattaaggttgatgacaacaagaaactaggagaatgggtaggcctttgtaaaattgacagagaggggaaaccccgtaaagtggttggttgcagttgtgtagtagttaaggactatggcaaggagtctcaggccaaggatgtcattgaagagtatttcaaatgcaagaaatgaagaaataaatctttggctcaca

SEQ ID NO: 319847 - DNA, 891 bp, Homo sapiens
actactactttcttttgtgcacggcctacaaatatgattttaccacttatttcttttccagtcatctcttccacagccttattggcatcctcgtgtttttcgtaactcacaaagccaaagcctttggatttcccattgggatctctcatcaccttgacacttagggtcttaccaaactgactgaatagctctttccctgccgccgccgagtcgcgcggaggcggaggcttgggtgcgttcaagattcagcttcacccgtaacccaccgccatggccgaggaaggcattgctgctggaggtgtaatggacgttaatactgctttacaagaggttctgaagactgccctcatccacgatggcctagcacgtggaattcgcgaagctgccaaagccttagacaagcgccaagcccatctttgtgtgcttgcatccaactgtgatgagcctatgtatgtcaagttggtggaggccctttgtgctgaacaccaaatcaacctaattaaggttgatgacaacaagaaactaggagaatgggtaggcctttgtaaaattgacagagaggggaaaccccgtaaagtggttggttgcagttgtgtagtagttaaggactatggcaaggagtctcaggccaaggatgtcattgaagagtatttcaaatgcaagaaatgaagaaataaatctttggctcacaaaaaaaaaaaaaaaaaaaaaaaaaaaaaaaaaaaaaaaaaaacaaaaaaaaaacaaaaaaaaaaaaaaaaaaaaaaaaaaaaaaaaaaaaaaaaaattaatttaatcataatcatatttaaaaactctataaaaaaaattattatatatttatttactatacaaatttcctcaattttgcgtttatttataatccgcccg

SEQ ID NO: 319848 - DNA, 721 bp, Homo sapiens
  misc_feature (704)..(704): n is a, c, g, or t
  misc_feature (710)..(710): n is a, c, g, or t
  misc_feature (712)..(712): n is a, c, g, or t
actactactttcttttgtgcacggcctacaaatatgattttaccacttatttcttttccagtcatctcttccacagccttattggcatcctcgtgtttttcgtaactcacaaagccaaagcctttggatttcccattgggatctctcatcaccttgacacttagggtcttaccaaactgactgaatagctctttccctgccgccgccgagtcgcgcggaggcggaggcttgggtgcgttcaagattcagcttcacccgtaacccaccgccatggccgaggaaggcattgctgctggaggtgtaatggacgttaatactgctttacaagaggttctgaagactgccctcatccacgatggcctagcacgtggaattcgcgaagctgccaaagccttagacaagcgccaagcccatctttgtgtgcttgcatccaactgtgatgagcctatgtatgtcaagttggtggaggccctttgtgctgaacaccaaatcaacctaattaaggttgatgacaacaagaaactaggagaatgggtaggcctttgtaaaattgacagagaggggaaaccccgtaaagtggttggttgcagttgtgtagtagttaaggactatggcaaggagtctcaggccaaggatgtcattgaagagtatttcaaatgcaagaaatgaagaaataaatctttggctcacattctatgcattcnatgtgncngtaccggct

SEQ ID NO: 319849 - DNA, 888 bp, Homo sapiens
  misc_feature (733)..(733): n is a, c, g, or t
actactactttcttttgtgcacggcctacaaatatgattttaccacttatttcttttccagtcatctcttccacagccttattggcatcctcgtgtttttcgtaactcacaaagccaaagcctttggatttcccattgggatctctcatcaccttgacacttagggtcttaccaaactgactgaatagctctttccctgccgccgccgagtcgcgcggaggcggaggcttgggtgcgttcaagattcagcttcacccgtaacccaccgccatggccgaggaaggcattgctgctggaggtgtaatggacgttaatactgctttacaagaggttctgaagactgccctcatccacgatggcctagcacgtggaattcgcgaagctgccaaagccttagacaagcgccaagcccatctttgtgtgcttgcatccaactgtgatgagcctatgtatgtcaagttggtggaggccctttgtgctgaacaccaaatcaacctaattaaggttgatgacaacaagaaactaggagaatgggtaggcctttgtaaaattgacagagaggggaaaccccgtaaagtggttggttgcagttgtgtagtagttaaggactatggcaaggagtctcaggccaaggatgtcattgaagagtatttcaaatgcaagaaatgaagaaataaatctttggctcacaaaaaaaaaaaaaaaacaaaaaaaaaaaaaaaaaaaaaaaccncggggggttttttatggggggggggggaaaagggggagaaaaaagggcgccgggcacaagaggaccggggcccagtttccggacaccacggggaaacatcagaggagccccataggaggcgggacataatcgcgaaagcccggtacccggataag

SEQ ID NO: 319850 - DNA, 1461 bp, Homo sapiens
actactactttcttttgtgcacggcctacaaatatgattttaccacttatttcttttccagtcatctcttccacagccttattggcatcctcgtgtttttcgtaactcacaaagccaaagcctttggatttcccattgggatctctcatcaccttgacacttagggtcttaccaaactgactgaatagctctttccctgccgccgccgagtcgcgcggaggcggaggcttgggtgcgttcaagattcagcttcacccgtaacccaccgccatggccgaggaaggcattgctgctggaggtgtaatggacgttaatactgctttacaagaggttctgaagactgccctcatccacgatggcctagcacgtggaattcgcgaagctgccaaagccttagacaagcgccaagcccatctttgtgtgcttgcatccaactgtgatgagcctatgtatgtcaagttggtggaggccctttgtgctgaacaccaaatcaacctaattaaggttgatgacaacaagaaactaggagaatgggtaggcctttgtaaaattgacagagaggggaaaccccgtaaagtggttggttgcagttgtgtagtagttaaggactatggcaaggagtctcaggccaaggatgtcattgaagagtatttcaaatgcaagaaatgaagaaataaatctttggctcacaaaaaaaaaaaaaaaacaaaaaaaaaaaaaaaaaaaaaaaaaaaaaaaaaaaaaaaaaaaaaaaaaaaaaaaaacaaaaaaaaaacaaaaaaaaaaaaaaaaaaaaaaaaaaaaaaaaaaaaaaaaaaaaaaaaacacaaaaaaaaaaaagcagggggggggggaaaggacccagggcggggggggcaaaaaccaagaagccacccgggagaggagcgagcggcgagacagggcgggcagaggaacaaggacgaggccgcagcaggcgcacgggagaacgcagcggaaccaacccagcgagcccaaggaggcaacagggacgaacgaagatgggggcacagcacgacgcaaggaaggaggagcgggcgagacggagaacacggaggggtccagcgccgaggacaaggagggcggaacgcacggaagagagacagggggagcggcggggcgaaaggagcggagcagaaagcgggccgggggggggagggaagccggggacgacatgcggggcggcggccgcgccacgcgggagagagagagggggagcagggccgacgaacaagggagtcgccgacgaacgagcgcggcaccggggcggcgacaagcacaccggagcagccgaggcggcggagagaggataggggaggggacagggaaagggcgagcaggcaaccgaccaacgacgaaggcaccaagcagagccggggcaaggaggaaggagaggcggggggagaagcgacgcggggggagcggcgagggaagcaggcaaca

SEQ ID NO: 319851 - DNA, 1026 bp, Homo sapiens
  misc_feature (715)..(715): n is a, c, g, or t
  misc_feature (719)..(719): n is a, c, g, or t
actactactttcttttgtgcacggcctacaaatatgattttaccacttatttcttttccagtcatctcttccacagccttattggcatcctcgtgtttttcgtaactcacaaagccaaagcctttggatttcccattgggatctctcatcaccttgacacttagggtcttaccaaactgactgaatagctctttccctgccgccgccgagtcgcgcggaggcggaggcttgggtgcgttcaagattcagcttcacccgtaacccaccgccatggccgaggaaggcattgctgctggaggtgtaatggacgttaatactgctttacaagaggttctgaagactgccctcatccacgatggcctagcacgtggaattcgcgaagctgccaaagccttagacaagcgccaagcccatctttgtgtgcttgcatccaactgtgatgagcctatgtatgtcaagttggtggaggccctttgtgctgaacaccaaatcaacctaattaaggttgatgacaacaagaaactaggagaatgggtaggcctttgtaaaattgacagagaggggaaaccccgtaaagtggttggttgcagttgtgtagtagttaaggactatggcaaggagtctcaggccaaggatgtcattgaagagtatttcaaatgcaagaaatgaagaaataaatctttggctcacaaaaaaaaaaaaaaaaaaaaaaacnaaanaaaagagggtataccttttagagcgttttaaagacgtagatgtttattggatgtgtgggacgagcacagatgtcgcgggggtatattattaaagaaagtccaccatttgaaagataggggagtggagaccattatatgccggcgagaggtagcttcatgcaaaaagatttatcagagagtaaaccgctcttaaataggggcaaaaagtggcgccttatacccatagagggggctctaagatatgtggggcctaatagatgtgtgccttaataatagttagctaagttgctgtgttctacaggtatag

SEQ ID NO: 319852 - DNA, 1021 bp, Homo sapiens
actactactttcttttgtgcacggcctacaaatatgattttaccacttatttcttttccagtcatctcttccacagccttattggcatcctcgtgtttttcgtaactcacaaagccaaagcctttggatttcccattgggatctctcatcaccttgacacttagggtcttaccaaactgactgaatagctctttccctgccgccgccgagtcgcgcggaggcggaggcttgggtgcgttcaagattcagcttcacccgtaacccaccgccatggccgaggaaggcattgctgctggaggtgtaatggacgttaatactgctttacaagaggttctgaagactgccctcatccacgatggcctagcacgtggaattcgcgaagctgccaaagccttagacaagcgccaagcccatctttgtgtgcttgcatccaactgtgatgagcctatgtatgtcaagttggtggaggccctttgtgctgaacaccaaatcaacctaattaaggttgatgacaacaagaaactaggagaatgggtaggcctttgtaaaattgacagagaggggaaaccccgtaaagtggttggttgcagttgtgtagtagttaaggactatggcaaggagtctcaggccaaggatgtcattgaagagtatttcaaatgcaagaaatgaagaaataaatctttggctcacaaaaaaaaaacaaaaaaaaaaaaaaaaaaaaaaaaaaaaaaaaaaaaaaaaaacaacaccggggggacatatgggggggggggcacaagcgtgacaaaagggccaggcgcaccaagaggacgagaccccacttaggcacacagcgggggaaaccgaggagcgccccaaaaagagagcggaacaaattagagaaacccgaggcacctataatttcctctgcagcacatacaaaaaaaaaaaggaggtaagagggggagtaacaatgggtaaaaagaagggataaaaagaaataatatattagaaataaattatatagtaaatcaaaagaagt

SEQ ID NO: 319853 - DNA, 899 bp, Homo sapiens
actactactttcttttgtgcacggcctacaaatatgattttaccacttatttcttttccagtcatctcttccacagccttattggcatcctcgtgtttttcgtaactcacaaagccaaagcctttggatttcccattgggatctctcatcaccttgacacttagggtcttaccaaactgactgaatagctctttccctgccgccgccgagtcgcgcggaggcggaggcttgggtgcgttcaagattcagcttcacccgtaacccaccgccatggccgaggaaggcattgctgctggaggtgtaatggacgttaatactgctttacaagaggttctgaagactgccctcatccacgatggcctagcacgtggaattcgcgaagctgccaaagccttagacaagcgccaagcccatctttgtgtgcttgcatccaactgtgatgagcctatgtatgtcaagttggtggaggccctttgtgctgaacaccaaatcaacctaattaaggttgatgacaacaagaaactaggagaatgggtaggcctttgtaaaattgacagagaggggaaaccccgtaaagtggttggttgcagttgtgtagtagttaaggactatggcaaggagtctcaggccaaggatgtcattgaagagtatttcaaatgcaagaaatgaagaaataaatctttggctcacaaaaaaaaaacaaaaaaaaaaaaaaaaaaaaaaaaaaaaaaaaaaaaaaaaaacacggggggccaatcatattggggggggggggaaaaagagggtatttaaaatgggcattgtggtccataagttgttttctttaggccccttttttttggacaaaggggggggaatagggggggccccatagaggaggggcataaatttcggaagct

SEQ ID NO: 319854 - DNA, 734 bp, Homo sapiens
actactactttcttttgtgcacggcctacaaatatgattttaccacttatttcttttccagtcatctcttccacagccttattggcatcctcgtgtttttcgtaactcacaaagccaaagcctttggatttcccattgggatctctcatcaccttgacacttagggtcttaccaaactgactgaatagctctttccctgccgccgccgagtcgcgcggaggcggaggcttgggtgcgttcaagattcagcttcacccgtaacccaccgccatggccgaggaaggcattgctgctggaggtgtaatggacgttaatactgctttacaagaggttctgaagactgccctcatccacgatggcctagcacgtggaattcgcgaagctgccaaagccttagacaagcgccaagcccatctttgtgtgcttgcatccaactgtgatgagcctatgtatgtcaagttggtggaggccctttgtgctgaacaccaaatcaacctaattaaggttgatgacaacaagaaactaggagaatgggtaggcctttgtaaaattgacagagaggggaaaccccgtaaagtggttggttgcagttgtgtagtagttaaggactatggcaaggagtctcaggccaaggatgtcattgaagagtatttcaaatgcaagaaatgaagaaataaatctttggctcacaaaaaaaaaaagtcgacgcggccgcgaatttagtagtagtaggc

SEQ ID NO: 319855 - DNA, 1637 bp, Homo sapiens
actactactttcttttgtgcacggcctacaaatatgattttaccacttatttcttttccagtcatctcttccacagccttattggcatcctcgtgtttttcgtaactcacaaagccaaagcctttggatttcccattgggatctctcatcaccttgacacttagggtcttaccaaactgactgaatagctctttccctgccgccgccgagtcgcgcggaggcggaggcttgggtgcgttcaagattcagcttcacccgtaacccaccgccatggccgaggaaggcattgctgctggaggtgtaatggacgttaatactgctttacaagaggttctgaagactgccctcatccacgatggcctagcacgtggaattcgcgaagctgccaaagccttagacaagcgccaagcccatctttgtgtgcttgcatccaactgtgatgagcctatgtatgtcaagttggtggaggccctttgtgctgaacaccaaatcaacctaattaaggttgatgacaacaagaaactaggagaatgggtaggcctttgtaaaattgacagagaggggaaaccccgtaaagtggttggttgcagttgtgtagtagttaaggactatggcaaggagtctcaggccaaggatgtcattgaagagtatttcaaatgcaagaaatgaagaaataaatctttggctcacaaaaaaaaacaaaaaaacaccacgcaacaacaaattttttggtgacgcgcctgttgcgacgagagaaaagaagtttattaaaaaccactttggtgttgtggggggggcgcggccccccccgatagtgtaattgcacaacccttggtctcacaggcgtgttccctcaaggaagaaccccgtggctccagcaacaaacagaggggcgggcttcttccccccccaataaaaaaaagcccggggggggaacacacgaagtcgtttttttgacaccaacaccccagagggtggggatctccgggacagccacaaaaaggggggctcaacataacacaagggaggggggccccagcaggaaggaggcagagattaattaaaaaattacccccccggcacgtaggtagagaacacacaaaacagcaagaagcagcacagaaacaaagagcagagttcatactgatagaacaccaagtacgaaagaagataacagtaacaagaccagagagcagcagggcagcaacctagctagtatagatctcgaccgcaggagtaacagcgagtcagtcacaatcaacacagcaagacagcaatacatcagctaaccacaaaacactaaactaaaactactatctgaccggagggaggcacaggagcgagagaagtgagaaggagacatagagagagagaagcagactgttgcgagctgagacgtaccgacagcgagaacggacgagctgagtgcagactagacatagacttgggaacgcatatagaagggaggacgacctaaacatactcaacgatagggacggagaggacggagaggcagccaagcgaagaacaagaaagaaatgagcgagagagaacagaagcgggactacactgatagggacgaagagacaagagagaaacacaatgaggatgccacgagagtagattcccacgcgcca

SEQ ID NO: 319856 - DNA, 711 bp, Homo sapiens
  misc_feature (687)..(687): n is a, c, g, or t
actactactttcttttgtgcacggcctacaaatatgattttaccacttatttcttttccagtcatctcttccacagccttattggcatcctcgtgtttttcgtaactcacaaagccaaagcctttggatttcccattgggatctctcatcaccttgacacttagggtcttaccaaactgactgaatagctctttccctgccgccgccgagtcgcgcggaggcggaggcttgggtgcgttcaagattcagcttcacccgtaacccaccgccatggccgaggaaggcattgctgctggaggtgtaatggacgttaatactgctttacaagaggttctgaagactgccctcatccacgatggcctagcacgtggaattcgcgaagctgccaaagccttagacaagcgccaagcccatctttgtgtgcttgcatccaactgtgatgagcctatgtatgtcaagttggtggaggccctttgtgctgaacaccaaatcaacctaattaaggttgatgacaacaagaaactaggagaatgggtaggcctttgtaaaattgacagagaggggaaaccccgtaaagtggttggttgcagttgtgtagtagttaaggactatggcaaggagtctcaggccaaggatgtcattgaagagtatttcttcatttcttgcatttgaagtcgacgggccgcnaatttagtagtagtaggcggccgc

SEQ ID NO: 319857 - DNA, 688 bp, Homo sapiens
actactactttcttttgtgcacggcctacaaatatgattttaccacttatttcttttccagtcatctcttccacagccttattggcatcctcgtgtttttcgtaactcacaaagccaaagcctttggatttcccattgggatctctcatcaccttgacacttagggtcttaccaaactgactgaatagctctttccctgccgccgccgagtcgcgcggaggcggaggcttgggtgcgttcaagattcagcttcacccgtaacccaccgccatggccgaggaaggcattgctgctggaggtgtaatggacgttaatactgctttacaagaggttctgaagactgccctcatccacgatggcctagcacgtggaattcgcgaagctgccaaagccttagacaagcgccaagcccatctttgtgtgcttgcatccaactgtgatgagcctatgtatgtcaagttggtggaggccctttgtgctgaacaccaaatcaacctaattaaggttgatgacaacaagaaactaggagaatgggtaggcctttgtaaaattgacagagaggggaaaccccgtaaagtggttggttgcagttgtgtagtagttaaggactatggcaaggagtctcaggccaaggatgtcattgaagagtatttcaaatgcaagaattaagatacgaattttagggcgc

SEQ ID NO: 319858 - DNA, 828 bp, Homo sapiens
cggacgcgttgggcggacgcgtgggcgccgcgagtcgcgcggaggcggaggcttgggtgcgttcaagattcagcttcacccgtaacccaccgccatggccgaggaaggcattgctgctggaggtgtaatggacgttaatactgctttacaagaggttctgaagactgccctcatccacgatggcctagcacgtggaattcgcgaagctgccaaagccttagacaagcgccaagcccatctttgtgtgcttgcatccaactgtgatgagcctatgtatgtcaagttggtggaggccctttgtgctgaacaccaaatcaacctaattaaggttgatgacaacaagaaactaggagaatgggtaggcctttgtaaaattgacagagaggggaaaccccgtaaagtggttggttgcagttgtgtagtagttaaggactatggcaaggagtctcaggccaaggatgtcattgaagagtatttcaaatgcaagaaatgaagaaataaatctttggctcacaaaaaaaaaaaaaaaaaaaacaaaaaaaacaaaaaaaaaaaaaaaaaaaggggggggggggcaaaaaaacccccggggggggggacagatgttatggagacacccagatgttgctttgaacgaggcggccgcatatagggaggtattataaaggagagagggggcgcgtataaacaggcgcgatgggaaaaagctctgggggatttttgaaggagcccatactgggggggggaaaaggggcaaactaccgagaatagaggcgggaataaactggggtagggtagccgggcatttgcggaaatgccggtttgaat

SEQ ID NO: 319859 - DNA, 1109 bp, Homo sapiens
actactactttcttttgtgcacggcctacaaatatgattttaccacttatttcttttccagtcatctcttccacagccttattggcatcctcgtgtttttcgtaactcacaaagccaaagcctttggatttcccattgggatctctcatcaccttgacacttagggtcttaccaaactgactgaatagctctttccctgccgccgccgagtcgcgcggaggcggaggcttgggtgcgttcaagattcagcttcacccgtaacccaccgccatggccgaggaaggcattgctgctggaggtgtaatggacgttaatactgctttacaagaggttctgaagactgccctcatccacgatggcctagcacgtggaattcgcgaagctgccaaagccttagacaagcgccaagcccatctttgtgtgcttgcatccaactgtgatgagcctatgtatgtcaagttggtggaggccctttgtgctgaacaccaaatcaacctaattaaggttgatgacaacaagaaactaggagaatgggtaggcctttgtaaaattgacagagaggggaaaccccgtaaagtggttggttgcagttgtgtagtagttaaggtaagtcaccgtttattctagggatgaaggttatgctgggtaatcatataaaaccttgtattgaaataagttgaggatcttataaaaggaaaaaactgattcaacaggtttaaagcattttctgcatttcaggaaaaaaataaaagctgtaatttacaagccagccaatgaatctgcttacctgattgtgtttgtgcagacatactttaaaaactggcaatagtaaagccatgttacgagccttaaggacattgaagtcgttaaggtccctgagaatggctataacaaatcttagtgatgggaaacatttttataagacatagctaattgttgaagctccactataattgatactaatagcttggtgaaattcctaaatattaacaagaaattgcatgcgtgttttgttttttttaaggactatggcaaggagtctcaggccaaggatgtcattgaagagtatttcaaatgcaagaaatgaagaaataaatctttggctcaca

SEQ ID NO: 319860 - DNA, 2090 bp, Homo sapiens
aggcccgtggatctcatcgaagatggcggcgcgatctgtgtcgggcattaccagaagagtcttcatgtggacagtctcagggacaccatgtagagaattttggtctcgattcagaaaagagaaagagccagtggttgttgagacagtagaagagaaaaaggaacctatcctagtgtgtccacctttacgaagccgagcatacacaccacctgaagatctccagagtcgtttggaatcttacgttaaagaagtttttggttcatctcttcctagtaattggcaagacatctccctggaagatagtcgtctaaagttcaatcttctggctcatttagctgatgacttgggtcatgtagtccctaactccagactccaccagatgtgcagggttagagatgttcttgatttctataatgtccctattcaagatagatctaaatttgatgaactcagtgccagtaatctgccccccaatttgaaaatcacttggagttactaagcaattcggaagagaaacacattgaaatcactgtctttccctgagcaagggggctgctcattagatcttttgatactttaccatgtgaaatactaccagaactgttctctaaacccactttttctgtagaggaatgtatcatctttttttttctcatattacaaatggacaaataacggactttctattttcatatttgctgaaaccattttttaaatgaaattaggtcattatttatgaaaagttttgagagggcactgtcaacttgggtttaagacaggaggacattgcaagttcacacctttcataagcataaagtagttgcaagaaagtattttcatcctgttaggattcatatctaagatagagttatgcattgcacatacacaaataaacttttattagatagatacctacaaaagaagcataaaagtatgttgtgtattactgacagttctagattaatttcttttagaattaaagtagatttgttaaagtgtattgtgtgttgtaaattttttgagtgaaatttgcttgcgctctgccttgccatttctttccagtaagtataattttgaaaaaattagaatatatgccaaatattgagtgctgtgactcttcctcataagagatgtgccagattctatgtctaattgcatattctcttcagaggagatgatgcttattttaaacctttttctctataacttttaaaaagtggtgctgagtattcactagagtggcaagtctttgtgctttaatgcactcaatttgtggaaattacttaaatagcaggttatcagatggttctgaatgacaaaggtgttaaatttgggatttttttttcaagctttagatatggctggagagtaatgagacagaaggaatgtcttatattgttctgactgctgacaattcctaaagaaaagtgatagaagggtttttaacaaaactctttccctgccgccgccgagtcgcgcggaggcggaggcttgggtgcgttcaagattcagcttcacccgtaacccaccgccatggccgaggaaggcattgctgctggaggtgtaatggacgttaatactgctttacaagaggttctgaagactgccctcatccacgatggcctagcacgtggaattcgcgaagctgccaaagccttagacaagtacgtgtatcagtctcaatactgtgggttcttgcaaccggaacaaaactgccacccaagggaagaaggcatggagttcatggtgttagcgcaaaagttctgaatggcatccgtcctaccggaaacctaggaaaaggcgccaagcccatctttgtgtgcttgcatccaactgtgatgagcctatgtatgtcaagttggtggaggccctttgtgctgaacaccaaatcaacctaattaaggttgatgacaacaagaaactaggagaatgggtaggcctttgtaaaattgacagagaggggaaaccccgtaaagtggttggttgcagttgtgtagtagttaaggactatggcaaggagtctcaggccaaggatgtcattgaagagtatttcaaatgcaagaaatgaagaaataaatctttggctcaca

SEQ ID NO: 319861 - DNA, 653 bp, Homo sapiens
actactactttcttttgtgcacggcctacaaatatgattttaccacttatttcttttccagtcatctcttccacagccttattggcatcctcgtgtttttcgtaactcacaaagccaaagcctttggatttcccattgggatctctcatcaccttgacacttagggtcttaccaaactgactgaatagctctttccctgccgccgccgagtcgcgcggaggcggaggcttgggtgcgttcaagattcagcttcacccgtaacccaccgccatggccgaggaaggcattgctgctggaggtgtaatggacgttaatactgctttacaagaggttctgaagactgccctcatccacgatggcctagcacgtggaattcgcgaagctgccaaagccttagacaagcgccaagcccatctttgtgtgcttgcatccaactgtgatgagcctatgtatgtcaagttggtggaggccctttgtgctgaacaccaaatcaacctaattaaggttgatgacaacaagaaactaggagaatgggtaggcctttgtaaaattgacagagaggggaaaccccgtaagagggtgtgttccatttgtaaaaattaaggctcttggcggggggtcagcccggggtgattttagagattttgcgcgtg

SEQ ID NO: 319862 - DNA, 1934 bp, Homo sapiens
aggcccgtggatctcatcgaagatggcggcgcgatctgtgtcgggcattaccagaagagtcttcatgtggacagtctcagggacaccatgtagagaattttggtctcgattcagaaaagagaaagagccagtggttgttgagacagtagaagagaaaaaggaacctatcctagtgtgtccacctttacgaagccgagcatacacaccacctgaagatctccagagtcgtttggaatcttacgttaaagaagtttttggttcatctcttcctagtaattggcaagacatctccctggaagatagtcgtctaaagttcaatcttctggctcatttagctgatgacttgggtcatgtagtccctaactccagactccaccagatgtgcagggttagagatgttcttgatttctataatgtccctattcaagatagatctaaatttgatgaactcagtgccagtaatctgccccccaatttgaaaatcacttggagttactaagcaattcggaagagaaacacattgaaatcactgtctttccctgagcaagggggctgctcattagatcttttgatactttaccatgtgaaatactaccagaactgttctctaaacccactttttctgtagaggaatgtatcatctttttttttctcatattacaaatggacaaataacggactttctattttcatatttgctgaaaccattttttaaatgaaattaggtcattatttatgaaaagttttgagagggcactgtcaacttgggtttaagacaggaggacattgcaagttcacacctttcataagcataaagtagttgcaagaaagtattttcatcctgttaggattcatatctaagatagagttatgcattgcacatacacaaataaacttttattagatagatacctacaaaagaagcataaaagtatgttgtgtattactgacagttctagattaatttcttttagaattaaagtagatttgttaaagtgtattgtgtgttgtaaattttttgagtgaaatttgcttgcgctctgccttgccatttctttccagtaagtataattttgaaaaaattagaatatatgccaaatattgagtgctgtgactcttcctcataagagatgtgccagattctatgtctaattgcatattctcttcagaggagatgatgcttattttaaacctttttctctataacttttaaaaagtggtgctgagtattcactagagtggcaagtctttgtgctttaatgcactcaatttgtggaaattacttaaatagcaggttatcagatggttctgaatgacaaaggtgttaaatttgggatttttttttcaagctttagatatggctggagagtaatgagacagaaggaatgtcttatattgttctgactgctgacaattcctaaagaaaagtgatagaagggtttttaacaaaactctttccctgccgccgccgagtcgcgcggaggcggaggcttgggtgcgttcaagattcagcttcacccgtaacccaccgccatggccgaggaaggcattgctgctggaggtgtaatggacgttaatactgctttacaagaggttctgaagactgccctcatccacgatggcctagcacgtggaattcgcgaagctgccaaagccttagacaaggcttgcatccaactgtgatgagcctatgtatgtcaagttggtggaggccctttgtgctgaacaccaaatcaacctaattaaggttgatgacaacaagaaactaggagaatgggtaggcctttgtaaaattgacagagaggggaaaccccgtaaagtggttggttgcagttgtgtagtagttaaggactatggcaaggagtctcaggccaaggatgtcattgaagagtatttcaaatgcaagaaatgaagaaataaatctttggctcaca

SEQ ID NO: 319863 - DNA, 1954 bp, Homo sapiens
aggcccgtggatctcatcgaagatggcggcgcgatctgtgtcgggcattaccagaagagtcttcatgtggacagtctcagggacaccatgtagagaattttggtctcgattcagaaaagagaaagagccagtggttgttgagacagtagaagagaaaaaggaacctatcctagtgtgtccacctttacgaagccgagcatacacaccacctgaagatctccagagtcgtttggaatcttacgttaaagaagtttttggttcatctcttcctagtaattggcaagacatctccctggaagatagtcgtctaaagttcaatcttctggctcatttagctgatgacttgggtcatgtagtccctaactccagactccaccagatgtgcagggttagagatgttcttgatttctataatgtccctattcaagatagatctaaatttgatgaactcagtgccagtaatctgccccccaatttgaaaatcacttggagttactaagcaattcggaagagaaacacattgaaatcactgtctttccctgagcaagggggctgctcattagatcttttgatactttaccatgtgaaatactaccagaactgttctctaaacccactttttctgtagaggaatgtatcatctttttttttctcatattacaaatggacaaataacggactttctattttcatatttgctgaaaccattttttaaatgaaattaggtcattatttatgaaaagttttgagagggcactgtcaacttgggtttaagacaggaggacattgcaagttcacacctttcataagcataaagtagttgcaagaaagtattttcatcctgttaggattcatatctaagatagagttatgcattgcacatacacaaataaacttttattagatagatacctacaaaagaagcataaaagtatgttgtgtattactgacagttctagattaatttcttttagaattaaagtagatttgttaaagtgtattgtgtgttgtaaattttttgagtgaaatttgcttgcgctctgccttgccatttctttccagtaagtataattttgaaaaaattagaatatatgccaaatattgagtgctgtgactcttcctcataagagatgtgccagattctatgtctaattgcatattctcttcagaggagatgatgcttattttaaacctttttctctataacttttaaaaagtggtgctgagtattcactagagtggcaagtctttgtgctttaatgcactcaatttgtggaaattacttaaatagcaggttatcagatggttctgaatgacaaaggtgttaaatttgggatttttttttcaagctttagatatggctggagagtaatgagacagaaggaatgtcttatattgttctgactgctgacaattcctaaagaaaagtgatagaagggtttttaacaaaactctttccctgccgccgccgagtcgcgcggaggcggaggcttgggtgcgttcaagattcagcttcacccgtaacccaccgccatggccgaggaaggcattgctgctggaggtgtaatggacgttaatactgctttacaagaggttctgaagactgccctcatccacgatggcctagcacgtggaattcgcgaagctgccaaagccttagacaagcgccaagcccatctttgtgtgcttgcatccaactgtgatgagcctatgtatgtcaagttggtggaggccctttgtgctgaacaccaaatcaacctaattaaggttgatgacaacaagaaactaggagaatgggtaggcctttgtaaaattgacagagaggggaaaccccgtaaagtggttggttgcagttgtgtagtagttaaggactatggcaaggagtctcaggccaaggatgtcattgaagagtatttcaaatgcaagaaatgaagaaataaatctttggctcaca

SEQ ID NO: 319864 - DNA, 2133 bp, Homo sapiens
aggcccgtggatctcatcgaagatggcggcgcgatctgtgtcgggcattaccagaagagtcttcatgtggacagtctcagggacaccatgtagagaattttggtctcgattcagaaaagagaaagagccagtggttgttgagacagtagaagagaaaaaggaacctatcctagtgtgtccacctttacgaagccgagcatacacaccacctgaagatctccagagtcgtttggaatcttacgttaaagaagtttttggttcatctcttcctagtaattggcaagacatctccctggaagatagtcgtctaaagttcaatcttctggctcatttagctgatgacttgggtcatgtagtccctaactccagactccaccagatgtgcagggttagagatgttcttgatttctataatgtccctattcaagatagatctaaatttgatgaactcagtgccagtaatctgccccccaatttgaaaatcacttggagttactaagcaattcggaagagaaacacattgaaatcactgtctttccctgagcaagggggctgctcattagatcttttgatactttaccatgtgaaatactaccagaactgttctctaaacccactttttctgtagaggaatgtatcatctttttttttctcatattacaaatggacaaataacggactttctattttcatatttgctgaaaccattttttaaatgaaattaggtcattatttatgaaaagttttgagagggcactgtcaacttgggtttaagacaggaggacattgcaagttcacacctttcataagcataaagtagttgcaagaaagtattttcatcctgttaggattcatatctaagatagagttatgcattgcacatacacaaataaacttttattagatagatacctacaaaagaagcataaaagtatgttgtgtattactgacagttctagattaatttcttttagaattaaagtagatttgttaaagtgtattgtgtgttgtaaattttttgagtgaaatttgcttgcgctctgccttgccatttctttccagtaagtataattttgaaaaaattagaatatatgccaaatattgagtgctgtgactcttcctcataagagatgtgccagattctatgtctaattgcatattctcttcagaggagatgatgcttattttaaacctttttctctataacttttaaaaagtggtgctgagtattcactagagtggcaagtctttgtgctttaatgcactcaatttgtggaaattacttaaatagcaggttatcagatggttctgaatgacaaaggtgttaaatttgggatttttttttcaagctttagatatggctggagagtaatgagacagaaggaatgtcttatattgttctgactgctgacaattcctaaagaaaagtgatagaagggtttttaacaaaactctttccctgccgccgccgagtcgcgcggaggcggaggcttgggtgcgttcaagattcagcttcacccgtaacccaccgccatggccgaggaaggcattgctgctggaggtgtaatggacgttaatactgctttacaagaggttctgaagactgccctcatccacgatggcctagcacgtggaattcgcgaagctgccaaagccttagacaagtacgtgtatcagtctcaatactgtgggttcttgcaaccggaacaaaactgccacccaagggaagaaggcatggagttcatggtgttagcgcaaaagttctgaatggcatccgtcctaccggaaacctaggaaaaggcgccaagcccatctttgtgtgcttgcatccaactgtgatgagcctatgtatgtcaagttggtggaggccctttgtgctgaacaccaaatcaacctaattaaggttgatgacaacaagaaactaggagaatgggtaggcctttgtaaaattgacagagaggggaaaccccgtaaagtggttggttgcagttgtgtagtagttaaggactatggcaaggagtctcaggccaaggatgtcattgaagagtatttcaaatgcaagaaatgaagaaataaatctttggctcacaaaaaaaaaaagtcgacgcggccgcgaatttagtagtagtaggc

SEQ ID NO: 319865 - DNA, 2153 bp, Homo sapiens
aggcccgtggatctcatcgaagatggcggcgcgatctgtgtcgggcattaccagaagagtcttcatgtggacagtctcagggacaccatgtagagaattttggtctcgattcagaaaagagaaagagccagtggttgttgagacagtagaagagaaaaaggaacctatcctagtgtgtccacctttacgaagccgagcatacacaccacctgaagatctccagagtcgtttggaatcttacgttaaagaagtttttggttcatctcttcctagtaattggcaagacatctccctggaagatagtcgtctaaagttcaatcttctggctcatttagctgatgacttgggtcatgtagtccctaactccagactccaccagatgtgcagggttagagatgttcttgatttctataatgtccctattcaagatagatctaaatttgatgaactcagtgccagtaatctgccccccaatttgaaaatcacttggagttactaagcaattcggaagagaaacacattgaaatcactgtctttccctgagcaagggggctgctcattagatcttttgatactttaccatgtgaaatactaccagaactgttctctaaacccactttttctgtagaggaatgtatcatctttttttttctcatattacaaatggacaaataacggactttctattttcatatttgctgaaaccattttttaaatgaaattaggtcattatttatgaaaagttttgagagggcactgtcaacttgggtttaagacaggaggacattgcaagttcacacctttcataagcataaagtagttgcaagaaagtattttcatcctgttaggattcatatctaagatagagttatgcattgcacatacacaaataaacttttattagatagatacctacaaaagaagcataaaagtatgttgtgtattactgacagttctagattaatttcttttagaattaaagtagatttgttaaagtgtattgtgtgttgtaaattttttgagtgaaatttgcttgcgctctgccttgccatttctttccagtaagtataattttgaaaaaattagaatatatgccaaatattgagtgctgtgactcttcctcataagagatgtgccagattctatgtctaattgcatattctcttcagaggagatgatgcttattttaaacctttttctctataacttttaaaaagtggtgctgagtattcactagagtggcaagtctttgtgctttaatgcactcaatttgtggaaattacttaaatagcaggttatcagatggttctgaatgacaaaggtgttaaatttgggatttttttttcaagctttagatatggctggagagtaatgagacagaaggaatgtcttatattgttctgactgctgacaattcctaaagaaaagtgatagaagggtttttaacaaaactctttccctgccgccgccgagtcgcgcggaggcggaggcttgggtgcgttcaagattcagcttcacccgtaacccaccgccatggccgaggaaggcattgctgctggaggtgtaatggacgttaatactgctttacaagaggttctgaagactgccctcatccacgatggcctagcacgtggaattcgcgaagctgccaaagccttagacaaggcttgcatccaactgtgatgagcctatgtatgtcaagttggtggaggccctttgtgctgaacaccaaatcaacctaattaaggttgatgacaacaagaaactaggagaatgggtaggcctttgtaaaattgacagagaggggaaaccccgtaaagtggttggttgcagttgtgtagtagttaaggactatggcagcttcgcgaattccacgtgctaggccaaggtcagggacacagatggtgccacccggtgcaggtctctccgctcatcaagctcggccgctactccgccctgttccctcggggtggcctaacggagccacgcgctagaattacctaaaagctcgggcagaagagggagaggaggataggagcagaaagagaaagaagaaagcaggatgaactgaaggggatcgccagagagttggcagaagatgacagcatataaagtgagtgacctggaccatcttggacagcagcggatgatag

SEQ ID NO: 319866 - DNA, 2096 bp, Homo sapiens
aggcccgtggatctcatcgaagatggcggcgcgatctgtgtcgggcattaccagaagagtcttcatgtggacagtctcagggacaccatgtagagaattttggtctcgattcagaaaagagaaagagccagtggttgttgagacagtagaagagaaaaaggaacctatcctagtgtgtccacctttacgaagccgagcatacacaccacctgaagatctccagagtcgtttggaatcttacgttaaagaagtttttggttcatctcttcctagtaattggcaagacatctccctggaagatagtcgtctaaagttcaatcttctggctcatttagctgatgacttgggtcatgtagtccctaactccagactccaccagatgtgcagggttagagatgttcttgatttctataatgtccctattcaagatagatctaaatttgatgaactcagtgccagtaatctgccccccaatttgaaaatcacttggagttactaagcaattcggaagagaaacacattgaaatcactgtctttccctgagcaagggggctgctcattagatcttttgatactttaccatgtgaaatactaccagaactgttctctaaacccactttttctgtagaggaatgtatcatctttttttttctcatattacaaatggacaaataacggactttctattttcatatttgctgaaaccattttttaaatgaaattaggtcattatttatgaaaagttttgagagggcactgtcaacttgggtttaagacaggaggacattgcaagttcacacctttcataagcataaagtagttgcaagaaagtattttcatcctgttaggattcatatctaagatagagttatgcattgcacatacacaaataaacttttattagatagatacctacaaaagaagcataaaagtatgttgtgtattactgacagttctagattaatttcttttagaattaaagtagatttgttaaagtgtattgtgtgttgtaaattttttgagtgaaatttgcttgcgctctgccttgccatttctttccagtaagtataattttgaaaaaattagaatatatgccaaatattgagtgctgtgactcttcctcataagagatgtgccagattctatgtctaattgcatattctcttcagaggagatgatgcttattttaaacctttttctctataacttttaaaaagtggtgctgagtattcactagagtggcaagtctttgtgctttaatgcactcaatttgtggaaattacttaaatagcaggttatcagatggttctgaatgacaaaggtgttaaatttgggatttttttttcaagctttagatatggctggagagtaatgagacagaaggaatgtcttatattgttctgactgctgacaattcctaaagaaaagtgatagaagggtttttaacaaaactctttccctgccgccgccgagtcgcgcggaggcggaggcttgggtgcgttcaagattcagcttcacccgtaacccaccgccatggccgaggaaggcattgctgctggaggtgtaatggacgttaatactgctttacaagaggttctgaagactgccctcatccacgatggcctagcacgtggaattcgcgaagctgccaaagccttagacaagtacgtgtatcagtctcaatactgtgggttcttgcaaccggaacaaaactgccacccaagggaagaaggcatggagttcatggtgttagcgcaaaagttctgaatggcatccgtcctaccggaaacctaggaaaaggcgccaagcccatctttgtgtgcttgcatccaactgtgatgagcctatgtatgtcaagttggtggaggccctttgtgctgaacaccaaatcaacctaattaaggttgatgacaacaagaaactaggagaatgggtaggcctttgtaaaattgacagagaggggaaaccccgtaaagtggttggttgcagttgtgtagtagttaaggtgtatggcaagaagccaccccattcctccccacactcatcgcccttaccacgctactcctacctatctccccttttatattaataatctt

SEQ ID NO: 319867 - DNA, 1968 bp, Homo sapiens
aggcccgtggatctcatcgaagatggcggcgcgatctgtgtcgggcattaccagaagagtcttcatgtggacagtctcagggacaccatgtagagaattttggtctcgattcagaaaagagaaagagccagtggttgttgagacagtagaagagaaaaaggaacctatcctagtgtgtccacctttacgaagccgagcatacacaccacctgaagatctccagagtcgtttggaatcttacgttaaagaagtttttggttcatctcttcctagtaattggcaagacatctccctggaagatagtcgtctaaagttcaatcttctggctcatttagctgatgacttgggtcatgtagtccctaactccagactccaccagatgtgcagggttagagatgttcttgatttctataatgtccctattcaagatagatctaaatttgatgaactcagtgccagtaatctgccccccaatttgaaaatcacttggagttactaagcaattcggaagagaaacacattgaaatcactgtctttccctgagcaagggggctgctcattagatcttttgatactttaccatgtgaaatactaccagaactgttctctaaacccactttttctgtagaggaatgtatcatctttttttttctcatattacaaatggacaaataacggactttctattttcatatttgctgaaaccattttttaaatgaaattaggtcattatttatgaaaagttttgagagggcactgtcaacttgggtttaagacaggaggacattgcaagttcacacctttcataagcataaagtagttgcaagaaagtattttcatcctgttaggattcatatctaagatagagttatgcattgcacatacacaaataaacttttattagatagatacctacaaaagaagcataaaagtatgttgtgtattactgacagttctagattaatttcttttagaattaaagtagatttgttaaagtgtattgtgtgttgtaaattttttgagtgaaatttgcttgcgctctgccttgccatttctttccagtaagtataattttgaaaaaattagaatatatgccaaatattgagtgctgtgactcttcctcataagagatgtgccagattctatgtctaattgcatattctcttcagaggagatgatgcttattttaaacctttttctctataacttttaaaaagtggtgctgagtattcactagagtggcaagtctttgtgctttaatgcactcaatttgtggaaattacttaaatagcaggttatcagatggttctgaatgacaaaggtgttaaatttgggatttttttttcaagctttagatatggctggagagtaatgagacagaaggaatgtcttatattgttctgactgctgacaattcctaaagaaaagtgatagaagggtttttaacaaaactctttccctgccgccgccgagtcgcgcggaggcggaggcttgggtgcgttcaagattcagcttcacccgtaacccaccgccatggccgaggaaggcattgctgctggaggtgtaatggacgttaatactgctttacaagaggttctgaagactgccctcatccacgatggcctagcacgtggaattcgcgaagctgccaaagccttagacaagtacgtgtatcagtctcaatactgtgggttcttgcaaccggaacaaaactgccacccaagggaagaaggcatggagttcatggtgttagcgcaaaagttctgaatggcatccgtcctaccggaaacctaggaaaaggtatcagaactcagatctataaagcccacttaaaatgtgtgggttgctgtttggaatggggataagcactcaaaactacagtgtttgaatgatgactttaattgtcggatacccttcactccttttatgagtgaaacataagagtctgacaaacctgtaggttgtgga

SEQ ID NO: 319868 - DNA, 1820 bp, Homo sapiens
  misc_feature (1779)..(1779): n is a, c, g, or t
  misc_feature (1783)..(1786): n is a, c, g, or t
aggcccgtggatctcatcgaagatggcggcgcgatctgtgtcgggcattaccagaagagtcttcatgtggacagtctcagggacaccatgtagagaattttggtctcgattcagaaaagagaaagagccagtggttgttgagacagtagaagagaaaaaggaacctatcctagtgtgtccacctttacgaagccgagcatacacaccacctgaagatctccagagtcgtttggaatcttacgttaaagaagtttttggttcatctcttcctagtaattggcaagacatctccctggaagatagtcgtctaaagttcaatcttctggctcatttagctgatgacttgggtcatgtagtccctaactccagactccaccagatgtgcagggttagagatgttcttgatttctataatgtccctattcaagatagatctaaatttgatgaactcagtgccagtaatctgccccccaatttgaaaatcacttggagttactaagcaattcggaagagaaacacattgaaatcactgtctttccctgagcaagggggctgctcattagatcttttgatactttaccatgtgaaatactaccagaactgttctctaaacccactttttctgtagaggaatgtatcatctttttttttctcatattacaaatggacaaataacggactttctattttcatatttgctgaaaccattttttaaatgaaattaggtcattatttatgaaaagttttgagagggcactgtcaacttgggtttaagacaggaggacattgcaagttcacacctttcataagcataaagtagttgcaagaaagtattttcatcctgttaggattcatatctaagatagagttatgcattgcacatacacaaataaacttttattagatagatacctacaaaagaagcataaaagtatgttgtgtattactgacagttctagattaatttcttttagaattaaagtagatttgttaaagtgtattgtgtgttgtaaattttttgagtgaaatttgcttgcgctctgccttgccatttctttccagtaagtataattttgaaaaaattagaatatatgccaaatattgagtgctgtgactcttcctcataagagatgtgccagattctatgtctaattgcatattctcttcagaggagatgatgcttattttaaacctttttctctataacttttaaaaagtggtgctgagtattcactagagtggcaagtctttgtgctttaatgcactcaatttgtggaaattacttaaatagcaggttatcagatggttctgaatgacaaaggtgttaaatttgggatttttttttcaagctttagatatggctggagagtaatgagacagaaggaatgtcttatattgttctgactgctgacaattcctaaagaaaagtgatagaagggtttttaacaaaactctttccctgccgccgccgagtcgcgcggaggcggaggcttgggtgcgttcaagattcagcttcacccgtaacccaccgccatggccgaggaaggcattgctgctggaggtgtaatggacgttaatactgctttacaagaggttctgaagactgccctcatccacgatggcctagcacgtggaattcgcgaagctgccaaagccttagacaaggcttgcatccaactgtgatgagcctatgtatgtcaagttggtggaggccctttgtgctgaacaccaaatcaacctaattaaggttgatgacaacaagaaactaggagaatgggnaggnnnnggtagcccgaagctgtgagggtcctctagacacc

SEQ ID NO: 319869 - DNA, 1881 bp, Homo sapiens
aggcccgtggatctcatcgaagatggcggcgcgatctgtgtcgggcattaccagaagagtcttcatgtggacagtctcagggacaccatgtagagaattttggtctcgattcagaaaagagaaagagccagtggttgttgagacagtagaagagaaaaaggaacctatcctagtgtgtccacctttacgaagccgagcatacacaccacctgaagatctccagagtcgtttggaatcttacgttaaagaagtttttggttcatctcttcctagtaattggcaagacatctccctggaagatagtcgtctaaagttcaatcttctggctcatttagctgatgacttgggtcatgtagtccctaactccagactccaccagatgtgcagggttagagatgttcttgatttctataatgtccctattcaagatagatctaaatttgatgaactcagtgccagtaatctgccccccaatttgaaaatcacttggagttactaagcaattcggaagagaaacacattgaaatcactgtctttccctgagcaagggggctgctcattagatcttttgatactttaccatgtgaaatactaccagaactgttctctaaacccactttttctgtagaggaatgtatcatctttttttttctcatattacaaatggacaaataacggactttctattttcatatttgctgaaaccattttttaaatgaaattaggtcattatttatgaaaagttttgagagggcactgtcaacttgggtttaagacaggaggacattgcaagttcacacctttcataagcataaagtagttgcaagaaagtattttcatcctgttaggattcatatctaagatagagttatgcattgcacatacacaaataaacttttattagatagatacctacaaaagaagcataaaagtatgttgtgtattactgacagttctagattaatttcttttagaattaaagtagatttgttaaagtgtattgtgtgttgtaaattttttgagtgaaatttgcttgcgctctgccttgccatttctttccagtaagtataattttgaaaaaattagaatatatgccaaatattgagtgctgtgactcttcctcataagagatgtgccagattctatgtctaattgcatattctcttcagaggagatgatgcttattttaaacctttttctctataacttttaaaaagtggtgctgagtattcactagagtggcaagtctttgtgctttaatgcactcaatttgtggaaattacttaaatagcaggttatcagatggttctgaatgacaaaggtgttaaatttgggatttttttttcaagctttagatatggctggagagtaatgagacagaaggaatgtcttatattgttctgactgctgacaattcctaaagaaaagtgatagaagggtttttaacaaaactctttccctgccgccgccgagtcgcgcggaggcggaggcttgggtgcgttcaagattcagcttcacccgtaacccaccgccatggccgaggaaggcattgctgctggaggtgtaatggacgttaatactgctttacaagaggttctgaagactgccctcatccacgatggcctagcacgtggaattcgcgaagctgccaaagccttagacaaggcttgcatccaactgtgatgagcctatgtatgtcaagttggtggaggccctttgtgctgaacaccaaatcaacctaattaaggttgatgacaacaagaaactaggagaatgggtagggcgctcgttacggaggcgctcgttacggagggcgtcgttacggaggcgctcgttacggaggcgctcgttacggagggtgtaaggaggcgtcgttacgga

SEQ ID NO: 319870 - DNA, 1954 bp, Homo sapiens; identical to SEQ ID NO: 319863

SEQ ID NO: 319871 - DNA, 476 bp, Homo sapiens
caacccccccaacacacccatacgcagtggagccggggttaatcggacgaggcgcatggccgaggaaggcattgctgctggaggtgtaatggacgttaatactgctttacaagaggttctgaagactgccctcatccacgatggcctagcacgtggaattcgcgaagctgccaaagccttagacaagcgccaagcccatctttgtgtgcttgcatccaactgtgatgagcctatgtatgtcaagttggtggaggccctttgtgctgaacaccaaatcaacctaattaaggttgatgacaacaagaaactaggagaatgggtaggcctttgtaaaattgacagagaggggaaaccccgtaaagtggttggttgcagttgtgtagtagttaaggactatggcaaggagtctcaggccaaggatgtcattgaagagtatttcaaatgcaagaaatgaagaaataaatctttggctcaca

SEQ ID NO: 319872 - DNA, 839 bp, Homo sapiens
gcgtccctactactactaaattcgcggccgtcgaccttagacaagcgccaacccatcttgtgtgcttgcatccaactgtgatgagcctatgtatgtcaagttggtggaggccctttgtgctgaacaccaaatcaacctaattaaggttgatgacaacaagaaactaggagaatgggtaggcctttgtaaaattgacagagaggggaaaccccgtaaagtggttggttgcagttgtgtagtagttaaggactatggcaaggagtctcaggccaaggatgtcattgaagagtatttcaaatgcaagaaatgaagaaataaatctttggctcacaaacaaaaaaaaaaaaaaaaaaaaaaaaaaaaaaaaaacaaaaaaaaaaaaaaacaaaaaaaaagggggggggggccaaaaaaaaccccagggggggccaaaagaaagaggcacgagaccaccaagattcagctccagtcagaagggggcggccaaaagaaggggcggagggaagaaaaagaagaagatggccggaaggcggccagtagataacaatcaaggctgatcctgcgagagagaaacaaaaccggaagaggggggagaaccacggtagagaagacgaaagccgaaccaccgcgtgagggggaggacgacaaaaagaacagcggcaacaaacacaacaccgaacgaaaagtacaaaacacaccacagagggagaaaaacaaacacaggccaacggcgcagcacagaaaggaagagcaacaacaagaggcaacggcagagagccacaagaagacgcgctgatgaccacggaagaaagcagaagaagacaaatattcaacaacga

SEQ ID NO: 319873 - DNA, 265 bp, Homo sapiens
  misc_feature (4)..(4): n is a, c, g, or t
  misc_feature (6)..(6): n is a, c, g, or t
cgcngnccgcgcgaacgctgcgagagacgacagaagggggaggccctttgtgctgaacaccaaatcaacctaattaaggttgatgacaacaagaaactaggagaatgggtaggcctttgtaaaattgacagagaggggaaaccccgtaaagtggttggttgcagttgtgtagtagttaaggactatggcaaggagtctcaggccaaggatgtcattgaagagtatttcaaatgcaagaaatgaagaaataaatctttggctcaca

SEQ ID NO: 319874 - DNA, 710 bp, Homo sapiens
actactactttcttttgtgcacggcctacaaatatgattttaccacttatttcttttccagtcatctcttccacagccttattggcatcctcgtgtttttcgtaactcacaaagccaaagcctttggatttcccattgggatctctcatcaccttgacacttagggtcttaccaaactgactgaatagctctttccctgccgccgccgagtcgcgcggaggcggaggcttgggtgcgttcaagattcagcttcacccgtaacccaccgccatggccgaggaaggcattgctgctggaggtgtaatggacgttaatactgctttacaagaggttctgaagactgccctcatccacgatggcctagcacgtggaattcgcgaagctgccaaagccttagacaagcgccaagcccatctttgtgtgcttgcatccaactgtgatgagcctatgtatgtcaagttggtggaggccctttgtgctgaacaccaaatcaacctaattaaggttgatgacaacaagaaactaggagaatgggtaggcctttgtaaaattgacagagaggggaaaccccgtaaagtggttggttgcagttgtgtagtagttaaggactatggcaaggagtctcaggccaaggatgtcattgaagagtatttcaaatgcaagaatggacgtctatgcaagaatggacgtctatgcgagaatggacgtct

SEQ ID NO: 319875 - DNA, 693 bp, Homo sapiens
actactactttcttttgtgcacggcctacaaatatgattttaccacttatttcttttccagtcatctcttccacagccttattggcatcctcgtgtttttcgtaactcacaaagccaaagcctttggatttcccattgggatctctcatcaccttgacacttagggtcttaccaaactgactgaatagctctttccctgccgccgccgagtcgcgcggaggcggaggcttgggtgcgttcaagattcagcttcacccgtaacccaccgccatggccgaggaaggcattgctgctggaggtgtaatggacgttaatactgctttacaagaggttctgaagactgccctcatccacgatggcctagcacgtggaattcgcgaagctgccaaagccttagacaagcgccaagcccatctttgtgtgcttgcatccaactgtgatgagcctatgtatgtcaagttggtggaggccctttgtgctgaacaccaaatcaacctaattaaggttgatgacaacaagaaactaggagaatgggtaggcctttgtaaaattgacagagaggggaaaccccgtaaagtggttggttgcagttgtgtagtagttaaggactatcgcaaggagccacactatgagccacccaaagtgccccacgatgcgccacaccatgagccacccaaggagccacacgacgag

SEQ ID NO: 319876 - DNA, 2349 bp, Homo sapiens
aggcccgtggatctcatcgaagatggcggcgcgatctgtgtcgggcattaccagaagagtcttcatgtggacagtctcagggacaccatgtagagaattttggtctcgattcagaaaagagaaagagccagtggttgttgagacagtagaagagaaaaaggaacctatcctagtgtgtccacctttacgaagccgagcatacacaccacctgaagatctccagagtcgtttggaatcttacgttaaagaagtttttggttcatctcttcctagtaattggcaagacatctccctggaagatagtcgtctaaagttcaatcttctggctcatttagctgatgacttgggtcatgtagtccctaactccagactccaccagatgtgcagggttagagatgttcttgatttctataatgtccctattcaagatagatctaaatttgatgaactcagtgccagtaatctgccccccaatttgaaaatcacttggagttactaagcaattcggaagagaaacacattgaaatcactgtctttccctgagcaagggggctgctcattagatcttttgatactttaccatgtgaaatactaccagaactgttctctaaacccactttttctgtagaggaatgtatcatctttttttttctcatattacaaatggacaaataacggactttctattttcatatttgctgaaaccattttttaaatgaaattaggtcattatttatgaaaagttttgagagggcactgtcaacttgggtttaagacaggaggacattgcaagttcacacctttcataagcataaagtagttgcaagaaagtattttcatcctgttaggattcatatctaagatagagttatgcattgcacatacacaaataaacttttattagatagatacctacaaaagaagcataaaagtatgttgtgtattactgacagttctagattaatttcttttagaattaaagtagatttgttaaagtgtattgtgtgttgtaaattttttgagtgaaatttgcttgcgctctgccttgccatttctttccagtaagtataattttgaaaaaattagaatatatgccaaatattgagtgctgtgactcttcctcataagagatgtgccagattctatgtctaattgcatattctcttcagaggagatgatgcttattttaaacctttttctctataacttttaaaaagtggtgctgagtattcactagagtggcaagtctttgtgctttaatgcactcaatttgtggaaattacttaaatagcaggttatcagatggttctgaatgacaaaggtgttaaatttgggatttttttttcaagctttagatatggctggagagtaatgagacagaaggaatgtcttatattgttctgactgctgacaattcctaaagaaaagtgatagaagggtttttaacaaaactctttccctgccgccgccgagtcgcgcggaggcggaggcttgggtgcgttcaagattcagcttcacccgtaacccaccgccatggccgaggaaggcattgctgctggaggtgtaatggacgttaatactgctttacaagaggttctgaagactgccctcatccacgatggcctagcacgtggaattcgcgaagctgccaaagccttagacaagcgccaagcccatctttgtgtgcttgcatccaactgtgatgagcctatgtatgtcaagttggtggaggccctttgtgctgaacaccaaatcaacctaattaaggtaaggctgctaaggattgtgttgggactaatgttcagtgatgcttgtatatgggggtaaattctgtgaagtctcaagctgttcattttgtgcaggtgtaaacattacgtgcacctgatactgtcggccattttaaagatgattgtaggtagaagcattttatacctgcagaattgaatcctaattttgacgttggtatacaacaaagattagtagcaggcttgtaggtgatcttagtgctgtacatgatgacaactggctccctctactgaactgccatgaggaaactgccatgtcacccttctgattacagccaccttttgggtttcatttaattttggtagtgttaatgtctattaatgtgatttttttttttttaacctttctcccaataggttgatgacaacaagaaactaggagaatgggtaggcctttgtaaaattgacagagaggggaaaccccgtaaagtggttggttgcagttgtgtagtagttaaggactatggcaaggagtctcaggccaaggatgtcattgaagagtatttcaaatgcaagaaatgaagaaataaatctttggctcaca

SEQ ID NO: 319877 - DNA, 2120 bp, Homo sapiens
  misc_feature (2103)..(2103): n is a, c, g, or t
  misc_feature (2109)..(2109): n is a, c, g, or t
  misc_feature (2111)..(2111): n is a, c, g, or t
aggcccgtggatctcatcgaagatggcggcgcgatctgtgtcgggcattaccagaagagtcttcatgtggacagtctcagggacaccatgtagagaattttggtctcgattcagaaaagagaaagagccagtggttgttgagacagtagaagagaaaaaggaacctatcctagtgtgtccacctttacgaagccgagcatacacaccacctgaagatctccagagtcgtttggaatcttacgttaaagaagtttttggttcatctcttcctagtaattggcaagacatctccctggaagatagtcgtctaaagttcaatcttctggctcatttagctgatgacttgggtcatgtagtccctaactccagactccaccagatgtgcagggttagagatgttcttgatttctataatgtccctattcaagatagatctaaatttgatgaactcagtgccagtaatctgccccccaatttgaaaatcacttggagttactaagcaattcggaagagaaacacattgaaatcactgtctttccctgagcaagggggctgctcattagatcttttgatactttaccatgtgaaatactaccagaactgttctctaaacccactttttctgtagaggaatgtatcatctttttttttctcatattacaaatggacaaataacggactttctattttcatatttgctgaaaccattttttaaatgaaattaggtcattatttatgaaaagttttgagagggcactgtcaacttgggtttaagacaggaggacattgcaagttcacacctttcataagcataaagtagttgcaagaaagtattttcatcctgttaggattcatatctaagatagagttatgcattgcacatacacaaataaacttttattagatagatacctacaaaagaagcataaaagtatgttgtgtattactgacagttctagattaatttcttttagaattaaagtagatttgttaaagtgtattgtgtgttgtaaattttttgagtgaaatttgcttgcgctctgccttgccatttctttccagtaagtataattttgaaaaaattagaatatatgccaaatattgagtgctgtgactcttcctcataagagatgtgccagattctatgtctaattgcatattctcttcagaggagatgatgcttattttaaacctttttctctataacttttaaaaagtggtgctgagtattcactagagtggcaagtctttgtgctttaatgcactcaatttgtggaaattacttaaatagcaggttatcagatggttctgaatgacaaaggtgttaaatttgggatttttttttcaagctttagatatggctggagagtaatgagacagaaggaatgtcttatattgttctgactgctgacaattcctaaagaaaagtgatagaagggtttttaacaaaactctttccctgccgccgccgagtcgcgcggaggcggaggcttgggtgcgttcaagattcagcttcacccgtaacccaccgccatggccgaggaaggcattgctgctggaggtgtaatggacgttaatactgctttacaagaggttctgaagactgccctcatccacgatggcctagcacgtggaattcgcgaagctgccaaagccttagacaagtacgtgtatcagtctcaatactgtgggttcttgcaaccggaacaaaactgccacccaagggaagaaggcatggagttcatggtgttagcgcaaaagttctgaatggcatccgtcctaccggaaacctaggaaaaggcgccaagcccatctttgtgtgcttgcatccaactgtgatgagcctatgtatgtcaagttggtggaggccctttgtgctgaacaccaaatcaacctaattaaggttgatgacaacaagaaactaggagaatgggtaggcctttgtaaaattgacagagaggggaaaccccgtaaagtggttggttgcagttgtgtagtagttaaggactatggcaaggagtctcaggccaaggatgtcattgaagagtatttcaaatgcaagaaatgaagaaataaatctttggctcacattctatgcattcnatgtgncngtaccggct

SEQ ID NO: 319878 - DNA, 2767 bp, Homo sapiens
aggcccgtggatctcatcgaagatggcggcgcgatctgtgtcgggcattaccagaagagtcttcatgtggacagtctcagggacaccatgtagagaattttggtctcgattcagaaaagagaaagagccagtggttgttgagacagtagaagagaaaaaggaacctatcctagtgtgtccacctttacgaagccgagcatacacaccacctgaagatctccagagtcgtttggaatcttacgttaaagaagtttttggttcatctcttcctagtaattggcaagacatctccctggaagatagtcgtctaaagttcaatcttctggctcatttagctgatgacttgggtcatgtagtccctaactccagactccaccagatgtgcagggttagagatgttcttgatttctataatgtccctattcaagatagatctaaatttgatgaactcagtgccagtaatctgccccccaatttgaaaatcacttggagttactaagcaattcggaagagaaacacattgaaatcactgtctttccctgagcaagggggctgctcattagatcttttgatactttaccatgtgaaatactaccagaactgttctctaaacccactttttctgtagaggaatgtatcatctttttttttctcatattacaaatggacaaataacggactttctattttcatatttgctgaaaccattttttaaatgaaattaggtcattatttatgaaaagttttgagagggcactgtcaacttgggtttaagacaggaggacattgcaagttcacacctttcataagcataaagtagttgcaagaaagtattttcatcctgttaggattcatatctaagatagagttatgcattgcacatacacaaataaacttttattagatagatacctacaaaagaagcataaaagtatgttgtgtattactgacagttctagattaatttcttttagaattaaagtagatttgttaaagtgtattgtgtgttgtaaattttttgagtgaaatttgcttgcgctctgccttgccatttctttccagtaagtataattttgaaaaaattagaatatatgccaaatattgagtgctgtgactcttcctcataagagatgtgccagattctatgtctaattgcatattctcttcagaggagatgatgcttattttaaacctttttctctataacttttaaaaagtggtgctgagtattcactagagtggcaagtctttgtgctttaatgcactcaatttgtggaaattacttaaatagcaggttatcagatggttctgaatgacaaaggtgttaaatttgggatttttttttcaagctttagatatggctggagagtaatgagacagaaggaatgtcttatattgttctgactgctgacaattcctaaagaaaagtgatagaagggtttttaacaaaactctttccctgccgccgccgagtcgcgcggaggcggaggcttgggtgcgttcaagattcagcttcacccgtaacccaccgccatggccgaggaaggcattgctgctggaggtgtaatggacgttaatactgctttacaagaggttctgaagactgccctcatccacgatggcctagcacgtggaattcgcgaagctgccaaagccttagacaagcgccaagcccatctttgtgtgcttgcatccaactgtgatgagcctatgtatgtcaagttggtggaggccctttgtgctgaacaccaaatcaacctaattaaggtaaggctgctaaggattgtgttgggactaatgttcagtgatgcttgtatatgggggtaaattctgtgaagtctcaagctgttcattttgtgcaggtgtaaacattacgtgcacctgatactgtcggccattttaaagatgattgtaggtagaagcattttatacctgcagaattgaatcctaattttgacgttggtatacaacaaagattagtagcaggcttgtaggtgatcttagtgctgtacatgatgacaactggctccctctactgaactgccatgaggaaactgccatgtcacccttctgattacagccaccttttgggtttcatttaattttggtagtgttaatgtctattaatgtgatttttttttttttaacctttctcccaataggttgatgacaacaagaaactaggagaatgggtaggcctttgtaaaattgacagagaggggaaaccccgtaaagtggttggttgcagttgtgtagtagttaaggtaagtcaccgtttattctagggatgaaggttatgctgggtaatcatataaaaccttgtattgaaataagttgaggatcttataaaaggaaaaaactgattcaacaggtttaaagcattttctgcatttcaggaaaaaaataaaagctgtaatttacaagccagccaatgaatctgcttacctgattgtgtttgtgcagacatactttaaaaactggcaatagtaaagccatgttacgagccttaaggacattgaagtcgttaaggtccctgagaatggctataacaaatcttagtgatgggaaacatttttataagacatagctaattgttgaagctccactataattgatactaatagcttggtgaaattcctaaatattaacaagaaattgcatgcgtgttttgttttttttaaggactatggcaaggagtctcaggccaaggatgtcattgaagagtatttcaaatgcaagaaatgaagaaataaatctttggctcaca

SEQ ID NO: 319879 - DNA, 1914 bp, Homo sapiens
aggcccgtggatctcatcgaagatggcggcgcgatctgtgtcgggcattaccagaagagtcttcatgtggacagtctcagggacaccatgtagagaattttggtctcgattcagaaaagagaaagagccagtggttgttgagacagtagaagagaaaaaggaacctatcctagtgtgtccacctttacgaagccgagcatacacaccacctgaagatctccagagtcgtttggaatcttacgttaaagaagtttttggttcatctcttcctagtaattggcaagacatctccctggaagatagtcgtctaaagttcaatcttctggctcatttagctgatgacttgggtcatgtagtccctaactccagactccaccagatgtgcagggttagagatgttcttgatttctataatgtccctattcaagatagatctaaatttgatgaactcagtgccagtaatctgccccccaatttgaaaatcacttggagttactaagcaattcggaagagaaacacattgaaatcactgtctttccctgagcaagggggctgctcattagatcttttgatactttaccatgtgaaatactaccagaactgttctctaaacccactttttctgtagaggaatgtatcatctttttttttctcatattacaaatggacaaataacggactttctattttcatatttgctgaaaccattttttaaatgaaattaggtcattatttatgaaaagttttgagagggcactgtcaacttgggtttaagacaggaggacattgcaagttcacacctttcataagcataaagtagttgcaagaaagtattttcatcctgttaggattcatatctaagatagagttatgcattgcacatacacaaataaacttttattagatagatacctacaaaagaagcataaaagtatgttgtgtattactgacagttctagattaatttcttttagaattaaagtagatttgttaaagtgtattgtgtgttgtaaattttttgagtgaaatttgcttgcgctctgccttgccatttctttccagtaagtataattttgaaaaaattagaatatatgccaaatattgagtgctgtgactcttcctcataagagatgtgccagattctatgtctaattgcatattctcttcagaggagatgatgcttattttaaacctttttctctataacttttaaaaagtggtgctgagtattcactagagtggcaagtctttgtgctttaatgcactcaatttgtggaaattacttaaatagcaggttatcagatggttctgaatgacaaaggtgttaaatttgggatttttttttcaagctttagatatggctggagagtaatgagacagaaggaatgtcttatattgttctgactgctgacaattcctaaagaaaagtgatagaagggtttttaacaaaactctttccctgccgccgccgagtcgcgcggaggcggaggcttgggtgcgttcaagattcagcttcacccgtaacccaccgccatggccgaggaaggcattgctgctggaggtgtaatggacgttaatactgctttacaagaggttctgaagactgccctcatccacgatggcctagcacgtggaattcgcgaagctgccaaagccttagacaagcgccaagcccatctttgtgtggaggccctttgtgctgaacaccaaatcaacctaattaaggttgatgacaacaagaaactaggagaatgggtaggcctttgtaaaattgacagagaggggaaaccccgtaaagtggttggttgcagttgtgtagtagttaaggactatcgcaaggagccacactatgagccacccaaagtgccccacgatgcgccacaccatgagccacccaaggagccacacgacgag

SEQ ID NO: 319880 - DNA, 1888 bp, Homo sapiens
  misc_feature (1831)..(1833): n is a, c, g, or t
aggcccgtggatctcatcgaagatggcggcgcgatctgtgtcgggcattaccagaagagtcttcatgtggacagtctcagggacaccatgtagagaattttggtctcgattcagaaaagagaaagagccagtggttgttgagacagtagaagagaaaaaggaacctatcctagtgtgtccacctttacgaagccgagcatacacaccacctgaagatctccagagtcgtttggaatcttacgttaaagaagtttttggttcatctcttcctagtaattggcaagacatctccctggaagatagtcgtctaaagttcaatcttctggctcatttagctgatgacttgggtcatgtagtccctaactccagactccaccagatgtgcagggttagagatgttcttgatttctataatgtccctattcaagatagatctaaatttgatgaactcagtgccagtaatctgccccccaatttgaaaatcacttggagttactaagcaattcggaagagaaacacattgaaatcactgtctttccctgagcaagggggctgctcattagatcttttgatactttaccatgtgaaatactaccagaactgttctctaaacccactttttctgtagaggaatgtatcatctttttttttctcatattacaaatggacaaataacggactttctattttcatatttgctgaaaccattttttaaatgaaattaggtcattatttatgaaaagttttgagagggcactgtcaacttgggtttaagacaggaggacattgcaagttcacacctttcataagcataaagtagttgcaagaaagtattttcatcctgttaggattcatatctaagatagagttatgcattgcacatacacaaataaacttttattagatagatacctacaaaagaagcataaaagtatgttgtgtattactgacagttctagattaatttcttttagaattaaagtagatttgttaaagtgtattgtgtgttgtaaattttttgagtgaaatttgcttgcgctctgccttgccatttctttccagtaagtataattttgaaaaaattagaatatatgccaaatattgagtgctgtgactcttcctcataagagatgtgccagattctatgtctaattgcatattctcttcagaggagatgatgcttattttaaacctttttctctataacttttaaaaagtggtgctgagtattcactagagtggcaagtctttgtgctttaatgcactcaatttgtggaaattacttaaatagcaggttatcagatggttctgaatgacaaaggtgttaaatttgggatttttttttcaagctttagatatggctggagagtaatgagacagaaggaatgtcttatattgttctgactgctgacaattcctaaagaaaagtgatagaagggtttttaacaaaactctttccctgccgccgccgagtcgcgcggaggcggaggcttgggtgcgttcaagattcagcttcacccgtaacccaccgccatggccgaggaaggcattgctgctggaggtgtaatggacgttaatactgctttacaagaggttctgaagactgccctcatccacgatggcctagcacgtggaattcgcgaagctgccaaagccttagacaaggcttgcatccaactgtgatgagcctatgtatgtcaagttggtggaggccctttgtgctgaacaccaaatcaacctaattaaggttgatgacaacaagaaactaggagaatgggtaggcctttgtaaaattgacagagaggggaaaccccgtaaagtggttgattgnnngttgtgtagtagtaaggactatggcaggagtgctgacgcttggtaccgagctcga

SEQ ID NO: 319881 - DNA, 2029 bp, Homo sapiens
aggcccgtggatctcatcgaagatggcggcgcgatctgtgtcgggcattaccagaagagtcttcatgtggacagtctcagggacaccatgtagagaattttggtctcgattcagaaaagagaaagagccagtggttgttgagacagtagaagagaaaaaggaacctatcctagtgtgtccacctttacgaagccgagcatacacaccacctgaagatctccagagtcgtttggaatcttacgttaaagaagtttttggttcatctcttcctagtaattggcaagacatctccctggaagatagtcgtctaaagttcaatcttctggctcatttagctgatgacttgggtcatgtagtccctaactccagactccaccagatgtgcagggttagagatgttcttgatttctataatgtccctattcaagatagatctaaatttgatgaactcagtgccagtaatctgccccccaatttgaaaatcacttggagttactaagcaattcggaagagaaacacattgaaatcactgtctttccctgagcaagggggctgctcattagatcttttgatactttaccatgtgaaatactaccagaactgttctctaaacccactttttctgtagaggaatgtatcatctttttttttctcatattacaaatggacaaataacggactttctattttcatatttgctgaaaccattttttaaatgaaattaggtcattatttatgaaaagttttgagagggcactgtcaacttgggtttaagacaggaggacattgcaagttcacacctttcataagcataaagtagttgcaagaaagtattttcatcctgttaggattcatatctaagatagagttatgcattgcacatacacaaataaacttttattagatagatacctacaaaagaagcataaaagtatgttgtgtattactgacagttctagattaatttcttttagaattaaagtagatttgttaaagtgtattgtgtgttgtaaattttttgagtgaaatttgcttgcgctctgccttgccatttctttccagtaagtataattttgaaaaaattagaatatatgccaaatattgagtgctgtgactcttcctcataagagatgtgccagattctatgtctaattgcatattctcttcagaggagatgatgcttattttaaacctttttctctataacttttaaaaagtggtgctgagtattcactagagtggcaagtctttgtgctttaatgcactcaatttgtggaaattacttaaatagcaggttatcagatggttctgaatgacaaaggtgttaaatttgggatttttttttcaagctttagatatggctggagagtaatgagacagaaggaatgtcttatattgttctgactgctgacaattcctaaagaaaagtgatagaagggtttttaacaaaactctttccctgccgccgccgagtcgcgcggaggcggaggcttgggtgcgttcaagattcagcttcacccgtaacccaccgccatggccgaggaaggcattgctgctggaggtgtaatggacgttaatactgctttacaagaggttctgaagactgccctcatccacgatggcctagcacgtggaattcgcgaagctgccaaagccttagacaagcgccaagcccatctttgtgtgcttgcatccaactgtgatgagcctatgtatgtcaagttggtggaggccctttgtgctgaacaccaaatcaacctaattaaggttgatgacaacaagaaactaggagaatgggtaggcctttgtaaaattgacagagaggggaaaccccgtaaagtggttgggcgccgatgaatagcgcctcgctactcatcggcacctctgatagcaacaaatggcatctggcacgtggagggaacttgcattcttcaaccaatcttctctaacacgcggtgccgatgaatagcgaggtgccgatgaaagcgaggtgccgatgaatagcgagtgccgagaatagggcccgagc

SEQ ID NO: 319882 - DNA, 1775 bp, Homo sapiens
aggcccgtggatctcatcgaagatggcggcgcgatctgtgtcgggcattaccagaagagtcttcatgtggacagtctcagggacaccatgtagagaattttggtctcgattcagaaaagagaaagagccagtggttgttgagacagtagaagagaaaaaggaacctatcctagtgtgtccacctttacgaagccgagcatacacaccacctgaagatctccagagtcgtttggaatcttacgttaaagaagtttttggttcatctcttcctagtaattggcaagacatctccctggaagatagtcgtctaaagttcaatcttctggctcatttagctgatgacttgggtcatgtagtccctaactccagactccaccagatgtgcagggttagagatgttcttgatttctataatgtccctattcaagatagatctaaatttgatgaactcagtgccagtaatctgccccccaatttgaaaatcacttggagttactaagcaattcggaagagaaacacattgaaatcactgtctttccctgagcaagggggctgctcattagatcttttgatactttaccatgtgaaatactaccagaactgttctctaaacccactttttctgtagaggaatgtatcatctttttttttctcatattacaaatggacaaataacggactttctattttcatatttgctgaaaccattttttaaatgaaattaggtcattatttatgaaaagttttgagagggcactgtcaacttgggtttaagacaggaggacattgcaagttcacacctttcataagcataaagtagttgcaagaaagtattttcatcctgttaggattcatatctaagatagagttatgcattgcacatacacaaataaacttttattagatagatacctacaaaagaagcataaaagtatgttgtgtattactgacagttctagattaatttcttttagaattaaagtagatttgttaaagtgtattgtgtgttgtaaattttttgagtgaaatttgcttgcgctctgccttgccatttctttccagtaagtataattttgaaaaaattagaatatatgccaaatattgagtgctgtgactcttcctcataagagatgtgccagattctatgtctaattgcatattctcttcagaggagatgatgcttattttaaacctttttctctataacttttaaaaagtggtgctgagtattcactagagtggcaagtctttgtgctttaatgcactcaatttgtggaaattacttaaatagcaggttatcagatggttctgaatgacaaaggtgttaaatttgggatttttttttcaagctttagatatggctggagagtaatgagacagaaggaatgtcttatattgttctgactgctgacaattcctaaagaaaagtgatagaagggtttttaacaaaactctttccctgccgccgccgagtcgcgcggaggcggaggcttgggtgcgttcaagattcagcttcacccgtaacccaccgccatggccgaggaaggcattgctgctggaggtgtaatggacgttaatactgctttacaagaggttctgaagactgccctcatccacgatggcctagcacgtggaattcgcgaagctgccaaagccttagacaaggcttgcatccaactgtgatgagcctatgtatgtcaagttggtggaggcccggtgtgaagaacaccccaggtaaaaaactaagctcgatgaaaacagagctcccgaggaga

SEQ ID NO: 319883 - DNA, 899 bp, Homo sapiens
actactactttcttttgtgcacggcctacaaatatgattttaccacttatttcttttccagtcatctcttccacagccttattggcatcctcgtgtttttcgtaactcacaaagccaaagcctttggatttcccattgggatctctcatcaccttgacacttagggtcttaccaaactgactgaatagctctttccctgccgccgccgagtcgcgcggaggcggaggcttgggtgcgttcaagattcagcttcacccgtaacccaccgccatggccgaggaaggcattgctgctggaggtgtaatggacgttaatactgctttacaagaggttctgaagactgccctcatccacgatggcctagcacgtggaattcgcgaagctgccaaagccttagacaagcgccaagcccatctttgtgtgcttgcatccaactgtgatgagcctatgtatgtcaagttggtggaggccctttgtgctgaacaccaaatcaacctaattaaggttgatgacaacaagaaactaggagaatgggtaggcctttgtaaaattgacagagaggggaaaccccgtaaagtggttggttgcagttgtgtagtagttaaggactatggcaaggagtctcaggccaaggatgtcattgaagagtatttcaaatgcaagaaatgaagaaataaatctttggctcacaaacaaaaaaaaaaaaaaaaaaaaaaaaaaccgggggggttttatggggggggcgggaacaacagagtgcataggaacggcggcccagtggtgcctaaagctggttcccgtggccccagttttctttggcacccaggggggaaactcggcggggccccctaaaggggggcgcggaataaattccaaaaacccgtgtcacccggtaagag

SEQ ID NO: 319884 - DNA, 850 bp, Homo sapiens
actactactttcttttgtgcacggcctacaaatatgattttaccacttatttcttttccagtcatctcttccacagccttattggcatcctcgtgtttttcgtaactcacaaagccaaagcctttggatttcccattgggatctctcatcaccttgacacttagggtcttaccaaactgactgaatagctctttccctgccgccgccgagtcgcgcggaggcggaggcttgggtgcgttcaagattcagcttcacccgtaacccaccgccatggccgaggaaggcattgctgctggaggtgtaatggacgttaatactgctttacaagaggttctgaagactgccctcatccacgatggcctagcacgtggaattcgcgaagctgccaaagccttagacaagcgccaagcccatctttgtgtgcttgcatccaactgtgatgagcctatgtatgtcaagttggtggaggccctttgtgctgaacaccaaatcaacctaattaaggttgatgacaacaagaaactaggagaatgggtaggcctttgtaaaattgacagagaggggaaaccccgtaaagtggttggttgcagttgtgtagtagttaaggactatggcaaggagtctcaggccaaggatgtcattgaagagtatttcaaatgcaagaaatgaagaaataaatctttggctcacaaaaaaatcattatttctttctcttcctcctctctttccctcttcttcttctctttcccacccctaattaatgggccgtctttaaacacgcggcatgggaaatccctgggcttccccaacttatcaccttggatctctacccttttccccaggtgggcct

SEQ ID NO: 319885 - DNA, 874 bp, Homo sapiens
actactactttcttttgtgcacggcctacaaatatgattttaccacttatttcttttccagtcatctcttccacagccttattggcatcctcgtgtttttcgtaactcacaaagccaaagcctttggatttcccattgggatctctcatcaccttgacacttagggtcttaccaaactgactgaatagctctttccctgccgccgccgagtcgcgcggaggcggaggcttgggtgcgttcaagattcagcttcacccgtaacccaccgccatggccgaggaaggcattgctgctggaggtgtaatggacgttaatactgctttacaagaggttctgaagactgccctcatccacgatggcctagcacgtggaattcgcgaagctgccaaagccttagacaagcgccaagcccatctttgtgtgcttgcatccaactgtgatgagcctatgtatgtcaagttggtggaggccctttgtgctgaacaccaaatcaacctaattaaggttgatgacaacaagaaactaggagaatgggtaggcctttgtaaaattgacagagaggggaaaccccgtaaagtggttggttgcagttgtgtagtagttaaggactatggcaaggagtctcaggccaaggatgtcattgaagagtatttcaaatgcaagaaatgaagaaataaatctttggctcacaaaaaaaaaaaaaaaacaaaaaaaaaaaaaaaccaattcccctatagggaagtcgtttacaataactggcccgcgttttacaactccggactgggactctgctttaccccaataatcgcttggagtcccctttccagtggggtattacgagaggccgacccattcgcttccaacatgggcgctg

SEQ ID NO: 319886 - DNA, 985 bp, Homo sapiens
  misc_feature (985)..(985): n is a, c, g, or t
actactactttcttttgtgcacggcctacaaatatgattttaccacttatttcttttccagtcatctcttccacagccttattggcatcctcgtgtttttcgtaactcacaaagccaaagcctttggatttcccattgggatctctcatcaccttgacacttagggtcttaccaaactgactgaatagctctttccctgccgccgccgagtcgcgcggaggcggaggcttgggtgcgttcaagattcagcttcacccgtaacccaccgccatggccgaggaaggcattgctgctggaggtgtaatggacgttaatactgctttacaagaggttctgaagactgccctcatccacgatggcctagcacgtggaattcgcgaagctgccaaagccttagacaagcgccaagcccatctttgtgtgcttgcatccaactgtgatgagcctatgtatgtcaagttggtggaggccctttgtgctgaacaccaaatcaacctaattaaggttgatgacaacaagaaactaggagaatgggtaggcctttgtaaaattgacagagaggggaaaccccgtaaagtggttggttgcagttgtgtagtagttaaggactatggcaaggagtctcaggccaaggatgtcattgaagagtatttcaaatgcaagaaatgaagaaataaatctttggctcacaaaaaaaaaaaaaaaaaaaaaaaaaaaaagggggggggggcaaaaaatttccgtgggggggccccaactatactacgcgcacccaccagctttttggagacaaaggggcccccataaaggagacccagaaacaaagagacgacggggggcgcggtacaaaacgggccgggcgcgggaaacaacggcacctggaggatctgggcgaagcaccaacttctgggggcggacacttgggagcaccccacaagagagtatacgccccaggagacacaacagtcccgtctcacgcggaacn

SEQ ID NO: 319887 - DNA, 1004 bp, Homo sapiens
actactactttcttttgtgcacggcctacaaatatgattttaccacttatttcttttccagtcatctcttccacagccttattggcatcctcgtgtttttcgtaactcacaaagccaaagcctttggatttcccattgggatctctcatcaccttgacacttagggtcttaccaaactgactgaatagctctttccctgccgccgccgagtcgcgcggaggcggaggcttgggtgcgttcaagattcagcttcacccgtaacccaccgccatggccgaggaaggcattgctgctggaggtgtaatggacgttaatactgctttacaagaggttctgaagactgccctcatccacgatggcctagcacgtggaattcgcgaagctgccaaagccttagacaagcgccaagcccatctttgtgtgcttgcatccaactgtgatgagcctatgtatgtcaagttggtggaggccctttgtgctgaacaccaaatcaacctaattaaggttgatgacaacaagaaactaggagaatgggtaggcctttgtaaaattgacagagaggggaaaccccgtaaagtggttggttgcagttgtgtagtagttaaggactatggcaaggagtctcaggccaaggatgtcattgaagagtatttcaaatgcaagaaatgaagaaataaatctttggctcacaaaaaaaaaaaaaaaaaaaacaaaaaaaacaaaaaaaaaaaaaaaaaaaggggggggggggcaaaaaaacccccggggggggggacagatgttatggagacacccagatgttgctttgaacgaggcggccgcatatagggaggtattataaaggagagagggggcgcgtataaacaggcgcgatgggaaaaagctctgggggatttttgaaggagcccatactgggggggggaaaaggggcaaactaccgagaatagaggcgggaataaactggggtagggtagccgggcatttgcggaaatgccggtttgaat

SEQ ID NO: 319888 - DNA, 691 bp, Homo sapiens
actactactttcttttgtgcacggcctacaaatatgattttaccacttatttcttttccagtcatctcttccacagccttattggcatcctcgtgtttttcgtaactcacaaagccaaagcctttggatttcccattgggatctctcatcaccttgacacttagggtcttaccaaactgactgaatagctctttccctgccgccgccgagtcgcgcggaggcggaggcttgggtgcgttcaagattcagcttcacccgtaacccaccgccatggccgaggaaggcattgctgctggaggtgtaatggacgttaatactgctttacaagaggttctgaagactgccctcatccacgatggcctagcacgtggaattcgcgaagctgccaaagccttagacaagcgccaagcccatctttgtgtgcttgcatccaactgtgatgagcctatgtatgtcaagttggtggaggccctttgtgctgaacaccaaatcaacctaattaaggttgatgacaacaagaaactaggagaatgggtaggcctttgtaaaattgacagagaggggaaaccccgtaaagtggttggttgcagttgtgtagtagttaaggactatggcaaggagtctcaggccaaggatgtcattgaagagtatttcaaatgcaagaaatgaagaaataaatctttggctcaca

SEQ ID NO: 319889 - DNA, 540 bp, Homo sapiens
  misc_feature (4)..(4): n is a, c, g, or t
  misc_feature (6)..(6): n is a, c, g, or t
cgcngnccgcgcgaacgctgcgagagacgacagaagggtctttccctgccgccgccgagtcgcgcggaggcggaggcttgggtgcgttcaagattcagcttcacccgtaacccaccgccatggccgaggaaggcattgctgctggaggtgtaatggacgttaatactgctttacaagaggttctgaagactgccctcatccacgatggcctagcacgtggaattcgcgaagctgccaaagccttagacaagcgccaagcccatctttgtgtgcttgcatccaactgtgatgagcctatgtatgtcaagttggtggaggccctttgtgctgaacaccaaatcaacctaattaaggttgatgacaacaagaaactaggagaatgggtaggcctttgtaaaattgacagagaggggaaaccccgtaaagtggttggttgcagttgtgtagtagttaaggactatggcaaggagtctcaggccaaggatgtcattgaagagtatttcaaatgcaagaaatgaagaaataaatctttggctcaca

SEQ ID NO: 319890 - DNA, 4084 bp, Homo sapiens
ctgcaggttattcagcgatagttatgacctcccggttacgtgcgttgggtggaagaattaataatatacgcacctcggagttacccaaagagaaaactcgatcagaagtcatttgcagcatccactttttagatggcgtggtacagacctttaaagttactaaacaagacactggccaggttcttctggatatggtgcacaaccacctgggtgtgactgaaaaggaatattttggtttacagcatgatgacgactccgtggactctcctagatggctggaagcaagcaaacccatcaggaagcagttaaaaggaggtttcccctgtaccctgcattttcgagtaagattttttatacctgatcccaacacactgcagcaagaacaaaccaggcacttgtatttcttacaactgaagatggatatttgcgaaggaaggttaacctgccctcttaactcagcagtggttctagcgtcctatgccgtacaatctcattttggagactataattcttccatacatcatccaggctatctttccgatagtcactttatacccgatcaaaatgaggactttttaacaaaagtcgaatctctgcatgagcagcacagtgggctaaaacaatcagaagcagaatcctgctatatcaacatagcgcggaccctcgacttctatggagtagaactgcacagtggtagggatctgcacaatttagacctaatgattggaattgcttccgcgggtgttgctgtgtaccgaaaatacatttgcacaagtttctatccttgggtgaacattctcaaaatttctttcaaaaggaaaaagttcttcatacatcagcgacagaaacaggctgaatccagggaacatattgtggccttcaacatgctgaattaccgatcttgcaaaaacttgtggaaatcctgtgttgagcaccatacgttctttcaggcaaagaagctactacctcaggaaaagaatgttctgtctcagtactggactatgggctctcggaacaccaaaaagtcggtaaataaccaatattgcaaaaaggtgattggcgggatggtgtggaacccagccatgcggagatccttatcagtggagcacttagaaaccaagagtctgccttctcgttcccctcccattactcccaactggcgaagtcctcggctccggcacgaaatccgaaagccacgccactcttctgcagataaccttgcaaatgaaatgacctacatcacggaaacggaagatgtattttacacgtacaagggctctctggcccctcaagacagcgattctgaagtttctcagaaccgaagcccgcaccaagagagtttatccgagaacaatccggcacaaagctacctgacccagaagtcatccagttctgtgtctccatcttcaaatgctccaggctcctgctcacctgacggcgttgatcagcagctcttagatgacttccacagggtgaccaaagggggctccaccgaggacgccagccagtactactgtgacaagaatgataatggtgacagctacttagtcttgatccgtatcacaccagatgaagatggaaaatttggatttaatcttaagggaggagtggatcaaaagatgcctcttgtggtatcaaggataaacccagagtcacctgcggacacctgcattcctaagctgaacgaaggggatcaaatcgtgttaatcaatggccgggacatctcagaacacacgcatgaccaagtggtgatgttcatcaaagccagccgggagtcccactcacgggagctggccctggtgatcaggaggagagctgtccgctcatttgctgacttcaagtctgaagatgaactgaaccagcttttccccgaagccattttccccatgtgtccggagggtggggacactttggagggatccatggcacagctaaagaagggcctcgaaagcgggacggtgctgatccagtttgagcaactctacagaaaaaagccaggtttggccatcacgtttgcaaagctgcctcaaaatttggacaaaaaccgatataaagatgtgctgccttatgacaccacccgggtattattgcagggaaatgaagattatattaatgcaagttacgtgaacatggaaattcctgctgctaaccttgtgaacaagtacatcgccactcaggggcccctgccgcatacctgtgcacagttttggcaggttgtctgggatcagaagttgtcactcattgtcatgttgacgactctcacagaacgagggcggaccaaatgtcaccagtactggccagatccccccgacgtcatgaaccacggcggctttcacatccagtgtcagtcagaggactgcaccatcgcctatgtgtcccgagaaatgctggtcacaaacacccagaccggggaagaacacacagtgacacatctccagtacgtcgcatggcctgaccacggtgtgcccgatgactcctccgactttctggaatttgtaaactatgtgaggtctctgagagtggacagcgagcccgtcctagttcactgcagtgctggaataggtcgaaccggtgtgttggtcactatggaaacagccatgtgcctaactgagaggaacctgcccatttacccactggatattgtccgaaaaatgcgagaccagcgcgccatgatggtgcagacatcaagccagtacaagtttgtgtgtgaagcgattcttcgtgtgtatgaagaaggtttagtccaaatgctggatcctagttaagacaactgtgaaaaagttcattcctctttcccaagggcatcctccttgaaagaggaggacagacctctctggaagcagcaagaggaaccagtagctgtgggaaaggaatgggcacctctgaacccaggcactttaaacttctatagaaaagatatcgtgtacataggaactggtgtagataagcatgcaattatggcatcatttaggcctgtatttctatggaaagatacaaaaaggatctcagtttggggcctgtcctaatgccttcttccctaacatcaccacacacacccctgtcggcatcctggagcaattgagaccggacacccacagagctgttgtcctcccagcaacaagatggtgtggttatcttgggtcatttggatgttttgtttgtttctgtgtgtcagactgtaagggctgagctttctgtgcttctaggtggagctggaacaattcagattcacccgccctgatgctaaggaaaccctgacgtatgtactagatggcagggcactgggggtcaggctgaaggctgagcaacacctctctgccctccctccctttgtcccatctcccagcgacttccaatattcatgtttctgagaattgtgtccctcttcaggttccctcttggtgcctaacctggattagtaatgtgcattcaggtgaattttcagctgaggctctgagaactggtactctcagtgtgttctggtcatcttgtggcttagttgtagaagcaggtgtgtctcttgcctctgcttgcctcctactgcacactcagcacccaggactggaatcaccgactactgaatctcctacatgtattgctgctacttcaagctcctccacttgaaaccttatgattttcccaaggggagatgggacagtgtcatctaaatattccgaatgtttggccttctgagaaaagagcttctagtaattgaaccatgggaaacccagcttctggagggttggccgtggggctgtgtacatgtgtgtgcccaggggtgagtgtttctcaggattcctaacgattcaaattaccgttgagtatatataaagaatgagtctctgtatggaagaacaaatgtgtgcattcacccccagtcacaatggtctccattgcatttcaaaggagaggatcagactatctgaatataaacacaatctgatgttaatttattctaagaacaccatcattttgattgtcctaaagaattctgcctttgtgaataccgtgttaaatttttttaaatttgtgacaggattgtagcaaattattatttaaggaaaataaattgtgtaaacattta

SEQ ID NO: 319891 - DNA, 4184 bp, Homo sapiens
ctgcaggttattcagcgatagttatgacctcccggttacgtgcgttgggtggaagaattaataatatacgcacctcggagttacccaaagagaaaactcgatcagaagtcatttgcagcatccactttttagatggcgtggtacagacctttaaagttactaaacaagacactggccaggttcttctggatatggtgcacaaccacctgggtgtgactgaaaaggaatattttggtttacagcatgatgacgactccgtggactctcctagatggctggaagcaagcaaacccatcaggaagcagttaaaaggaggtttcccctgtaccctgcattttcgagtaagattttttatacctgatcccaacacactgcagcaagaacaaaccaggcacttgtatttcttacaactgaagatggatatttgcgaaggaaggttaacctgccctcttaactcagcagtggttctagcgtcctatgccgtacaatctcattttggagactataattcttccatacatcatccaggctatctttccgatagtcactttatacccgatcaaaatgaggactttttaacaaaagtcgaatctctgcatgagcagcacagtgggctaaaacaatcagaagcagaatcctgctatatcaacatagcgcggaccctcgacttctatggagtagaactgcacagtggtagggatctgcacaatttagacctaatgattggaattgcttccgcgggtgttgctgtgtaccgaaaatacatttgcacaagtttctatccttgggtgaacattctcaaaatttctttcaaaaggaaaaagttcttcatacatcagcgacagaaacaggctgaatccagggaacatattgtggccttcaacatgctgaattaccgatcttgcaaaaacttgtggaaatcctgtgttgagcaccatacgttctttcaggcaaagaagctactacctcaggaaaagaatgttctgtctcagtactggactatgggctctcggaacaccaaaaagtcggtaaataaccaatattgcaaaaaggtgattggcgggatggtgtggaacccagccatgcggagatccttatcagtggagcacttagaaaccaagagtctgccttctcgttcccctcccattactcccaactggcgaagtcctcggctccggcacgaaatccgaaagccacgccactcttctgcagataaccttgcaaatgaaatgacctacatcacggaaacggaagatgtattttacacgtacaagggctctctggcccctcaagacagcgattctgaagtttctcagaaccgaagcccgcaccaagagagtttatccgagaacaatccggcacaaagctacctgacccagaagtcatccagttctgtgtctccatcttcaaatgctccaggctcctgctcacctgacggcgttgatcagcagctcttagatgacttccacagggtgaccaaagggggctccaccgaggacgccagccagtactactgtgacaagaatgataatggtgacagctacttagtcttgatccgtatcacaccagatgaagatggaaaatttggatttaatcttaagggaggagtggatcaaaagatgcctcttgtggtatcaaggataaacccagagtcacctgcggacacctgcattcctaagctgaacgaaggggatcaaatcgtgttaatcaatggccgggacatctcagaacacacgcatgaccaagtggtgatgttcatcaaagccagccgggagtcccactcacgggagctggccctggtgatcaggaggagagctgtccgctcatttgctgacttcaagtctgaagatgaactgaaccagcttttccccgaagccattttccccatgtgtccggagggtggggacactttggagggatccatggcacagctaaagaagggcctcgaaagcgggacggtgctgatccagtttgagcaactctacagaaaaaagccaggtttggccatcacgtttgcaaagctgcctcaaaatttggacaaaaaccgatataaagatgtgctgccttatgacaccacccgggtattattgcagggaaatgaagattatattaatgcaagttacgtgaacatggaaattcctgctgctaaccttgtgaacaagtacatcgccactcaggggcccctgccgcatacctgtgcacagttttggcaggttgtctgggatcagaagttgtcactcattgtcatgttgacgactctcacagaacgagggcggaccaaatgtcaccagtactggccagatccccccgacgtcatgaaccacggcggctttcacatccagtgtcagtcagaggactgcaccatcgcctatgtgtcccgagaaatgctggtcacaaacacccagaccggggaagaacacacagtgacacatctccagtacgtcgcatggcctgaccacggtgtgcccgatgactcctccgactttctggaatttgtaaactatgtgaggtctctgagagtggacagcgagcccgtcctagttcactgcagtgctggaataggtcgaaccggtgtgttggtcactatggaaacagccatgtgcctaactgagaggaacctgcccatttacccactggatattgtccgaaaaatgcgagaccagcgcgccatgatggtgcagacatcaagccagtacaagtttgtgtgtgaagcgattcttcgtgtgtatgaagaaggtttagtccaaatgctggatcctagttaagacaactgtgaaaaagttcattcctctttcccaagggcatcctccttgaaagaggaggacagacctctctggaagcagcaagaggaaccagtagctgtgggaaaggaatgggcacctctgaacccaggcactttaaacttctatagaaaagatatcgtgtacataggaactggtgtagataagcatgcaattatggcatcatttaggcctgtatttctatggaaagatacaaaaaggatctcagtttggggcctgtcctaatgccttcttccctaacatcaccacacacacccctgtcggcatcctggagcaattgagaccggacacccacagagctgttgtcctcccagcaacaagatggtgtggttatcttgggtcatttggatgttttgtttgtttctgtgtgtcagactgtaagggctgagctttctgtgcttctaggtggagctggaacaattcagattcacccgccctgatgctaaggaaaccctgacgtatgtactagatggcagggcactgggggtcaggctgaaggctgagcaacacctctctgccctccctccctttgtcccatctcccagcgacttccaatattcatgtttctgagaattgtgtccctcttcaggttccctcttggtgcctaacctggattagtaatgtgcattcaggtgaattttcagctgaggctctgagaactggtactctcagtgtgttctggtcatcttgtggcttagttgtagaagcaggtgtgtctcttgcctctgcttgcctcctactgcacactcagcacccaggactggaatcaccgactactgaatctcctacatgtattgctgctacttcaagctcctccacttgaaaccttatgattttcccaaggggagatgggacagtgtcatctaaatattccgaatgtttggccttctgagaaaagagcttctagtaattgaaccatgggaaacccagcttctggagggttggccgtggggctgtgtacatgtgtgtgcccaggggtgagtgtttctcaggattcctaacgattcaaattaccgttgagtatatataaagaatgagtctctgtatggaagaacaaatgtgtgcattcacccccagtcacaatggtctccattgcatttcaaaggagaggatcagactatctgaatataaacacaatctgatgttaatttattctaagaacaccatcattttgattgtcctaaagaattctgcctttgtgaataccgtgttaaatttttttaaatttgtgacaggattgtagcaaattattatttaaggaaaataaattgtgtaaacatttaatgtggtatttttgaacagcggtttttatgtactcagaagaggaagtaaagccaggttcttaatggtatttatagaaaagatgttttcatattataatgc

SEQ ID NO: 319892 - DNA, 3544 bp, Homo sapiens
cgactctagcggagcttatgggtgtcatccccccatccaggctatctttccgatagtcactttatacccgatcaaaatgaggactttttaacaaaagtcgaatctctgcatgagcagcacagtgggctaaaacaatcagaagcagaatcctgctatatcaacatagcgcggaccctcgacttctatggagtagaactgcacagtggtagggatctgcacaatttagacctaatgattggaattgcttccgcgggtgttgctgtgtaccgaaaatacatttgcacaagtttctatccttgggtgaacattctcaaaatttctttcaaaaggaaaaagttcttcatacatcagcgacagaaacaggctgaatccagggaacatattgtggccttcaacatgctgaattaccgatcttgcaaaaacttgtggaaatcctgtgttgagcaccatacgttctttcaggcaaagaagctactacctcaggaaaagaatgttctgtctcagtactggactatgggctctcggaacaccaaaaagtcggtaaataaccaatattgcaaaaaggtgattggcgggatggtgtggaacccagccatgcggagatccttatcagtggagcacttagaaaccaagagtctgccttctcgttcccctcccattactcccaactggcgaagtcctcggctccggcacgaaatccgaaagccacgccactcttctgcagataaccttgcaaatgaaatgacctacatcacggaaacggaagatgtattttacacgtacaagggctctctggcccctcaagacagcgattctgaagtttctcagaaccgaagcccgcaccaagagagtttatccgagaacaatccggcacaaagctacctgacccagaagtcatccagttctgtgtctccatcttcaaatgctccaggctcctgctcacctgacggcgttgatcagcagctcttagatgacttccacagggtgaccaaagggggctccaccgaggacgccagccagtactactgtgacaagaatgataatggtgacagctacttagtcttgatccgtatcacaccagatgaagatggaaaatttggatttaatcttaagggaggagtggatcaaaagatgcctcttgtggtatcaaggataaacccagagtcacctgcggacacctgcattcctaagctgaacgaaggggatcaaatcgtgttaatcaatggccgggacatctcagaacacacgcatgaccaagtggtgatgttcatcaaagccagccgggagtcccactcacgggagctggccctggtgatcaggaggagagctgtccgctcatttgctgacttcaagtctgaagatgaactgaaccagcttttccccgaagccattttccccatgtgtccggagggtggggacactttggagggatccatggcacagctaaagaagggcctcgaaagcgggacggtgctgatccagtttgagcaactctacagaaaaaagccaggtttggccatcacgtttgcaaagctgcctcaaaatttggacaaaaaccgatataaagatgtgctgccttatgacaccacccgggtattattgcagggaaatgaagattatattaatgcaagttacgtgaacatggaaattcctgctgctaaccttgtgaacaagtacatcgccactcaggggcccctgccgcatacctgtgcacagttttggcaggttgtctgggatcagaagttgtcactcattgtcatgttgacgactctcacagaacgagggcggaccaaatgtcaccagtactggccagatccccccgacgtcatgaaccacggcggctttcacatccagtgtcagtcagaggactgcaccatcgcctatgtgtcccgagaaatgctggtcacaaacacccagaccggggaagaacacacagtgacacatctccagtacgtcgcatggcctgaccacggtgtgcccgatgactcctccgactttctggaatttgtaaactatgtgaggtctctgagagtggacagcgagcccgtcctagttcactgcagtgctggaataggtcgaaccggtgtgttggtcactatggaaacagccatgtgcctaactgagaggaacctgcccatttacccactggatattgtccgaaaaatgcgagaccagcgcgccatgatggtgcagacatcaagccagtacaagtttgtgtgtgaagcgattcttcgtgtgtatgaagaaggtttagtccaaatgctggatcctagttaagacaactgtgaaaaagttcattcctctttcccaagggcatcctccttgaaagaggaggacagacctctctggaagcagcaagaggaaccagtagctgtgggaaaggaatgggcacctctgaacccaggcactttaaacttctatagaaaagatatcgtgtacataggaactggtgtagataagcatgcaattatggcatcatttaggcctgtatttctatggaaagatacaaaaaggatctcagtttggggcctgtcctaatgccttcttccctaacatcaccacacacacccctgtcggcatcctggagcaattgagaccggacacccacagagctgttgtcctcccagcaacaagatggtgtggttatcttgggtcatttggatgttttgtttgtttctgtgtgtcagactgtaagggctgagctttctgtgcttctaggtggagctggaacaattcagattcacccgccctgatgctaaggaaaccctgacgtatgtactctccctccctttgtcccatctcccagcgacttccaatattcatgtttctgagaattgtgtccctcttcaggttccctcttggtgcctaacctggattagtaatgtgcattcaggtgaattttcagctgaggctctgagaactggtactctcagtgtgttctggtcatcttgtggcttagttgtagaagcaggtgtgtctcttgcctctgcttgcctcctactgcacactcagcacccaggactggaatcaccgactactgaatctcctacatgtattgctgctacttcaagctcctccacttgaaaccttatgattttcccaaggggagatgggacagtgtcatctaaatattccgaatgtttggccttctgagaaaagagcttctagtaattgaaccatgggaaacccagcttctggagggttggccgtggggctgtgtacatgtgtgtgcccaggggtgagtgtttctcaggattcctaacgattcaaattaccgttgagtatatataaagaatgagtctctgtatggaagaacaaatgtgtgcattcacccccagtcacaatggtctccattgcatttcaaaggagaggatcagactatctgaatataaacacaatctgatgttaatttattctaagaacaccatcattttgattgtcctaaagaattctgcctttgtgaataccgtgttaaatttttttaaatttgtgacaggattgtagcaaattattatttaaggaaaataaattgtgtaaacattta

SEQ ID NO: 319893 - DNA, 3457 bp, Homo sapiens
cagtggggctgccatcatttctacagagaagtaaactctaggcagccaagagcccccactcatcaggatcatggagtaaaggacatgcattgagaggcatcagcttcaacctggccgatccctgatgtgctttgtttgtgttttgttttattttttgaagggtgaacattctcaaaatttctttcaaaaggaaaaagttcttcatacatcagcgacagaaacaggctgaatccagggaacatattgtggccttcaacatgctgaattaccgatcttgcaaaaacttgtggaaatcctgtgttgagcaccatacgttctttcaggcaaagaagctactacctcaggaaaagaatgttctgtctcagtactggactatgggctctcggaacaccaaaaagtcggtaaataaccaatattgcaaaaaggtgattggcgggatggtgtggaacccagccatgcggagatccttatcagtggagcacttagaaaccaagagtctgccttctcgttcccctcccattactcccaactggcgaagtcctcggctccggcacgaaatccgaaagccacgccactcttctgcagataaccttgcaaatgaaatgacctacatcacggaaacggaagatgtattttacacgtacaagggctctctggcccctcaagacagcgattctgaagtttctcagaaccgaagcccgcaccaagagagtttatccgagaacaatccggcacaaagctacctgacccagaagtcatccagttctgtgtctccatcttcaaatgctccaggctcctgctcacctgacggcgttgatcagcagctcttagatgacttccacagggtgaccaaagggggctccaccgaggacgccagccagtactactgtgacaagaatgataatggtgacagctacttagtcttgatccgtatcacaccagatgaagatggaaaatttggatttaatcttaagggaggagtggatcaaaagatgcctcttgtggtatcaaggataaacccagagtcacctgcggacacctgcattcctaagctgaacgaaggggatcaaatcgtgttaatcaatggccgggacatctcagaacacacgcatgaccaagtggtgatgttcatcaaagccagccgggagtcccactcacgggagctggccctggtgatcaggaggagagctgtccgctcatttgctgacttcaagtctgaagatgaactgaaccagcttttccccgaagccattttccccatgtgtccggagggtggggacactttggagggatccatggcacagctaaagaagggcctcgaaagcgggacggtgctgatccagtttgagcaactctacagaaaaaagccaggtttggccatcacgtttgcaaagctgcctcaaaatttggacaaaaaccgatataaagatgtgctgccttatgacaccacccgggtattattgcagggaaatgaagattatattaatgcaagttacgtgaacatggaaattcctgctgctaaccttgtgaacaagtacatcgccactcaggggcccctgccgcatacctgtgcacagttttggcaggttgtctgggatcagaagttgtcactcattgtcatgttgacgactctcacagaacgagggcggaccaaatgtcaccagtactggccagatccccccgacgtcatgaaccacggcggctttcacatccagtgtcagtcagaggactgcaccatcgcctatgtgtcccgagaaatgctggtcacaaacacccagaccggggaagaacacacagtgacacatctccagtacgtcgcatggcctgaccacggtgtgcccgatgactcctccgactttctggaatttgtaaactatgtgaggtctctgagagtggacagcgagcccgtcctagttcactgcagtgctggaataggtcgaaccggtgtgttggtcactatggaaacagccatgtgcctaactgagaggaacctgcccatttacccactggatattgtccgaaaaatgcgagaccagcgcgccatgatggtgcagacatcaagccagtacaagtttgtgtgtgaagcgattcttcgtgtgtatgaagaaggtttagtccaaatgctggatcctagttaagacaactgtgaaaaagttcattcctctttcccaagggcatcctccttgaaagaggaggacagacctctctggaagcagcaagaggaaccagtagctgtgggaaaggaatgggcacctctgaacccaggcactttaaacttctatagaaaagatatcgtgtacataggaactggtgtagataagcatgcaattatggcatcatttaggcctgtatttctatggaaagatacaaaaaggatctcagtttggggcctgtcctaatgccttcttccctaacatcaccacacacacccctgtcggcatcctggagcaattgagaccggacacccacagagctgttgtcctcccagcaacaagatggtgtggttatcttgggtcatttggatgttttgtttgtttctgtgtgtcagactgtaagggctgagctttctgtgcttctaggtggagctggaacaattcagattcacccgccctgatgctaaggaaaccctgacgtatgtactagatggcagggcactgggggtcaggctgaaggctgagcaacacctctctgccctccctccctttgtcccatctcccagcgacttccaatattcatgtttctgagaattgtgtccctcttcaggttccctcttggtgcctaacctggattagtaatgtgcattcaggtgaattttcagctgaggctctgagaactggtactctcagtgtgttctggtcatcttgtggcttagttgtagaagcaggtgtgtctcttgcctctgcttgcctcctactgcacactcagcacccaggactggaatcaccgactactgaatctcctacatgtattgctgctacttcaagctcctccacttgaaaccttatgattttcccaaggggagatgggacagtgtcatctaaatattccgaatgtttggccttctgagaaaagagcttctagtaattgaaccatgggaaacccagcttctggagggttggccgtggggctgtgtacatgtgtgtgcccaggggtgagtgtttctcaggattcctaacgattcaaattaccgttgagtatatataaagaatgagtctctgtatggaagaacaaatgtgtgcattcacccccagtcacaatggtctccattgcatttcaaaggagaggatcagactatctgaatataaacacaatctgatgttaatttattctaagaacaccatcattttgattgtcctaaagaattctgcctttgtgaataccgtgttaaatttttttaaatttgtgacaggattgtagcaaattattatttaaggaaaataaattgtgtaaacattta

SEQ ID NO: 319894 - DNA, 2888 bp, Homo sapiens
gtgggatgaacagccagaaaagcagcccccaccacctctgttaggtgggagacctcttcctgccggtgggaagccactttgtgctgggtcttcagaggaggctggccctcctgagggtctgggaacccccattgctccaggagtttatccgagaacaatccggcacaaagctacctgacccagaagtcatccagttctgtgtctccatcttcaaatgctccaggctcctgctcacctgacggcgttgatcagcagctcttagatgacttccacagggtgaccaaagggggctccaccgaggacgccagccagtactactgtgacaagaatgataatggtgacagctacttagtcttgatccgtatcacaccagatgaagatggaaaatttggatttaatcttaagggaggagtggatcaaaagatgcctcttgtggtatcaaggataaacccagagtcacctgcggacacctgcattcctaagctgaacgaaggggatcaaatcgtgttaatcaatggccgggacatctcagaacacacgcatgaccaagtggtgatgttcatcaaagccagccgggagtcccactcacgggagctggccctggtgatcaggaggagagctgtccgctcatttgctgacttcaagtctgaagatgaactgaaccagcttttccccgaagccattttccccatgtgtccggagggtggggacactttggagggatccatggcacagctaaagaagggcctcgaaagcgggacggtgctgatccagtttgagcaactctacagaaaaaagccaggtttggccatcacgtttgcaaagctgcctcaaaatttggacaaaaaccgatataaagatgtgctgccttatgacaccacccgggtattattgcagggaaatgaagattatattaatgcaagttacgtgaacatggaaattcctgctgctaaccttgtgaacaagtacatcgccactcaggggcccctgccgcatacctgtgcacagttttggcaggttgtctgggatcagaagttgtcactcattgtcatgttgacgactctcacagaacgagggcggaccaaatgtcaccagtactggccagatccccccgacgtcatgaaccacggcggctttcacatccagtgtcagtcagaggactgcaccatcgcctatgtgtcccgagaaatgctggtcacaaacacccagaccggggaagaacacacagtgacacatctccagtacgtcgcatggcctgaccacggtgtgcccgatgactcctccgactttctggaatttgtaaactatgtgaggtctctgagagtggacagcgagcccgtcctagttcactgcagtgctggaataggtcgaaccggtgtgttggtcactatggaaacagccatgtgcctaactgagaggaacctgcccatttacccactggatattgtccgaaaaatgcgagaccagcgcgccatgatggtgcagacatcaagccagtacaagtttgtgtgtgaagcgattcttcgtgtgtatgaagaaggtttagtccaaatgctggatcctagttaagacaactgtgaaaaagttcattcctctttcccaagggcatcctccttgaaagaggaggacagacctctctggaagcagcaagaggaaccagtagctgtgggaaaggaatgggcacctctgaacccaggcactttaaacttctatagaaaagatatcgtgtacataggaactggtgtagataagcatgcaattatggcatcatttaggcctgtatttctatggaaagatacaaaaaggatctcagtttggggcctgtcctaatgccttcttccctaacatcaccacacacacccctgtcggcatcctggagcaattgagaccggacacccacagagctgttgtcctcccagcaacaagatggtgtggttatcttgggtcatttggatgttttgtttgtttctgtgtgtcagactgtaagggctgagctttctgtgcttctaggtggagctggaacaattcagattcacccgccctgatgctaaggaaaccctgacgtatgtactagatggcagggcactgggggtcaggctgaaggctgagcaacacctctctgccctccctccctttgtcccatctcccagcgacttccaatattcatgtttctgagaattgtgtccctcttcaggttccctcttggtgcctaacctggattagtaatgtgcattcaggtgaattttcagctgaggctctgagaactggtactctcagtgtgttctggtcatcttgtggcttagttgtagaagcaggtgtgtctcttgcctctgcttgcctcctactgcacactcagcacccaggactggaatcaccgactactgaatctcctacatgtattgctgctacttcaagctcctccacttgaaaccttatgattttcccaaggggagatgggacagtgtcatctaaatattccgaatgtttggccttctgagaaaagagcttctagtaattgaaccatgggaaacccagcttctggagggttggccgtggggctgtgtacatgtgtgtgcccaggggtgagtgtttctcaggattcctaacgattcaaattaccgttgagtatatataaagaatgagtctctgtatggaagaacaaatgtgtgcattcacccccagtcacaatggtctccattgcatttcaaaggagaggatcagactatctgaatataaacacaatctgatgttaatttattctaagaacaccatcattttgattgtcctaaagaattctgcctttgtgaataccgtgttaaatttttttaaatttgtgacaggattgtagcaaattattatttaaggaaaataaattgtgtaaacattta

SEQ ID NO: 319895 - DNA, 2444 bp, Homo sapiens
aattgggatagggtgggtatgctcataggaagatagctcaacacagagaatcagaacctgattgggggtgagaagaacatccacaggtagtgatgaaccagggtgtgatactggagtctatgagagtgaggaagatttctacataataggcctgattgatggttaaggaggagagctgtccgctcatttgctgacttcaagtctgaagatgaactgaaccagcttttccccgaagccattttccccatgtgtccggagggtggggacactttggagggatccatggcacagctaaagaagggcctcgaaagcgggacggtgctgatccagtttgagcaactctacagaaaaaagccaggtttggccatcacgtttgcaaagctgcctcaaaatttggacaaaaaccgatataaagatgtgctgccttatgacaccacccgggtattattgcagggaaatgaagattatattaatgcaagttacgtgaacatggaaattcctgctgctaaccttgtgaacaagtacatcgccactcaggggcccctgccgcatacctgtgcacagttttggcaggttgtctgggatcagaagttgtcactcattgtcatgttgacgactctcacagaacgagggcggaccaaatgtcaccagtactggccagatccccccgacgtcatgaaccacggcggctttcacatccagtgtcagtcagaggactgcaccatcgcctatgtgtcccgagaaatgctggtcacaaacacccagaccggggaagaacacacagtgacacatctccagtacgtcgcatggcctgaccacggtgtgcccgatgactcctccgactttctggaatttgtaaactatgtgaggtctctgagagtggacagcgagcccgtcctagttcactgcagtgctggaataggtcgaaccggtgtgttggtcactatggaaacagccatgtgcctaactgagaggaacctgcccatttacccactggatattgtccgaaaaatgcgagaccagcgcgccatgatggtgcagacatcaagccagtacaagtttgtgtgtgaagcgattcttcgtgtgtatgaagaaggtttagtccaaatgctggatcctagttaagacaactgtgaaaaagttcattcctctttcccaagggcatcctccttgaaagaggaggacagacctctctggaagcagcaagaggaaccagtagctgtgggaaaggaatgggcacctctgaacccaggcactttaaacttctatagaaaagatatcgtgtacataggaactggtgtagataagcatgcaattatggcatcatttaggcctgtatttctatggaaagatacaaaaaggatctcagtttggggcctgtcctaatgccttcttccctaacatcaccacacacacccctgtcggcatcctggagcaattgagaccggacacccacagagctgttgtcctcccagcaacaagatggtgtggttatcttgggtcatttggatgttttgtttgtttctgtgtgtcagactgtaagggctgagctttctgtgcttctaggtggagctggaacaattcagattcacccgccctgatgctaaggaaaccctgacgtatgtactagatggcagggcactgggggtcaggctgaaggctgagcaacacctctctgccctccctccctttgtcccatctcccagcgacttccaatattcatgtttctgagaattgtgtccctcttcaggttccctcttggtgcctaacctggattagtaatgtgcattcaggtgaattttcagctgaggctctgagaactggtactctcagtgtgttctggtcatcttgtggcttagttgtagaagcaggtgtgtctcttgcctctgcttgcctcctactgcacactcagcacccaggactggaatcaccgactactgaatctcctacatgtattgctgctacttcaagctcctccacttgaaaccttatgattttcccaaggggagatgggacagtgtcatctaaatattccgaatgtttggccttctgagaaaagagcttctagtaattgaaccatgggaaacccagcttctggagggttggccgtggggctgtgtacatgtgtgtgcccaggggtgagtgtttctcaggattcctaacgattcaaattaccgttgagtatatataaagaatgagtctctgtatggaagaacaaatgtgtgcattcacccccagtcacaatggtctccattgcatttcaaaggagaggatcagactatctgaatataaacacaatctgatgttaatttattctaagaacaccatcattttgattgtcctaaagaattctgcctttgtgaataccgtgttaaatttttttaaatttgtgacaggattgtagcaaattattatttaaggaaaataaattgtgtaaacattta

SEQ ID NO: 319896 - DNA, 2662 bp, Homo sapiens
aaaggcgacccccttggagcggattgcgggcccggaacaaaattttccaggaggccaaacccgtaaagggaaagggcccctgcaagaatacttgttaggtttgccagcagtagaatctgcatctgggactgtgcctggaaaggggcactatggaaggtcccaaaattactagcaacgatttcaattcagcaaacctttctgggaaggacacttaggttgagtagaacatagcataagaagtgccaatatagccgggtgcagtgactcacgcctgtaatcccagcactttgggaggtccaggcgggcagatcagttgaggtcaggagtttgagaccagcctggccagcatgagaaaaccctgtctctactaaaaatacaaaaattagccaggcatggtgatgcacacctgtagtcccagctactcggaaggctgaggcacgagaatcgcttgaacctgggaggtggacgttacagtgagccgagatcacgtcactgcactccagcctgggcaacaaagagagaccctgtctcaggaagagaaaaaaaaagtgccacaactctacagaaaaaagccaggtttggccatcacgtttgcaaagctgcctcaaaatttggacaaaaaccgatataaagatgtgctgccttatgacaccacccgggtattattgcagggaaatgaagattatattaatgcaagttacgtgaacatggaaattcctgctgctaaccttgtgaacaagtacatcgccactcaggggcccctgccgcatacctgtgcacagttttggcaggttgtctgggatcagaagttgtcactcattgtcatgttgacgactctcacagaacgagggcggaccaaatgtcaccagtactggccagatccccccgacgtcatgaaccacggcggctttcacatccagtgtcagtcagaggactgcaccatcgcctatgtgtcccgagaaatgctggtcacaaacacccagaccggggaagaacacacagtgacacatctccagtacgtcgcatggcctgaccacggtgtgcccgatgactcctccgactttctggaatttgtaaactatgtgaggtctctgagagtggacagcgagcccgtcctagttcactgcagtgctggaataggtcgaaccggtgtgttggtcactatggaaacagccatgtgcctaactgagaggaacctgcccatttacccactggatattgtccgaaaaatgcgagaccagcgcgccatgatggtgcagacatcaagccagtacaagtttgtgtgtgaagcgattcttcgtgtgtatgaagaaggtttagtccaaatgctggatcctagttaagacaactgtgaaaaagttcattcctctttcccaagggcatcctccttgaaagaggaggacagacctctctggaagcagcaagaggaaccagtagctgtgggaaaggaatgggcacctctgaacccaggcactttaaacttctatagaaaagatatcgtgtacataggaactggtgtagataagcatgcaattatggcatcatttaggcctgtatttctatggaaagatacaaaaaggatctcagtttggggcctgtcctaatgccttcttccctaacatcaccacacacacccctgtcggcatcctggagcaattgagaccggacacccacagagctgttgtcctcccagcaacaagatggtgtggttatcttgggtcatttggatgttttgtttgtttctgtgtgtcagactgtaagggctgagctttctgtgcttctaggtggagctggaacaattcagattcacccgccctgatgctaaggaaaccctgacgtatgtactagatggcagggcactgggggtcaggctgaaggctgagcaacacctctctgccctccctccctttgtcccatctcccagcgacttccaatattcatgtttctgagaattgtgtccctcttcaggttccctcttggtgcctaacctggattagtaatgtgcattcaggtgaattttcagctgaggctctgagaactggtactctcagtgtgttctggtcatcttgtggcttagttgtagaagcaggtgtgtctcttgcctctgcttgcctcctactgcacactcagcacccaggactggaatcaccgactactgaatctcctacatgtattgctgctacttcaagctcctccacttgaaaccttatgattttcccaaggggagatgggacagtgtcatctaaatattccgaatgtttggccttctgagaaaagagcttctagtaattgaaccatgggaaacccagcttctggagggttggccgtggggctgtgtacatgtgtgtgcccaggggtgagtgtttctcaggattcctaacgattcaaattaccgttgagtatatataaagaatgagtctctgtatggaagaacaaatgtgtgcattcacccccagtcacaatggtctccattgcatttcaaaggagaggatcagactatctgaatataaacacaatctgatgttaatttattctaagaacaccatcattttgattgtcctaaagaattctgcctttgtgaataccgtgttaaatttttttaaatttgtgacaggattgtagcaaattattatttaaggaaaataaattgtgtaaacattta

SEQ ID NO: 319897 - DNA, 1115 bp, Homo sapiens
cacagcattattgattatccaggcccagggggattgcaaatcatggaggccctgacagtcctgaggagaaatggtcaccacacacacccctgtcggcatcctggagcaattgagaccggacacccacagagctgttgtcctcccagcaacaagatggtgtggttatcttgggtcatttggatgttttgtttgtttctgtgtgtcagactgtaagggctgagctttctgtgcttctaggtggagctggaacaattcagattcacccgccctgatgctaaggaaaccctgacgtatgtactagatggcagggcactgggggtcaggctgaaggctgagcaacacctctctgccctccctccctttgtcccatctcccagcgacttccaatattcatgtttctgagaattgtgtccctcttcaggttccctcttggtgcctaacctggattagtaatgtgcattcaggtgaattttcagctgaggctctgagaactggtactctcagtgtgttctggtcatcttgtggcttagttgtagaagcaggtgtgtctcttgcctctgcttgcctcctactgcacactcagcacccaggactggaatcaccgactactgaatctcctacatgtattgctgctacttcaagctcctccacttgaaaccttatgattttcccaaggggagatgggacagtgtcatctaaatattccgaatgtttggccttctgagaaaagagcttctagtaattgaaccatgggaaacccagcttctggagggttggccgtggggctgtgtacatgtgtgtgcccaggggtgagtgtttctcaggattcctaacgattcaaattaccgttgagtatatataaagaatgagtctctgtatggaagaacaaatgtgtgcattcacccccagtcacaatggtctccattgcatttcaaaggagaggatcagactatctgaatataaacacaatctgatgttaatttattctaagaacaccatcattttgattgtcctaaagaattctgcctttgtgaataccgtgttaaatttttttaaatttgtgacaggattgtagcaaattattatttaaggaaaataaattgtgtaaacattta

SEQ ID NO: 319898 - DNA, 1070 bp, Homo sapiens
cgactctagcggagcttatgggtgtcatccccccatccaggctatctttccgatagtcactttatacccgatcaaaatgaggactttttaacaaaagtcgaatctctgcatgagcagcacagtgggctaaaacaatcagaagcagaatcctgctatatcaacatagcgcggaccctcgacttctatggagtagaactgcacagtggtagggatctgcacaatttagacctaatgattggaattgcttccgcgggtgttgctgtgtaccgaaaatacatttgcacaagtttctatccttgggtgaacattctcaaaatttctttcaaaaggaaaaagttcttcatacatcagcgacagaaacaggctgaatccagggaacatattgtggccttcaacatgctgaattaccgatcttgcaaaaacttgtggaaatcctgtgttgagcaccatacgttctttcaggcaaagaagctactacctcaggaaaagaatgttctgtctcagtactggactatgggctctcggaacaccaaaaagtcggtaaataaccaatattgcaaaaaggtgattggcgggatggtgtggaacccagccatgcggagatccttatcagtggagcacttagaaaccaagagtctgccttctcgttcccctcccattactcccaactggtatgtcctccttttttttttttttgtactacccaacagtagacactttatctcttttaaaaataaaaactcaacttataaactcctaaagatagatgacctacaatttgcattttaggctcttggcagaagtaactgttttcatgaagtacacaagtctagctaaatgttttccatcgtgtataatgctgagatgctctttttaaaaaaacttattcaatctaaatagtttgggaaactcgagcctgctgaaaggcctcctttggaatcacagcacacattagcatattaaacactctgagacgtccaataataaaaaagtacggttagctttacttaattcatgttttccattaatatcccacaaaataaactttagggaaaactaacgcaggtacg

SEQ ID NO: 319899 - DNA, 229 bp, Homo sapiens
tcccaacacactgcagcaagaacaaaccaggtaacaacatttttttaaagttttctgtttagtgtataaaaatgagtaaccactaaaaatgtactcttcattttattactatggccaaataacttcatttgggtgtaactacaccaacaatgatgatccaagtaaaaatctggggtgcacatactgacattttaatcacctaatgagttttcagtcttgggcctgcttc

SEQ ID NO: 319900 - DNA, 466 bp, Homo sapiens
ttattgttgtgtgtctgtctgaaagggcccctgcaagaatacttgttaggtttgccagcagtagaatctgcatctgggactgtgcctggaaaggggcactatggaaggtcccaaaattactagcaacgatttcaattcagcaaacctttctgggaaggtaggtagaggctccaagaccccgctagatggtttctcttgccctctggctgggtcagatacaaaggaaaagcgatgtcctagtgtgggtgagctacccgtgagtagtgaactgttaatttgtctaccaagtggtactaaaacaacctcttggggtgggctctttgggaaaaatgggttaccctcagcttagttatagggcactatgtctaagaaagctgaaattgctttgaaattctcttgggcatgctttattcacatggttggcactcatttttgaaagcagcagatcccattattccttgactct

SEQ ID NO: 319901 - DNA, 3596 bp, Homo sapiens
cgactctagcggagcttatgggtgtcatccccccatccaggctatctttccgatagtcactttatacccgatcaaaatgaggactttttaacaaaagtcgaatctctgcatgagcagcacagtgggctaaaacaatcagaagcagaatcctgctatatcaacatagcgcggaccctcgacttctatggagtagaactgcacagtggtagggatctgcacaatttagacctaatgattggaattgcttccgcgggtgttgctgtgtaccgaaaatacatttgcacaagtttctatccttgggtgaacattctcaaaatttctttcaaaaggaaaaagttcttcatacatcagcgacagaaacaggctgaatccagggaacatattgtggccttcaacatgctgaattaccgatcttgcaaaaacttgtggaaatcctgtgttgagcaccatacgttctttcaggcaaagaagctactacctcaggaaaagaatgttctgtctcagtactggactatgggctctcggaacaccaaaaagtcggtaaataaccaatattgcaaaaaggtgattggcgggatggtgtggaacccagccatgcggagatccttatcagtggagcacttagaaaccaagagtctgccttctcgttcccctcccattactcccaactggcgaagtcctcggctccggcacgaaatccgaaagccacgccactcttctgcagataaccttgcaaatgaaatgacctacatcacggaaacggaagatgtattttacacgtacaagggctctctggcccctcaagacagcgattctgaagtttctcagaaccgaagcccgcaccaagagagtttatccgagaacaatccggcacaaagctacctgacccagaagtcatccagttctgtgtctccatcttcaaatgctccaggctcctgctcacctgacggcgttgatcagcagctcttagatgacttccacagggtgaccaaagggggctccaccgaggacgccagccagtactactgtgacaagaatgataatggtgacagctacttagtcttgatccgtatcacaccagatgaagatggaaaatttggatttaatcttaagggaggagtggatcaaaagatgcctcttgtggtatcaaggataaacccagagtcacctgcggacacctgcattcctaagctgaacgaaggggatcaaatcgtgttaatcaatggccgggacatctcagaacacacgcatgaccaagtggtgatgttcatcaaagccagccgggagtcccactcacgggagctggccctggtgatcaggaggagagctgtccgctcatttgctgacttcaagtctgaagatgaactgaaccagcttttccccgaagccattttccccatgtgtccggagggtggggacactttggagggatccatggcacagctaaagaagggcctcgaaagcgggacggtgctgatccagtttgagcaactctacagaaaaaagccaggtttggccatcacgtttgcaaagctgcctcaaaatttggacaaaaaccgatataaagatgtgctgccttatgacaccacccgggtattattgcagggaaatgaagattatattaatgcaagttacgtgaacatggaaattcctgctgctaaccttgtgaacaagtacatcgccactcaggggcccctgccgcatacctgtgcacagttttggcaggttgtctgggatcagaagttgtcactcattgtcatgttgacgactctcacagaacgagggcggaccaaatgtcaccagtactggccagatccccccgacgtcatgaaccacggcggctttcacatccagtgtcagtcagaggactgcaccatcgcctatgtgtcccgagaaatgctggtcacaaacacccagaccggggaagaacacacagtgacacatctccagtacgtcgcatggcctgaccacggtgtgcccgatgactcctccgactttctggaatttgtaaactatgtgaggtctctgagagtggacagcgagcccgtcctagttcactgcagtgctggaataggtcgaaccggtgtgttggtcactatggaaacagccatgtgcctaactgagaggaacctgcccatttacccactggatattgtccgaaaaatgcgagaccagcgcgccatgatggtgcagacatcaagccagtacaagtttgtgtgtgaagcgattcttcgtgtgtatgaagaaggtttagtccaaatgctggatcctagttaagacaactgtgaaaaagttcattcctctttcccaagggcatcctccttgaaagaggaggacagacctctctggaagcagcaagaggaaccagtagctgtgggaaaggaatgggcacctctgaacccaggcactttaaacttctatagaaaagatatcgtgtacataggaactggtgtagataagcatgcaattatggcatcatttaggcctgtatttctatggaaagatacaaaaaggatctcagtttggggcctgtcctaatgccttcttccctaacatcaccacacacacccctgtcggcatcctggagcaattgagaccggacacccacagagctgttgtcctcccagcaacaagatggtgtggttatcttgggtcatttggatgttttgtttgtttctgtgtgtcagactgtaagggctgagctttctgtgcttctaggtggagctggaacaattcagattcacccgccctgatgctaaggaaaccctgacgtatgtactagatggcagggcactgggggtcaggctgaaggctgagcaacacctctctgccctccctccctttgtcccatctcccagcgacttccaatattcatgtttctgagaattgtgtccctcttcaggttccctcttggtgcctaacctggattagtaatgtgcattcaggtgaattttcagctgaggctctgagaactggtactctcagtgtgttctggtcatcttgtggcttagttgtagaagcaggtgtgtctcttgcctctgcttgcctcctactgcacactcagcacccaggactggaatcaccgactactgaatctcctacatgtattgctgctacttcaagctcctccacttgaaaccttatgattttcccaaggggagatgggacagtgtcatctaaatattccgaatgtttggccttctgagaaaagagcttctagtaattgaaccatgggaaacccagcttctggagggttggccgtggggctgtgtacatgtgtgtgcccaggggtgagtgtttctcaggattcctaacgattcaaattaccgttgagtatatataaagaatgagtctctgtatggaagaacaaatgtgtgcattcacccccagtcacaatggtctccattgcatttcaaaggagaggatcagactatctgaatataaacacaatctgatgttaatttattctaagaacaccatcattttgattgtcctaaagaattctgcctttgtgaataccgtgttaaatttttttaaatttgtgacaggattgtagcaaattattatttaaggaaaataaattgtgtaaacattta

SEQ ID NO: 319902 - DNA, 3549 bp, Homo sapiens
cgactctagcggagcttatgggtgtcatccccccatccaggctatctttccgatagtcactttatacccgatcaaaatgaggactttttaacaaaagtcgaatctctgcatgagcagcacagtgggctaaaacaatcagaagcagaatcctgctatatcaacatagcgcggaccctcgacttctatggagtagaactgcacagtggtagggatctgcacaatttagacctaatgattggaattgcttccgcgggtgttgctgtgtaccgaaaatacatttgcacaagtttctatccttgggtgaacattctcaaaatttctttcaaaaggaaaaagttcttcatacatcagcgacagaaacaggctgaatccagggaacatattgtggccttcaacatgctgaattaccgatcttgcaaaaacttgtggaaatcctgtgttgagcaccatacgttctttcaggcaaagaagctactacctcaggaaaagaatgttctgtctcagtactggactatgggctctcggaacaccaaaaagtcggtaaataaccaatattgcaaaaaggtgattggcgggatggtgtggaacccagccatgcggagatccttatcagtggagcacttagaaaccaagagtctgccttctcgttcccctcccattactcccaactggcgaagtcctcggctccggcacgaaatccgaaagccacgccactcttctgcagataaccttgcaaatgaaatgacctacatcacggaaacggaagatgtattttacacgtacaagggctctctggcccctcaagacagcgattctgaagtttctcagaaccgaagcccgcaccaagagagtttatccgagaacaatccggcacaaagctacctgacccagaagtcatccagttctgtgtctccatcttcaaatgctccaggctcctgctcacctgacggcgttgatcagcagctcttagatgacttccacagggtgaccaaagggggctccaccgaggacgccagccagtactactgtgacaagaatgataatggtgacagctacttagtcttgatccgtatcacaccagatgaagatggaaaatttggatttaatcttaagggaggagtggatcaaaagatgcctcttgtggtatcaaggataaacccagagtcacctgcggacacctgcattcctaagctgaacgaaggggatcaaatcgtgttaatcaatggccgggacatctcagaacacacgcatgaccaagtggtgatgttcatcaaagccagccgggagtcccactcacgggagctggccctggtgatcaggaggagagctgtccgctcatttgctgacttcaagtctgaagatgaactgaaccagcttttccccgaagccattttccccatgtgtccggagggtggggacactttggagggatccatggcacagctaaagaagggcctcgaaagcgggacggtgctgatccagtttgagcaactctacagaaaaaagccaggtttggccatcacgtttgcaaagctgcctcaaaatttggacaaaaaccgatataaagatgtgctgccttatgacaccacccgggtattattgcagggaaatgaagattatattaatgcaagttacgtgaacatggaaattcctgctgctaaccttgtgaacaagtacatcgccactcaggggcccctgccgcatacctgtgcacagttttggcaggttgtctgggatcagaagttgtcactcattgtcatgttgacgactctcacagaacgagggcggaccaaatgtcaccagtactggccagatccccccgacgtcatgaaccacggcggctttcacatccagtgtcagtcagaggactgcaccatcgcctatgtgtcccgagaaatgctggtcacaaacacccagaccggggaagaacacacagtgacacatctccagtacgtcgcatggcctgaccacggtgtgcccgatgactcctccgactttctggaatttgtaaactatgtgaggtctctgagagtggacagcgagcccgtcctagttcactgcagtgctggaataggtcgaaccggtgtgttggtcactatggaaacagccatgtgcctaactgagaggaacctgcccatttacccactggatattgtccgaaaaatgcgagaccagcgcgccatgatggtgcagacatcaagccagtacaagtttgtgtgtgaagcgattcttcgtgtgtatgaagaaggtttagtccaaatgctggatcctagttaagacaactgtgaaaaagttcattcctctttcccaagggcatcctccttgaaagaggaggacagacctctctggaagcagcaagaggaaccagtagctgtgggaaaggaatgggcacctctgaacccaggcactttaaacttctatagaaaagatatcgtgtacataggaactggtgtagataagcatgcaattatggcatcatttaggcctgtatttctatggaaagatacatcaccacacacacccctgtcggcatcctggagcaattgagaccggacacccacagagctgttgtcctcccagcaacaagatggtgtggttatcttgggtcatttggatgttttgtttgtttctgtgtgtcagactgtaagggctgagctttctgtgcttctaggtggagctggaacaattcagattcacccgccctgatgctaaggaaaccctgacgtatgtactagatggcagggcactgggggtcaggctgaaggctgagcaacacctctctgccctccctccctttgtcccatctcccagcgacttccaatattcatgtttctgagaattgtgtccctcttcaggttccctcttggtgcctaacctggattagtaatgtgcattcaggtgaattttcagctgaggctctgagaactggtactctcagtgtgttctggtcatcttgtggcttagttgtagaagcaggtgtgtctcttgcctctgcttgcctcctactgcacactcagcacccaggactggaatcaccgactactgaatctcctacatgtattgctgctacttcaagctcctccacttgaaaccttatgattttcccaaggggagatgggacagtgtcatctaaatattccgaatgtttggccttctgagaaaagagcttctagtaattgaaccatgggaaacccagcttctggagggttggccgtggggctgtgtacatgtgtgtgcccaggggtgagtgtttctcaggattcctaacgattcaaattaccgttgagtatatataaagaatgagtctctgtatggaagaacaaatgtgtgcattcacccccagtcacaatggtctccattgcatttcaaaggagaggatcagactatctgaatataaacacaatctgatgttaatttattctaagaacaccatcattttgattgtcctaaagaattctgcctttgtgaataccgtgttaaatttttttaaatttgtgacaggattgtagcaaattattatttaaggaaaataaattgtgtaaacattta

SEQ ID NO: 319903 - DNA, 3461 bp, Homo sapiens
cgactctagcggagcttatgggtgtcatccccccatccaggctatctttccgatagtcactttatacccgatcaaaatgaggactttttaacaaaagtcgaatctctgcatgagcagcacagtgggctaaaacaatcagaagcagaatcctgctatatcaacatagcgcggaccctcgacttctatggagtagaactgcacagtggtagggatctgcacaatttagacctaatgattggaattgcttccgcgggtgttgctgtgtaccgaaaatacatttgcacaagtttctatccttgggtgaacattctcaaaatttctttcaaaaggaaaaagttcttcatacatcagcgacagaaacaggctgaatccagggaacatattgtggccttcaacatgctgaattaccgatcttgcaaaaacttgtggaaatcctgtgttgagcaccatacgttctttcaggcaaagaagctactacctcaggaaaagaatgttctgtctcagtactggactatgggctctcggaacaccaaaaagcgaagtcctcggctccggcacgaaatccgaaagccacgccactcttctgcagataaccttgcaaatgaaatgacctacatcacggaaacggaagatgtattttacacgtacaagggctctctggcccctcaagacagcgattctgaagtttctcagaaccgaagcccgcaccaagagagtttatccgagaacaatccggcacaaagctacctgacccagaagtcatccagttctgtgtctccatcttcaaatgctccaggctcctgctcacctgacggcgttgatcagcagctcttagatgacttccacagggtgaccaaagggggctccaccgaggacgccagccagtactactgtgacaagaatgataatggtgacagctacttagtcttgatccgtatcacaccagatgaagatggaaaatttggatttaatcttaagggaggagtggatcaaaagatgcctcttgtggtatcaaggataaacccagagtcacctgcggacacctgcattcctaagctgaacgaaggggatcaaatcgtgttaatcaatggccgggacatctcagaacacacgcatgaccaagtggtgatgttcatcaaagccagccgggagtcccactcacgggagctggccctggtgatcaggaggagagctgtccgctcatttgctgacttcaagtctgaagatgaactgaaccagcttttccccgaagccattttccccatgtgtccggagggtggggacactttggagggatccatggcacagctaaagaagggcctcgaaagcgggacggtgctgatccagtttgagcaactctacagaaaaaagccaggtttggccatcacgtttgcaaagctgcctcaaaatttggacaaaaaccgatataaagatgtgctgccttatgacaccacccgggtattattgcagggaaatgaagattatattaatgcaagttacgtgaacatggaaattcctgctgctaaccttgtgaacaagtacatcgccactcaggggcccctgccgcatacctgtgcacagttttggcaggttgtctgggatcagaagttgtcactcattgtcatgttgacgactctcacagaacgagggcggaccaaatgtcaccagtactggccagatccccccgacgtcatgaaccacggcggctttcacatccagtgtcagtcagaggactgcaccatcgcctatgtgtcccgagaaatgctggtcacaaacacccagaccggggaagaacacacagtgacacatctccagtacgtcgcatggcctgaccacggtgtgcccgatgactcctccgactttctggaatttgtaaactatgtgaggtctctgagagtggacagcgagcccgtcctagttcactgcagtgctggaataggtcgaaccggtgtgttggtcactatggaaacagccatgtgcctaactgagaggaacctgcccatttacccactggatattgtccgaaaaatgcgagaccagcgcgccatgatggtgcagacatcaagccagtacaagtttgtgtgtgaagcgattcttcgtgtgtatgaagaaggtttagtccaaatgctggatcctagttaagacaactgtgaaaaagttcattcctctttcccaagggcatcctccttgaaagaggaggacagacctctctggaagcagcaagaggaaccagtagctgtgggaaaggaatgggcacctctgaacccaggcactttaaacttctatagaaaagatatcgtgtacataggaactggtgtagataagcatgcaattatggcatcatttaggcctgtatttctatggaaagatacaaaaaggatctcagtttggggcctgtcctaatgccttcttccctaacatcaccacacacacccctgtcggcatcctggagcaattgagaccggacacccacagagctgttgtcctcccagcaacaagatggtgtggttatcttgggtcatttggatgttttgtttgtttctgtgtgtcagactgtaagggctgagctttctgtgcttctaggtggagctggaacaattcagattcacccgccctgatgctaaggaaaccctgacgtatgtactagatggcagggcactgggggtcaggctgaaggctgagcaacacctctctgccctccctccctttgtcccatctcccagcgacttccaatattcatgtttctgagaattgtgtccctcttcaggttccctcttggtgcctaacctggattagtaatgtgcattcaggtgaattttcagctgaggctctgagaactggtactctcagtgtgttctggtcatcttgtggcttagttgtagaagcaggtgtgtctcttgcctctgcttgcctcctactgcacactcagcacccaggactggaatcaccgactactgaatctcctacatgtattgctgctacttcaagctcctccacttgaaaccttatgattttcccaaggggagatgggacagtgtcatctaaatattccgaatgtttggccttctgagaaaagagcttctagtaattgaaccatgggaaacccagcttctggagggttggccgtggggctgtgtacatgtgtgtgcccaggggtgagtgtttctcaggattcctaacgattcaaattaccgttgagtatatataaagaatgagtctctgtatggaagaacaaatgtgtgcattcacccccagtcacaatggtctccattgcatttcaaaggagaggatcagactatctgaatataaacacaatctgatgttaatttattctaagaacaccatcattttgattgtcctaaagaattctgcctttgtgaataccgtgttaaatttttttaaatttgtgacaggattgtagcaaattattatttaaggaaaataaattgtgtaaacattta

SEQ ID NO: 319904 - DNA, 771 bp, Homo sapiens
ctgcaggttattcagcgatagttatgacctcccggttacgtgcgttgggtggaagaattaataatatacgcacctcggagttacccaaagagaaaactcgatcagaagtcatttgcagcatccactttttagatggcgtggtacagacctttaaagttactaaacaagacactggccaggttcttctggatatggtgcacaaccacctgggtgtgactgaaaaggaatattttggtttacagcatgatgacgactccgtggactctcctagatggctggaagcaagcaaacccatcaggaagcagttaaaaggttggtgtgatcttttcatttcagtcgaacattaggtgttagtgtatcacagcctgtttctcccctccaatcgtcagtgcctgtgacatctggtacctgtagttccgggtgtccaggagtcatgagtgagccgacttctccctgtctgacttctgagtcagcagagatgcttccagatcagccctctaggatccgccccagctgtgggaaagaaggggaagggtgagagtaggcagctcagagcgagggaacccacatttctgtattcaaggaaggaaaaggaaggaggatggccttacttagcccgatgtgagagccagggtggacaagagagacagggagatagacaaacacaaacacctcatactttccaacagcatagtcgcgttcacggaaaaccgaaccataagtaggtaatgtcaccaatataaaagattaagtcttccaaactaccgctta

SEQ ID NO: 319905 - DNA, 3423 bp, Homo sapiens
  misc_feature (2308)..(2308): n is a, c, g, or t
  misc_feature (2324)..(2324): n is a, c, g, or t
  misc_feature (2329)..(2329): n is a, c, g, or t
  misc_feature (2340)..(2340): n is a, c, g, or t
  misc_feature (2346)..(2346): n is a, c, g, or t
  misc_feature (2399)..(2399): n is a, c, g, or t
  misc_feature (2471)..(2471): n is a, c, g, or t
  misc_feature (2492)..(2492): n is a, c, g, or t
  misc_feature (2507)..(2508): n is a, c, g, or t
  misc_feature (2521)..(2521): n is a, c, g, or t
  misc_feature (2524)..(2524): n is a, c, g, or t
  misc_feature (2559)..(2559): n is a, c, g, or t
tggacagcacacaggaggcacctctaggtcctggacccctcgctcagcctggcccctaagactccacctcctctcctcctctcagaggaggatggtacaccagaagggcctgtcaccccagctaccacagtgcatgctccagaggagcctgatactgcagctgtcagagtgtccaccccagaggagcccgcctccccagctgctgcagtgcccaccccagaggagcccacctccccagctgctgcagtgcccaccccagaggagcccacctccccagctgctgcagtgccccccccagaggagcccacctccccagctgctgcagtgcccaccccagaggagcccacctccccagctgctgcagtgcccaccccagaggagcccacctccccagctgctgcagtgcccaccccagaggagcccacctccccagctgctgcagtgcccaccccagaggagcccacctccccagctgctgcagtgcccaccccagaggagcccacctccccagctgctgcagtgcccaccccagaggagcccgcctccccagctgctgcagtgcccaccccagaggagcccgcctccccagctgctgcagtgcccaccccagaggagcctgccttcccagctcctgcagtgcccaccccagaggaatccgcctccgcagctgttgcagtgcccacccccgaggaatctgcctccccagctgctgcagtgcccaccccagcagaatctgcctcctttgcagctgtggtggccaccctggaggaacccacttccccggcagcttcagtgcccacccctgcagctatggtggccaccctagaggaattcacttccccggcagcttcagtgcccacctctgaggagcctgcctccctagcagctgcagtgtccaacccagaggagcccacctccccagcagcagcagtgcccaccctagaggaacccacctcctcagcagctgcagtgctcaccccagaggaactcagttccccagcagcttcagtgcccacccccgaggagcctgcctccccagcagctgcagtgtccaacctagaggagcccgcctccccagcagcagcagtgcccaccccagaggtggctgccatccctgctgcttcagtgcccaccccagaggtgcctgccatcccagctgctgcagtgcctcctatggaggaagtttcccccattggtgtgcccttcctgggagtttctgcccacactgactcagtgcctatttcagaagaaggaacacctgttctagaggaggcttcctccactggaatgtggatcaaggaggaccttgattccctagtatttggcataaaagaggtgaccagcacagtgctacatgggaaagtgcctctggctgcaaccgctggattaaattcagatgaggtaattgtccattttgattctgggaagggtctaaagagtaaagtgagatttgcagggctgacctggtggtgatgagaaatggcacagatagttcttttgttctttttgggtctcccgggcttatagtttgtagtctttctgttcagtttttggggaaaatatactttaattttgtctggtgaaagactttataatttcatgcttcgttttttattcagataagccaatcccacggaaaacagggatataaacagttgttgatttacatttttaaaaagattattagcaggaaagggtcattctgtttttgaattatacagtgagcatgttcttgcctaaaccaagagacagtttattcattggtggtgtcaacatttaggtagaggccagagtgtgagctttggaatgagacctggggtgcttcctaaccactctgggaaaattagttagctattcttgagtttcctgtttcttcatttgttaaggcataactctgtgaggataaaatgagatacatttaaggtaccaagcgtataagattaccaatcactggccatatcctccccattcttttcaaataggtatgttggttggttgaaagaatttaccaaagtagattggagagaagcaataaagctaaatgattaagaacttttaaatgcaaatatgtgtttctgaaaaccagagctaggcataatgtttatgaaaaatagagatattttagtcatctttgtcaaactgcctttgtgtccttaagcaagtcattttcctttccaggacctcatttcttcattataaaacaagaaaattgggctaaatgtcctcttgggtctctcttggctctaagattctttttattttttttttttagatggagtctggctctgtcagtcaggctggagtgctngagtgcagtggtgcgntctcngctcactgcangctccncctcccgggttcacgccattctcctgcctcagcctcccgagtagctgggactncaggcgcccgccactacgcccggcaattttttgtatatatatatatataattttttttttttttttttagtngagacgggtttcactgtgttngccaggatggtctcnntctcctgacctcntgntctgcccgcctcggcctcccagagtgctgggattncaggcgtgagccaccgcgcccagccggctctaagattcttaatgttagagaaccgaatgtgttaggaaacagttggaaacgatgttccacatccttgagcactcctagtccaaggaatttgagatcagcagctttccacagttaattacccaggtttgatttggtcagtggtaaagagtgcaggagttagaggtttaatctgaacacaagagatgactgagtgagaagattgttttgattttactgcgcccctaggactcaaaatagtgccttcttcatagcaggcatttgctgttgactgactgactgaatgcatgaatatcaatttcctagactatggatggatgctacaagaaagatgggttttctcattcacctcactgcagagcctttcagggcagccttaagtcagctagagcaccagctaaacatgcaggtcctgacaacaaaatcattttgattgcatgccataaactctttgattaagaggattgattaagataatctggccttgctgagtggtggtggttttaccttgagctttaccagttattttgtcaggtagcattccattaaattaggatgcatcatctttgagactgatggatttttgattcatttttccgagttttattgaatttggaatgacaccgagatcccaatagcctgtacaaagtgaagacagtaggtcaacaacagagccattcttgataatacagaatatttcacaccaggcacagtggctcacgcctctaatcccaacatttgggaagccaagggaagaggattgcttgaggccaggagttcgagaacagcctaggcaacatagtaagaccccatctctgagaaaataaaaagaaaaaa

SEQ ID NO: 319906 - DNA, 4335 bp, Homo sapiens
  misc_feature (3220)..(3220): n is a, c, g, or t
  misc_feature (3236)..(3236): n is a, c, g, or t
  misc_feature (3241)..(3241): n is a, c, g, or t
  misc_feature (3252)..(3252): n is a, c, g, or t
  misc_feature (3258)..(3258): n is a, c, g, or t
  misc_feature (3311)..(3311): n is a, c, g, or t
  misc_feature (3383)..(3383): n is a, c, g, or t
  misc_feature (3404)..(3404): n is a, c, g, or t
  misc_feature (3419)..(3420): n is a, c, g, or t
  misc_feature (3433)..(3433): n is a, c, g, or t
  misc_feature (3436)..(3436): n is a, c, g, or t
  misc_feature (3471)..(3471): n is a, c, g, or t
ggagactgcagtcaaactgaggggaatggtgaggagtgcattgagagggtcaccttcagttttgcttttaatcatgaactaacagatgttacctcaggacctgaagtagaggtgttatatgaatcaaatttactaacagatgaaattcatttggaaagtgggaatgtaactgttaatcaagaaaataacagtctgacatcaatgggaaatgtggtcacttgtgaattgtctgtggagaaagtttgtgatgaggatggtgaggcaaaagagctggattatcaagccacacttttggaggatcaagctccagcacatttccacagaaacttcccagagcaggtcttccaggatctccagaggaagtccccagagtcagagattctgagtctgcacctgctggttgaagaactgagacttaatccagatggagtggaaactgtgaatgatacaaagcctgagctgaatgtggcatcatcagagggaggggagatggaaaggagagattcagattcattcctaaatatttttccagagaaacaagttaccaaggctggtaatactgaaccagttttagaggaatggatacccgtcctccagagaccttcccggactgctgcagtacccactgtcaaagatgccctagatgctgcactgcccagcccagaggagggtacctcaattgctgcagtgcctgccccagagggaactgctgtagttgctgctttagtgccctttccacatgaggacatcctagttgcttcaatagtctccttagaggaggaggatgtcacagctgctgcagtatcagccccagagagggctactgtcccagctgttacagtatctgtccctgaagggactgctgcagttgctgcagtgtcctccccagaggagactgctccagctgttgcagcagccatcacacaggagggtatgtcagctgtcgcagggttctccccagagtgggctgctttagctattacagtacccatcacagaggaggatggtacaccagaagggcctgtcaccccagctaccacagtgcatgctccagaggagcctgatactgcagctgtcagagtgtccaccccagaggagcccgcctccccagctgctgcagtgcccaccccagaggagcccacctccccagctgctgcagtgcccaccccagaggagcccacctccccagctgctgcagtgccccccccagaggagcccacctccccagctgctgcagtgcccaccccagaggagcccacctccccagctgctgcagtgcccaccccagaggagcccacctccccagctgctgcagtgcccaccccagaggagcccacctccccagctgctgcagtgcccaccccagaggagcccacctccccagctgctgcagtgcccaccccagaggagcccacctccccagctgctgcagtgcccaccccagaggagcccgcctccccagctgctgcagtgcccaccccagaggagcccgcctccccagctgctgcagtgcccaccccagaggagcctgccttcccagctcctgcagtgcccaccccagaggaatccgcctccgcagctgttgcagtgcccacccccgaggaatctgcctccccagctgctgcagtgcccaccccagcagaatctgcctcctttgcagctgtggtggccaccctggaggaacccacttccccggcagcttcagtgcccacccctgcagctatggtggccaccctagaggaattcacttccccggcagcttcagtgcccacctctgaggagcctgcctccctagcagctgcagtgtccaacccagaggagcccacctccccagcagcagcagtgcccaccctagaggaacccacctcctcagcagctgcagtgctcaccccagaggaactcagttccccagcagcttcagtgcccacccccgaggagcctgcctccccagcagctgcagtgtccaacctagaggagcccgcctccccagcagcagcagtgcccaccccagaggtggctgccatccctgctgcttcagtgcccaccccagaggtgcctgccatcccagctgctgcagtgcctcctatggaggaagtttcccccattggtgtgcccttcctgggagtttctgcccacactgactcagtgcctatttcagaagaaggaacacctgttctagaggaggcttcctccactggaatgtggatcaaggaggaccttgattccctagtatttggcataaaagaggtgaccagcacagtgctacatgggaaagtgcctctggctgcaaccgctggattaaattcagatgaggtaattgtccattttgattctgggaagggtctaaagagtaaagtgagatttgcagggctgacctggtggtgatgagaaatggcacagatagttcttttgttctttttgggtctcccgggcttatagtttgtagtctttctgttcagtttttggggaaaatatactttaattttgtctggtgaaagactttataatttcatgcttcgttttttattcagataagccaatcccacggaaaacagggatataaacagttgttgatttacatttttaaaaagattattagcaggaaagggtcattctgtttttgaattatacagtgagcatgttcttgcctaaaccaagagacagtttattcattggtggtgtcaacatttaggtagaggccagagtgtgagctttggaatgagacctggggtgcttcctaaccactctgggaaaattagttagctattcttgagtttcctgtttcttcatttgttaaggcataactctgtgaggataaaatgagatacatttaaggtaccaagcgtataagattaccaatcactggccatatcctccccattcttttcaaataggtatgttggttggttgaaagaatttaccaaagtagattggagagaagcaataaagctaaatgattaagaacttttaaatgcaaatatgtgtttctgaaaaccagagctaggcataatgtttatgaaaaatagagatattttagtcatctttgtcaaactgcctttgtgtccttaagcaagtcattttcctttccaggacctcatttcttcattataaaacaagaaaattgggctaaatgtcctcttgggtctctcttggctctaagattctttttattttttttttttagatggagtctggctctgtcagtcaggctggagtgctngagtgcagtggtgcgntctcngctcactgcangctccncctcccgggttcacgccattctcctgcctcagcctcccgagtagctgggactncaggcgcccgccactacgcccggcaattttttgtatatatatatatataattttttttttttttttttagtngagacgggtttcactgtgttngccaggatggtctcnntctcctgacctcntgntctgcccgcctcggcctcccagagtgctgggattncaggcgtgagccaccgcgcccagccggctctaagattcttaatgttagagaaccgaatgtgttaggaaacagttggaaacgatgttccacatccttgagcactcctagtccaaggaatttgagatcagcagctttccacagttaattacccaggtttgatttggtcagtggtaaagagtgcaggagttagaggtttaatctgaacacaagagatgactgagtgagaagattgttttgattttactgcgcccctaggactcaaaatagtgccttcttcatagcaggcatttgctgttgactgactgactgaatgcatgaatatcaatttcctagactatggatggatgctacaagaaagatgggttttctcattcacctcactgcagagcctttcagggcagccttaagtcagctagagcaccagctaaacatgcaggtcctgacaacaaaatcattttgattgcatgccataaactctttgattaagaggattgattaagataatctggccttgctgagtggtggtggttttaccttgagctttaccagttattttgtcaggtagcattccattaaattaggatgcatcatctttgagactgatggatttttgattcatttttccgagttttattgaatttggaatgacaccgagatcccaatagcctgtacaaagtgaagacagtaggtcaacaacagagccattcttgataatacagaatatttcacaccaggcacagtggctcacgcctctaatcccaacatttgggaagccaagggaagaggattgcttgaggccaggagttcgagaacagcctaggcaacatagtaagaccccatctctgagaaaataaaaagaaaaaa

SEQ ID NO: 319907 - DNA, 983 bp, Homo sapiens
gttgtgacctgacgtcacttttcttgagttacctcccgcagccgcagccgccgtgctcagcgcgagccccggagcccttgagcgcgaggcgcggagcccccggagcccccaaaccgcagacacatccccgcgccccagagccccggcctgcgcgcccagccgggcccgcgcgatgccctcagaccggcctttcaagcagcggcggagcttcgccgaccgctgtaaggaggtacagcagatccgcgaccagcaccccagcaaaatcccggtgatcatcgagcgctacaagggtgagaagcagctgcccgtcctggacaagaccaagtttttggtcccggaccatgtcaacatgagcgagttggtcaagatcatccggcgccgcctgcagctgaaccccacgcaggccttcttcctgctggtgaaccagcacagcatggtgagtgtgtccacgcccatcgcggacatctacgagcaggagaaagacgaggacggcttcctctatatggtctacgcctcccaggaaaccttcggcttctgagccagcagtaggggggctcggcctgggagtcggggggccccggtcaggccctgcccagagagctcctggttcctgaactgagctgcctctaccgtggtgggctgggcaggcatgtgcccccctagtcagagggcaccaacccacctactctgcccctgggtggatcctgggccggtcgtgttagggttgtccctctgggtgctggctggtgggatgggggagggtggggagcagctcccagcacccctgctgtgtggttcatcttttttttaggcccctgcctgtctgcccatctgcccctcacccacccgaggctctgcccaccgcctggacctgcccacccctgaaagactggcccctggctccccgcccctcggtctccacgtggtgtatggatctgtggtcattgtccctctgcagaataaagattgctcaggcctgcctg

SEQ ID NO: 319908 - DNA, 717 bp, Homo sapiens
gttgtgacctgacgtcacttttcttgagttacctcccgcagccgcagccgccgtgctcagcgcgagccccggagcccttgagcgcgaggcgcggagcccccggagcccccaaaccgcagacacatccccgcgccccagagccccggcctgcgcgcccagccgggcccgcgcgatgccctcagaccggcctttcaagcagcggcggagcttcgccgaccgctgtaaggaggtacagcagatccgcgaccagcaccccagcaaaatcccggtgatcatcgagcgctacaagggtgagaagcagctgcccgtcctggacaagaccaagtttttggtcccggaccatgtcaacatgagcgagttggtcaagatcatccggcgccgcctgcagctgaaccccacgcaggccttcttcctgctggtgaaccagcacagcatggtgagtgtgtccacgcccatcgcggacatctacgagcaggagaaagacgaggacggcttcctctatatggtctacgcctcccaggaaaccttcggcttctgagccagcagcccctgcctgtctgcccatctgcccctcacccacccgaggctctgcccaccgcctggacctgcccacccctgaaagactggcccctggctccccgcccctcggtctccacgtggtgtatggatctgtggtcattgtccctctgcagaataaagattgctcaggcctgcctg

SEQ ID NO: 319909 - DNA, 277 bp, Homo sapiens
ctgccttggcctttgaaaagtgcttgggttacaggcgtgagcctctggacctggcagagccaactgttaatggcagaatgtaactgggtgtaagagggaccactaccattatttcaagtgtgtttgaacgctttcataatgaaatgcccagaaaaattatacagcatattggaaggcctccctgaggagacacttgaaccaaaactcggtctccacgtggtgtatggatctgtggtcattgtccctctgcagaataaagattgctcaggcctgcctg

SEQ ID NO: 319910 - DNA, 871 bp, Homo sapiens
gttgtgacctgacgtcacttttcttgagttacctcccgcagccgcagccgccgtgctcagcgcgagccccggagcccttgagcgcgaggcgcggagcccccggagcccccaaaccgcagacacatccccgcgccccagagccccggcctgcgcgcccagccgggcccgcgcgatgccctcagaccggcctttcaagcagcggcggagcttcgccgaccgctgtaaggaggtacagcagatccgcgaccagcaccccagcaaaatcccggtgatcatcgagcgctacaagggtgagaagcagctgcccgtcctggacaagaccaagtttttggtcccggaccatgtcaacatgagcgagttggtcaagatcatccggcgccgcctgcagctgaaccccacgcaggccttcttcctgctggtgaaccagcacagcatggtgagtgtgtccacgcccatcgcggacatctacgagcaggagaaagacgaggacggcttcctctatatggtctacgcctcccaggaaaccttcggcttctgagccagcagtaggggggctcggcctgggagtcggggggccccggtcaggccctgcccagagagctcctggttcctgaactgagctgcctctaccgtggtgggctgggcaggcatgtgcccccctagtcagagggcaccaacccacctactctgcccctgggtggatcctgggccggtcgtgttagggttgtccctctgggtgctggctggtgggatgggggaggttgatctctctttccatgtccttcttctcttaggcaagtaatactttcattatgtgtctgtttttattaattatgtcaattgatgtcttttcattgtcatatatcgcact

SEQ ID NO: 319911 - DNA, 719 bp, Homo sapiens
gttgtgacctgacgtcacttttcttgagttacctcccgcagccgcagccgccgtgctcagcgcgagccccggagcccttgagcgcgaggcgcggagcccccggagcccccaaaccgcagacacatccccgcgccccagagccccggcctgcgcgcccagccgggcccgcgcgatgccctcagaccggcctttcaagcagcggcggagcttcgccgaccgctgtaaggaggtacagcagatccgcgaccagcaccccagcaaaatcccggtgatcatcgagcgctacaagggtgagaagcagctgcccgtcctggacaagaccaagtttttggtcccggaccatgtcaacatgagcgagttggtcaagatcatccggcgccgcctgcagctgaaccccacgcaggccttcttcctgctggtgaaccagcacagcatggtgagtgtgtccacgcccatcgcggacatctacgagcaggagaaagacgaggacggcttcctctatatggtctacgcctcccaggaaaccttcggcttctgagccagcagtaggggggctcggcctgggagtcggggggccccggtcaggccctgcccagagagctcctggttcctgaactgagctgcctctaccgtggtgggctgggcaggcatgtgcccccctagtcagagggcaccaacccacctactctgcccatatcccttcatctaagcgcacctcg

SEQ ID NO: 319912 - DNA, 896 bp, Homo sapiens
gactccatggcttccgagttgctgactgaccctccacctcagaggtagttctgacactgtctcagttttgcagatgaagatgagattcttcagttctccatgtggaaaagcagctgtggacccagccgaccgctgtaaggaggtacagcagatccgcgaccagcaccccagcaaaatcccggtgatcatcgagcgctacaagggtgagaagcagctgcccgtcctggacaagaccaagtttttggtcccggaccatgtcaacatgagcgagttggtcaagatcatccggcgccgcctgcagctgaaccccacgcaggccttcttcctgctggtgaaccagcacagcatggtgagtgtgtccacgcccatcgcggacatctacgagcaggagaaagacgaggacggcttcctctatatggtctacgcctcccaggaaaccttcggcttctgagccagcagtaggggggctcggcctgggagtcggggggccccggtcaggccctgcccagagagctcctggttcctgaactgagctgcctctaccgtggtgggctgggcaggcatgtgcccccctagtcagagggcaccaacccacctactctgcccctgggtggatcctgggccggtcgtgttagggttgtccctctgggtgctggctggtgggatgggggagggtggggagcagctcccagcacccctgctgtgtggttcatcttttttttaggcccctgcctgtctgcccatctgcccctcacccacccgaggctctgcccaccgcctggacctgcccacccctgaaagactggcccctggctccccgcccctcggtctccacgtggtgtatggatctgtggtcattgtccctctgcagaataaagattgctcaggcctgcctg

SEQ ID NO: 319913 - DNA, 449 bp, Homo sapiens
agcgggcggctgcggggctgccgggcagcctctcgcagcaactctttggtctcaacctttaccatggagaagcgaggattttacgagtctcttgccaaggtcaagccagggaacttcaaggtccagactgtctctccaagagaaccagcttccaaagtgactgaacaagctctgttaagacctcaaagtaaaaatggccctcaggaaaaagattgtgacctagtagacttggacgatgcgagccttccggtcagtgacgtgtgaggcagaagcgcacggagcctgcctgcctctgccgtcctcagtttcctttcatgaggcttctagccaaagatgataaagggggaaatggtttttagtgcgtatattatactgcctcttaggtgtactctttataagctggtaaaccaagaatctagggagtggccaaactaaatataatttcttta

SEQ ID NO: 319914 - DNA, 3930 bp, Homo sapiens
  misc_feature (44)..(44): n is a, c, g, or t
ggaatctcagccgccgtctgagggctgaggcagcgtggggacgngtgcgcagtgcgcgggctggccgtcgcggacgccgctccgggcagccgagcctctgtgggagccggggccgcggcggcgcgggtgctccgggccgaggccgcgctgctggagcgcggttcccgctgtggcgagcggggaggcgtccgcagaggggcggtgggtgctgtctggctcttgctgattgaattcctttggtgcagtttagcatgttcctctgtgttctgcatctcctgtagtgtaatgttcaagctcagaaatgccttatgtggatcgtcagaatcgcatttgtggttttctagacattgaagaaaatgaaaacagtgggaaatttcttcgaaggtacttcatactggataccagagaagatagtttcgtgtggtacatggataatccacagaacctaccttctggatcatcacgtgttggagccattaagcttacctacatttcaaaggttagcgatgctactaagctaaggccaaaggcggagttctgttttgttatgaatgcaggaatgaggaagtacttcctacaagccaatgatcagcaggacctagtggaatgggtaaatgtgttaaacaaagctataaaaattacagtaccaaagcagtcagactcacagcctaattctgataacctaagtcgccatggtgaatgtgggaaaaagcaagtgtcttacagaactgatattgttggtggcgtacccatcattactcccactcagaaagaagaagtaaatgaatgtggtgaaagtattgacagaaataatctgaaacggtcacaaagccatcttccttactttactcctaaaccacctcaagatagtgcggttatcaaagctggatattgtgtaaaacaaggagcagtgatgaaaaactggaagagaagatattttcaattggatgaaaacacaataggctacttcaaatctgaactggaaaaggaacctcttcgcgtaataccacttaaagaggttcataaagtccaggaatgtaagcaaagcgacataatgatgagggacaacctctttgaaattgtaacaacgtctcgaactttctatgtgcaggctgatagccctgaagagatgcacagttggattaaagcagtctctggcgccattgtagcacagcggggtcccggcagatctgcgtcttctgagcatccccccggtccttcagaatccaaacacgctttccgtcctaccaacgcagccgccgccacctcacattccacagcctctcgcagcaactctttggtctcaacctttaccatggagaagcgaggattttacgagtctcttgccaaggtcaagccagggaacttcaaggtccagactgtctctccaagagaaccagcttccaaagtgactgaacaagctctgttaagacctcaaagtaaaaatggccctcaggaaaaagattgtgacctagtagacttggacgatgcgagccttccggtcagtgacgtgtgaggcagaagcgcacggagcctgcctgcctctgccgtcctcagtttcctttcatgaggcttctagccaaagatgataaagggggaaatggtttttagtgcgtatattatactgcctcttaggtgtactctttataagctggtaaaccaagaatctagggagtggccaaactaaatataatttctttaaaaaagaaagaaaaaggaaaaatccaaaatatctcagtatcatctgtctgaagcattgtgtgttctcattcgggtggtaacaatgtatgtgtaatatttttttcttagtgattttgacagtttaaatgtttaacaacttaaagcattaaaaatgcttattaataactttggtcatttaaaaaatgctacaatgacttcctattaaaggttcaatatttacacattcttattggttgatattaccacatgaaatattgccagaccaagatacctaaactcatgatgtctgtggtgctgtaaaatttatactaaaatgtggactattttgaaattataaccatttttgatgccctgaatcttgaggtgacttattttgcatagaggatatggatagaccaacagtaagggttgtgggttataccggcatagagaaaagaagaaaactagaattgaaacaactgtgtcttagacatttgtttgaaaaagcttcatcaggccttggagcagtcactgctttattccgcaaaaattatttggtaggaaatttttgggagatctgattttcttatccaagttttgtaaatagttgttatttctatatttggattggtgaaagacctcaagtttatatgtaaagacataactgcccttagtcatgaaattgttgtgacctctactttttgtcactaatagcctacattcaagtgcctgtgttttttcatcttgtttaggaatgttttgagattaatgtgcttaaaagtcctacgtgactgattttaaacattgtgataaaattaattttcagtagaatagttgaatgtgttaagataggattttatgttagagataccagaatgctggtattctactacttgtgcaatatatatgttttaaaaaacaaatttgagaatacatttaatcatagggatatagatataagcacctctctaaagaatctttagtttccgacgttgaattatagaccagtttgagtaagtactgctttttttttttgggagacgggctctcgctctgttggctcaggctggagtgcagtggcgtgatctcagctcactacagcctccacctcgtgggttcaaacagttgtgctgcctcagcttcccgagtagctaggattacaggtgcatgccaccacacctggctaattttggtattttagtagagatggggtttcaccatgttggccaggctcgtctcgaactcctgacttcaggtgatccacccatctcagcctcccaaagtgctgggattacaggcgtgagccaccatgcccggcccataagtaccgttttgaggttcagtcttaaacatttgctttaagaaaacagtcttgaatttcacatgctgctatttttatattttgccattttacagtactgttttgttttgaattcatgcatatcattgaaaatttctcgttttcattttcttagatgacttcttgtctgagacagaaaaatttcctactacagcagtgcagtccagaggttaagatgtattagaattatacaatatcagtttaaaaatctgtatgcataaagaatgcaccactcaacttttttattcataagctaatatttttttaaagttacattaagattttttctcttttgcagctacatttgaaagtgatagaataaagagattttaatgagttatcactttttcagctgatatattcattttaatggcttttttgaaagttcctttttcatgaacacacccgagaaatcttaaatagacactttgcaatatttaagaacctaatgctgtttaattttggtacagcttccacattgcatgttcactttagtatttgcaatttgatatatttcatggtggcaaaatattagctctgttttgggacattttaaaatagaactatccttgttcgatagcataggaaaatgttctggtgattgtcagggtctcctaatatttatctcaattcttttataagtctatggaaattatttaattattttaaaacgtacacacttttcttgtaaatatgtcacatctgagttcaaaaaaattactttgaataccttaatatttgctgcatttttttccgtatatataacatgtcttctttcagaatgggaatatatgtgtgcctcccaacatttactgttaaagtgtgttatctttatatgtcaaactggttgaacactgtaatgagaataaactgcacagagtttattctga

SEQ ID NO: 319915 - DNA, 4011 bp, Homo sapiens
  misc_feature (44)..(44): n is a, c, g, or t
ggaatctcagccgccgtctgagggctgaggcagcgtggggacgngtgcgcagtgcgcgggctggccgtcgcggacgccgctccgggcagccgagcctctgtgggagccggggccgcggcggcgcgggtgctccgggccgaggccgcgtctggctcttgctgattgaattcctttggtgcagtttagcatgttcctctgtgttctgcatctcctgtagtgtaatgttcaagctcagaaatgccttatgtggatcgtcagaatcgcatttgtggttttctagacattgaagaaaatgaaaacagtgggaaatttcttcgaaggtacttcatactggataccagagaagatagtttcgtgtggtacatggataatccacagaacctaccttctggatcatcacgtgttggagccattaagcttacctacatttcaaaggttagcgatgctactaagctaaggccaaaggcggagttctgttttgttatgaatgcaggaatgaggaagtacttcctacaagccaatgatcagcaggacctagtggaatgggtaaatgtgttaaacaaagctataaaaattacagtaccaaagcagtcagactcacagcctaattctgataacctaagtcgccatggtgaatgtgggaaaaagcaagtgtcttacagaactgatattgttggtggcgtacccatcattactcccactcagaaagaagaagtaaatgaatgtggtgaaagtattgacagaaataatctgaaacggtcacaaagccatcttccttactttactcctaaaccacctcaagatagtgcggttatcaaagctggatattgtgtaaaacaaggagcagtgatgaaaaactggaagagaagatattttcaattggatgaaaacacaataggctacttcaaatctgaactggaaaaggaacctcttcgcgtaataccacttaaagaggttcataaagtccaggaatgtaagcaaagcgacataatgatgagggacaacctctttgaaattgtaacaacgtctcgaactttctatgtgcaggctgatagccctgaagagatgcacagttggattaaagcagtctctggcgccattgtagcacagcggggtcccggcagatctgcgtcttctatgcggcaggccagaaggctgtcgaacccttgtatacagaggtatacatcaagagctggtgaatgcagcacgtatgtgggctctcacgcaaacgtgccttcttagtggagggcccagacttactacttacaactgatcatagaaagagcatccccccggtccttcagaatccaaacacgctttccgtcctaccaacgcagccgccgccacctcacattccacagcctctcgcagcaactctttggtctcaacctttaccatggagaagcgaggattttacgagtctcttgccaaggtcaagccagggaacttcaaggtccagactgtctctccaagagaaccagcttccaaagtgactgaacaagctctgttaagacctcaaagtaaaaatggccctcaggaaaaagattgtgacctagtagacttggacgatgcgagccttccggtcagtgacgtgtgaggcagaagcgcacggagcctgcctgcctctgccgtcctcagtttcctttcatgaggcttctagccaaagatgataaagggggaaatggtttttagtgcgtatattatactgcctcttaggtgtactctttataagctggtaaaccaagaatctagggagtggccaaactaaatataatttctttaaaaaagaaagaaaaaggaaaaatccaaaatatctcagtatcatctgtctgaagcattgtgtgttctcattcgggtggtaacaatgtatgtgtaatatttttttcttagtgattttgacagtttaaatgtttaacaacttaaagcattaaaaatgcttattaataactttggtcatttaaaaaatgctacaatgacttcctattaaaggttcaatatttacacattcttattggttgatattaccacatgaaatattgccagaccaagatacctaaactcatgatgtctgtggtgctgtaaaatttatactaaaatgtggactattttgaaattataaccatttttgatgccctgaatcttgaggtgacttattttgcatagaggatatggatagaccaacagtaagggttgtgggttataccggcatagagaaaagaagaaaactagaattgaaacaactgtgtcttagacatttgtttgaaaaagcttcatcaggccttggagcagtcactgctttattccgcaaaaattatttggtaggaaatttttgggagatctgattttcttatccaagttttgtaaatagttgttatttctatatttggattggtgaaagacctcaagtttatatgtaaagacataactgcccttagtcatgaaattgttgtgacctctactttttgtcactaatagcctacattcaagtgcctgtgttttttcatcttgtttaggaatgttttgagattaatgtgcttaaaagtcctacgtgactgattttaaacattgtgataaaattaattttcagtagaatagttgaatgtgttaagataggattttatgttagagataccagaatgctggtattctactacttgtgcaatatatatgttttaaaaaacaaatttgagaatacatttaatcatagggatatagatataagcacctctctaaagaatctttagtttccgacgttgaattatagaccagtttgagtaagtactgctttttttttttgggagacgggctctcgctctgttggctcaggctggagtgcagtggcgtgatctcagctcactacagcctccacctcgtgggttcaaacagttgtgctgcctcagcttcccgagtagctaggattacaggtgcatgccaccacacctggctaattttggtattttagtagagatggggtttcaccatgttggccaggctcgtctcgaactcctgacttcaggtgatccacccatctcagcctcccaaagtgctgggattacaggcgtgagccaccatgcccggcccataagtaccgttttgaggttcagtcttaaacatttgctttaagaaaacagtcttgaatttcacatgctgctatttttatattttgccattttacagtactgttttgttttgaattcatgcatatcattgaaaatttctcgttttcattttcttagatgacttcttgtctgagacagaaaaatttcctactacagcagtgcagtccagaggttaagatgtattagaattatacaatatcagtttaaaaatctgtatgcataaagaatgcaccactcaacttttttattcataagctaatatttttttaaagttacattaagattttttctcttttgcagctacatttgaaagtgatagaataaagagattttaatgagttatcactttttcagctgatatattcattttaatggcttttttgaaagttcctttttcatgaacacacccgagaaatcttaaatagacactttgcaatatttaagaacctaatgctgtttaattttggtacagcttccacattgcatgttcactttagtatttgcaatttgatatatttcatggtggcaaaatattagctctgttttgggacattttaaaatagaactatccttgttcgatagcataggaaaatgttctggtgattgtcagggtctcctaatatttatctcaattcttttataagtctatggaaattatttaattattttaaaacgtacacacttttcttgtaaatatgtcacatctgagttcaaaaaaattactttgaataccttaatatttgctgcatttttttccgtatatataacatgtcttctttcagaatgggaatatatgtgtgcctcccaacatttactgttaaagtgtgttatctttatatgtcaaactggttgaacactgtaatgagaataaactgcacagagtttattctga

SEQ ID NO: 319916 - DNA, 4094 bp, Homo sapiens
  misc_feature (44)..(44): n is a, c, g, or t
ggaatctcagccgccgtctgagggctgaggcagcgtggggacgngtgcgcagtgcgcgggctggccgtcgcggacgccgctccgggcagccgagcctctgtgggagccggggccgcggcggcgcgggtgctccgggccgaggccgcgtctggctcttgctgattgaattcctttggtgcagtttagcatgttcctctgtgttctgcatctcctgtagtgtaatgttcaagctcagaaatgccttatgtggatcgtcagaatcgcatttgtggttttctagacattgaagaaaatgaaaacagtgggaaatttcttcgaaggtacttcatactggataccagagaagatagtttcgtgtggtacatggataatccacagaacctaccttctggatcatcacgtgttggagccattaagcttacctacatttcaaaggttagcgatgctactaagctaaggccaaaggcggagttctgttttgttatgaatgcaggaatgaggaagtacttcctacaagccaatgatcagcaggacctagtggaatgggtaaatgtgttaaacaaagctataaaaattacagtaccaaagcagtcagactcacagcctaattctgataacctaagtcgccatggtgaatgtgggaaaaagcaagtgtcttacagaactgatattgttggtggcgtacccatcattactcccactcagaaagaagaagtaaatgaatgtggtgaaagtattgacagaaataatctgaaacggtcacaaagccatcttccttactttactcctaaaccacctcaagatagtgcggttatcaaagctggatattgtgtaaaacaaggagcagtgatgaaaaactggaagagaagatattttcaattggatgaaaacacaataggctacttcaaatctgaactggaaaaggaacctcttcgcgtaataccacttaaagaggttcataaagtccaggaatgtaagcaaagcgacataatgatgagggacaacctctttgaaattgtaacaacgtctcgaactttctatgtgcaggctgatagccctgaagagatgcacagttggattaaagcagtctctggcgccattgtagcacagcggggtcccggcagatctgcgtcttctatgcggcaggccagaaggctgtcgaacccttgtatacagaggtatacatcaagagctggtgaatgcagcacgtatgtgggctctcacgcaaacgtgccttcttagtggagggcccagacttactacttacaactgatcatagaaagttgagttaaccaaactgccttttgcagttatcataactgattttgtcaatactaacgcaaactgtttcactgtagtcatcaggagcatccccccggtccttcagaatccaaacacgctttccgtcctaccaacgcagccgccgccacctcacattccacagcctctcgcagcaactctttggtctcaacctttaccatggagaagcgaggattttacgagtctcttgccaaggtcaagccagggaacttcaaggtccagactgtctctccaagagaaccagcttccaaagtgactgaacaagctctgttaagacctcaaagtaaaaatggccctcaggaaaaagattgtgacctagtagacttggacgatgcgagccttccggtcagtgacgtgtgaggcagaagcgcacggagcctgcctgcctctgccgtcctcagtttcctttcatgaggcttctagccaaagatgataaagggggaaatggtttttagtgcgtatattatactgcctcttaggtgtactctttataagctggtaaaccaagaatctagggagtggccaaactaaatataatttctttaaaaaagaaagaaaaaggaaaaatccaaaatatctcagtatcatctgtctgaagcattgtgtgttctcattcgggtggtaacaatgtatgtgtaatatttttttcttagtgattttgacagtttaaatgtttaacaacttaaagcattaaaaatgcttattaataactttggtcatttaaaaaatgctacaatgacttcctattaaaggttcaatatttacacattcttattggttgatattaccacatgaaatattgccagaccaagatacctaaactcatgatgtctgtggtgctgtaaaatttatactaaaatgtggactattttgaaattataaccatttttgatgccctgaatcttgaggtgacttattttgcatagaggatatggatagaccaacagtaagggttgtgggttataccggcatagagaaaagaagaaaactagaattgaaacaactgtgtcttagacatttgtttgaaaaagcttcatcaggccttggagcagtcactgctttattccgcaaaaattatttggtaggaaatttttgggagatctgattttcttatccaagttttgtaaatagttgttatttctatatttggattggtgaaagacctcaagtttatatgtaaagacataactgcccttagtcatgaaattgttgtgacctctactttttgtcactaatagcctacattcaagtgcctgtgttttttcatcttgtttaggaatgttttgagattaatgtgcttaaaagtcctacgtgactgattttaaacattgtgataaaattaattttcagtagaatagttgaatgtgttaagataggattttatgttagagataccagaatgctggtattctactacttgtgcaatatatatgttttaaaaaacaaatttgagaatacatttaatcatagggatatagatataagcacctctctaaagaatctttagtttccgacgttgaattatagaccagtttgagtaagtactgctttttttttttgggagacgggctctcgctctgttggctcaggctggagtgcagtggcgtgatctcagctcactacagcctccacctcgtgggttcaaacagttgtgctgcctcagcttcccgagtagctaggattacaggtgcatgccaccacacctggctaattttggtattttagtagagatggggtttcaccatgttggccaggctcgtctcgaactcctgacttcaggtgatccacccatctcagcctcccaaagtgctgggattacaggcgtgagccaccatgcccggcccataagtaccgttttgaggttcagtcttaaacatttgctttaagaaaacagtcttgaatttcacatgctgctatttttatattttgccattttacagtactgttttgttttgaattcatgcatatcattgaaaatttctcgttttcattttcttagatgacttcttgtctgagacagaaaaatttcctactacagcagtgcagtccagaggttaagatgtattagaattatacaatatcagtttaaaaatctgtatgcataaagaatgcaccactcaacttttttattcataagctaatatttttttaaagttacattaagattttttctcttttgcagctacatttgaaagtgatagaataaagagattttaatgagttatcactttttcagctgatatattcattttaatggcttttttgaaagttcctttttcatgaacacacccgagaaatcttaaatagacactttgcaatatttaagaacctaatgctgtttaattttggtacagcttccacattgcatgttcactttagtatttgcaatttgatatatttcatggtggcaaaatattagctctgttttgggacattttaaaatagaactatccttgttcgatagcataggaaaatgttctggtgattgtcagggtctcctaatatttatctcaattcttttataagtctatggaaattatttaattattttaaaacgtacacacttttcttgtaaatatgtcacatctgagttcaaaaaaattactttgaataccttaatatttgctgcatttttttccgtatatataacatgtcttctttcagaatgggaatatatgtgtgcctcccaacatttactgttaaagtgtgttatctttatatgtcaaactggttgaacactgtaatgagaataaactgcacagagtttattctga

SEQ ID NO: 319917 - DNA, 3796 bp, Homo sapiens
  misc_feature (44)..(44): n is a, c, g, or t
ggaatctcagccgccgtctgagggctgaggcagcgtggggacgngtgcgcagtgcgcgggctggccgtcgcggacgccgctccgggcagccgagcctctgtgggagccggggccgcggcggcgcgggtgctccgggccgaggccgcgtgtaatgttcaagctcagaaatgccttatgtggatcgtcagaatcgcatttgtggttttctagacattgaagaaaatgaaaacagtgggaaatttcttcgaaggtacttcatactggataccagagaagatagtttcgtgtggtacatggataatccacagaacctaccttctggatcatcacgtgttggagccattaagcttacctacatttcaaaggttagcgatgctactaagctaaggccaaaggcggagttctgttttgttatgaatgcaggaatgaggaagtacttcctacaagccaatgatcagcaggacctagtggaatgggtaaatgtgttaaacaaagctataaaaattacagtaccaaagcagtcagactcacagcctaattctgataacctaagtcgccatggtgaatgtgggaaaaagcaagtgtcttacagaactgatattgttggtggcgtacccatcattactcccactcagaaagaagaagtaaatgaatgtggtgaaagtattgacagaaataatctgaaacggtcacaaagccatcttccttactttactcctaaaccacctcaagatagtgcggttatcaaagctggatattgtgtaaaacaaggagcagtgatgaaaaactggaagagaagatattttcaattggatgaaaacacaataggctacttcaaatctgaactggaaaaggaacctcttcgcgtaataccacttaaagaggttcataaagtccaggaatgtaagcaaagcgacataatgatgagggacaacctctttgaaattgtaacaacgtctcgaactttctatgtgcaggctgatagccctgaagagatgcacagttggattaaagcagtctctggcgccattgtagcacagcggggtcccggcagatctgcgtcttctgagcatccccccggtccttcagaatccaaacacgctttccgtcctaccaacgcagccgccgccacctcacattccacagcctctcgcagcaactctttggtctcaacctttaccatggagaagcgaggattttacgagtctcttgccaaggtcaagccagggaacttcaaggtccagactgtctctccaagagaaccagcttccaaagtgactgaacaagctctgttaagacctcaaagtaaaaatggccctcaggaaaaagattgtgacctagtagacttggacgatgcgagccttccggtcagtgacgtgtgaggcagaagcgcacggagcctgcctgcctctgccgtcctcagtttcctttcatgaggcttctagccaaagatgataaagggggaaatggtttttagtgcgtatattatactgcctcttaggtgtactctttataagctggtaaaccaagaatctagggagtggccaaactaaatataatttctttaaaaaagaaagaaaaaggaaaaatccaaaatatctcagtatcatctgtctgaagcattgtgtgttctcattcgggtggtaacaatgtatgtgtaatatttttttcttagtgattttgacagtttaaatgtttaacaacttaaagcattaaaaatgcttattaataactttggtcatttaaaaaatgctacaatgacttcctattaaaggttcaatatttacacattcttattggttgatattaccacatgaaatattgccagaccaagatacctaaactcatgatgtctgtggtgctgtaaaatttatactaaaatgtggactattttgaaattataaccatttttgatgccctgaatcttgaggtgacttattttgcatagaggatatggatagaccaacagtaagggttgtgggttataccggcatagagaaaagaagaaaactagaattgaaacaactgtgtcttagacatttgtttgaaaaagcttcatcaggccttggagcagtcactgctttattccgcaaaaattatttggtaggaaatttttgggagatctgattttcttatccaagttttgtaaatagttgttatttctatatttggattggtgaaagacctcaagtttatatgtaaagacataactgcccttagtcatgaaattgttgtgacctctactttttgtcactaatagcctacattcaagtgcctgtgttttttcatcttgtttaggaatgttttgagattaatgtgcttaaaagtcctacgtgactgattttaaacattgtgataaaattaattttcagtagaatagttgaatgtgttaagataggattttatgttagagataccagaatgctggtattctactacttgtgcaatatatatgttttaaaaaacaaatttgagaatacatttaatcatagggatatagatataagcacctctctaaagaatctttagtttccgacgttgaattatagaccagtttgagtaagtactgctttttttttttgggagacgggctctcgctctgttggctcaggctggagtgcagtggcgtgatctcagctcactacagcctccacctcgtgggttcaaacagttgtgctgcctcagcttcccgagtagctaggattacaggtgcatgccaccacacctggctaattttggtattttagtagagatggggtttcaccatgttggccaggctcgtctcgaactcctgacttcaggtgatccacccatctcagcctcccaaagtgctgggattacaggcgtgagccaccatgcccggcccataagtaccgttttgaggttcagtcttaaacatttgctttaagaaaacagtcttgaatttcacatgctgctatttttatattttgccattttacagtactgttttgttttgaattcatgcatatcattgaaaatttctcgttttcattttcttagatgacttcttgtctgagacagaaaaatttcctactacagcagtgcagtccagaggttaagatgtattagaattatacaatatcagtttaaaaatctgtatgcataaagaatgcaccactcaacttttttattcataagctaatatttttttaaagttacattaagattttttctcttttgcagctacatttgaaagtgatagaataaagagattttaatgagttatcactttttcagctgatatattcattttaatggcttttttgaaagttcctttttcatgaacacacccgagaaatcttaaatagacactttgcaatatttaagaacctaatgctgtttaattttggtacagcttccacattgcatgttcactttagtatttgcaatttgatatatttcatggtggcaaaatattagctctgttttgggacattttaaaatagaactatccttgttcgatagcataggaaaatgttctggtgattgtcagggtctcctaatatttatctcaattcttttataagtctatggaaattatttaattattttaaaacgtacacacttttcttgtaaatatgtcacatctgagttcaaaaaaattactttgaataccttaatatttgctgcatttttttccgtatatataacatgtcttctttcagaatgggaatatatgtgtgcctcccaacatttactgttaaagtgtgttatctttatatgtcaaactggttgaacactgtaatgagaataaactgcacagagtttattctga

SEQ ID NO: 319918 - DNA, 4066 bp, Homo sapiens
  misc_feature (44)..(44): n is a, c, g, or t
  misc_feature (4002)..(4002): n is a, c, g, or t
ggaatctcagccgccgtctgagggctgaggcagcgtggggacgngtgcgcagtgcgcgggctggccgtcgcggacgccgctccgggcagccgagcctctgtgggagccggggccgcggcggcgcgggtgctccgggccgaggccgcgtctggctcttgctgattgaattcctttggtgcagtttagcatgttcctctgtgttctgcatctcctgtagtgtaatgttcaagctcagaaatgccttatgtggatcgtcagaatcgcatttgtggttttctagacattgaagaaaatgaaaacagtgggaaatttcttcgaaggtacttcatactggataccagagaagatagtttcgtgtggtacatggataatccacagaacctaccttctggatcatcacgtgttggagccattaagcttacctacatttcaaaggttagcgatgctactaagctaaggccaaaggcggagttctgttttgttatgaatgcaggaatgaggaagtacttcctacaagccaatgatcagcaggacctagtggaatgggtaaatgtgttaaacaaagctataaaaattacagtaccaaagcagtcagactcacagcctaattctgataacctaagtcgccatggtgaatgtgggaaaaagcaagtgtcttacagaactgatattgttggtggcgtacccatcattactcccactcagaaagaagaagtaaatgaatgtggtgaaagtattgacagaaataatctgaaacggtcacaaagccatcttccttactttactcctaaaccacctcaagatagtgcggttatcaaagctggatattgtgtaaaacaaggagcagtgatgaaaaactggaagagaagatattttcaattggatgaaaacacaataggctacttcaaatctgaactggaaaaggaacctcttcgcgtaataccacttaaagaggttcataaagtccaggaatgtaagcaaagcgacataatgatgagggacaacctctttgaaattgtaacaacgtctcgaactttctatgtgcaggctgatagccctgaagagatgcacagttggattaaagcagtctctggcgccattgtagcacagcggggtcccggcagatctgcgtcttctgagcatccccccggtccttcagaatccaaacacgctttccgtcctaccaacgcagccgccgccacctcacattccacagcctctcgcagcaactctttggtctcaacctttaccatggagaagcgaggattttacgagtctcttgccaaggtcaagccagggaacttcaaggtccagactgtctctccaagagaaccagcttccaaagtgactgaacaagctctgttaagacctcaaagtaaaaatggccctcaggaaaaagattgtgacctagtagacttggacgatgcgagccttccggtcagtgacgtgtgaggcagaagcgcacggagcctgcctgcctctgccgtcctcagtttcctttcatgaggcttctagccaaagatgataaagggggaaatggtttttagtgcgtatattatactgcctcttaggtgtactctttataagctggtaaaccaagaatctagggagtggccaaactaaatataatttctttaaaaaagaaagaaaaaggaaaaatccaaaatatctcagtatcatctgtctgaagcattgtgtgttctcattcgggtggtaacaatgtatgtgtaatatttttttcttagtgattttgacagtttaaatgtttaacaacttaaagcattaaaaatgcttattaataactttggtcatttaaaaaatgctacaatgacttcctattaaaggttcaatatttacacattcttattggttgatattaccacatgaaatattgccagaccaagatacctaaactcatgatgtctgtggtgctgtaaaatttatactaaaatgtggactattttgaaattataaccatttttgatgccctgaatcttgaggtgacttattttgcatagaggatatggatagaccaacagtaagggttgtgggttataccggcatagagaaaagaagaaaactagaattgaaacaactgtgtcttagacatttgtttgaaaaagcttcatcaggccttggagcagtcactgctttattccgcaaaaattatttggtaggaaatttttgggagatctgattttcttatccaagttttgtaaatagttgttatttctatatttggattggtgaaagacctcaagtttatatgtaaagacataactgcccttagtcatgaaattgttgtgacctctactttttgtcactaatagcctacattcaagtgcctgtgttttttcatcttgtttaggaatgttttgagattaatgtgcttaaaagtcctacgtgactgattttaaacattgtgataaaattaattttcagtagaatagttgaatgtgttaagataggattttatgttagagataccagaatgctggtattctactacttgtgcaatatatatgttttaaaaaacaaatttgagaatacatttaatcatagggatatagatataagcacctctctaaagaatctttagtttccgacgttgaattatagaccagtttgagtaagtactgctttttttttttgggagacgggctctcgctctgttggctcaggctggagtgcagtggcgtgatctcagctcactacagcctccacctcgtgggttcaaacagttgtgctgcctcagcttcccgagtagctaggattacaggtgcatgccaccacacctggctaattttggtattttagtagagatggggtttcaccatgttggccaggctcgtctcgaactcctgacttcaggtgatccacccatctcagcctcccaaagtgctgggattacaggcgtgagccaccatgcccggcccataagtaccgttttgaggttcagtcttaaacatttgctttaagaaaacagtcttgaatttcacatgctgctatttttatattttgccattttacagtactgttttgttttgaattcatgcatatcattgaaaatttctcgttttcattttcttagatgacttcttgtctgagacagaaaaatttcctactacagcagtgcagtccagaggttaagatgtattagaattatacaatatcagtttaaaaatctgtatgcataaagaatgcaccactcaacttttttattcataagctaatatttttttaaagttacattaagattttttctcttttgcagctacatttgaaagtgatagaataaagagattttaatgagttatcactttttcagctgatatattcattttaatggcttttttgaaagttcctttttcatgaacacacccgagaaatcttaaatagacactttgcaatatttaagaacctaatgctgtttaattttggtacagcttccacattgcatgttcactttagtatttgcaatttgatatatttcatggtggcaaaatattagctctgttttgggacattttaaaatagaactatccttgttcgatagcataggaaaatgttctggtgattgtcagggtctcctaatatttatctcaattcttttataagtctatggaaattatttaattattttaaaacgtacacacttttcttgtaaatatgtcacatctgagttcaaaaaaattactttgaataccttaatatttgctgcatttttttccgtatatataacatgtcttctttcagaatgggaatatatgtgtgcctcccaacatttactgttaaagtgtgttatctttatatgtcaaactggttgaacactgtaatgagaataaactgcacagagtttattctgaaaaaaaaacacaccaaaaaaaatttttggggccgccgggcttgaaagaagtttttagacccttcctgtggggcggggcccgggttgttgacctgggccaggtccaaggaaacgggccggccgggtgtgtgttcccncaaaaaagcgcgggccgcggtcggacaatccagggccgggcctcggtccaccgggccggcctac

SEQ ID NO: 319919 - DNA, 3772 bp, Homo sapiens
ttccaaagttgctatgtcattttgcatttccaccagcaatatatgatagttcgtttatttcacatctttgacagcatttagtgttgtcagggttttttttgtttgttttagacattttagtagtgtaatgttcaagctcagaaatgccttatgtggatcgtcagaatcgcatttgtggttttctagacattgaagaaaatgaaaacagtgggaaatttcttcgaaggtacttcatactggataccagagaagatagtttcgtgtggtacatggataatccacagaacctaccttctggatcatcacgtgttggagccattaagcttacctacatttcaaaggttagcgatgctactaagctaaggccaaaggcggagttctgttttgttatgaatgcaggaatgaggaagtacttcctacaagccaatgatcagcaggacctagtggaatgggtaaatgtgttaaacaaagctataaaaattacagtaccaaagcagtcagactcacagcctaattctgataacctaagtcgccatggtgaatgtgggaaaaagcaagtgtcttacagaactgatattgttggtggcgtacccatcattactcccactcagaaagaagaagtaaatgaatgtggtgaaagtattgacagaaataatctgaaacggtcacaaagccatcttccttactttactcctaaaccacctcaagatagtgcggttatcaaagctggatattgtgtaaaacaaggagcagtgatgaaaaactggaagagaagatattttcaattggatgaaaacacaataggctacttcaaatctgaactggaaaaggaacctcttcgcgtaataccacttaaagaggttcataaagtccaggaatgtaagcaaagcgacataatgatgagggacaacctctttgaaattgtaacaacgtctcgaactttctatgtgcaggctgatagccctgaagagatgcacagttggattaaagcagtctctggcgccattgtagcacagcggggtcccggcagatctgcgtcttctgagcatccccccggtccttcagaatccaaacacgctttccgtcctaccaacgcagccgccgccacctcacattccacagcctctcgcagcaactctttggtctcaacctttaccatggagaagcgaggattttacgagtctcttgccaaggtcaagccagggaacttcaaggtccagactgtctctccaagagaaccagcttccaaagtgactgaacaagctctgttaagacctcaaagtaaaaatggccctcaggaaaaagattgtgacctagtagacttggacgatgcgagccttccggtcagtgacgtgtgaggcagaagcgcacggagcctgcctgcctctgccgtcctcagtttcctttcatgaggcttctagccaaagatgataaagggggaaatggtttttagtgcgtatattatactgcctcttaggtgtactctttataagctggtaaaccaagaatctagggagtggccaaactaaatataatttctttaaaaaagaaagaaaaaggaaaaatccaaaatatctcagtatcatctgtctgaagcattgtgtgttctcattcgggtggtaacaatgtatgtgtaatatttttttcttagtgattttgacagtttaaatgtttaacaacttaaagcattaaaaatgcttattaataactttggtcatttaaaaaatgctacaatgacttcctattaaaggttcaatatttacacattcttattggttgatattaccacatgaaatattgccagaccaagatacctaaactcatgatgtctgtggtgctgtaaaatttatactaaaatgtggactattttgaaattataaccatttttgatgccctgaatcttgaggtgacttattttgcatagaggatatggatagaccaacagtaagggttgtgggttataccggcatagagaaaagaagaaaactagaattgaaacaactgtgtcttagacatttgtttgaaaaagcttcatcaggccttggagcagtcactgctttattccgcaaaaattatttggtaggaaatttttgggagatctgattttcttatccaagttttgtaaatagttgttatttctatatttggattggtgaaagacctcaagtttatatgtaaagacataactgcccttagtcatgaaattgttgtgacctctactttttgtcactaatagcctacattcaagtgcctgtgttttttcatcttgtttaggaatgttttgagattaatgtgcttaaaagtcctacgtgactgattttaaacattgtgataaaattaattttcagtagaatagttgaatgtgttaagataggattttatgttagagataccagaatgctggtattctactacttgtgcaatatatatgttttaaaaaacaaatttgagaatacatttaatcatagggatatagatataagcacctctctaaagaatctttagtttccgacgttgaattatagaccagtttgagtaagtactgctttttttttttgggagacgggctctcgctctgttggctcaggctggagtgcagtggcgtgatctcagctcactacagcctccacctcgtgggttcaaacagttgtgctgcctcagcttcccgagtagctaggattacaggtgcatgccaccacacctggctaattttggtattttagtagagatggggtttcaccatgttggccaggctcgtctcgaactcctgacttcaggtgatccacccatctcagcctcccaaagtgctgggattacaggcgtgagccaccatgcccggcccataagtaccgttttgaggttcagtcttaaacatttgctttaagaaaacagtcttgaatttcacatgctgctatttttatattttgccattttacagtactgttttgttttgaattcatgcatatcattgaaaatttctcgttttcattttcttagatgacttcttgtctgagacagaaaaatttcctactacagcagtgcagtccagaggttaagatgtattagaattatacaatatcagtttaaaaatctgtatgcataaagaatgcaccactcaacttttttattcataagctaatatttttttaaagttacattaagattttttctcttttgcagctacatttgaaagtgatagaataaagagattttaatgagttatcactttttcagctgatatattcattttaatggcttttttgaaagttcctttttcatgaacacacccgagaaatcttaaatagacactttgcaatatttaagaacctaatgctgtttaattttggtacagcttccacattgcatgttcactttagtatttgcaatttgatatatttcatggtggcaaaatattagctctgttttgggacattttaaaatagaactatccttgttcgatagcataggaaaatgttctggtgattgtcagggtctcctaatatttatctcaattcttttataagtctatggaaattatttaattattttaaaacgtacacacttttcttgtaaatatgtcacatctgagttcaaaaaaattactttgaataccttaatatttgctgcatttttttccgtatatataacatgtcttctttcagaatgggaatatatgtgtgcctcccaacatttactgttaaagtgtgttatctttatatgtcaaactggttgaacactgtaatgagaataaactgcacagagtttattctga

SEQ ID NO: 319920 - DNA, 3427 bp, Homo sapiens
ggagtacatacatggactataatttttatatgtatctgtcaaccgtatgcaaacggatgaataattagaaattctgcgagaaaacaggttcacatgtataatgctggttgcaaaatgattcattttatttactatttcaggtaccaaagcagtcagactcacagcctaattctgataacctaagtcgccatggtgaatgtgggaaaaagcaagtgtcttacagaactgatattgttggtggcgtacccatcattactcccactcagaaagaagaagtaaatgaatgtggtgaaagtattgacagaaataatctgaaacggtcacaaagccatcttccttactttactcctaaaccacctcaagatagtgcggttatcaaagctggatattgtgtaaaacaaggagcagtgatgaaaaactggaagagaagatattttcaattggatgaaaacacaataggctacttcaaatctgaactggaaaaggaacctcttcgcgtaataccacttaaagaggttcataaagtccaggaatgtaagcaaagcgacataatgatgagggacaacctctttgaaattgtaacaacgtctcgaactttctatgtgcaggctgatagccctgaagagatgcacagttggattaaagcagtctctggcgccattgtagcacagcggggtcccggcagatctgcgtcttctgagcatccccccggtccttcagaatccaaacacgctttccgtcctaccaacgcagccgccgccacctcacattccacagcctctcgcagcaactctttggtctcaacctttaccatggagaagcgaggattttacgagtctcttgccaaggtcaagccagggaacttcaaggtccagactgtctctccaagagaaccagcttccaaagtgactgaacaagctctgttaagacctcaaagtaaaaatggccctcaggaaaaagattgtgacctagtagacttggacgatgcgagccttccggtcagtgacgtgtgaggcagaagcgcacggagcctgcctgcctctgccgtcctcagtttcctttcatgaggcttctagccaaagatgataaagggggaaatggtttttagtgcgtatattatactgcctcttaggtgtactctttataagctggtaaaccaagaatctagggagtggccaaactaaatataatttctttaaaaaagaaagaaaaaggaaaaatccaaaatatctcagtatcatctgtctgaagcattgtgtgttctcattcgggtggtaacaatgtatgtgtaatatttttttcttagtgattttgacagtttaaatgtttaacaacttaaagcattaaaaatgcttattaataactttggtcatttaaaaaatgctacaatgacttcctattaaaggttcaatatttacacattcttattggttgatattaccacatgaaatattgccagaccaagatacctaaactcatgatgtctgtggtgctgtaaaatttatactaaaatgtggactattttgaaattataaccatttttgatgccctgaatcttgaggtgacttattttgcatagaggatatggatagaccaacagtaagggttgtgggttataccggcatagagaaaagaagaaaactagaattgaaacaactgtgtcttagacatttgtttgaaaaagcttcatcaggccttggagcagtcactgctttattccgcaaaaattatttggtaggaaatttttgggagatctgattttcttatccaagttttgtaaatagttgttatttctatatttggattggtgaaagacctcaagtttatatgtaaagacataactgcccttagtcatgaaattgttgtgacctctactttttgtcactaatagcctacattcaagtgcctgtgttttttcatcttgtttaggaatgttttgagattaatgtgcttaaaagtcctacgtgactgattttaaacattgtgataaaattaattttcagtagaatagttgaatgtgttaagataggattttatgttagagataccagaatgctggtattctactacttgtgcaatatatatgttttaaaaaacaaatttgagaatacatttaatcatagggatatagatataagcacctctctaaagaatctttagtttccgacgttgaattatagaccagtttgagtaagtactgctttttttttttgggagacgggctctcgctctgttggctcaggctggagtgcagtggcgtgatctcagctcactacagcctccacctcgtgggttcaaacagttgtgctgcctcagcttcccgagtagctaggattacaggtgcatgccaccacacctggctaattttggtattttagtagagatggggtttcaccatgttggccaggctcgtctcgaactcctgacttcaggtgatccacccatctcagcctcccaaagtgctgggattacaggcgtgagccaccatgcccggcccataagtaccgttttgaggttcagtcttaaacatttgctttaagaaaacagtcttgaatttcacatgctgctatttttatattttgccattttacagtactgttttgttttgaattcatgcatatcattgaaaatttctcgttttcattttcttagatgacttcttgtctgagacagaaaaatttcctactacagcagtgcagtccagaggttaagatgtattagaattatacaatatcagtttaaaaatctgtatgcataaagaatgcaccactcaacttttttattcataagctaatatttttttaaagttacattaagattttttctcttttgcagctacatttgaaagtgatagaataaagagattttaatgagttatcactttttcagctgatatattcattttaatggcttttttgaaagttcctttttcatgaacacacccgagaaatcttaaatagacactttgcaatatttaagaacctaatgctgtttaattttggtacagcttccacattgcatgttcactttagtatttgcaatttgatatatttcatggtggcaaaatattagctctgttttgggacattttaaaatagaactatccttgttcgatagcataggaaaatgttctggtgattgtcagggtctcctaatatttatctcaattcttttataagtctatggaaattatttaattattttaaaacgtacacacttttcttgtaaatatgtcacatctgagttcaaaaaaattactttgaataccttaatatttgctgcatttttttccgtatatataacatgtcttctttcagaatgggaatatatgtgtgcctcccaacatttactgttaaagtgtgttatctttatatgtcaaactggttgaacactgtaatgagaataaactgcacagagtttattctga

SEQ ID NO: 319921 - DNA, 3256 bp, Homo sapiens
aaacacataaaatcatacaataaaagatgaaagccaggcaccagaaattgaattaggaattcaaagcctgggtagctagagagggatgaggtttaatttatcgcatctctaagggaagtaatgagatttttcactgcttggcatgtctgattgtgggttcatatcagggtaattaagtggtgactaacatttgacattcttagaaacacaagtcttatgtctgtgttcatctctggtagatgaaaaactggaagagaagatattttcaattggatgaaaacacaataggctacttcaaatctgaactggaaaaggaacctcttcgcgtaataccacttaaagaggttcataaagtccaggaatgtaagcaaagcgacataatgatgagggacaacctctttgaaattgtaacaacgtctcgaactttctatgtgcaggctgatagccctgaagagatgcacagttggattaaagcagtctctggcgccattgtagcacagcggggtcccggcagatctgcgtcttctgagcatccccccggtccttcagaatccaaacacgctttccgtcctaccaacgcagccgccgccacctcacattccacagcctctcgcagcaactctttggtctcaacctttaccatggagaagcgaggattttacgagtctcttgccaaggtcaagccagggaacttcaaggtccagactgtctctccaagagaaccagcttccaaagtgactgaacaagctctgttaagacctcaaagtaaaaatggccctcaggaaaaagattgtgacctagtagacttggacgatgcgagccttccggtcagtgacgtgtgaggcagaagcgcacggagcctgcctgcctctgccgtcctcagtttcctttcatgaggcttctagccaaagatgataaagggggaaatggtttttagtgcgtatattatactgcctcttaggtgtactctttataagctggtaaaccaagaatctagggagtggccaaactaaatataatttctttaaaaaagaaagaaaaaggaaaaatccaaaatatctcagtatcatctgtctgaagcattgtgtgttctcattcgggtggtaacaatgtatgtgtaatatttttttcttagtgattttgacagtttaaatgtttaacaacttaaagcattaaaaatgcttattaataactttggtcatttaaaaaatgctacaatgacttcctattaaaggttcaatatttacacattcttattggttgatattaccacatgaaatattgccagaccaagatacctaaactcatgatgtctgtggtgctgtaaaatttatactaaaatgtggactattttgaaattataaccatttttgatgccctgaatcttgaggtgacttattttgcatagaggatatggatagaccaacagtaagggttgtgggttataccggcatagagaaaagaagaaaactagaattgaaacaactgtgtcttagacatttgtttgaaaaagcttcatcaggccttggagcagtcactgctttattccgcaaaaattatttggtaggaaatttttgggagatctgattttcttatccaagttttgtaaatagttgttatttctatatttggattggtgaaagacctcaagtttatatgtaaagacataactgcccttagtcatgaaattgttgtgacctctactttttgtcactaatagcctacattcaagtgcctgtgttttttcatcttgtttaggaatgttttgagattaatgtgcttaaaagtcctacgtgactgattttaaacattgtgataaaattaattttcagtagaatagttgaatgtgttaagataggattttatgttagagataccagaatgctggtattctactacttgtgcaatatatatgttttaaaaaacaaatttgagaatacatttaatcatagggatatagatataagcacctctctaaagaatctttagtttccgacgttgaattatagaccagtttgagtaagtactgctttttttttttgggagacgggctctcgctctgttggctcaggctggagtgcagtggcgtgatctcagctcactacagcctccacctcgtgggttcaaacagttgtgctgcctcagcttcccgagtagctaggattacaggtgcatgccaccacacctggctaattttggtattttagtagagatggggtttcaccatgttggccaggctcgtctcgaactcctgacttcaggtgatccacccatctcagcctcccaaagtgctgggattacaggcgtgagccaccatgcccggcccataagtaccgttttgaggttcagtcttaaacatttgctttaagaaaacagtcttgaatttcacatgctgctatttttatattttgccattttacagtactgttttgttttgaattcatgcatatcattgaaaatttctcgttttcattttcttagatgacttcttgtctgagacagaaaaatttcctactacagcagtgcagtccagaggttaagatgtattagaattatacaatatcagtttaaaaatctgtatgcataaagaatgcaccactcaacttttttattcataagctaatatttttttaaagttacattaagattttttctcttttgcagctacatttgaaagtgatagaataaagagattttaatgagttatcactttttcagctgatatattcattttaatggcttttttgaaagttcctttttcatgaacacacccgagaaatcttaaatagacactttgcaatatttaagaacctaatgctgtttaattttggtacagcttccacattgcatgttcactttagtatttgcaatttgatatatttcatggtggcaaaatattagctctgttttgggacattttaaaatagaactatccttgttcgatagcataggaaaatgttctggtgattgtcagggtctcctaatatttatctcaattcttttataagtctatggaaattatttaattattttaaaacgtacacacttttcttgtaaatatgtcacatctgagttcaaaaaaattactttgaataccttaatatttgctgcatttttttccgtatatataacatgtcttctttcagaatgggaatatatgtgtgcctcccaacatttactgttaaagtgtgttatctttatatgtcaaactggttgaacactgtaatgagaataaactgcacagagtttattctga

SEQ ID NO: 319922 - DNA, 2804 bp, Homo sapiens
aatcaagtctcacactgagttactaacctggtcatgagtgactgaccgtgtctgactgccactcctttttgcagggagcatccccccggtccttcagaatccaaacacgctttccgtcctaccaacgcagccgccgccacctcacattccacagcctctcgcagcaactctttggtctcaacctttaccatggagaagcgaggattttacgagtctcttgccaaggtcaagccagggaacttcaaggtccagactgtctctccaagagaaccagcttccaaagtgactgaacaagctctgttaagacctcaaagtaaaaatggccctcaggaaaaagattgtgacctagtagacttggacgatgcgagccttccggtcagtgacgtgtgaggcagaagcgcacggagcctgcctgcctctgccgtcctcagtttcctttcatgaggcttctagccaaagatgataaagggggaaatggtttttagtgcgtatattatactgcctcttaggtgtactctttataagctggtaaaccaagaatctagggagtggccaaactaaatataatttctttaaaaaagaaagaaaaaggaaaaatccaaaatatctcagtatcatctgtctgaagcattgtgtgttctcattcgggtggtaacaatgtatgtgtaatatttttttcttagtgattttgacagtttaaatgtttaacaacttaaagcattaaaaatgcttattaataactttggtcatttaaaaaatgctacaatgacttcctattaaaggttcaatatttacacattcttattggttgatattaccacatgaaatattgccagaccaagatacctaaactcatgatgtctgtggtgctgtaaaatttatactaaaatgtggactattttgaaattataaccatttttgatgccctgaatcttgaggtgacttattttgcatagaggatatggatagaccaacagtaagggttgtgggttataccggcatagagaaaagaagaaaactagaattgaaacaactgtgtcttagacatttgtttgaaaaagcttcatcaggccttggagcagtcactgctttattccgcaaaaattatttggtaggaaatttttgggagatctgattttcttatccaagttttgtaaatagttgttatttctatatttggattggtgaaagacctcaagtttatatgtaaagacataactgcccttagtcatgaaattgttgtgacctctactttttgtcactaatagcctacattcaagtgcctgtgttttttcatcttgtttaggaatgttttgagattaatgtgcttaaaagtcctacgtgactgattttaaacattgtgataaaattaattttcagtagaatagttgaatgtgttaagataggattttatgttagagataccagaatgctggtattctactacttgtgcaatatatatgttttaaaaaacaaatttgagaatacatttaatcatagggatatagatataagcacctctctaaagaatctttagtttccgacgttgaattatagaccagtttgagtaagtactgctttttttttttgggagacgggctctcgctctgttggctcaggctggagtgcagtggcgtgatctcagctcactacagcctccacctcgtgggttcaaacagttgtgctgcctcagcttcccgagtagctaggattacaggtgcatgccaccacacctggctaattttggtattttagtagagatggggtttcaccatgttggccaggctcgtctcgaactcctgacttcaggtgatccacccatctcagcctcccaaagtgctgggattacaggcgtgagccaccatgcccggcccataagtaccgttttgaggttcagtcttaaacatttgctttaagaaaacagtcttgaatttcacatgctgctatttttatattttgccattttacagtactgttttgttttgaattcatgcatatcattgaaaatttctcgttttcattttcttagatgacttcttgtctgagacagaaaaatttcctactacagcagtgcagtccagaggttaagatgtattagaattatacaatatcagtttaaaaatctgtatgcataaagaatgcaccactcaacttttttattcataagctaatatttttttaaagttacattaagattttttctcttttgcagctacatttgaaagtgatagaataaagagattttaatgagttatcactttttcagctgatatattcattttaatggcttttttgaaagttcctttttcatgaacacacccgagaaatcttaaatagacactttgcaatatttaagaacctaatgctgtttaattttggtacagcttccacattgcatgttcactttagtatttgcaatttgatatatttcatggtggcaaaatattagctctgttttgggacattttaaaatagaactatccttgttcgatagcataggaaaatgttctggtgattgtcagggtctcctaatatttatctcaattcttttataagtctatggaaattatttaattattttaaaacgtacacacttttcttgtaaatatgtcacatctgagttcaaaaaaattactttgaataccttaatatttgctgcatttttttccgtatatataacatgtcttctttcagaatgggaatatatgtgtgcctcccaacatttactgttaaagtgtgttatctttatatgtcaaactggttgaacactgtaatgagaataaactgcacagagtttattctga

SEQ ID NO: 319923 - DNA, 2678 bp, Homo sapiens
agcgggcggctgcggggctgccgggcagcctctcgcagcaactctttggtctcaacctttaccatggagaagcgaggattttacgagtctcttgccaaggtcaagccagggaacttcaaggtccagactgtctctccaagagaaccagcttccaaagtgactgaacaagctctgttaagacctcaaagtaaaaatggccctcaggaaaaagattgtgacctagtagacttggacgatgcgagccttccggtcagtgacgtgtgaggcagaagcgcacggagcctgcctgcctctgccgtcctcagtttcctttcatgaggcttctagccaaagatgataaagggggaaatggtttttagtgcgtatattatactgcctcttaggtgtactctttataagctggtaaaccaagaatctagggagtggccaaactaaatataatttctttaaaaaagaaagaaaaaggaaaaatccaaaatatctcagtatcatctgtctgaagcattgtgtgttctcattcgggtggtaacaatgtatgtgtaatatttttttcttagtgattttgacagtttaaatgtttaacaacttaaagcattaaaaatgcttattaataactttggtcatttaaaaaatgctacaatgacttcctattaaaggttcaatatttacacattcttattggttgatattaccacatgaaatattgccagaccaagatacctaaactcatgatgtctgtggtgctgtaaaatttatactaaaatgtggactattttgaaattataaccatttttgatgccctgaatcttgaggtgacttattttgcatagaggatatggatagaccaacagtaagggttgtgggttataccggcatagagaaaagaagaaaactagaattgaaacaactgtgtcttagacatttgtttgaaaaagcttcatcaggccttggagcagtcactgctttattccgcaaaaattatttggtaggaaatttttgggagatctgattttcttatccaagttttgtaaatagttgttatttctatatttggattggtgaaagacctcaagtttatatgtaaagacataactgcccttagtcatgaaattgttgtgacctctactttttgtcactaatagcctacattcaagtgcctgtgttttttcatcttgtttaggaatgttttgagattaatgtgcttaaaagtcctacgtgactgattttaaacattgtgataaaattaattttcagtagaatagttgaatgtgttaagataggattttatgttagagataccagaatgctggtattctactacttgtgcaatatatatgttttaaaaaacaaatttgagaatacatttaatcatagggatatagatataagcacctctctaaagaatctttagtttccgacgttgaattatagaccagtttgagtaagtactgctttttttttttgggagacgggctctcgctctgttggctcaggctggagtgcagtggcgtgatctcagctcactacagcctccacctcgtgggttcaaacagttgtgctgcctcagcttcccgagtagctaggattacaggtgcatgccaccacacctggctaattttggtattttagtagagatggggtttcaccatgttggccaggctcgtctcgaactcctgacttcaggtgatccacccatctcagcctcccaaagtgctgggattacaggcgtgagccaccatgcccggcccataagtaccgttttgaggttcagtcttaaacatttgctttaagaaaacagtcttgaatttcacatgctgctatttttatattttgccattttacagtactgttttgttttgaattcatgcatatcattgaaaatttctcgttttcattttcttagatgacttcttgtctgagacagaaaaatttcctactacagcagtgcagtccagaggttaagatgtattagaattatacaatatcagtttaaaaatctgtatgcataaagaatgcaccactcaacttttttattcataagctaatatttttttaaagttacattaagattttttctcttttgcagctacatttgaaagtgatagaataaagagattttaatgagttatcactttttcagctgatatattcattttaatggcttttttgaaagttcctttttcatgaacacacccgagaaatcttaaatagacactttgcaatatttaagaacctaatgctgtttaattttggtacagcttccacattgcatgttcactttagtatttgcaatttgatatatttcatggtggcaaaatattagctctgttttgggacattttaaaatagaactatccttgttcgatagcataggaaaatgttctggtgattgtcagggtctcctaatatttatctcaattcttttataagtctatggaaattatttaattattttaaaacgtacacacttttcttgtaaatatgtcacatctgagttcaaaaaaattactttgaataccttaatatttgctgcatttttttccgtatatataacatgtcttctttcagaatgggaatatatgtgtgcctcccaacatttactgttaaagtgtgttatctttatatgtcaaactggttgaacactgtaatgagaataaactgcacagagtttattctga

SEQ ID NO: 319924 - DNA, 1567 bp, Homo sapiens
  misc_feature (44)..(44): n is a, c, g, or t
ggaatctcagccgccgtctgagggctgaggcagcgtggggacgngtgcgcagtgcgcgggctggccgtcgcggacgccgctccgggcagccgagcctctgtgggagccggggccgcggcggcgcgggtgctccgggccgaggccgcgtgtaatgttcaagctcagaaatgccttatgtggatcgtcagaatcgcatttgtggttttctagacattgaagaaaatgaaaacagtgggaaatttcttcgaaggtacttcatactggataccagagaagatagtttcgtgtggtacatggataatccacagaacctaccttctggatcatcacgtgttggagccattaagcttacctacatttcaaaggttagcgatgctactaagctaaggccaaaggcggagttctgttttgttatgaatgcaggaatgaggaagtacttcctacaagccaatgatcagcaggacctagtggaatgggtaaatgtgttaaacaaagctataaaaattacagtaccaaagcagtcagactcacagcctaattctgataacctaagtcgccatggtgaatgtgggaaaaagcaagtgtcttacagaactgatattgttggtggcgtacccatcattactcccactcagaaagaagaagtaaatgaatgtggtgaaagtattgacagaaataatctgaaacggtcacaaagccatcttccttactttactcctaaaccacctcaagatagtgcggttatcaaagctggatattgtgtaaaacaaggagcagtgatgaaaaactggaagagaagatattttcaattggatgaaaacacaataggctacttcaaatctgaactggaaaaggaacctcttcgcgtaataccacttaaagaggttcataaagtccaggaatgtaagcaaagcgacataatgatgagggacaacctctttgaaattgtaacaacgtctcgaactttctatgtgcaggctgatagccctgaagagatgcacagttggattaaagcagtctctggcgccattgtagcacagcggggtcccggcagatctgcgtcttctgagcatccccccggtccttcagaatccaaacacgctttccgtcctaccaacgcagccgccgccacctcacattccacagcctctcgcagcaactctttggtctcaacctttaccatggagaagcgaggattttacgagtctcttgccaaggtcaagccagggaacttcaaggtccagactgtctctccaagagaaccagcttccaaagtgactgaacaagctctgttaagacctcaaagtaaaaatggccctcaggaaaaagattgtgacctagtagacttggacgatgcgagccttccggtcagtgacgtgtgaggcagaagcgcacggagcctgcctgcctctgccgtcctcagtttcctttcatgaggcttctagccaaagatgataaagggggaaatggtttttagtgcgtatattatactgcctcttaggtgtactctttataagctggtaaaccaagaatctagggagtggccaaactaaatataatttcttta

SEQ ID NO: 319925 - DNA, 2204 bp, Homo sapiens
  misc_feature (44)..(44): n is a, c, g, or t
ggaatctcagccgccgtctgagggctgaggcagcgtggggacgngtgcgcagtgcgcgggctggccgtcgcggacgccgctccgggcagccgagcctctgtgggagccggggccgcggcggcgcgggtgctccgggccgaggccgcgtctggctcttgctgattgaattcctttggtgcagtttagcatgttcctctgtgttctgcatctcctgtagtgtaatgttcaagctcagaaatgccttatgtggatcgtcagaatcgcatttgtggttttctagacattgaagaaaatgaaaacagtgggaaatttcttcgaaggtacttcatactggataccagagaagatagtttcgtgtggtacatggataatccacagaacctaccttctggatcatcacgtgttggagccattaagcttacctacatttcaaaggttagcgatgctactaagctaaggccaaaggcggagttctgttttgttatgaatgcaggaatgaggaagtacttcctacaagccaatgatcagcaggacctagtggaatgggtaaatgtgttaaacaaagctataaaaattacagtaccaaagcagtcagactcacagcctaattctgataacctaagtcgccatggtgaatgtgggaaaaagcaagtgtcttacagaactgatattgttggtggcgtacccatcattactcccactcagaaagaagaagtaaatgaatgtggtgaaagtattgacagaaataatctgaaacggtcacaaagccatcttccttactttactcctaaaccacctcaagatagtgcggttatcaaagctggatattgtgtaaaacaaggagcagtgatgaaaaactggaagagaagatattttcaattggatgaaaacacaataggctacttcaaatctgaactggaaaaggaacctcttcgcgtaataccacttaaagaggttcataaagtccaggaatgtaagcaaagcgacataatgatgagggacaacctctttgaaattgtaacaacgtctcgaactttctatgtgcaggctgatagccctgaagagatgcacagttggattaaagcagtctctggcgccattgtagcacagcggggtcccggcagatctgcgtcttctatgcggcaggccagaaggctgtcgaacccttgtatacagaggtatacatcaagagctggtgaatgcagcacgtatgtgggctctcacgcaaacgtgccttcttagtggagggcccagacttactacttacaactgatcatagaaagttgagttaaccaaactgccttttgcagttatcataactgattttgtcaatactaacgcaaactgtttcactgtagtcatcaggttggatatgtgtatttaaaaataaaaaataaaacatacaactttactaacagaaagagacattaacatataaaaattaatatactcaactgctgcaagagtttcaattttatattatgtatttaaaaatttttaagatacaatacttacgaaatgcaccattgttctaataatatatgcaaactaatgcatgcatatgcattggataaactgtacattactatagtttgcatggcatttaaaaatctctgaaatttagccatctaataggactctgtagtgttttggtaatttgtagcactttgatttcaaagccactggtatcataaatgaatataatatactagtatatagcaatgtatttagaatggtcatatttaaggatattttcagatttgatctagttagaagcatattgaaattaacattctcaactactaattatttcaccacagtttaaaatgtgataaatgtgtaccctttgttacctttaaaatattaagccatatgaatatatgacctattcagaactaaaattaagtaaaaaatgaaaagactgtgctattattggttgcagtgaaattcagggaagtaaaaactaagtcttatcagcagaataatgtttgaaagatgattcgtgcttattaaagaaatatggcctttcattgttatagtctatattttaatttttttcattctgaaatatgtgggataattcctagtgttgactgagaatatactcttaaataaaatgatacagctgggaggttctcttttaaacacagttcagttgcagctggaacactgtatttcagtttaggttggctgaatcttcaaag

SEQ ID NO: 319926 - DNA, 1035 bp, Homo sapiens
gtacaagcccaagggagattacagggaactcttgcagcagacaagaatgagatttgttttctgaattcaacatcaactataataatgagccaccatgcccggcccataagtaccgttttgaggttcagtcttaaacatttgctttaagaaaacagtcttgaatttcacatgctgctatttttatattttgccattttacagtactgttttgttttgaattcatgcatatcattgaaaatttctcgttttcattttcttagatgacttcttgtctgagacagaaaaatttcctactacagcagtgcagtccagaggttaagatgtattagaattatacaatatcagtttaaaaatctgtatgcataaagaatgcaccactcaacttttttattcataagctaatatttttttaaagttacattaagattttttctcttttgcagctacatttgaaagtgatagaataaagagattttaatgagttatcactttttcagctgatatattcattttaatggcttttttgaaagttcctttttcatgaacacacccgagaaatcttaaatagacactttgcaatatttaagaacctaatgctgtttaattttggtacagcttccacattgcatgttcactttagtatttgcaatttgatatatttcatggtggcaaaatattagctctgttttgggacattttaaaatagaactatccttgttcgatagcataggaaaatgttctggtgattgtcagggtctcctaatatttatctcaattcttttataagtctatggaaattatttaattattttaaaacgtacacacttttcttgtaaatatgtcacatctgagttcaaaaaaattactttgaataccttaatatttgctgcatttttttccgtatatataacatgtcttctttcagaatgggaatatatgtgtgcctcccaacatttactgttaaagtgtgttatctttatatgtcaaactggttgaacactgtaatgagaataaactgcacagagtttattctga

SEQ ID NO: 319927 - DNA, 393 bp, Homo sapiens
agggagcttactgttaatatttttattttacagtgtaatgttcaagctcagaaatgccttatgtggatcgtcagaatcgcatttgtggttttctagacattgaagaaaatgaaaacagtgggaaatttcttcgaaggtacttcatactggataccagagaagatagtttcgtgtggtacatggataatccacaggtttgtaaaatcccaaggattatcttttaaaagcacagaaagttgtatttaagtatttaacatactatacaggctttagaatttgtcttcttaagcagtatatttttagatttatttctactggctgtcctctctgccctgcacccctgacctctactgttttgtttgaatttcagaaggtgaaactaagtttatttga

SEQ ID NO: 319928 - DNA, 392 bp, Homo sapiens
taagggaagtaatgagatttttcactgcttggcatgtctgattgtgggttcatatcagggtaattaagtggtgactaacatttgacattcttagaaacacaagtcttatgtctgtgttcatctctggtagatgaaaaactggaagagaagatattttcaattggatgaaaacacaataggctacttcaaatctgaactggtatgttgttacgtcataaatgttgctataagaatgtttgaaaagtgttgcaatgtagtgattatatataatttcttgtactgttctgtagtttcagaataagtctagtttttagaggtaaatatagtttatttggttgtgatgcttttggttaatgatatttttcttaaatacatttttaagtaaaaagatc

SEQ ID NO: 319929 - DNA, 428 bp, Homo sapiens
gattttgagaaaaaattgtttgaatgagttcttttttcctttaggctgatagccctgaagagatgcacagttggattaaagcagtctctggcgccattgtagcacagcggggtcccggcagatctgcgtcttctgtaggtttcctgctctctggggtgatactcccttgcgtctcccccatcctatcaaatttcctctctcccaatccatccggtttctttctttcttgagatttatttgcatgttgacttttataccaattggacttgcaaaaaataatgcatttctaatttaatgcttccttgtagtattatgtatacataactttctgtgcattgtattgtgttaaatgcacaagtagggcaactaaagaataaacatttccttgctttgttttaggagttcttacttgtcagtagctctagatt

SEQ ID NO: 319930 - DNA, 3866 bp, Homo sapiens
  misc_feature (44)..(44): n is a, c, g, or t
ggaatctcagccgccgtctgagggctgaggcagcgtggggacgngtgcgcagtgcgcgggctggccgtcgcggacgccgctccgggcagccgagcctctgtgggagccggggccgcggcggcgcgggtgctccgggccgaggccgcgtctggctcttgctgattgaattcctttggtgcagtttagcatgttcctctgtgttctgcatctcctgtagtgtaatgttcaagctcagaaatgccttatgtggatcgtcagaatcgcatttgtggttttctagacattgaagaaaatgaaaacagtgggaaatttcttcgaaggtacttcatactggataccagagaagatagtttcgtgtggtacatggataatccacagaacctaccttctggatcatcacgtgttggagccattaagcttacctacatttcaaaggttagcgatgctactaagctaaggccaaaggcggagttctgttttgttatgaatgcaggaatgaggaagtacttcctacaagccaatgatcagcaggacctagtggaatgggtaaatgtgttaaacaaagctataaaaattacagtaccaaagcagtcagactcacagcctaattctgataacctaagtcgccatggtgaatgtgggaaaaagcaagtgtcttacagaactgatattgttggtggcgtacccatcattactcccactcagaaagaagaagtaaatgaatgtggtgaaagtattgacagaaataatctgaaacggtcacaaagccatcttccttactttactcctaaaccacctcaagatagtgcggttatcaaagctggatattgtgtaaaacaaggagcagtgatgaaaaactggaagagaagatattttcaattggatgaaaacacaataggctacttcaaatctgaactggaaaaggaacctcttcgcgtaataccacttaaagaggttcataaagtccaggaatgtaagcaaagcgacataatgatgagggacaacctctttgaaattgtaacaacgtctcgaactttctatgtgcaggctgatagccctgaagagatgcacagttggattaaagcagtctctggcgccattgtagcacagcggggtcccggcagatctgcgtcttctgagcatccccccggtccttcagaatccaaacacgctttccgtcctaccaacgcagccgccgccacctcacattccacagcctctcgcagcaactctttggtctcaacctttaccatggagaagcgaggattttacgagtctcttgccaaggtcaagccagggaacttcaaggtccagactgtctctccaagagaaccagcttccaaagtgactgaacaagctctgttaagacctcaaagtaaaaatggccctcaggaaaaagattgtgacctagtagacttggacgatgcgagccttccggtcagtgacgtgtgaggcagaagcgcacggagcctgcctgcctctgccgtcctcagtttcctttcatgaggcttctagccaaagatgataaagggggaaatggtttttagtgcgtatattatactgcctcttaggtgtactctttataagctggtaaaccaagaatctagggagtggccaaactaaatataatttctttaaaaaagaaagaaaaaggaaaaatccaaaatatctcagtatcatctgtctgaagcattgtgtgttctcattcgggtggtaacaatgtatgtgtaatatttttttcttagtgattttgacagtttaaatgtttaacaacttaaagcattaaaaatgcttattaataactttggtcatttaaaaaatgctacaatgacttcctattaaaggttcaatatttacacattcttattggttgatattaccacatgaaatattgccagaccaagatacctaaactcatgatgtctgtggtgctgtaaaatttatactaaaatgtggactattttgaaattataaccatttttgatgccctgaatcttgaggtgacttattttgcatagaggatatggatagaccaacagtaagggttgtgggttataccggcatagagaaaagaagaaaactagaattgaaacaactgtgtcttagacatttgtttgaaaaagcttcatcaggccttggagcagtcactgctttattccgcaaaaattatttggtaggaaatttttgggagatctgattttcttatccaagttttgtaaatagttgttatttctatatttggattggtgaaagacctcaagtttatatgtaaagacataactgcccttagtcatgaaattgttgtgacctctactttttgtcactaatagcctacattcaagtgcctgtgttttttcatcttgtttaggaatgttttgagattaatgtgcttaaaagtcctacgtgactgattttaaacattgtgataaaattaattttcagtagaatagttgaatgtgttaagataggattttatgttagagataccagaatgctggtattctactacttgtgcaatatatatgttttaaaaaacaaatttgagaatacatttaatcatagggatatagatataagcacctctctaaagaatctttagtttccgacgttgaattatagaccagtttgagtaagtactgctttttttttttgggagacgggctctcgctctgttggctcaggctggagtgcagtggcgtgatctcagctcactacagcctccacctcgtgggttcaaacagttgtgctgcctcagcttcccgagtagctaggattacaggtgcatgccaccacacctggctaattttggtattttagtagagatggggtttcaccatgttggccaggctcgtctcgaactcctgacttcaggtgatccacccatctcagcctcccaaagtgctgggattacaggcgtgagccaccatgcccggcccataagtaccgttttgaggttcagtcttaaacatttgctttaagaaaacagtcttgaatttcacatgctgctatttttatattttgccattttacagtactgttttgttttgaattcatgcatatcattgaaaatttctcgttttcattttcttagatgacttcttgtctgagacagaaaaatttcctactacagcagtgcagtccagaggttaagatgtattagaattatacaatatcagtttaaaaatctgtatgcataaagaatgcaccactcaacttttttattcataagctaatatttttttaaagttacattaagattttttctcttttgcagctacatttgaaagtgatagaataaagagattttaatgagttatcactttttcagctgatatattcattttaatggcttttttgaaagttcctttttcatgaacacacccgagaaatcttaaatagacactttgcaatatttaagaacctaatgctgtttaattttggtacagcttccacattgcatgttcactttagtatttgcaatttgatatatttcatggtggcaaaatattagctctgttttgggacattttaaaatagaactatccttgttcgatagcataggaaaatgttctggtgattgtcagggtctcctaatatttatctcaattcttttataagtctatggaaattatttaattattttaaaacgtacacacttttcttgtaaatatgtcacatctgagttcaaaaaaattactttgaataccttaatatttgctgcatttttttccgtatatataacatgtcttctttcagaatgggaatatatgtgtgcctcccaacatttactgttaaagtgtgttatctttatatgtcaaactggttgaacactgtaatgagaataaactgcacagagtttattctga

SEQ ID NO: 319931 - DNA, 4046 bp, Homo sapiens
tgcccggggattcccggtggcgccggtcggagcgcctccctccagggctgtgcccgcggggcgcgcgtccccgggcatcctttcctggtgtttaatgcattttggcttcaggacttgccgaggccgaagccggctccgccctgggccctgaagtcgggcggtgtccgcgatttacctccgcaccttcggggcaggtggccagaggcagcgttgaaagcgacttgcccaaggtcacgcaggtggcaccggggaggcgaccgtctagacccaggtctttcgacgccgaggccagctgccaaccgcagagctttggggccgtcttgagtgtctggctcttgctgattgaattcctttggtgcagtttagcatgttcctctgtgttctgcatctcctgtagtgtaatgttcaagctcagaaatgccttatgtggatcgtcagaatcgcatttgtggttttctagacattgaagaaaatgaaaacagtgggaaatttcttcgaaggtacttcatactggataccagagaagatagtttcgtgtggtacatggataatccacagaacctaccttctggatcatcacgtgttggagccattaagcttacctacatttcaaaggttagcgatgctactaagctaaggccaaaggcggagttctgttttgttatgaatgcaggaatgaggaagtacttcctacaagccaatgatcagcaggacctagtggaatgggtaaatgtgttaaacaaagctataaaaattacagtaccaaagcagtcagactcacagcctaattctgataacctaagtcgccatggtgaatgtgggaaaaagcaagtgtcttacagaactgatattgttggtggcgtacccatcattactcccactcagaaagaagaagtaaatgaatgtggtgaaagtattgacagaaataatctgaaacggtcacaaagccatcttccttactttactcctaaaccacctcaagatagtgcggttatcaaagctggatattgtgtaaaacaaggagcagtgatgaaaaactggaagagaagatattttcaattggatgaaaacacaataggctacttcaaatctgaactggaaaaggaacctcttcgcgtaataccacttaaagaggttcataaagtccaggaatgtaagcaaagcgacataatgatgagggacaacctctttgaaattgtaacaacgtctcgaactttctatgtgcaggctgatagccctgaagagatgcacagttggattaaagcagtctctggcgccattgtagcacagcggggtcccggcagatctgcgtcttctgagcatccccccggtccttcagaatccaaacacgctttccgtcctaccaacgcagccgccgccacctcacattccacagcctctcgcagcaactctttggtctcaacctttaccatggagaagcgaggattttacgagtctcttgccaaggtcaagccagggaacttcaaggtccagactgtctctccaagagaaccagcttccaaagtgactgaacaagctctgttaagacctcaaagtaaaaatggccctcaggaaaaagattgtgacctagtagacttggacgatgcgagccttccggtcagtgacgtgtgaggcagaagcgcacggagcctgcctgcctctgccgtcctcagtttcctttcatgaggcttctagccaaagatgataaagggggaaatggtttttagtgcgtatattatactgcctcttaggtgtactctttataagctggtaaaccaagaatctagggagtggccaaactaaatataatttctttaaaaaagaaagaaaaaggaaaaatccaaaatatctcagtatcatctgtctgaagcattgtgtgttctcattcgggtggtaacaatgtatgtgtaatatttttttcttagtgattttgacagtttaaatgtttaacaacttaaagcattaaaaatgcttattaataactttggtcatttaaaaaatgctacaatgacttcctattaaaggttcaatatttacacattcttattggttgatattaccacatgaaatattgccagaccaagatacctaaactcatgatgtctgtggtgctgtaaaatttatactaaaatgtggactattttgaaattataaccatttttgatgccctgaatcttgaggtgacttattttgcatagaggatatggatagaccaacagtaagggttgtgggttataccggcatagagaaaagaagaaaactagaattgaaacaactgtgtcttagacatttgtttgaaaaagcttcatcaggccttggagcagtcactgctttattccgcaaaaattatttggtaggaaatttttgggagatctgattttcttatccaagttttgtaaatagttgttatttctatatttggattggtgaaagacctcaagtttatatgtaaagacataactgcccttagtcatgaaattgttgtgacctctactttttgtcactaatagcctacattcaagtgcctgtgttttttcatcttgtttaggaatgttttgagattaatgtgcttaaaagtcctacgtgactgattttaaacattgtgataaaattaattttcagtagaatagttgaatgtgttaagataggattttatgttagagataccagaatgctggtattctactacttgtgcaatatatatgttttaaaaaacaaatttgagaatacatttaatcatagggatatagatataagcacctctctaaagaatctttagtttccgacgttgaattatagaccagtttgagtaagtactgctttttttttttgggagacgggctctcgctctgttggctcaggctggagtgcagtggcgtgatctcagctcactacagcctccacctcgtgggttcaaacagttgtgctgcctcagcttcccgagtagctaggattacaggtgcatgccaccacacctggctaattttggtattttagtagagatggggtttcaccatgttggccaggctcgtctcgaactcctgacttcaggtgatccacccatctcagcctcccaaagtgctgggattacaggcgtgagccaccatgcccggcccataagtaccgttttgaggttcagtcttaaacatttgctttaagaaaacagtcttgaatttcacatgctgctatttttatattttgccattttacagtactgttttgttttgaattcatgcatatcattgaaaatttctcgttttcattttcttagatgacttcttgtctgagacagaaaaatttcctactacagcagtgcagtccagaggttaagatgtattagaattatacaatatcagtttaaaaatctgtatgcataaagaatgcaccactcaacttttttattcataagctaatatttttttaaagttacattaagattttttctcttttgcagctacatttgaaagtgatagaataaagagattttaatgagttatcactttttcagctgatatattcattttaatggcttttttgaaagttcctttttcatgaacacacccgagaaatcttaaatagacactttgcaatatttaagaacctaatgctgtttaattttggtacagcttccacattgcatgttcactttagtatttgcaatttgatatatttcatggtggcaaaatattagctctgttttgggacattttaaaatagaactatccttgttcgatagcataggaaaatgttctggtgattgtcagggtctcctaatatttatctcaattcttttataagtctatggaaattatttaattattttaaaacgtacacacttttcttgtaaatatgtcacatctgagttcaaaaaaattactttgaataccttaatatttgctgcatttttttccgtatatataacatgtcttctttcagaatgggaatatatgtgtgcctcccaacatttactgttaaagtgtgttatctttatatgtcaaactggttgaacactgtaatgagaataaactgcacagagtttattctga

SEQ ID NO: 319932 - DNA, 3937 bp, Homo sapiens
  misc_feature (44)..(44): n is a, c, g, or t
ggaatctcagccgccgtctgagggctgaggcagcgtggggacgngtgcgcagtgcgcgggctggccgtcgcggacgccgctccgggcagccgagcctctgtgggagccggggccgcggcggcgcgggtgctccgggccgaggccgcgtctggctcttgctgattgaattcctttggtgcagtttagcatgttcctctgtgttctgcatctcctgtagtgtaatgttcaagctcagaaatgccttatgtggatcgtcagaatcgcatttgtggttttctagacattgaagaaaatgaaaacagtgggaaatttcttcgaaggtacttcatactggataccagagaagatagtttcgtgtggtacatggataatccacagaacctaccttctggatcatcacgtgttggagccattaagcttacctacatttcaaaggttagcgatgctactaagctaaggccaaaggcggagttctgttttgttatgaatgcaggaatgaggaagtacttcctacaagccaatgatcagcaggacctagtggaatgggtaaatgtgttaaacaaagctataaaaattacagtaccaaagcagtcagactcacagcctaattctgataacctaagtcgccatggtgaatgtgggaaaaagcaagtgtcttacagaactgatattgttggtggcgtacccatcattactcccactcagaaagaagaagtaaatgaatgtggtgaaagtattgacagaaataatctgaaacggtcacaaagccatcttccttactttactcctaaaccacctcaagatagtgcggttatcaaagctggatattgtgtaaaacaaggagcagtgatgaaaaactggaagagaagatattttcaattggatgaaaacacaataggctacttcaaatctgaactggaaaaggaacctcttcgcgtaataccacttaaagaggttcataaagtccaggaatgtaagcaaagcgacataatgatgagggacaacctctttgaaattgtaacaacgtctcgaactttctatgtgcaggctgatagccctgaagagatgcacagttggattaaagcagtctctggcgccattgtagcacagcggggtcccggcagatctgcgtcttctatgcggcaggccagaaggctgtcgaacccttgtatacagaggtatacatcaagagctggtgaatgcagcacgagcatccccccggtccttcagaatccaaacacgctttccgtcctaccaacgcagccgccgccacctcacattccacagcctctcgcagcaactctttggtctcaacctttaccatggagaagcgaggattttacgagtctcttgccaaggtcaagccagggaacttcaaggtccagactgtctctccaagagaaccagcttccaaagtgactgaacaagctctgttaagacctcaaagtaaaaatggccctcaggaaaaagattgtgacctagtagacttggacgatgcgagccttccggtcagtgacgtgtgaggcagaagcgcacggagcctgcctgcctctgccgtcctcagtttcctttcatgaggcttctagccaaagatgataaagggggaaatggtttttagtgcgtatattatactgcctcttaggtgtactctttataagctggtaaaccaagaatctagggagtggccaaactaaatataatttctttaaaaaagaaagaaaaaggaaaaatccaaaatatctcagtatcatctgtctgaagcattgtgtgttctcattcgggtggtaacaatgtatgtgtaatatttttttcttagtgattttgacagtttaaatgtttaacaacttaaagcattaaaaatgcttattaataactttggtcatttaaaaaatgctacaatgacttcctattaaaggttcaatatttacacattcttattggttgatattaccacatgaaatattgccagaccaagatacctaaactcatgatgtctgtggtgctgtaaaatttatactaaaatgtggactattttgaaattataaccatttttgatgccctgaatcttgaggtgacttattttgcatagaggatatggatagaccaacagtaagggttgtgggttataccggcatagagaaaagaagaaaactagaattgaaacaactgtgtcttagacatttgtttgaaaaagcttcatcaggccttggagcagtcactgctttattccgcaaaaattatttggtaggaaatttttgggagatctgattttcttatccaagttttgtaaatagttgttatttctatatttggattggtgaaagacctcaagtttatatgtaaagacataactgcccttagtcatgaaattgttgtgacctctactttttgtcactaatagcctacattcaagtgcctgtgttttttcatcttgtttaggaatgttttgagattaatgtgcttaaaagtcctacgtgactgattttaaacattgtgataaaattaattttcagtagaatagttgaatgtgttaagataggattttatgttagagataccagaatgctggtattctactacttgtgcaatatatatgttttaaaaaacaaatttgagaatacatttaatcatagggatatagatataagcacctctctaaagaatctttagtttccgacgttgaattatagaccagtttgagtaagtactgctttttttttttgggagacgggctctcgctctgttggctcaggctggagtgcagtggcgtgatctcagctcactacagcctccacctcgtgggttcaaacagttgtgctgcctcagcttcccgagtagctaggattacaggtgcatgccaccacacctggctaattttggtattttagtagagatggggtttcaccatgttggccaggctcgtctcgaactcctgacttcaggtgatccacccatctcagcctcccaaagtgctgggattacaggcgtgagccaccatgcccggcccataagtaccgttttgaggttcagtcttaaacatttgctttaagaaaacagtcttgaatttcacatgctgctatttttatattttgccattttacagtactgttttgttttgaattcatgcatatcattgaaaatttctcgttttcattttcttagatgacttcttgtctgagacagaaaaatttcctactacagcagtgcagtccagaggttaagatgtattagaattatacaatatcagtttaaaaatctgtatgcataaagaatgcaccactcaacttttttattcataagctaatatttttttaaagttacattaagattttttctcttttgcagctacatttgaaagtgatagaataaagagattttaatgagttatcactttttcagctgatatattcattttaatggcttttttgaaagttcctttttcatgaacacacccgagaaatcttaaatagacactttgcaatatttaagaacctaatgctgtttaattttggtacagcttccacattgcatgttcactttagtatttgcaatttgatatatttcatggtggcaaaatattagctctgttttgggacattttaaaatagaactatccttgttcgatagcataggaaaatgttctggtgattgtcagggtctcctaatatttatctcaattcttttataagtctatggaaattatttaattattttaaaacgtacacacttttcttgtaaatatgtcacatctgagttcaaaaaaattactttgaataccttaatatttgctgcatttttttccgtatatataacatgtcttctttcagaatgggaatatatgtgtgcctcccaacatttactgttaaagtgtgttatctttatatgtcaaactggttgaacactgtaatgagaataaactgcacagagtttattctga

SEQ ID NO: 319933 - DNA, 4050 bp, Homo sapiens
  misc_feature (44)..(44): n is a, c, g, or t
ggaatctcagccgccgtctgagggctgaggcagcgtggggacgngtgcgcagtgcgcgggctggccgtcgcggacgccgctccgggcagccgagcctctgtgggagccggggccgcggcggcgcgggtgctccgggccgaggccgcgtctggctcttgctgattgaattcctttggtgcagtttagcatgttcctctgtgttctgcatctcctgtagtgtaatgttcaagctcagaaatgccttatgtggatcgtcagaatcgcatttgtggttttctagacattgaagaaaatgaaaacagtgggaaatttcttcgaaggtacttcatactggataccagagaagatagtttcgtgtggtacatggataatccacagaacctaccttctggatcatcacgtgttggagccattaagcttacctacatttcaaaggttagcgatgctactaagctaaggccaaaggcggagttctgttttgttatgaatgcaggaatgaggaagtacttcctacaagccaatgatcagcaggacctagtggaatgggtaaatgtgttaaacaaagctataaaaattacagtaccaaagcagtcagactcacagcctaattctgataacctaagtcgccatggtgaatgtgggaaaaagcaagtgtcttacagaactgatattgttggtggcgtacccatcattactcccactcagaaagaagaagtaaatgaatgtggtgaaagtattgacagaaataatctgaaacggtcacaaagccatcttccttactttactcctaaaccacctcaagatagtgcggttatcaaagctggatattgtgtaaaacaaggagcagtgatgaaaaactggaagagaagatattttcaattggatgaaaacacaataggctacttcaaatctgaactggaaaaggaacctcttcgcgtaataccacttaaagaggttcataaagtccaggaatgtaagcaaagcgacataatgatgagggacaacctctttgaaattgtaacaacgtctcgaactttctatgtgcaggctgatagccctgaagagatgcacagttggattaaagcagtctctggcgccattgtagcacagcggggtcccggcagatctgcgtcttctgagcatccccccggtccttcagaatccaaacacgctttccgtcctaccaacgcagccgccgccacctcacattccacagcctctcgcagcaactctttggtctcaacctttaccatggagaagcgaggattttacgagtctcttgccaaggtcaagccagggaacttcaaggtccagactgtctctccaagagaaccagcttccaaagtgactgaacaagctctgttaagacctcaaagtaaaaatggccctcaggaaaaagattgtgacctagtagacttggacgatgcgagccttccggtcagtgacgtgtgaggcagaagcgcacggagcctgcctgcctctgccgtcctcagtttcctttcatgaggcttctagccaaagatgataaagggggaaatggtttttagtgcgtatattatactgcctcttaggtgtactctttataagctggtaaaccaagaatctagggagtggccaaactaaatataatttctttaaaaaagaaagaaaaaggaaaaatccaaaatatctcagtatcatctgtctgaagcattgtgtgttctcattcgggtggtaacaatgtatgtgtaatatttttttcttagtgattttgacagtttaaatgtttaacaacttaaagcattaaaaatgcttattaataactttggtcatttaaaaaatgctacaatgacttcctattaaaggttcaatatttacacattcttattggttgatattaccacatgaaatattgccagaccaagatacctaaactcatgatgtctgtggtgctgtaaaatttatactaaaatgtggactattttgaaattataaccatttttgatgccctgaatcttgaggtgacttattttgcatagaggatatggatagaccaacagtaagggttgtgggttataccggcatagagaaaagaagaaaactagaattgaaacaactgtgtcttagacatttgtttgaaaaagcttcatcaggccttggagcagtcactgctttattccgcaaaaattatttggtaggaaatttttgggagatctgattttcttatccaagttttgtaaatagttgttatttctatatttggattggtgaaagacctcaagtttatatgtaaagacataactgcccttagtcatgaaattgttgtgacctctactttttgtcactaatagcctacattcaagtgcctgtgttttttcatcttgtttaggaatgttttgagattaatgtgcttaaaagtcctacgtgactgattttaaacattgtgataaaattaattttcagtagaatagttgaatgtgttaagataggattttatgttagagataccagaatgctggtattctactacttgtgcaatatatatgttttaaaaaacaaatttgagaatacatttaatcatagggatatagatataagcacctctctaaagaatctttagtttccgacgttgaattatagaccagtttgagtaagtactgctttttttttttgggagacgggctctcgctctgttggctcaggctggagtgcagtggcgtgatctcagctcactacagcctccacctcgtgggttcaaacagttgtgctgcctcagcttcccgagtagctaggattacaggtgcatgccaccacacctggctaattttggtattttagtagagatggggtttcaccatgttggccaggctcgtctcgaactcctgacttcaggtgatccacccatctcagcctcccaaagtgctgggattacaggcgtgagccaccatgcccggcccataagtaccgttttgaggttcagtcttaaacatttgctttaagaaaacagtcttgaatttcacatgctgctatttttatattttgccattttacagtactgttttgttttgaattcatgcatatcattgaaaatttctcgttttcattttcttagatgacttcttgtctgagacagaaaaatttcctactacagcagtgcagtccagaggttaagatgtattagaattatacaatatcagtttaaaaatctgtatgcataaagaatgcaccactcaacttttttattcataagctaatatttttttaaagttacattaagattttttctcttttgcagctacatttgaaagtgatagaataaagagattttaatgagttatcactttttcagctgatatattcattttaatggcttttttgaaagttcctttttcatgaacacacccgagaaatcttaaatagacactttgcaatatttaagaacctaatgctgtttaattttggtacagcttccacattgcatgttcactttagtatttgcaatttgatatatttcatggtggcaaaatattagctctgttttgggacattttaaaatagaactatccttgttcgatagcataggaaaatgttctggtgattgtcagggtctcctaatatttatctcaattcttttataagtctatggaaattatttaattattttaaaacgtacacacttttcttgtaaatatgtcacatctgagttcaaaaaaattactttgaataccttaatatttgctgcatttttttccgtatatataacatgtcttctttcagaatgggaatatatgtgtgcctcccaacatttactgttaaagtgtgttatctttatatgtcaaactggttgaacactgtaatgagaataaactgcacagagtttattctgaaaaaaaaaaaaaaaaaaacccaaaacaccccaaacacaaaaaaaacaaattgtgggcggcgcgcgcgccccccaaaaatttaaaacacacgggggggggcggccccagataaaccggccggtgccaagaaacccgggcaaagggggggtccccaaaaaaacgcgcggggccgggttggacaccg

SEQ ID NO: 319934 - DNA, 3610 bp, Homo sapiens
  misc_feature (1)..(1): n is a, c, g, or t
  misc_feature (12)..(12): n is a, c, g, or t
  misc_feature (18)..(18): n is a, c, g, or t
nggcccggcggncgggtngctccgggccaggcgcgtctggctcttgctgattgaattcctttggtgcagtttagcatgttcctctgtgttctgcatctcctgtagtgtaatgttcaagctcagaaatgccttatgtggatcgtcagaatcgcatttgtggttttctagacattgaagaaaatgaaaacagtgggaaatttcttcgaaggtacttcatactggataccagagaagatagtttcgtgtggtacatggataatccacagaacctaccttctggatcatcacgtgttggagccattaagcttacctacatttcaaaggtaccaaagcagtcagactcacagcctaattctgataacctaagtcgccatggtgaatgtgggaaaaagcaagtgtcttacagaactgatattgttggtggcgtacccatcattactcccactcagaaagaagaagtaaatgaatgtggtgaaagtattgacagaaataatctgaaacggtcacaaagccatcttccttactttactcctaaaccacctcaagatagtgcggttatcaaagctggatattgtgtaaaacaaggagcagtgatgaaaaactggaagagaagatattttcaattggatgaaaacacaataggctacttcaaatctgaactggaaaaggaacctcttcgcgtaataccacttaaagaggttcataaagtccaggaatgtaagcaaagcgacataatgatgagggacaacctctttgaaattgtaacaacgtctcgaactttctatgtgcaggctgatagccctgaagagatgcacagttggattaaagcagtctctggcgccattgtagcacagcggggtcccggcagatctgcgtcttctgagcatccccccggtccttcagaatccaaacacgctttccgtcctaccaacgcagccgccgccacctcacattccacagcctctcgcagcaactctttggtctcaacctttaccatggagaagcgaggattttacgagtctcttgccaaggtcaagccagggaacttcaaggtccagactgtctctccaagagaaccagcttccaaagtgactgaacaagctctgttaagacctcaaagtaaaaatggccctcaggaaaaagattgtgacctagtagacttggacgatgcgagccttccggtcagtgacgtgtgaggcagaagcgcacggagcctgcctgcctctgccgtcctcagtttcctttcatgaggcttctagccaaagatgataaagggggaaatggtttttagtgcgtatattatactgcctcttaggtgtactctttataagctggtaaaccaagaatctagggagtggccaaactaaatataatttctttaaaaaagaaagaaaaaggaaaaatccaaaatatctcagtatcatctgtctgaagcattgtgtgttctcattcgggtggtaacaatgtatgtgtaatatttttttcttagtgattttgacagtttaaatgtttaacaacttaaagcattaaaaatgcttattaataactttggtcatttaaaaaatgctacaatgacttcctattaaaggttcaatatttacacattcttattggttgatattaccacatgaaatattgccagaccaagatacctaaactcatgatgtctgtggtgctgtaaaatttatactaaaatgtggactattttgaaattataaccatttttgatgccctgaatcttgaggtgacttattttgcatagaggatatggatagaccaacagtaagggttgtgggttataccggcatagagaaaagaagaaaactagaattgaaacaactgtgtcttagacatttgtttgaaaaagcttcatcaggccttggagcagtcactgctttattccgcaaaaattatttggtaggaaatttttgggagatctgattttcttatccaagttttgtaaatagttgttatttctatatttggattggtgaaagacctcaagtttatatgtaaagacataactgcccttagtcatgaaattgttgtgacctctactttttgtcactaatagcctacattcaagtgcctgtgttttttcatcttgtttaggaatgttttgagattaatgtgcttaaaagtcctacgtgactgattttaaacattgtgataaaattaattttcagtagaatagttgaatgtgttaagataggattttatgttagagataccagaatgctggtattctactacttgtgcaatatatatgttttaaaaaacaaatttgagaatacatttaatcatagggatatagatataagcacctctctaaagaatctttagtttccgacgttgaattatagaccagtttgagtaagtactgctttttttttttgggagacgggctctcgctctgttggctcaggctggagtgcagtggcgtgatctcagctcactacagcctccacctcgtgggttcaaacagttgtgctgcctcagcttcccgagtagctaggattacaggtgcatgccaccacacctggctaattttggtattttagtagagatggggtttcaccatgttggccaggctcgtctcgaactcctgacttcaggtgatccacccatctcagcctcccaaagtgctgggattacaggcgtgagccaccatgcccggcccataagtaccgttttgaggttcagtcttaaacatttgctttaagaaaacagtcttgaatttcacatgctgctatttttatattttgccattttacagtactgttttgttttgaattcatgcatatcattgaaaatttctcgttttcattttcttagatgacttcttgtctgagacagaaaaatttcctactacagcagtgcagtccagaggttaagatgtattagaattatacaatatcagtttaaaaatctgtatgcataaagaatgcaccactcaacttttttattcataagctaatatttttttaaagttacattaagattttttctcttttgcagctacatttgaaagtgatagaataaagagattttaatgagttatcactttttcagctgatatattcattttaatggcttttttgaaagttcctttttcatgaacacacccgagaaatcttaaatagacactttgcaatatttaagaacctaatgctgtttaattttggtacagcttccacattgcatgttcactttagtatttgcaatttgatatatttcatggtggcaaaatattagctctgttttgggacattttaaaatagaactatccttgttcgatagcataggaaaatgttctggtgattgtcagggtctcctaatatttatctcaattcttttataagtctatggaaattatttaattattttaaaacgtacacacttttcttgtaaatatgtcacatctgagttcaaaaaaattactttgaataccttaatatttgctgcatttttttccgtatatataacatgtcttctttcagaatgggaatatatgtgtgcctcccaacatttactgttaaagtgtgttatctttatatgtcaaactggttgaacactgtaatgagaataaactgcacagagtttattctga

SEQ ID NO: 319935 - DNA, 1637 bp, Homo sapiens
  misc_feature (44)..(44): n is a, c, g, or t
ggaatctcagccgccgtctgagggctgaggcagcgtggggacgngtgcgcagtgcgcgggctggccgtcgcggacgccgctccgggcagccgagcctctgtgggagccggggccgcggcggcgcgggtgctccgggccgaggccgcgtctggctcttgctgattgaattcctttggtgcagtttagcatgttcctctgtgttctgcatctcctgtagtgtaatgttcaagctcagaaatgccttatgtggatcgtcagaatcgcatttgtggttttctagacattgaagaaaatgaaaacagtgggaaatttcttcgaaggtacttcatactggataccagagaagatagtttcgtgtggtacatggataatccacagaacctaccttctggatcatcacgtgttggagccattaagcttacctacatttcaaaggttagcgatgctactaagctaaggccaaaggcggagttctgttttgttatgaatgcaggaatgaggaagtacttcctacaagccaatgatcagcaggacctagtggaatgggtaaatgtgttaaacaaagctataaaaattacagtaccaaagcagtcagactcacagcctaattctgataacctaagtcgccatggtgaatgtgggaaaaagcaagtgtcttacagaactgatattgttggtggcgtacccatcattactcccactcagaaagaagaagtaaatgaatgtggtgaaagtattgacagaaataatctgaaacggtcacaaagccatcttccttactttactcctaaaccacctcaagatagtgcggttatcaaagctggatattgtgtaaaacaaggagcagtgatgaaaaactggaagagaagatattttcaattggatgaaaacacaataggctacttcaaatctgaactggaaaaggaacctcttcgcgtaataccacttaaagaggttcataaagtccaggaatgtaagcaaagcgacataatgatgagggacaacctctttgaaattgtaacaacgtctcgaactttctatgtgcaggctgatagccctgaagagatgcacagttggattaaagcagtctctggcgccattgtagcacagcggggtcccggcagatctgcgtcttctgagcatccccccggtccttcagaatccaaacacgctttccgtcctaccaacgcagccgccgccacctcacattccacagcctctcgcagcaactctttggtctcaacctttaccatggagaagcgaggattttacgagtctcttgccaaggtcaagccagggaacttcaaggtccagactgtctctccaagagaaccagcttccaaagtgactgaacaagctctgttaagacctcaaagtaaaaatggccctcaggaaaaagattgtgacctagtagacttggacgatgcgagccttccggtcagtgacgtgtgaggcagaagcgcacggagcctgcctgcctctgccgtcctcagtttcctttcatgaggcttctagccaaagatgataaagggggaaatggtttttagtgcgtatattatactgcctcttaggtgtactctttataagctggtaaaccaagaatctagggagtggccaaactaaatataatttcttta

SEQ ID NO: 319936 - DNA, 2111 bp, Homo sapiens
  misc_feature (44)..(44): n is a, c, g, or t
ggaatctcagccgccgtctgagggctgaggcagcgtggggacgngtgcgcagtgcgcgggctggccgtcgcggacgccgctccgggcagccgagcctctgtgggagccggggccgcggcggcgcgggtgctccgggccgaggccgcgtctggctcttgctgattgaattcctttggtgcagtttagcatgttcctctgtgttctgcatctcctgtagtgtaatgttcaagctcagaaatgccttatgtggatcgtcagaatcgcatttgtggttttctagacattgaagaaaatgaaaacagtgggaaatttcttcgaaggtacttcatactggataccagagaagatagtttcgtgtggtacatggataatccacagaacctaccttctggatcatcacgtgttggagccattaagcttacctacatttcaaaggttagcgatgctactaagctaaggccaaaggcggagttctgttttgttatgaatgcaggaatgaggaagtacttcctacaagccaatgatcagcaggacctagtggaatgggtaaatgtgttaaacaaagctataaaaattacagtaccaaagcagtcagactcacagcctaattctgataacctaagtcgccatggtgaatgtgggaaaaagcaagtgtcttacagaactgatattgttggtggcgtacccatcattactcccactcagaaagaagaagtaaatgaatgtggtgaaagtattgacagaaataatctgaaacggtcacaaagccatcttccttactttactcctaaaccacctcaagatagtgcggttatcaaagctggatattgtgtaaaacaaggagcagtgatgaaaaactggaagagaagatattttcaattggatgaaaacacaataggctacttcaaatctgaactggaaaaggaacctcttcgcgtaataccacttaaagaggttcataaagtccaggaatgtaagcaaagcgacataatgatgagggacaacctctttgaaattgtaacaacgtctcgaactttctatgtgcaggctgatagccctgaagagatgcacagttggattaaagcagtctctggcgccattgtagcacagcggggtcccggcagatctgcgtcttctatgcggcaggccagaaggctgtcgaacccttgtatacagaggtatacatcaagagctggtgaatgcagcacgtatgtgggctctcacgcaaacgtgccttcttagtggagggcccagacttactacttacaactgatcatagaaagttgagttaaccaaactgccttttgcagttatcataactgattttgtcaatactaacgcaaactgtttcactgtagtcatcaggttggatatgtgtatttaaaaataaaaaataaaacatacaactttactaacagaaagagacattaacatataaaaattaatatactcaactgctgcaagagtttcaattttatattatgtatttaaaaatttttaagatacaatacttacgaaatgcaccattgttctaataatatatgcaaactaatgcatgcatatgcattggataaactgtacattactatagtttgcatggcatttaaaaatctctgaaatttagccatctaataggactctgtagtgttttggtaatttgtagcactttgatttcaaagccactggtatcataaatgaatataatatactagtatatagcaatgtatttagaatggtcatatttaaggatattttcagatttgatctagttagaagcatattgaaattaacattctcaactactaattatttcaccacagtttaaaatgtgataaatgtgtaccctttgttacctttaaaatattaagccatatgaatatatgacctattcagaactaaaattaagtaaaaaatgaaaagactgtgctattattggttgcagtgaaattcagggaagtaaaaactaagtcttatcagcagaataatgtttgaaagatgattcgtgcttattaaagaaatatggcctttcattgttatagtctatattttaatttttttcattctgaaatatgtgggataacacgttcgcgaggggatcctctcagagtcgc

SEQ ID NO: 319937 - DNA, 524 bp, Homo sapiens
atccattcatttccctatggaaaacaatgatttaatctaaacagcaacaaggttctcaaaaatattccagaagtttcatcttcacaaattactggaaaacataattattattctgccacatttacctttgaaaacagaaaaaaaaagacaacagaaaatctgaatgaattataatagcaaacaagatgccaaactccacactaaaaattacagtatgcccaattcaactgaggagtagtgacataattaccttagtgctccacaacacagatggatgcactttttcttaatctattttattaaaactgcaacctagaacaacttattaaatacacactaggcaatagtgcaaacataaacaaatgcatttatttcactgatacgtgcaatgctgcttttttgcaaagggcgtatattatcacaaaacatttgccatctatgataacaatagctgccatgaacctaggagaaaagtgaaaaaagttagcatctgttatgcctgtatttaagacttaatgaggcca

SEQ ID NO: 319938 - DNA, 5093 bp, Homo sapiens
ttcacattaaaatattttatagcctcctgtactggtaagtagtgggattgcacctgtgaatagactctgcactcaagcctgagcaacatagtgagaccctgtccctaaataataataataatattttatagccattatggatgaggattgctcagtaatagatggccagttgttcagtagttaaaaatgaaccttggctttaaggaaatttataagaaaacatggtaagactaccactatataacatcacattctaaacagaatttatgtcccatgtattgacctttaagtttttaacattaaaccgtaagtagctattttaagaaaatttaagagtttgttttgatttgaaaaattaaattattttaaaattagctaagaccattttaaaataaattatcttaaaattatagataatttattcaaacaaaaacaaattgtcaaaaccaaattgattaccctttctcaacaaaatctcagcatcttcctcaaattcactcttcccccaaatctcactattctagcaaattcctccactttcctgtaaagtcataatcaatgaactatacccccaatgttaattgatatatttaaccatatcttttgctccttggttcttctgatctgtagtttactctccaccctgttgttcccggccttgtctaacttgaaaaataattttcaaattccctttcttttctgtacacactctctatgtaggatttgtttgtatgtttgtttgtttttaaccttcctggcattcttggatggcctttgagtctgtgaactctgccgaaattgagtatacaattttgtatctgtggacattttgctggaaagaagttctgtgttttctttaggttgaagagtctataaaccaacccccctcgccccgtgccacaactccaaaaactgaaaagataagcactgccttgatgatccgtatggggaactaagtacccttagaaagaggccctcagaagagtcttctcttaagaagataaagaaggtagtggaaacgaacttcctgagcttttcaggctctaatggctgaagaatcaagaaagccttcagccccatccccaccagaccagactcctgaagaggatcttgtaatcgtcaaggtagaggaggatcatggttgggaccaggaatctagtctgcatgaaagtaaccctcttggccaagaagtgttccgcctgcgcttcaggcagttacgctaccaggagacactaggaccccgagaagctctgatccaactacgggccctttgccatcagtggctgaggccagatttgaacaccaaggaacagatcctggagctgctggtgctggagcagttcttgaccatcctacctgaggagctccagacactggttaaggaacatcagctagagaacggagaggaggtggtgaccctattagaggatttggaaaggcagattgatatactaggacgaccagtctcagctcgcgtacatggacatagggtactctgggaggaggtagtacattcagcatctgcaccagagcctccaaatactcagctccaatctgaggcaacccaacataaatctccagtgccccaagagtcacaagagagagccatgtctacttcccagagtcctactcgttcccagaaaggaagttctggagaccaggaaatgacagctacacttctcacagcagggttccagactttggagaagattgaagacatggctgtgtcccttattcgagaggagtggcttcttgatccatcacagaaggatctgtgtagagataacaggccagaaaatttcagaaacatgttctccctgggtggtgagaccaggagtgagaacagggaattagcttcaaaacaggtaatatctactggaatccagccacatggagagacagctgccaaatgcaacggggatgttatcaggggtcttgagcatgaagaagcccgagaccttctgggcagattagagaggcagcggggaaatcccacacaagagagacgacataaatgtgatgaatgtgggaaaagctttgctcagagctcaggccttgttcgccactggagaatccacactggggagaaaccctatcagtgtaatgtgtgtggtaaagccttcagttacaggtcagcccttctttcacatcaggatatccacaacaaagtaaaacgctatcactgtaaggagtgtggcaaagccttcagtcagaacacaggcctgattctgcaccagagaatccacactggggagaagccatatcagtgcaatcagtgtgggaaggctttcagtcagagtgcgggccttattctgcaccagagaatccacagtggagagagaccctatgaatgtaatgagtgtgggaaagctttcagtcatagctcacacctcattggacatcagagaatccacactggggagaagccctatgagtgtgatgagtgtgggaaaaccttcaggcggagctcacatcttattggtcatcagaggagccacactggggagaaaccctacaaatgcaatgagtgtgggagggccttcagtcagaagtcaggccttattgaacatcagagaatccacactggagaaagaccctataaatgtaaagaatgtgggaaagctttcaatgggaacactggtctcattcaacacctgagaattcacacaggggagaagccctaccaatgtaatgagtgtgggaaagcctttattcagaggtcaagtctcattcgacatcagagaatccacagtggtgaaaaatctgaatccataagcgtttaggaacaacatcagttagagtttgagcattattcagcattagggaaaccacacactggtgagaggtctttcagtgtactaaaaggcagaaaggtcatcacaactttagtgtcagaatctatagtggtggcaaagttaggatagctctttagtaatttgggcccagtgccttggtgaaggttgattaccttgactgtctttgaaagtatctgatggagctcctgatgacctaatgtatcctttagaaatttaaaatagcattagagcaagttgcttgtcatggcttgaagagcttaactttgtcttttgggtgagtagctataggtttgagagaggctggctactcctagttcctgtgcttcttcccatctcctgtgatccccctctcccatttattcccttgaaggtgcccttgtattcctaatctgatctaagaagctgctgtagagtcagaagtagcttctgtgtgaaacttatatttgtatgtagctttctaggaaaattttacagacacttaaagtatttatgcttaagtgtgcatttttttattctaatattccttctagtcagtggaaatttgtattcccatacaaactcagaatgctatatttttaacagcactccagcatttttcttcatgtatcaccttcactgactccattgagtcattgagcatctgtacatatccttcaccacccccagtcccagcacctgtgtcagtaaagaaagtggacacattagtaatggttatgggagtaatacagagaaagaggtgagtggagactcagcccagctgctcttgagcttggatagttatacattttggtgacttctgactctccttccacctccccactgtacactgtggtacagatagttggcactatcctagttatggcatcaggtaggagaaggagacgaagatgctttaggaagataaaaaccttacaaagaatgtatactcatcttttttggcccattacaatactgctttctcaggttcttaacagcctgtgcaaactccctgactagatggtctgtcactcctatcattaaccttgcacccatctctttagatggcctcagcacctcactcgttattctccatctgtttcttgccattagtttatatgactttaatatccacagtggtaatgtaataccttacctcacaggttttcattcttttgaactctggtgcactccatctgtaatccatgtctataatctaccaacaaagatgtactcttaaactcagtatcaccaggcactatatttcatctttgaggcttttgttataccaaggaatactatataaagtaatgagactggtttaaagtaacatgccagaacttacgcatccaatgtgggttgtcacttgttattcccaagtactattattccatactactatattcttccaaatatttggaacactcttagaattcccatttaataaaccatatgagaaaaccctctattactcttacactttagttttaccatttgagtagccacttattcaccagagttggaattgagaaattttgggctttccaaaattaacctttaaacttaaaattgattacattgagcctattcagaaaaaaaattatataggttctgatgaaagcttcataatttcaccctgtgactatcctgaaaagaaataataatcattttatgattgatgggccaaaaaaagcaatcaaagtcttacgtcatagaggaccaccttttggatcataaattctttccctataacattccttctctgcctctctatggcccactttgaccactaacaacatcagaattatctacatcaatttcattgagccattggtgaatgaagacacccatcacttgtcatgttggtttccaacagtcctttcgattatcctttattttcttatcctcccttctcttgtttcttttatttataagttaccattcctagtttctttgtacttgaaattttaagaaaccagaaacaagtaaatctggttgtatctagatctttgctctgtgtttcagttgtgccttaccctctgtaagatactgattcttcctggggccagtattaccttgtatgcaaatattacatatgatgggtgcattgtcagagggaaaatatatgtgtatgtacacatgtgtatgtacacacacacacacacctgccatacactttagaagaacgcttctcttctattccaataaaaagtccttttagcaatgcaacatattaacaaaattgggtgcattcagggtggtatggccatagaccagagcaacacaccatgaaatgtatac

SEQ ID NO: 319939 - DNA, 369 bp, Homo sapiens
tctgtgaactctgccgaaattgagtatacaattttgtatctgtggacattttgctggaaagaagttctgtgttttctttaggttgaagagtctataaaccaacccccctcgccccgtgccacaactccaaaaactgaaaagataagcactgccttgatgatccgtatggggaactgtatgtacagtaatctgatttttttcctaagtacctatctcttctttgtggactataggtctctggttttatcttgatgttagcatctcatgacaactggtttagggtatgctacctttacttacactcttcttcattctctacagtatctttgaaatacaaagataatggtcacctctgtcaacaaacatttg

SEQ ID NO: 319940 - DNA, 4231 bp, Homo sapiens
gctttcatcgcctttactccccgaccttccttcgagtctgtttatccgttgcagcctcccttccccacgacggggcgcctctgcaactcacaaagtacccttagaaagaggccctcagaagagtcttctcttaagaagataaagaaggtagtggaaacgaacttcctgagcttttcaggctctaatggctgaagaatcaagaaagccttcagccccatccccaccagaccagactcctgaagaggatcttgtaatcgtcaaggtagaggaggatcatggttgggaccaggaatctagtctgcatgaaagtaaccctcttggccaagaagtgttccgcctgcgcttcaggcagttacgctaccaggagacactaggaccccgagaagctctgatccaactacgggccctttgccatcagtggctgaggccagatttgaacaccaaggaacagatcctggagctgctggtgctggagcagttcttgaccatcctacctgaggagctccagacactggttaaggaacatcagctagagaacggagaggaggtggtgaccctattagaggatttggaaaggcagattgatatactaggacgaccagtctcagctcgcgtacatggacatagggtactctgggaggaggtagtacattcagcatctgcaccagagcctccaaatactcagctccaatctgaggcaacccaacataaatctccagtgccccaagagtcacaagagagagccatgtctacttcccagagtcctactcgttcccagaaaggaagttctggagaccaggaaatgacagctacacttctcacagcagggttccagactttggagaagattgaagacatggctgtgtcccttattcgagaggagtggcttcttgatccatcacagaaggatctgtgtagagataacaggccagaaaatttcagaaacatgttctccctgggtggtgagaccaggagtgagaacagggaattagcttcaaaacaggtaatatctactggaatccagccacatggagagacagctgccaaatgcaacggggatgttatcaggggtcttgagcatgaagaagcccgagaccttctgggcagattagagaggcagcggggaaatcccacacaagagagacgacataaatgtgatgaatgtgggaaaagctttgctcagagctcaggccttgttcgccactggagaatccacactggggagaaaccctatcagtgtaatgtgtgtggtaaagccttcagttacaggtcagcccttctttcacatcaggatatccacaacaaagtaaaacgctatcactgtaaggagtgtggcaaagccttcagtcagaacacaggcctgattctgcaccagagaatccacactggggagaagccatatcagtgcaatcagtgtgggaaggctttcagtcagagtgcgggccttattctgcaccagagaatccacagtggagagagaccctatgaatgtaatgagtgtgggaaagctttcagtcatagctcacacctcattggacatcagagaatccacactggggagaagccctatgagtgtgatgagtgtgggaaaaccttcaggcggagctcacatcttattggtcatcagaggagccacactggggagaaaccctacaaatgcaatgagtgtgggagggccttcagtcagaagtcaggccttattgaacatcagagaatccacactggagaaagaccctataaatgtaaagaatgtgggaaagctttcaatgggaacactggtctcattcaacacctgagaattcacacaggggagaagccctaccaatgtaatgagtgtgggaaagcctttattcagaggtcaagtctcattcgacatcagagaatccacagtggtgaaaaatctgaatccataagcgtttaggaacaacatcagttagagtttgagcattattcagcattagggaaaccacacactggtgagaggtctttcagtgtactaaaaggcagaaaggtcatcacaactttagtgtcagaatctatagtggtggcaaagttaggatagctctttagtaatttgggcccagtgccttggtgaaggttgattaccttgactgtctttgaaagtatctgatggagctcctgatgacctaatgtatcctttagaaatttaaaatagcattagagcaagttgcttgtcatggcttgaagagcttaactttgtcttttgggtgagtagctataggtttgagagaggctggctactcctagttcctgtgcttcttcccatctcctgtgatccccctctcccatttattcccttgaaggtgcccttgtattcctaatctgatctaagaagctgctgtagagtcagaagtagcttctgtgtgaaacttatatttgtatgtagctttctaggaaaattttacagacacttaaagtatttatgcttaagtgtgcatttttttattctaatattccttctagtcagtggaaatttgtattcccatacaaactcagaatgctatatttttaacagcactccagcatttttcttcatgtatcaccttcactgactccattgagtcattgagcatctgtacatatccttcaccacccccagtcccagcacctgtgtcagtaaagaaagtggacacattagtaatggttatgggagtaatacagagaaagaggtgagtggagactcagcccagctgctcttgagcttggatagttatacattttggtgacttctgactctccttccacctccccactgtacactgtggtacagatagttggcactatcctagttatggcatcaggtaggagaaggagacgaagatgctttaggaagataaaaaccttacaaagaatgtatactcatcttttttggcccattacaatactgctttctcaggttcttaacagcctgtgcaaactccctgactagatggtctgtcactcctatcattaaccttgcacccatctctttagatggcctcagcacctcactcgttattctccatctgtttcttgccattagtttatatgactttaatatccacagtggtaatgtaataccttacctcacaggttttcattcttttgaactctggtgcactccatctgtaatccatgtctataatctaccaacaaagatgtactcttaaactcagtatcaccaggcactatatttcatctttgaggcttttgttataccaaggaatactatataaagtaatgagactggtttaaagtaacatgccagaacttacgcatccaatgtgggttgtcacttgttattcccaagtactattattccatactactatattcttccaaatatttggaacactcttagaattcccatttaataaaccatatgagaaaaccctctattactcttacactttagttttaccatttgagtagccacttattcaccagagttggaattgagaaattttgggctttccaaaattaacctttaaacttaaaattgattacattgagcctattcagaaaaaaaattatataggttctgatgaaagcttcataatttcaccctgtgactatcctgaaaagaaataataatcattttatgattgatgggccaaaaaaagcaatcaaagtcttacgtcatagaggaccaccttttggatcataaattctttccctataacattccttctctgcctctctatggcccactttgaccactaacaacatcagaattatctacatcaatttcattgagccattggtgaatgaagacacccatcacttgtcatgttggtttccaacagtcctttcgattatcctttattttcttatcctcccttctcttgtttcttttatttataagttaccattcctagtttctttgtacttgaaattttaagaaaccagaaacaagtaaatctggttgtatctagatctttgctctgtgtttcagttgtgccttaccctctgtaagatactgattcttcctggggccagtattaccttgtatgcaaatattacatatgatgggtgcattgtcagagggaaaatatatgtgtatgtacacatgtgtatgtacacacacacacacacctgccatacactttagaagaacgcttctcttctattccaataaaaagtccttttagcaatgcaacatattaacaaaattgggtgcattcagggtggtatggccatagaccagagcaacacaccatgaaatgtatac

SEQ ID NO: 319941 - DNA, 598 bp, Homo sapiens
gtgtcagaaacatttaaataagataaacataaaattgtccatagcaattatctctaggaagagagactgcaagaatggaaaatgaaagtaatatggggaagggcttttgcctatgtgtgcatgtgtgcgtgtgtgtgtatgtgtgtgtgctggggtttttgtaataacaaaaattccttaaaaggcattcaaagtctgatcagacttaatttttatctgcatccatgagcttggcataaggattacacatttcattatctaataaaggggacaccattaaggaaaagagcaacattctctctgcccctttggcctctccaattgaactaaaacaagacttattaagtttttacccactccaaaacaaatgtttccatttcatcagaagcaagagagaaaaatcttaaaggacattaaccttcaagcagctccgaagggaaaggaatattagaacttgagaaataaaatggagaatgaaactcccttgacactcttcaggtaacaaggagaaccacacagttaaagagctattccctcctcatagtgaaaccctgaggtggaaactgatgaaaagtgtcccagagagcagcctgctcgc

SEQ ID NO: 319942 - DNA, 405 bp, Homo sapiens
agaggcagacacagatagacagagagagagaaaatgaattagtgatgtgctggcgtccactgacatctaaccatgtaagtcaatttagccatgataggagtatagttacaccatgaaaatcacaacaccacacacacacgtgcacacacacacataaatcaggtttatttgtttttcagagagtttgttgctaaacatttaccagcacaccctaaagagaggagaaaaaaaatatgtgaagaaaaagaaaaaaggagaaatcaaagaaagagaaagcaaaaagagcatatttggatgtggaagaagaaaaagacaagttgaactgtcttaaattccagcccatgaaagccttcctttttttaaataaagtttttgttttgttttggtctggaatgtttttctttt

SEQ ID NO: 319943 - DNA, 3419 bp, Homo sapiens
cgtgcctcggtttccgttagcaaccagaggcttctaaacaacctaccctccttccccattttctgtggtccaactaccctcggcgatcccaggcttggcggggcaccgcctggcctctcccgttcctttaggctgccgccgctgcctgccgccatggcagagttgggcctaaatgagcaccatcaaaatgaagttattaattatatgcgttttgctcgttcaaagagaggcttgagactcaaaactgtagattcctgcttccaagacctcaaggagagcaggctggtggaggacaccttcaccatagatgaagtctctgaagtcctcaatggattacaagctgtggttcatagtgaggtggaatctgagctcatcaacactgcctataccaatgtgttacttctgcgacagctgtttgcacaagctgagaagtggtatcttaagctacagacagacatctctgaacttgaaaaccgagaattattagaacaagttgcagaatttgaaaaagcagagattacatcttcaaacaaaaagcccatcttagatgtcacaaagccaaaacttgctccacttaatgaaggtggaacagcagaactcctaaacaaggaaattttaagacttcaagaagagaatgagaaattgaagtcaaggttgaagaccattgaaatacaggctacaaatgcactggatgaaaagtcaaaactagaaaaagcactgcaagatttacagcttgatcaaggaaatcaaaaggattttataaaggcccaagacttaagtaacttagaaaacactgtcgctgccttaaagagtgagtttcagaagacacttaatgacaagacagaaaaccagaagtcactggaggagaatctggcgacagccaagcacgatctactcagggttcaggagcagctgcacatggctgaaaaggaattagaaaagaaatttcagcaaacagcagcttatcgaaacatgaaagagattcttaccaagaagaatgaccaaatcaaagatctgaggaaaagactggcacaatatgaacctgaagattaaaactgaagatttcctctggaagctaccacatgcaaacatacaagcagtctcacctcaggcatgtattttgaaaagcattttgtcatatcccctctccttatttttctaatatttagactttgaatatttagaactagagttcctattttcagctagttgaaaacagagaaaacctagtgattctgtctggtcatcccacacacctctctactgagtgctccagagtcttagctcacatgcactgagaattctttacagcaaagaagagatttttagagtgggaagaagaggcttatccttctgcattagtataaagagtctgtatttttaataaatgttaaataagctaacaatgtttgtacttatgcattccccatgggtaaaaataaataatagcattgttaaagatagttattaccaaaaaaagagagttattacaaataaatatgtctctttatttttaaaaatgaaatcttaattcatttactctatttgatgataaactataaattcattgaaaatgtgaattctattatgggtagcctttttaccaattataaggaaaatttacagcagtgaacatgaacattcacttagcttcctcagtctctccatcttaaagatcatttatcagaggaggttcagcattttttgcagcataacttttcatgagtctgtattactaatggataagtcaaatccatcctgcacttctacagtttagaaagtatctggactcagaataaatgtaatatttatacttgtttccagaatgttattttacattttatgttcaataagaacactttttaaaagacgtatattcaacataaaatcagctatcagacttcagattagactttatttatgtgggtctataataattgtattttcaagaggttttcactatatttgtattggcctggttttctcagacgattttggacaaatcattagaaactgggcatcatatccacagttatgtaaggcagtgatatactataaggataaacaaagtcaagtccataaagcaataatccctcagaaggaaagtccttacttttcacatattaatatttagtaatttttcctgcttctaaaagtgagagtatcacaccctaaatgaacactgtctactaagagacatcattccatttccacaaatgaagattttattccaagaaacgagtttactgattggagcatagggcttgttgttatttttattcaagcttttagtaatagccttgaatttattatttttcttataggctttttgttaaaatagtgaaggaacaaatgttaaagggtaagataatttccctgcaaaaggacacagaaggcagtcttaagaagatgaatggatgagagaagggagagaataaaatgcaataacgagccagcatttactatgtattttctcctcacctgtctctccatatttaggtcacttaccagtttctgtgcccttttggagcttttgttgagggcttcattctcaccctgtatttctttagccctaaattgacactctctccaaaaatccattccattgtctgtggaccaagatgttctatgtaattcagaagcagaactcttggctaaagggctagtgtggccttcagaaaccattcaattattttctccctacacctttgtcagtttgaaaccagtgaggaaaaaaggtatgttgataagaaacctatattgctaggtagaatttgtacttgttttcttggtagcagttttgaaatattctgtacagtacgttcctattgtttaataataaattcaaaaatatttctaaaaccttaaaaccaactatgccaagcattaagataaacaaatatgatgttctttgacgtaaatcaacgtgatgattctttcacatgtaaacacattttagtgtttctggtttgtcatttttgttgttgttgttgttgttgttatttactctataccctttagcaaaatacagttttaaatttttattgtttttagtagtttcccaactttaagacttatctaatttaactgagaaagaaagcctttttcatatatatatatattggatttctaaggatggtggtttgagccttgattagacttttgatgtgctaagccagacaggcagtctgtacattgatggccatcacaatgcagctttggtttaatttaattcaggcctgctgctgagttatgcacagactttttgttgaccaaaataaaatataaagggttttcttctgtttgacatttgtgttcattttttctctttatgtattacattttaacctatattaaataaatgtttaaatgataatttgcttatgtcttataaaactcagcataagaaaaaaaaaact

SEQ ID NO: 319944 - DNA, 3375 bp, Homo sapiens
cgtgcctcggtttccgttagcaaccagaggcttctaaacaacctaccctccttccccattttctgtggtccaactaccctcggcgatcccaggcttggcggggcaccgcctggcctctcccgttcctttaggctgccgccgctgcctgccgccatggcagagttgggcctaaatgagcaccatcaaaatgaagttattaattatatgcgttttgctcgttcaaagagaggcttgagactcaaaactgtagattcctgcttccaagacctcaaggagagcaggctggtggaggacaccttcaccatagatgaagtctctgaagtcctcaatggattacaagctgtggttcatagtgaggtggaatctgagctcatcaacactgcctataccaatgtgttacttctgcgacagctgtttgcacaagctgagaagtggtatcttaagctacagacagacatctctgaacttgaaaaccgagaattattagaacaagttgcagaatttgaaaaagcagagattacatcttcaaacaaaaagcccatcttagatgtcacaaagccaaaacttgctccacttaatgaaggtggaacagcagaactcctaaacaaggaaattttaagacttcaagaagagaatgagaaattgaagtcaaggttgaagaccattgaaatacaggctacaaatgcactggatgaaaagtcaaaactagaaaaagcactgcaagatttacagcttgatcaaggaaatcaaaaggattttataaaggcccaagacttaagtaacttagaaaacactgtcgctgccttaaagagtgagtttcagaagacacttaatgacaagacagaaaaccagaagtcactggaggagaatctggcgacagccaagcacgatctactcagggttcaggagcagctgcacatggctgaaaaggaattagaaaagaaatttcagcaaacagcagcttatcgaaacatgaaagagattcttaccaagaagaatgaccaaatcaaagatctgaggaaaagactggcacaatatgaacctgaagattaaaactgaagatttcctctggaagctaccacatgcaaacatacaagcagtctcacctcaggcatgtattttgaaaagcattttgtcatatcccctctccttatttttctaatatttagactttgaatatttagaactagagttcctattttcagctagttgaaaacagagaaaacctagtgattctgtctggtcatcccacacacctctctactgagtgctccagagtcttagctcacatgcactgagaattctttacagcaaagaagagatttttagagtgggaagaagaggcttatccttctgcattagtataaagagtctgtatttttaataaatgttaaataagctaacaatgtttgtacttatgcattccccatgggtaaaaataaataatagcattgttaaagatagttattaccaaaaaaagagagttattacaaataaatatgtctctttatttttaaaaatgaaatcttaattcatttactctatttgatgataaactataaattcattgaaaatgtgaattctattatgggtagcctttttaccaattataaggaaaatttacagcagtgaacatgaacattcacttagcttcctcagtctctccatcttaaagatcatttatcagaggaggttcagcattttttgcagcataacttttcatgagtctgtattactaatggataagtcaaatccatcctgcacttctacagtttagaaagtatctggactcagaataaatgtaatatttatacttgtttccagaatgttattttacattttatgttcaataagaacactttttaaaagacgtatattcaacataaaatcagctatcagacttcagattagactttatttatgtgggtctataataattgtattttcaagaggttttcactatatttgtattggcctggttttctcagacgattttggacaaatcattagaaactgggcatcatatccacagttatgtaaggcagtgatatactataaggataaacaaagtcaagtccataaagcaataatccctcagaaggaaagtccttacttttcacatattaatatttagtaatttttcctgcttctaaaagtgagagtatcacaccctaaatgaacactgtctactaagagacatcattccatttccacaaatgaagattttattccaagaaacgagtttactgattggagcatagggcttgttgttatttttattcaagcttttagtaatagccttgaatttattatttttcttataggctttttgttaaaatagtgaaggaacaaatgttaaagggtaagataatttccctgcaaaaggacacagaaggcagtcttaagaagatgaatggatgagagaagggagagaataaaatgcaataacgagccagcatttactatgtattttctcctcacctgtctctccatatttaggtcacttaccagtttctgtgcccttttggagcttttgttgagggcttcattctcaccctgtatttctttagccctaaattgacactctctccaaaaatccattccattgtctgtggaccaagatgttctatgtaattcagaagcagaactcttggctaaagggctagtgtggccttcagaaaccattcaattattttctccctacacctttgtcagtttgaaaccagtgaggaaaaaaggtatgttgataagaaacctatattgctaggtagaatttgtacttgttttcttggtagcagttttgaaatattctgtacagtacgttcctattgtttaataataaattcaaaaatatttctaaaaccttaaaaccaactatgccaagcattaagataaacaaatatgatgttctttgacgtaaatcaacgtgatgattctttcacatgtaaacacattttagtgtttctggtttgtcatttttgttgttgttgttgttgttgttatttactctataccctttagcaaaatacagttttaaatttttattgtttttagtagtttcccaactttaagacttatctaatttaactgagaaagaaagcctttttcatatatatatatattggatttctaaggatggtggtttgagccttgattagacttttgatgtgctaagccagacaggcagtctgtacattgatggccatcacaatgcagctttggtttaatttaattcaggcctgctgctgagttatgcacagactttttgttgaccaaaataaaatataaagggttttcttctgtttgacatttgtgttcattttttctctttatgtattacattttaacctatattaaataaatgtttaaatgata

SEQ ID NO: 319945 - DNA, 2286 bp, Homo sapiens
  misc_feature (48)..(48): n is a, c, g, or t
gaagcggccggcctactaaataattataataaacgcgcgggttcgganctccttccttaattttttcaaaaaattaaagttttttgaatatttagaactagagttcctattttcagctagttgaaaacagagaaaacctagtgattctgtctggtcatcccacacacctctctactgagtgctccagagtcttagctcacatgcactgagaattctttacagcaaagaagagatttttagagtgggaagaagaggcttatccttctgcattagtataaagagtctgtatttttaataaatgttaaataagctaacaatgtttgtacttatgcattccccatgggtaaaaataaataatagcattgttaaagatagttattaccaaaaaaagagagttattacaaataaatatgtctctttatttttaaaaatgaaatcttaattcatttactctatttgatgataaactataaattcattgaaaatgtgaattctattatgggtagcctttttaccaattataaggaaaatttacagcagtgaacatgaacattcacttagcttcctcagtctctccatcttaaagatcatttatcagaggaggttcagcattttttgcagcataacttttcatgagtctgtattactaatggataagtcaaatccatcctgcacttctacagtttagaaagtatctggactcagaataaatgtaatatttatacttgtttccagaatgttattttacattttatgttcaataagaacactttttaaaagacgtatattcaacataaaatcagctatcagacttcagattagactttatttatgtgggtctataataattgtattttcaagaggttttcactatatttgtattggcctggttttctcagacgattttggacaaatcattagaaactgggcatcatatccacagttatgtaaggcagtgatatactataaggataaacaaagtcaagtccataaagcaataatccctcagaaggaaagtccttacttttcacatattaatatttagtaatttttcctgcttctaaaagtgagagtatcacaccctaaatgaacactgtctactaagagacatcattccatttccacaaatgaagattttattccaagaaacgagtttactgattggagcatagggcttgttgttatttttattcaagcttttagtaatagccttgaatttattatttttcttataggctttttgttaaaatagtgaaggaacaaatgttaaagggtaagataatttccctgcaaaaggacacagaaggcagtcttaagaagatgaatggatgagagaagggagagaataaaatgcaataacgagccagcatttactatgtattttctcctcacctgtctctccatatttaggtcacttaccagtttctgtgcccttttggagcttttgttgagggcttcattctcaccctgtatttctttagccctaaattgacactctctccaaaaatccattccattgtctgtggaccaagatgttctatgtaattcagaagcagaactcttggctaaagggctagtgtggccttcagaaaccattcaattattttctccctacacctttgtcagtttgaaaccagtgaggaaaaaaggtatgttgataagaaacctatattgctaggtagaatttgtacttgttttcttggtagcagttttgaaatattctgtacagtacgttcctattgtttaataataaattcaaaaatatttctaaaaccttaaaaccaactatgccaagcattaagataaacaaatatgatgttctttgacgtaaatcaacgtgatgattctttcacatgtaaacacattttagtgtttctggtttgtcatttttgttgttgttgttgttgttgttatttactctataccctttagcaaaatacagttttaaatttttattgtttttagtagtttcccaactttaagacttatctaatttaactgagaaagaaagcctttttcatatatatatatattggatttctaaggatggtggtttgagccttgattagacttttgatgtgctaagccagacaggcagtctgtacattgatggccatcacaatgcagctttggtttaatttaattcaggcctgctgctgagttatgcacagactttttgttgaccaaaataaaatataaagggttttcttctgtttgacatttgtgttcattttttctctttatgtattacattttaacctatattaaataaatgtttaaatgata

SEQ ID NO: 319946 - DNA, 1262 bp, Homo sapiens
cgtgcctcggtttccgttagcaaccagaggcttctaaacaacctaccctccttccccattttctgtggtccaactaccctcggcgatcccaggcttggcggggcaccgcctggcctctcccgttcctttaggctgccgccgctgcctgccgccatggcagagttgggcctaaatgagcaccatcaaaatgaagttattaattatatgcgttttgctcgttcaaagagaggcttgagactcaaaactgtagattcctgcttccaagacctcaaggagagcaggctggtggaggacaccttcaccatagatgaagtctctgaagtcctcaatggattacaagctgtggttcatagtgaggtggaatctgagctcatcaacactgcctataccaatgtgttacttctgcgacagctgtttgcacaagctgagaagtggtatcttaagctacagacagacatctctgaacttgaaaaccgagaattattagaacaagttgcagaatttgaaaaagcagagattacatcttcaaacaaaaagcccatcttagatgtcacaaagccaaaacttgctccacttaatgaaggtggaacagcagaactcctaaacaaggaaattttaagacttcaagaagagaatgagaaattgaagtcaaggttgaagaccattgaaatacaggctacaaatgcactggatgaaaagtcaaaactagaaaaagcactgcaagatttacagcttgatcaaggaaatcaaaaggattttataaaggcccaagacttaagtaacttagaaaacactgtcgctgccttaaagagtgagtttcagaagacacttaatgacaagacagaaaaccagaagtcactggaggagaatctggcgacagccaagcacgatctactcagggttcaggagcagctgcacatggctgaaaaggaattagaaaagaaatttcagcaaacagcagcttatcgaaacatgaaagagattcttaccaagaagaatgaccaaatcaaagatctgaggaaaagactggcacagtaagccacactgatcccgcctttggatttctctctctggattgatgtttgttctctgttaaatctaagcttgttccagagaggtcaagccggtggtagttgctggatcatttagtccagaagccttcatttgaggaaagtggaggagctctggcctgaccttatctataatgcccaccagggcttctttttaggttcatctaggcctttagactcacacaggcctac

SEQ ID NO: 319947 - DNA, 841 bp, Homo sapiens
  misc_feature (763)..(763): n is a, c, g, or t
cgtgcctcggtttccgttagcaaccagaggcttctaaacaacctaccctccttccccattttctgtggtccaactaccctcggcgatcccaggcttggcggggcaccgcctggcctctcccgttcctttaggctgccgccgctgcctgccgccatggcagagttgggcctaaatgagcaccatcaaaatgaagttattaattatatgcgttttgctcgttcaaagagaggcttgagactcaaaactgtagattcctgcttccaagacctcaaggagagcaggctggtggaggacaccttcaccatagatgaagtctctgaagtcctcaatggattacaagctgtggttcatagtgaggtggaatctgagctcatcaacactgcctataccaatgtgttacttctgcgacagctgtttgcacaagctgagaagtggtatcttaagctacagacagacatctctgaacttgaaaaccgagaattattagaacaagttgcagaatttgaaaaagcagagattacatcttcaaacaaaaagcccatcttagatgtcacaaagccaaaacttgctccacttaatgaaggtggaacagcagaactcctaaacaaggaaattttaagacttcaagaagagaatgagaaattgaagtcaaggttgaagaccattgaaatacaggctacaaatgcactggatgaaaagtcaaaactagaaaaagcactgcaagatttacagcttgatcaaggaaatcaaaaggttttataanggccagacttagtaattagaaacatggggtgcttaagaggggttcgaagacttatgacagacgccggcctgggggtgg

SEQ ID NO: 319948 - DNA, 546 bp, Homo sapiens
tgaaattacatgcatgcatttatttttcataggattttataaaggcccaagacttaagtaacttagaaaacactgtcgctgccttaaagagtgagtttcagaagacacttaatgacaagacagaaaaccagaagtcactggaggagaatctggcgacagccaagcacgatctactcagggttcaggagcagctgcacatggctgaaaaggtcagaagaccatgtttaagggatttgtctgttaatgcatgattaatgcacacagtatagaggaatacatgtggctaagataaacgttggacaactgcaaattcagattattttttctcaaggtattagccaatatgttctaaagattaatcatttccgggcactgatattcttccatctttggtactaaaatatctgtgataataagacatctcctctccctctatggtgtagtgaaatgctcctctgtaggtggcttgaatcctgccctacatcccaccatgttgctcttctgctccttcttcccacagcctgcagagggatgagggactgtttt

SEQ ID NO: 319949 - DNA, 2371 bp, Homo sapiens
  misc_feature (915)..(915): n is a, c, g, or t
  misc_feature (991)..(991): n is a, c, g, or t
  misc_feature (1035)..(1035): n is a, c, g, or t
  misc_feature (1763)..(1763): n is a, c, g, or t
  misc_feature (1938)..(1938): n is a, c, g, or t
cgtgcctcggtttccgttagcaaccagaggcttctaaacaacctaccctccttccccattttctgtggtccaactaccctcggcgatcccaggcttggcggggcaccgcctggcctctcccgttcctttaggctgccgccgctgcctgccgccatggcagagttgggcctaaatgagcaccatcaaaatgaagttattaattatatgcgttttgctcgttcaaagagaggcttgagactcaaaactgtagattcctgcttccaagacctcaaggagagcaggctggtggaggacaccttcaccatagatgaagtctctgaagtcctcaatggattacaagctgtggttcatagtgaggtggaatctgagctcatcaacactgcctataccaatgtgttacttctgcgacagctgtttgcacaagctgagaagtggtatcttaagctacagacagacatctctgaacttgaaaaccggtaataaaatttgaacttgcaactgtgacaataatggcccaagcataatcttaaaagttagtgaacatctttggctgcatattttcttggggctagtgtgtgaggaaatttgggtagggtaacagcaaagcattgagtcactgagtgatctcttgggtaccactaagcacccttttaaaagttctctgtttctactgttcctaggtattacaaaggccatcgagatttatgaaattgcttttcaggctatcattaattatttcttacagcatttttgttagcttggtcagtattaccatcagtctttatagattggtcaactaagaaatagagattatgagacagttgaaaagtcaattcaaatataataaataccatcaattcaatccagtagcattggaagttttctaaataatggaatttaaaagtatacatttantaactttgaaataggaaatatacaaaaaagcttataatatggacatctaagagctcaaattcaaaaaatatggtanaattggtgaagttgaaactcattttaagaaaaagcatgccaganatcaggaaggactgaccgccaagccccgtgaactactctaagcacagtcacagcacatcagttcacatgcagagtgttgaacaacgctgaggacaacctatgagctggggaggaaaatcattgaacttctgccactgtcagtagatgactggtgagaaaactctgagaaggtggtgctttaagaagcttagaagctgactgctgttaacactctaagcttgtgtgtagtcacttctcattggcctttgcaaatcttcagatggcacacccccactatctgtctttcctaggaatttgtggtactctttttcagtagatactatggactattttcatttttctgagactactttattaagaatcttttttgaacacctactagctaacaatacacattatgtaataaaacagtctcctcatagcacctcaagaatacaaagttgactataaattttcctcatatttgtattaacattatggtttatttctagcagtagatattgcatacctagtagatacaaaatgccaggtactgtggatgattacatttgagtccatgtggtttaggttctcaaccatttgcaactaacatttttgatatggtgaagtttggtccatcttgctctgttctctctggcatgtaatgggttggtaccagtgattttactcttcttgcgtgtgatataaatctattttaaatgaataatttttatctttgctttcttctncaagagaattattagaacaagttgcagaatttgaaaaagcagagattacatcttcaaacaaaaagcccatcttagatgtcacaaagccaaaacttgctccacttaatgaaggtggaacagcagaactcctaaacaaggtaatattattattttgagaaacggaaagtctctcatnctgtcctgtcattgcctagggtggagaaacagaagtggaaggtttgtttcaggtcctctgaggataattagtccattgcagtagttttacttgatggtaccccatgggccagaagagggcatacttaaccttctagagagcctgaagtagctcctgatcacaccttttcaaggtaaagtgaagagcatgaaattttggacagcgtttattgatggacatttaaagtttgtgatctgcggtaacaaggagaagggtttttaagtttataaaaattatttatcaattagccgggtgtggtggtacgtgcctatagtcagagctactcgggaggctgaggcaggagaattgcttgaacccgggaggtggaggttgcagtgagctgagatcacgccactgcactctagcctgggcgacagagcgagactccatctca

SEQ ID NO: 319950 - DNA, 4666 bp, Homo sapiens
  misc_feature (915)..(915): n is a, c, g, or t
  misc_feature (991)..(991): n is a, c, g, or t
  misc_feature (1035)..(1035): n is a, c, g, or t
  misc_feature (1763)..(1763): n is a, c, g, or t
cgtgcctcggtttccgttagcaaccagaggcttctaaacaacctaccctccttccccattttctgtggtccaactaccctcggcgatcccaggcttggcggggcaccgcctggcctctcccgttcctttaggctgccgccgctgcctgccgccatggcagagttgggcctaaatgagcaccatcaaaatgaagttattaattatatgcgttttgctcgttcaaagagaggcttgagactcaaaactgtagattcctgcttccaagacctcaaggagagcaggctggtggaggacaccttcaccatagatgaagtctctgaagtcctcaatggattacaagctgtggttcatagtgaggtggaatctgagctcatcaacactgcctataccaatgtgttacttctgcgacagctgtttgcacaagctgagaagtggtatcttaagctacagacagacatctctgaacttgaaaaccggtaataaaatttgaacttgcaactgtgacaataatggcccaagcataatcttaaaagttagtgaacatctttggctgcatattttcttggggctagtgtgtgaggaaatttgggtagggtaacagcaaagcattgagtcactgagtgatctcttgggtaccactaagcacccttttaaaagttctctgtttctactgttcctaggtattacaaaggccatcgagatttatgaaattgcttttcaggctatcattaattatttcttacagcatttttgttagcttggtcagtattaccatcagtctttatagattggtcaactaagaaatagagattatgagacagttgaaaagtcaattcaaatataataaataccatcaattcaatccagtagcattggaagttttctaaataatggaatttaaaagtatacatttantaactttgaaataggaaatatacaaaaaagcttataatatggacatctaagagctcaaattcaaaaaatatggtanaattggtgaagttgaaactcattttaagaaaaagcatgccaganatcaggaaggactgaccgccaagccccgtgaactactctaagcacagtcacagcacatcagttcacatgcagagtgttgaacaacgctgaggacaacctatgagctggggaggaaaatcattgaacttctgccactgtcagtagatgactggtgagaaaactctgagaaggtggtgctttaagaagcttagaagctgactgctgttaacactctaagcttgtgtgtagtcacttctcattggcctttgcaaatcttcagatggcacacccccactatctgtctttcctaggaatttgtggtactctttttcagtagatactatggactattttcatttttctgagactactttattaagaatcttttttgaacacctactagctaacaatacacattatgtaataaaacagtctcctcatagcacctcaagaatacaaagttgactataaattttcctcatatttgtattaacattatggtttatttctagcagtagatattgcatacctagtagatacaaaatgccaggtactgtggatgattacatttgagtccatgtggtttaggttctcaaccatttgcaactaacatttttgatatggtgaagtttggtccatcttgctctgttctctctggcatgtaatgggttggtaccagtgattttactcttcttgcgtgtgatataaatctattttaaatgaataatttttatctttgctttcttctncaagagaattattagaacaagttgcagaatttgaaaaagcagagattacatcttcaaacaaaaagcccatcttagatgtcacaaagccaaaacttgctccacttaatgaaggtggaacagcagaactcctaaacaaggaaattttaagacttcaagaagagaatgagaaattgaagtcaaggttgaagaccattgaaatacaggctacaaatgcactggatgaaaagtcaaaactagaaaaagcactgcaagatttacagcttgatcaaggaaatcaaaaggattttataaaggcccaagacttaagtaacttagaaaacactgtcgctgccttaaagagtgagtttcagaagacacttaatgacaagacagaaaaccagaagtcactggaggagaatctggcgacagccaagcacgatctactcagggttcaggagcagctgcacatggctgaaaaggaattagaaaagaaatttcagcaaacagcagcttatcgaaacatgaaagagattcttaccaagaagaatgaccaaatcaaagatctgaggaaaagactggcacaatatgaacctgaagattaaaactgaagatttcctctggaagctaccacatgcaaacatacaagcagtctcacctcaggcatgtattttgaaaagcattttgtcatatcccctctccttatttttctaatatttagactttgaatatttagaactagagttcctattttcagctagttgaaaacagagaaaacctagtgattctgtctggtcatcccacacacctctctactgagtgctccagagtcttagctcacatgcactgagaattctttacagcaaagaagagatttttagagtgggaagaagaggcttatccttctgcattagtataaagagtctgtatttttaataaatgttaaataagctaacaatgtttgtacttatgcattccccatgggtaaaaataaataatagcattgttaaagatagttattaccaaaaaaagagagttattacaaataaatatgtctctttatttttaaaaatgaaatcttaattcatttactctatttgatgataaactataaattcattgaaaatgtgaattctattatgggtagcctttttaccaattataaggaaaatttacagcagtgaacatgaacattcacttagcttcctcagtctctccatcttaaagatcatttatcagaggaggttcagcattttttgcagcataacttttcatgagtctgtattactaatggataagtcaaatccatcctgcacttctacagtttagaaagtatctggactcagaataaatgtaatatttatacttgtttccagaatgttattttacattttatgttcaataagaacactttttaaaagacgtatattcaacataaaatcagctatcagacttcagattagactttatttatgtgggtctataataattgtattttcaagaggttttcactatatttgtattggcctggttttctcagacgattttggacaaatcattagaaactgggcatcatatccacagttatgtaaggcagtgatatactataaggataaacaaagtcaagtccataaagcaataatccctcagaaggaaagtccttacttttcacatattaatatttagtaatttttcctgcttctaaaagtgagagtatcacaccctaaatgaacactgtctactaagagacatcattccatttccacaaatgaagattttattccaagaaacgagtttactgattggagcatagggcttgttgttatttttattcaagcttttagtaatagccttgaatttattatttttcttataggctttttgttaaaatagtgaaggaacaaatgttaaagggtaagataatttccctgcaaaaggacacagaaggcagtcttaagaagatgaatggatgagagaagggagagaataaaatgcaataacgagccagcatttactatgtattttctcctcacctgtctctccatatttaggtcacttaccagtttctgtgcccttttggagcttttgttgagggcttcattctcaccctgtatttctttagccctaaattgacactctctccaaaaatccattccattgtctgtggaccaagatgttctatgtaattcagaagcagaactcttggctaaagggctagtgtggccttcagaaaccattcaattattttctccctacacctttgtcagtttgaaaccagtgaggaaaaaaggtatgttgataagaaacctatattgctaggtagaatttgtacttgttttcttggtagcagttttgaaatattctgtacagtacgttcctattgtttaataataaattcaaaaatatttctaaaaccttaaaaccaactatgccaagcattaagataaacaaatatgatgttctttgacgtaaatcaacgtgatgattctttcacatgtaaacacattttagtgtttctggtttgtcatttttgttgttgttgttgttgttgttatttactctataccctttagcaaaatacagttttaaatttttattgtttttagtagtttcccaactttaagacttatctaatttaactgagaaagaaagcctttttcatatatatatatattggatttctaaggatggtggtttgagccttgattagacttttgatgtgctaagccagacaggcagtctgtacattgatggccatcacaatgcagctttggtttaatttaattcaggcctgctgctgagttatgcacagactttttgttgaccaaaataaaatataaagggttttcttctgtttgacatttgtgttcattttttctctttatgtattacattttaacctatattaaataaatgtttaaatgata

SEQ ID NO: 319951 - DNA, 353 bp, Homo sapiens
tcttggttcactgcaacctctgcctcccaggttcaagtaattctcctgcctcagcctccccagtaactgggattataggtgcctgccaacacgcctggctaatttttatatttttagtagagacgaggtttcaccatgttggccaggctggtctcgaacacctgaactcaggttatctgcctgcctcggcctcccagtgtgctgggattacaagtgtgagccactgcgcctggccaaggaacactctttgttctatgctacctactaggacagctagtctactcagttaccccaaaaccaaaaggatagtaactcaacaagctcagaatacaccattctgcttgcagccattg

SEQ ID NO: 319952 - DNA, 298 bp, Homo sapiens
tatccttcccgtactaattaatcccctggcccaacccgtcatctactctaccatctttgcaggcacactcatcacagcgctaagctcgcactgattttttacctgagtaggcctagaaataaacatgctagcttttattccagttctaaccaaaaaaataaaccctcgttccacagaagctgccatcaagtatttcctcacgcaagcaaccgcatccataatccttctaatagctatcctcttcaacaatatactctccggacacacgaatgttcaggtaccgagctgattgtatcag

SEQ ID NO: 319953 - DNA, 837 bp, Homo sapiens
  misc_feature (771)..(771): n is a, c, g, or t
  misc_feature (829)..(829): n is a, c, g, or t
tatccttcccgtactaattaatcccctggcccaacccgtcatctactctaccatctttgcaggcacactcatcacagcgctaagctcgcactgattttttacctgagtaggcctagaaataaacatgctagcttttattccagttctaaccaaaaaaataaaccctcgttccacagaagctgccatcaagtatttcctcacgcaagcaaccgcatccataatccttctaatagctatcctcttcaacaatatactctccggacaatgaaccataaccaatactaccaatcaatactcatcattaataatcataatggctatagcaataaaactaggaatagccccctttcacttctgagtcccagaggttacccaaggcacccctctgacatccggcctgcttcttctcacatgacaaaaactagcccccatctcaatcatataccaaatttctccctcattaaacgtaagccttctcctcactctttcaatcttatccatcatggcaggcagtttgaggtggattaaaccaaacccaactacgcaaaatcttagcatactcctcaattacccacataggatgaataatagcagttctaccgtacaaccctaacataaccattcttaatttaactatttatattatcctaactactaccgcattcctactactcaacttaaactccagcaccacaaccctactactatctaattctaccgtacaaccctaacataaccattcttaatttaactatttatattatcctaacnactaccgcattcctactactcaacttaaactccagcaccacaaccctactctgaaagngggtccga

SEQ ID NO: 319954 - DNA, 972 bp, Homo sapiens
  misc_feature (906)..(906): n is a, c, g, or t
  misc_feature (964)..(964): n is a, c, g, or t
tatccttcccgtactaattaatcccctggcccaacccgtcatctactctaccatctttgcaggcacactcatcacagcgctaagctcgcactgattttttacctgagtaggcctagaaataaacatgctagcttttattccagttctaaccaaaaaaataaaccctcgttccacagaagctgccatcaagtatttcctcacgcaagcaaccgcatccataatccttctaatagctatcctcttcaacaatatactctccggacaatgaaccataaccaatactaccaatcaatactcatcattaataatcataatggctatagcaataaaactaggaatagccccctttcacttctgagtcccagaggttacccaaggcacccctctgacatccggcctgcttcttctcacatgacaaaaactagcccccatctcaatcatataccaaatttctccctcattaaacgtaagccttctcctcactctttcaatcttatccatcatggcaggcagtttgaggtggattaaaccaaacccaactacgcaaaatcttagcatactcctcaattacccacataggatgaataatagcagttctaccgtacaaccctaacataaccattcttaatttaactatttatattatcctaactactaccgcattcctactactcaacttaaactccagcaccacaaccctactactatctatctcgcacctgaaacaagctaacatgactaacacccttaattccatccaccctcctctccctaggaggcctgcccccgctaaccggctttttgcccaaatgggccattatcgaagaattcacaaaaaacaatagcattctaccgtacaaccctaacataaccattcttaatttaactatttatattatcctaacnactaccgcattcctactactcaacttaaactccagcaccacaaccctactctgaaagngggtccga

SEQ ID NO: 319955 - DNA, 706 bp, Homo sapiens
tatccttcccgtactaattaatcccctggcccaacccgtcatctactctaccatctttgcaggcacactcatcacagcgctaagctcgcactgattttttacctgagtaggcctagaaataaacatgctagcttttattccagttctaaccaaaaaaataaaccctcgttccacagaagctgccatcaagtatttcctcacgcaagcaaccgcatccataatccttctaatagctatcctcttcaacaatatactctccggacaatgaaccataaccaatactaccaatcaatactcatcattaataatcataatggctatagcaataaaactaggaatagccccctttcacttctgagtcccagaggttacccaaggcacccctctgacatccggcctgcttcttctcacatgacaaaaactagcccccatctcaatcatataccaaatttctccctcattaaacgtaagccttctcctcactctttcaatcttatccatcatggcaggcagtttgaggtggattaaaccaaacccaactacgcaaaatcttagcatactcctcaattacccacataggatgaataatagcagttctaccgtacaaccctaacataaccattcttaatttaactatttatattatcctaactactaccgcattcctactactcacacacagtcattcagagcggggaatccatct

SEQ ID NO: 319956 - DNA, 645 bp, Homo sapiens
  misc_feature (579)..(579): n is a, c, g, or t
  misc_feature (637)..(637): n is a, c, g, or t
acgatggcaaggcacttcctgcaacaacgcatctcatattcgcaatgactattacaacaacaaccatgtgcaatgaaccataaccaatactaccaatcaatactcatcattaataatcataatggctatagcaataaaactaggaatagccccctttcacttctgagtcccagaggttacccaaggcacccctctgacatccggcctgcttcttctcacatgacaaaaactagcccccatctcaatcatataccaaatttctccctcattaaacgtaagccttctcctcactctttcaatcttatccatcatggcaggcagtttgaggtggattaaaccaaacccaactacgcaaaatcttagcatactcctcaattacccacataggatgaataatagcagttctaccgtacaaccctaacataaccattcttaatttaactatttatattatcctaactactaccgcattcctactactcaacttaaactccagcaccacaaccctactactatctaattctaccgtacaaccctaacataaccattcttaatttaactatttatattatcctaacnactaccgcattcctactactcaacttaaactccagcaccacaaccctactctgaaagngggtccga

SEQ ID NO: 319957 - DNA, 482 bp, Homo sapiens
tatccttcccgtactaattaatcccctggcccaacccgtcatctactctaccatctttgcaggcacactcatcacagcgctaagctcgcactgattttttacctgagtaggcctagaaataaacatgctagcttttattccagttctaaccaaaaaaataaaccctcgttccacagaagctgccatcaagtatttcctcacgcaagcaaccgcatccataatccttctaatagctatcctcttcaacaatatactctccggacaatgaaccataaccaatactaccaatcaatactcatcattaataatcataatggctatagcaataaaactaggaatagccccctttcacttctgagtcccagaggttacccaaggcacccctctgacatccggccatgatgataagattgagagagtgaggagaaggcttacgtctagtgagggagagatttggtatatgattgtgctgcgctgctacg

SEQ ID NO: 319958 - DNA, 428 bp, Homo sapiens
tatccttcccgtactaattaatcccctggcccaacccgtcatctactctaccatctttgcaggcacactcatcacagcgctaagctcgcactgattttttacctgagtaggcctagaaataaacatgctagcttttattccagttctaaccaaaaaaataaaccctcgttccacagaagctgccatcaagtatttcctcacgcaagcaaccgcatccataatccttctaatagctatcctcttcaacaatatactctccggacaatgaaccataaccaatactaccaatcaatactcatcattaataatcataatggctatagcaataaaactaggaatagccccctttcacttctgagtcccagaggttacccaaggcacccctctgacatccggcctctgccaataggggggtcctctagagcagc

SEQ ID NO: 319959 - DNA, 445 bp, Homo sapiens
tatccttcccgtactaattaatcccctggcccaacccgtcatctactctaccatctttgcaggcacactcatcacagcgctaagctcgcactgattttttacctgagtaggcctagaaataaacatgctagcttttattccagttctaaccaaaaaaataaaccctcgttccacagaagctgccatcaagtatttcctcacgcaagcaaccgcatccataatccttctaatagctatcctcttcaacaatatactctccggacaatgaaccataaccaatactaccaatcaatactcatcattaataatcataatggctatagcaataaaactaggaatagccccctttcacttctgagtcccagtgtacaaaaaggaacacgctataaataccggctgcttcttgtgaccatgacaacagactagcacatgtcatccgtagtgg

SEQ ID NO: 319960 - DNA, 545 bp, Homo sapiens
tatccttcccgtactaattaatcccctggcccaacccgtcatctactctaccatctttgcaggcacactcatcacagcgctaagctcgcactgattttttacctgagtaggcctagaaataaacatgctagcttttattccagttctaaccaaaaaaataaaccctcgttccacagaagctgccatcaagtatttcctcacgcaagcaaccgcatccataatccttctaatagctatcctcttcaacaatatactctccggacaatgaaccataaccaatactaccaatcaatactcatcattaataatcataatggctatagcaataaaactaggaatagccccctttcacttctgagtcccagctggactgatctcggaaattaattagccactcattcatcgacctccccaccccatccaacatctccgcatgatgaagctacggctcactccttggcgcctgcctgatcctcgaggggtaaccgtcacggggcctgagctggacccagtctgcgaggtgagggccgccgtcgaccggatgc

SEQ ID NO: 319961 - DNA, 374 bp, Homo sapiens
  misc_feature (308)..(308): n is a, c, g, or t
  misc_feature (366)..(366): n is a, c, g, or t
aaaaatgttgagcatgagggtggatcacgaggtcaggagttcagaccagctggccaagatggtgaaatcctcagtcaacttaaactccagcaccacaaccctactactatctatctcgcacctgaaacaagctaacatgactaacacccttaattccatccaccctcctctccctaggaggcctgcccccgctaaccggctttttgcccaaatgggccattatcgaagaattcacaaaaaacaatagcattctaccgtacaaccctaacataaccattcttaatttaactatttatattatcctaacnactaccgcattcctactactcaacttaaactccagcaccacaaccctactctgaaagngggtccga

SEQ ID NO: 319962 - DNA, 836 bp, Homo sapiens
tatccttcccgtactaattaatcccctggcccaacccgtcatctactctaccatctttgcaggcacactcatcacagcgctaagctcgcactgattttttacctgagtaggcctagaaataaacatgctagcttttattccagttctaaccaaaaaaataaaccctcgttccacagaagctgccatcaagtatttcctcacgcaagcaaccgcatcccccttccaaacaacaatccccctctacctaaaactcacagccctcgctgtcactttcctaggacttctaacaccctgacctcaactaaaaaaaaaaaaaaaaaaaaaaaaaaaaaaaaaaaaaaaaaaaaaaaaaaagaggggggcgcgcgcgcacagaaaaatacccccgccggggggccccacatagagccgcggccccccagttttggtggacaaacgagggggcgccccaaggagggggccgctaatataaaaagacgaggcagaacggggcgcgggttaaaaaaaaccgcgggagcgagggggaaaacctacgacaaaccagggggcacctcctggggggaagacggcgacccccctaaccacgcccgggggggcggcgaaccatacaagggggcaaaaacaaccctatcacctcaacacagagcaataacaaagccccgcatcaggggtaaaacactacacaaccttacacagggcgggtaatcaacggcgggcgacaagcaacaaggcccgaatgatcgcctgcgccacgcaaaaactatcgccacaccgcggcggacatgagcactcgcaaacacctatttacccaccgaggacaggtcaaaaaagagaat

SEQ ID NO: 319963 - DNA, 14083 bp, Homo sapiens
cgttaaatgcaaacgctgctctggctcatgtgtttgctccgaggtataggttttgttcgactgacgtatcagatagtcagagtggttaccacaccgacgttgtagcagctgcataataaatgactgaaagaatcatgttaggcatgcccacctaacctaacttgaatcatgcgaaaggggagctgttggaattcaaatagactttctggttcccagcagtcggcagtaatagaatgctttcaggaagatgacagaatcaggagaaagatgctgttttgcactatcttgatttgttacagcagccaacttattggcatgatggagtgacaggaaaaacagctggcatggaagatgaaagagaagatgttcaaaagaaaacattcacaaaatgggtaaatgcacaattttctaagtttgggaagcagcatattgagaacctcttcagtgacctacaggatgggaggcgcctcctagacctcctcgaaggcctgacagggcaaaaactgccaaaagaaaaaggatccacaagagttcatgccctgaacaatgtcaacaaggcactgcgggttttgcagaacaataatgttgatttagtgaatattggaagtactgacatcgtagatggaaatcataaactgactcttggtttgatttggaatataatcctccactggcaggtcaaaaatgtaatgaaaaatatcatggctggattgcaacaaaccaacagtgaaaagattctcctgagctgggtccgacaatcaactcgtaattatccacaggttaatgtaatcaacttcaccaccagctggtctgatggcctggctttgaatgctctcatccatagtcataggccagacctatttgactggaatagtgtggtttgccagcagtcagccacacaacgactggaacatgcattcaacatcgccagatatcaattaggcatagagaaactactcgatcctgaagatgttgataccacctatccagataagaagtccatcttaatgtacatcacatcactcttccaagttttgcctcaacaagtgagcattgaagccatccaggaagtggaaatgttgccaaggccacctaaagtgactaaagaagaacattttcagttacatcatcaaatgcactattctcaacagatcacggtcagtctagcacagggatatgagagaacttcttcccctaagcctcgattcaagagctatgcctacacacaggctgcttatgtcaccacctctgaccctacacggagcccatttccttcacagcatttggaagctcctgaagacaagtcatttggcagttcattgatggagagtgaagtaaacctggaccgttatcaaacagctttagaagaagtattatcgtggcttctttctgctgaggacacattgcaagcacaaggagagatttctaatgatgtggaagtggtgaaagaccagtttcatactcatgaggggtacatgatggatttgacagcccatcagggccgggttggtaatattctacaattgggaagtaagctgattggaacaggaaaattatcagaagatgaagaaactgaagtacaagagcagatgaatctcctaaattcaagatgggaatgcctcagggtagctagcatggaaaaacaaagcaatttacatagagttttaatggatctccagaatcagaaactgaaagagttgaatgactggctaacaaaaacagaagaaagaacaaggaaaatggaggaagagcctcttggacctgatcttgaagacctaaaacgccaagtacaacaacataaggtgcttcaagaagatctagaacaagaacaagtcagggtcaattctctcactcacatggtggtggtagttgatgaatctagtggagatcacgcaactgctgctttggaagaacaacttaaggtattgggagatcgatgggcaaacatctgtagatggacagaagaccgctgggttcttttacaagacatccttctcaaatggcaacgtcttactgaagaacagtgcctttttagtgcatggctttcagaaaaagaagatgcagtgaacaagattcacacaactggctttaaagatcaaaatgaaatgttatcaagtcttcaaaaactggccgttttaaaagcggatctagaaaagaaaaagcaatccatgggcaaactgtattcactcaaacaagatcttctttcaacactgaagaataagtcagtgacccagaagacggaagcatggctggataactttgcccggtgttgggataatttagtccaaaaacttgaaaagagtacagcacagatttcacaggctgtcaccaccactcagccatcactaacacagacaactgtaatggaaacagtaactacggtgaccacaagggaacagatcctggtaaagcatgctcaagaggaacttccaccaccacctccccaaaagaagaggcagattactgtggattctgaaattaggaaaaggttggatgttgatataactgaacttcacagctggattactcgctcagaagctgtgttgcagagtcctgaatttgcaatctttcggaaggaaggcaacttctcagacttaaaagaaaaagtcaatgccatagagcgagaaaaagctgagaagttcagaaaactgcaagatgccagcagatcagctcaggccctggtggaacagatggtgaatgagggtgttaatgcagatagcatcaaacaagcctcagaacaactgaacagccggtggatcgaattctgccagttgctaagtgagagacttaactggctggagtatcagaacaacatcatcgctttctataatcagctacaacaattggagcagatgacaactactgctgaaaactggttgaaaatccaacccaccaccccatcagagccaacagcaattaaaagtcagttaaaaatttgtaaggatgaagtcaaccggctatcaggtcttcaacctcaaattgaacgattaaaaattcaaagcatagccctgaaagagaaaggacaaggacccatgttcctggatgcagactttgtggcctttacaaatcattttaagcaagtcttttctgatgtgcaggccagagagaaagagctacagacaatttttgacactttgccaccaatgcgctatcaggagaccatgagtgccatcaggacatgggtccagcagtcagaaaccaaactctccatacctcaacttagtgtcaccgactatgaaatcatggagcagagactcggggaattgcaggctttacaaagttctctgcaagagcaacaaagtggcctatactatctcagcaccactgtgaaagagatgtcgaagaaagcgccctctgaaattagccggaaatatcaatcagaatttgaagaaattgagggacgctggaagaagctctcctcccagctggttgagcattgtcaaaagctagaggagcaaatgaataaactccgaaaaattcagaatcacatacaaaccctgaagaaatggatggctgaagttgatgtttttctgaaggaggaatggcctgcccttggggattcagaaattctaaaaaagcagctgaaacagtgcagacttttagtcagtgatattcagacaattcagcccagtctaaacagtgtcaatgaaggtgggcagaagataaagaatgaagcagagccagagtttgcttcgagacttgagacagaactcaaagaacttaacactcagtgggatcacatgtgccaacaggtctatgccagaaaggaggccttgaagggaggtttggagaaaactgtaagcctccagaaagatctatcagagatgcacgaatggatgacacaagctgaagaagagtatcttgagagagattttgaatataaaactccagatgaattacagaaagcagttgaagagatgaagagagctaaagaagaggcccaacaaaaagaagcgaaagtgaaactccttactgagtctgtaaatagtgtcatagctcaagctccacctgtagcacaagaggccttaaaaaaggaacttgaaactctaaccaccaactaccagtggctctgcactaggctgaatgggaaatgcaagactttggaagaagtttgggcatgttggcatgagttattgtcatacttggagaaagcaaacaagtggctaaatgaagtagaatttaaacttaaaaccactgaaaacattcctggcggagctgaggaaatctctgaggtgctagattcacttgaaaatttgatgcgacattcagaggataacccaaatcagattcgcatattggcacagaccctaacagatggcggagtcatggatgagctaatcaatgaggaacttgagacatttaattctcgttggagggaactacatgaagaggctgtaaggaggcaaaagttgcttgaacagagcatccagtctgcccaggagactgaaaaatccttacacttaatccaggagtccctcacattcattgacaagcagttggcagcttatattgcagacaaggtggacgcagctcaaatgcctcaggaagcccagaaaatccaatctgatttgacaagtcatgagatcagtttagaagaaatgaagaaacataatcaggggaaggaggctgcccaaagagtcctgtctcagattgatgttgcacagaaaaaattacaagatgtctccatgaagtttcgattattccagaaaccagccaattttgagcagcgtctacaagaaagtaagatgattttagatgaagtgaagatgcacttgcctgcattggaaacaaagagtgtggaacaggaagtagtacagtcacagctaaatcattgtgtgaacttgtataaaagtctgagtgaagtgaagtctgaagtggaaatggtgataaagactggacgtcagattgtacagaaaaagcagacggaaaatcccaaagaacttgatgaaagagtaacagctttgaaattgcattataatgagctgggagcaaaggtaacagaaagaaagcaacagttggagaaatgcttgaaattgtcccgtaagatgcgaaaggaaatgaatgtcttgacagaatggctggcagctacagatatggaattgacaaagagatcagcagttgaaggaatgcctagtaatttggattctgaagttgcctggggaaaggctactcaaaaagagattgagaaacagaaggtgcacctgaagagtatcacagaggtaggagaggccttgaaaacagttttgggcaagaaggagacgttggtggaagataaactcagtcttctgaatagtaactggatagctgtcacctcccgagcagaagagtggttaaatcttttgttggaataccagaaacacatggaaacttttgaccagaatgtggaccacatcacaaagtggatcattcaggctgacacacttttggatgaatcagagaaaaagaaaccccagcaaaaagaagacgtgcttaagcgtttaaaggcagaactgaatgacatacgcccaaaggtggactctacacgtgaccaagcagcaaacttgatggcaaaccgcggtgaccactgcaggaaattagtagagccccaaatctcagagctcaaccatcgatttgcagccatttcacacagaattaagactggaaaggcctccattcctttgaaggaattggagcagtttaactcagatatacaaaaattgcttgaaccactggaggctgaaattcagcagggggtgaatctgaaagaggaagacttcaataaagatatgaatgaagacaatgagggtactgtaaaagaattgttgcaaagaggagacaacttacaacaaagaatcacagatgagagaaagcgagaggaaataaagataaaacagcagctgttacagacaaaacataatgctctcaaggatttgaggtctcaaagaagaaaaaaggctctagaaatttctcatcagtggtatcagtacaagaggcaggctgatgatctcctgaaatgcttggatgacattgaaaaaaaattagccagcctacctgagcccagagatgaaaggaaaataaaggaaattgatcgggaattgcagaagaagaaagaggagctgaatgcagtgcgtaggcaagctgagggcttgtctgaggatggggccgcaatggcagtggagccaactcagatccagctcagcaagcgctggcgggaaattgagagcaaatttgctcagtttcgaagactcaactttgcacaaattcacactgtccgtgaagaaacgatgatggtgatgactgaagacatgcctttggaaatttcttatgtgccttctacttatttgactgaaatcactcatgtctcacaagccctattagaagtggaacaacttctcaatgctcctgacctctgtgctaaggactttgaagatctctttaagcaagaggagtctctgaagaatataaaagatagtctacaacaaagctcaggtcggattgacattattcatagcaagaagacagcagcattgcaaagtgcaacgcctgtggaaagggtgaagctacaggaagctctctcccagcttgatttccaatgggaaaaagttaacaaaatgtacaaggaccgacaagggcgatttgacagatctgttgagaaatggcggcgttttcattatgatataaagatatttaatcagtggctaacagaagctgaacagtttctcagaaagacacaaattcctgagaattgggaacatgctaaatacaaatggtatcttaaggaactccaggatggcattgggcagcggcaaactgttgtcagaacattgaatgcaactggggaagaaataattcagcaatcctcaaaaacagatgccagtattctacaggaaaaattgggaagcctgaatctgcggtggcaggaggtctgcaaacagctgtcagacagaaaaaagaggctagaagaacaaaagaatatcttgtcagaatttcaaagagatttaaatgaatttgttttatggttggaggaagcagataacattgctagtatcccacttgaacctggaaaagagcagcaactaaaagaaaagcttgagcaagtcaagttactggtggaagagttgcccctgcgccagggaattctcaaacaattaaatgaaactggaggacccgtgcttgtaagtgctcccataagcccagaagagcaagataaacttgaaaataagctcaagcagacaaatctccagtggataaaggtttccagagctttacctgagaaacaaggagaaattgaagctcaaataaaagaccttgggcagcttgaaaaaaagcttgaagaccttgaagagcagttaaatcatctgctgctgtggttatctcctattaggaatcagttggaaatttataaccaaccaaaccaagaaggaccatttgacgttcaggaaactgaaatagcagttcaagctaaacaaccggatgtggaagagattttgtctaaagggcagcatttgtacaaggaaaaaccagccactcagccagtgaagaggaagttagaagatctgagctctgagtggaaggcggtaaaccgtttacttcaagagctgagggcaaagcagcctgacctagctcctggactgaccactattggagcctctcctactcagactgttactctggtgacacaacctgtggttactaaggaaactgccatctccaaactagaaatgccatcttccttgatgttggaggtacctgctctggcagatttcaaccgggcttggacagaacttaccgactggctttctctgcttgatcaagttataaaatcacagagggtgatggtgggtgaccttgaggatatcaacgagatgatcatcaagcagaaggcaacaatgcaggatttggaacagaggcgtccccagttggaagaactcattaccgctgcccaaaatttgaaaaacaagaccagcaatcaagaggctagaacaatcattacggatcgaattgaaagaattcagaatcagtgggatgaagtacaagaacaccttcagaaccggaggcaacagttgaatgaaatgttaaaggattcaacacaatggctggaagctaaggaagaagctgagcaggtcttaggacaggccagagccaagcttgagtcatggaaggagggtccctatacagtagatgcaatccaaaagaaaatcacagaaaccaagcagttggccaaagacctccgccagtggcagacaaatgtagatgtggcaaatgacttggccctgaaacttctccgggattattctgcagatgataccagaaaagtccacatgataacagagaatatcaatgcctcttggagaagcattcataaaagggtgagtgagcgagaggctgctttggaagaaactcatagattactgcaacagttccccctggacctggaaaagtttcttgcctggcttacagaagctgaaacaactgccaatgtcctacaggatgctacccgtaaggaaaggctcctagaagactccaagggagtaaaagagctgatgaaacaatggcaagacctccaaggtgaaattgaagctcacacagatgtttatcacaacctggatgaaaacagccaaaaaatcctgagatccctggaaggttccgatgatgcagtcctgttacaaagacgtttggataacatgaacttcaagtggagtgaacttcggaaaaagtctctcaacattaggtcccatttggaagccagttctgaccagtggaagcgtctgcacctttctctgcaggaacttctggtgtggctacagctgaaagatgatgaattaagccggcaggcacctattggaggcgactttccagcagttcagaagcagaacgatgtacatagggccttcaagagggaattgaaaactaaagaacctgtaatcatgagtactcttgagactgtacgaatatttctgacagagcagcctttggaaggactagagaaactctaccaggagcccagagagctgcctcctgaggagagagcccagaatgtcactcggcttctacgaaagcaggctgaggaggtcaatactgagtgggaaaaattgaacctgcactccgctgactggcagagaaaaatagatgagacccttgaaagactccaggaacttcaagaggccacggatgagctggacctcaagctgcgccaagctgaggtgatcaagggatcctggcagcccgtgggcgatctcctcattgactctctccaagatcacctcgagaaagtcaaggcacttcgaggagaaattgcgcctctgaaagagaacgtgagccacgtcaatgaccttgctcgccagcttaccactttgggcattcagctctcaccgtataacctcagcactctggaagacctgaacaccagatggaagcttctgcaggtggccgtcgaggaccgagtcaggcagctgcatgaagcccacagggactttggtccagcatctcagcactttctttccacgtctgtccagggtccctgggagagagccatctcgccaaacaaagtgccctactatatcaaccacgagactcaaacaacttgctgggaccatcccaaaatgacagagctctaccagtctttagctgacctgaataatgtcagattctcagcttataggactgccatgaaactccgaagactgcagaaggccctttgcttggatctcttgagcctgtcagctgcatgtgatgccttggaccagcacaacctcaagcaaaatgaccagcccatggatatcctgcagattattaattgtttgaccactatttatgaccgcctggagcaagagcacaacaatttggtcaacgtccctctctgcgtggatatgtgtctgaactggctgctgaatgtttatgatacgggacgaacagggaggatccgtgtcctgtcttttaaaactggcatcatttccctgtgtaaagcacatttggaagacaagtacagataccttttcaagcaagtggcaagttcaacaggattttgtgaccagcgcaggctgggcctccttctgcatgattctatccaaattccaagacagttgggtgaagttgcatcctttgggggcagtaacattgagccaagtgtccggagctgcttccaatttgctaataataagccagagatcgaagcggccctcttcctagactggatgagactggaaccccagtccatggtgtggctgcccgtcctgcacagagtggctgctgcagaaactgccaagcatcaggccaaatgtaacatctgcaaagagtgtccaatcattggattcaggtacaggagtctaaagcactttaattatgacatctgccaaagctgctttttttctggtcgagttgcaaaaggccataaaatgcactatcccatggtggaatattgcactccgactacatcaggagaagatgttcgagactttgccaaggtactaaaaaacaaatttcgaaccaaaaggtattttgcgaagcatccccgaatgggctacctgccagtgcagactgtcttagagggggacaacatggaaactcccgttactctgatcaacttctggccagtagattctgcgcctgcctcgtcccctcagctttcacacgatgatactcattcacgcattgaacattatgctagcaggctagcagaaatggaaaacagcaatggatcttatctaaatgatagcatctctcctaatgagagcatagatgatgaacatttgttaatccagcattactgccaaagtttgaaccaggactcccccctgagccagcctcgtagtcctgcccagatcttgatttccttagagagtgaggaaagaggggagctagagagaatcctagcagatcttgaggaagaaaacaggaatctgcaagcagaatatgaccgtctaaagcagcagcacgaacataaaggcctgtccccactgccgtcccctcctgaaatgatgcccacctctccccagagtccccgggatgctgagctcattgctgaggccaagctactgcgtcaacacaaaggccgcctggaagccaggatgcaaatcctggaagaccacaataaacagctggagtcacagttacacaggctaaggcagctgctggagcaaccccaggcagaggccaaagtgaatggcacaacggtgtcctctccttctacctctctacagaggtccgacagcagtcagcctatgctgctccgagtggttggcagtcaaacttcggactccatgggtgaggaagatcttctcagtcctccccaggacacaagcacagggttagaggaggtgatggagcaactcaacaactccttccctagttcaagaggaagaaatacccctggaaagccaatgagagaggacacaatgtaggaagtcttttccacatggcagatgatttgggcagagcgatggagtccttagtatcagtcatgacagatgaagaaggagcagaataaatgttttacaactcctgattcccgcatggtttttataatattcatacaacaaagaggattagacagtaagagtttacaagaaataaatctatatttttgtgaagggtagtggtattatactgtagatttcagtagtttctaagtctgttattgttttgttaacaatggcaggttttacacgtctatgcaattgtacaaaaaagttataagaaaactacatgtaaaatcttgatagctaaataacttgccatttctttatatggaacgcattttgggttgtttaaaaatttataacagttataaagaaagattgtaaactaaagtgtgctttataaaaaaaagttgtttataaaaacccctaaaaacaaaacaaacacacacacacacacatacacacacacacacaaaactttgaggcagcgcattgttttgcatccttttggcgtgatatccatatgaaattcatggctttttctttttttgcatattaaagataagacttcctctaccaccacaccaaatgactactacacactgctcatttgagaactgtcagctgagtggggcaggcttgagttttcatttcatatatctatatgtctataagtatataaatactatagttatatagataaagagatacgaatttctatagactgactttttccattttttaaatgttcatgtcacatcctaatagaaagaaattacttctagtcagtcatccaggcttacctgcttggtctagaatggatttttcccggagccggaagccaggaggaaactacaccacactaaaacattgtctacagctccagatgtttctcattttaaacaactttccactgacaacgaaagtaaagtaaagtattggatttttttaaagggaacatgtgaatgaatacacaggacttattatatcagagtgagtaatcggttggttggttgattgattgattgattgatacattcagcttcctgctgctagcaatgccacgatttagatttaatgatgcttcagtggaaatcaatcagaaggtattctgaccttgtgaacatcagaaggtattttttaactcccaagcagtagcaggacgatgatagggctggagggctatggattcccagcccatccctgtgaaggagtaggccactctttaagtgaaggattggatgattgttcataatacataaagttctctgtaattacaactaaattattatgccctcttctcacagtcaaaaggaactgggtggtttggtttttgttgcttttttagatttattgtcccatgtgggatgagtttttaaatgccacaagacataatttaaaataaataaactttgggaaaaggtgtaagacagtagccccatcacatttgtgatactgacaggtatcaacccagaagcccatgaactgtgtttccatcctttgcatttctctgcgagtagttccacacaggtttgtaagtaagtaagaaagaaggcaaattgattcaaatgttacaaaaaaacccttcttggtggattagacaggttaaatatataaacaaacaaacaaaaattgctcaaaaaagaggagaaaagctcaagaggaaaagctaaggactggtaggaaaaagctttactctttcatgccattttatttctttttgatttttaaatcattcattcaatagataccaccgtgtgacctataattttgcaaatctgttacctctgacatcaagtgtaattagcttttggagagtgggctgacatcaagtgtaattagcttttggagagtgggttttgtccattattaataattaattaattaacatcaaacacggcttctcatgctatttctacctcactttggttttggggtgttcctgataattgtgcacacctgagttcacagcttcaccacttgtccattgcgttattttctttttcctttataattctttctttttccttcataattttcaaaagaaaacccaaagctctaaggtaacaaattaccaaattacatgaagatttggtttttgtcttgcatttttttcctttatgtgacgctggaccttttctttacccaaggatttttaaaactcagatttaaaacaaggggttactttacatcctactaagaagtttaagtaagtaagtttcattctaaaatcagaggtaaatagagtgcataaataattttgttttaatctttttgtttttcttttagacacattagctctggagtgagtctgtcataatatttgaacaaaaattgagagctttattgctgcattttaagcataattaatttggacattatttcgtgttgtgttctttataaccaccaagtattaaactgtaaatcataatgtaactgaagcataaacatcacatggcatgttttgtcattgttttcaggtactgagttcttacttgagtatcataatatattgtgttttaacaccaacactgtaacatttacgaattatttttttaaacttcagttttactgcattttcacaacatatcagacttcaccaaatatatgccttactattgtattatagtactgctttactgtgtatctcaataaagcacgcagttatgttacaaaaaagtaaaaac

SEQ ID NO: 319964 - DNA, 14014 bp, Homo sapiens
atgctgtctgtgaagctgaatctgtgagaacacctcactattcacggcaaccggagtggaagaaacaggtgcaaaaagattgtgtgtttgtctgcttttgtgaggctggtcagagattctgtgcctgctttatctgtgcttggctatgactctacctccaggtttaccataccccatagaatgtgtaagagaaaagtaccaacagggaaatcagcaaaaagctttcctatgaaggtgtgtagccagcctccgcagaatttgaaatgtctgaggtttcttctgatgaaagagaagatgttcaaaagaaaacattcacaaaatgggtaaatgcacaattttctaagtttgggaagcagcatattgagaacctcttcagtgacctacaggatgggaggcgcctcctagacctcctcgaaggcctgacagggcaaaaactgccaaaagaaaaaggatccacaagagttcatgccctgaacaatgtcaacaaggcactgcgggttttgcagaacaataatgttgatttagtgaatattggaagtactgacatcgtagatggaaatcataaactgactcttggtttgatttggaatataatcctccactggcaggtcaaaaatgtaatgaaaaatatcatggctggattgcaacaaaccaacagtgaaaagattctcctgagctgggtccgacaatcaactcgtaattatccacaggttaatgtaatcaacttcaccaccagctggtctgatggcctggctttgaatgctctcatccatagtcataggccagacctatttgactggaatagtgtggtttgccagcagtcagccacacaacgactggaacatgcattcaacatcgccagatatcaattaggcatagagaaactactcgatcctgaagatgttgataccacctatccagataagaagtccatcttaatgtacatcacatcactcttccaagttttgcctcaacaagtgagcattgaagccatccaggaagtggaaatgttgccaaggccacctaaagtgactaaagaagaacattttcagttacatcatcaaatgcactattctcaacagatcacggtcagtctagcacagggatatgagagaacttcttcccctaagcctcgattcaagagctatgcctacacacaggctgcttatgtcaccacctctgaccctacacggagcccatttccttcacagcatttggaagctcctgaagacaagtcatttggcagttcattgatggagagtgaagtaaacctggaccgttatcaaacagctttagaagaagtattatcgtggcttctttctgctgaggacacattgcaagcacaaggagagatttctaatgatgtggaagtggtgaaagaccagtttcatactcatgaggggtacatgatggatttgacagcccatcagggccgggttggtaatattctacaattgggaagtaagctgattggaacaggaaaattatcagaagatgaagaaactgaagtacaagagcagatgaatctcctaaattcaagatgggaatgcctcagggtagctagcatggaaaaacaaagcaatttacatagagttttaatggatctccagaatcagaaactgaaagagttgaatgactggctaacaaaaacagaagaaagaacaaggaaaatggaggaagagcctcttggacctgatcttgaagacctaaaacgccaagtacaacaacataaggtgcttcaagaagatctagaacaagaacaagtcagggtcaattctctcactcacatggtggtggtagttgatgaatctagtggagatcacgcaactgctgctttggaagaacaacttaaggtattgggagatcgatgggcaaacatctgtagatggacagaagaccgctgggttcttttacaagacatccttctcaaatggcaacgtcttactgaagaacagtgcctttttagtgcatggctttcagaaaaagaagatgcagtgaacaagattcacacaactggctttaaagatcaaaatgaaatgttatcaagtcttcaaaaactggccgttttaaaagcggatctagaaaagaaaaagcaatccatgggcaaactgtattcactcaaacaagatcttctttcaacactgaagaataagtcagtgacccagaagacggaagcatggctggataactttgcccggtgttgggataatttagtccaaaaacttgaaaagagtacagcacagatttcacaggctgtcaccaccactcagccatcactaacacagacaactgtaatggaaacagtaactacggtgaccacaagggaacagatcctggtaaagcatgctcaagaggaacttccaccaccacctccccaaaagaagaggcagattactgtggattctgaaattaggaaaaggttggatgttgatataactgaacttcacagctggattactcgctcagaagctgtgttgcagagtcctgaatttgcaatctttcggaaggaaggcaacttctcagacttaaaagaaaaagtcaatgccatagagcgagaaaaagctgagaagttcagaaaactgcaagatgccagcagatcagctcaggccctggtggaacagatggtgaatgagggtgttaatgcagatagcatcaaacaagcctcagaacaactgaacagccggtggatcgaattctgccagttgctaagtgagagacttaactggctggagtatcagaacaacatcatcgctttctataatcagctacaacaattggagcagatgacaactactgctgaaaactggttgaaaatccaacccaccaccccatcagagccaacagcaattaaaagtcagttaaaaatttgtaaggatgaagtcaaccggctatcaggtcttcaacctcaaattgaacgattaaaaattcaaagcatagccctgaaagagaaaggacaaggacccatgttcctggatgcagactttgtggcctttacaaatcattttaagcaagtcttttctgatgtgcaggccagagagaaagagctacagacaatttttgacactttgccaccaatgcgctatcaggagaccatgagtgccatcaggacatgggtccagcagtcagaaaccaaactctccatacctcaacttagtgtcaccgactatgaaatcatggagcagagactcggggaattgcaggctttacaaagttctctgcaagagcaacaaagtggcctatactatctcagcaccactgtgaaagagatgtcgaagaaagcgccctctgaaattagccggaaatatcaatcagaatttgaagaaattgagggacgctggaagaagctctcctcccagctggttgagcattgtcaaaagctagaggagcaaatgaataaactccgaaaaattcagaatcacatacaaaccctgaagaaatggatggctgaagttgatgtttttctgaaggaggaatggcctgcccttggggattcagaaattctaaaaaagcagctgaaacagtgcagacttttagtcagtgatattcagacaattcagcccagtctaaacagtgtcaatgaaggtgggcagaagataaagaatgaagcagagccagagtttgcttcgagacttgagacagaactcaaagaacttaacactcagtgggatcacatgtgccaacaggtctatgccagaaaggaggccttgaagggaggtttggagaaaactgtaagcctccagaaagatctatcagagatgcacgaatggatgacacaagctgaagaagagtatcttgagagagattttgaatataaaactccagatgaattacagaaagcagttgaagagatgaagagagctaaagaagaggcccaacaaaaagaagcgaaagtgaaactccttactgagtctgtaaatagtgtcatagctcaagctccacctgtagcacaagaggccttaaaaaaggaacttgaaactctaaccaccaactaccagtggctctgcactaggctgaatgggaaatgcaagactttggaagaagtttgggcatgttggcatgagttattgtcatacttggagaaagcaaacaagtggctaaatgaagtagaatttaaacttaaaaccactgaaaacattcctggcggagctgaggaaatctctgaggtgctagattcacttgaaaatttgatgcgacattcagaggataacccaaatcagattcgcatattggcacagaccctaacagatggcggagtcatggatgagctaatcaatgaggaacttgagacatttaattctcgttggagggaactacatgaagaggctgtaaggaggcaaaagttgcttgaacagagcatccagtctgcccaggagactgaaaaatccttacacttaatccaggagtccctcacattcattgacaagcagttggcagcttatattgcagacaaggtggacgcagctcaaatgcctcaggaagcccagaaaatccaatctgatttgacaagtcatgagatcagtttagaagaaatgaagaaacataatcaggggaaggaggctgcccaaagagtcctgtctcagattgatgttgcacagaaaaaattacaagatgtctccatgaagtttcgattattccagaaaccagccaattttgagcagcgtctacaagaaagtaagatgattttagatgaagtgaagatgcacttgcctgcattggaaacaaagagtgtggaacaggaagtagtacagtcacagctaaatcattgtgtgaacttgtataaaagtctgagtgaagtgaagtctgaagtggaaatggtgataaagactggacgtcagattgtacagaaaaagcagacggaaaatcccaaagaacttgatgaaagagtaacagctttgaaattgcattataatgagctgggagcaaaggtaacagaaagaaagcaacagttggagaaatgcttgaaattgtcccgtaagatgcgaaaggaaatgaatgtcttgacagaatggctggcagctacagatatggaattgacaaagagatcagcagttgaaggaatgcctagtaatttggattctgaagttgcctggggaaaggctactcaaaaagagattgagaaacagaaggtgcacctgaagagtatcacagaggtaggagaggccttgaaaacagttttgggcaagaaggagacgttggtggaagataaactcagtcttctgaatagtaactggatagctgtcacctcccgagcagaagagtggttaaatcttttgttggaataccagaaacacatggaaacttttgaccagaatgtggaccacatcacaaagtggatcattcaggctgacacacttttggatgaatcagagaaaaagaaaccccagcaaaaagaagacgtgcttaagcgtttaaaggcagaactgaatgacatacgcccaaaggtggactctacacgtgaccaagcagcaaacttgatggcaaaccgcggtgaccactgcaggaaattagtagagccccaaatctcagagctcaaccatcgatttgcagccatttcacacagaattaagactggaaaggcctccattcctttgaaggaattggagcagtttaactcagatatacaaaaattgcttgaaccactggaggctgaaattcagcagggggtgaatctgaaagaggaagacttcaataaagatatgaatgaagacaatgagggtactgtaaaagaattgttgcaaagaggagacaacttacaacaaagaatcacagatgagagaaagcgagaggaaataaagataaaacagcagctgttacagacaaaacataatgctctcaaggatttgaggtctcaaagaagaaaaaaggctctagaaatttctcatcagtggtatcagtacaagaggcaggctgatgatctcctgaaatgcttggatgacattgaaaaaaaattagccagcctacctgagcccagagatgaaaggaaaataaaggaaattgatcgggaattgcagaagaagaaagaggagctgaatgcagtgcgtaggcaagctgagggcttgtctgaggatggggccgcaatggcagtggagccaactcagatccagctcagcaagcgctggcgggaaattgagagcaaatttgctcagtttcgaagactcaactttgcacaaattcacactgtccgtgaagaaacgatgatggtgatgactgaagacatgcctttggaaatttcttatgtgccttctacttatttgactgaaatcactcatgtctcacaagccctattagaagtggaacaacttctcaatgctcctgacctctgtgctaaggactttgaagatctctttaagcaagaggagtctctgaagaatataaaagatagtctacaacaaagctcaggtcggattgacattattcatagcaagaagacagcagcattgcaaagtgcaacgcctgtggaaagggtgaagctacaggaagctctctcccagcttgatttccaatgggaaaaagttaacaaaatgtacaaggaccgacaagggcgatttgacagatctgttgagaaatggcggcgttttcattatgatataaagatatttaatcagtggctaacagaagctgaacagtttctcagaaagacacaaattcctgagaattgggaacatgctaaatacaaatggtatcttaaggaactccaggatggcattgggcagcggcaaactgttgtcagaacattgaatgcaactggggaagaaataattcagcaatcctcaaaaacagatgccagtattctacaggaaaaattgggaagcctgaatctgcggtggcaggaggtctgcaaacagctgtcagacagaaaaaagaggctagaagaacaaaagaatatcttgtcagaatttcaaagagatttaaatgaatttgttttatggttggaggaagcagataacattgctagtatcccacttgaacctggaaaagagcagcaactaaaagaaaagcttgagcaagtcaagttactggtggaagagttgcccctgcgccagggaattctcaaacaattaaatgaaactggaggacccgtgcttgtaagtgctcccataagcccagaagagcaagataaacttgaaaataagctcaagcagacaaatctccagtggataaaggtttccagagctttacctgagaaacaaggagaaattgaagctcaaataaaagaccttgggcagcttgaaaaaaagcttgaagaccttgaagagcagttaaatcatctgctgctgtggttatctcctattaggaatcagttggaaatttataaccaaccaaaccaagaaggaccatttgacgttcaggaaactgaaatagcagttcaagctaaacaaccggatgtggaagagattttgtctaaagggcagcatttgtacaaggaaaaaccagccactcagccagtgaagaggaagttagaagatctgagctctgagtggaaggcggtaaaccgtttacttcaagagctgagggcaaagcagcctgacctagctcctggactgaccactattggagcctctcctactcagactgttactctggtgacacaacctgtggttactaaggaaactgccatctccaaactagaaatgccatcttccttgatgttggaggtacctgctctggcagatttcaaccgggcttggacagaacttaccgactggctttctctgcttgatcaagttataaaatcacagagggtgatggtgggtgaccttgaggatatcaacgagatgatcatcaagcagaaggcaacaatgcaggatttggaacagaggcgtccccagttggaagaactcattaccgctgcccaaaatttgaaaaacaagaccagcaatcaagaggctagaacaatcattacggatcgaattgaaagaattcagaatcagtgggatgaagtacaagaacaccttcagaaccggaggcaacagttgaatgaaatgttaaaggattcaacacaatggctggaagctaaggaagaagctgagcaggtcttaggacaggccagagccaagcttgagtcatggaaggagggtccctatacagtagatgcaatccaaaagaaaatcacagaaaccaagcagttggccaaagacctccgccagtggcagacaaatgtagatgtggcaaatgacttggccctgaaacttctccgggattattctgcagatgataccagaaaagtccacatgataacagagaatatcaatgcctcttggagaagcattcataaaagggtgagtgagcgagaggctgctttggaagaaactcatagattactgcaacagttccccctggacctggaaaagtttcttgcctggcttacagaagctgaaacaactgccaatgtcctacaggatgctacccgtaaggaaaggctcctagaagactccaagggagtaaaagagctgatgaaacaatggcaagacctccaaggtgaaattgaagctcacacagatgtttatcacaacctggatgaaaacagccaaaaaatcctgagatccctggaaggttccgatgatgcagtcctgttacaaagacgtttggataacatgaacttcaagtggagtgaacttcggaaaaagtctctcaacattaggtcccatttggaagccagttctgaccagtggaagcgtctgcacctttctctgcaggaacttctggtgtggctacagctgaaagatgatgaattaagccggcaggcacctattggaggcgactttccagcagttcagaagcagaacgatgtacatagggccttcaagagggaattgaaaactaaagaacctgtaatcatgagtactcttgagactgtacgaatatttctgacagagcagcctttggaaggactagagaaactctaccaggagcccagagagctgcctcctgaggagagagcccagaatgtcactcggcttctacgaaagcaggctgaggaggtcaatactgagtgggaaaaattgaacctgcactccgctgactggcagagaaaaatagatgagacccttgaaagactccaggaacttcaagaggccacggatgagctggacctcaagctgcgccaagctgaggtgatcaagggatcctggcagcccgtgggcgatctcctcattgactctctccaagatcacctcgagaaagtcaaggcacttcgaggagaaattgcgcctctgaaagagaacgtgagccacgtcaatgaccttgctcgccagcttaccactttgggcattcagctctcaccgtataacctcagcactctggaagacctgaacaccagatggaagcttctgcaggtggccgtcgaggaccgagtcaggcagctgcatgaagcccacagggactttggtccagcatctcagcactttctttccacgtctgtccagggtccctgggagagagccatctcgccaaacaaagtgccctactatatcaaccacgagactcaaacaacttgctgggaccatcccaaaatgacagagctctaccagtctttagctgacctgaataatgtcagattctcagcttataggactgccatgaaactccgaagactgcagaaggccctttgcttggatctcttgagcctgtcagctgcatgtgatgccttggaccagcacaacctcaagcaaaatgaccagcccatggatatcctgcagattattaattgtttgaccactatttatgaccgcctggagcaagagcacaacaatttggtcaacgtccctctctgcgtggatatgtgtctgaactggctgctgaatgtttatgatacgggacgaacagggaggatccgtgtcctgtcttttaaaactggcatcatttccctgtgtaaagcacatttggaagacaagtacagataccttttcaagcaagtggcaagttcaacaggattttgtgaccagcgcaggctgggcctccttctgcatgattctatccaaattccaagacagttgggtgaagttgcatcctttgggggcagtaacattgagccaagtgtccggagctgcttccaatttgctaataataagccagagatcgaagcggccctcttcctagactggatgagactggaaccccagtccatggtgtggctgcccgtcctgcacagagtggctgctgcagaaactgccaagcatcaggccaaatgtaacatctgcaaagagtgtccaatcattggattcaggtacaggagtctaaagcactttaattatgacatctgccaaagctgctttttttctggtcgagttgcaaaaggccataaaatgcactatcccatggtggaatattgcactccgactacatcaggagaagatgttcgagactttgccaaggtactaaaaaacaaatttcgaaccaaaaggtattttgcgaagcatccccgaatgggctacctgccagtgcagactgtcttagagggggacaacatggaaactcccgttactctgatcaacttctggccagtagattctgcgcctgcctcgtcccctcagctttcacacgatgatactcattcacgcattgaacattatgctagcaggctagcagaaatggaaaacagcaatggatcttatctaaatgatagcatctctcctaatgagagcatagatgatgaacatttgttaatccagcattactgccaaagtttgaaccaggactcccccctgagccagcctcgtagtcctgcccagatcttgatttccttagagagtgaggaaagaggggagctagagagaatcctagcagatcttgaggaagaaaacaggaatctgcaagcagaatatgaccgtctaaagcagcagcacgaacataaaggcctgtccccactgccgtcccctcctgaaatgatgcccacctctccccagagtccccgggatgctgagctcattgctgaggccaagctactgcgtcaacacaaaggccgcctggaagccaggatgcaaatcctggaagaccacaataaacagctggagtcacagttacacaggctaaggcagctgctggagcaaccccaggcagaggccaaagtgaatggcacaacggtgtcctctccttctacctctctacagaggtccgacagcagtcagcctatgctgctccgagtggttggcagtcaaacttcggactccatgggtgaggaagatcttctcagtcctccccaggacacaagcacagggttagaggaggtgatggagcaactcaacaactccttccctagttcaagaggaagaaatacccctggaaagccaatgagagaggacacaatgtaggaagtcttttccacatggcagatgatttgggcagagcgatggagtccttagtatcagtcatgacagatgaagaaggagcagaataaatgttttacaactcctgattcccgcatggtttttataatattcatacaacaaagaggattagacagtaagagtttacaagaaataaatctatatttttgtgaagggtagtggtattatactgtagatttcagtagtttctaagtctgttattgttttgttaacaatggcaggttttacacgtctatgcaattgtacaaaaaagttataagaaaactacatgtaaaatcttgatagctaaataacttgccatttctttatatggaacgcattttgggttgtttaaaaatttataacagttataaagaaagattgtaaactaaagtgtgctttataaaaaaaagttgtttataaaaacccctaaaaacaaaacaaacacacacacacacacatacacacacacacacaaaactttgaggcagcgcattgttttgcatccttttggcgtgatatccatatgaaattcatggctttttctttttttgcatattaaagataagacttcctctaccaccacaccaaatgactactacacactgctcatttgagaactgtcagctgagtggggcaggcttgagttttcatttcatatatctatatgtctataagtatataaatactatagttatatagataaagagatacgaatttctatagactgactttttccattttttaaatgttcatgtcacatcctaatagaaagaaattacttctagtcagtcatccaggcttacctgcttggtctagaatggatttttcccggagccggaagccaggaggaaactacaccacactaaaacattgtctacagctccagatgtttctcattttaaacaactttccactgacaacgaaagtaaagtaaagtattggatttttttaaagggaacatgtgaatgaatacacaggacttattatatcagagtgagtaatcggttggttggttgattgattgattgattgatacattcagcttcctgctgctagcaatgccacgatttagatttaatgatgcttcagtggaaatcaatcagaaggtattctgaccttgtgaacatcagaaggtattttttaactcccaagcagtagcaggacgatgatagggctggagggctatggattcccagcccatccctgtgaaggagtaggccactctttaagtgaaggattggatgattgttcataatacataaagttctctgtaattacaactaaattattatgccctcttctcacagtcaaaaggaactgggtggtttggtttttgttgcttttttagatttattgtcccatgtgggatgagtttttaaatgccacaagacataatttaaaataaataaactttgggaaaaggtgtaagacagtagccccatcacatttgtgatactgacaggtatcaacccagaagcccatgaactgtgtttccatcctttgcatttctctgcgagtagttccacacaggtttgtaagtaagtaagaaagaaggcaaattgattcaaatgttacaaaaaaacccttcttggtggattagacaggttaaatatataaacaaacaaacaaaaattgctcaaaaaagaggagaaaagctcaagaggaaaagctaaggactggtaggaaaaagctttactctttcatgccattttatttctttttgatttttaaatcattcattcaatagataccaccgtgtgacctataattttgcaaatctgttacctctgacatcaagtgtaattagcttttggagagtgggctgacatcaagtgtaattagcttttggagagtgggttttgtccattattaataattaattaattaacatcaaacacggcttctcatgctatttctacctcactttggttttggggtgttcctgataattgtgcacacctgagttcacagcttcaccacttgtccattgcgttattttctttttcctttataattctttctttttccttcataattttcaaaagaaaacccaaagctctaaggtaacaaattaccaaattacatgaagatttggtttttgtcttgcatttttttcctttatgtgacgctggaccttttctttacccaaggatttttaaaactcagatttaaaacaaggggttactttacatcctactaagaagtttaagtaagtaagtttcattctaaaatcagaggtaaatagagtgcataaataattttgttttaatctttttgtttttcttttagacacattagctctggagtgagtctgtcataatatttgaacaaaaattgagagctttattgctgcattttaagcataattaatttggacattatttcgtgttgtgttctttataaccaccaagtattaaactgtaaatcataatgtaactgaagcataaacatcacatggcatgttttgtcattgttttcaggtactgagttcttacttgagtatcataatatattgtgttttaacaccaacactgtaacatttacgaattatttttttaaacttcagttttactgcattttcacaacatatcagacttcaccaaatatatgccttactattgtattatagtactgctttactgtgtatctcaataaagcacgcagttatgttacaaaaaagtaaaaac

SEQ ID NO: 319965 - DNA, 13778 bp, Homo sapiens
tcactgacacatagagtaacttctagttctccaagctctactcatgatgaaagagaagatgttcaaaagaaaacattcacaaaatgggtaaatgcacaattttctaagtttgggaagcagcatattgagaacctcttcagtgacctacaggatgggaggcgcctcctagacctcctcgaaggcctgacagggcaaaaactgccaaaagaaaaaggatccacaagagttcatgccctgaacaatgtcaacaaggcactgcgggttttgcagaacaataatgttgatttagtgaatattggaagtactgacatcgtagatggaaatcataaactgactcttggtttgatttggaatataatcctccactggcaggtcaaaaatgtaatgaaaaatatcatggctggattgcaacaaaccaacagtgaaaagattctcctgagctgggtccgacaatcaactcgtaattatccacaggttaatgtaatcaacttcaccaccagctggtctgatggcctggctttgaatgctctcatccatagtcataggccagacctatttgactggaatagtgtggtttgccagcagtcagccacacaacgactggaacatgcattcaacatcgccagatatcaattaggcatagagaaactactcgatcctgaagatgttgataccacctatccagataagaagtccatcttaatgtacatcacatcactcttccaagttttgcctcaacaagtgagcattgaagccatccaggaagtggaaatgttgccaaggccacctaaagtgactaaagaagaacattttcagttacatcatcaaatgcactattctcaacagatcacggtcagtctagcacagggatatgagagaacttcttcccctaagcctcgattcaagagctatgcctacacacaggctgcttatgtcaccacctctgaccctacacggagcccatttccttcacagcatttggaagctcctgaagacaagtcatttggcagttcattgatggagagtgaagtaaacctggaccgttatcaaacagctttagaagaagtattatcgtggcttctttctgctgaggacacattgcaagcacaaggagagatttctaatgatgtggaagtggtgaaagaccagtttcatactcatgaggggtacatgatggatttgacagcccatcagggccgggttggtaatattctacaattgggaagtaagctgattggaacaggaaaattatcagaagatgaagaaactgaagtacaagagcagatgaatctcctaaattcaagatgggaatgcctcagggtagctagcatggaaaaacaaagcaatttacatagagttttaatggatctccagaatcagaaactgaaagagttgaatgactggctaacaaaaacagaagaaagaacaaggaaaatggaggaagagcctcttggacctgatcttgaagacctaaaacgccaagtacaacaacataaggtgcttcaagaagatctagaacaagaacaagtcagggtcaattctctcactcacatggtggtggtagttgatgaatctagtggagatcacgcaactgctgctttggaagaacaacttaaggtattgggagatcgatgggcaaacatctgtagatggacagaagaccgctgggttcttttacaagacatccttctcaaatggcaacgtcttactgaagaacagtgcctttttagtgcatggctttcagaaaaagaagatgcagtgaacaagattcacacaactggctttaaagatcaaaatgaaatgttatcaagtcttcaaaaactggccgttttaaaagcggatctagaaaagaaaaagcaatccatgggcaaactgtattcactcaaacaagatcttctttcaacactgaagaataagtcagtgacccagaagacggaagcatggctggataactttgcccggtgttgggataatttagtccaaaaacttgaaaagagtacagcacagatttcacaggctgtcaccaccactcagccatcactaacacagacaactgtaatggaaacagtaactacggtgaccacaagggaacagatcctggtaaagcatgctcaagaggaacttccaccaccacctccccaaaagaagaggcagattactgtggattctgaaattaggaaaaggttggatgttgatataactgaacttcacagctggattactcgctcagaagctgtgttgcagagtcctgaatttgcaatctttcggaaggaaggcaacttctcagacttaaaagaaaaagtcaatgccatagagcgagaaaaagctgagaagttcagaaaactgcaagatgccagcagatcagctcaggccctggtggaacagatggtgaatgagggtgttaatgcagatagcatcaaacaagcctcagaacaactgaacagccggtggatcgaattctgccagttgctaagtgagagacttaactggctggagtatcagaacaacatcatcgctttctataatcagctacaacaattggagcagatgacaactactgctgaaaactggttgaaaatccaacccaccaccccatcagagccaacagcaattaaaagtcagttaaaaatttgtaaggatgaagtcaaccggctatcaggtcttcaacctcaaattgaacgattaaaaattcaaagcatagccctgaaagagaaaggacaaggacccatgttcctggatgcagactttgtggcctttacaaatcattttaagcaagtcttttctgatgtgcaggccagagagaaagagctacagacaatttttgacactttgccaccaatgcgctatcaggagaccatgagtgccatcaggacatgggtccagcagtcagaaaccaaactctccatacctcaacttagtgtcaccgactatgaaatcatggagcagagactcggggaattgcaggctttacaaagttctctgcaagagcaacaaagtggcctatactatctcagcaccactgtgaaagagatgtcgaagaaagcgccctctgaaattagccggaaatatcaatcagaatttgaagaaattgagggacgctggaagaagctctcctcccagctggttgagcattgtcaaaagctagaggagcaaatgaataaactccgaaaaattcagaatcacatacaaaccctgaagaaatggatggctgaagttgatgtttttctgaaggaggaatggcctgcccttggggattcagaaattctaaaaaagcagctgaaacagtgcagacttttagtcagtgatattcagacaattcagcccagtctaaacagtgtcaatgaaggtgggcagaagataaagaatgaagcagagccagagtttgcttcgagacttgagacagaactcaaagaacttaacactcagtgggatcacatgtgccaacaggtctatgccagaaaggaggccttgaagggaggtttggagaaaactgtaagcctccagaaagatctatcagagatgcacgaatggatgacacaagctgaagaagagtatcttgagagagattttgaatataaaactccagatgaattacagaaagcagttgaagagatgaagagagctaaagaagaggcccaacaaaaagaagcgaaagtgaaactccttactgagtctgtaaatagtgtcatagctcaagctccacctgtagcacaagaggccttaaaaaaggaacttgaaactctaaccaccaactaccagtggctctgcactaggctgaatgggaaatgcaagactttggaagaagtttgggcatgttggcatgagttattgtcatacttggagaaagcaaacaagtggctaaatgaagtagaatttaaacttaaaaccactgaaaacattcctggcggagctgaggaaatctctgaggtgctagattcacttgaaaatttgatgcgacattcagaggataacccaaatcagattcgcatattggcacagaccctaacagatggcggagtcatggatgagctaatcaatgaggaacttgagacatttaattctcgttggagggaactacatgaagaggctgtaaggaggcaaaagttgcttgaacagagcatccagtctgcccaggagactgaaaaatccttacacttaatccaggagtccctcacattcattgacaagcagttggcagcttatattgcagacaaggtggacgcagctcaaatgcctcaggaagcccagaaaatccaatctgatttgacaagtcatgagatcagtttagaagaaatgaagaaacataatcaggggaaggaggctgcccaaagagtcctgtctcagattgatgttgcacagaaaaaattacaagatgtctccatgaagtttcgattattccagaaaccagccaattttgagcagcgtctacaagaaagtaagatgattttagatgaagtgaagatgcacttgcctgcattggaaacaaagagtgtggaacaggaagtagtacagtcacagctaaatcattgtgtgaacttgtataaaagtctgagtgaagtgaagtctgaagtggaaatggtgataaagactggacgtcagattgtacagaaaaagcagacggaaaatcccaaagaacttgatgaaagagtaacagctttgaaattgcattataatgagctgggagcaaaggtaacagaaagaaagcaacagttggagaaatgcttgaaattgtcccgtaagatgcgaaaggaaatgaatgtcttgacagaatggctggcagctacagatatggaattgacaaagagatcagcagttgaaggaatgcctagtaatttggattctgaagttgcctggggaaaggctactcaaaaagagattgagaaacagaaggtgcacctgaagagtatcacagaggtaggagaggccttgaaaacagttttgggcaagaaggagacgttggtggaagataaactcagtcttctgaatagtaactggatagctgtcacctcccgagcagaagagtggttaaatcttttgttggaataccagaaacacatggaaacttttgaccagaatgtggaccacatcacaaagtggatcattcaggctgacacacttttggatgaatcagagaaaaagaaaccccagcaaaaagaagacgtgcttaagcgtttaaaggcagaactgaatgacatacgcccaaaggtggactctacacgtgaccaagcagcaaacttgatggcaaaccgcggtgaccactgcaggaaattagtagagccccaaatctcagagctcaaccatcgatttgcagccatttcacacagaattaagactggaaaggcctccattcctttgaaggaattggagcagtttaactcagatatacaaaaattgcttgaaccactggaggctgaaattcagcagggggtgaatctgaaagaggaagacttcaataaagatatgaatgaagacaatgagggtactgtaaaagaattgttgcaaagaggagacaacttacaacaaagaatcacagatgagagaaagcgagaggaaataaagataaaacagcagctgttacagacaaaacataatgctctcaaggatttgaggtctcaaagaagaaaaaaggctctagaaatttctcatcagtggtatcagtacaagaggcaggctgatgatctcctgaaatgcttggatgacattgaaaaaaaattagccagcctacctgagcccagagatgaaaggaaaataaaggaaattgatcgggaattgcagaagaagaaagaggagctgaatgcagtgcgtaggcaagctgagggcttgtctgaggatggggccgcaatggcagtggagccaactcagatccagctcagcaagcgctggcgggaaattgagagcaaatttgctcagtttcgaagactcaactttgcacaaattcacactgtccgtgaagaaacgatgatggtgatgactgaagacatgcctttggaaatttcttatgtgccttctacttatttgactgaaatcactcatgtctcacaagccctattagaagtggaacaacttctcaatgctcctgacctctgtgctaaggactttgaagatctctttaagcaagaggagtctctgaagaatataaaagatagtctacaacaaagctcaggtcggattgacattattcatagcaagaagacagcagcattgcaaagtgcaacgcctgtggaaagggtgaagctacaggaagctctctcccagcttgatttccaatgggaaaaagttaacaaaatgtacaaggaccgacaagggcgatttgacagatctgttgagaaatggcggcgttttcattatgatataaagatatttaatcagtggctaacagaagctgaacagtttctcagaaagacacaaattcctgagaattgggaacatgctaaatacaaatggtatcttaaggaactccaggatggcattgggcagcggcaaactgttgtcagaacattgaatgcaactggggaagaaataattcagcaatcctcaaaaacagatgccagtattctacaggaaaaattgggaagcctgaatctgcggtggcaggaggtctgcaaacagctgtcagacagaaaaaagaggctagaagaacaaaagaatatcttgtcagaatttcaaagagatttaaatgaatttgttttatggttggaggaagcagataacattgctagtatcccacttgaacctggaaaagagcagcaactaaaagaaaagcttgagcaagtcaagttactggtggaagagttgcccctgcgccagggaattctcaaacaattaaatgaaactggaggacccgtgcttgtaagtgctcccataagcccagaagagcaagataaacttgaaaataagctcaagcagacaaatctccagtggataaaggtttccagagctttacctgagaaacaaggagaaattgaagctcaaataaaagaccttgggcagcttgaaaaaaagcttgaagaccttgaagagcagttaaatcatctgctgctgtggttatctcctattaggaatcagttggaaatttataaccaaccaaaccaagaaggaccatttgacgttcaggaaactgaaatagcagttcaagctaaacaaccggatgtggaagagattttgtctaaagggcagcatttgtacaaggaaaaaccagccactcagccagtgaagaggaagttagaagatctgagctctgagtggaaggcggtaaaccgtttacttcaagagctgagggcaaagcagcctgacctagctcctggactgaccactattggagcctctcctactcagactgttactctggtgacacaacctgtggttactaaggaaactgccatctccaaactagaaatgccatcttccttgatgttggaggtacctgctctggcagatttcaaccgggcttggacagaacttaccgactggctttctctgcttgatcaagttataaaatcacagagggtgatggtgggtgaccttgaggatatcaacgagatgatcatcaagcagaaggcaacaatgcaggatttggaacagaggcgtccccagttggaagaactcattaccgctgcccaaaatttgaaaaacaagaccagcaatcaagaggctagaacaatcattacggatcgaattgaaagaattcagaatcagtgggatgaagtacaagaacaccttcagaaccggaggcaacagttgaatgaaatgttaaaggattcaacacaatggctggaagctaaggaagaagctgagcaggtcttaggacaggccagagccaagcttgagtcatggaaggagggtccctatacagtagatgcaatccaaaagaaaatcacagaaaccaagcagttggccaaagacctccgccagtggcagacaaatgtagatgtggcaaatgacttggccctgaaacttctccgggattattctgcagatgataccagaaaagtccacatgataacagagaatatcaatgcctcttggagaagcattcataaaagggtgagtgagcgagaggctgctttggaagaaactcatagattactgcaacagttccccctggacctggaaaagtttcttgcctggcttacagaagctgaaacaactgccaatgtcctacaggatgctacccgtaaggaaaggctcctagaagactccaagggagtaaaagagctgatgaaacaatggcaagacctccaaggtgaaattgaagctcacacagatgtttatcacaacctggatgaaaacagccaaaaaatcctgagatccctggaaggttccgatgatgcagtcctgttacaaagacgtttggataacatgaacttcaagtggagtgaacttcggaaaaagtctctcaacattaggtcccatttggaagccagttctgaccagtggaagcgtctgcacctttctctgcaggaacttctggtgtggctacagctgaaagatgatgaattaagccggcaggcacctattggaggcgactttccagcagttcagaagcagaacgatgtacatagggccttcaagagggaattgaaaactaaagaacctgtaatcatgagtactcttgagactgtacgaatatttctgacagagcagcctttggaaggactagagaaactctaccaggagcccagagagctgcctcctgaggagagagcccagaatgtcactcggcttctacgaaagcaggctgaggaggtcaatactgagtgggaaaaattgaacctgcactccgctgactggcagagaaaaatagatgagacccttgaaagactccaggaacttcaagaggccacggatgagctggacctcaagctgcgccaagctgaggtgatcaagggatcctggcagcccgtgggcgatctcctcattgactctctccaagatcacctcgagaaagtcaaggcacttcgaggagaaattgcgcctctgaaagagaacgtgagccacgtcaatgaccttgctcgccagcttaccactttgggcattcagctctcaccgtataacctcagcactctggaagacctgaacaccagatggaagcttctgcaggtggccgtcgaggaccgagtcaggcagctgcatgaagcccacagggactttggtccagcatctcagcactttctttccacgtctgtccagggtccctgggagagagccatctcgccaaacaaagtgccctactatatcaaccacgagactcaaacaacttgctgggaccatcccaaaatgacagagctctaccagtctttagctgacctgaataatgtcagattctcagcttataggactgccatgaaactccgaagactgcagaaggccctttgcttggatctcttgagcctgtcagctgcatgtgatgccttggaccagcacaacctcaagcaaaatgaccagcccatggatatcctgcagattattaattgtttgaccactatttatgaccgcctggagcaagagcacaacaatttggtcaacgtccctctctgcgtggatatgtgtctgaactggctgctgaatgtttatgatacgggacgaacagggaggatccgtgtcctgtcttttaaaactggcatcatttccctgtgtaaagcacatttggaagacaagtacagataccttttcaagcaagtggcaagttcaacaggattttgtgaccagcgcaggctgggcctccttctgcatgattctatccaaattccaagacagttgggtgaagttgcatcctttgggggcagtaacattgagccaagtgtccggagctgcttccaatttgctaataataagccagagatcgaagcggccctcttcctagactggatgagactggaaccccagtccatggtgtggctgcccgtcctgcacagagtggctgctgcagaaactgccaagcatcaggccaaatgtaacatctgcaaagagtgtccaatcattggattcaggtacaggagtctaaagcactttaattatgacatctgccaaagctgctttttttctggtcgagttgcaaaaggccataaaatgcactatcccatggtggaatattgcactccgactacatcaggagaagatgttcgagactttgccaaggtactaaaaaacaaatttcgaaccaaaaggtattttgcgaagcatccccgaatgggctacctgccagtgcagactgtcttagagggggacaacatggaaactcccgttactctgatcaacttctggccagtagattctgcgcctgcctcgtcccctcagctttcacacgatgatactcattcacgcattgaacattatgctagcaggctagcagaaatggaaaacagcaatggatcttatctaaatgatagcatctctcctaatgagagcatagatgatgaacatttgttaatccagcattactgccaaagtttgaaccaggactcccccctgagccagcctcgtagtcctgcccagatcttgatttccttagagagtgaggaaagaggggagctagagagaatcctagcagatcttgaggaagaaaacaggaatctgcaagcagaatatgaccgtctaaagcagcagcacgaacataaaggcctgtccccactgccgtcccctcctgaaatgatgcccacctctccccagagtccccgggatgctgagctcattgctgaggccaagctactgcgtcaacacaaaggccgcctggaagccaggatgcaaatcctggaagaccacaataaacagctggagtcacagttacacaggctaaggcagctgctggagcaaccccaggcagaggccaaagtgaatggcacaacggtgtcctctccttctacctctctacagaggtccgacagcagtcagcctatgctgctccgagtggttggcagtcaaacttcggactccatgggtgaggaagatcttctcagtcctccccaggacacaagcacagggttagaggaggtgatggagcaactcaacaactccttccctagttcaagaggaagaaatacccctggaaagccaatgagagaggacacaatgtaggaagtcttttccacatggcagatgatttgggcagagcgatggagtccttagtatcagtcatgacagatgaagaaggagcagaataaatgttttacaactcctgattcccgcatggtttttataatattcatacaacaaagaggattagacagtaagagtttacaagaaataaatctatatttttgtgaagggtagtggtattatactgtagatttcagtagtttctaagtctgttattgttttgttaacaatggcaggttttacacgtctatgcaattgtacaaaaaagttataagaaaactacatgtaaaatcttgatagctaaataacttgccatttctttatatggaacgcattttgggttgtttaaaaatttataacagttataaagaaagattgtaaactaaagtgtgctttataaaaaaaagttgtttataaaaacccctaaaaacaaaacaaacacacacacacacacatacacacacacacacaaaactttgaggcagcgcattgttttgcatccttttggcgtgatatccatatgaaattcatggctttttctttttttgcatattaaagataagacttcctctaccaccacaccaaatgactactacacactgctcatttgagaactgtcagctgagtggggcaggcttgagttttcatttcatatatctatatgtctataagtatataaatactatagttatatagataaagagatacgaatttctatagactgactttttccattttttaaatgttcatgtcacatcctaatagaaagaaattacttctagtcagtcatccaggcttacctgcttggtctagaatggatttttcccggagccggaagccaggaggaaactacaccacactaaaacattgtctacagctccagatgtttctcattttaaacaactttccactgacaacgaaagtaaagtaaagtattggatttttttaaagggaacatgtgaatgaatacacaggacttattatatcagagtgagtaatcggttggttggttgattgattgattgattgatacattcagcttcctgctgctagcaatgccacgatttagatttaatgatgcttcagtggaaatcaatcagaaggtattctgaccttgtgaacatcagaaggtattttttaactcccaagcagtagcaggacgatgatagggctggagggctatggattcccagcccatccctgtgaaggagtaggccactctttaagtgaaggattggatgattgttcataatacataaagttctctgtaattacaactaaattattatgccctcttctcacagtcaaaaggaactgggtggtttggtttttgttgcttttttagatttattgtcccatgtgggatgagtttttaaatgccacaagacataatttaaaataaataaactttgggaaaaggtgtaagacagtagccccatcacatttgtgatactgacaggtatcaacccagaagcccatgaactgtgtttccatcctttgcatttctctgcgagtagttccacacaggtttgtaagtaagtaagaaagaaggcaaattgattcaaatgttacaaaaaaacccttcttggtggattagacaggttaaatatataaacaaacaaacaaaaattgctcaaaaaagaggagaaaagctcaagaggaaaagctaaggactggtaggaaaaagctttactctttcatgccattttatttctttttgatttttaaatcattcattcaatagataccaccgtgtgacctataattttgcaaatctgttacctctgacatcaagtgtaattagcttttggagagtgggctgacatcaagtgtaattagcttttggagagtgggttttgtccattattaataattaattaattaacatcaaacacggcttctcatgctatttctacctcactttggttttggggtgttcctgataattgtgcacacctgagttcacagcttcaccacttgtccattgcgttattttctttttcctttataattctttctttttccttcataattttcaaaagaaaacccaaagctctaaggtaacaaattaccaaattacatgaagatttggtttttgtcttgcatttttttcctttatgtgacgctggaccttttctttacccaaggatttttaaaactcagatttaaaacaaggggttactttacatcctactaagaagtttaagtaagtaagtttcattctaaaatcagaggtaaatagagtgcataaataattttgttttaatctttttgtttttcttttagacacattagctctggagtgagtctgtcataatatttgaacaaaaattgagagctttattgctgcattttaagcataattaatttggacattatttcgtgttgtgttctttataaccaccaagtattaaactgtaaatcataatgtaactgaagcataaacatcacatggcatgttttgtcattgttttcaggtactgagttcttacttgagtatcataatatattgtgttttaacaccaacactgtaacatttacgaattatttttttaaacttcagttttactgcattttcacaacatatcagacttcaccaaatatatgccttactattgtattatagtactgctttactgtgtatctcaataaagcacgcagttatgttacaaaaaagtaaaaac

SEQ ID NO: 319966 - DNA, 9787 bp, Homo sapiens
gttcaagagatcaggaggaacattcgacctgagaaagacagattgcaatgactgagattattttgctaattttttttccagcctatttccttaatgctgtaaggaggcaaaagttgcttgaacagagcatccagtctgcccaggagactgaaaaatccttacacttaatccaggagtccctcacattcattgacaagcagttggcagcttatattgcagacaaggtggacgcagctcaaatgcctcaggaagcccagaaaatccaatctgatttgacaagtcatgagatcagtttagaagaaatgaagaaacataatcaggggaaggaggctgcccaaagagtcctgtctcagattgatgttgcacagaaaaaattacaagatgtctccatgaagtttcgattattccagaaaccagccaattttgagcagcgtctacaagaaagtaagatgattttagatgaagtgaagatgcacttgcctgcattggaaacaaagagtgtggaacaggaagtagtacagtcacagctaaatcattgtgtgaacttgtataaaagtctgagtgaagtgaagtctgaagtggaaatggtgataaagactggacgtcagattgtacagaaaaagcagacggaaaatcccaaagaacttgatgaaagagtaacagctttgaaattgcattataatgagctgggagcaaaggtaacagaaagaaagcaacagttggagaaatgcttgaaattgtcccgtaagatgcgaaaggaaatgaatgtcttgacagaatggctggcagctacagatatggaattgacaaagagatcagcagttgaaggaatgcctagtaatttggattctgaagttgcctggggaaaggctactcaaaaagagattgagaaacagaaggtgcacctgaagagtatcacagaggtaggagaggccttgaaaacagttttgggcaagaaggagacgttggtggaagataaactcagtcttctgaatagtaactggatagctgtcacctcccgagcagaagagtggttaaatcttttgttggaataccagaaacacatggaaacttttgaccagaatgtggaccacatcacaaagtggatcattcaggctgacacacttttggatgaatcagagaaaaagaaaccccagcaaaaagaagacgtgcttaagcgtttaaaggcagaactgaatgacatacgcccaaaggtggactctacacgtgaccaagcagcaaacttgatggcaaaccgcggtgaccactgcaggaaattagtagagccccaaatctcagagctcaaccatcgatttgcagccatttcacacagaattaagactggaaaggcctccattcctttgaaggaattggagcagtttaactcagatatacaaaaattgcttgaaccactggaggctgaaattcagcagggggtgaatctgaaagaggaagacttcaataaagatatgaatgaagacaatgagggtactgtaaaagaattgttgcaaagaggagacaacttacaacaaagaatcacagatgagagaaagcgagaggaaataaagataaaacagcagctgttacagacaaaacataatgctctcaaggatttgaggtctcaaagaagaaaaaaggctctagaaatttctcatcagtggtatcagtacaagaggcaggctgatgatctcctgaaatgcttggatgacattgaaaaaaaattagccagcctacctgagcccagagatgaaaggaaaataaaggaaattgatcgggaattgcagaagaagaaagaggagctgaatgcagtgcgtaggcaagctgagggcttgtctgaggatggggccgcaatggcagtggagccaactcagatccagctcagcaagcgctggcgggaaattgagagcaaatttgctcagtttcgaagactcaactttgcacaaattcacactgtccgtgaagaaacgatgatggtgatgactgaagacatgcctttggaaatttcttatgtgccttctacttatttgactgaaatcactcatgtctcacaagccctattagaagtggaacaacttctcaatgctcctgacctctgtgctaaggactttgaagatctctttaagcaagaggagtctctgaagaatataaaagatagtctacaacaaagctcaggtcggattgacattattcatagcaagaagacagcagcattgcaaagtgcaacgcctgtggaaagggtgaagctacaggaagctctctcccagcttgatttccaatgggaaaaagttaacaaaatgtacaaggaccgacaagggcgatttgacagatctgttgagaaatggcggcgttttcattatgatataaagatatttaatcagtggctaacagaagctgaacagtttctcagaaagacacaaattcctgagaattgggaacatgctaaatacaaatggtatcttaaggaactccaggatggcattgggcagcggcaaactgttgtcagaacattgaatgcaactggggaagaaataattcagcaatcctcaaaaacagatgccagtattctacaggaaaaattgggaagcctgaatctgcggtggcaggaggtctgcaaacagctgtcagacagaaaaaagaggctagaagaacaaaagaatatcttgtcagaatttcaaagagatttaaatgaatttgttttatggttggaggaagcagataacattgctagtatcccacttgaacctggaaaagagcagcaactaaaagaaaagcttgagcaagtcaagttactggtggaagagttgcccctgcgccagggaattctcaaacaattaaatgaaactggaggacccgtgcttgtaagtgctcccataagcccagaagagcaagataaacttgaaaataagctcaagcagacaaatctccagtggataaaggtttccagagctttacctgagaaacaaggagaaattgaagctcaaataaaagaccttgggcagcttgaaaaaaagcttgaagaccttgaagagcagttaaatcatctgctgctgtggttatctcctattaggaatcagttggaaatttataaccaaccaaaccaagaaggaccatttgacgttcaggaaactgaaatagcagttcaagctaaacaaccggatgtggaagagattttgtctaaagggcagcatttgtacaaggaaaaaccagccactcagccagtgaagaggaagttagaagatctgagctctgagtggaaggcggtaaaccgtttacttcaagagctgagggcaaagcagcctgacctagctcctggactgaccactattggagcctctcctactcagactgttactctggtgacacaacctgtggttactaaggaaactgccatctccaaactagaaatgccatcttccttgatgttggaggtacctgctctggcagatttcaaccgggcttggacagaacttaccgactggctttctctgcttgatcaagttataaaatcacagagggtgatggtgggtgaccttgaggatatcaacgagatgatcatcaagcagaaggcaacaatgcaggatttggaacagaggcgtccccagttggaagaactcattaccgctgcccaaaatttgaaaaacaagaccagcaatcaagaggctagaacaatcattacggatcgaattgaaagaattcagaatcagtgggatgaagtacaagaacaccttcagaaccggaggcaacagttgaatgaaatgttaaaggattcaacacaatggctggaagctaaggaagaagctgagcaggtcttaggacaggccagagccaagcttgagtcatggaaggagggtccctatacagtagatgcaatccaaaagaaaatcacagaaaccaagcagttggccaaagacctccgccagtggcagacaaatgtagatgtggcaaatgacttggccctgaaacttctccgggattattctgcagatgataccagaaaagtccacatgataacagagaatatcaatgcctcttggagaagcattcataaaagggtgagtgagcgagaggctgctttggaagaaactcatagattactgcaacagttccccctggacctggaaaagtttcttgcctggcttacagaagctgaaacaactgccaatgtcctacaggatgctacccgtaaggaaaggctcctagaagactccaagggagtaaaagagctgatgaaacaatggcaagacctccaaggtgaaattgaagctcacacagatgtttatcacaacctggatgaaaacagccaaaaaatcctgagatccctggaaggttccgatgatgcagtcctgttacaaagacgtttggataacatgaacttcaagtggagtgaacttcggaaaaagtctctcaacattaggtcccatttggaagccagttctgaccagtggaagcgtctgcacctttctctgcaggaacttctggtgtggctacagctgaaagatgatgaattaagccggcaggcacctattggaggcgactttccagcagttcagaagcagaacgatgtacatagggccttcaagagggaattgaaaactaaagaacctgtaatcatgagtactcttgagactgtacgaatatttctgacagagcagcctttggaaggactagagaaactctaccaggagcccagagagctgcctcctgaggagagagcccagaatgtcactcggcttctacgaaagcaggctgaggaggtcaatactgagtgggaaaaattgaacctgcactccgctgactggcagagaaaaatagatgagacccttgaaagactccaggaacttcaagaggccacggatgagctggacctcaagctgcgccaagctgaggtgatcaagggatcctggcagcccgtgggcgatctcctcattgactctctccaagatcacctcgagaaagtcaaggcacttcgaggagaaattgcgcctctgaaagagaacgtgagccacgtcaatgaccttgctcgccagcttaccactttgggcattcagctctcaccgtataacctcagcactctggaagacctgaacaccagatggaagcttctgcaggtggccgtcgaggaccgagtcaggcagctgcatgaagcccacagggactttggtccagcatctcagcactttctttccacgtctgtccagggtccctgggagagagccatctcgccaaacaaagtgccctactatatcaaccacgagactcaaacaacttgctgggaccatcccaaaatgacagagctctaccagtctttagctgacctgaataatgtcagattctcagcttataggactgccatgaaactccgaagactgcagaaggccctttgcttggatctcttgagcctgtcagctgcatgtgatgccttggaccagcacaacctcaagcaaaatgaccagcccatggatatcctgcagattattaattgtttgaccactatttatgaccgcctggagcaagagcacaacaatttggtcaacgtccctctctgcgtggatatgtgtctgaactggctgctgaatgtttatgatacgggacgaacagggaggatccgtgtcctgtcttttaaaactggcatcatttccctgtgtaaagcacatttggaagacaagtacagataccttttcaagcaagtggcaagttcaacaggattttgtgaccagcgcaggctgggcctccttctgcatgattctatccaaattccaagacagttgggtgaagttgcatcctttgggggcagtaacattgagccaagtgtccggagctgcttccaatttgctaataataagccagagatcgaagcggccctcttcctagactggatgagactggaaccccagtccatggtgtggctgcccgtcctgcacagagtggctgctgcagaaactgccaagcatcaggccaaatgtaacatctgcaaagagtgtccaatcattggattcaggtacaggagtctaaagcactttaattatgacatctgccaaagctgctttttttctggtcgagttgcaaaaggccataaaatgcactatcccatggtggaatattgcactccgactacatcaggagaagatgttcgagactttgccaaggtactaaaaaacaaatttcgaaccaaaaggtattttgcgaagcatccccgaatgggctacctgccagtgcagactgtcttagagggggacaacatggaaactcccgttactctgatcaacttctggccagtagattctgcgcctgcctcgtcccctcagctttcacacgatgatactcattcacgcattgaacattatgctagcaggctagcagaaatggaaaacagcaatggatcttatctaaatgatagcatctctcctaatgagagcatagatgatgaacatttgttaatccagcattactgccaaagtttgaaccaggactcccccctgagccagcctcgtagtcctgcccagatcttgatttccttagagagtgaggaaagaggggagctagagagaatcctagcagatcttgaggaagaaaacaggaatctgcaagcagaatatgaccgtctaaagcagcagcacgaacataaaggcctgtccccactgccgtcccctcctgaaatgatgcccacctctccccagagtccccgggatgctgagctcattgctgaggccaagctactgcgtcaacacaaaggccgcctggaagccaggatgcaaatcctggaagaccacaataaacagctggagtcacagttacacaggctaaggcagctgctggagcaaccccaggcagaggccaaagtgaatggcacaacggtgtcctctccttctacctctctacagaggtccgacagcagtcagcctatgctgctccgagtggttggcagtcaaacttcggactccatgggtgaggaagatcttctcagtcctccccaggacacaagcacagggttagaggaggtgatggagcaactcaacaactccttccctagttcaagaggaagaaatacccctggaaagccaatgagagaggacacaatgtaggaagtcttttccacatggcagatgatttgggcagagcgatggagtccttagtatcagtcatgacagatgaagaaggagcagaataaatgttttacaactcctgattcccgcatggtttttataatattcatacaacaaagaggattagacagtaagagtttacaagaaataaatctatatttttgtgaagggtagtggtattatactgtagatttcagtagtttctaagtctgttattgttttgttaacaatggcaggttttacacgtctatgcaattgtacaaaaaagttataagaaaactacatgtaaaatcttgatagctaaataacttgccatttctttatatggaacgcattttgggttgtttaaaaatttataacagttataaagaaagattgtaaactaaagtgtgctttataaaaaaaagttgtttataaaaacccctaaaaacaaaacaaacacacacacacacacatacacacacacacacaaaactttgaggcagcgcattgttttgcatccttttggcgtgatatccatatgaaattcatggctttttctttttttgcatattaaagataagacttcctctaccaccacaccaaatgactactacacactgctcatttgagaactgtcagctgagtggggcaggcttgagttttcatttcatatatctatatgtctataagtatataaatactatagttatatagataaagagatacgaatttctatagactgactttttccattttttaaatgttcatgtcacatcctaatagaaagaaattacttctagtcagtcatccaggcttacctgcttggtctagaatggatttttcccggagccggaagccaggaggaaactacaccacactaaaacattgtctacagctccagatgtttctcattttaaacaactttccactgacaacgaaagtaaagtaaagtattggatttttttaaagggaacatgtgaatgaatacacaggacttattatatcagagtgagtaatcggttggttggttgattgattgattgattgatacattcagcttcctgctgctagcaatgccacgatttagatttaatgatgcttcagtggaaatcaatcagaaggtattctgaccttgtgaacatcagaaggtattttttaactcccaagcagtagcaggacgatgatagggctggagggctatggattcccagcccatccctgtgaaggagtaggccactctttaagtgaaggattggatgattgttcataatacataaagttctctgtaattacaactaaattattatgccctcttctcacagtcaaaaggaactgggtggtttggtttttgttgcttttttagatttattgtcccatgtgggatgagtttttaaatgccacaagacataatttaaaataaataaactttgggaaaaggtgtaagacagtagccccatcacatttgtgatactgacaggtatcaacccagaagcccatgaactgtgtttccatcctttgcatttctctgcgagtagttccacacaggtttgtaagtaagtaagaaagaaggcaaattgattcaaatgttacaaaaaaacccttcttggtggattagacaggttaaatatataaacaaacaaacaaaaattgctcaaaaaagaggagaaaagctcaagaggaaaagctaaggactggtaggaaaaagctttactctttcatgccattttatttctttttgatttttaaatcattcattcaatagataccaccgtgtgacctataattttgcaaatctgttacctctgacatcaagtgtaattagcttttggagagtgggctgacatcaagtgtaattagcttttggagagtgggttttgtccattattaataattaattaattaacatcaaacacggcttctcatgctatttctacctcactttggttttggggtgttcctgataattgtgcacacctgagttcacagcttcaccacttgtccattgcgttattttctttttcctttataattctttctttttccttcataattttcaaaagaaaacccaaagctctaaggtaacaaattaccaaattacatgaagatttggtttttgtcttgcatttttttcctttatgtgacgctggaccttttctttacccaaggatttttaaaactcagatttaaaacaaggggttactttacatcctactaagaagtttaagtaagtaagtttcattctaaaatcagaggtaaatagagtgcataaataattttgttttaatctttttgtttttcttttagacacattagctctggagtgagtctgtcataatatttgaacaaaaattgagagctttattgctgcattttaagcataattaatttggacattatttcgtgttgtgttctttataaccaccaagtattaaactgtaaatcataatgtaactgaagcataaacatcacatggcatgttttgtcattgttttcaggtactgagttcttacttgagtatcataatatattgtgttttaacaccaacactgtaacatttacgaattatttttttaaacttcagttttactgcattttcacaacatatcagacttcaccaaatatatgccttactattgtattatagtactgctttactgtgtatctcaataaagcacgcagttatgttacaaaaaagtaaaaac

SEQ ID NO: 319967 - DNA, 7353 bp, Homo sapiens
acactagcaatggcaaagctttgtgcggaggcattgctggctgctctgaactaaaagcatccgtggggaccgaaagaggtttttgcacaccttattaaggaactccaggatggcattgggcagcggcaaactgttgtcagaacattgaatgcaactggggaagaaataattcagcaatcctcaaaaacagatgccagtattctacaggaaaaattgggaagcctgaatctgcggtggcaggaggtctgcaaacagctgtcagacagaaaaaagaggctagaagaacaaaagaatatcttgtcagaatttcaaagagatttaaatgaatttgttttatggttggaggaagcagataacattgctagtatcccacttgaacctggaaaagagcagcaactaaaagaaaagcttgagcaagtcaagttactggtggaagagttgcccctgcgccagggaattctcaaacaattaaatgaaactggaggacccgtgcttgtaagtgctcccataagcccagaagagcaagataaacttgaaaataagctcaagcagacaaatctccagtggataaaggtttccagagctttacctgagaaacaaggagaaattgaagctcaaataaaagaccttgggcagcttgaaaaaaagcttgaagaccttgaagagcagttaaatcatctgctgctgtggttatctcctattaggaatcagttggaaatttataaccaaccaaaccaagaaggaccatttgacgttcaggaaactgaaatagcagttcaagctaaacaaccggatgtggaagagattttgtctaaagggcagcatttgtacaaggaaaaaccagccactcagccagtgaagaggaagttagaagatctgagctctgagtggaaggcggtaaaccgtttacttcaagagctgagggcaaagcagcctgacctagctcctggactgaccactattggagcctctcctactcagactgttactctggtgacacaacctgtggttactaaggaaactgccatctccaaactagaaatgccatcttccttgatgttggaggtacctgctctggcagatttcaaccgggcttggacagaacttaccgactggctttctctgcttgatcaagttataaaatcacagagggtgatggtgggtgaccttgaggatatcaacgagatgatcatcaagcagaaggcaacaatgcaggatttggaacagaggcgtccccagttggaagaactcattaccgctgcccaaaatttgaaaaacaagaccagcaatcaagaggctagaacaatcattacggatcgaattgaaagaattcagaatcagtgggatgaagtacaagaacaccttcagaaccggaggcaacagttgaatgaaatgttaaaggattcaacacaatggctggaagctaaggaagaagctgagcaggtcttaggacaggccagagccaagcttgagtcatggaaggagggtccctatacagtagatgcaatccaaaagaaaatcacagaaaccaagcagttggccaaagacctccgccagtggcagacaaatgtagatgtggcaaatgacttggccctgaaacttctccgggattattctgcagatgataccagaaaagtccacatgataacagagaatatcaatgcctcttggagaagcattcataaaagggtgagtgagcgagaggctgctttggaagaaactcatagattactgcaacagttccccctggacctggaaaagtttcttgcctggcttacagaagctgaaacaactgccaatgtcctacaggatgctacccgtaaggaaaggctcctagaagactccaagggagtaaaagagctgatgaaacaatggcaagacctccaaggtgaaattgaagctcacacagatgtttatcacaacctggatgaaaacagccaaaaaatcctgagatccctggaaggttccgatgatgcagtcctgttacaaagacgtttggataacatgaacttcaagtggagtgaacttcggaaaaagtctctcaacattaggtcccatttggaagccagttctgaccagtggaagcgtctgcacctttctctgcaggaacttctggtgtggctacagctgaaagatgatgaattaagccggcaggcacctattggaggcgactttccagcagttcagaagcagaacgatgtacatagggccttcaagagggaattgaaaactaaagaacctgtaatcatgagtactcttgagactgtacgaatatttctgacagagcagcctttggaaggactagagaaactctaccaggagcccagagagctgcctcctgaggagagagcccagaatgtcactcggcttctacgaaagcaggctgaggaggtcaatactgagtgggaaaaattgaacctgcactccgctgactggcagagaaaaatagatgagacccttgaaagactccaggaacttcaagaggccacggatgagctggacctcaagctgcgccaagctgaggtgatcaagggatcctggcagcccgtgggcgatctcctcattgactctctccaagatcacctcgagaaagtcaaggcacttcgaggagaaattgcgcctctgaaagagaacgtgagccacgtcaatgaccttgctcgccagcttaccactttgggcattcagctctcaccgtataacctcagcactctggaagacctgaacaccagatggaagcttctgcaggtggccgtcgaggaccgagtcaggcagctgcatgaagcccacagggactttggtccagcatctcagcactttctttccacgtctgtccagggtccctgggagagagccatctcgccaaacaaagtgccctactatatcaaccacgagactcaaacaacttgctgggaccatcccaaaatgacagagctctaccagtctttagctgacctgaataatgtcagattctcagcttataggactgccatgaaactccgaagactgcagaaggccctttgcttggatctcttgagcctgtcagctgcatgtgatgccttggaccagcacaacctcaagcaaaatgaccagcccatggatatcctgcagattattaattgtttgaccactatttatgaccgcctggagcaagagcacaacaatttggtcaacgtccctctctgcgtggatatgtgtctgaactggctgctgaatgtttatgatacgggacgaacagggaggatccgtgtcctgtcttttaaaactggcatcatttccctgtgtaaagcacatttggaagacaagtacagataccttttcaagcaagtggcaagttcaacaggattttgtgaccagcgcaggctgggcctccttctgcatgattctatccaaattccaagacagttgggtgaagttgcatcctttgggggcagtaacattgagccaagtgtccggagctgcttccaatttgctaataataagccagagatcgaagcggccctcttcctagactggatgagactggaaccccagtccatggtgtggctgcccgtcctgcacagagtggctgctgcagaaactgccaagcatcaggccaaatgtaacatctgcaaagagtgtccaatcattggattcaggtacaggagtctaaagcactttaattatgacatctgccaaagctgctttttttctggtcgagttgcaaaaggccataaaatgcactatcccatggtggaatattgcactccgactacatcaggagaagatgttcgagactttgccaaggtactaaaaaacaaatttcgaaccaaaaggtattttgcgaagcatccccgaatgggctacctgccagtgcagactgtcttagagggggacaacatggaaacgcctgcctcgtcccctcagctttcacacgatgatactcattcacgcattgaacattatgctagcaggctagcagaaatggaaaacagcaatggatcttatctaaatgatagcatctctcctaatgagagcatagatgatgaacatttgttaatccagcattactgccaaagtttgaaccaggactcccccctgagccagcctcgtagtcctgcccagatcttgatttccttagagagtgaggaaagaggggagctagagagaatcctagcagatcttgaggaagaaaacaggaatctgcaagcagaatatgaccgtctaaagcagcagcacgaacataaaggcctgtccccactgccgtcccctcctgaaatgatgcccacctctccccagagtccccgggatgctgagctcattgctgaggccaagctactgcgtcaacacaaaggccgcctggaagccaggatgcaaatcctggaagaccacaataaacagctggagtcacagttacacaggctaaggcagctgctggagcaaccccaggcagaggccaaagtgaatggcacaacggtgtcctctccttctacctctctacagaggtccgacagcagtcagcctatgctgctccgagtggttggcagtcaaacttcggactccatgggtgaggaagatcttctcagtcctccccaggacacaagcacagggttagaggaggtgatggagcaactcaacaactccttccctagttcaagaggacacaatgtaggaagtcttttccacatggcagatgatttgggcagagcgatggagtccttagtatcagtcatgacagatgaagaaggagcagaataaatgttttacaactcctgattcccgcatggtttttataatattcatacaacaaagaggattagacagtaagagtttacaagaaataaatctatatttttgtgaagggtagtggtattatactgtagatttcagtagtttctaagtctgttattgttttgttaacaatggcaggttttacacgtctatgcaattgtacaaaaaagttataagaaaactacatgtaaaatcttgatagctaaataacttgccatttctttatatggaacgcattttgggttgtttaaaaatttataacagttataaagaaagattgtaaactaaagtgtgctttataaaaaaaagttgtttataaaaacccctaaaaacaaaacaaacacacacacacacacatacacacacacacacaaaactttgaggcagcgcattgttttgcatccttttggcgtgatatccatatgaaattcatggctttttctttttttgcatattaaagataagacttcctctaccaccacaccaaatgactactacacactgctcatttgagaactgtcagctgagtggggcaggcttgagttttcatttcatatatctatatgtctataagtatataaatactatagttatatagataaagagatacgaatttctatagactgactttttccattttttaaatgttcatgtcacatcctaatagaaagaaattacttctagtcagtcatccaggcttacctgcttggtctagaatggatttttcccggagccggaagccaggaggaaactacaccacactaaaacattgtctacagctccagatgtttctcattttaaacaactttccactgacaacgaaagtaaagtaaagtattggatttttttaaagggaacatgtgaatgaatacacaggacttattatatcagagtgagtaatcggttggttggttgattgattgattgattgatacattcagcttcctgctgctagcaatgccacgatttagatttaatgatgcttcagtggaaatcaatcagaaggtattctgaccttgtgaacatcagaaggtattttttaactcccaagcagtagcaggacgatgatagggctggagggctatggattcccagcccatccctgtgaaggagtaggccactctttaagtgaaggattggatgattgttcataatacataaagttctctgtaattacaactaaattattatgccctcttctcacagtcaaaaggaactgggtggtttggtttttgttgcttttttagatttattgtcccatgtgggatgagtttttaaatgccacaagacataatttaaaataaataaactttgggaaaaggtgtaagacagtagccccatcacatttgtgatactgacaggtatcaacccagaagcccatgaactgtgtttccatcctttgcatttctctgcgagtagttccacacaggtttgtaagtaagtaagaaagaaggcaaattgattcaaatgttacaaaaaaacccttcttggtggattagacaggttaaatatataaacaaacaaacaaaaattgctcaaaaaagaggagaaaagctcaagaggaaaagctaaggactggtaggaaaaagctttactctttcatgccattttatttctttttgatttttaaatcattcattcaatagataccaccgtgtgacctataattttgcaaatctgttacctctgacatcaagtgtaattagcttttggagagtgggctgacatcaagtgtaattagcttttggagagtgggttttgtccattattaataattaattaattaacatcaaacacggcttctcatgctatttctacctcactttggttttggggtgttcctgataattgtgcacacctgagttcacagcttcaccacttgtccattgcgttattttctttttcctttataattctttctttttccttcataattttcaaaagaaaacccaaagctctaaggtaacaaattaccaaattacatgaagatttggtttttgtcttgcatttttttcctttatgtgacgctggaccttttctttacccaaggatttttaaaactcagatttaaaacaaggggttactttacatcctactaagaagtttaagtaagtaagtttcattctaaaatcagaggtaaatagagtgcataaataattttgttttaatctttttgtttttcttttagacacattagctctggagtgagtctgtcataatatttgaacaaaaattgagagctttattgctgcattttaagcataattaatttggacattatttcgtgttgtgttctttataaccaccaagtattaaactgtaaatcataatgtaactgaagcataaacatcacatggcatgttttgtcattgttttcaggtactgagttcttacttgagtatcataatatattgtgttttaacaccaacactgtaacatttacgaattatttttttaaacttcagttttactgcattttcacaacatatcagacttcaccaaatatatgccttactattgtattatagtactgctttactgtgtatctcaataaagcacgcagttatgttacaaaaaagtaaaaac

SEQ ID NO: 319968 - DNA, 7424 bp, Homo sapiens
acactagcaatggcaaagctttgtgcggaggcattgctggctgctctgaactaaaagcatccgtggggaccgaaagaggtttttgcacaccttattaaggaactccaggatggcattgggcagcggcaaactgttgtcagaacattgaatgcaactggggaagaaataattcagcaatcctcaaaaacagatgccagtattctacaggaaaaattgggaagcctgaatctgcggtggcaggaggtctgcaaacagctgtcagacagaaaaaagaggctagaagaacaaaagaatatcttgtcagaatttcaaagagatttaaatgaatttgttttatggttggaggaagcagataacattgctagtatcccacttgaacctggaaaagagcagcaactaaaagaaaagcttgagcaagtcaagttactggtggaagagttgcccctgcgccagggaattctcaaacaattaaatgaaactggaggacccgtgcttgtaagtgctcccataagcccagaagagcaagataaacttgaaaataagctcaagcagacaaatctccagtggataaaggtttccagagctttacctgagaaacaaggagaaattgaagctcaaataaaagaccttgggcagcttgaaaaaaagcttgaagaccttgaagagcagttaaatcatctgctgctgtggttatctcctattaggaatcagttggaaatttataaccaaccaaaccaagaaggaccatttgacgttcaggaaactgaaatagcagttcaagctaaacaaccggatgtggaagagattttgtctaaagggcagcatttgtacaaggaaaaaccagccactcagccagtgaagaggaagttagaagatctgagctctgagtggaaggcggtaaaccgtttacttcaagagctgagggcaaagcagcctgacctagctcctggactgaccactattggagcctctcctactcagactgttactctggtgacacaacctgtggttactaaggaaactgccatctccaaactagaaatgccatcttccttgatgttggaggtacctgctctggcagatttcaaccgggcttggacagaacttaccgactggctttctctgcttgatcaagttataaaatcacagagggtgatggtgggtgaccttgaggatatcaacgagatgatcatcaagcagaaggcaacaatgcaggatttggaacagaggcgtccccagttggaagaactcattaccgctgcccaaaatttgaaaaacaagaccagcaatcaagaggctagaacaatcattacggatcgaattgaaagaattcagaatcagtgggatgaagtacaagaacaccttcagaaccggaggcaacagttgaatgaaatgttaaaggattcaacacaatggctggaagctaaggaagaagctgagcaggtcttaggacaggccagagccaagcttgagtcatggaaggagggtccctatacagtagatgcaatccaaaagaaaatcacagaaaccaagcagttggccaaagacctccgccagtggcagacaaatgtagatgtggcaaatgacttggccctgaaacttctccgggattattctgcagatgataccagaaaagtccacatgataacagagaatatcaatgcctcttggagaagcattcataaaagggtgagtgagcgagaggctgctttggaagaaactcatagattactgcaacagttccccctggacctggaaaagtttcttgcctggcttacagaagctgaaacaactgccaatgtcctacaggatgctacccgtaaggaaaggctcctagaagactccaagggagtaaaagagctgatgaaacaatggcaagacctccaaggtgaaattgaagctcacacagatgtttatcacaacctggatgaaaacagccaaaaaatcctgagatccctggaaggttccgatgatgcagtcctgttacaaagacgtttggataacatgaacttcaagtggagtgaacttcggaaaaagtctctcaacattaggtcccatttggaagccagttctgaccagtggaagcgtctgcacctttctctgcaggaacttctggtgtggctacagctgaaagatgatgaattaagccggcaggcacctattggaggcgactttccagcagttcagaagcagaacgatgtacatagggccttcaagagggaattgaaaactaaagaacctgtaatcatgagtactcttgagactgtacgaatatttctgacagagcagcctttggaaggactagagaaactctaccaggagcccagagagctgcctcctgaggagagagcccagaatgtcactcggcttctacgaaagcaggctgaggaggtcaatactgagtgggaaaaattgaacctgcactccgctgactggcagagaaaaatagatgagacccttgaaagactccaggaacttcaagaggccacggatgagctggacctcaagctgcgccaagctgaggtgatcaagggatcctggcagcccgtgggcgatctcctcattgactctctccaagatcacctcgagaaagtcaaggcacttcgaggagaaattgcgcctctgaaagagaacgtgagccacgtcaatgaccttgctcgccagcttaccactttgggcattcagctctcaccgtataacctcagcactctggaagacctgaacaccagatggaagcttctgcaggtggccgtcgaggaccgagtcaggcagctgcatgaagcccacagggactttggtccagcatctcagcactttctttccacgtctgtccagggtccctgggagagagccatctcgccaaacaaagtgccctactatatcaaccacgagactcaaacaacttgctgggaccatcccaaaatgacagagctctaccagtctttagctgacctgaataatgtcagattctcagcttataggactgccatgaaactccgaagactgcagaaggccctttgcttggatctcttgagcctgtcagctgcatgtgatgccttggaccagcacaacctcaagcaaaatgaccagcccatggatatcctgcagattattaattgtttgaccactatttatgaccgcctggagcaagagcacaacaatttggtcaacgtccctctctgcgtggatatgtgtctgaactggctgctgaatgtttatgatacgggacgaacagggaggatccgtgtcctgtcttttaaaactggcatcatttccctgtgtaaagcacatttggaagacaagtacagataccttttcaagcaagtggcaagttcaacaggattttgtgaccagcgcaggctgggcctccttctgcatgattctatccaaattccaagacagttgggtgaagttgcatcctttgggggcagtaacattgagccaagtgtccggagctgcttccaatttgctaataataagccagagatcgaagcggccctcttcctagactggatgagactggaaccccagtccatggtgtggctgcccgtcctgcacagagtggctgctgcagaaactgccaagcatcaggccaaatgtaacatctgcaaagagtgtccaatcattggattcaggtacaggagtctaaagcactttaattatgacatctgccaaagctgctttttttctggtcgagttgcaaaaggccataaaatgcactatcccatggtggaatattgcactccgactacatcaggagaagatgttcgagactttgccaaggtactaaaaaacaaatttcgaaccaaaaggtattttgcgaagcatccccgaatgggctacctgccagtgcagactgtcttagagggggacaacatggaaactcccgttactctgatcaacttctggccagtagattctgcgcctgcctcgtcccctcagctttcacacgatgatactcattcacgcattgaacattatgctagcaggctagcagaaatggaaaacagcaatggatcttatctaaatgatagcatctctcctaatgagagcatagatgatgaacatttgttaatccagcattactgccaaagtttgaaccaggactcccccctgagccagcctcgtagtcctgcccagatcttgatttccttagagagtgaggaaagaggggagctagagagaatcctagcagatcttgaggaagaaaacaggaatctgcaagcagaatatgaccgtctaaagcagcagcacgaacataaaggcctgtccccactgccgtcccctcctgaaatgatgcccacctctccccagagtccccgggatgctgagctcattgctgaggccaagctactgcgtcaacacaaaggccgcctggaagccaggatgcaaatcctggaagaccacaataaacagctggagtcacagttacacaggctaaggcagctgctggagcaaccccaggcagaggccaaagtgaatggcacaacggtgtcctctccttctacctctctacagaggtccgacagcagtcagcctatgctgctccgagtggttggcagtcaaacttcggactccatgggtgaggaagatcttctcagtcctccccaggacacaagcacagggttagaggaggtgatggagcaactcaacaactccttccctagttcaagaggaagaaatacccctggaaagccaatgagagaggacacaatgtaggaagtcttttccacatggcagatgatttgggcagagcgatggagtccttagtatcagtcatgacagatgaagaaggagcagaataaatgttttacaactcctgattcccgcatggtttttataatattcatacaacaaagaggattagacagtaagagtttacaagaaataaatctatatttttgtgaagggtagtggtattatactgtagatttcagtagtttctaagtctgttattgttttgttaacaatggcaggttttacacgtctatgcaattgtacaaaaaagttataagaaaactacatgtaaaatcttgatagctaaataacttgccatttctttatatggaacgcattttgggttgtttaaaaatttataacagttataaagaaagattgtaaactaaagtgtgctttataaaaaaaagttgtttataaaaacccctaaaaacaaaacaaacacacacacacacacatacacacacacacacaaaactttgaggcagcgcattgttttgcatccttttggcgtgatatccatatgaaattcatggctttttctttttttgcatattaaagataagacttcctctaccaccacaccaaatgactactacacactgctcatttgagaactgtcagctgagtggggcaggcttgagttttcatttcatatatctatatgtctataagtatataaatactatagttatatagataaagagatacgaatttctatagactgactttttccattttttaaatgttcatgtcacatcctaatagaaagaaattacttctagtcagtcatccaggcttacctgcttggtctagaatggatttttcccggagccggaagccaggaggaaactacaccacactaaaacattgtctacagctccagatgtttctcattttaaacaactttccactgacaacgaaagtaaagtaaagtattggatttttttaaagggaacatgtgaatgaatacacaggacttattatatcagagtgagtaatcggttggttggttgattgattgattgattgatacattcagcttcctgctgctagcaatgccacgatttagatttaatgatgcttcagtggaaatcaatcagaaggtattctgaccttgtgaacatcagaaggtattttttaactcccaagcagtagcaggacgatgatagggctggagggctatggattcccagcccatccctgtgaaggagtaggccactctttaagtgaaggattggatgattgttcataatacataaagttctctgtaattacaactaaattattatgccctcttctcacagtcaaaaggaactgggtggtttggtttttgttgcttttttagatttattgtcccatgtgggatgagtttttaaatgccacaagacataatttaaaataaataaactttgggaaaaggtgtaagacagtagccccatcacatttgtgatactgacaggtatcaacccagaagcccatgaactgtgtttccatcctttgcatttctctgcgagtagttccacacaggtttgtaagtaagtaagaaagaaggcaaattgattcaaatgttacaaaaaaacccttcttggtggattagacaggttaaatatataaacaaacaaacaaaaattgctcaaaaaagaggagaaaagctcaagaggaaaagctaaggactggtaggaaaaagctttactctttcatgccattttatttctttttgatttttaaatcattcattcaatagataccaccgtgtgacctataattttgcaaatctgttacctctgacatcaagtgtaattagcttttggagagtgggctgacatcaagtgtaattagcttttggagagtgggttttgtccattattaataattaattaattaacatcaaacacggcttctcatgctatttctacctcactttggttttggggtgttcctgataattgtgcacacctgagttcacagcttcaccacttgtccattgcgttattttctttttcctttataattctttctttttccttcataattttcaaaagaaaacccaaagctctaaggtaacaaattaccaaattacatgaagatttggtttttgtcttgcatttttttcctttatgtgacgctggaccttttctttacccaaggatttttaaaactcagatttaaaacaaggggttactttacatcctactaagaagtttaagtaagtaagtttcattctaaaatcagaggtaaatagagtgcataaataattttgttttaatctttttgtttttcttttagacacattagctctggagtgagtctgtcataatatttgaacaaaaattgagagctttattgctgcattttaagcataattaatttggacattatttcgtgttgtgttctttataaccaccaagtattaaactgtaaatcataatgtaactgaagcataaacatcacatggcatgttttgtcattgttttcaggtactgagttcttacttgagtatcataatatattgtgttttaacaccaacactgtaacatttacgaattatttttttaaacttcagttttactgcattttcacaacatatcagacttcaccaaatatatgccttactattgtattatagtactgctttactgtgtatctcaataaagcacgcagttatgttacaaaaaagtaaaaac

SEQ ID NO: 319969 - DNA, 7062 bp, Homo sapiens
acactagcaatggcaaagctttgtgcggaggcattgctggctgctctgaactaaaagcatccgtggggaccgaaagaggtttttgcacaccttattaaggaactccaggatggcattgggcagcggcaaactgttgtcagaacattgaatgcaactggggaagaaataattcagcaatcctcaaaaacagatgccagtattctacaggaaaaattgggaagcctgaatctgcggtggcaggaggtctgcaaacagctgtcagacagaaaaaagaggctagaagaacaaaagaatatcttgtcagaatttcaaagagatttaaatgaatttgttttatggttggaggaagcagataacattgctagtatcccacttgaacctggaaaagagcagcaactaaaagaaaagcttgagcaagtcaagttactggtggaagagttgcccctgcgccagggaattctcaaacaattaaatgaaactggaggacccgtgcttgtaagtgctcccataagcccagaagagcaagataaacttgaaaataagctcaagcagacaaatctccagtggataaaggtttccagagctttacctgagaaacaaggagaaattgaagctcaaataaaagaccttgggcagcttgaaaaaaagcttgaagaccttgaagagcagttaaatcatctgctgctgtggttatctcctattaggaatcagttggaaatttataaccaaccaaaccaagaaggaccatttgacgttcaggaaactgaaatagcagttcaagctaaacaaccggatgtggaagagattttgtctaaagggcagcatttgtacaaggaaaaaccagccactcagccagtgaagaggaagttagaagatctgagctctgagtggaaggcggtaaaccgtttacttcaagagctgagggcaaagcagcctgacctagctcctggactgaccactattggagcctctcctactcagactgttactctggtgacacaacctgtggttactaaggaaactgccatctccaaactagaaatgccatcttccttgatgttggaggtacctgctctggcagatttcaaccgggcttggacagaacttaccgactggctttctctgcttgatcaagttataaaatcacagagggtgatggtgggtgaccttgaggatatcaacgagatgatcatcaagcagaaggcaacaatgcaggatttggaacagaggcgtccccagttggaagaactcattaccgctgcccaaaatttgaaaaacaagaccagcaatcaagaggctagaacaatcattacggatcgaattgaaagaattcagaatcagtgggatgaagtacaagaacaccttcagaaccggaggcaacagttgaatgaaatgttaaaggattcaacacaatggctggaagctaaggaagaagctgagcaggtcttaggacaggccagagccaagcttgagtcatggaaggagggtccctatacagtagatgcaatccaaaagaaaatcacagaaaccaagcagttggccaaagacctccgccagtggcagacaaatgtagatgtggcaaatgacttggccctgaaacttctccgggattattctgcagatgataccagaaaagtccacatgataacagagaatatcaatgcctcttggagaagcattcataaaagggtgagtgagcgagaggctgctttggaagaaactcatagattactgcaacagttccccctggacctggaaaagtttcttgcctggcttacagaagctgaaacaactgccaatgtcctacaggatgctacccgtaaggaaaggctcctagaagactccaagggagtaaaagagctgatgaaacaatggcaagacctccaaggtgaaattgaagctcacacagatgtttatcacaacctggatgaaaacagccaaaaaatcctgagatccctggaaggttccgatgatgcagtcctgttacaaagacgtttggataacatgaacttcaagtggagtgaacttcggaaaaagtctctcaacattaggtcccatttggaagccagttctgaccagtggaagcgtctgcacctttctctgcaggaacttctggtgtggctacagctgaaagatgatgaattaagccggcaggcacctattggaggcgactttccagcagttcagaagcagaacgatgtacatagggccttcaagagggaattgaaaactaaagaacctgtaatcatgagtactcttgagactgtacgaatatttctgacagagcagcctttggaaggactagagaaactctaccaggagcccagagagctgcctcctgaggagagagcccagaatgtcactcggcttctacgaaagcaggctgaggaggtcaatactgagtgggaaaaattgaacctgcactccgctgactggcagagaaaaatagatgagacccttgaaagactccaggaacttcaagaggccacggatgagctggacctcaagctgcgccaagctgaggtgatcaagggatcctggcagcccgtgggcgatctcctcattgactctctccaagatcacctcgagaaagtcaaggcacttcgaggagaaattgcgcctctgaaagagaacgtgagccacgtcaatgaccttgctcgccagcttaccactttgggcattcagctctcaccgtataacctcagcactctggaagacctgaacaccagatggaagcttctgcaggtggccgtcgaggaccgagtcaggcagctgcatgaagcccacagggactttggtccagcatctcagcactttctttccacgtctgtccagggtccctgggagagagccatctcgccaaacaaagtgccctactatatcaaccacgagactcaaacaacttgctgggaccatcccaaaatgacagagctctaccagtctttagctgacctgaataatgtcagattctcagcttataggactgccatgaaactccgaagactgcagaaggccctttgcttggatctcttgagcctgtcagctgcatgtgatgccttggaccagcacaacctcaagcaaaatgaccagcccatggatatcctgcagattattaattgtttgaccactatttatgaccgcctggagcaagagcacaacaatttggtcaacgtccctctctgcgtggatatgtgtctgaactggctgctgaatgtttatgatacgggacgaacagggaggatccgtgtcctgtcttttaaaactggcatcatttccctgtgtaaagcacatttggaagacaagtacagataccttttcaagcaagtggcaagttcaacaggattttgtgaccagcgcaggctgggcctccttctgcatgattctatccaaattccaagacagttgggtgaagttgcatcctttgggggcagtaacattgagccaagtgtccggagctgcttccaatttgctaataataagccagagatcgaagcggccctcttcctagactggatgagactggaaccccagtccatggtgtggctgcccgtcctgcacagagtggctgctgcagaaactgccaagcatcaggccaaatgtaacatctgcaaagagtgtccaatcattggattcaggtacaggagtctaaagcactttaattatgacatctgccaaagctgctttttttctggtcgagttgcaaaaggccataaaatgcactatcccatggtggaatattgcactccgactacatcaggagaagatgttcgagactttgccaaggtactaaaaaacaaatttcgaaccaaaaggtattttgcgaagcatccccgaatgggctacctgccagtgcagactgtcttagagggggacaacatggaaacgaatctgcaagcagaatatgaccgtctaaagcagcagcacgaacataaaggcctgtccccactgccgtcccctcctgaaatgatgcccacctctccccagagtccccgggatgctgagctcattgctgaggccaagctactgcgtcaacacaaaggccgcctggaagccaggatgcaaatcctggaagaccacaataaacagctggagtcacagttacacaggctaaggcagctgctggagcaaccccaggcagaggccaaagtgaatggcacaacggtgtcctctccttctacctctctacagaggtccgacagcagtcagcctatgctgctccgagtggttggcagtcaaacttcggactccatgggtgaggaagatcttctcagtcctccccaggacacaagcacagggttagaggaggtgatggagcaactcaacaactccttccctagttcaagaggacacaatgtaggaagtcttttccacatggcagatgatttgggcagagcgatggagtccttagtatcagtcatgacagatgaagaaggagcagaataaatgttttacaactcctgattcccgcatggtttttataatattcatacaacaaagaggattagacagtaagagtttacaagaaataaatctatatttttgtgaagggtagtggtattatactgtagatttcagtagtttctaagtctgttattgttttgttaacaatggcaggttttacacgtctatgcaattgtacaaaaaagttataagaaaactacatgtaaaatcttgatagctaaataacttgccatttctttatatggaacgcattttgggttgtttaaaaatttataacagttataaagaaagattgtaaactaaagtgtgctttataaaaaaaagttgtttataaaaacccctaaaaacaaaacaaacacacacacacacacatacacacacacacacaaaactttgaggcagcgcattgttttgcatccttttggcgtgatatccatatgaaattcatggctttttctttttttgcatattaaagataagacttcctctaccaccacaccaaatgactactacacactgctcatttgagaactgtcagctgagtggggcaggcttgagttttcatttcatatatctatatgtctataagtatataaatactatagttatatagataaagagatacgaatttctatagactgactttttccattttttaaatgttcatgtcacatcctaatagaaagaaattacttctagtcagtcatccaggcttacctgcttggtctagaatggatttttcccggagccggaagccaggaggaaactacaccacactaaaacattgtctacagctccagatgtttctcattttaaacaactttccactgacaacgaaagtaaagtaaagtattggatttttttaaagggaacatgtgaatgaatacacaggacttattatatcagagtgagtaatcggttggttggttgattgattgattgattgatacattcagcttcctgctgctagcaatgccacgatttagatttaatgatgcttcagtggaaatcaatcagaaggtattctgaccttgtgaacatcagaaggtattttttaactcccaagcagtagcaggacgatgatagggctggagggctatggattcccagcccatccctgtgaaggagtaggccactctttaagtgaaggattggatgattgttcataatacataaagttctctgtaattacaactaaattattatgccctcttctcacagtcaaaaggaactgggtggtttggtttttgttgcttttttagatttattgtcccatgtgggatgagtttttaaatgccacaagacataatttaaaataaataaactttgggaaaaggtgtaagacagtagccccatcacatttgtgatactgacaggtatcaacccagaagcccatgaactgtgtttccatcctttgcatttctctgcgagtagttccacacaggtttgtaagtaagtaagaaagaaggcaaattgattcaaatgttacaaaaaaacccttcttggtggattagacaggttaaatatataaacaaacaaacaaaaattgctcaaaaaagaggagaaaagctcaagaggaaaagctaaggactggtaggaaaaagctttactctttcatgccattttatttctttttgatttttaaatcattcattcaatagataccaccgtgtgacctataattttgcaaatctgttacctctgacatcaagtgtaattagcttttggagagtgggctgacatcaagtgtaattagcttttggagagtgggttttgtccattattaataattaattaattaacatcaaacacggcttctcatgctatttctacctcactttggttttggggtgttcctgataattgtgcacacctgagttcacagcttcaccacttgtccattgcgttattttctttttcctttataattctttctttttccttcataattttcaaaagaaaacccaaagctctaaggtaacaaattaccaaattacatgaagatttggtttttgtcttgcatttttttcctttatgtgacgctggaccttttctttacccaaggatttttaaaactcagatttaaaacaaggggttactttacatcctactaagaagtttaagtaagtaagtttcattctaaaatcagaggtaaatagagtgcataaataattttgttttaatctttttgtttttcttttagacacattagctctggagtgagtctgtcataatatttgaacaaaaattgagagctttattgctgcattttaagcataattaatttggacattatttcgtgttgtgttctttataaccaccaagtattaaactgtaaatcataatgtaactgaagcataaacatcacatggcatgttttgtcattgttttcaggtactgagttcttacttgagtatcataatatattgtgttttaacaccaacactgtaacatttacgaattatttttttaaacttcagttttactgcattttcacaacatatcagacttcaccaaatatatgccttactattgtattatagtactgctttactgtgtatctcaataaagcacgcagttatgttacaaaaaagtaaaaac

SEQ ID NO: 319970 - DNA, 4656 bp, Homo sapiens
ctccgcagtgctttcagctgtgagcttgggcggcggcggcggcggcgctccactttcggggagcccggcggctctgggaagctcactcctccactcgtacccacactcgaccgcggagcccttgcagccatgagggaacagctcaaaggccacgagactcaaacaacttgctgggaccatcccaaaatgacagagctctaccagtctttagctgacctgaataatgtcagattctcagcttataggactgccatgaaactccgaagactgcagaaggccctttgcttggatctcttgagcctgtcagctgcatgtgatgccttggaccagcacaacctcaagcaaaatgaccagcccatggatatcctgcagattattaattgtttgaccactatttatgaccgcctggagcaagagcacaacaatttggtcaacgtccctctctgcgtggatatgtgtctgaactggctgctgaatgtttatgatacgggacgaacagggaggatccgtgtcctgtcttttaaaactggcatcatttccctgtgtaaagcacatttggaagacaagtacagataccttttcaagcaagtggcaagttcaacaggattttgtgaccagcgcaggctgggcctccttctgcatgattctatccaaattccaagacagttgggtgaagttgcatcctttgggggcagtaacattgagccaagtgtccggagctgcttccaatttgctaataataagccagagatcgaagcggccctcttcctagactggatgagactggaaccccagtccatggtgtggctgcccgtcctgcacagagtggctgctgcagaaactgccaagcatcaggccaaatgtaacatctgcaaagagtgtccaatcattggattcaggtacaggagtctaaagcactttaattatgacatctgccaaagctgctttttttctggtcgagttgcaaaaggccataaaatgcactatcccatggtggaatattgcactccgactacatcaggagaagatgttcgagactttgccaaggtactaaaaaacaaatttcgaaccaaaaggtattttgcgaagcatccccgaatgggctacctgccagtgcagactgtcttagagggggacaacatggaaactcccgttactctgatcaacttctggccagtagattctgcgcctgcctcgtcccctcagctttcacacgatgatactcattcacgcattgaacattatgctagcaggctagcagaaatggaaaacagcaatggatcttatctaaatgatagcatctctcctaatgagagcatagatgatgaacatttgttaatccagcattactgccaaagtttgaaccaggactcccccctgagccagcctcgtagtcctgcccagatcttgatttccttagagagtgaggaaagaggggagctagagagaatcctagcagatcttgaggaagaaaacaggaatctgcaagcagaatatgaccgtctaaagcagcagcacgaacataaaggcctgtccccactgccgtcccctcctgaaatgatgcccacctctccccagagtccccgggatgctgagctcattgctgaggccaagctactgcgtcaacacaaaggccgcctggaagccaggatgcaaatcctggaagaccacaataaacagctggagtcacagttacacaggctaaggcagctgctggagcaaccccaggcagaggccaaagtgaatggcacaacggtgtcctctccttctacctctctacagaggtccgacagcagtcagcctatgctgctccgagtggttggcagtcaaacttcggactccatgggtgaggaagatcttctcagtcctccccaggacacaagcacagggttagaggaggtgatggagcaactcaacaactccttccctagttcaagaggacacaatgtaggaagtcttttccacatggcagatgatttgggcagagcgatggagtccttagtatcagtcatgacagatgaagaaggagcagaataaatgttttacaactcctgattcccgcatggtttttataatattcatacaacaaagaggattagacagtaagagtttacaagaaataaatctatatttttgtgaagggtagtggtattatactgtagatttcagtagtttctaagtctgttattgttttgttaacaatggcaggttttacacgtctatgcaattgtacaaaaaagttataagaaaactacatgtaaaatcttgatagctaaataacttgccatttctttatatggaacgcattttgggttgtttaaaaatttataacagttataaagaaagattgtaaactaaagtgtgctttataaaaaaaagttgtttataaaaacccctaaaaacaaaacaaacacacacacacacacatacacacacacacacaaaactttgaggcagcgcattgttttgcatccttttggcgtgatatccatatgaaattcatggctttttctttttttgcatattaaagataagacttcctctaccaccacaccaaatgactactacacactgctcatttgagaactgtcagctgagtggggcaggcttgagttttcatttcatatatctatatgtctataagtatataaatactatagttatatagataaagagatacgaatttctatagactgactttttccattttttaaatgttcatgtcacatcctaatagaaagaaattacttctagtcagtcatccaggcttacctgcttggtctagaatggatttttcccggagccggaagccaggaggaaactacaccacactaaaacattgtctacagctccagatgtttctcattttaaacaactttccactgacaacgaaagtaaagtaaagtattggatttttttaaagggaacatgtgaatgaatacacaggacttattatatcagagtgagtaatcggttggttggttgattgattgattgattgatacattcagcttcctgctgctagcaatgccacgatttagatttaatgatgcttcagtggaaatcaatcagaaggtattctgaccttgtgaacatcagaaggtattttttaactcccaagcagtagcaggacgatgatagggctggagggctatggattcccagcccatccctgtgaaggagtaggccactctttaagtgaaggattggatgattgttcataatacataaagttctctgtaattacaactaaattattatgccctcttctcacagtcaaaaggaactgggtggtttggtttttgttgcttttttagatttattgtcccatgtgggatgagtttttaaatgccacaagacataatttaaaataaataaactttgggaaaaggtgtaagacagtagccccatcacatttgtgatactgacaggtatcaacccagaagcccatgaactgtgtttccatcctttgcatttctctgcgagtagttccacacaggtttgtaagtaagtaagaaagaaggcaaattgattcaaatgttacaaaaaaacccttcttggtggattagacaggttaaatatataaacaaacaaacaaaaattgctcaaaaaagaggagaaaagctcaagaggaaaagctaaggactggtaggaaaaagctttactctttcatgccattttatttctttttgatttttaaatcattcattcaatagataccaccgtgtgacctataattttgcaaatctgttacctctgacatcaagtgtaattagcttttggagagtgggctgacatcaagtgtaattagcttttggagagtgggttttgtccattattaataattaattaattaacatcaaacacggcttctcatgctatttctacctcactttggttttggggtgttcctgataattgtgcacacctgagttcacagcttcaccacttgtccattgcgttattttctttttcctttataattctttctttttccttcataattttcaaaagaaaacccaaagctctaaggtaacaaattaccaaattacatgaagatttggtttttgtcttgcatttttttcctttatgtgacgctggaccttttctttacccaaggatttttaaaactcagatttaaaacaaggggttactttacatcctactaagaagtttaagtaagtaagtttcattctaaaatcagaggtaaatagagtgcataaataattttgttttaatctttttgtttttcttttagacacattagctctggagtgagtctgtcataatatttgaacaaaaattgagagctttattgctgcattttaagcataattaatttggacattatttcgtgttgtgttctttataaccaccaagtattaaactgtaaatcataatgtaactgaagcataaacatcacatggcatgttttgtcattgttttcaggtactgagttcttacttgagtatcataatatattgtgttttaacaccaacactgtaacatttacgaattatttttttaaacttcagttttactgcattttcacaacatatcagacttcaccaaatatatgccttactattgtattatagtactgctttactgtgtatctcaataaagcacgcagttatgttacaaaaaagtaaaaac

SEQ ID NO: 319971 - DNA, 4649 bp, Homo sapiens
ctccgcagtgctttcagctgtgagcttgggcggcggcggcggcggcgctccactttcggggagcccggcggctctgggaagctcactcctccactcgtacccacactcgaccgcggagcccttgcagccatgagggaacagctcaaaggccacgagactcaaacaacttgctgggaccatcccaaaatgacagagctctaccagtctttagctgacctgaataatgtcagattctcagcttataggactgccatgaaactccgaagactgcagaaggccctttgcttggatctcttgagcctgtcagctgcatgtgatgccttggaccagcacaacctcaagcaaaatgaccagcccatggatatcctgcagattattaattgtttgaccactatttatgaccgcctggagcaagagcacaacaatttggtcaacgtccctctctgcgtggatatgtgtctgaactggctgctgaatgtttatgatacgggacgaacagggaggatccgtgtcctgtcttttaaaactggcatcatttccctgtgtaaagcacatttggaagacaagtacagataccttttcaagcaagtggcaagttcaacaggattttgtgaccagcgcaggctgggcctccttctgcatgattctatccaaattccaagacagttgggtgaagttgcatcctttgggggcagtaacattgagccaagtgtccggagctgcttccaatttgctaataataagccagagatcgaagcggccctcttcctagactggatgagactggaaccccagtccatggtgtggctgcccgtcctgcacagagtggctgctgcagaaactgccaagcatcaggccaaatgtaacatctgcaaagagtgtccaatcattggattcaggtacaggagtctaaagcactttaattatgacatctgccaaagctgctttttttctggtcgagttgcaaaaggccataaaatgcactatcccatggtggaatattgcactccgactacatcaggagaagatgttcgagactttgccaaggtactaaaaaacaaatttcgaaccaaaaggtattttgcgaagcatccccgaatgggctacctgccagtgcagactgtcttagagggggacaacatggaaacgcctgcctcgtcccctcagctttcacacgatgatactcattcacgcattgaacattatgctagcaggctagcagaaatggaaaacagcaatggatcttatctaaatgatagcatctctcctaatgagagcatagatgatgaacatttgttaatccagcattactgccaaagtttgaaccaggactcccccctgagccagcctcgtagtcctgcccagatcttgatttccttagagagtgaggaaagaggggagctagagagaatcctagcagatcttgaggaagaaaacaggaatctgcaagcagaatatgaccgtctaaagcagcagcacgaacataaaggcctgtccccactgccgtcccctcctgaaatgatgcccacctctccccagagtccccgggatgctgagctcattgctgaggccaagctactgcgtcaacacaaaggccgcctggaagccaggatgcaaatcctggaagaccacaataaacagctggagtcacagttacacaggctaaggcagctgctggagcaaccccaggcagaggccaaagtgaatggcacaacggtgtcctctccttctacctctctacagaggtccgacagcagtcagcctatgctgctccgagtggttggcagtcaaacttcggactccatgggtgaggaagatcttctcagtcctccccaggacacaagcacagggttagaggaggtgatggagcaactcaacaactccttccctagttcaagaggaagaaatacccctggaaagccaatgagagaggacacaatgtaggaagtcttttccacatggcagatgatttgggcagagcgatggagtccttagtatcagtcatgacagatgaagaaggagcagaataaatgttttacaactcctgattcccgcatggtttttataatattcatacaacaaagaggattagacagtaagagtttacaagaaataaatctatatttttgtgaagggtagtggtattatactgtagatttcagtagtttctaagtctgttattgttttgttaacaatggcaggttttacacgtctatgcaattgtacaaaaaagttataagaaaactacatgtaaaatcttgatagctaaataacttgccatttctttatatggaacgcattttgggttgtttaaaaatttataacagttataaagaaagattgtaaactaaagtgtgctttataaaaaaaagttgtttataaaaacccctaaaaacaaaacaaacacacacacacacacatacacacacacacacaaaactttgaggcagcgcattgttttgcatccttttggcgtgatatccatatgaaattcatggctttttctttttttgcatattaaagataagacttcctctaccaccacaccaaatgactactacacactgctcatttgagaactgtcagctgagtggggcaggcttgagttttcatttcatatatctatatgtctataagtatataaatactatagttatatagataaagagatacgaatttctatagactgactttttccattttttaaatgttcatgtcacatcctaatagaaagaaattacttctagtcagtcatccaggcttacctgcttggtctagaatggatttttcccggagccggaagccaggaggaaactacaccacactaaaacattgtctacagctccagatgtttctcattttaaacaactttccactgacaacgaaagtaaagtaaagtattggatttttttaaagggaacatgtgaatgaatacacaggacttattatatcagagtgagtaatcggttggttggttgattgattgattgattgatacattcagcttcctgctgctagcaatgccacgatttagatttaatgatgcttcagtggaaatcaatcagaaggtattctgaccttgtgaacatcagaaggtattttttaactcccaagcagtagcaggacgatgatagggctggagggctatggattcccagcccatccctgtgaaggagtaggccactctttaagtgaaggattggatgattgttcataatacataaagttctctgtaattacaactaaattattatgccctcttctcacagtcaaaaggaactgggtggtttggtttttgttgcttttttagatttattgtcccatgtgggatgagtttttaaatgccacaagacataatttaaaataaataaactttgggaaaaggtgtaagacagtagccccatcacatttgtgatactgacaggtatcaacccagaagcccatgaactgtgtttccatcctttgcatttctctgcgagtagttccacacaggtttgtaagtaagtaagaaagaaggcaaattgattcaaatgttacaaaaaaacccttcttggtggattagacaggttaaatatataaacaaacaaacaaaaattgctcaaaaaagaggagaaaagctcaagaggaaaagctaaggactggtaggaaaaagctttactctttcatgccattttatttctttttgatttttaaatcattcattcaatagataccaccgtgtgacctataattttgcaaatctgttacctctgacatcaagtgtaattagcttttggagagtgggctgacatcaagtgtaattagcttttggagagtgggttttgtccattattaataattaattaattaacatcaaacacggcttctcatgctatttctacctcactttggttttggggtgttcctgataattgtgcacacctgagttcacagcttcaccacttgtccattgcgttattttctttttcctttataattctttctttttccttcataattttcaaaagaaaacccaaagctctaaggtaacaaattaccaaattacatgaagatttggtttttgtcttgcatttttttcctttatgtgacgctggaccttttctttacccaaggatttttaaaactcagatttaaaacaaggggttactttacatcctactaagaagtttaagtaagtaagtttcattctaaaatcagaggtaaatagagtgcataaataattttgttttaatctttttgtttttcttttagacacattagctctggagtgagtctgtcataatatttgaacaaaaattgagagctttattgctgcattttaagcataattaatttggacattatttcgtgttgtgttctttataaccaccaagtattaaactgtaaatcataatgtaactgaagcataaacatcacatggcatgttttgtcattgttttcaggtactgagttcttacttgagtatcataatatattgtgttttaacaccaacactgtaacatttacgaattatttttttaaacttcagttttactgcattttcacaacatatcagacttcaccaaatatatgccttactattgtattatagtactgctttactgtgtatctcaataaagcacgcagttatgttacaaaaaagtaaaaac

SEQ ID NO: 319972 - DNA, 1678 bp, Homo sapiens
ctccgcagtgctttcagctgtgagcttgggcggcggcggcggcggcgctccactttcggggagcccggcggctctgggaagctcactcctccactcgtacccacactcgaccgcggagcccttgcagccatgagggaacagctcaaaggccacgagactcaaacaacttgctgggaccatcccaaaatgacagagctctaccagtctttagctgacctgaataatgtcagattctcagcttataggactgccatgaaactccgaagactgcagaaggccctttgcttggatctcttgagcctgtcagctgcatgtgatgccttggaccagcacaacctcaagcaaaatgaccagcccatggatatcctgcagattattaattgtttgaccactatttatgaccgcctggagcaagagcacaacaatttggtcaacgtccctctctgcgtggatatgtgtctgaactggctgctgaatgtttatgatacgggacgaacagggaggatccgtgtcctgtcttttaaaactggcatcatttccctgtgtaaagcacatttggaagacaagtacagataccttttcaagcaagtggcaagttcaacaggattttgtgaccagcgcaggctgggcctccttctgcatgattctatccaaattccaagacagttgggtgaagttgcatcctttgggggcagtaacattgagccaagtgtccggagctgcttccaatttgctaataataagccagagatcgaagcggccctcttcctagactggatgagactggaaccccagtccatggtgtggctgcccgtcctgcacagagtggctgctgcagaaactgccaagcatcaggccaaatgtaacatctgcaaagagtgtccaatcattggattcaggtacaggagtctaaagcactttaattatgacatctgccaaagctgctttttttctggtcgagttgcaaaaggccataaaatgcactatcccatggtggaatattgcactccgactacatcaggagaagatgttcgagactttgccaaggtactaaaaaacaaatttcgaaccaaaaggtattttgcgaagcatccccgaatgggctacctgccagtgcagactgtcttagagggggacaacatggaaacgtgagtagtagcaaaagcagaacacactcttgtttgatgtatatttgaactcctctcagctgaacaccctccttcactcccaaatgcaaacagtctcttctatttctttctttttatttacattagctgaaaagagaaaaataagctgatgtccagttgccactttcccacgtcacttgacaatttctttttccaaaagttaaactttatctcacagggggaaaaaaaaaaaaaaaccacaacacaatacagccactaattgccttacaagccttataagaaatatgggactgtttacaaatgagtgattccagtatttcattttgattttcctctcacaatcagtaatgtgtgtctttgtatctcatgtgtggtcatatctagtcactgtctactcacaaatcagtaaatgtgtgtctttttgtatctcattgtgtggtcatatctagtcacttgtttctaccaaaagaaaatatagtcacaggaaactactcacgtaagtagtaatgattctcaagatcaaaggggag

SEQ ID NO: 319973 - DNA, 13955 bp, Homo sapiens
  misc_feature (2)..(3): n is a, c, g, or t
gnntcctggcatcagttactgtgttgactcactcagtgttgggatcactcactttccccctacaggactcagatctgggaggcaattaccttcggagaaaaacgaataggaaaaactgaagtgttactttttttaaagctgctgaagtttgttggtttctcattgtttttaagcctactggagcaataaagtttgaagaacttttaccaggttttttttatcgctgccttgatatacacttttcaaaatgctttggtgggaagaagtagaggactgttatgaaagagaagatgttcaaaagaaaacattcacaaaatgggtaaatgcacaattttctaagtttgggaagcagcatattgagaacctcttcagtgacctacaggatgggaggcgcctcctagacctcctcgaaggcctgacagggcaaaaactgccaaaagaaaaaggatccacaagagttcatgccctgaacaatgtcaacaaggcactgcgggttttgcagaacaataatgttgatttagtgaatattggaagtactgacatcgtagatggaaatcataaactgactcttggtttgatttggaatataatcctccactggcaggtcaaaaatgtaatgaaaaatatcatggctggattgcaacaaaccaacagtgaaaagattctcctgagctgggtccgacaatcaactcgtaattatccacaggttaatgtaatcaacttcaccaccagctggtctgatggcctggctttgaatgctctcatccatagtcataggccagacctatttgactggaatagtgtggtttgccagcagtcagccacacaacgactggaacatgcattcaacatcgccagatatcaattaggcatagagaaactactcgatcctgaagatgttgataccacctatccagataagaagtccatcttaatgtacatcacatcactcttccaagttttgcctcaacaagtgagcattgaagccatccaggaagtggaaatgttgccaaggccacctaaagtgactaaagaagaacattttcagttacatcatcaaatgcactattctcaacagatcacggtcagtctagcacagggatatgagagaacttcttcccctaagcctcgattcaagagctatgcctacacacaggctgcttatgtcaccacctctgaccctacacggagcccatttccttcacagcatttggaagctcctgaagacaagtcatttggcagttcattgatggagagtgaagtaaacctggaccgttatcaaacagctttagaagaagtattatcgtggcttctttctgctgaggacacattgcaagcacaaggagagatttctaatgatgtggaagtggtgaaagaccagtttcatactcatgaggggtacatgatggatttgacagcccatcagggccgggttggtaatattctacaattgggaagtaagctgattggaacaggaaaattatcagaagatgaagaaactgaagtacaagagcagatgaatctcctaaattcaagatgggaatgcctcagggtagctagcatggaaaaacaaagcaatttacatagagttttaatggatctccagaatcagaaactgaaagagttgaatgactggctaacaaaaacagaagaaagaacaaggaaaatggaggaagagcctcttggacctgatcttgaagacctaaaacgccaagtacaacaacataaggtgcttcaagaagatctagaacaagaacaagtcagggtcaattctctcactcacatggtggtggtagttgatgaatctagtggagatcacgcaactgctgctttggaagaacaacttaaggtattgggagatcgatgggcaaacatctgtagatggacagaagaccgctgggttcttttacaagacatccttctcaaatggcaacgtcttactgaagaacagtgcctttttagtgcatggctttcagaaaaagaagatgcagtgaacaagattcacacaactggctttaaagatcaaaatgaaatgttatcaagtcttcaaaaactggccgttttaaaagcggatctagaaaagaaaaagcaatccatgggcaaactgtattcactcaaacaagatcttctttcaacactgaagaataagtcagtgacccagaagacggaagcatggctggataactttgcccggtgttgggataatttagtccaaaaacttgaaaagagtacagcacagatttcacaggctgtcaccaccactcagccatcactaacacagacaactgtaatggaaacagtaactacggtgaccacaagggaacagatcctggtaaagcatgctcaagaggaacttccaccaccacctccccaaaagaagaggcagattactgtggattctgaaattaggaaaaggttggatgttgatataactgaacttcacagctggattactcgctcagaagctgtgttgcagagtcctgaatttgcaatctttcggaaggaaggcaacttctcagacttaaaagaaaaagtcaatgccatagagcgagaaaaagctgagaagttcagaaaactgcaagatgccagcagatcagctcaggccctggtggaacagatggtgaatgagggtgttaatgcagatagcatcaaacaagcctcagaacaactgaacagccggtggatcgaattctgccagttgctaagtgagagacttaactggctggagtatcagaacaacatcatcgctttctataatcagctacaacaattggagcagatgacaactactgctgaaaactggttgaaaatccaacccaccaccccatcagagccaacagcaattaaaagtcagttaaaaatttgtaaggatgaagtcaaccggctatcaggtcttcaacctcaaattgaacgattaaaaattcaaagcatagccctgaaagagaaaggacaaggacccatgttcctggatgcagactttgtggcctttacaaatcattttaagcaagtcttttctgatgtgcaggccagagagaaagagctacagacaatttttgacactttgccaccaatgcgctatcaggagaccatgagtgccatcaggacatgggtccagcagtcagaaaccaaactctccatacctcaacttagtgtcaccgactatgaaatcatggagcagagactcggggaattgcaggctttacaaagttctctgcaagagcaacaaagtggcctatactatctcagcaccactgtgaaagagatgtcgaagaaagcgccctctgaaattagccggaaatatcaatcagaatttgaagaaattgagggacgctggaagaagctctcctcccagctggttgagcattgtcaaaagctagaggagcaaatgaataaactccgaaaaattcagaatcacatacaaaccctgaagaaatggatggctgaagttgatgtttttctgaaggaggaatggcctgcccttggggattcagaaattctaaaaaagcagctgaaacagtgcagacttttagtcagtgatattcagacaattcagcccagtctaaacagtgtcaatgaaggtgggcagaagataaagaatgaagcagagccagagtttgcttcgagacttgagacagaactcaaagaacttaacactcagtgggatcacatgtgccaacaggtctatgccagaaaggaggccttgaagggaggtttggagaaaactgtaagcctccagaaagatctatcagagatgcacgaatggatgacacaagctgaagaagagtatcttgagagagattttgaatataaaactccagatgaattacagaaagcagttgaagagatgaagagagctaaagaagaggcccaacaaaaagaagcgaaagtgaaactccttactgagtctgtaaatagtgtcatagctcaagctccacctgtagcacaagaggccttaaaaaaggaacttgaaactctaaccaccaactaccagtggctctgcactaggctgaatgggaaatgcaagactttggaagaagtttgggcatgttggcatgagttattgtcatacttggagaaagcaaacaagtggctaaatgaagtagaatttaaacttaaaaccactgaaaacattcctggcggagctgaggaaatctctgaggtgctagattcacttgaaaatttgatgcgacattcagaggataacccaaatcagattcgcatattggcacagaccctaacagatggcggagtcatggatgagctaatcaatgaggaacttgagacatttaattctcgttggagggaactacatgaagaggctgtaaggaggcaaaagttgcttgaacagagcatccagtctgcccaggagactgaaaaatccttacacttaatccaggagtccctcacattcattgacaagcagttggcagcttatattgcagacaaggtggacgcagctcaaatgcctcaggaagcccagaaaatccaatctgatttgacaagtcatgagatcagtttagaagaaatgaagaaacataatcaggggaaggaggctgcccaaagagtcctgtctcagattgatgttgcacagaaaaaattacaagatgtctccatgaagtttcgattattccagaaaccagccaattttgagcagcgtctacaagaaagtaagatgattttagatgaagtgaagatgcacttgcctgcattggaaacaaagagtgtggaacaggaagtagtacagtcacagctaaatcattgtgtgaacttgtataaaagtctgagtgaagtgaagtctgaagtggaaatggtgataaagactggacgtcagattgtacagaaaaagcagacggaaaatcccaaagaacttgatgaaagagtaacagctttgaaattgcattataatgagctgggagcaaaggtaacagaaagaaagcaacagttggagaaatgcttgaaattgtcccgtaagatgcgaaaggaaatgaatgtcttgacagaatggctggcagctacagatatggaattgacaaagagatcagcagttgaaggaatgcctagtaatttggattctgaagttgcctggggaaaggctactcaaaaagagattgagaaacagaaggtgcacctgaagagtatcacagaggtaggagaggccttgaaaacagttttgggcaagaaggagacgttggtggaagataaactcagtcttctgaatagtaactggatagctgtcacctcccgagcagaagagtggttaaatcttttgttggaataccagaaacacatggaaacttttgaccagaatgtggaccacatcacaaagtggatcattcaggctgacacacttttggatgaatcagagaaaaagaaaccccagcaaaaagaagacgtgcttaagcgtttaaaggcagaactgaatgacatacgcccaaaggtggactctacacgtgaccaagcagcaaacttgatggcaaaccgcggtgaccactgcaggaaattagtagagccccaaatctcagagctcaaccatcgatttgcagccatttcacacagaattaagactggaaaggcctccattcctttgaaggaattggagcagtttaactcagatatacaaaaattgcttgaaccactggaggctgaaattcagcagggggtgaatctgaaagaggaagacttcaataaagatatgaatgaagacaatgagggtactgtaaaagaattgttgcaaagaggagacaacttacaacaaagaatcacagatgagagaaagcgagaggaaataaagataaaacagcagctgttacagacaaaacataatgctctcaaggatttgaggtctcaaagaagaaaaaaggctctagaaatttctcatcagtggtatcagtacaagaggcaggctgatgatctcctgaaatgcttggatgacattgaaaaaaaattagccagcctacctgagcccagagatgaaaggaaaataaaggaaattgatcgggaattgcagaagaagaaagaggagctgaatgcagtgcgtaggcaagctgagggcttgtctgaggatggggccgcaatggcagtggagccaactcagatccagctcagcaagcgctggcgggaaattgagagcaaatttgctcagtttcgaagactcaactttgcacaaattcacactgtccgtgaagaaacgatgatggtgatgactgaagacatgcctttggaaatttcttatgtgccttctacttatttgactgaaatcactcatgtctcacaagccctattagaagtggaacaacttctcaatgctcctgacctctgtgctaaggactttgaagatctctttaagcaagaggagtctctgaagaatataaaagatagtctacaacaaagctcaggtcggattgacattattcatagcaagaagacagcagcattgcaaagtgcaacgcctgtggaaagggtgaagctacaggaagctctctcccagcttgatttccaatgggaaaaagttaacaaaatgtacaaggaccgacaagggcgatttgacagatctgttgagaaatggcggcgttttcattatgatataaagatatttaatcagtggctaacagaagctgaacagtttctcagaaagacacaaattcctgagaattgggaacatgctaaatacaaatggtatcttaaggaactccaggatggcattgggcagcggcaaactgttgtcagaacattgaatgcaactggggaagaaataattcagcaatcctcaaaaacagatgccagtattctacaggaaaaattgggaagcctgaatctgcggtggcaggaggtctgcaaacagctgtcagacagaaaaaagaggctagaagaacaaaagaatatcttgtcagaatttcaaagagatttaaatgaatttgttttatggttggaggaagcagataacattgctagtatcccacttgaacctggaaaagagcagcaactaaaagaaaagcttgagcaagtcaagttactggtggaagagttgcccctgcgccagggaattctcaaacaattaaatgaaactggaggacccgtgcttgtaagtgctcccataagcccagaagagcaagataaacttgaaaataagctcaagcagacaaatctccagtggataaaggtttccagagctttacctgagaaacaaggagaaattgaagctcaaataaaagaccttgggcagcttgaaaaaaagcttgaagaccttgaagagcagttaaatcatctgctgctgtggttatctcctattaggaatcagttggaaatttataaccaaccaaaccaagaaggaccatttgacgttcaggaaactgaaatagcagttcaagctaaacaaccggatgtggaagagattttgtctaaagggcagcatttgtacaaggaaaaaccagccactcagccagtgaagaggaagttagaagatctgagctctgagtggaaggcggtaaaccgtttacttcaagagctgagggcaaagcagcctgacctagctcctggactgaccactattggagcctctcctactcagactgttactctggtgacacaacctgtggttactaaggaaactgccatctccaaactagaaatgccatcttccttgatgttggaggtacctgctctggcagatttcaaccgggcttggacagaacttaccgactggctttctctgcttgatcaagttataaaatcacagagggtgatggtgggtgaccttgaggatatcaacgagatgatcatcaagcagaaggcaacaatgcaggatttggaacagaggcgtccccagttggaagaactcattaccgctgcccaaaatttgaaaaacaagaccagcaatcaagaggctagaacaatcattacggatcgaattgaaagaattcagaatcagtgggatgaagtacaagaacaccttcagaaccggaggcaacagttgaatgaaatgttaaaggattcaacacaatggctggaagctaaggaagaagctgagcaggtcttaggacaggccagagccaagcttgagtcatggaaggagggtccctatacagtagatgcaatccaaaagaaaatcacagaaaccaagcagttggccaaagacctccgccagtggcagacaaatgtagatgtggcaaatgacttggccctgaaacttctccgggattattctgcagatgataccagaaaagtccacatgataacagagaatatcaatgcctcttggagaagcattcataaaagggtgagtgagcgagaggctgctttggaagaaactcatagattactgcaacagttccccctggacctggaaaagtttcttgcctggcttacagaagctgaaacaactgccaatgtcctacaggatgctacccgtaaggaaaggctcctagaagactccaagggagtaaaagagctgatgaaacaatggcaagacctccaaggtgaaattgaagctcacacagatgtttatcacaacctggatgaaaacagccaaaaaatcctgagatccctggaaggttccgatgatgcagtcctgttacaaagacgtttggataacatgaacttcaagtggagtgaacttcggaaaaagtctctcaacattaggtcccatttggaagccagttctgaccagtggaagcgtctgcacctttctctgcaggaacttctggtgtggctacagctgaaagatgatgaattaagccggcaggcacctattggaggcgactttccagcagttcagaagcagaacgatgtacatagggccttcaagagggaattgaaaactaaagaacctgtaatcatgagtactcttgagactgtacgaatatttctgacagagcagcctttggaaggactagagaaactctaccaggagcccagagagctgcctcctgaggagagagcccagaatgtcactcggcttctacgaaagcaggctgaggaggtcaatactgagtgggaaaaattgaacctgcactccgctgactggcagagaaaaatagatgagacccttgaaagactccaggaacttcaagaggccacggatgagctggacctcaagctgcgccaagctgaggtgatcaagggatcctggcagcccgtgggcgatctcctcattgactctctccaagatcacctcgagaaagtcaaggcacttcgaggagaaattgcgcctctgaaagagaacgtgagccacgtcaatgaccttgctcgccagcttaccactttgggcattcagctctcaccgtataacctcagcactctggaagacctgaacaccagatggaagcttctgcaggtggccgtcgaggaccgagtcaggcagctgcatgaagcccacagggactttggtccagcatctcagcactttctttccacgtctgtccagggtccctgggagagagccatctcgccaaacaaagtgccctactatatcaaccacgagactcaaacaacttgctgggaccatcccaaaatgacagagctctaccagtctttagctgacctgaataatgtcagattctcagcttataggactgccatgaaactccgaagactgcagaaggccctttgcttggatctcttgagcctgtcagctgcatgtgatgccttggaccagcacaacctcaagcaaaatgaccagcccatggatatcctgcagattattaattgtttgaccactatttatgaccgcctggagcaagagcacaacaatttggtcaacgtccctctctgcgtggatatgtgtctgaactggctgctgaatgtttatgatacgggacgaacagggaggatccgtgtcctgtcttttaaaactggcatcatttccctgtgtaaagcacatttggaagacaagtacagataccttttcaagcaagtggcaagttcaacaggattttgtgaccagcgcaggctgggcctccttctgcatgattctatccaaattccaagacagttgggtgaagttgcatcctttgggggcagtaacattgagccaagtgtccggagctgcttccaatttgctaataataagccagagatcgaagcggccctcttcctagactggatgagactggaaccccagtccatggtgtggctgcccgtcctgcacagagtggctgctgcagaaactgccaagcatcaggccaaatgtaacatctgcaaagagtgtccaatcattggattcaggtacaggagtctaaagcactttaattatgacatctgccaaagctgctttttttctggtcgagttgcaaaaggccataaaatgcactatcccatggtggaatattgcactccgactacatcaggagaagatgttcgagactttgccaaggtactaaaaaacaaatttcgaaccaaaaggtattttgcgaagcatccccgaatgggctacctgccagtgcagactgtcttagagggggacaacatggaaactcccgttactctgatcaacttctggccagtagattctgcgcctgcctcgtcccctcagctttcacacgatgatactcattcacgcattgaacattatgctagcaggctagcagaaatggaaaacagcaatggatcttatctaaatgatagcatctctcctaatgagagcatagatgatgaacatttgttaatccagcattactgccaaagtttgaaccaggactcccccctgagccagcctcgtagtcctgcccagatcttgatttccttagagagtgaggaaagaggggagctagagagaatcctagcagatcttgaggaagaaaacaggaatctgcaagcagaatatgaccgtctaaagcagcagcacgaacataaaggcctgtccccactgccgtcccctcctgaaatgatgcccacctctccccagagtccccgggatgctgagctcattgctgaggccaagctactgcgtcaacacaaaggccgcctggaagccaggatgcaaatcctggaagaccacaataaacagctggagtcacagttacacaggctaaggcagctgctggagcaaccccaggcagaggccaaagtgaatggcacaacggtgtcctctccttctacctctctacagaggtccgacagcagtcagcctatgctgctccgagtggttggcagtcaaacttcggactccatgggtgaggaagatcttctcagtcctccccaggacacaagcacagggttagaggaggtgatggagcaactcaacaactccttccctagttcaagaggaagaaatacccctggaaagccaatgagagaggacacaatgtaggaagtcttttccacatggcagatgatttgggcagagcgatggagtccttagtatcagtcatgacagatgaagaaggagcagaataaatgttttacaactcctgattcccgcatggtttttataatattcatacaacaaagaggattagacagtaagagtttacaagaaataaatctatatttttgtgaagggtagtggtattatactgtagatttcagtagtttctaagtctgttattgttttgttaacaatggcaggttttacacgtctatgcaattgtacaaaaaagttataagaaaactacatgtaaaatcttgatagctaaataacttgccatttctttatatggaacgcattttgggttgtttaaaaatttataacagttataaagaaagattgtaaactaaagtgtgctttataaaaaaaagttgtttataaaaacccctaaaaacaaaacaaacacacacacacacacatacacacacacacacaaaactttgaggcagcgcattgttttgcatccttttggcgtgatatccatatgaaattcatggctttttctttttttgcatattaaagataagacttcctctaccaccacaccaaatgactactacacactgctcatttgagaactgtcagctgagtggggcaggcttgagttttcatttcatatatctatatgtctataagtatataaatactatagttatatagataaagagatacgaatttctatagactgactttttccattttttaaatgttcatgtcacatcctaatagaaagaaattacttctagtcagtcatccaggcttacctgcttggtctagaatggatttttcccggagccggaagccaggaggaaactacaccacactaaaacattgtctacagctccagatgtttctcattttaaacaactttccactgacaacgaaagtaaagtaaagtattggatttttttaaagggaacatgtgaatgaatacacaggacttattatatcagagtgagtaatcggttggttggttgattgattgattgattgatacattcagcttcctgctgctagcaatgccacgatttagatttaatgatgcttcagtggaaatcaatcagaaggtattctgaccttgtgaacatcagaaggtattttttaactcccaagcagtagcaggacgatgatagggctggagggctatggattcccagcccatccctgtgaaggagtaggccactctttaagtgaaggattggatgattgttcataatacataaagttctctgtaattacaactaaattattatgccctcttctcacagtcaaaaggaactgggtggtttggtttttgttgcttttttagatttattgtcccatgtgggatgagtttttaaatgccacaagacataatttaaaataaataaactttgggaaaagcccatgaactgtgtttccatcctttgcatttctctgcgagtagttccacacaggtttgtaagtaagtaagaaagaaggcaaattgattcaaatgttacaaaaaaacccttcttggtggattagacaggttaaatatataaacaaacaaacaaaaattgctcaaaaaagaggagaaaagctcaagaggaaaagctaaggactggtaggaaaaagctttactctttcatgccattttatttctttttgatttttaaatcattcattcaatagataccaccgtgtgacctataattttgcaaatctgttacctctgacatcaagtgtaattagcttttggagagtgggctgacatcaagtgtaattagcttttggagagtgggttttgtccattattaataattaattaattaacatcaaacacggcttctcatgctatttctacctcactttggttttggggtgttcctgataattgtgcacacctgagttcacagcttcaccacttgtccattgcgttattttctttttcctttataattctttctttttccttcataattttcaaaagaaaacccaaagctctaaggtaacaaattaccaaattacatgaagatttggtttttgtcttgcatttttttcctttatgtgacgctggaccttttctttacccaaggatttttaaaactcagatttaaaacaaggggttactttacatcctactaagaagtttaagtaagtaagtttcattctaaaatcagaggtaaatagagtgcataaataattttgttttaatctttttgtttttcttttagacacattagctctggagtgagtctgtcataatatttgaacaaaaattgagagctttattgctgcattttaagcataattaatttggacattatttcgtgttgtgttctttataaccaccaagtattaaactgtaaatcataatgtaactgaagcataaacatcacatggcatgttttgtcattgttttcaggtactgagttcttacttgagtatcataatatattgtgttttaacaccaacactgtaacatttacgaattatttttttaaacttcagttttactgcattttcacaacatatcagacttcaccaaatatatgccttactattgtattatagtactgctttactgtgtatctcaataaagcacgcagttatgttacaaaaaagtaaaaac

SEQ ID NO: 319974 - DNA, 13903 bp, Homo sapiens
cgttaaatgcaaacgctgctctggctcatgtgtttgctccgaggtataggttttgttcgactgacgtatcagatagtcagagtggttaccacaccgacgttgtagcagctgcataataaatgactgaaagaatcatgttaggcatgcccacctaacctaacttgaatcatgcgaaaggggagctgttggaattcaaatagactttctggttcccagcagtcggcagtaatagaatgctttcaggaagatgacagaatcaggagaaagatgctgttttgcactatcttgatttgttacagcagccaacttattggcatgatggagtgacaggaaaaacagctggcatggaagatgaaagagaagatgttcaaaagaaaacattcacaaaatgggtaaatgcacaattttctaagtttgggaagcagcatattgagaacctcttcagtgacctacaggatgggaggcgcctcctagacctcctcgaaggcctgacagggcaaaaactgccaaaagaaaaaggatccacaagagttcatgccctgaacaatgtcaacaaggcactgcgggttttgcagaacaataatgttgatttagtgaatattggaagtactgacatcgtagatggaaatcataaactgactcttggtttgatttggaatataatcctccactggcaggtcaaaaatgtaatgaaaaatatcatggctggattgcaacaaaccaacagtgaaaagattctcctgagctgggtccgacaatcaactcgtaattatccacaggttaatgtaatcaacttcaccaccagctggtctgatggcctggctttgaatgctctcatccatagtcataggccagacctatttgactggaatagtgtggtttgccagcagtcagccacacaacgactggaacatgcattcaacatcgccagatatcaattaggcatagagaaactactcgatcctgaagatgttgataccacctatccagataagaagtccatcttaatgtacatcacatcactcttccaagttttgcctcaacaagtgagcattgaagccatccaggaagtggaaatgttgccaaggccacctaaagtgactaaagaagaacattttcagttacatcatcaaatgcactattctcaacagatcacggtcagtctagcacagggatatgagagaacttcttcccctaagcctcgattcaagagctatgcctacacacaggctgcttatgtcaccacctctgaccctacacggagcccatttccttcacagcatttggaagctcctgaagacaagtcatttggcagttcattgatggagagtgaagtaaacctggaccgttatcaaacagctttagaagaagtattatcgtggcttctttctgctgaggacacattgcaagcacaaggagagatttctaatgatgtggaagtggtgaaagaccagtttcatactcatgaggggtacatgatggatttgacagcccatcagggccgggttggtaatattctacaattgggaagtaagctgattggaacaggaaaattatcagaagatgaagaaactgaagtacaagagcagatgaatctcctaaattcaagatgggaatgcctcagggtagctagcatggaaaaacaaagcaatttacatagagttttaatggatctccagaatcagaaactgaaagagttgaatgactggctaacaaaaacagaagaaagaacaaggaaaatggaggaagagcctcttggacctgatcttgaagacctaaaacgccaagtacaacaacataaggtgcttcaagaagatctagaacaagaacaagtcagggtcaattctctcactcacatggtggtggtagttgatgaatctagtggagatcacgcaactgctgctttggaagaacaacttaaggtattgggagatcgatgggcaaacatctgtagatggacagaagaccgctgggttcttttacaagacatccttctcaaatggcaacgtcttactgaagaacagtgcctttttagtgcatggctttcagaaaaagaagatgcagtgaacaagattcacacaactggctttaaagatcaaaatgaaatgttatcaagtcttcaaaaactggccgttttaaaagcggatctagaaaagaaaaagcaatccatgggcaaactgtattcactcaaacaagatcttctttcaacactgaagaataagtcagtgacccagaagacggaagcatggctggataactttgcccggtgttgggataatttagtccaaaaacttgaaaagagtacagcacagatttcacaggctgtcaccaccactcagccatcactaacacagacaactgtaatggaaacagtaactacggtgaccacaagggaacagatcctggtaaagcatgctcaagaggaacttccaccaccacctccccaaaagaagaggcagattactgtggattctgaaattaggaaaaggttggatgttgatataactgaacttcacagctggattactcgctcagaagctgtgttgcagagtcctgaatttgcaatctttcggaaggaaggcaacttctcagacttaaaagaaaaagtcaatgccatagagcgagaaaaagctgagaagttcagaaaactgcaagatgccagcagatcagctcaggccctggtggaacagatggtgaatgagggtgttaatgcagatagcatcaaacaagcctcagaacaactgaacagccggtggatcgaattctgccagttgctaagtgagagacttaactggctggagtatcagaacaacatcatcgctttctataatcagctacaacaattggagcagatgacaactactgctgaaaactggttgaaaatccaacccaccaccccatcagagccaacagcaattaaaagtcagttaaaaatttgtaaggatgaagtcaaccggctatcaggtcttcaacctcaaattgaacgattaaaaattcaaagcatagccctgaaagagaaaggacaaggacccatgttcctggatgcagactttgtggcctttacaaatcattttaagcaagtcttttctgatgtgcaggccagagagaaagagctacagacaatttttgacactttgccaccaatgcgctatcaggagaccatgagtgccatcaggacatgggtccagcagtcagaaaccaaactctccatacctcaacttagtgtcaccgactatgaaatcatggagcagagactcggggaattgcaggctttacaaagttctctgcaagagcaacaaagtggcctatactatctcagcaccactgtgaaagagatgtcgaagaaagcgccctctgaaattagccggaaatatcaatcagaatttgaagaaattgagggacgctggaagaagctctcctcccagctggttgagcattgtcaaaagctagaggagcaaatgaataaactccgaaaaattcagaatcacatacaaaccctgaagaaatggatggctgaagttgatgtttttctgaaggaggaatggcctgcccttggggattcagaaattctaaaaaagcagctgaaacagtgcagacttttagtcagtgatattcagacaattcagcccagtctaaacagtgtcaatgaaggtgggcagaagataaagaatgaagcagagccagagtttgcttcgagacttgagacagaactcaaagaacttaacactcagtgggatcacatgtgccaacaggtctatgccagaaaggaggccttgaagggaggtttggagaaaactgtaagcctccagaaagatctatcagagatgcacgaatggatgacacaagctgaagaagagtatcttgagagagattttgaatataaaactccagatgaattacagaaagcagttgaagagatgaagagagctaaagaagaggcccaacaaaaagaagcgaaagtgaaactccttactgagtctgtaaatagtgtcatagctcaagctccacctgtagcacaagaggccttaaaaaaggaacttgaaactctaaccaccaactaccagtggctctgcactaggctgaatgggaaatgcaagactttggaagaagtttgggcatgttggcatgagttattgtcatacttggagaaagcaaacaagtggctaaatgaagtagaatttaaacttaaaaccactgaaaacattcctggcggagctgaggaaatctctgaggtgctagattcacttgaaaatttgatgcgacattcagaggataacccaaatcagattcgcatattggcacagaccctaacagatggcggagtcatggatgagctaatcaatgaggaacttgagacatttaattctcgttggagggaactacatgaagaggctgtaaggaggcaaaagttgcttgaacagagcatccagtctgcccaggagactgaaaaatccttacacttaatccaggagtccctcacattcattgacaagcagttggcagcttatattgcagacaaggtggacgcagctcaaatgcctcaggaagcccagaaaatccaatctgatttgacaagtcatgagatcagtttagaagaaatgaagaaacataatcaggggaaggaggctgcccaaagagtcctgtctcagattgatgttgcacagaaaaaattacaagatgtctccatgaagtttcgattattccagaaaccagccaattttgagcagcgtctacaagaaagtaagatgattttagatgaagtgaagatgcacttgcctgcattggaaacaaagagtgtggaacaggaagtagtacagtcacagctaaatcattgtgtgaacttgtataaaagtctgagtgaagtgaagtctgaagtggaaatggtgataaagactggacgtcagattgtacagaaaaagcagacggaaaatcccaaagaacttgatgaaagagtaacagctttgaaattgcattataatgagctgggagcaaaggtaacagaaagaaagcaacagttggagaaatgcttgaaattgtcccgtaagatgcgaaaggaaatgaatgtcttgacagaatggctggcagctacagatatggaattgacaaagagatcagcagttgaaggaatgcctagtaatttggattctgaagttgcctggggaaaggctactcaaaaagagattgagaaacagaaggtgcacctgaagagtatcacagaggtaggagaggccttgaaaacagttttgggcaagaaggagacgttggtggaagataaactcagtcttctgaatagtaactggatagctgtcacctcccgagcagaagagtggttaaatcttttgttggaataccagaaacacatggaaacttttgaccagaatgtggaccacatcacaaagtggatcattcaggctgacacacttttggatgaatcagagaaaaagaaaccccagcaaaaagaagacgtgcttaagcgtttaaaggcagaactgaatgacatacgcccaaaggtggactctacacgtgaccaagcagcaaacttgatggcaaaccgcggtgaccactgcaggaaattagtagagccccaaatctcagagctcaaccatcgatttgcagccatttcacacagaattaagactggaaaggcctccattcctttgaaggaattggagcagtttaactcagatatacaaaaattgcttgaaccactggaggctgaaattcagcagggggtgaatctgaaagaggaagacttcaataaagatatgaatgaagacaatgagggtactgtaaaagaattgttgcaaagaggagacaacttacaacaaagaatcacagatgagagaaagcgagaggaaataaagataaaacagcagctgttacagacaaaacataatgctctcaaggatttgaggtctcaaagaagaaaaaaggctctagaaatttctcatcagtggtatcagtacaagaggcaggctgatgatctcctgaaatgcttggatgacattgaaaaaaaattagccagcctacctgagcccagagatgaaaggaaaataaaggaaattgatcgggaattgcagaagaagaaagaggagctgaatgcagtgcgtaggcaagctgagggcttgtctgaggatggggccgcaatggcagtggagccaactcagatccagctcagcaagcgctggcgggaaattgagagcaaatttgctcagtttcgaagactcaactttgcacaaattcacactgtccgtgaagaaacgatgatggtgatgactgaagacatgcctttggaaatttcttatgtgccttctacttatttgactgaaatcactcatgtctcacaagccctattagaagtggaacaacttctcaatgctcctgacctctgtgctaaggactttgaagatctctttaagcaagaggagtctctgaagaatataaaagatagtctacaacaaagctcaggtcggattgacattattcatagcaagaagacagcagcattgcaaagtgcaacgcctgtggaaagggtgaagctacaggaagctctctcccagcttgatttccaatgggaaaaagttaacaaaatgtacaaggaccgacaagggcgatttgacagatctgttgagaaatggcggcgttttcattatgatataaagatatttaatcagtggctaacagaagctgaacagtttctcagaaagacacaaattcctgagaattgggaacatgctaaatacaaatggtatcttaaggaactccaggatggcattgggcagcggcaaactgttgtcagaacattgaatgcaactggggaagaaataattcagcaatcctcaaaaacagatgccagtattctacaggaaaaattgggaagcctgaatctgcggtggcaggaggtctgcaaacagctgtcagacagaaaaaagaggctagaagaacaaaagaatatcttgtcagaatttcaaagagatttaaatgaatttgttttatggttggaggaagcagataacattgctagtatcccacttgaacctggaaaagagcagcaactaaaagaaaagcttgagcaagtcaagttactggtggaagagttgcccctgcgccagggaattctcaaacaattaaatgaaactggaggacccgtgcttgtaagtgctcccataagcccagaagagcaagataaacttgaaaataagctcaagcagacaaatctccagtggataaaggtttccagagctttacctgagaaacaaggagaaattgaagctcaaataaaagaccttgggcagcttgaaaaaaagcttgaagaccttgaagagcagttaaatcatctgctgctgtggttatctcctattaggaatcagttggaaatttataaccaaccaaaccaagaaggaccatttgacgttcaggaaactgaaatagcagttcaagctaaacaaccggatgtggaagagattttgtctaaagggcagcatttgtacaaggaaaaaccagccactcagccagtgaagctcctactcagactgttactctggtgacacaacctgtggttactaaggaaactgccatctccaaactagaaatgccatcttccttgatgttggaggtacctgctctggcagatttcaaccgggcttggacagaacttaccgactggctttctctgcttgatcaagttataaaatcacagagggtgatggtgggtgaccttgaggatatcaacgagatgatcatcaagcagaaggcaacaatgcaggatttggaacagaggcgtccccagttggaagaactcattaccgctgcccaaaatttgaaaaacaagaccagcaatcaagaggctagaacaatcattacggatcgaattgaaagaattcagaatcagtgggatgaagtacaagaacaccttcagaaccggaggcaacagttgaatgaaatgttaaaggattcaacacaatggctggaagctaaggaagaagctgagcaggtcttaggacaggccagagccaagcttgagtcatggaaggagggtccctatacagtagatgcaatccaaaagaaaatcacagaaaccaagcagttggccaaagacctccgccagtggcagacaaatgtagatgtggcaaatgacttggccctgaaacttctccgggattattctgcagatgataccagaaaagtccacatgataacagagaatatcaatgcctcttggagaagcattcataaaagggtgagtgagcgagaggctgctttggaagaaactcatagattactgcaacagttccccctggacctggaaaagtttcttgcctggcttacagaagctgaaacaactgccaatgtcctacaggatgctacccgtaaggaaaggctcctagaagactccaagggagtaaaagagctgatgaaacaatggcaagacctccaaggtgaaattgaagctcacacagatgtttatcacaacctggatgaaaacagccaaaaaatcctgagatccctggaaggttccgatgatgcagtcctgttacaaagacgtttggataacatgaacttcaagtggagtgaacttcggaaaaagtctctcaacattaggtcccatttggaagccagttctgaccagtggaagcgtctgcacctttctctgcaggaacttctggtgtggctacagctgaaagatgatgaattaagccggcaggcacctattggaggcgactttccagcagttcagaagcagaacgatgtacatagggccttcaagagggaattgaaaactaaagaacctgtaatcatgagtactcttgagactgtacgaatatttctgacagagcagcctttggaaggactagagaaactctaccaggagcccagagagctgcctcctgaggagagagcccagaatgtcactcggcttctacgaaagcaggctgaggaggtcaatactgagtgggaaaaattgaacctgcactccgctgactggcagagaaaaatagatgagacccttgaaagactccaggaacttcaagaggccacggatgagctggacctcaagctgcgccaagctgaggtgatcaagggatcctggcagcccgtgggcgatctcctcattgactctctccaagatcacctcgagaaagtcaaggcacttcgaggagaaattgcgcctctgaaagagaacgtgagccacgtcaatgaccttgctcgccagcttaccactttgggcattcagctctcaccgtataacctcagcactctggaagacctgaacaccagatggaagcttctgcaggtggccgtcgaggaccgagtcaggcagctgcatgaagcccacagggactttggtccagcatctcagcactttctttccacgtctgtccagggtccctgggagagagccatctcgccaaacaaagtgccctactatatcaaccacgagactcaaacaacttgctgggaccatcccaaaatgacagagctctaccagtctttagctgacctgaataatgtcagattctcagcttataggactgccatgaaactccgaagactgcagaaggccctttgcttggatctcttgagcctgtcagctgcatgtgatgccttggaccagcacaacctcaagcaaaatgaccagcccatggatatcctgcagattattaattgtttgaccactatttatgaccgcctggagcaagagcacaacaatttggtcaacgtccctctctgcgtggatatgtgtctgaactggctgctgaatgtttatgatacgggacgaacagggaggatccgtgtcctgtcttttaaaactggcatcatttccctgtgtaaagcacatttggaagacaagtacagataccttttcaagcaagtggcaagttcaacaggattttgtgaccagcgcaggctgggcctccttctgcatgattctatccaaattccaagacagttgggtgaagttgcatcctttgggggcagtaacattgagccaagtgtccggagctgcttccaatttgctaataataagccagagatcgaagcggccctcttcctagactggatgagactggaaccccagtccatggtgtggctgcccgtcctgcacagagtggctgctgcagaaactgccaagcatcaggccaaatgtaacatctgcaaagagtgtccaatcattggattcaggtacaggagtctaaagcactttaattatgacatctgccaaagctgctttttttctggtcgagttgcaaaaggccataaaatgcactatcccatggtggaatattgcactccgactacatcaggagaagatgttcgagactttgccaaggtactaaaaaacaaatttcgaaccaaaaggtattttgcgaagcatccccgaatgggctacctgccagtgcagactgtcttagagggggacaacatggaaacgcctgcctcgtcccctcagctttcacacgatgatactcattcacgcattgaacattatgctagcaggctagcagaaatggaaaacagcaatggatcttatctaaatgatagcatctctcctaatgagagcatagatgatgaacatttgttaatccagcattactgccaaagtttgaaccaggactcccccctgagccagcctcgtagtcctgcccagatcttgatttccttagagagtgaggaaagaggggagctagagagaatcctagcagatcttgaggaagaaaacaggaatctgcaagcagaatatgaccgtctaaagcagcagcacgaacataaaggcctgtccccactgccgtcccctcctgaaatgatgcccacctctccccagagtccccgggatgctgagctcattgctgaggccaagctactgcgtcaacacaaaggccgcctggaagccaggatgcaaatcctggaagaccacaataaacagctggagtcacagttacacaggctaaggcagctgctggagcaaccccaggcagaggccaaagtgaatggcacaacggtgtcctctccttctacctctctacagaggtccgacagcagtcagcctatgctgctccgagtggttggcagtcaaacttcggactccatgggtgaggaagatcttctcagtcctccccaggacacaagcacagggttagaggaggtgatggagcaactcaacaactccttccctagttcaagaggacacaatgtaggaagtcttttccacatggcagatgatttgggcagagcgatggagtccttagtatcagtcatgacagatgaagaaggagcagaataaatgttttacaactcctgattcccgcatggtttttataatattcatacaacaaagaggattagacagtaagagtttacaagaaataaatctatatttttgtgaagggtagtggtattatactgtagatttcagtagtttctaagtctgttattgttttgttaacaatggcaggttttacacgtctatgcaattgtacaaaaaagttataagaaaactacatgtaaaatcttgatagctaaataacttgccatttctttatatggaacgcattttgggttgtttaaaaatttataacagttataaagaaagattgtaaactaaagtgtgctttataaaaaaaagttgtttataaaaacccctaaaaacaaaacaaacacacacacacacacatacacacacacacacaaaactttgaggcagcgcattgttttgcatccttttggcgtgatatccatatgaaattcatggctttttctttttttgcatattaaagataagacttcctctaccaccacaccaaatgactactacacactgctcatttgagaactgtcagctgagtggggcaggcttgagttttcatttcatatatctatatgtctataagtatataaatactatagttatatagataaagagatacgaatttctatagactgactttttccattttttaaatgttcatgtcacatcctaatagaaagaaattacttctagtcagtcatccaggcttacctgcttggtctagaatggatttttcccggagccggaagccaggaggaaactacaccacactaaaacattgtctacagctccagatgtttctcattttaaacaactttccactgacaacgaaagtaaagtaaagtattggatttttttaaagggaacatgtgaatgaatacacaggacttattatatcagagtgagtaatcggttggttggttgattgattgattgattgatacattcagcttcctgctgctagcaatgccacgatttagatttaatgatgcttcagtggaaatcaatcagaaggtattctgaccttgtgaacatcagaaggtattttttaactcccaagcagtagcaggacgatgatagggctggagggctatggattcccagcccatccctgtgaaggagtaggccactctttaagtgaaggattggatgattgttcataatacataaagttctctgtaattacaactaaattattatgccctcttctcacagtcaaaaggaactgggtggtttggtttttgttgcttttttagatttattgtcccatgtgggatgagtttttaaatgccacaagacataatttaaaataaataaactttgggaaaaggtgtaagacagtagccccatcacatttgtgatactgacaggtatcaacccagaagcccatgaactgtgtttccatcctttgcatttctctgcgagtagttccacacaggtttgtaagtaagtaagaaagaaggcaaattgattcaaatgttacaaaaaaacccttcttggtggattagacaggttaaatatataaacaaacaaacaaaaattgctcaaaaaagaggagaaaagctcaagaggaaaagctaaggactggtaggaaaaagctttactctttcatgccattttatttctttttgatttttaaatcattcattcaatagataccaccgtgtgacctataattttgcaaatctgttacctctgacatcaagtgtaattagcttttggagagtgggctgacatcaagtgtaattagcttttggagagtgggttttgtccattattaataattaattaattaacatcaaacacggcttctcatgctatttctacctcactttggttttggggtgttcctgataattgtgcacacctgagttcacagcttcaccacttgtccattgcgttattttctttttcctttataattctttctttttccttcataattttcaaaagaaaacccaaagctctaaggtaacaaattaccaaattacatgaagatttggtttttgtcttgcatttttttcctttatgtgacgctggaccttttctttacccaaggatttttaaaactcagatttaaaacaaggggttactttacatcctactaagaagtttaagtaagtaagtttcattctaaaatcagaggtaaatagagtgcataaataattttgttttaatctttttgtttttcttttagacacattagctctggagtgagtctgtcataatatttgaacaaaaattgagagctttattgctgcattttaagcataattaatttggacattatttcgtgttgtgttctttataaccaccaagtattaaactgtaaatcataatgtaactgaagcataaacatcacatggcatgttttgtcattgttttcaggtactgagttcttacttgagtatcataatatattgtgttttaacaccaacactgtaacatttacgaattatttttttaaacttcagttttactgcattttcacaacatatcagacttcaccaaatatatgccttactattgtattatagtactgctttactgtgtatctcaataaagcacgcagttatgttacaaaaaagtaaaaac

SEQ ID NO: 319975 - DNA, 13281 bp, Homo sapiens
cgttaaatgcaaacgctgctctggctcatgtgtttgctccgaggtataggttttgttcgactgacgtatcagatagtcagagtggttaccacaccgacgttgtagcagctgcataataaatgactgaaagaatcatgttaggcatgcccacctaacctaacttgaatcatgcgaaaggggagctgttggaattcaaatagactttctggttcccagcagtcggcagtaatagaatgctttcaggaagatgacagaatcaggagaaagatgctgttttgcactatcttgatttgttacagcagccaacttattggcatgatggagtgacaggaaaaacagctggcatggaagatgaaagagaagatgttcaaaagaaaacattcacaaaatgggtaaatgcacaattttctaagtttgggaagcagcatattgagaacctcttcagtgacctacaggatgggaggcgcctcctagacctcctcgaaggcctgacagggcaaaaactgccaaaagaaaaaggatccacaagagttcatgccctgaacaatgtcaacaaggcactgcgggttttgcagaacaataatgttgatttagtgaatattggaagtactgacatcgtagatggaaatcataaactgactcttggtttgatttggaatataatcctccactggcaggtcaaaaatgtaatgaaaaatatcatggctggattgcaacaaaccaacagtgaaaagattctcctgagctgggtccgacaatcaactcgtaattatccacaggttaatgtaatcaacttcaccaccagctggtctgatggcctggctttgaatgctctcatccatagtcataggccagacctatttgactggaatagtgtggtttgccagcagtcagccacacaacgactggaacatgcattcaacatcgccagatatcaattaggcatagagaaactactcgatcctgaagatgttgataccacctatccagataagaagtccatcttaatgtacatcacatcactcttccaagttttgcctcaacaagtgagcattgaagccatccaggaagtggaaatgttgccaaggccacctaaagtgactaaagaagaacattttcagttacatcatcaaatgcactattctcaacagatcacggtcagtctagcacagggatatgagagaacttcttcccctaagcctcgattcaagagctatgcctacacacaggctgcttatgtcaccacctctgaccctacacggagcccatttccttcacagcatttggaagctcctgaagacaagtcatttggcagttcattgatggagagtgaagtaaacctggaccgttatcaaacagctttagaagaagtattatcgtggcttctttctgctgaggacacattgcaagcacaaggagagatttctaatgatgtggaagtggtgaaagaccagtttcatactcatgaggggtacatgatggatttgacagcccatcagggccgggttggtaatattctacaattgggaagtaagctgattggaacaggaaaattatcagaagatgaagaaactgaagtacaagagcagatgaatctcctaaattcaagatgggaatgcctcagggtagctagcatggaaaaacaaagcaatttacatagagttttaatggatctccagaatcagaaactgaaagagttgaatgactggctaacaaaaacagaagaaagaacaaggaaaatggaggaagagcctcttggacctgatcttgaagacctaaaacgccaagtacaacaacataaggtgcttcaagaagatctagaacaagaacaagtcagggtcaattctctcactcacatggtggtggtagttgatgaatctagtggagatcacgcaactgctgctttggaagaacaacttaaggtattgggagatcgatgggcaaacatctgtagatggacagaagaccgctgggttcttttacaagacatccttctcaaatggcaacgtcttactgaagaacagtgcctttttagtgcatggctttcagaaaaagaagatgcagtgaacaagattcacacaactggctttaaagatcaaaatgaaatgttatcaagtcttcaaaaactggccgttttaaaagcggatctagaaaagaaaaagcaatccatgggcaaactgtattcactcaaacaagatcttctttcaacactgaagaataagtcagtgacccagaagacggaagcatggctggataactttgcccggtgttgggataatttagtccaaaaacttgaaaagagtacagcacagatttcacaggctgtcaccaccactcagccatcactaacacagacaactgtaatggaaacagtaactacggtgaccacaagggaacagatcctggtaaagcatgctcaagaggaacttccaccaccacctccccaaaagaagaggcagattactgtggattctgaaattaggaaaaggttggatgttgatataactgaacttcacagctggattactcgctcagaagctgtgttgcagagtcctgaatttgcaatctttcggaaggaaggcaacttctcagacttaaaagaaaaagtcaatgccatagagcgagaaaaagctgagaagttcagaaaactgcaagatgccagcagatcagctcaggccctggtggaacagatggtgaatgagggtgttaatgcagatagcatcaaacaagcctcagaacaactgaacagccggtggatcgaattctgccagttgctaagtgagagacttaactggctggagtatcagaacaacatcatcgctttctataatcagctacaacaattggagcagatgacaactactgctgaaaactggttgaaaatccaacccaccaccccatcagagccaacagcaattaaaagtcagttaaaaatttgtaaggatgaagtcaaccggctatcaggtcttcaacctcaaattgaacgattaaaaattcaaagcatagccctgaaagagaaaggacaaggacccatgttcctggatgcagactttgtggcctttacaaatcattttaagcaagtcttttctgatgtgcaggccagagagaaagagctacagacaatttttgacactttgccaccaatgcgctatcaggagaccatgagtgccatcaggacatgggtccagcagtcagaaaccaaactctccatacctcaacttagtgtcaccgactatgaaatcatggagcagagactcggggaattgcaggctttacaaagttctctgcaagagcaacaaagtggcctatactatctcagcaccactgtgaaagagatgtcgaagaaagcgccctctgaaattagccggaaatatcaatcagaatttgaagaaattgagggacgctggaagaagctctcctcccagctggttgagcattgtcaaaagctagaggagcaaatgaataaactccgaaaaattcagaatcacatacaaaccctgaagaaatggatggctgaagttgatgtttttctgaaggaggaatggcctgcccttggggattcagaaattctaaaaaagcagctgaaacagtgcagacttttagtcagtgatattcagacaattcagcccagtctaaacagtgtcaatgaaggtgggcagaagataaagaatgaagcagagccagagtttgcttcgagacttgagacagaactcaaagaacttaacactcagtgggatcacatgtgccaacaggtctatgccagaaaggaggccttgaagggaggtttggagaaaactgtaagcctccagaaagatctatcagagatgcacgaatggatgacacaagctgaagaagagtatcttgagagagattttgaatataaaactccagatgaattacagaaagcagttgaagagatgaagagagctaaagaagaggcccaacaaaaagaagcgaaagtgaaactccttactgagtctgtaaatagtgtcatagctcaagctccacctgtagcacaagaggccttaaaaaaggaacttgaaactctaaccaccaactaccagtggctctgcactaggctgaatgggaaatgcaagactttggaagaagtttgggcatgttggcatgagttattgtcatacttggagaaagcaaacaagtggctaaatgaagtagaatttaaacttaaaaccactgaaaacattcctggcggagctgaggaaatctctgaggtgctagattcacttgaaaatttgatgcgacattcagaggataacccaaatcagattcgcatattggcacagaccctaacagatggcggagtcatggatgagctaatcaatgaggaacttgagacatttaattctcgttggagggaactacatgaagaggctgtaaggaggcaaaagttgcttgaacagagcatccagtctgcccaggagactgaaaaatccttacacttaatccaggagtccctcacattcattgacaagcagttggcagcttatattgcagacaaggtggacgcagctcaaatgcctcaggaagcccagaaaatccaatctgatttgacaagtcatgagatcagtttagaagaaatgaagaaacataatcaggggaaggaggctgcccaaagagtcctgtctcagattgatgttgcacagaaaaaattacaagatgtctccatgaagtttcgattattccagaaaccagccaattttgagcagcgtctacaagaaagtaagatgattttagatgaagtgaagatgcacttgcctgcattggaaacaaagagtgtggaacaggaagtagtacagtcacagctaaatcattgtgtgaacttgtataaaagtctgagtgaagtgaagtctgaagtggaaatggtgataaagactggacgtcagattgtacagaaaaagcagacggaaaatcccaaagaacttgatgaaagagtaacagctttgaaattgcattataatgagctgggagcaaaggtaacagaaagaaagcaacagttggagaaatgcttgaaattgtcccgtaagatgcgaaaggaaatgaatgtcttgacagaatggctggcagctacagatatggaattgacaaagagatcagcagttgaaggaatgcctagtaatttggattctgaagttgcctggggaaaggctactcaaaaagagattgagaaacagaaggtgcacctgaagagtatcacagaggtaggagaggccttgaaaacagttttgggcaagaaggagacgttggtggaagataaactcagtcttctgaatagtaactggatagctgtcacctcccgagcagaagagtggttaaatcttttgttggaataccagaaacacatggaaacttttgaccagaatgtggaccacatcacaaagtggatcattcaggctgacacacttttggatgaatcagagaaaaagaaaccccagcaaaaagaagacgtgcttaagcgtttaaaggcagaactgaatgacatacgcccaaaggtggactctacacgtgaccaagcagcaaacttgatggcaaaccgcggtgaccactgcaggaaattagtagagccccaaatctcagagctcaaccatcgatttgcagccatttcacacagaattaagactggaaaggcctccattcctttgaaggaattggagcagtttaactcagatatacaaaaattgcttgaaccactggaggctgaaattcagcagggggtgaatctgaaagaggaagacttcaataaagatatgaatgaagacaatgagggtactgtaaaagaattgttgcaaagaggagacaacttacaacaaagaatcacagatgagagaaagcgagaggaaataaagataaaacagcagctgttacagacaaaacataatgctctcaaggatttgaggtctcaaagaagaaaaaaggctctagaaatttctcatcagtggtatcagtacaagaggcaggctgatgatctcctgaaatgcttggatgacattgaaaaaaaattagccagcctacctgagcccagagatgaaaggaaaataaaggaaattgatcgggaattgcagaagaagaaagaggagctgaatgcagtgcgtaggcaagctgagggcttgtctgaggatggggccgcaatggcagtggagccaactcagatccagctcagcaagcgctggcgggaaattgagagcaaatttgctcagtttcgaagactcaactttgcacaaattcacactgtccgtgaagaaacgatgatggtgatgactgaagacatgcctttggaaatttcttatgtgccttctacttatttgactgaaatcactcatgtctcacaagccctattagaagtggaacaacttctcaatgctcctgacctctgtgctaaggactttgaagatctctttaagcaagaggagtctctgaagaatataaaagatagtctacaacaaagctcaggtcggattgacattattcatagcaagaagacagcagcattgcaaagtgcaacgcctgtggaaagggtgaagctacaggaagctctctcccagcttgatttccaatgggaaaaagttaacaaaatgtacaaggaccgacaagggtttccagagctttacctgagaaacaaggagaaattgaagctcaaataaaagaccttgggcagcttgaaaaaaagcttgaagaccttgaagagcagttaaatcatctgctgctgtggttatctcctattaggaatcagttggaaatttataaccaaccaaaccaagaaggaccatttgacgttcaggaaactgaaatagcagttcaagctaaacaaccggatgtggaagagattttgtctaaagggcagcatttgtacaaggaaaaaccagccactcagccagtgaagctcctactcagactgttactctggtgacacaacctgtggttactaaggaaactgccatctccaaactagaaatgccatcttccttgatgttggaggtacctgctctggcagatttcaaccgggcttggacagaacttaccgactggctttctctgcttgatcaagttataaaatcacagagggtgatggtgggtgaccttgaggatatcaacgagatgatcatcaagcagaaggcaacaatgcaggatttggaacagaggcgtccccagttggaagaactcattaccgctgcccaaaatttgaaaaacaagaccagcaatcaagaggctagaacaatcattacggatcgaattgaaagaattcagaatcagtgggatgaagtacaagaacaccttcagaaccggaggcaacagttgaatgaaatgttaaaggattcaacacaatggctggaagctaaggaagaagctgagcaggtcttaggacaggccagagccaagcttgagtcatggaaggagggtccctatacagtagatgcaatccaaaagaaaatcacagaaaccaagcagttggccaaagacctccgccagtggcagacaaatgtagatgtggcaaatgacttggccctgaaacttctccgggattattctgcagatgataccagaaaagtccacatgataacagagaatatcaatgcctcttggagaagcattcataaaagggtgagtgagcgagaggctgctttggaagaaactcatagattactgcaacagttccccctggacctggaaaagtttcttgcctggcttacagaagctgaaacaactgccaatgtcctacaggatgctacccgtaaggaaaggctcctagaagactccaagggagtaaaagagctgatgaaacaatggcaagacctccaaggtgaaattgaagctcacacagatgtttatcacaacctggatgaaaacagccaaaaaatcctgagatccctggaaggttccgatgatgcagtcctgttacaaagacgtttggataacatgaacttcaagtggagtgaacttcggaaaaagtctctcaacattaggtcccatttggaagccagttctgaccagtggaagcgtctgcacctttctctgcaggaacttctggtgtggctacagctgaaagatgatgaattaagccggcaggcacctattggaggcgactttccagcagttcagaagcagaacgatgtacatagggccttcaagagggaattgaaaactaaagaacctgtaatcatgagtactcttgagactgtacgaatatttctgacagagcagcctttggaaggactagagaaactctaccaggagcccagagagctgcctcctgaggagagagcccagaatgtcactcggcttctacgaaagcaggctgaggaggtcaatactgagtgggaaaaattgaacctgcactccgctgactggcagagaaaaatagatgagacccttgaaagactccaggaacttcaagaggccacggatgagctggacctcaagctgcgccaagctgaggtgatcaagggatcctggcagcccgtgggcgatctcctcattgactctctccaagatcacctcgagaaagtcaaggcacttcgaggagaaattgcgcctctgaaagagaacgtgagccacgtcaatgaccttgctcgccagcttaccactttgggcattcagctctcaccgtataacctcagcactctggaagacctgaacaccagatggaagcttctgcaggtggccgtcgaggaccgagtcaggcagctgcatgaagcccacagggactttggtccagcatctcagcactttctttccacgtctgtccagggtccctgggagagagccatctcgccaaacaaagtgccctactatatcaaccacgagactcaaacaacttgctgggaccatcccaaaatgacagagctctaccagtctttagctgacctgaataatgtcagattctcagcttataggactgccatgaaactccgaagactgcagaaggccctttgcttggatctcttgagcctgtcagctgcatgtgatgccttggaccagcacaacctcaagcaaaatgaccagcccatggatatcctgcagattattaattgtttgaccactatttatgaccgcctggagcaagagcacaacaatttggtcaacgtccctctctgcgtggatatgtgtctgaactggctgctgaatgtttatgatacgggacgaacagggaggatccgtgtcctgtcttttaaaactggcatcatttccctgtgtaaagcacatttggaagacaagtacagataccttttcaagcaagtggcaagttcaacaggattttgtgaccagcgcaggctgggcctccttctgcatgattctatccaaattccaagacagttgggtgaagttgcatcctttgggggcagtaacattgagccaagtgtccggagctgcttccaatttgctaataataagccagagatcgaagcggccctcttcctagactggatgagactggaaccccagtccatggtgtggctgcccgtcctgcacagagtggctgctgcagaaactgccaagcatcaggccaaatgtaacatctgcaaagagtgtccaatcattggattcaggtacaggagtctaaagcactttaattatgacatctgccaaagctgctttttttctggtcgagttgcaaaaggccataaaatgcactatcccatggtggaatattgcactccgactacatcaggagaagatgttcgagactttgccaaggtactaaaaaacaaatttcgaaccaaaaggtattttgcgaagcatccccgaatgggctacctgccagtgcagactgtcttagagggggacaacatggaaacgcctgcctcgtcccctcagctttcacacgatgatactcattcacgcattgaacattatgctagcaggctagcagaaatggaaaacagcaatggatcttatctaaatgatagcatctctcctaatgagagcatagatgatgaacatttgttaatccagcattactgccaaagtttgaaccaggactcccccctgagccagcctcgtagtcctgcccagatcttgatttccttagagagtgaggaaagaggggagctagagagaatcctagcagatcttgaggaagaaaacaggaatctgcaagcagaatatgaccgtctaaagcagcagcacgaacataaaggcctgtccccactgccgtcccctcctgaaatgatgcccacctctccccagagtccccgggatgctgagctcattgctgaggccaagctactgcgtcaacacaaaggccgcctggaagccaggatgcaaatcctggaagaccacaataaacagctggagtcacagttacacaggctaaggcagctgctggagcaaccccaggcagaggccaaagtgaatggcacaacggtgtcctctccttctacctctctacagaggtccgacagcagtcagcctatgctgctccgagtggttggcagtcaaacttcggactccatgggtgaggaagatcttctcagtcctccccaggacacaagcacagggttagaggaggtgatggagcaactcaacaactccttccctagttcaagaggacacaatgtaggaagtcttttccacatggcagatgatttgggcagagcgatggagtccttagtatcagtcatgacagatgaagaaggagcagaataaatgttttacaactcctgattcccgcatggtttttataatattcatacaacaaagaggattagacagtaagagtttacaagaaataaatctatatttttgtgaagggtagtggtattatactgtagatttcagtagtttctaagtctgttattgttttgttaacaatggcaggttttacacgtctatgcaattgtacaaaaaagttataagaaaactacatgtaaaatcttgatagctaaataacttgccatttctttatatggaacgcattttgggttgtttaaaaatttataacagttataaagaaagattgtaaactaaagtgtgctttataaaaaaaagttgtttataaaaacccctaaaaacaaaacaaacacacacacacacacatacacacacacacacaaaactttgaggcagcgcattgttttgcatccttttggcgtgatatccatatgaaattcatggctttttctttttttgcatattaaagataagacttcctctaccaccacaccaaatgactactacacactgctcatttgagaactgtcagctgagtggggcaggcttgagttttcatttcatatatctatatgtctataagtatataaatactatagttatatagataaagagatacgaatttctatagactgactttttccattttttaaatgttcatgtcacatcctaatagaaagaaattacttctagtcagtcatccaggcttacctgcttggtctagaatggatttttcccggagccggaagccaggaggaaactacaccacactaaaacattgtctacagctccagatgtttctcattttaaacaactttccactgacaacgaaagtaaagtaaagtattggatttttttaaagggaacatgtgaatgaatacacaggacttattatatcagagtgagtaatcggttggttggttgattgattgattgattgatacattcagcttcctgctgctagcaatgccacgatttagatttaatgatgcttcagtggaaatcaatcagaaggtattctgaccttgtgaacatcagaaggtattttttaactcccaagcagtagcaggacgatgatagggctggagggctatggattcccagcccatccctgtgaaggagtaggccactctttaagtgaaggattggatgattgttcataatacataaagttctctgtaattacaactaaattattatgccctcttctcacagtcaaaaggaactgggtggtttggtttttgttgcttttttagatttattgtcccatgtgggatgagtttttaaatgccacaagacataatttaaaataaataaactttgggaaaaggtgtaagacagtagccccatcacatttgtgatactgacaggtatcaacccagaagcccatgaactgtgtttccatcctttgcatttctctgcgagtagttccacacaggtttgtaagtaagtaagaaagaaggcaaattgattcaaatgttacaaaaaaacccttcttggtggattagacaggttaaatatataaacaaacaaacaaaaattgctcaaaaaagaggagaaaagctcaagaggaaaagctaaggactggtaggaaaaagctttactctttcatgccattttatttctttttgatttttaaatcattcattcaatagataccaccgtgtgacctataattttgcaaatctgttacctctgacatcaagtgtaattagcttttggagagtgggctgacatcaagtgtaattagcttttggagagtgggttttgtccattattaataattaattaattaacatcaaacacggcttctcatgctatttctacctcactttggttttggggtgttcctgataattgtgcacacctgagttcacagcttcaccacttgtccattgcgttattttctttttcctttataattctttctttttccttcataattttcaaaagaaaacccaaagctctaaggtaacaaattaccaaattacatgaagatttggtttttgtcttgcatttttttcctttatgtgacgctggaccttttctttacccaaggatttttaaaactcagatttaaaacaaggggttactttacatcctactaagaagtttaagtaagtaagtttcattctaaaatcagaggtaaatagagtgcataaataattttgttttaatctttttgtttttcttttagacacattagctctggagtgagtctgtcataatatttgaacaaaaattgagagctttattgctgcattttaagcataattaatttggacattatttcgtgttgtgttctttataaccaccaagtattaaactgtaaatcataatgtaactgaagcataaacatcacatggcatgttttgtcattgttttcaggtactgagttcttacttgagtatcataatatattgtgttttaacaccaacactgtaacatttacgaattatttttttaaacttcagttttactgcattttcacaacatatcagacttcaccaaatatatgccttactattgtattatagtactgctttactgtgtatctcaataaagcacgcagttatgttacaaaaaagtaaaaac

SEQ ID NO: 319976 - DNA, 12963 bp, Homo sapiens
  misc_feature (2)..(3): n is a, c, g, or t
gnntcctggcatcagttactgtgttgactcactcagtgttgggatcactcactttccccctacaggactcagatctgggaggcaattaccttcggagaaaaacgaataggaaaaactgaagtgttactttttttaaagctgctgaagtttgttggtttctcattgtttttaagcctactggagcaataaagtttgaagaacttttaccaggttttttttatcgctgccttgatatacacttttcaaaatgctttggtgggaagaagtagaggactgttatgaaagagaagatgttcaaaagaaaacattcacaaaatgggtaaatgcacaattttctaagcatttggaagctcctgaagacaagtcatttggcagttcattgatggagagtgaagtaaacctggaccgttatcaaacagctttagaagaagtattatcgtggcttctttctgctgaggacacattgcaagcacaaggagagatttctaatgatgtggaagtggtgaaagaccagtttcatactcatgaggggtacatgatggatttgacagcccatcagggccgggttggtaatattctacaattgggaagtaagctgattggaacaggaaaattatcagaagatgaagaaactgaagtacaagagcagatgaatctcctaaattcaagatgggaatgcctcagggtagctagcatggaaaaacaaagcaatttacatagagttttaatggatctccagaatcagaaactgaaagagttgaatgactggctaacaaaaacagaagaaagaacaaggaaaatggaggaagagcctcttggacctgatcttgaagacctaaaacgccaagtacaacaacataaggtgcttcaagaagatctagaacaagaacaagtcagggtcaattctctcactcacatggtggtggtagttgatgaatctagtggagatcacgcaactgctgctttggaagaacaacttaaggtattgggagatcgatgggcaaacatctgtagatggacagaagaccgctgggttcttttacaagacatccttctcaaatggcaacgtcttactgaagaacagtgcctttttagtgcatggctttcagaaaaagaagatgcagtgaacaagattcacacaactggctttaaagatcaaaatgaaatgttatcaagtcttcaaaaactggccgttttaaaagcggatctagaaaagaaaaagcaatccatgggcaaactgtattcactcaaacaagatcttctttcaacactgaagaataagtcagtgacccagaagacggaagcatggctggataactttgcccggtgttgggataatttagtccaaaaacttgaaaagagtacagcacagatttcacaggctgtcaccaccactcagccatcactaacacagacaactgtaatggaaacagtaactacggtgaccacaagggaacagatcctggtaaagcatgctcaagaggaacttccaccaccacctccccaaaagaagaggcagattactgtggattctgaaattaggaaaaggttggatgttgatataactgaacttcacagctggattactcgctcagaagctgtgttgcagagtcctgaatttgcaatctttcggaaggaaggcaacttctcagacttaaaagaaaaagtcaatgccatagagcgagaaaaagctgagaagttcagaaaactgcaagatgccagcagatcagctcaggccctggtggaacagatggtgaatgagggtgttaatgcagatagcatcaaacaagcctcagaacaactgaacagccggtggatcgaattctgccagttgctaagtgagagacttaactggctggagtatcagaacaacatcatcgctttctataatcagctacaacaattggagcagatgacaactactgctgaaaactggttgaaaatccaacccaccaccccatcagagccaacagcaattaaaagtcagttaaaaatttgtaaggatgaagtcaaccggctatcaggtcttcaacctcaaattgaacgattaaaaattcaaagcatagccctgaaagagaaaggacaaggacccatgttcctggatgcagactttgtggcctttacaaatcattttaagcaagtcttttctgatgtgcaggccagagagaaagagctacagacaatttttgacactttgccaccaatgcgctatcaggagaccatgagtgccatcaggacatgggtccagcagtcagaaaccaaactctccatacctcaacttagtgtcaccgactatgaaatcatggagcagagactcggggaattgcaggctttacaaagttctctgcaagagcaacaaagtggcctatactatctcagcaccactgtgaaagagatgtcgaagaaagcgccctctgaaattagccggaaatatcaatcagaatttgaagaaattgagggacgctggaagaagctctcctcccagctggttgagcattgtcaaaagctagaggagcaaatgaataaactccgaaaaattcagaatcacatacaaaccctgaagaaatggatggctgaagttgatgtttttctgaaggaggaatggcctgcccttggggattcagaaattctaaaaaagcagctgaaacagtgcagacttttagtcagtgatattcagacaattcagcccagtctaaacagtgtcaatgaaggtgggcagaagataaagaatgaagcagagccagagtttgcttcgagacttgagacagaactcaaagaacttaacactcagtgggatcacatgtgccaacaggtctatgccagaaaggaggccttgaagggaggtttggagaaaactgtaagcctccagaaagatctatcagagatgcacgaatggatgacacaagctgaagaagagtatcttgagagagattttgaatataaaactccagatgaattacagaaagcagttgaagagatgaagagagctaaagaagaggcccaacaaaaagaagcgaaagtgaaactccttactgagtctgtaaatagtgtcatagctcaagctccacctgtagcacaagaggccttaaaaaaggaacttgaaactctaaccaccaactaccagtggctctgcactaggctgaatgggaaatgcaagactttggaagaagtttgggcatgttggcatgagttattgtcatacttggagaaagcaaacaagtggctaaatgaagtagaatttaaacttaaaaccactgaaaacattcctggcggagctgaggaaatctctgaggtgctagattcacttgaaaatttgatgcgacattcagaggataacccaaatcagattcgcatattggcacagaccctaacagatggcggagtcatggatgagctaatcaatgaggaacttgagacatttaattctcgttggagggaactacatgaagaggctgtaaggaggcaaaagttgcttgaacagagcatccagtctgcccaggagactgaaaaatccttacacttaatccaggagtccctcacattcattgacaagcagttggcagcttatattgcagacaaggtggacgcagctcaaatgcctcaggaagcccagaaaatccaatctgatttgacaagtcatgagatcagtttagaagaaatgaagaaacataatcaggggaaggaggctgcccaaagagtcctgtctcagattgatgttgcacagaaaaaattacaagatgtctccatgaagtttcgattattccagaaaccagccaattttgagcagcgtctacaagaaagtaagatgattttagatgaagtgaagatgcacttgcctgcattggaaacaaagagtgtggaacaggaagtagtacagtcacagctaaatcattgtgtgaacttgtataaaagtctgagtgaagtgaagtctgaagtggaaatggtgataaagactggacgtcagattgtacagaaaaagcagacggaaaatcccaaagaacttgatgaaagagtaacagctttgaaattgcattataatgagctgggagcaaaggtaacagaaagaaagcaacagttggagaaatgcttgaaattgtcccgtaagatgcgaaaggaaatgaatgtcttgacagaatggctggcagctacagatatggaattgacaaagagatcagcagttgaaggaatgcctagtaatttggattctgaagttgcctggggaaaggctactcaaaaagagattgagaaacagaaggtgcacctgaagagtatcacagaggtaggagaggccttgaaaacagttttgggcaagaaggagacgttggtggaagataaactcagtcttctgaatagtaactggatagctgtcacctcccgagcagaagagtggttaaatcttttgttggaataccagaaacacatggaaacttttgaccagaatgtggaccacatcacaaagtggatcattcaggctgacacacttttggatgaatcagagaaaaagaaaccccagcaaaaagaagacgtgcttaagcgtttaaaggcagaactgaatgacatacgcccaaaggtggactctacacgtgaccaagcagcaaacttgatggcaaaccgcggtgaccactgcaggaaattagtagagccccaaatctcagagctcaaccatcgatttgcagccatttcacacagaattaagactggaaaggcctccattcctttgaaggaattggagcagtttaactcagatatacaaaaattgcttgaaccactggaggctgaaattcagcagggggtgaatctgaaagaggaagacttcaataaagatatgaatgaagacaatgagggtactgtaaaagaattgttgcaaagaggagacaacttacaacaaagaatcacagatgagagaaagcgagaggaaataaagataaaacagcagctgttacagacaaaacataatgctctcaaggatttgaggtctcaaagaagaaaaaaggctctagaaatttctcatcagtggtatcagtacaagaggcaggctgatgatctcctgaaatgcttggatgacattgaaaaaaaattagccagcctacctgagcccagagatgaaaggaaaataaaggaaattgatcgggaattgcagaagaagaaagaggagctgaatgcagtgcgtaggcaagctgagggcttgtctgaggatggggccgcaatggcagtggagccaactcagatccagctcagcaagcgctggcgggaaattgagagcaaatttgctcagtttcgaagactcaactttgcacaaattcacactgtccgtgaagaaacgatgatggtgatgactgaagacatgcctttggaaatttcttatgtgccttctacttatttgactgaaatcactcatgtctcacaagccctattagaagtggaacaacttctcaatgctcctgacctctgtgctaaggactttgaagatctctttaagcaagaggagtctctgaagaatataaaagatagtctacaacaaagctcaggtcggattgacattattcatagcaagaagacagcagcattgcaaagtgcaacgcctgtggaaagggtgaagctacaggaagctctctcccagcttgatttccaatgggaaaaagttaacaaaatgtacaaggaccgacaagggcgatttgacagatctgttgagaaatggcggcgttttcattatgatataaagatatttaatcagtggctaacagaagctgaacagtttctcagaaagacacaaattcctgagaattgggaacatgctaaatacaaatggtatcttaaggaactccaggatggcattgggcagcggcaaactgttgtcagaacattgaatgcaactggggaagaaataattcagcaatcctcaaaaacagatgccagtattctacaggaaaaattgggaagcctgaatctgcggtggcaggaggtctgcaaacagctgtcagacagaaaaaagaggctagaagaacaaaagaatatcttgtcagaatttcaaagagatttaaatgaatttgttttatggttggaggaagcagataacattgctagtatcccacttgaacctggaaaagagcagcaactaaaagaaaagcttgagcaagtcaagttactggtggaagagttgcccctgcgccagggaattctcaaacaattaaatgaaactggaggacccgtgcttgtaagtgctcccataagcccagaagagcaagataaacttgaaaataagctcaagcagacaaatctccagtggataaaggtttccagagctttacctgagaaacaaggagaaattgaagctcaaataaaagaccttgggcagcttgaaaaaaagcttgaagaccttgaagagcagttaaatcatctgctgctgtggttatctcctattaggaatcagttggaaatttataaccaaccaaaccaagaaggaccatttgacgttcaggaaactgaaatagcagttcaagctaaacaaccggatgtggaagagattttgtctaaagggcagcatttgtacaaggaaaaaccagccactcagccagtgaagctcctactcagactgttactctggtgacacaacctgtggttactaaggaaactgccatctccaaactagaaatgccatcttccttgatgttggaggtacctgctctggcagatttcaaccgggcttggacagaacttaccgactggctttctctgcttgatcaagttataaaatcacagagggtgatggtgggtgaccttgaggatatcaacgagatgatcatcaagcagaaggcaacaatgcaggatttggaacagaggcgtccccagttggaagaactcattaccgctgcccaaaatttgaaaaacaagaccagcaatcaagaggctagaacaatcattacggatcgaattgaaagaattcagaatcagtgggatgaagtacaagaacaccttcagaaccggaggcaacagttgaatgaaatgttaaaggattcaacacaatggctggaagctaaggaagaagctgagcaggtcttaggacaggccagagccaagcttgagtcatggaaggagggtccctatacagtagatgcaatccaaaagaaaatcacagaaaccaagcagttggccaaagacctccgccagtggcagacaaatgtagatgtggcaaatgacttggccctgaaacttctccgggattattctgcagatgataccagaaaagtccacatgataacagagaatatcaatgcctcttggagaagcattcataaaagggtgagtgagcgagaggctgctttggaagaaactcatagattactgcaacagttccccctggacctggaaaagtttcttgcctggcttacagaagctgaaacaactgccaatgtcctacaggatgctacccgtaaggaaaggctcctagaagactccaagggagtaaaagagctgatgaaacaatggcaagacctccaaggtgaaattgaagctcacacagatgtttatcacaacctggatgaaaacagccaaaaaatcctgagatccctggaaggttccgatgatgcagtcctgttacaaagacgtttggataacatgaacttcaagtggagtgaacttcggaaaaagtctctcaacattaggtcccatttggaagccagttctgaccagtggaagcgtctgcacctttctctgcaggaacttctggtgtggctacagctgaaagatgatgaattaagccggcaggcacctattggaggcgactttccagcagttcagaagcagaacgatgtacatagggccttcaagagggaattgaaaactaaagaacctgtaatcatgagtactcttgagactgtacgaatatttctgacagagcagcctttggaaggactagagaaactctaccaggagcccagagagctgcctcctgaggagagagcccagaatgtcactcggcttctacgaaagcaggctgaggaggtcaatactgagtgggaaaaattgaacctgcactccgctgactggcagagaaaaatagatgagacccttgaaagactccaggaacttcaagaggccacggatgagctggacctcaagctgcgccaagctgaggtgatcaagggatcctggcagcccgtgggcgatctcctcattgactctctccaagatcacctcgagaaagtcaaggcacttcgaggagaaattgcgcctctgaaagagaacgtgagccacgtcaatgaccttgctcgccagcttaccactttgggcattcagctctcaccgtataacctcagcactctggaagacctgaacaccagatggaagcttctgcaggtggccgtcgaggaccgagtcaggcagctgcatgaagcccacagggactttggtccagcatctcagcactttctttccacgtctgtccagggtccctgggagagagccatctcgccaaacaaagtgccctactatatcaaccacgagactcaaacaacttgctgggaccatcccaaaatgacagagctctaccagtctttagctgacctgaataatgtcagattctcagcttataggactgccatgaaactccgaagactgcagaaggccctttgcttggatctcttgagcctgtcagctgcatgtgatgccttggaccagcacaacctcaagcaaaatgaccagcccatggatatcctgcagattattaattgtttgaccactatttatgaccgcctggagcaagagcacaacaatttggtcaacgtccctctctgcgtggatatgtgtctgaactggctgctgaatgtttatgatacgggacgaacagggaggatccgtgtcctgtcttttaaaactggcatcatttccctgtgtaaagcacatttggaagacaagtacagataccttttcaagcaagtggcaagttcaacaggattttgtgaccagcgcaggctgggcctccttctgcatgattctatccaaattccaagacagttgggtgaagttgcatcctttgggggcagtaacattgagccaagtgtccggagctgcttccaatttgctaataataagccagagatcgaagcggccctcttcctagactggatgagactggaaccccagtccatggtgtggctgcccgtcctgcacagagtggctgctgcagaaactgccaagcatcaggccaaatgtaacatctgcaaagagtgtccaatcattggattcaggtacaggagtctaaagcactttaattatgacatctgccaaagctgctttttttctggtcgagttgcaaaaggccataaaatgcactatcccatggtggaatattgcactccgactacatcaggagaagatgttcgagactttgccaaggtactaaaaaacaaatttcgaaccaaaaggtattttgcgaagcatccccgaatgggctacctgccagtgcagactgtcttagagggggacaacatggaaacgcctgcctcgtcccctcagctttcacacgatgatactcattcacgcattgaacattatgctagcaggctagcagaaatggaaaacagcaatggatcttatctaaatgatagcatctctcctaatgagagcatagatgatgaacatttgttaatccagcattactgccaaagtttgaaccaggactcccccctgagccagcctcgtagtcctgcccagatcttgatttccttagagagtgaggaaagaggggagctagagagaatcctagcagatcttgaggaagaaaacaggaatctgcaagcagaatatgaccgtctaaagcagcagcacgaacataaaggcctgtccccactgccgtcccctcctgaaatgatgcccacctctccccagagtccccgggatgctgagctcattgctgaggccaagctactgcgtcaacacaaaggccgcctggaagccaggatgcaaatcctggaagaccacaataaacagctggagtcacagttacacaggctaaggcagctgctggagcaaccccaggcagaggccaaagtgaatggcacaacggtgtcctctccttctacctctctacagaggtccgacagcagtcagcctatgctgctccgagtggttggcagtcaaacttcggactccatgggtgaggaagatcttctcagtcctccccaggacacaagcacagggttagaggaggtgatggagcaactcaacaactccttccctagttcaagaggacacaatgtaggaagtcttttccacatggcagatgatttgggcagagcgatggagtccttagtatcagtcatgacagatgaagaaggagcagaataaatgttttacaactcctgattcccgcatggtttttataatattcatacaacaaagaggattagacagtaagagtttacaagaaataaatctatatttttgtgaagggtagtggtattatactgtagatttcagtagtttctaagtctgttattgttttgttaacaatggcaggttttacacgtctatgcaattgtacaaaaaagttataagaaaactacatgtaaaatcttgatagctaaataacttgccatttctttatatggaacgcattttgggttgtttaaaaatttataacagttataaagaaagattgtaaactaaagtgtgctttataaaaaaaagttgtttataaaaacccctaaaaacaaaacaaacacacacacacacacatacacacacacacacaaaactttgaggcagcgcattgttttgcatccttttggcgtgatatccatatgaaattcatggctttttctttttttgcatattaaagataagacttcctctaccaccacaccaaatgactactacacactgctcatttgagaactgtcagctgagtggggcaggcttgagttttcatttcatatatctatatgtctataagtatataaatactatagttatatagataaagagatacgaatttctatagactgactttttccattttttaaatgttcatgtcacatcctaatagaaagaaattacttctagtcagtcatccaggcttacctgcttggtctagaatggatttttcccggagccggaagccaggaggaaactacaccacactaaaacattgtctacagctccagatgtttctcattttaaacaactttccactgacaacgaaagtaaagtaaagtattggatttttttaaagggaacatgtgaatgaatacacaggacttattatatcagagtgagtaatcggttggttggttgattgattgattgattgatacattcagcttcctgctgctagcaatgccacgatttagatttaatgatgcttcagtggaaatcaatcagaaggtattctgaccttgtgaacatcagaaggtattttttaactcccaagcagtagcaggacgatgatagggctggagggctatggattcccagcccatccctgtgaaggagtaggccactctttaagtgaaggattggatgattgttcataatacataaagttctctgtaattacaactaaattattatgccctcttctcacagtcaaaaggaactgggtggtttggtttttgttgcttttttagatttattgtcccatgtgggatgagtttttaaatgccacaagacataatttaaaataaataaactttgggaaaaggtgtaagacagtagccccatcacatttgtgatactgacaggtatcaacccagaagcccatgaactgtgtttccatcctttgcatttctctgcgagtagttccacacaggtttgtaagtaagtaagaaagaaggcaaattgattcaaatgttacaaaaaaacccttcttggtggattagacaggttaaatatataaacaaacaaacaaaaattgctcaaaaaagaggagaaaagctcaagaggaaaagctaaggactggtaggaaaaagctttactctttcatgccattttatttctttttgatttttaaatcattcattcaatagataccaccgtgtgacctataattttgcaaatctgttacctctgacatcaagtgtaattagcttttggagagtgggctgacatcaagtgtaattagcttttggagagtgggttttgtccattattaataattaattaattaacatcaaacacggcttctcatgctatttctacctcactttggttttggggtgttcctgataattgtgcacacctgagttcacagcttcaccacttgtccattgcgttattttctttttcctttataattctttctttttccttcataattttcaaaagaaaacccaaagctctaaggtaacaaattaccaaattacatgaagatttggtttttgtcttgcatttttttcctttatgtgacgctggaccttttctttacccaaggatttttaaaactcagatttaaaacaaggggttactttacatcctactaagaagtttaagtaagtaagtttcattctaaaatcagaggtaaatagagtgcataaataattttgttttaatctttttgtttttcttttagacacattagctctggagtgagtctgtcataatatttgaacaaaaattgagagctttattgctgcattttaagcataattaatttggacattatttcgtgttgtgttctttataaccaccaagtattaaactgtaaatcataatgtaactgaagcataaacatcacatggcatgttttgtcattgttttcaggtactgagttcttacttgagtatcataatatattgtgttttaacaccaacactgtaacatttacgaattatttttttaaacttcagttttactgcattttcacaacatatcagacttcaccaaatatatgccttactattgtattatagtactgctttactgtgtatctcaataaagcacgcagttatgttacaaaaaagtaaaaac

SEQ ID NO: 319977 - DNA, 7633 bp, Homo sapiens
  misc_feature (2)..(3): n is a, c, g, or t
gnntcctggcatcagttactgtgttgactcactcagtgttgggatcactcactttccccctacaggactcagatctgggaggcaattaccttcggagaaaaacgaataggaaaaactgaagtgttactttttttaaagctgctgaagtttgttggtttctcattgtttttaagcctactggagcaataaagtttgaagaacttttaccaggttttttttatcgctgccttgatatacacttttcaaaatgctttggtgggaagaagtagaggactgttatgaaagagaagatgttcaaaagaaaacattcacaaaatgggtaaatgcacaattttctaaggcgatttgacagatctgttgagaaatggcggcgttttcattatgatataaagatatttaatcagtggctaacagaagctgaacagtttctcagaaagacacaaattcctgagaattgggaacatgctaaatacaaatggtatcttaaggaactccaggatggcattgggcagcggcaaactgttgtcagaacattgaatgcaactggggaagaaataattcagcaatcctcaaaaacagatgccagtattctacaggaaaaattgggaagcctgaatctgcggtggcaggaggtctgcaaacagctgtcagacagaaaaaagaggctagaagaacaaaagaatatcttgtcagaatttcaaagagatttaaatgaatttgttttatggttggaggaagcagataacattgctagtatcccacttgaacctggaaaagagcagcaactaaaagaaaagcttgagcaagtcaagttactggtggaagagttgcccctgcgccagggaattctcaaacaattaaatgaaactggaggacccgtgcttgtaagtgctcccataagcccagaagagcaagataaacttgaaaataagctcaagcagacaaatctccagtggataaaggtttccagagctttacctgagaaacaaggagaaattgaagctcaaataaaagaccttgggcagcttgaaaaaaagcttgaagaccttgaagagcagttaaatcatctgctgctgtggttatctcctattaggaatcagttggaaatttataaccaaccaaaccaagaaggaccatttgacgttcaggaaactgaaatagcagttcaagctaaacaaccggatgtggaagagattttgtctaaagggcagcatttgtacaaggaaaaaccagccactcagccagtgaagctcctactcagactgttactctggtgacacaacctgtggttactaaggaaactgccatctccaaactagaaatgccatcttccttgatgttggaggtacctgctctggcagatttcaaccgggcttggacagaacttaccgactggctttctctgcttgatcaagttataaaatcacagagggtgatggtgggtgaccttgaggatatcaacgagatgatcatcaagcagaaggcaacaatgcaggatttggaacagaggcgtccccagttggaagaactcattaccgctgcccaaaatttgaaaaacaagaccagcaatcaagaggctagaacaatcattacggatcgaattgaaagaattcagaatcagtgggatgaagtacaagaacaccttcagaaccggaggcaacagttgaatgaaatgttaaaggattcaacacaatggctggaagctaaggaagaagctgagcaggtcttaggacaggccagagccaagcttgagtcatggaaggagggtccctatacagtagatgcaatccaaaagaaaatcacagaaaccaagcagttggccaaagacctccgccagtggcagacaaatgtagatgtggcaaatgacttggccctgaaacttctccgggattattctgcagatgataccagaaaagtccacatgataacagagaatatcaatgcctcttggagaagcattcataaaagggtgagtgagcgagaggctgctttggaagaaactcatagattactgcaacagttccccctggacctggaaaagtttcttgcctggcttacagaagctgaaacaactgccaatgtcctacaggatgctacccgtaaggaaaggctcctagaagactccaagggagtaaaagagctgatgaaacaatggcaagacctccaaggtgaaattgaagctcacacagatgtttatcacaacctggatgaaaacagccaaaaaatcctgagatccctggaaggttccgatgatgcagtcctgttacaaagacgtttggataacatgaacttcaagtggagtgaacttcggaaaaagtctctcaacattaggtcccatttggaagccagttctgaccagtggaagcgtctgcacctttctctgcaggaacttctggtgtggctacagctgaaagatgatgaattaagccggcaggcacctattggaggcgactttccagcagttcagaagcagaacgatgtacatagggccttcaagagggaattgaaaactaaagaacctgtaatcatgagtactcttgagactgtacgaatatttctgacagagcagcctttggaaggactagagaaactctaccaggagcccagagagctgcctcctgaggagagagcccagaatgtcactcggcttctacgaaagcaggctgaggaggtcaatactgagtgggaaaaattgaacctgcactccgctgactggcagagaaaaatagatgagacccttgaaagactccaggaacttcaagaggccacggatgagctggacctcaagctgcgccaagctgaggtgatcaagggatcctggcagcccgtgggcgatctcctcattgactctctccaagatcacctcgagaaagtcaaggcacttcgaggagaaattgcgcctctgaaagagaacgtgagccacgtcaatgaccttgctcgccagcttaccactttgggcattcagctctcaccgtataacctcagcactctggaagacctgaacaccagatggaagcttctgcaggtggccgtcgaggaccgagtcaggcagctgcatgaagcccacagggactttggtccagcatctcagcactttctttccacgtctgtccagggtccctgggagagagccatctcgccaaacaaagtgccctactatatcaaccacgagactcaaacaacttgctgggaccatcccaaaatgacagagctctaccagtctttagctgacctgaataatgtcagattctcagcttataggactgccatgaaactccgaagactgcagaaggccctttgcttggatctcttgagcctgtcagctgcatgtgatgccttggaccagcacaacctcaagcaaaatgaccagcccatggatatcctgcagattattaattgtttgaccactatttatgaccgcctggagcaagagcacaacaatttggtcaacgtccctctctgcgtggatatgtgtctgaactggctgctgaatgtttatgatacgggacgaacagggaggatccgtgtcctgtcttttaaaactggcatcatttccctgtgtaaagcacatttggaagacaagtacagataccttttcaagcaagtggcaagttcaacaggattttgtgaccagcgcaggctgggcctccttctgcatgattctatccaaattccaagacagttgggtgaagttgcatcctttgggggcagtaacattgagccaagtgtccggagctgcttccaatttgctaataataagccagagatcgaagcggccctcttcctagactggatgagactggaaccccagtccatggtgtggctgcccgtcctgcacagagtggctgctgcagaaactgccaagcatcaggccaaatgtaacatctgcaaagagtgtccaatcattggattcaggtacaggagtctaaagcactttaattatgacatctgccaaagctgctttttttctggtcgagttgcaaaaggccataaaatgcactatcccatggtggaatattgcactccgactacatcaggagaagatgttcgagactttgccaaggtactaaaaaacaaatttcgaaccaaaaggtattttgcgaagcatccccgaatgggctacctgccagtgcagactgtcttagagggggacaacatggaaacgcctgcctcgtcccctcagctttcacacgatgatactcattcacgcattgaacattatgctagcaggctagcagaaatggaaaacagcaatggatcttatctaaatgatagcatctctcctaatgagagcatagatgatgaacatttgttaatccagcattactgccaaagtttgaaccaggactcccccctgagccagcctcgtagtcctgcccagatcttgatttccttagagagtgaggaaagaggggagctagagagaatcctagcagatcttgaggaagaaaacaggaatctgcaagcagaatatgaccgtctaaagcagcagcacgaacataaaggcctgtccccactgccgtcccctcctgaaatgatgcccacctctccccagagtccccgggatgctgagctcattgctgaggccaagctactgcgtcaacacaaaggccgcctggaagccaggatgcaaatcctggaagaccacaataaacagctggagtcacagttacacaggctaaggcagctgctggagcaaccccaggcagaggccaaagtgaatggcacaacggtgtcctctccttctacctctctacagaggtccgacagcagtcagcctatgctgctccgagtggttggcagtcaaacttcggactccatgggtgaggaagatcttctcagtcctccccaggacacaagcacagggttagaggaggtgatggagcaactcaacaactccttccctagttcaagaggacacaatgtaggaagtcttttccacatggcagatgatttgggcagagcgatggagtccttagtatcagtcatgacagatgaagaaggagcagaataaatgttttacaactcctgattcccgcatggtttttataatattcatacaacaaagaggattagacagtaagagtttacaagaaataaatctatatttttgtgaagggtagtggtattatactgtagatttcagtagtttctaagtctgttattgttttgttaacaatggcaggttttacacgtctatgcaattgtacaaaaaagttataagaaaactacatgtaaaatcttgatagctaaataacttgccatttctttatatggaacgcattttgggttgtttaaaaatttataacagttataaagaaagattgtaaactaaagtgtgctttataaaaaaaagttgtttataaaaacccctaaaaacaaaacaaacacacacacacacacatacacacacacacacaaaactttgaggcagcgcattgttttgcatccttttggcgtgatatccatatgaaattcatggctttttctttttttgcatattaaagataagacttcctctaccaccacaccaaatgactactacacactgctcatttgagaactgtcagctgagtggggcaggcttgagttttcatttcatatatctatatgtctataagtatataaatactatagttatatagataaagagatacgaatttctatagactgactttttccattttttaaatgttcatgtcacatcctaatagaaagaaattacttctagtcagtcatccaggcttacctgcttggtctagaatggatttttcccggagccggaagccaggaggaaactacaccacactaaaacattgtctacagctccagatgtttctcattttaaacaactttccactgacaacgaaagtaaagtaaagtattggatttttttaaagggaacatgtgaatgaatacacaggacttattatatcagagtgagtaatcggttggttggttgattgattgattgattgatacattcagcttcctgctgctagcaatgccacgatttagatttaatgatgcttcagtggaaatcaatcagaaggtattctgaccttgtgaacatcagaaggtattttttaactcccaagcagtagcaggacgatgatagggctggagggctatggattcccagcccatccctgtgaaggagtaggccactctttaagtgaaggattggatgattgttcataatacataaagttctctgtaattacaactaaattattatgccctcttctcacagtcaaaaggaactgggtggtttggtttttgttgcttttttagatttattgtcccatgtgggatgagtttttaaatgccacaagacataatttaaaataaataaactttgggaaaaggtgtaagacagtagccccatcacatttgtgatactgacaggtatcaacccagaagcccatgaactgtgtttccatcctttgcatttctctgcgagtagttccacacaggtttgtaagtaagtaagaaagaaggcaaattgattcaaatgttacaaaaaaacccttcttggtggattagacaggttaaatatataaacaaacaaacaaaaattgctcaaaaaagaggagaaaagctcaagaggaaaagctaaggactggtaggaaaaagctttactctttcatgccattttatttctttttgatttttaaatcattcattcaatagataccaccgtgtgacctataattttgcaaatctgttacctctgacatcaagtgtaattagcttttggagagtgggctgacatcaagtgtaattagcttttggagagtgggttttgtccattattaataattaattaattaacatcaaacacggcttctcatgctatttctacctcactttggttttggggtgttcctgataattgtgcacacctgagttcacagcttcaccacttgtccattgcgttattttctttttcctttataattctttctttttccttcataattttcaaaagaaaacccaaagctctaaggtaacaaattaccaaattacatgaagatttggtttttgtcttgcatttttttcctttatgtgacgctggaccttttctttacccaaggatttttaaaactcagatttaaaacaaggggttactttacatcctactaagaagtttaagtaagtaagtttcattctaaaatcagaggtaaatagagtgcataaataattttgttttaatctttttgtttttcttttagacacattagctctggagtgagtctgtcataatatttgaacaaaaattgagagctttattgctgcattttaagcataattaatttggacattatttcgtgttgtgttctttataaccaccaagtattaaactgtaaatcataatgtaactgaagcataaacatcacatggcatgttttgtcattgttttcaggtactgagttcttacttgagtatcataatatattgtgttttaacaccaacactgtaacatttacgaattatttttttaaacttcagttttactgcattttcacaacatatcagacttcaccaaatatatgccttactattgtattatagtactgctttactgtgtatctcaataaagcacgcagttatgttacaaaaaagtaaaaac

SEQ ID NO: 319978 - DNA, 12671 bp, Homo sapiens
atgctgtctgtgaagctgaatctgtgagaacacctcactattcacggcaaccggagtggaagaaacaggtgcaaaaagattgtgtgtttgtctgcttttgtgaggctggtcagagattctgtgcctgctttatctgtgcttggctatgactctacctccaggtttaccataccccatagaatgtgtaagagaaaagtaccaacagggaaatcagcaaaaagctttcctatgaaggtgtgtagccagcctccgcagaatttgaaatgtctgaggtttcttctggtgagtaaaagctgcagataatcaacagccattcagaagaatgataaatgccacaagcatttggaaacaggcttccctaaagatgaaagagaagatgttcaaaagaaaacattcacaaaatgggtaaatgcacaattttctaagtttgggaagcagcatattgagaacctcttcagtgacctacaggatgggaggcgcctcctagacctcctcgaaggcctgacagggcaaaaactgccaaaagaaaaaggatccacaagagttcatgccctgaacaatgtcaacaaggcactgcgggttttgcagaacaataatgttgatttagtgaatattggaagtactgacatcgtagatggaaatcataaactgactcttggtttgatttggaatataatcctccactggcaggtattgggagatcgatgggcaaacatctgtagatggacagaagaccgctgggttcttttacaagacatccttctcaaatggcaacgtcttactgaagaacagtgcctttttagtgcatggctttcagaaaaagaagatgcagtgaacaagattcacacaactggctttaaagatcaaaatgaaatgttatcaagtcttcaaaaactggccgttttaaaagcggatctagaaaagaaaaagcaatccatgggcaaactgtattcactcaaacaagatcttctttcaacactgaagaataagtcagtgacccagaagacggaagcatggctggataactttgcccggtgttgggataatttagtccaaaaacttgaaaagagtacagcacagatttcacaggctgtcaccaccactcagccatcactaacacagacaactgtaatggaaacagtaactacggtgaccacaagggaacagatcctggtaaagcatgctcaagaggaacttccaccaccacctccccaaaagaagaggcagattactgtggattctgaaattaggaaaaggttggatgttgatataactgaacttcacagctggattactcgctcagaagctgtgttgcagagtcctgaatttgcaatctttcggaaggaaggcaacttctcagacttaaaagaaaaagtcaatgccatagagcgagaaaaagctgagaagttcagaaaactgcaagatgccagcagatcagctcaggccctggtggaacagatggtgaatgagggtgttaatgcagatagcatcaaacaagcctcagaacaactgaacagccggtggatcgaattctgccagttgctaagtgagagacttaactggctggagtatcagaacaacatcatcgctttctataatcagctacaacaattggagcagatgacaactactgctgaaaactggttgaaaatccaacccaccaccccatcagagccaacagcaattaaaagtcagttaaaaatttgtaaggatgaagtcaaccggctatcaggtcttcaacctcaaattgaacgattaaaaattcaaagcatagccctgaaagagaaaggacaaggacccatgttcctggatgcagactttgtggcctttacaaatcattttaagcaagtcttttctgatgtgcaggccagagagaaagagctacagacaatttttgacactttgccaccaatgcgctatcaggagaccatgagtgccatcaggacatgggtccagcagtcagaaaccaaactctccatacctcaacttagtgtcaccgactatgaaatcatggagcagagactcggggaattgcaggctttacaaagttctctgcaagagcaacaaagtggcctatactatctcagcaccactgtgaaagagatgtcgaagaaagcgccctctgaaattagccggaaatatcaatcagaatttgaagaaattgagggacgctggaagaagctctcctcccagctggttgagcattgtcaaaagctagaggagcaaatgaataaactccgaaaaattcagaatcacatacaaaccctgaagaaatggatggctgaagttgatgtttttctgaaggaggaatggcctgcccttggggattcagaaattctaaaaaagcagctgaaacagtgcagacttttagtcagtgatattcagacaattcagcccagtctaaacagtgtcaatgaaggtgggcagaagataaagaatgaagcagagccagagtttgcttcgagacttgagacagaactcaaagaacttaacactcagtgggatcacatgtgccaacaggtctatgccagaaaggaggccttgaagggaggtttggagaaaactgtaagcctccagaaagatctatcagagatgcacgaatggatgacacaagctgaagaagagtatcttgagagagattttgaatataaaactccagatgaattacagaaagcagttgaagagatgaagagagctaaagaagaggcccaacaaaaagaagcgaaagtgaaactccttactgagtctgtaaatagtgtcatagctcaagctccacctgtagcacaagaggccttaaaaaaggaacttgaaactctaaccaccaactaccagtggctctgcactaggctgaatgggaaatgcaagactttggaagaagtttgggcatgttggcatgagttattgtcatacttggagaaagcaaacaagtggctaaatgaagtagaatttaaacttaaaaccactgaaaacattcctggcggagctgaggaaatctctgaggtgctagattcacttgaaaatttgatgcgacattcagaggataacccaaatcagattcgcatattggcacagaccctaacagatggcggagtcatggatgagctaatcaatgaggaacttgagacatttaattctcgttggagggaactacatgaagaggctgtaaggaggcaaaagttgcttgaacagagcatccagtctgcccaggagactgaaaaatccttacacttaatccaggagtccctcacattcattgacaagcagttggcagcttatattgcagacaaggtggacgcagctcaaatgcctcaggaagcccagaaaatccaatctgatttgacaagtcatgagatcagtttagaagaaatgaagaaacataatcaggggaaggaggctgcccaaagagtcctgtctcagattgatgttgcacagaaaaaattacaagatgtctccatgaagtttcgattattccagaaaccagccaattttgagcagcgtctacaagaaagtaagatgattttagatgaagtgaagatgcacttgcctgcattggaaacaaagagtgtggaacaggaagtagtacagtcacagctaaatcattgtgtgaacttgtataaaagtctgagtgaagtgaagtctgaagtggaaatggtgataaagactggacgtcagattgtacagaaaaagcagacggaaaatcccaaagaacttgatgaaagagtaacagctttgaaattgcattataatgagctgggagcaaaggtaacagaaagaaagcaacagttggagaaatgcttgaaattgtcccgtaagatgcgaaaggaaatgaatgtcttgacagaatggctggcagctacagatatggaattgacaaagagatcagcagttgaaggaatgcctagtaatttggattctgaagttgcctggggaaaggctactcaaaaagagattgagaaacagaaggtgcacctgaagagtatcacagaggtaggagaggccttgaaaacagttttgggcaagaaggagacgttggtggaagataaactcagtcttctgaatagtaactggatagctgtcacctcccgagcagaagagtggttaaatcttttgttggaataccagaaacacatggaaacttttgaccagaatgtggaccacatcacaaagtggatcattcaggctgacacacttttggatgaatcagagaaaaagaaaccccagcaaaaagaagacgtgcttaagcgtttaaaggcagaactgaatgacatacgcccaaaggtggactctacacgtgaccaagcagcaaacttgatggcaaaccgcggtgaccactgcaggaaattagtagagccccaaatctcagagctcaaccatcgatttgcagccatttcacacagaattaagactggaaaggcctccattcctttgaaggaattggagcagtttaactcagatatacaaaaattgcttgaaccactggaggctgaaattcagcagggggtgaatctgaaagaggaagacttcaataaagatatgaatgaagacaatgagggtactgtaaaagaattgttgcaaagaggagacaacttacaacaaagaatcacagatgagagaaagcgagaggaaataaagataaaacagcagctgttacagacaaaacataatgctctcaaggatttgaggtctcaaagaagaaaaaaggctctagaaatttctcatcagtggtatcagtacaagaggcaggctgatgatctcctgaaatgcttggatgacattgaaaaaaaattagccagcctacctgagcccagagatgaaaggaaaataaaggaaattgatcgggaattgcagaagaagaaagaggagctgaatgcagtgcgtaggcaagctgagggcttgtctgaggatggggccgcaatggcagtggagccaactcagatccagctcagcaagcgctggcgggaaattgagagcaaatttgctcagtttcgaagactcaactttgcacaaattcacactgtccgtgaagaaacgatgatggtgatgactgaagacatgcctttggaaatttcttatgtgccttctacttatttgactgaaatcactcatgtctcacaagccctattagaagtggaacaacttctcaatgctcctgacctctgtgctaaggactttgaagatctctttaagcaagaggagtctctgaagaatataaaagatagtctacaacaaagctcaggtcggattgacattattcatagcaagaagacagcagcattgcaaagtgcaacgcctgtggaaagggtgaagctacaggaagctctctcccagcttgatttccaatgggaaaaagttaacaaaatgtacaaggaccgacaagggcgatttgacagatctgttgagaaatggcggcgttttcattatgatataaagatatttaatcagtggctaacagaagctgaacagtttctcagaaagacacaaattcctgagaattgggaacatgctaaatacaaatggtatcttaaggaactccaggatggcattgggcagcggcaaactgttgtcagaacattgaatgcaactggggaagaaataattcagcaatcctcaaaaacagatgccagtattctacaggaaaaattgggaagcctgaatctgcggtggcaggaggtctgcaaacagctgtcagacagaaaaaagaggctagaagaacaaaagaatatcttgtcagaatttcaaagagatttaaatgaatttgttttatggttggaggaagcagataacattgctagtatcccacttgaacctggaaaagagcagcaactaaaagaaaagcttgagcaagtcaagttactggtggaagagttgcccctgcgccagggaattctcaaacaattaaatgaaactggaggacccgtgcttgtaagtgctcccataagcccagaagagcaagataaacttgaaaataagctcaagcagacaaatctccagtggataaaggtttccagagctttacctgagaaacaaggagaaattgaagctcaaataaaagaccttgggcagcttgaaaaaaagcttgaagaccttgaagagcagttaaatcatctgctgctgtggttatctcctattaggaatcagttggaaatttataaccaaccaaaccaagaaggaccatttgacgttcaggaaactgaaatagcagttcaagctaaacaaccggatgtggaagagattttgtctaaagggcagcatttgtacaaggaaaaaccagccactcagccagtgaagctcctactcagactgttactctggtgacacaacctgtggttactaaggaaactgccatctccaaactagaaatgccatcttccttgatgttggaggtacctgctctggcagatttcaaccgggcttggacagaacttaccgactggctttctctgcttgatcaagttataaaatcacagagggtgatggtgggtgaccttgaggatatcaacgagatgatcatcaagcagaaggcaacaatgcaggatttggaacagaggcgtccccagttggaagaactcattaccgctgcccaaaatttgaaaaacaagaccagcaatcaagaggctagaacaatcattacggatcgaattgaaagaattcagaatcagtgggatgaagtacaagaacaccttcagaaccggaggcaacagttgaatgaaatgttaaaggattcaacacaatggctggaagctaaggaagaagctgagcaggtcttaggacaggccagagccaagcttgagtcatggaaggagggtccctatacagtagatgcaatccaaaagaaaatcacagaaaccaagcagttggccaaagacctccgccagtggcagacaaatgtagatgtggcaaatgacttggccctgaaacttctccgggattattctgcagatgataccagaaaagtccacatgataacagagaatatcaatgcctcttggagaagcattcataaaagggtgagtgagcgagaggctgctttggaagaaactcatagattactgcaacagttccccctggacctggaaaagtttcttgcctggcttacagaagctgaaacaactgccaatgtcctacaggatgctacccgtaaggaaaggctcctagaagactccaagggagtaaaagagctgatgaaacaatggcaagacctccaaggtgaaattgaagctcacacagatgtttatcacaacctggatgaaaacagccaaaaaatcctgagatccctggaaggttccgatgatgcagtcctgttacaaagacgtttggataacatgaacttcaagtggagtgaacttcggaaaaagtctctcaacattaggtcccatttggaagccagttctgaccagtggaagcgtctgcacctttctctgcaggaacttctggtgtggctacagctgaaagatgatgaattaagccggcaggcacctattggaggcgactttccagcagttcagaagcagaacgatgtacatagggccttcaagagggaattgaaaactaaagaacctgtaatcatgagtactcttgagactgtacgaatatttctgacagagcagcctttggaaggactagagaaactctaccaggagcccagagagctgcctcctgaggagagagcccagaatgtcactcggcttctacgaaagcaggctgaggaggtcaatactgagtgggaaaaattgaacctgcactccgctgactggcagagaaaaatagatgagacccttgaaagactccaggaacttcaagaggccacggatgagctggacctcaagctgcgccaagctgaggtgatcaagggatcctggcagcccgtgggcgatctcctcattgactctctccaagatcacctcgagaaagtcaaggcacttcgaggagaaattgcgcctctgaaagagaacgtgagccacgtcaatgaccttgctcgccagcttaccactttgggcattcagctctcaccgtataacctcagcactctggaagacctgaacaccagatggaagcttctgcaggtggccgtcgaggaccgagtcaggcagctgcatgaagcccacagggactttggtccagcatctcagcactttctttccacgtctgtccagggtccctgggagagagccatctcgccaaacaaagtgccctactatatcaaccacgagactcaaacaacttgctgggaccatcccaaaatgacagagctctaccagtctttagctgacctgaataatgtcagattctcagcttataggactgccatgaaactccgaagactgcagaaggccctttgcttggatctcttgagcctgtcagctgcatgtgatgccttggaccagcacaacctcaagcaaaatgaccagcccatggatatcctgcagattattaattgtttgaccactatttatgaccgcctggagcaagagcacaacaatttggtcaacgtccctctctgcgtggatatgtgtctgaactggctgctgaatgtttatgatacgggacgaacagggaggatccgtgtcctgtcttttaaaactggcatcatttccctgtgtaaagcacatttggaagacaagtacagataccttttcaagcaagtggcaagttcaacaggattttgtgaccagcgcaggctgggcctccttctgcatgattctatccaaattccaagacagttgggtgaagttgcatcctttgggggcagtaacattgagccaagtgtccggagctgcttccaatttgctaataataagccagagatcgaagcggccctcttcctagactggatgagactggaaccccagtccatggtgtggctgcccgtcctgcacagagtggctgctgcagaaactgccaagcatcaggccaaatgtaacatctgcaaagagtgtccaatcattggattcaggtacaggagtctaaagcactttaattatgacatctgccaaagctgctttttttctggtcgagttgcaaaaggccataaaatgcactatcccatggtggaatattgcactccgactacatcaggagaagatgttcgagactttgccaaggtactaaaaaacaaatttcgaaccaaaaggtattttgcgaagcatccccgaatgggctacctgccagtgcagactgtcttagagggggacaacatggaaacgcctgcctcgtcccctcagctttcacacgatgatactcattcacgcattgaacattatgctagcaggctagcagaaatggaaaacagcaatggatcttatctaaatgatagcatctctcctaatgagagcatagatgatgaacatttgttaatccagcattactgccaaagtttgaaccaggactcccccctgagccagcctcgtagtcctgcccagatcttgatttccttagagagtgaggaaagaggggagctagagagaatcctagcagatcttgaggaagaaaacaggaatctgcaagcagaatatgaccgtctaaagcagcagcacgaacataaaggcctgtccccactgccgtcccctcctgaaatgatgcccacctctccccagagtccccgggatgctgagctcattgctgaggccaagctactgcgtcaacacaaaggccgcctggaagccaggatgcaaatcctggaagaccacaataaacagctggagtcacagttacacaggctaaggcagctgctggagcaaccccaggcagaggccaaagtgaatggcacaacggtgtcctctccttctacctctctacagaggtccgacagcagtcagcctatgctgctccgagtggttggcagtcaaacttcggactccatgggtgaggaagatcttctcagtcctccccaggacacaagcacagggttagaggaggtgatggagcaactcaacaactccttccctagttcaagaggacacaatgtaggaagtcttttccacatggcagatgatttgggcagagcgatggagtccttagtatcagtcatgacagatgaagaaggagcagaataaatgttttacaactcctgattcccgcatggtttttataatattcatacaacaaagaggattagacagtaagagtttacaagaaataaatctatatttttgtgaagggtagtggtattatactgtagatttcagtagtttctaagtctgttattgttttgttaacaatggcaggttttacacgtctatgcaattgtacaaaaaagttataagaaaactacatgtaaaatcttgatagctaaataacttgccatttctttatatggaacgcattttgggttgtttaaaaatttataacagttataaagaaagattgtaaactaaagtgtgctttataaaaaaaagttgtttataaaaacccctaaaaacaaaacaaacacacacacacacacatacacacacacacacaaaactttgaggcagcgcattgttttgcatccttttggcgtgatatccatatgaaattcatggctttttctttttttgcatattaaagataagacttcctctaccaccacaccaaatgactactacacactgctcatttgagaactgtcagctgagtggggcaggcttgagttttcatttcatatatctatatgtctataagtatataaatactatagttatatagataaagagatacgaatttctatagactgactttttccattttttaaatgttcatgtcacatcctaatagaaagaaattacttctagtcagtcatccaggcttacctgcttggtctagaatggatttttcccggagccggaagccaggaggaaactacaccacactaaaacattgtctacagctccagatgtttctcattttaaacaactttccactgacaacgaaagtaaagtaaagtattggatttttttaaagggaacatgtgaatgaatacacaggacttattatatcagagtgagtaatcggttggttggttgattgattgattgattgatacattcagcttcctgctgctagcaatgccacgatttagatttaatgatgcttcagtggaaatcaatcagaaggtattctgaccttgtgaacatcagaaggtattttttaactcccaagcagtagcaggacgatgatagggctggagggctatggattcccagcccatccctgtgaaggagtaggccactctttaagtgaaggattggatgattgttcataatacataaagttctctgtaattacaactaaattattatgccctcttctcacagtcaaaaggaactgggtggtttggtttttgttgcttttttagatttattgtcccatgtgggatgagtttttaaatgccacaagacataatttaaaataaataaactttgggaaaaggtgtaagacagtagccccatcacatttgtgatactgacaggtatcaacccagaagcccatgaactgtgtttccatcctttgcatttctctgcgagtagttccacacaggtttgtaagtaagtaagaaagaaggcaaattgattcaaatgttacaaaaaaacccttcttggtggattagacaggttaaatatataaacaaacaaacaaaaattgctcaaaaaagaggagaaaagctcaagaggaaaagctaaggactggtaggaaaaagctttactctttcatgccattttatttctttttgatttttaaatcattcattcaatagataccaccgtgtgacctataattttgcaaatctgttacctctgacatcaagtgtaattagcttttggagagtgggctgacatcaagtgtaattagcttttggagagtgggttttgtccattattaataattaattaattaacatcaaacacggcttctcatgctatttctacctcactttggttttggggtgttcctgataattgtgcacacctgagttcacagcttcaccacttgtccattgcgttattttctttttcctttataattctttctttttccttcataattttcaaaagaaaacccaaagctctaaggtaacaaattaccaaattacatgaagatttggtttttgtcttgcatttttttcctttatgtgacgctggaccttttctttacccaaggatttttaaaactcagatttaaaacaaggggttactttacatcctactaagaagtttaagtaagtaagtttcattctaaaatcagaggtaaatagagtgcataaataattttgttttaatctttttgtttttcttttagacacattagctctggagtgagtctgtcataatatttgaacaaaaattgagagctttattgctgcattttaagcataattaatttggacattatttcgtgttgtgttctttataaccaccaagtattaaactgtaaatcataatgtaactgaagcataaacatcacatggcatgttttgtcattgttttcaggtactgagttcttacttgagtatcataatatattgtgttttaacaccaacactgtaacatttacgaattatttttttaaacttcagttttactgcattttcacaacatatcagacttcaccaaatatatgccttactattgtattatagtactgctttactgtgtatctcaataaagcacgcagttatgttacaaaaaagtaaaaac

SEQ ID NO: 319979 - DNA, 12844 bp, Homo sapiens
atgctgtctgtgaagctgaatctgtgagaacacctcactattcacggcaaccggagtggaagaaacaggtgcaaaaagattgtgtgtttgtctgcttttgtgaggctggtcagagattctgtgcctgctttatctgtgcttggctatgactctacctccaggtttaccataccccatagaatgtgtaagagaaaagtaccaacagggaaatcagcaaaaagctttcctatgaaggtgtgtagccagcctccgcagaatttgaaatgtctgaggtttcttctggtgagtaaaagctgcagataatcaacagccattcagaagaatgataaatgccacaagcatttggaaacaggcttccctaaagatgaaagagaagatgttcaaaagaaaacattcacaaaatgggtaaatgcacaattttctaagtttgggaagcagcatattgagaacctcttcagtgacctacaggatgggaggcgcctcctagacctcctcgaaggcctgacagggcaaaaactgccaaaagaaaaaggatccacaagagttcatgccctgaacaatgtcaacaaggcactgcgggttttgcagaacaataatgttgatttagtgaatattggaagtactgacatcgtagatggaaatcataaactgactcttggtttgatttggaatataatcctccactggcaggtcaaaaatgtaatgaaaaatatcatggctggattgcaacaaaccaacagtgaaaagattctcctgagctgggtccgacaatcaactcgtaattatccacaggttaatgtaatcaacttcaccaccagctggtctgatggcctggctttgaatgctctcatccatagtcataggtattgggagatcgatgggcaaacatctgtagatggacagaagaccgctgggttcttttacaagacatccttctcaaatggcaacgtcttactgaagaacagtgcctttttagtgcatggctttcagaaaaagaagatgcagtgaacaagattcacacaactggctttaaagatcaaaatgaaatgttatcaagtcttcaaaaactggccgttttaaaagcggatctagaaaagaaaaagcaatccatgggcaaactgtattcactcaaacaagatcttctttcaacactgaagaataagtcagtgacccagaagacggaagcatggctggataactttgcccggtgttgggataatttagtccaaaaacttgaaaagagtacagcacagatttcacaggctgtcaccaccactcagccatcactaacacagacaactgtaatggaaacagtaactacggtgaccacaagggaacagatcctggtaaagcatgctcaagaggaacttccaccaccacctccccaaaagaagaggcagattactgtggattctgaaattaggaaaaggttggatgttgatataactgaacttcacagctggattactcgctcagaagctgtgttgcagagtcctgaatttgcaatctttcggaaggaaggcaacttctcagacttaaaagaaaaagtcaatgccatagagcgagaaaaagctgagaagttcagaaaactgcaagatgccagcagatcagctcaggccctggtggaacagatggtgaatgagggtgttaatgcagatagcatcaaacaagcctcagaacaactgaacagccggtggatcgaattctgccagttgctaagtgagagacttaactggctggagtatcagaacaacatcatcgctttctataatcagctacaacaattggagcagatgacaactactgctgaaaactggttgaaaatccaacccaccaccccatcagagccaacagcaattaaaagtcagttaaaaatttgtaaggatgaagtcaaccggctatcaggtcttcaacctcaaattgaacgattaaaaattcaaagcatagccctgaaagagaaaggacaaggacccatgttcctggatgcagactttgtggcctttacaaatcattttaagcaagtcttttctgatgtgcaggccagagagaaagagctacagacaatttttgacactttgccaccaatgcgctatcaggagaccatgagtgccatcaggacatgggtccagcagtcagaaaccaaactctccatacctcaacttagtgtcaccgactatgaaatcatggagcagagactcggggaattgcaggctttacaaagttctctgcaagagcaacaaagtggcctatactatctcagcaccactgtgaaagagatgtcgaagaaagcgccctctgaaattagccggaaatatcaatcagaatttgaagaaattgagggacgctggaagaagctctcctcccagctggttgagcattgtcaaaagctagaggagcaaatgaataaactccgaaaaattcagaatcacatacaaaccctgaagaaatggatggctgaagttgatgtttttctgaaggaggaatggcctgcccttggggattcagaaattctaaaaaagcagctgaaacagtgcagacttttagtcagtgatattcagacaattcagcccagtctaaacagtgtcaatgaaggtgggcagaagataaagaatgaagcagagccagagtttgcttcgagacttgagacagaactcaaagaacttaacactcagtgggatcacatgtgccaacaggtctatgccagaaaggaggccttgaagggaggtttggagaaaactgtaagcctccagaaagatctatcagagatgcacgaatggatgacacaagctgaagaagagtatcttgagagagattttgaatataaaactccagatgaattacagaaagcagttgaagagatgaagagagctaaagaagaggcccaacaaaaagaagcgaaagtgaaactccttactgagtctgtaaatagtgtcatagctcaagctccacctgtagcacaagaggccttaaaaaaggaacttgaaactctaaccaccaactaccagtggctctgcactaggctgaatgggaaatgcaagactttggaagaagtttgggcatgttggcatgagttattgtcatacttggagaaagcaaacaagtggctaaatgaagtagaatttaaacttaaaaccactgaaaacattcctggcggagctgaggaaatctctgaggtgctagattcacttgaaaatttgatgcgacattcagaggataacccaaatcagattcgcatattggcacagaccctaacagatggcggagtcatggatgagctaatcaatgaggaacttgagacatttaattctcgttggagggaactacatgaagaggctgtaaggaggcaaaagttgcttgaacagagcatccagtctgcccaggagactgaaaaatccttacacttaatccaggagtccctcacattcattgacaagcagttggcagcttatattgcagacaaggtggacgcagctcaaatgcctcaggaagcccagaaaatccaatctgatttgacaagtcatgagatcagtttagaagaaatgaagaaacataatcaggggaaggaggctgcccaaagagtcctgtctcagattgatgttgcacagaaaaaattacaagatgtctccatgaagtttcgattattccagaaaccagccaattttgagcagcgtctacaagaaagtaagatgattttagatgaagtgaagatgcacttgcctgcattggaaacaaagagtgtggaacaggaagtagtacagtcacagctaaatcattgtgtgaacttgtataaaagtctgagtgaagtgaagtctgaagtggaaatggtgataaagactggacgtcagattgtacagaaaaagcagacggaaaatcccaaagaacttgatgaaagagtaacagctttgaaattgcattataatgagctgggagcaaaggtaacagaaagaaagcaacagttggagaaatgcttgaaattgtcccgtaagatgcgaaaggaaatgaatgtcttgacagaatggctggcagctacagatatggaattgacaaagagatcagcagttgaaggaatgcctagtaatttggattctgaagttgcctggggaaaggctactcaaaaagagattgagaaacagaaggtgcacctgaagagtatcacagaggtaggagaggccttgaaaacagttttgggcaagaaggagacgttggtggaagataaactcagtcttctgaatagtaactggatagctgtcacctcccgagcagaagagtggttaaatcttttgttggaataccagaaacacatggaaacttttgaccagaatgtggaccacatcacaaagtggatcattcaggctgacacacttttggatgaatcagagaaaaagaaaccccagcaaaaagaagacgtgcttaagcgtttaaaggcagaactgaatgacatacgcccaaaggtggactctacacgtgaccaagcagcaaacttgatggcaaaccgcggtgaccactgcaggaaattagtagagccccaaatctcagagctcaaccatcgatttgcagccatttcacacagaattaagactggaaaggcctccattcctttgaaggaattggagcagtttaactcagatatacaaaaattgcttgaaccactggaggctgaaattcagcagggggtgaatctgaaagaggaagacttcaataaagatatgaatgaagacaatgagggtactgtaaaagaattgttgcaaagaggagacaacttacaacaaagaatcacagatgagagaaagcgagaggaaataaagataaaacagcagctgttacagacaaaacataatgctctcaaggatttgaggtctcaaagaagaaaaaaggctctagaaatttctcatcagtggtatcagtacaagaggcaggctgatgatctcctgaaatgcttggatgacattgaaaaaaaattagccagcctacctgagcccagagatgaaaggaaaataaaggaaattgatcgggaattgcagaagaagaaagaggagctgaatgcagtgcgtaggcaagctgagggcttgtctgaggatggggccgcaatggcagtggagccaactcagatccagctcagcaagcgctggcgggaaattgagagcaaatttgctcagtttcgaagactcaactttgcacaaattcacactgtccgtgaagaaacgatgatggtgatgactgaagacatgcctttggaaatttcttatgtgccttctacttatttgactgaaatcactcatgtctcacaagccctattagaagtggaacaacttctcaatgctcctgacctctgtgctaaggactttgaagatctctttaagcaagaggagtctctgaagaatataaaagatagtctacaacaaagctcaggtcggattgacattattcatagcaagaagacagcagcattgcaaagtgcaacgcctgtggaaagggtgaagctacaggaagctctctcccagcttgatttccaatgggaaaaagttaacaaaatgtacaaggaccgacaagggcgatttgacagatctgttgagaaatggcggcgttttcattatgatataaagatatttaatcagtggctaacagaagctgaacagtttctcagaaagacacaaattcctgagaattgggaacatgctaaatacaaatggtatcttaaggaactccaggatggcattgggcagcggcaaactgttgtcagaacattgaatgcaactggggaagaaataattcagcaatcctcaaaaacagatgccagtattctacaggaaaaattgggaagcctgaatctgcggtggcaggaggtctgcaaacagctgtcagacagaaaaaagaggctagaagaacaaaagaatatcttgtcagaatttcaaagagatttaaatgaatttgttttatggttggaggaagcagataacattgctagtatcccacttgaacctggaaaagagcagcaactaaaagaaaagcttgagcaagtcaagttactggtggaagagttgcccctgcgccagggaattctcaaacaattaaatgaaactggaggacccgtgcttgtaagtgctcccataagcccagaagagcaagataaacttgaaaataagctcaagcagacaaatctccagtggataaaggtttccagagctttacctgagaaacaaggagaaattgaagctcaaataaaagaccttgggcagcttgaaaaaaagcttgaagaccttgaagagcagttaaatcatctgctgctgtggttatctcctattaggaatcagttggaaatttataaccaaccaaaccaagaaggaccatttgacgttcaggaaactgaaatagcagttcaagctaaacaaccggatgtggaagagattttgtctaaagggcagcatttgtacaaggaaaaaccagccactcagccagtgaagctcctactcagactgttactctggtgacacaacctgtggttactaaggaaactgccatctccaaactagaaatgccatcttccttgatgttggaggtacctgctctggcagatttcaaccgggcttggacagaacttaccgactggctttctctgcttgatcaagttataaaatcacagagggtgatggtgggtgaccttgaggatatcaacgagatgatcatcaagcagaaggcaacaatgcaggatttggaacagaggcgtccccagttggaagaactcattaccgctgcccaaaatttgaaaaacaagaccagcaatcaagaggctagaacaatcattacggatcgaattgaaagaattcagaatcagtgggatgaagtacaagaacaccttcagaaccggaggcaacagttgaatgaaatgttaaaggattcaacacaatggctggaagctaaggaagaagctgagcaggtcttaggacaggccagagccaagcttgagtcatggaaggagggtccctatacagtagatgcaatccaaaagaaaatcacagaaaccaagcagttggccaaagacctccgccagtggcagacaaatgtagatgtggcaaatgacttggccctgaaacttctccgggattattctgcagatgataccagaaaagtccacatgataacagagaatatcaatgcctcttggagaagcattcataaaagggtgagtgagcgagaggctgctttggaagaaactcatagattactgcaacagttccccctggacctggaaaagtttcttgcctggcttacagaagctgaaacaactgccaatgtcctacaggatgctacccgtaaggaaaggctcctagaagactccaagggagtaaaagagctgatgaaacaatggcaagacctccaaggtgaaattgaagctcacacagatgtttatcacaacctggatgaaaacagccaaaaaatcctgagatccctggaaggttccgatgatgcagtcctgttacaaagacgtttggataacatgaacttcaagtggagtgaacttcggaaaaagtctctcaacattaggtcccatttggaagccagttctgaccagtggaagcgtctgcacctttctctgcaggaacttctggtgtggctacagctgaaagatgatgaattaagccggcaggcacctattggaggcgactttccagcagttcagaagcagaacgatgtacatagggccttcaagagggaattgaaaactaaagaacctgtaatcatgagtactcttgagactgtacgaatatttctgacagagcagcctttggaaggactagagaaactctaccaggagcccagagagctgcctcctgaggagagagcccagaatgtcactcggcttctacgaaagcaggctgaggaggtcaatactgagtgggaaaaattgaacctgcactccgctgactggcagagaaaaatagatgagacccttgaaagactccaggaacttcaagaggccacggatgagctggacctcaagctgcgccaagctgaggtgatcaagggatcctggcagcccgtgggcgatctcctcattgactctctccaagatcacctcgagaaagtcaaggcacttcgaggagaaattgcgcctctgaaagagaacgtgagccacgtcaatgaccttgctcgccagcttaccactttgggcattcagctctcaccgtataacctcagcactctggaagacctgaacaccagatggaagcttctgcaggtggccgtcgaggaccgagtcaggcagctgcatgaagcccacagggactttggtccagcatctcagcactttctttccacgtctgtccagggtccctgggagagagccatctcgccaaacaaagtgccctactatatcaaccacgagactcaaacaacttgctgggaccatcccaaaatgacagagctctaccagtctttagctgacctgaataatgtcagattctcagcttataggactgccatgaaactccgaagactgcagaaggccctttgcttggatctcttgagcctgtcagctgcatgtgatgccttggaccagcacaacctcaagcaaaatgaccagcccatggatatcctgcagattattaattgtttgaccactatttatgaccgcctggagcaagagcacaacaatttggtcaacgtccctctctgcgtggatatgtgtctgaactggctgctgaatgtttatgatacgggacgaacagggaggatccgtgtcctgtcttttaaaactggcatcatttccctgtgtaaagcacatttggaagacaagtacagataccttttcaagcaagtggcaagttcaacaggattttgtgaccagcgcaggctgggcctccttctgcatgattctatccaaattccaagacagttgggtgaagttgcatcctttgggggcagtaacattgagccaagtgtccggagctgcttccaatttgctaataataagccagagatcgaagcggccctcttcctagactggatgagactggaaccccagtccatggtgtggctgcccgtcctgcacagagtggctgctgcagaaactgccaagcatcaggccaaatgtaacatctgcaaagagtgtccaatcattggattcaggtacaggagtctaaagcactttaattatgacatctgccaaagctgctttttttctggtcgagttgcaaaaggccataaaatgcactatcccatggtggaatattgcactccgactacatcaggagaagatgttcgagactttgccaaggtactaaaaaacaaatttcgaaccaaaaggtattttgcgaagcatccccgaatgggctacctgccagtgcagactgtcttagagggggacaacatggaaacgcctgcctcgtcccctcagctttcacacgatgatactcattcacgcattgaacattatgctagcaggctagcagaaatggaaaacagcaatggatcttatctaaatgatagcatctctcctaatgagagcatagatgatgaacatttgttaatccagcattactgccaaagtttgaaccaggactcccccctgagccagcctcgtagtcctgcccagatcttgatttccttagagagtgaggaaagaggggagctagagagaatcctagcagatcttgaggaagaaaacaggaatctgcaagcagaatatgaccgtctaaagcagcagcacgaacataaaggcctgtccccactgccgtcccctcctgaaatgatgcccacctctccccagagtccccgggatgctgagctcattgctgaggccaagctactgcgtcaacacaaaggccgcctggaagccaggatgcaaatcctggaagaccacaataaacagctggagtcacagttacacaggctaaggcagctgctggagcaaccccaggcagaggccaaagtgaatggcacaacggtgtcctctccttctacctctctacagaggtccgacagcagtcagcctatgctgctccgagtggttggcagtcaaacttcggactccatgggtgaggaagatcttctcagtcctccccaggacacaagcacagggttagaggaggtgatggagcaactcaacaactccttccctagttcaagaggacacaatgtaggaagtcttttccacatggcagatgatttgggcagagcgatggagtccttagtatcagtcatgacagatgaagaaggagcagaataaatgttttacaactcctgattcccgcatggtttttataatattcatacaacaaagaggattagacagtaagagtttacaagaaataaatctatatttttgtgaagggtagtggtattatactgtagatttcagtagtttctaagtctgttattgttttgttaacaatggcaggttttacacgtctatgcaattgtacaaaaaagttataagaaaactacatgtaaaatcttgatagctaaataacttgccatttctttatatggaacgcattttgggttgtttaaaaatttataacagttataaagaaagattgtaaactaaagtgtgctttataaaaaaaagttgtttataaaaacccctaaaaacaaaacaaacacacacacacacacatacacacacacacacaaaactttgaggcagcgcattgttttgcatccttttggcgtgatatccatatgaaattcatggctttttctttttttgcatattaaagataagacttcctctaccaccacaccaaatgactactacacactgctcatttgagaactgtcagctgagtggggcaggcttgagttttcatttcatatatctatatgtctataagtatataaatactatagttatatagataaagagatacgaatttctatagactgactttttccattttttaaatgttcatgtcacatcctaatagaaagaaattacttctagtcagtcatccaggcttacctgcttggtctagaatggatttttcccggagccggaagccaggaggaaactacaccacactaaaacattgtctacagctccagatgtttctcattttaaacaactttccactgacaacgaaagtaaagtaaagtattggatttttttaaagggaacatgtgaatgaatacacaggacttattatatcagagtgagtaatcggttggttggttgattgattgattgattgatacattcagcttcctgctgctagcaatgccacgatttagatttaatgatgcttcagtggaaatcaatcagaaggtattctgaccttgtgaacatcagaaggtattttttaactcccaagcagtagcaggacgatgatagggctggagggctatggattcccagcccatccctgtgaaggagtaggccactctttaagtgaaggattggatgattgttcataatacataaagttctctgtaattacaactaaattattatgccctcttctcacagtcaaaaggaactgggtggtttggtttttgttgcttttttagatttattgtcccatgtgggatgagtttttaaatgccacaagacataatttaaaataaataaactttgggaaaaggtgtaagacagtagccccatcacatttgtgatactgacaggtatcaacccagaagcccatgaactgtgtttccatcctttgcatttctctgcgagtagttccacacaggtttgtaagtaagtaagaaagaaggcaaattgattcaaatgttacaaaaaaacccttcttggtggattagacaggttaaatatataaacaaacaaacaaaaattgctcaaaaaagaggagaaaagctcaagaggaaaagctaaggactggtaggaaaaagctttactctttcatgccattttatttctttttgatttttaaatcattcattcaatagataccaccgtgtgacctataattttgcaaatctgttacctctgacatcaagtgtaattagcttttggagagtgggctgacatcaagtgtaattagcttttggagagtgggttttgtccattattaataattaattaattaacatcaaacacggcttctcatgctatttctacctcactttggttttggggtgttcctgataattgtgcacacctgagttcacagcttcaccacttgtccattgcgttattttctttttcctttataattctttctttttccttcataattttcaaaagaaaacccaaagctctaaggtaacaaattaccaaattacatgaagatttggtttttgtcttgcatttttttcctttatgtgacgctggaccttttctttacccaaggatttttaaaactcagatttaaaacaaggggttactttacatcctactaagaagtttaagtaagtaagtttcattctaaaatcagaggtaaatagagtgcataaataattttgttttaatctttttgtttttcttttagacacattagctctggagtgagtctgtcataatatttgaacaaaaattgagagctttattgctgcattttaagcataattaatttggacattatttcgtgttgtgttctttataaccaccaagtattaaactgtaaatcataatgtaactgaagcataaacatcacatggcatgttttgtcattgttttcaggtactgagttcttacttgagtatcataatatattgtgttttaacaccaacactgtaacatttacgaattatttttttaaacttcagttttactgcattttcacaacatatcagacttcaccaaatatatgccttactattgtattatagtactgctttactgtgtatctcaataaagcacgcagttatgttacaaaaaagtaaaaac

SEQ ID NO: 319980 - DNA, 11741 bp, Homo sapiens
gggcgtgagggtactgtaaagagaatgttgcaaagaggagacaacttacaacaaagaatcacagatgagagaaagcgagaggaaataaagataaaacagcggctgttagagacaaaacataatgctctcaaggatttgaggtctcaaagaagaaaaaaggctctagaaatttctcagccatcactaacacagacaactgtaatggaaacagtaactacggtgaccacaagggaacagatcctggtaaagcatgctcaagaggaacttccaccaccacctccccaaaagaagaggcagattactgtggattctgaaattaggaaaaggttggatgttgatataactgaacttcacagctggattactcgctcagaagctgtgttgcagagtcctgaatttgcaatctttcggaaggaaggcaacttctcagacttaaaagaaaaagtcaatgccatagagcgagaaaaagctgagaagttcagaaaactgcaagatgccagcagatcagctcaggccctggtggaacagatggtgaatgagggtgttaatgcagatagcatcaaacaagcctcagaacaactgaacagccggtggatcgaattctgccagttgctaagtgagagacttaactggctggagtatcagaacaacatcatcgctttctataatcagctacaacaattggagcagatgacaactactgctgaaaactggttgaaaatccaacccaccaccccatcagagccaacagcaattaaaagtcagttaaaaatttgtaaggatgaagtcaaccggctatcaggtcttcaacctcaaattgaacgattaaaaattcaaagcatagccctgaaagagaaaggacaaggacccatgttcctggatgcagactttgtggcctttacaaatcattttaagcaagtcttttctgatgtgcaggccagagagaaagagctacagacaatttttgacactttgccaccaatgcgctatcaggagaccatgagtgccatcaggacatgggtccagcagtcagaaaccaaactctccatacctcaacttagtgtcaccgactatgaaatcatggagcagagactcggggaattgcaggctttacaaagttctctgcaagagcaacaaagtggcctatactatctcagcaccactgtgaaagagatgtcgaagaaagcgccctctgaaattagccggaaatatcaatcagaatttgaagaaattgagggacgctggaagaagctctcctcccagctggttgagcattgtcaaaagctagaggagcaaatgaataaactccgaaaaattcagaatcacatacaaaccctgaagaaatggatggctgaagttgatgtttttctgaaggaggaatggcctgcccttggggattcagaaattctaaaaaagcagctgaaacagtgcagacttttagtcagtgatattcagacaattcagcccagtctaaacagtgtcaatgaaggtgggcagaagataaagaatgaagcagagccagagtttgcttcgagacttgagacagaactcaaagaacttaacactcagtgggatcacatgtgccaacaggtctatgccagaaaggaggccttgaagggaggtttggagaaaactgtaagcctccagaaagatctatcagagatgcacgaatggatgacacaagctgaagaagagtatcttgagagagattttgaatataaaactccagatgaattacagaaagcagttgaagagatgaagagagctaaagaagaggcccaacaaaaagaagcgaaagtgaaactccttactgagtctgtaaatagtgtcatagctcaagctccacctgtagcacaagaggccttaaaaaaggaacttgaaactctaaccaccaactaccagtggctctgcactaggctgaatgggaaatgcaagactttggaagaagtttgggcatgttggcatgagttattgtcatacttggagaaagcaaacaagtggctaaatgaagtagaatttaaacttaaaaccactgaaaacattcctggcggagctgaggaaatctctgaggtgctagattcacttgaaaatttgatgcgacattcagaggataacccaaatcagattcgcatattggcacagaccctaacagatggcggagtcatggatgagctaatcaatgaggaacttgagacatttaattctcgttggagggaactacatgaagaggctgtaaggaggcaaaagttgcttgaacagagcatccagtctgcccaggagactgaaaaatccttacacttaatccaggagtccctcacattcattgacaagcagttggcagcttatattgcagacaaggtggacgcagctcaaatgcctcaggaagcccagaaaatccaatctgatttgacaagtcatgagatcagtttagaagaaatgaagaaacataatcaggggaaggaggctgcccaaagagtcctgtctcagattgatgttgcacagaaaaaattacaagatgtctccatgaagtttcgattattccagaaaccagccaattttgagcagcgtctacaagaaagtaagatgattttagatgaagtgaagatgcacttgcctgcattggaaacaaagagtgtggaacaggaagtagtacagtcacagctaaatcattgtgtgaacttgtataaaagtctgagtgaagtgaagtctgaagtggaaatggtgataaagactggacgtcagattgtacagaaaaagcagacggaaaatcccaaagaacttgatgaaagagtaacagctttgaaattgcattataatgagctgggagcaaaggtaacagaaagaaagcaacagttggagaaatgcttgaaattgtcccgtaagatgcgaaaggaaatgaatgtcttgacagaatggctggcagctacagatatggaattgacaaagagatcagcagttgaaggaatgcctagtaatttggattctgaagttgcctggggaaaggctactcaaaaagagattgagaaacagaaggtgcacctgaagagtatcacagaggtaggagaggccttgaaaacagttttgggcaagaaggagacgttggtggaagataaactcagtcttctgaatagtaactggatagctgtcacctcccgagcagaagagtggttaaatcttttgttggaataccagaaacacatggaaacttttgaccagaatgtggaccacatcacaaagtggatcattcaggctgacacacttttggatgaatcagagaaaaagaaaccccagcaaaaagaagacgtgcttaagcgtttaaaggcagaactgaatgacatacgcccaaaggtggactctacacgtgaccaagcagcaaacttgatggcaaaccgcggtgaccactgcaggaaattagtagagccccaaatctcagagctcaaccatcgatttgcagccatttcacacagaattaagactggaaaggcctccattcctttgaaggaattggagcagtttaactcagatatacaaaaattgcttgaaccactggaggctgaaattcagcagggggtgaatctgaaagaggaagacttcaataaagatatgaatgaagacaatgagggtactgtaaaagaattgttgcaaagaggagacaacttacaacaaagaatcacagatgagagaaagcgagaggaaataaagataaaacagcagctgttacagacaaaacataatgctctcaaggatttgaggtctcaaagaagaaaaaaggctctagaaatttctcatcagtggtatcagtacaagaggcaggctgatgatctcctgaaatgcttggatgacattgaaaaaaaattagccagcctacctgagcccagagatgaaaggaaaataaaggaaattgatcgggaattgcagaagaagaaagaggagctgaatgcagtgcgtaggcaagctgagggcttgtctgaggatggggccgcaatggcagtggagccaactcagatccagctcagcaagcgctggcgggaaattgagagcaaatttgctcagtttcgaagactcaactttgcacaaattcacactgtccgtgaagaaacgatgatggtgatgactgaagacatgcctttggaaatttcttatgtgccttctacttatttgactgaaatcactcatgtctcacaagccctattagaagtggaacaacttctcaatgctcctgacctctgtgctaaggactttgaagatctctttaagcaagaggagtctctgaagaatataaaagatagtctacaacaaagctcaggtcggattgacattattcatagcaagaagacagcagcattgcaaagtgcaacgcctgtggaaagggtgaagctacaggaagctctctcccagcttgatttccaatgggaaaaagttaacaaaatgtacaaggaccgacaagggcgatttgacagatctgttgagaaatggcggcgttttcattatgatataaagatatttaatcagtggctaacagaagctgaacagtttctcagaaagacacaaattcctgagaattgggaacatgctaaatacaaatggtatcttaaggaactccaggatggcattgggcagcggcaaactgttgtcagaacattgaatgcaactggggaagaaataattcagcaatcctcaaaaacagatgccagtattctacaggaaaaattgggaagcctgaatctgcggtggcaggaggtctgcaaacagctgtcagacagaaaaaagaggctagaagaacaaaagaatatcttgtcagaatttcaaagagatttaaatgaatttgttttatggttggaggaagcagataacattgctagtatcccacttgaacctggaaaagagcagcaactaaaagaaaagcttgagcaagtcaagttactggtggaagagttgcccctgcgccagggaattctcaaacaattaaatgaaactggaggacccgtgcttgtaagtgctcccataagcccagaagagcaagataaacttgaaaataagctcaagcagacaaatctccagtggataaaggtttccagagctttacctgagaaacaaggagaaattgaagctcaaataaaagaccttgggcagcttgaaaaaaagcttgaagaccttgaagagcagttaaatcatctgctgctgtggttatctcctattaggaatcagttggaaatttataaccaaccaaaccaagaaggaccatttgacgttcaggaaactgaaatagcagttcaagctaaacaaccggatgtggaagagattttgtctaaagggcagcatttgtacaaggaaaaaccagccactcagccagtgaagctcctactcagactgttactctggtgacacaacctgtggttactaaggaaactgccatctccaaactagaaatgccatcttccttgatgttggaggtacctgctctggcagatttcaaccgggcttggacagaacttaccgactggctttctctgcttgatcaagttataaaatcacagagggtgatggtgggtgaccttgaggatatcaacgagatgatcatcaagcagaaggcaacaatgcaggatttggaacagaggcgtccccagttggaagaactcattaccgctgcccaaaatttgaaaaacaagaccagcaatcaagaggctagaacaatcattacggatcgaattgaaagaattcagaatcagtgggatgaagtacaagaacaccttcagaaccggaggcaacagttgaatgaaatgttaaaggattcaacacaatggctggaagctaaggaagaagctgagcaggtcttaggacaggccagagccaagcttgagtcatggaaggagggtccctatacagtagatgcaatccaaaagaaaatcacagaaaccaagcagttggccaaagacctccgccagtggcagacaaatgtagatgtggcaaatgacttggccctgaaacttctccgggattattctgcagatgataccagaaaagtccacatgataacagagaatatcaatgcctcttggagaagcattcataaaagggtgagtgagcgagaggctgctttggaagaaactcatagattactgcaacagttccccctggacctggaaaagtttcttgcctggcttacagaagctgaaacaactgccaatgtcctacaggatgctacccgtaaggaaaggctcctagaagactccaagggagtaaaagagctgatgaaacaatggcaagacctccaaggtgaaattgaagctcacacagatgtttatcacaacctggatgaaaacagccaaaaaatcctgagatccctggaaggttccgatgatgcagtcctgttacaaagacgtttggataacatgaacttcaagtggagtgaacttcggaaaaagtctctcaacattaggtcccatttggaagccagttctgaccagtggaagcgtctgcacctttctctgcaggaacttctggtgtggctacagctgaaagatgatgaattaagccggcaggcacctattggaggcgactttccagcagttcagaagcagaacgatgtacatagggccttcaagagggaattgaaaactaaagaacctgtaatcatgagtactcttgagactgtacgaatatttctgacagagcagcctttggaaggactagagaaactctaccaggagcccagagagctgcctcctgaggagagagcccagaatgtcactcggcttctacgaaagcaggctgaggaggtcaatactgagtgggaaaaattgaacctgcactccgctgactggcagagaaaaatagatgagacccttgaaagactccaggaacttcaagaggccacggatgagctggacctcaagctgcgccaagctgaggtgatcaagggatcctggcagcccgtgggcgatctcctcattgactctctccaagatcacctcgagaaagtcaaggcacttcgaggagaaattgcgcctctgaaagagaacgtgagccacgtcaatgaccttgctcgccagcttaccactttgggcattcagctctcaccgtataacctcagcactctggaagacctgaacaccagatggaagcttctgcaggtggccgtcgaggaccgagtcaggcagctgcatgaagcccacagggactttggtccagcatctcagcactttctttccacgtctgtccagggtccctgggagagagccatctcgccaaacaaagtgccctactatatcaaccacgagactcaaacaacttgctgggaccatcccaaaatgacagagctctaccagtctttagctgacctgaataatgtcagattctcagcttataggactgccatgaaactccgaagactgcagaaggccctttgcttggatctcttgagcctgtcagctgcatgtgatgccttggaccagcacaacctcaagcaaaatgaccagcccatggatatcctgcagattattaattgtttgaccactatttatgaccgcctggagcaagagcacaacaatttggtcaacgtccctctctgcgtggatatgtgtctgaactggctgctgaatgtttatgatacgggacgaacagggaggatccgtgtcctgtcttttaaaactggcatcatttccctgtgtaaagcacatttggaagacaagtacagataccttttcaagcaagtggcaagttcaacaggattttgtgaccagcgcaggctgggcctccttctgcatgattctatccaaattccaagacagttgggtgaagttgcatcctttgggggcagtaacattgagccaagtgtccggagctgcttccaatttgctaataataagccagagatcgaagcggccctcttcctagactggatgagactggaaccccagtccatggtgtggctgcccgtcctgcacagagtggctgctgcagaaactgccaagcatcaggccaaatgtaacatctgcaaagagtgtccaatcattggattcaggtacaggagtctaaagcactttaattatgacatctgccaaagctgctttttttctggtcgagttgcaaaaggccataaaatgcactatcccatggtggaatattgcactccgactacatcaggagaagatgttcgagactttgccaaggtactaaaaaacaaatttcgaaccaaaaggtattttgcgaagcatccccgaatgggctacctgccagtgcagactgtcttagagggggacaacatggaaacgcctgcctcgtcccctcagctttcacacgatgatactcattcacgcattgaacattatgctagcaggctagcagaaatggaaaacagcaatggatcttatctaaatgatagcatctctcctaatgagagcatagatgatgaacatttgttaatccagcattactgccaaagtttgaaccaggactcccccctgagccagcctcgtagtcctgcccagatcttgatttccttagagagtgaggaaagaggggagctagagagaatcctagcagatcttgaggaagaaaacaggaatctgcaagcagaatatgaccgtctaaagcagcagcacgaacataaaggcctgtccccactgccgtcccctcctgaaatgatgcccacctctccccagagtccccgggatgctgagctcattgctgaggccaagctactgcgtcaacacaaaggccgcctggaagccaggatgcaaatcctggaagaccacaataaacagctggagtcacagttacacaggctaaggcagctgctggagcaaccccaggcagaggccaaagtgaatggcacaacggtgtcctctccttctacctctctacagaggtccgacagcagtcagcctatgctgctccgagtggttggcagtcaaacttcggactccatgggtgaggaagatcttctcagtcctccccaggacacaagcacagggttagaggaggtgatggagcaactcaacaactccttccctagttcaagaggacacaatgtaggaagtcttttccacatggcagatgatttgggcagagcgatggagtccttagtatcagtcatgacagatgaagaaggagcagaataaatgttttacaactcctgattcccgcatggtttttataatattcatacaacaaagaggattagacagtaagagtttacaagaaataaatctatatttttgtgaagggtagtggtattatactgtagatttcagtagtttctaagtctgttattgttttgttaacaatggcaggttttacacgtctatgcaattgtacaaaaaagttataagaaaactacatgtaaaatcttgatagctaaataacttgccatttctttatatggaacgcattttgggttgtttaaaaatttataacagttataaagaaagattgtaaactaaagtgtgctttataaaaaaaagttgtttataaaaacccctaaaaacaaaacaaacacacacacacacacatacacacacacacacaaaactttgaggcagcgcattgttttgcatccttttggcgtgatatccatatgaaattcatggctttttctttttttgcatattaaagataagacttcctctaccaccacaccaaatgactactacacactgctcatttgagaactgtcagctgagtggggcaggcttgagttttcatttcatatatctatatgtctataagtatataaatactatagttatatagataaagagatacgaatttctatagactgactttttccattttttaaatgttcatgtcacatcctaatagaaagaaattacttctagtcagtcatccaggcttacctgcttggtctagaatggatttttcccggagccggaagccaggaggaaactacaccacactaaaacattgtctacagctccagatgtttctcattttaaacaactttccactgacaacgaaagtaaagtaaagtattggatttttttaaagggaacatgtgaatgaatacacaggacttattatatcagagtgagtaatcggttggttggttgattgattgattgattgatacattcagcttcctgctgctagcaatgccacgatttagatttaatgatgcttcagtggaaatcaatcagaaggtattctgaccttgtgaacatcagaaggtattttttaactcccaagcagtagcaggacgatgatagggctggagggctatggattcccagcccatccctgtgaaggagtaggccactctttaagtgaaggattggatgattgttcataatacataaagttctctgtaattacaactaaattattatgccctcttctcacagtcaaaaggaactgggtggtttggtttttgttgcttttttagatttattgtcccatgtgggatgagtttttaaatgccacaagacataatttaaaataaataaactttgggaaaaggtgtaagacagtagccccatcacatttgtgatactgacaggtatcaacccagaagcccatgaactgtgtttccatcctttgcatttctctgcgagtagttccacacaggtttgtaagtaagtaagaaagaaggcaaattgattcaaatgttacaaaaaaacccttcttggtggattagacaggttaaatatataaacaaacaaacaaaaattgctcaaaaaagaggagaaaagctcaagaggaaaagctaaggactggtaggaaaaagctttactctttcatgccattttatttctttttgatttttaaatcattcattcaatagataccaccgtgtgacctataattttgcaaatctgttacctctgacatcaagtgtaattagcttttggagagtgggctgacatcaagtgtaattagcttttggagagtgggttttgtccattattaataattaattaattaacatcaaacacggcttctcatgctatttctacctcactttggttttggggtgttcctgataattgtgcacacctgagttcacagcttcaccacttgtccattgcgttattttctttttcctttataattctttctttttccttcataattttcaaaagaaaacccaaagctctaaggtaacaaattaccaaattacatgaagatttggtttttgtcttgcatttttttcctttatgtgacgctggaccttttctttacccaaggatttttaaaactcagatttaaaacaaggggttactttacatcctactaagaagtttaagtaagtaagtttcattctaaaatcagaggtaaatagagtgcataaataattttgttttaatctttttgtttttcttttagacacattagctctggagtgagtctgtcataatatttgaacaaaaattgagagctttattgctgcattttaagcataattaatttggacattatttcgtgttgtgttctttataaccaccaagtattaaactgtaaatcataatgtaactgaagcataaacatcacatggcatgttttgtcattgttttcaggtactgagttcttacttgagtatcataatatattgtgttttaacaccaacactgtaacatttacgaattatttttttaaacttcagttttactgcattttcacaacatatcagacttcaccaaatatatgccttactattgtattatagtactgctttactgtgtatctcaataaagcacgcagttatgttacaaaaaagtaaaaac

SEQ ID NO: 319981 - DNA, 8898 bp, Homo sapiens
  misc_feature (2)..(3): n is a, c, g, or t
gnntcctggcatcagttactgtgttgactcactcagtgttgggatcactcactttccccctacaggactcagatctgggaggcaattaccttcggagaaaaacgaataggaaaaactgaagtgttactttttttaaagctgctgaagtttgttggtttctcattgtttttaagcctactggagcaataaagtttgaagaacttttaccaggttttttttatcgctgccttgatatacacttttcaaaatgctttggtgggaagaagtagaggactgttatgaaagagaagatgttcaaaagaaaacattcacaaaatgggtaaatgcacaattttctaaggaataccagaaacacatggaaacttttgaccagaatgtggaccacatcacaaagtggatcattcaggctgacacacttttggatgaatcagagaaaaagaaaccccagcaaaaagaagacgtgcttaagcgtttaaaggcagaactgaatgacatacgcccaaaggtggactctacacgtgaccaagcagcaaacttgatggcaaaccgcggtgaccactgcaggaaattagtagagccccaaatctcagagctcaaccatcgatttgcagccatttcacacagaattaagactggaaaggcctccattcctttgaaggaattggagcagtttaactcagatatacaaaaattgcttgaaccactggaggctgaaattcagcagggggtgaatctgaaagaggaagacttcaataaagatatgaatgaagacaatgagggtactgtaaaagaattgttgcaaagaggagacaacttacaacaaagaatcacagatgagagaaagcgagaggaaataaagataaaacagcagctgttacagacaaaacataatgctctcaaggatttgaggtctcaaagaagaaaaaaggctctagaaatttctcatcagtggtatcagtacaagaggcaggctgatgatctcctgaaatgcttggatgacattgaaaaaaaattagccagcctacctgagcccagagatgaaaggaaaataaaggaaattgatcgggaattgcagaagaagaaagaggagctgaatgcagtgcgtaggcaagctgagggcttgtctgaggatggggccgcaatggcagtggagccaactcagatccagctcagcaagcgctggcgggaaattgagagcaaatttgctcagtttcgaagactcaactttgcacaaattcacactgtccgtgaagaaacgatgatggtgatgactgaagacatgcctttggaaatttcttatgtgccttctacttatttgactgaaatcactcatgtctcacaagccctattagaagtggaacaacttctcaatgctcctgacctctgtgctaaggactttgaagatctctttaagcaagaggagtctctgaagaatataaaagatagtctacaacaaagctcaggtcggattgacattattcatagcaagaagacagcagcattgcaaagtgcaacgcctgtggaaagggtgaagctacaggaagctctctcccagcttgatttccaatgggaaaaagttaacaaaatgtacaaggaccgacaagggcgatttgacagatctgttgagaaatggcggcgttttcattatgatataaagatatttaatcagtggctaacagaagctgaacagtttctcagaaagacacaaattcctgagaattgggaacatgctaaatacaaatggtatcttaaggaactccaggatggcattgggcagcggcaaactgttgtcagaacattgaatgcaactggggaagaaataattcagcaatcctcaaaaacagatgccagtattctacaggaaaaattgggaagcctgaatctgcggtggcaggaggtctgcaaacagctgtcagacagaaaaaagaggctagaagaacaaaagaatatcttgtcagaatttcaaagagatttaaatgaatttgttttatggttggaggaagcagataacattgctagtatcccacttgaacctggaaaagagcagcaactaaaagaaaagcttgagcaagtcaagttactggtggaagagttgcccctgcgccagggaattctcaaacaattaaatgaaactggaggacccgtgcttgtaagtgctcccataagcccagaagagcaagataaacttgaaaataagctcaagcagacaaatctccagtggataaaggtttccagagctttacctgagaaacaaggagaaattgaagctcaaataaaagaccttgggcagcttgaaaaaaagcttgaagaccttgaagagcagttaaatcatctgctgctgtggttatctcctattaggaatcagttggaaatttataaccaaccaaaccaagaaggaccatttgacgttcaggaaactgaaatagcagttcaagctaaacaaccggatgtggaagagattttgtctaaagggcagcatttgtacaaggaaaaaccagccactcagccagtgaagctcctactcagactgttactctggtgacacaacctgtggttactaaggaaactgccatctccaaactagaaatgccatcttccttgatgttggaggtacctgctctggcagatttcaaccgggcttggacagaacttaccgactggctttctctgcttgatcaagttataaaatcacagagggtgatggtgggtgaccttgaggatatcaacgagatgatcatcaagcagaaggcaacaatgcaggatttggaacagaggcgtccccagttggaagaactcattaccgctgcccaaaatttgaaaaacaagaccagcaatcaagaggctagaacaatcattacggatcgaattgaaagaattcagaatcagtgggatgaagtacaagaacaccttcagaaccggaggcaacagttgaatgaaatgttaaaggattcaacacaatggctggaagctaaggaagaagctgagcaggtcttaggacaggccagagccaagcttgagtcatggaaggagggtccctatacagtagatgcaatccaaaagaaaatcacagaaaccaagcagttggccaaagacctccgccagtggcagacaaatgtagatgtggcaaatgacttggccctgaaacttctccgggattattctgcagatgataccagaaaagtccacatgataacagagaatatcaatgcctcttggagaagcattcataaaagggtgagtgagcgagaggctgctttggaagaaactcatagattactgcaacagttccccctggacctggaaaagtttcttgcctggcttacagaagctgaaacaactgccaatgtcctacaggatgctacccgtaaggaaaggctcctagaagactccaagggagtaaaagagctgatgaaacaatggcaagacctccaaggtgaaattgaagctcacacagatgtttatcacaacctggatgaaaacagccaaaaaatcctgagatccctggaaggttccgatgatgcagtcctgttacaaagacgtttggataacatgaacttcaagtggagtgaacttcggaaaaagtctctcaacattaggtcccatttggaagccagttctgaccagtggaagcgtctgcacctttctctgcaggaacttctggtgtggctacagctgaaagatgatgaattaagccggcaggcacctattggaggcgactttccagcagttcagaagcagaacgatgtacatagggccttcaagagggaattgaaaactaaagaacctgtaatcatgagtactcttgagactgtacgaatatttctgacagagcagcctttggaaggactagagaaactctaccaggagcccagagagctgcctcctgaggagagagcccagaatgtcactcggcttctacgaaagcaggctgaggaggtcaatactgagtgggaaaaattgaacctgcactccgctgactggcagagaaaaatagatgagacccttgaaagactccaggaacttcaagaggccacggatgagctggacctcaagctgcgccaagctgaggtgatcaagggatcctggcagcccgtgggcgatctcctcattgactctctccaagatcacctcgagaaagtcaaggcacttcgaggagaaattgcgcctctgaaagagaacgtgagccacgtcaatgaccttgctcgccagcttaccactttgggcattcagctctcaccgtataacctcagcactctggaagacctgaacaccagatggaagcttctgcaggtggccgtcgaggaccgagtcaggcagctgcatgaagcccacagggactttggtccagcatctcagcactttctttccacgtctgtccagggtccctgggagagagccatctcgccaaacaaagtgccctactatatcaaccacgagactcaaacaacttgctgggaccatcccaaaatgacagagctctaccagtctttagctgacctgaataatgtcagattctcagcttataggactgccatgaaactccgaagactgcagaaggccctttgcttggatctcttgagcctgtcagctgcatgtgatgccttggaccagcacaacctcaagcaaaatgaccagcccatggatatcctgcagattattaattgtttgaccactatttatgaccgcctggagcaagagcacaacaatttggtcaacgtccctctctgcgtggatatgtgtctgaactggctgctgaatgtttatgatacgggacgaacagggaggatccgtgtcctgtcttttaaaactggcatcatttccctgtgtaaagcacatttggaagacaagtacagataccttttcaagcaagtggcaagttcaacaggattttgtgaccagcgcaggctgggcctccttctgcatgattctatccaaattccaagacagttgggtgaagttgcatcctttgggggcagtaacattgagccaagtgtccggagctgcttccaatttgctaataataagccagagatcgaagcggccctcttcctagactggatgagactggaaccccagtccatggtgtggctgcccgtcctgcacagagtggctgctgcagaaactgccaagcatcaggccaaatgtaacatctgcaaagagtgtccaatcattggattcaggtacaggagtctaaagcactttaattatgacatctgccaaagctgctttttttctggtcgagttgcaaaaggccataaaatgcactatcccatggtggaatattgcactccgactacatcaggagaagatgttcgagactttgccaaggtactaaaaaacaaatttcgaaccaaaaggtattttgcgaagcatccccgaatgggctacctgccagtgcagactgtcttagagggggacaacatggaaacgcctgcctcgtcccctcagctttcacacgatgatactcattcacgcattgaacattatgctagcaggctagcagaaatggaaaacagcaatggatcttatctaaatgatagcatctctcctaatgagagcatagatgatgaacatttgttaatccagcattactgccaaagtttgaaccaggactcccccctgagccagcctcgtagtcctgcccagatcttgatttccttagagagtgaggaaagaggggagctagagagaatcctagcagatcttgaggaagaaaacaggaatctgcaagcagaatatgaccgtctaaagcagcagcacgaacataaaggcctgtccccactgccgtcccctcctgaaatgatgcccacctctccccagagtccccgggatgctgagctcattgctgaggccaagctactgcgtcaacacaaaggccgcctggaagccaggatgcaaatcctggaagaccacaataaacagctggagtcacagttacacaggctaaggcagctgctggagcaaccccaggcagaggccaaagtgaatggcacaacggtgtcctctccttctacctctctacagaggtccgacagcagtcagcctatgctgctccgagtggttggcagtcaaacttcggactccatgggtgaggaagatcttctcagtcctccccaggacacaagcacagggttagaggaggtgatggagcaactcaacaactccttccctagttcaagaggacacaatgtaggaagtcttttccacatggcagatgatttgggcagagcgatggagtccttagtatcagtcatgacagatgaagaaggagcagaataaatgttttacaactcctgattcccgcatggtttttataatattcatacaacaaagaggattagacagtaagagtttacaagaaataaatctatatttttgtgaagggtagtggtattatactgtagatttcagtagtttctaagtctgttattgttttgttaacaatggcaggttttacacgtctatgcaattgtacaaaaaagttataagaaaactacatgtaaaatcttgatagctaaataacttgccatttctttatatggaacgcattttgggttgtttaaaaatttataacagttataaagaaagattgtaaactaaagtgtgctttataaaaaaaagttgtttataaaaacccctaaaaacaaaacaaacacacacacacacacatacacacacacacacaaaactttgaggcagcgcattgttttgcatccttttggcgtgatatccatatgaaattcatggctttttctttttttgcatattaaagataagacttcctctaccaccacaccaaatgactactacacactgctcatttgagaactgtcagctgagtggggcaggcttgagttttcatttcatatatctatatgtctataagtatataaatactatagttatatagataaagagatacgaatttctatagactgactttttccattttttaaatgttcatgtcacatcctaatagaaagaaattacttctagtcagtcatccaggcttacctgcttggtctagaatggatttttcccggagccggaagccaggaggaaactacaccacactaaaacattgtctacagctccagatgtttctcattttaaacaactttccactgacaacgaaagtaaagtaaagtattggatttttttaaagggaacatgtgaatgaatacacaggacttattatatcagagtgagtaatcggttggttggttgattgattgattgattgatacattcagcttcctgctgctagcaatgccacgatttagatttaatgatgcttcagtggaaatcaatcagaaggtattctgaccttgtgaacatcagaaggtattttttaactcccaagcagtagcaggacgatgatagggctggagggctatggattcccagcccatccctgtgaaggagtaggccactctttaagtgaaggattggatgattgttcataatacataaagttctctgtaattacaactaaattattatgccctcttctcacagtcaaaaggaactgggtggtttggtttttgttgcttttttagatttattgtcccatgtgggatgagtttttaaatgccacaagacataatttaaaataaataaactttgggaaaaggtgtaagacagtagccccatcacatttgtgatactgacaggtatcaacccagaagcccatgaactgtgtttccatcctttgcatttctctgcgagtagttccacacaggtttgtaagtaagtaagaaagaaggcaaattgattcaaatgttacaaaaaaacccttcttggtggattagacaggttaaatatataaacaaacaaacaaaaattgctcaaaaaagaggagaaaagctcaagaggaaaagctaaggactggtaggaaaaagctttactctttcatgccattttatttctttttgatttttaaatcattcattcaatagataccaccgtgtgacctataattttgcaaatctgttacctctgacatcaagtgtaattagcttttggagagtgggctgacatcaagtgtaattagcttttggagagtgggttttgtccattattaataattaattaattaacatcaaacacggcttctcatgctatttctacctcactttggttttggggtgttcctgataattgtgcacacctgagttcacagcttcaccacttgtccattgcgttattttctttttcctttataattctttctttttccttcataattttcaaaagaaaacccaaagctctaaggtaacaaattaccaaattacatgaagatttggtttttgtcttgcatttttttcctttatgtgacgctggaccttttctttacccaaggatttttaaaactcagatttaaaacaaggggttactttacatcctactaagaagtttaagtaagtaagtttcattctaaaatcagaggtaaatagagtgcataaataattttgttttaatctttttgtttttcttttagacacattagctctggagtgagtctgtcataatatttgaacaaaaattgagagctttattgctgcattttaagcataattaatttggacattatttcgtgttgtgttctttataaccaccaagtattaaactgtaaatcataatgtaactgaagcataaacatcacatggcatgttttgtcattgttttcaggtactgagttcttacttgagtatcataatatattgtgttttaacaccaacactgtaacatttacgaattatttttttaaacttcagttttactgcattttcacaacatatcagacttcaccaaatatatgccttactattgtattatagtactgctttactgtgtatctcaataaagcacgcagttatgttacaaaaaagtaaaaac

SEQ ID NO: 319982 - DNA, 12569 bp, Homo sapiens
cgttaaatgcaaacgctgctctggctcatgtgtttgctccgaggtataggttttgttcgactgacgtatcagatagtcagagtggttaccacaccgacgttgtagcagctgcataataaatgactgaaagaatcatgttaggcatgcccacctaacctaacttgaatcatgcgaaaggggagctgttggaattcaaatagactttctggttcccagcagtcggcagtaatagaatgctttcaggaagatgacagaatcaggagaaagatgctgttttgcactatcttgatttgttacagcagccaacttattggcatgatggagtgacaggaaaaacagctggcatggaagatgaaagagaagatgttcaaaagaaaacattcacaaaatgggtaaatgcacaattttctaagtttgggaagcagcatattgagaacctcttcagtgacctacaggatgggaggcgcctcctagacctcctcgaaggcctgacagggcaaaaactgccaaaagaaaaaggatccacaagagttcatgccctgaacaatgtcaacaaggcactgcgggttttgcagaacaataatgttgatttagtgaatattggaagtactgacatcgtagatggaaatcataaactgactcttggtttgatttggaatataatcctccactggcaggtcaaaaatgtaatgaaaaatatcatggctggattgcaacaaaccaacagtgaaaagattctcctgagctgggtccgacaatcaactcgtaattatccacaggttaatgtaatcaacttcaccaccagctggtctgatggcctggctttgaatgctctcatccatagtcataggccagacctatttgactggaatagtgtggtttgccagcagtcagccacacaacgactggaacatgcattcaacatcgccagatatcaattaggcatagagaaactactcgatcctgaagatgttgataccacctatccagataagaagtccatcttaatgtacatcacatcactcttccaagttttgcctcaacaagtgagcattgaagccatccaggaagtggaaatgttgccaaggccacctaaagtgactaaagaagaacattttcagttacatcatcaaatgcactattctcaacagatcacggtcagtctagcacagggatatgagagaacttcttcccctaagcctcgattcaagagctatgcctacacacaggctgcttatgtcaccacctctgaccctacacggagcccatttccttcacagcatttggaagctcctgaagacaagtcatttggcagttcattgatggagagtgaagtaaacctggaccgttatcaaacagctttagaagaagtattatcgtggcttctttctgctgaggacacattgcaagcacaaggagagatttctaatgatgtggaagtggtgaaagaccagtttcatactcatgaggggtacatgatggatttgacagcccatcagggccgggttggtaatattctacaattgggaagtaagctgattggaacaggaaaattatcagaagatgaagaaactgaagtacaagagcagatgaatctcctaaattcaagatgggaatgcctcagggtagctagcatggaaaaacaaagcaatttacatagagttttaatggatctccagaatcagaaactgaaagagttgaatgactggctaacaaaaacagaagaaagaacaaggaaaatggaggaagagcctcttggacctgatcttgaagacctaaaacgccaagtacaacaacataaggtgcttcaagaagatctagaacaagaacaagtcagggtcaattctctcactcacatggtggtggtagttgatgaatctagtggagatcacgcaactgctgctttggaagaacaacttaaggtattgggagatcgatgggcaaacatctgtagatggacagaagaccgctgggttcttttacaagacatccttctcaaatggcaacgtcttactgaagaacagtgcctttttagtgcatggctttcagaaaaagaagatgcagtgaacaagattcacacaactggctttaaagatcaaaatgaaatgttatcaagtcttcaaaaactggccgttttaaaagcggatctagaaaagaaaaagcaatccatgggcaaactgtattcactcaaacaagatcttctttcaacactgaagaataagtcagtgacccagaagacggaagcatggctggataactttgcccggtgttgggataatttagtccaaaaacttgaaaagagtacagcacagatttcacaggctgtcaccaccactcagccatcactaacacagacaactgtaatggaaacagtaactacggtgaccacaagggaacagatcctggtaaagcatgctcaagaggaacttccaccaccacctccccaaaagaagaggcagattactgtggattctgaaattaggaaaaggttggatgttgatataactgaacttcacagctggattactcgctcagaagctgtgttgcagagtcctgaatttgcaatctttcggaaggaaggcaacttctcagacttaaaagaaaaagtcaatgccatagagcgagaaaaagctgagaagttcagaaaactgcaagatgccagcagatcagctcaggccctggtggaacagatggtgaatgagggtgttaatgcagatagcatcaaacaagcctcagaacaactgaacagccggtggatcgaattctgccagttgctaagtgagagacttaactggctggagtatcagaacaacatcatcgctttctataatcagctacaacaattggagcagatgacaactactgctgaaaactggttgaaaatccaacccaccaccccatcagagccaacagcaattaaaagtcagttaaaaatttgtaaggatgaagtcaaccggctatcaggtcttcaacctcaaattgaacgattaaaaattcaaagcatagccctgaaagagaaaggacaaggacccatgttcctggatgcagactttgtggcctttacaaatcattttaagcaagtcttttctgatgtgcaggccagagagaaagagctacagacaatttttgacactttgccaccaatgcgctatcaggagaccatgagtgccatcaggacatgggtccagcagtcagaaaccaaactctccatacctcaacttagtgtcaccgactatgaaatcatggagcagagactcggggaattgcaggctttacaaagttctctgcaagagcaacaaagtggcctatactatctcagcaccactgtgaaagagatgtcgaagaaagcgccctctgaaattagccggaaatatcaatcagaatttgaagaaattgagggacgctggaagaagctctcctcccagctggttgagcattgtcaaaagctagaggagcaaatgaataaactccgaaaaattcagaatcacatacaaaccctgaagaaatggatggctgaagttgatgtttttctgaaggaggaatggcctgcccttggggattcagaaattctaaaaaagcagctgaaacagtgcagacttttagtcagtgatattcagacaattcagcccagtctaaacagtgtcaatgaaggtgggcagaagataaagaatgaagcagagccagagtttgcttcgagacttgagacagaactcaaagaacttaacactcagtgggatcacatgtgccaacaggtctatgccagaaaggaggccttgaagggaggtttggagaaaactgtaagcctccagaaagatctatcagagatgcacgaatggatgacacaagctgaagaagagtatcttgagagagattttgaatataaaactccagatgaattacagaaagcagttgaagagatgaagagagctaaagaagaggcccaacaaaaagaagcgaaagtgaaactccttactgagtctgtaaatagtgtcatagctcaagctccacctgtagcacaagaggccttaaaaaaggaacttgaaactctaaccaccaactaccagtggctctgcactaggctgaatgggaaatgcaagactttggaagaagtttgggcatgttggcatgagttattgtcatacttggagaaagcaaacaagtggctaaatgaagtagaatttaaacttaaaaccactgaaaacattcctggcggagctgaggaaatctctgaggtgctagattcacttgaaaatttgatgcgacattcagaggataacccaaatcagattcgcatattggcacagaccctaacagatggcggagtcatggatgagctaatcaatgaggaacttgagacatttaattctcgttggagggaactacatgaagaggctgtaaggaggcaaaagttgcttgaacagagcatccagtctgcccaggagactgaaaaatccttacacttaatccaggagtccctcacattcattgacaagcagttggcagcttatattgcagacaaggtggacgcagctcaaatgcctcaggaagcccagaaaatccaatctgatttgacaagtcatgagatcagtttagaagaaatgaagaaacataatcaggggaaggaggctgcccaaagagtcctgtctcagattgatgttgcacagaaaaaattacaagatgtctccatgaagtttcgattattccagaaaccagccaattttgagcagcgtctacaagaaagtaagatgattttagatgaagtgaagatgcacttgcctgcattggaaacaaagagtgtggaacaggaagtagtacagtcacagctaaatcattgtgtgaacttgtataaaagtctgagtgaagtgaagtctgaagtggaaatggtgataaagactggacgtcagattgtacagaaaaagcagacggaaaatcccaaagaacttgatgaaagagtaacagctttgaaattgcattataatgagctgggagcaaaggtaacagaaagaaagcaacagttggagaaatgcttgaaattgtcccgtaagatgcgaaaggaaatgaatgtcttgacagaatggctggcagctacagatatggaattgacaaagagatcagcagttgaaggaatgcctagtaatttggattctgaagttgcctggggaaaggctactcaaaaagagattgagaaacagaaggtgcacctgaagagtatcacagaggtaggagaggccttgaaaacagttttgggcaagaaggagacgttggtggaagataaactcagtcttctgaatagtaactggatagctgtcacctcccgagcagaagagtggttaaatcttttgttggaataccagaaacacatggaaacttttgaccagaatgtggaccacatcacaaagtggatcattcaggctgacacacttttggatgaatcagagaaaaagaaaccccagcaaaaagaagacgtgcttaagcgtttaaaggcagaactgaatgacatacgcccaaaggtggactctacacgtgaccaagcagcaaacttgatggcaaaccgcggtgaccactgcaggaaattagtagagccccaaatctcagagctcaaccatcgatttgcagccatttcacacagaattaagactggaaaggcctccattcctttgaaggaattggagcagtttaactcagatatacaaaaattgcttgaaccactggaggctgaaattcagcagggggtgaatctgaaagaggaagacttcaataaagatatgaatgaagacaatgagggtactgtaaaagaattgttgcaaagaggagacaacttacaacaaagaatcacagatgagagaaagcgagaggaaataaagataaaacagcagctgttacagacaaaacataatgctctcaaggatttgaggtctcaaagaagaaaaaaggctctagaaatttctcatcagtggtatcagtacaagaggcaggctgatgatctcctgaaatgcttggatgacattgaaaaaaaattagccagcctacctgagcccagagatgaaaggaaaataaaggaaattgatcgggaattgcagaagaagaaagaggagctgaatgcagtgcgtaggcaagctgagggcttgtctgaggatggggccgcaatggcagtggagccaactcagatccagctcagcaagcgctggcgggaaattgagagcaaatttgctcagtttcgaagactcaactttgcacaaattcacactgtccgtgaagaaacgatgatggtgatgactgaagacatgcctttggaaatttcttatgtgccttctacttatttgactgaaatcactcatgtctcacaagccctattagaagtggaacaacttctcaatgctcctgacctctgtgctaaggactttgaagatctctttaagcaagaggagtctctgaagaatataaaagatagtctacaacaaagctcaggtcggattgacattattcatagcaagaagacagcagcattgcaaagtgcaacgcctgtggaaagggtgaagctacaggaagctctctcccagcttgatttccaatgggaaaaagttaacaaaatgtacaaggaccgacaagggcgatttgacagatctgttgagaaatggcggcgttttcattatgatataaagatatttaatcagtggctaacagaagctgaacagtttctcagaaagacacaaattcctgagaattgggaacatgctaaatacaaatggtatcttaaggaactccaggatggcattgggcagcggcaaactgttgtcagaacattgaatgcaactggggaagaaataattcagcaatcctcaaaaacagatgccagtattctacaggaaaaattgggaagcctgaatctgcggtggcaggaggtctgcaaacagctgtcagacagaaaaaagaggctagaagaacaaaagaatatcttgtcagaatttcaaagagatttaaatgaatttgttttatggttggaggaagcagataacattgctagtatcccacttgaacctggaaaagagcagcaactaaaagaaaagcttgagcaagtcaagttactggtggaagagttgcccctgcgccagggaattctcaaacaattaaatgaaactggaggacccgtgcttgtaagtgctcccataagcccagaagagcaagataaacttgaaaataagctcaagcagacaaatctccagtggataaaggtttccagagctttacctgagaaacaaggagaaattgaagctcaaataaaagaccttgggcagcttgaaaaaaagcttgaagaccttgaagagcagttaaatcatctgctgctgtggttatctcctattaggaatcagttggaaatttataaccaaccaaaccaagaaggaccatttgacgttcaggaaactgaaatagcagttcaagctaaacaaccggatgtggaagagattttgtctaaagggcagcatttgtacaaggaaaaaccagccactcagccagtgaagctcctactcagactgttactctggtgacacaacctgtggttactaaggaaactgccatctccaaactagaaatgccatcttccttgatgttggaggtacctgctctggcagatttcaaccgggcttggacagaacttaccgactggctttctctgcttgatcaagttataaaatcacagagggtgatggtgggtgaccttgaggatatcaacgagatgatcatcaagcagaaggcaacaatgcaggatttggaacagaggcgtccccagttggaagaactcattaccgctgcccaaaatttgaaaaacaagaccagcaatcaagaggctagaacaatcattacggatcgaattgaaagaattcagaatcagtgggatgaagtacaagaacaccttcagaaccggaggcaacagttgaatgaaatgttaaaggattcaacacaatggctggaagctaaggaagaagctgagcaggtcttaggacaggccagagccaagcttgagtcatggaaggagggtccctatacagtagatgcaatccaaaagaaaatcacagaaaccaagcagttggccaaagacctccgccagtggcagacaaatgtagatgtggcaaatgacttggccctgaaacttctccgggattattctgcagatgataccagaaaagtccacatgataacagagaatatcaatgcctcttggagaagcattcataaaagggtgagtgagcgagaggctgctttggaagaaactcatagattactgcaacagttccccctggacctggaaaagtttcttgcctggcttacagaagctgaaacaactgccaatgtcctacaggatgctacccgtaaggaaaggctcctagaagactccaagggagtaaaagagctgatgaaacaatggcaagacctccaaggtgaaattgaagctcacacagatgtttatcacaacctggatgaaaacagccaaaaaatcctgagatccctggaaggttccgatgatgcagtcctgttacaaagacgtttggataacatgaacttcaagtggagtgaacttcggaaaaagtctctcaacattaggtcccatttggaagccagttctgaccagtggaagcgtctgcacctttctctgcaggaacttctggtgtggctacagctgaaagatgatgaattaagccggcaggcacctattggaggcgactttccagcagttcagaagcagaacgatgtacatagggccttcaagagggaattgaaaactaaagaacctgtaatcatgagtactcttgagactgtacgaatatttctgacagagcagcctttggaaggactagagaaactctaccaggagcccagagagctgcctcctgaggagagagcccagaatgtcactcggcttctacgaaagcaggctgaggaggtcaatactgagtgggaaaaattgaacctgcactccgctgactggcagagaaaaatagatgagacccttgaaagactccaggaacttcaagaggccacggatgagctggacctcaagctgcgccaagctgaggtgatcaagggatcctggcagcccgtgggcgatctcctcattgactctctccaagatcacctcgagaaagtcaaggcacttcgaggagaaattgcgcctctgaaagagaacgtgagccacgtcaatgaccttgctcgccagcttaccactttgggcattcagctctcaccgtataacctcagcactctggaagacctgaacaccagatggaagcttctgcaggtggccgtcgaggaccgagtcaggcagctgcatgaagcccacagggactttggtccagcatctcagcactttctttccacgtctgtccagggtccctgggagagagccatctcgccaaacaaagtgccctactatatcaaccacgagactcaaacaacttgctgggaccatcccaaaatgacagagctctaccagtctttagctgacctgaataatgtcagattctcagcttataggactgccatgaaactccgaagactgcagaaggccctttgcttggatctcttgagcctgtcagctgcatgtgatgccttggaccagcacaacctcaagcaaaatgaccagcccatggatatcctgcagattattaattgtttgaccactatttatgaccgcctggagcaagagcacaacaatttggtcaacgtccctctctgcgtggatatgtgtctgaactggctgctgaatgtttatgatacgggacgaacagggaggatccgtgtcctgtcttttaaaactggcatcatttccctgtgtaaagcacatttggaagacaagtacagataccttttcaagcaagtggcaagttcaacaggattttgtgaccagcgcaggctgggcctccttctgcatgattctatccaaattccaagacagttgggtgaagttgcatcctttgggggcagtaacattgagccaagtgtccggagctgcttccaatttgctaataataagccagagatcgaagcggccctcttcctagactggatgagactggaaccccagtccatggtgtggctgcccgtcctgcacagagtggctgctgcagaaactgccaagcatcaggccaaatgtaacatctgcaaagagtgtccaatcattggattcaggtacaggagtctaaagcactttaattatgacatctgccaaagctgctttttttctggtcgagttgcaaaaggccataaaatgcactatcccatggtggaatattgcactccgactacatcaggagaagatgttcgagactttgccaaggtactaaaaaacaaatttcgaaccaaaaggtattttgcgaagcatccccgaatgggctacctgccagtgcagactgtcttagagggggacaacatggaaacgcctgcctcgtcccctcagctttcacacgatgatactcattcacgcattgaacattatgctagcaggctagcagaaatggaaaacagcaatggatcttatctaaatgatagcatctctcctaatgagagcatagatgatgaacatttgttaatccagcattactgccaaagtttgaaccaggactcccccctgagccagcctcgtagtcctgcccagatcttgatttccttagagagtgaggaaagaggggagctagagagaatcctagcagatcttgaggaagaaaacaggaatctgcaagcagaatatgaccgtctaaagcagcagcacgaacataaaggcctgtccccactgccgtcccctcctgaaatgatgcccacctctccccagagtccccgggatgctgagctcattgctgaggccaagctactgcgtcaacacaaaggccgcctggaagccaggatgcaaatcctggaagaccacaataaacagctggagtcacagttacacaggctaaggcagctgctggagcaaccccaggcagaggccaaagtgaatggcacaacggtgtcctctccttctacctctctacagaggtccgacagcagtcagcctatgctgctccgagtggttggcagtcaaacttcggactccatgggtgaggaagatcttctcagtcctccccaggacacaagcacagggttagaggaggtgatggagcaactcaacaactccttccctagttcaagaggacacaatgtaggaagtcttttccacatggcagatgatttgggcagagcgatggagtccttagtatcagtcatgacagatgaagaaggagcagaataaatgttttacaactcctgattcccgcatggtttttataatattcatacaacaaagaggattagacagtaagagtttacaagaaataaatctatatttttgtgaagggtagtggtattatactgtagatttcagtagtttctaagtctgttattgttttgttaacaatggcaggttttacacgtctatgcaattgtacaaaaaagttataagaaaactacatgtaaaatcttgatagctaaataacttgccatttctttatatggaacgcattttgggttgtttaaaaatttataacagttataaagaaagattgtaaactaaagtgtgctttataaaaaaaagttgtttataaaaacccctaaaaacaaaacaaacacacacacacacacatacacacacacacacaaaactttgaggcagcgcattgttttgcatccttttggcgtgatatccatatgaaattcatggctttttctttttttgcatattaaagataagacttcctctaccaccacaccaaatgactactacacactgctcatttgagaactgtcagctgagtggggcaggcttgagttttcatttcatatatctatatgtctataagtatataaatactatagttatatagataaagagatacgaatttctatagactgactttttccattttttaaatgttcatgtcacatcctaatagaaagaaattacttctagtcagtcatccaggcttacctgcttggtctagaatggatttttcccggagccggaagccaggaggaaactacaccacactaaaacattgtctacagctccagatgtttctcattttaaacaactttccactgacaacgaaagtaaagtaaagtattggatttttttaaagggaacatgtgaatgaatacacaggacttattatatcagagtgagtaatcggttggttggttgattgattgattgattgatacattcagcttcctgctgctagcaatgccacgatttagatttaatgatgcttcagtggaaatcaatcagaaggtattctgaccttgtgaacatcagaaggtattttttaactcccaagcagtagcaggacgatgatagggctggagggctatggattcccagcccatccctgtgaaggagtaggccactctttaagtgaaggattggatgattgttcataatacataaagctcactcctccactcgtacccacactcgaccgcggagcccttgcagccatgagggaacagctcaaaggccacgagactcaggtggtgtg

SEQ ID NO: 319983 - DNA, 10906 bp, Homo sapiens
cgttaaatgcaaacgctgctctggctcatgtgtttgctccgaggtataggttttgttcgactgacgtatcagatagtcagagtggttaccacaccgacgttgtagcagctgcataataaatgactgaaagaatcatgttaggcatgcccacctaacctaacttgaatcatgcgaaaggggagctgttggaattcaaatagactttctggttcccagcagtcggcagtaatagaatgctttcaggaagatgacagaatcaggagaaagatgctgttttgcactatcttgatttgttacagcagccaacttattggcatgatggagtgacaggaaaaacagctggcatggaagatgaaagagaagatgttcaaaagaaaacattcacaaaatgggtaaatgcacaattttctaagtttgggaagcagcatattgagaacctcttcagtgacctacaggatgggaggcgcctcctagacctcctcgaaggcctgacagggcaaaaactgccaaaagaaaaaggatccacaagagttcatgccctgaacaatgtcaacaaggcactgcgggttttgcagaacaataatgttgatttagtgaatattggaagtactgacatcgtagatggaaatcataaactgactcttggtttgatttggaatataatcctccactggcaggtcaaaaatgtaatgaaaaatatcatggctggattgcaacaaaccaacagtgaaaagattctcctgagctgggtccgacaatcaactcgtaattatccacaggttaatgtaatcaacttcaccaccagctggtctgatggcctggctttgaatgctctcatccatagtcataggccagacctatttgactggaatagtgtggtttgccagcagtcagccacacaacgactggaacatgcattcaacatcgccagatatcaattaggcatagagaaactactcgatcctgaagatgttgataccacctatccagataagaagtccatcttaatgtacatcacatcactcttccaagttttgcctcaacaagtgagcattgaagccatccaggaagtggaaatgttgccaaggccacctaaagtgactaaagaagaacattttcagttacatcatcaaatgcactattctcaacagatcacggtcagtctagcacagggatatgagagaacttcttcccctaagcctcgattcaagagctatgcctacacacaggctgcttatgtcaccacctctgaccctacacggagcccatttccttcacagcatttggaagctcctgaagacaagtcatttggcagttcattgatggagagtgaagtaaacctggaccgttatcaaacagctttagaagaagtattatcgtggcttctttctgctgaggacacattgcaagcacaaggagagatttctaatgatgtggaagtggtgaaagaccagtttcatactcatgaggggtacatgatggatttgacagcccatcagggccgggttggtaatattctacaattgggaagtaagctgattggaacaggaaaattatcagaagatgaagaaactgaagtacaagagcagatgaatctcctaaattcaagatgggaatgcctcagggtagctagcatggaaaaacaaagcaatttacatagagttttaatggatctccagaatcagaaactgaaagagttgaatgactggctaacaaaaacagaagaaagaacaaggaaaatggaggaagagcctcttggacctgatcttgaagacctaaaacgccaagtacaacaacataaggtgcttcaagaagatctagaacaagaacaagtcagggtcaattctctcactcacatggtggtggtagttgatgaatctagtggagatcacgcaactgctgctttggaagaacaacttaaggtattgggagatcgatgggcaaacatctgtagatggacagaagaccgctgggttcttttacaagacatccttctcaaatggcaacgtcttactgaagaacagtgcctttttagtgcatggctttcagaaaaagaagatgcagtgaacaagattcacacaactggctttaaagatcaaaatgaaatgttatcaagtcttcaaaaactggccgttttaaaagcggatctagaaaagaaaaagcaatccatgggcaaactgtattcactcaaacaagatcttctttcaacactgaagaataagtcagtgacccagaagacggaagcatggctggataactttgcccggtgttgggataatttagtccaaaaacttgaaaagagtacagcacagatttcacaggctgtcaccaccactcagccatcactaacacagacaactgtaatggaaacagtaactacggtgaccacaagggaacagatcctggtaaagcatgctcaagaggaacttccaccaccacctccccaaaagaagaggcagattactgtggattctgaaattaggaaaaggttggatgttgatataactgaacttcacagctggattactcgctcagaagctgtgttgcagagtcctgaatttgcaatctttcggaaggaaggcaacttctcagacttaaaagaaaaagtcaatgccatagagcgagaaaaagctgagaagttcagaaaactgcaagatgccagcagatcagctcaggccctggtggaacagatggtgaatgagggtgttaatgcagatagcatcaaacaagcctcagaacaactgaacagccggtggatcgaattctgccagttgctaagtgagagacttaactggctggagtatcagaacaacatcatcgctttctataatcagctacaacaattggagcagatgacaactactgctgaaaactggttgaaaatccaacccaccaccccatcagagccaacagcaattaaaagtcagttaaaaatttgtaaggatgaagtcaaccggctatcaggtcttcaacctcaaattgaacgattaaaaattcaaagcatagccctgaaagagaaaggacaaggacccatgttcctggatgcagactttgtggcctttacaaatcattttaagcaagtcttttctgatgtgcaggccagagagaaagagctacagacaatttttgacactttgccaccaatgcgctatcaggagaccatgagtgccatcaggacatgggtccagcagtcagaaaccaaactctccatacctcaacttagtgtcaccgactatgaaatcatggagcagagactcggggaattgcaggctttacaaagttctctgcaagagcaacaaagtggcctatactatctcagcaccactgtgaaagagatgtcgaagaaagcgccctctgaaattagccggaaatatcaatcagaatttgaagaaattgagggacgctggaagaagctctcctcccagctggttgagcattgtcaaaagctagaggagcaaatgaataaactccgaaaaattcagaatcacatacaaaccctgaagaaatggatggctgaagttgatgtttttctgaaggaggaatggcctgcccttggggattcagaaattctaaaaaagcagctgaaacagtgcagacttttagtcagtgatattcagacaattcagcccagtctaaacagtgtcaatgaaggtgggcagaagataaagaatgaagcagagccagagtttgcttcgagacttgagacagaactcaaagaacttaacactcagtgggatcacatgtgccaacaggtctatgccagaaaggaggccttgaagggaggtttggagaaaactgtaagcctccagaaagatctatcagagatgcacgaatggatgacacaagctgaagaagagtatcttgagagagattttgaatataaaactccagatgaattacagaaagcagttgaagagatgaagagagctaaagaagaggcccaacaaaaagaagcgaaagtgaaactccttactgagtctgtaaatagtgtcatagctcaagctccacctgtagcacaagaggccttaaaaaaggaacttgaaactctaaccaccaactaccagtggctctgcactaggctgaatgggaaatgcaagactttggaagaagtttgggcatgttggcatgagttattgtcatacttggagaaagcaaacaagtggctaaatgaagtagaatttaaacttaaaaccactgaaaacattcctggcggagctgaggaaatctctgaggtgctagattcacttgaaaatttgatgcgacattcagaggataacccaaatcagattcgcatattggcacagaccctaacagatggcggagtcatggatgagctaatcaatgaggaacttgagacatttaattctcgttggagggaactacatgaagaggctgtaaggaggcaaaagttgcttgaacagagcatccagtctgcccaggagactgaaaaatccttacacttaatccaggagtccctcacattcattgacaagcagttggcagcttatattgcagacaaggtggacgcagctcaaatgcctcaggaagcccagaaaatccaatctgatttgacaagtcatgagatcagtttagaagaaatgaagaaacataatcaggggaaggaggctgcccaaagagtcctgtctcagattgatgttgcacagaaaaaattacaagatgtctccatgaagtttcgattattccagaaaccagccaattttgagcagcgtctacaagaaagtaagatgattttagatgaagtgaagatgcacttgcctgcattggaaacaaagagtgtggaacaggaagtagtacagtcacagctaaatcattgtgtgaacttgtataaaagtctgagtgaagtgaagtctgaagtggaaatggtgataaagactggacgtcagattgtacagaaaaagcagacggaaaatcccaaagaacttgatgaaagagtaacagctttgaaattgcattataatgagctgggagcaaaggtaacagaaagaaagcaacagttggagaaatgcttgaaattgtcccgtaagatgcgaaaggaaatgaatgtcttgacagaatggctggcagctacagatatggaattgacaaagagatcagcagttgaaggaatgcctagtaatttggattctgaagttgcctggggaaaggctactcaaaaagagattgagaaacagaaggtgcacctgaagagtatcacagaggtaggagaggccttgaaaacagttttgggcaagaaggagacgttggtggaagataaactcagtcttctgaatagtaactggatagctgtcacctcccgagcagaagagtggttaaatcttttgttggaataccagaaacacatggaaacttttgaccagaatgtggaccacatcacaaagtggatcattcaggctgacacacttttggatgaatcagagaaaaagaaaccccagcaaaaagaagacgtgcttaagcgtttaaaggcagaactgaatgacatacgcccaaaggtggactctacacgtgaccaagcagcaaacttgatggcaaaccgcggtgaccactgcaggaaattagtagagccccaaatctcagagctcaaccatcgatttgcagccatttcacacagaattaagactggaaaggcctccattcctttgaaggaattggagcagtttaactcagatatacaaaaattgcttgaaccactggaggctgaaattcagcagggggtgaatctgaaagaggaagacttcaataaagatatgaatgaagacaatgagggtactgtaaaagaattgttgcaaagaggagacaacttacaacaaagaatcacagatgagagaaagcgagaggaaataaagataaaacagcagctgttacagacaaaacataatgctctcaaggatttgaggtctcaaagaagaaaaaaggctctagaaatttctcatcagtggtatcagtacaagaggcaggctgatgatctcctgaaatgcttggatgacattgaaaaaaaattagccagcctacctgagcccagagatgaaaggaaaataaaggaaattgatcgggaattgcagaagaagaaagaggagctgaatgcagtgcgtaggcaagctgagggcttgtctgaggatggggccgcaatggcagtggagccaactcagatccagctcagcaagcgctggcgggaaattgagagcaaatttgctcagtttcgaagactcaactttgcacaaattcacactgtccgtgaagaaacgatgatggtgatgactgaagacatgcctttggaaatttcttatgtgccttctacttatttgactgaaatcactcatgtctcacaagccctattagaagtggaacaacttctcaatgctcctgacctctgtgctaaggactttgaagatctctttaagcaagaggagtctctgaagaatataaaagatagtctacaacaaagctcaggtcggattgacattattcatagcaagaagacagcagcattgcaaagtgcaacgcctgtggaaagggtgaagctacaggaagctctctcccagcttgatttccaatgggaaaaagttaacaaaatgtacaaggaccgacaagggcgatttgacagatctgttgagaaatggcggcgttttcattatgatataaagatatttaatcagtggctaacagaagctgaacagtttctcagaaagacacaaattcctgagaattgggaacatgctaaatacaaatggtatcttaaggaactccaggatggcattgggcagcggcaaactgttgtcagaacattgaatgcaactggggaagaaataattcagcaatcctcaaaaacagatgccagtattctacaggaaaaattgggaagcctgaatctgcggtggcaggaggtctgcaaacagctgtcagacagaaaaaagaggctagaagaacaaaagaatatcttgtcagaatttcaaagagatttaaatgaatttgttttatggttggaggaagcagataacattgctagtatcccacttgaacctggaaaagagcagcaactaaaagaaaagcttgagcaagtcaagttactggtggaagagttgcccctgcgccagggaattctcaaacaattaaatgaaactggaggacccgtgcttgtaagtgctcccataagcccagaagagcaagataaacttgaaaataagctcaagcagacaaatctccagtggataaaggtttccagagctttacctgagaaacaaggagaaattgaagctcaaataaaagaccttgggcagcttgaaaaaaagcttgaagaccttgaagagcagttaaatcatctgctgctgtggttatctcctattaggaatcagttggaaatttataaccaaccaaaccaagaaggaccatttgacgttcaggaaactgaaatagcagttcaagctaaacaaccggatgtggaagagattttgtctaaagggcagcatttgtacaaggaaaaaccagccactcagccagtgaagctcctactcagactgttactctggtgacacaacctgtggttactaaggaaactgccatctccaaactagaaatgccatcttccttgatgttggaggtacctgctctggcagatttcaaccgggcttggacagaacttaccgactggctttctctgcttgatcaagttataaaatcacagagggtgatggtgggtgaccttgaggatatcaacgagatgatcatcaagcagaaggcaacaatgcaggatttggaacagaggcgtccccagttggaagaactcattaccgctgcccaaaatttgaaaaacaagaccagcaatcaagaggctagaacaatcattacggatcgaattgaaagaattcagaatcagtgggatgaagtacaagaacaccttcagaaccggaggcaacagttgaatgaaatgttaaaggattcaacacaatggctggaagctaaggaagaagctgagcaggtcttaggacaggccagagccaagcttgagtcatggaaggagggtccctatacagtagatgcaatccaaaagaaaatcacagaaaccaagcagttggccaaagacctccgccagtggcagacaaatgtagatgtggcaaatgacttggccctgaaacttctccgggattattctgcagatgataccagaaaagtccacatgataacagagaatatcaatgcctcttggagaagcattcataaaagggtgagtgagcgagaggctgctttggaagaaactcatagattactgcaacagttccccctggacctggaaaagtttcttgcctggcttacagaagctgaaacaactgccaatgtcctacaggatgctacccgtaaggaaaggctcctagaagactccaagggagtaaaagagctgatgaaacaatggcaagacctccaaggtgaaattgaagctcacacagatgtttatcacaacctggatgaaaacagccaaaaaatcctgagatccctggaaggttccgatgatgcagtcctgttacaaagacgtttggataacatgaacttcaagtggagtgaacttcggaaaaagtctctcaacattaggtcccatttggaagccagttctgaccagtggaagcgtctgcacctttctctgcaggaacttctggtgtggctacagctgaaagatgatgaattaagccggcaggcacctattggaggcgactttccagcagttcagaagcagaacgatgtacatagggccttcaagagggaattgaaaactaaagaacctgtaatcatgagtactcttgagactgtacgaatatttctgacagagcagcctttggaaggactagagaaactctaccaggagcccagagagctgcctcctgaggagagagcccagaatgtcactcggcttctacgaaagcaggctgaggaggtcaatactgagtgggaaaaattgaacctgcactccgctgactggcagagaaaaatagatgagacccttgaaagactccaggaacttcaagaggccacggatgagctggacctcaagctgcgccaagctgaggtgatcaagggatcctggcagcccgtgggcgatctcctcattgactctctccaagatcacctcgagaaagtcaaggcacttcgaggagaaattgcgcctctgaaagagaacgtgagccacgtcaatgaccttgctcgccagcttaccactttgggcattcagctctcaccgtataacctcagcactctggaagacctgaacaccagatggaagcttctgcaggtggccgtcgaggaccgagtcaggcagctgcatgaagcccacagggactttggtccagcatctcagcactttctttccacgtctgtccagggtccctgggagagagccatctcgccaaacaaagtgccctactatatcaaccacgagactcaaacaacttgctgggaccatcccaaaatgacagagctctaccagtctttagctgacctgaataatgtcagattctcagcttataggactgccatgaaactccgaagactgcagaaggccctttgcttggatctcttgagcctgtcagctgcatgtgatgccttggaccagcacaacctcaagcaaaatgaccagcccatggatatcctgcagattattaattgtttgaccactatttatgaccgcctggagcaagagcacaacaatttggtcaacgtccctctctgcgtggatatgtgtctgaactggctgctgaatgtttatgatacgggacgaacagggaggatccgtgtcctgtcttttaaaactggcatcatttccctgtgtaaagcacatttggaagacaagtacagataccttttcaagcaagtggcaagttcaacaggattttgtgaccagcgcaggctgggcctccttctgcatgattctatccaaattccaagacagttgggtgaagttgcatcctttgggggcagtaacattgagccaagtgtccggagctgcttccaatttgctaataataagccagagatcgaagcggccctcttcctagactggatgagactggaaccccagtccatggtgtggctgcccgtcctgcacagagtggctgctgcagaaactgccaagcatcaggccaaatgtaacatctgcaaagagtgtccaatcattggattcaggtacaggagtctaaagcactttaattatgacatctgccaaagctgctttttttctggtcgagttgcaaaaggccataaaatgcactatcccatggtggaatattgcactccgactacatcaggagaagatgttcgagactttgccaaggtactaaaaaacaaatttcgaaccaaaaggtattttgcgaagcatccccgaatgggctacctgccagtgcagactgtcttagagggggacaacatggaaacgtgagtagtagcaaaagcagaacacactcttgtttgatgtatatttgaactcctctcagctgaacaccctccttcactcccaaatgcaaacagtctcttctatttctttctttttatttacattagctgaaaagagaaaaataagctgatgtccagttgccactttcccacgtcacttgacaatttctttttccaaaagttaaactttatctcacagggggaaaaaaaaaaaaaaaccacaacacaatacagccactaattgccttacaagccttataagaaatatgggactgtttacaaatgagtgattccagtatttcattttgattttcctctctcacaaatcagtaaatgtgtgtctttttgtatctcattgtgtggtcatatctagtcacttgtttctaccaaaagaaaatatagtcacaggaaactactcacgtaagtagtaatgattctcaagatcaaaggggag

SEQ ID NO: 319984 - DNA, 8764 bp, Homo sapiens
cgttaaatgcaaacgctgctctggctcatgtgtttgctccgaggtataggttttgttcgactgacgtatcagatagtcagagtggttaccacaccgacgttgtagcagctgcataataaatgactgaaagaatcatgttaggcatgcccacctaacctaacttgaatcatgcgaaaggggagctgttggaattcaaatagactttctggttcccagcagtcggcagtaatagaatgctttcaggaagatgacagaatcaggagaaagatgctgttttgcactatcttgatttgttacagcagccaacttattggcatgatggagtgacaggaaaaacagctggcatggaagatgaaagagaagatgttcaaaagaaaacattcacaaaatgggtaaatgcacaattttctaagtttgggaagcagcatattgagaacctcttcagtgacctacaggatgggaggcgcctcctagacctcctcgaaggcctgacagggcaaaaactgccaaaagaaaaaggatccacaagagttcatgccctgaacaatgtcaacaaggcactgcgggttttgcagaacaataatgttgatttagtgaatattggaagtactgacatcgtagatggaaatcataaactgactcttggtttgatttggaatataatcctccactggcaggtcaaaaatgtaatgaaaaatatcatggctggattgcaacaaaccaacagtgaaaagattctcctgagctgggtccgacaatcaactcgtaattatccacaggttaatgtaatcaacttcaccaccagctggtctgatggcctggctttgaatgctctcatccatagtcataggccagacctatttgactggaatagtgtggtttgccagcagtcagccacacaacgactggaacatgcattcaacatcgccagatatcaattaggcatagagaaactactcgatcctgaagatgttgataccacctatccagataagaagtccatcttaatgtacatcacatcactcttccaagttttgcctcaacaagtgagcattgaagccatccaggaagtggaaatgttgccaaggccacctaaagtgactaaagaagaacattttcagttacatcatcaaatgcactattctcaacagatcacggtcagtctagcacagggatatgagagaacttcttcccctaagcctcgattcaagagctatgcctacacacaggctgcttatgtcaccacctctgaccctacacggagcccatttccttcacagcatttggaagctcctgaagacaagtcatttggcagttcattgatggagagtgaagtaaacctggaccgttatcaaacagctttagaagaagtattatcgtggcttctttctgctgaggacacattgcaagcacaaggagagatttctaatgatgtggaagtggtgaaagaccagtttcatactcatgaggggtacatgatggatttgacagcccatcagggccgggttggtaatattctacaattgggaagtaagctgattggaacaggaaaattatcagaagatgaagaaactgaagtacaagagcagatgaatctcctaaattcaagatgggaatgcctcagggtagctagcatggaaaaacaaagcaatttacatagagttttaatggatctccagaatcagaaactgaaagagttgaatgactggctaacaaaaacagaagaaagaacaaggaaaatggaggaagagcctcttggacctgatcttgaagacctaaaacgccaagtacaacaacataaggtgcttcaagaagatctagaacaagaacaagtcagggtcaattctctcactcacatggtggtggtagttgatgaatctagtggagatcacgcaactgctgctttggaagaacaacttaaggtattgggagatcgatgggcaaacatctgtagatggacagaagaccgctgggttcttttacaagacatccttctcaaatggcaacgtcttactgaagaacagtgcctttttagtgcatggctttcagaaaaagaagatgcagtgaacaagattcacacaactggctttaaagatcaaaatgaaatgttatcaagtcttcaaaaactggccgttttaaaagcggatctagaaaagaaaaagcaatccatgggcaaactgtattcactcaaacaagatcttctttcaacactgaagaataagtcagtgacccagaagacggaagcatggctggataactttgcccggtgttgggataatttagtccaaaaacttgaaaagagtacagcacagatttcacaggctgtcaccaccactcagccatcactaacacagacaactgtaatggaaacagtaactacggtgaccacaagggaacagatcctggtaaagcatgctcaagaggaacttccaccaccacctccccaaaagaagaggcagattactgtggattctgaaattaggaaaaggttggatgttgatataactgaacttcacagctggattactcgctcagaagctgtgttgcagagtcctgaatttgcaatctttcggaaggaaggcaacttctcagacttaaaagaaaaagtcaatgccatagagcgagaaaaagctgagaagttcagaaaactgcaagatgccagcagatcagctcaggccctggtggaacagatggtgaatgagggtgttaatgcagatagcatcaaacaagcctcagaacaactgaacagccggtggatcgaattctgccagttgctaagtgagagacttaactggctggagtatcagaacaacatcatcgctttctataatcagctacaacaattggagcagatgacaactactgctgaaaactggttgaaaatccaacccaccaccccatcagagccaacagcaattaaaagtcagttaaaaatttgtaaggatgaagtcaaccggctatcaggtcttcaacctcaaattgaacgattaaaaattcaaagcatagccctgaaagagaaaggacaaggacccatgttcctggatgcagactttgtggcctttacaaatcattttaagcaagtcttttctgatgtgcaggccagagagaaagagctacagacaatttttgacactttgccaccaatgcgctatcaggagaccatgagtgccatcaggacatgggtccagcagtcagaaaccaaactctccatacctcaacttagtgtcaccgactatgaaatcatggagcagagactcggggaattgcaggctttacaaagttctctgcaagagcaacaaagtggcctatactatctcagcaccactgtgaaagagatgtcgaagaaagcgccctctgaaattagccggaaatatcaatcagaatttgaagaaattgagggacgctggaagaagctctcctcccagctggttgagcattgtcaaaagctagaggagcaaatgaataaactccgaaaaattcagaatcacatacaaaccctgaagaaatggatggctgaagttgatgtttttctgaaggaggaatggcctgcccttggggattcagaaattctaaaaaagcagctgaaacagtgcagacttttagtcagtgatattcagacaattcagcccagtctaaacagtgtcaatgaaggtgggcagaagataaagaatgaagcagagccagagtttgcttcgagacttgagacagaactcaaagaacttaacactcagtgggatcacatgtgccaacaggtctatgccagaaaggaggccttgaagggaggtttggagaaaactgtaagcctccagaaagatctatcagagatgcacgaatggatgacacaagctgaagaagagtatcttgagagagattttgaatataaaactccagatgaattacagaaagcagttgaagagatgaagagagctaaagaagaggcccaacaaaaagaagcgaaagtgaaactccttactgagtctgtaaatagtgtcatagctcaagctccacctgtagcacaagaggccttaaaaaaggaacttgaaactctaaccaccaactaccagtggctctgcactaggctgaatgggaaatgcaagactttggaagaagtttgggcatgttggcatgagttattgtcatacttggagaaagcaaacaagtggctaaatgaagtagaatttaaacttaaaaccactgaaaacattcctggcggagctgaggaaatctctgaggtgctagattcacttgaaaatttgatgcgacattcagaggataacccaaatcagattcgcatattggcacagaccctaacagatggcggagtcatggatgagctaatcaatgaggaacttgagacatttaattctcgttggagggaactacatgaagaggctgtaaggaggcaaaagttgcttgaacagagcatccagtctgcccaggagactgaaaaatccttacacttaatccaggagtccctcacattcattgacaagcagttggcagcttatattgcagacaaggtggacgcagctcaaatgcctcaggaagcccagaaaatccaatctgatttgacaagtcatgagatcagtttagaagaaatgaagaaacataatcaggggaaggaggctgcccaaagagtcctgtctcagattgatgttgcacagaaaaaattacaagatgtctccatgaagtttcgattattccagaaaccagccaattttgagcagcgtctacaagaaagtaagatgattttagatgaagtgaagatgcacttgcctgcattggaaacaaagagtgtggaacaggaagtagtacagtcacagctaaatcattgtgtgaacttgtataaaagtctgagtgaagtgaagtctgaagtggaaatggtgataaagactggacgtcagattgtacagaaaaagcagacggaaaatcccaaagaacttgatgaaagagtaacagctttgaaattgcattataatgagctgggagcaaaggtaacagaaagaaagcaacagttggagaaatgcttgaaattgtcccgtaagatgcgaaaggaaatgaatgtcttgacagaatggctggcagctacagatatggaattgacaaagagatcagcagttgaaggaatgcctagtaatttggattctgaagttgcctggggaaaggctactcaaaaagagattgagaaacagaaggtgcacctgaagagtatcacagaggtaggagaggccttgaaaacagttttgggcaagaaggagacgttggtggaagataaactcagtcttctgaatagtaactggatagctgtcacctcccgagcagaagagtggttaaatcttttgttggaataccagaaacacatggaaacttttgaccagaatgtggaccacatcacaaagtggatcattcaggctgacacacttttggatgaatcagagaaaaagaaaccccagcaaaaagaagacgtgcttaagcgtttaaaggcagaactgaatgacatacgcccaaaggtggactctacacgtgaccaagcagcaaacttgatggcaaaccgcggtgaccactgcaggaaattagtagagccccaaatctcagagctcaaccatcgatttgcagccatttcacacagaattaagactggaaaggcctccattcctttgaaggaattggagcagtttaactcagatatacaaaaattgcttgaaccactggaggctgaaattcagcagggggtgaatctgaaagaggaagacttcaataaagatatgaatgaagacaatgagggtactgtaaaagaattgttgcaaagaggagacaacttacaacaaagaatcacagatgagagaaagcgagaggaaataaagataaaacagcagctgttacagacaaaacataatgctctcaaggatttgaggtctcaaagaagaaaaaaggctctagaaatttctcatcagtggtatcagtacaagaggcaggctgatgatctcctgaaatgcttggatgacattgaaaaaaaattagccagcctacctgagcccagagatgaaaggaaaataaaggaaattgatcgggaattgcagaagaagaaagaggagctgaatgcagtgcgtaggcaagctgagggcttgtctgaggatggggccgcaatggcagtggagccaactcagatccagctcagcaagcgctggcgggaaattgagagcaaatttgctcagtttcgaagactcaactttgcacaaattcacactgtccgtgaagaaacgatgatggtgatgactgaagacatgcctttggaaatttcttatgtgccttctacttatttgactgaaatcactcatgtctcacaagccctattagaagtggaacaacttctcaatgctcctgacctctgtgctaaggactttgaagatctctttaagcaagaggagtctctgaagaatataaaagatagtctacaacaaagctcaggtcggattgacattattcatagcaagaagacagcagcattgcaaagtgcaacgcctgtggaaagggtgaagctacaggaagctctctcccagcttgatttccaatgggaaaaagttaacaaaatgtacaaggaccgacaagggcgatttgacagatctgttgagaaatggcggcgttttcattatgatataaagatatttaatcagtggctaacagaagctgaacagtttctcagaaagacacaaattcctgagaattgggaacatgctaaatacaaatggtatcttaaggaactccaggatggcattgggcagcggcaaactgttgtcagaacattgaatgcaactggggaagaaataattcagcaatcctcaaaaacagatgccagtattctacaggaaaaattgggaagcctgaatctgcggtggcaggaggtctgcaaacagctgtcagacagaaaaaagaggctagaagaacaaaagaatatcttgtcagaatttcaaagagatttaaatgaatttgttttatggttggaggaagcagataacattgctagtatcccacttgaacctggaaaagagcagcaactaaaagaaaagcttgagcaagtcaagttactggtggaagagttgcccctgcgccagggaattctcaaacaattaaatgaaactggaggacccgtgcttgtaagtgctcccataagcccagaagagcaagataaacttgaaaataagctcaagcagacaaatctccagtggataaaggtttccagagctttacctgagaaacaaggagaaattgaagctcaaataaaagaccttgggcagcttgaaaaaaagcttgaagaccttgaagagcagttaaatcatctgctgctgtggttatctcctattaggaatcagttggaaatttataaccaaccaaaccaagaaggaccatttgacgttcaggaaactgaaatagcagttcaagctaaacaaccggatgtggaagagattttgtctaaagggcagcatttgtacaaggaaaaaccagccactcagccagtgaagctcctactcagactgttactctggtgacacaacctgtggttactaaggaaactgccatctccaaactagaaatgccatcttccttgatgttggaggtacctgctctggcagatttcaaccgggcttggacagaacttaccgactggctttctctgcttgatcaagttataaaatcacagagggtgatggtgggtgaccttgaggatatcaacgagatgatcatcaagcagaaggcaacaatgcaggatttggaacagaggcgtccccagttggaagaactcattaccgctgcccaaaatttgaaaaacaagaccagcaatcaagaggctagaacaatcattacggatcgaattgaaagaattcagaatcagtgggatgaagtacaagaacaccttcagaaccggaggcaacagttgaatgaaatgttaaaggattcaacacaatggctggaagctaaggaagaagctgagcaggtcttaggacaggccagagccaagcttgagtcatggaaggagggtccctatacagtagatgcaatccaaaagaaaatcacagaaaccaagcagttggccaaagacctccgccagtggcagacaaatgtagatgtggcaaatgacttggccctgaaacttctccgggattattctgcagatgataccagaaaagtccacatgataacagagaatatcaatgcctcttggagaagcattcataaaaggtatgaattacattatttctaaaactactgttggctgtaataatggggtggtgaaactggatggaccatgaggatttgtttttccaatccagctaaactggagcttgggagggttcaagacgataaataccaactaaactcacggacttggctcagacttctattttaaaaacgaggaacataagatctcatttgcccgctgtcacaaaagtagtgacataaccaagagattaaacaaaaacttgctcatggtatgaaactagagcttgaggacactgatctagtctatctatactactctttctgacagacccctctcttcattctcatgctccttgatggcccaagccactctctcagttttttaaaaaattgttttatcaaggtctctggattcttcatgggaatgacttccagtttatattttttggcttggttccaaaaagctatcagctaaggaatgcatatacttacttcccctatgggtaaagtaaatgagaattttagaagccaactcacattttta

SEQ ID NO: 319985 - DNA, 408 bp, Homo sapiens
gtgaaatatcccaaattaaacaatctttgggagggcttctaaagtaggaagggtcaaaatttatgagtcctgagtgtgtatcatattttgaaatttatacatttgtatgtttattatgaaaagtaattctgttttcttttggatgacttagccccaggcagaggccaaagtgaatggcacaacggtgtcctctccttctacctctctacagaggtccgacagcagtcagcctatgctgctccgagtggttggcagtcaaacttcggactccatgggtaagtgtcctagctactctcagattttgttgtctgaagaaaggtagagtcgtattacagggacatgaatatttggccgtaagtgtttgactcatcttggtatcagggagccactgaaaatcatataccaggc

SEQ ID NO: 319986 - DNA, 739 bp, Homo sapiens
gattctaagacgtcacataagttttaatgagcttttacgttttttatcaggctagcagaaatggaaaacagcaatggatcttatctaaatgatagcatctctcctaatgagagcatgtaagtatcccatctctttttacaaaatgttcctgacaatgaaattgctttgagggatttagaggtaggatagcacaggatataggaattagcatcatattcatttgatcttttaaggagccattcatttacttttttcctttaattcttaatgccctggcatggaatgagctcatccaaattctggcattattagtattcagagtagcaaaaatagtttgccttactcttatttgaacttatttcataccatatgattacaaattgcagagtcccaagtatttatagtaatgcttaatctttgaccaaacctgccagatatttaaagggataggatattaattttaaagtcatggctaagtactattttctccactcatggggagtggaaacgtgatcttggtatagcatggctattcacatatggtaggttagttgggcattttccttcagaaatccaaagaagtagatttttgtgatttagcatcttcacaagataaataaagtgaggcaatcttatgaagagtttccagaggagaagtaccaattcaggttgcaggttgttagcaggatgataagccaaccctgttaaactttaaggacggagatagagcggtgctaag

SEQ ID NO: 319987 - DNA, 134 bp, Homo sapiens
gaacagatcctggtaaagcatgctcaagaggaacttccaccaccacctccccaaaagaagaggcagattactgtggattctgaaattaggaaaaggtgagagcatcttaagcttttatctgcaaatgaagtgga

SEQ ID NO: 319988 - DNA, 661 bp, Homo sapiens
attggaacaggaaaattatcagaagatgaagaaactgaagtacaagagcagatgaatctcctaaattcaagatgggaatgcctcagggtagctagcatggaaaaacaaagcaagtaagtccttatttgtttttaattaagaagactaacaagttttggaagcttgtgattattttgatgtggtttgatggttaagttacgattctcagtttgttcccaaggcacacagctttctttcaagggagactggttggattttcatagaaataacattttggttttcacttttgtaactaaaagagcagatgttagatagatgcactgttatctacagaactatgttttaagatttgccaaaattctgtcatagttattattttctaggttttcctccaaacattaaaatgtcactataaaaggcacagaagcatgcacaggagattgtgtacataaaatcacctattagctatagttgacacgaaacttctcttctgaagaaaaagcccttgaaaatattaaagagttactcatctatatatggaaatcctcttgaaaaacattattcaaacgttttgggaaattcttattaaaatacagtatggctatgaattatcttaagaatatatattgacttaataaaaaagaggatttgagacatttct

SEQ ID NO: 319989 - DNA, 481 bp, Homo sapiens
agctaaataaagtctcgctcaggtgtgtagtttgcttacctttctcgtttgttggttttgttttcttttcttgtcatctagtagccaaaaagagtaatggcagtttaccaaagccttaggagtgggtagctctttggatatcagggagcatttgcagaaacaagctgtgaaaagccagcctagctttgcaaccattgttctttctatcttttctgtttaacttattaatcgaactgatatacacctcctttgccatcttgccttctttcctttcatccttttgccctccttctctctccctcctgtctttgcaggctaataataagccagagatcgaagcggccctcttcctagactggatgagactggaaccccagtccatggtgtggctgcccgtcctgcacagagtggctgctgcagaaactgccaagcatcaggccaaatgtaacatctgcaaagagtgtccaatcattggattcag

SEQ ID NO: 319990 - DNA, 14010 bp, Homo sapiens
  misc_feature (2)..(3): n is a, c, g, or t
gnntcctggcatcagttactgtgttgactcactcagtgttgggatcactcactttccccctacaggactcagatctgggaggcaattaccttcggagaaaaacgaataggaaaaactgaagtgttactttttttaaagctgctgaagtttgttggtttctcattgtttttaagcctactggagcaataaagtttgaagaacttttaccaggttttttttatcgctgccttgatatacacttttcaaaatgctttggtgggaagaagtagaggactgttatgaaagagaagatgttcaaaagaaaacattcacaaaatgggtaaatgcacaattttctaagtttgggaagcagcatattgagaacctcttcagtgacctacaggatgggaggcgcctcctagacctcctcgaaggcctgacagggcaaaaactgccaaaagaaaaaggatccacaagagttcatgccctgaacaatgtcaacaaggcactgcgggttttgcagaacaataatgttgatttagtgaatattggaagtactgacatcgtagatggaaatcataaactgactcttggtttgatttggaatataatcctccactggcaggtcaaaaatgtaatgaaaaatatcatggctggattgcaacaaaccaacagtgaaaagattctcctgagctgggtccgacaatcaactcgtaattatccacaggttaatgtaatcaacttcaccaccagctggtctgatggcctggctttgaatgctctcatccatagtcataggccagacctatttgactggaatagtgtggtttgccagcagtcagccacacaacgactggaacatgcattcaacatcgccagatatcaattaggcatagagaaactactcgatcctgaagatgttgataccacctatccagataagaagtccatcttaatgtacatcacatcactcttccaagttttgcctcaacaagtgagcattgaagccatccaggaagtggaaatgttgccaaggccacctaaagtgactaaagaagaacattttcagttacatcatcaaatgcactattctcaacagatcacggtcagtctagcacagggatatgagagaacttcttcccctaagcctcgattcaagagctatgcctacacacaggctgcttatgtcaccacctctgaccctacacggagcccatttccttcacagcatttggaagctcctgaagacaagtcatttggcagttcattgatggagagtgaagtaaacctggaccgttatcaaacagctttagaagaagtattatcgtggcttctttctgctgaggacacattgcaagcacaaggagagatttctaatgatgtggaagtggtgaaagaccagtttcatactcatgaggggtacatgatggatttgacagcccatcagggccgggttggtaatattctacaattgggaagtaagctgattggaacaggaaaattatcagaagatgaagaaactgaagtacaagagcagatgaatctcctaaattcaagatgggaatgcctcagggtagctagcatggaaaaacaaagcaatttacatagagttttaatggatctccagaatcagaaactgaaagagttgaatgactggctaacaaaaacagaagaaagaacaaggaaaatggaggaagagcctcttggacctgatcttgaagacctaaaacgccaagtacaacaacataaggtgcttcaagaagatctagaacaagaacaagtcagggtcaattctctcactcacatggtggtggtagttgatgaatctagtggagatcacgcaactgctgctttggaagaacaacttaaggtattgggagatcgatgggcaaacatctgtagatggacagaagaccgctgggttcttttacaagacatccttctcaaatggcaacgtcttactgaagaacagtgcctttttagtgcatggctttcagaaaaagaagatgcagtgaacaagattcacacaactggctttaaagatcaaaatgaaatgttatcaagtcttcaaaaactggccgttttaaaagcggatctagaaaagaaaaagcaatccatgggcaaactgtattcactcaaacaagatcttctttcaacactgaagaataagtcagtgacccagaagacggaagcatggctggataactttgcccggtgttgggataatttagtccaaaaacttgaaaagagtacagcacagatttcacaggctgtcaccaccactcagccatcactaacacagacaactgtaatggaaacagtaactacggtgaccacaagggaacagatcctggtaaagcatgctcaagaggaacttccaccaccacctccccaaaagaagaggcagattactgtggattctgaaattaggaaaaggttggatgttgatataactgaacttcacagctggattactcgctcagaagctgtgttgcagagtcctgaatttgcaatctttcggaaggaaggcaacttctcagacttaaaagaaaaagtcaatgccatagagcgagaaaaagctgagaagttcagaaaactgcaagatgccagcagatcagctcaggccctggtggaacagatggtgaatgagggtgttaatgcagatagcatcaaacaagcctcagaacaactgaacagccggtggatcgaattctgccagttgctaagtgagagacttaactggctggagtatcagaacaacatcatcgctttctataatcagctacaacaattggagcagatgacaactactgctgaaaactggttgaaaatccaacccaccaccccatcagagccaacagcaattaaaagtcagttaaaaatttgtaaggatgaagtcaaccggctatcaggtcttcaacctcaaattgaacgattaaaaattcaaagcatagccctgaaagagaaaggacaaggacccatgttcctggatgcagactttgtggcctttacaaatcattttaagcaagtcttttctgatgtgcaggccagagagaaagagctacagacaatttttgacactttgccaccaatgcgctatcaggagaccatgagtgccatcaggacatgggtccagcagtcagaaaccaaactctccatacctcaacttagtgtcaccgactatgaaatcatggagcagagactcggggaattgcaggctttacaaagttctctgcaagagcaacaaagtggcctatactatctcagcaccactgtgaaagagatgtcgaagaaagcgccctctgaaattagccggaaatatcaatcagaatttgaagaaattgagggacgctggaagaagctctcctcccagctggttgagcattgtcaaaagctagaggagcaaatgaataaactccgaaaaattcagaatcacatacaaaccctgaagaaatggatggctgaagttgatgtttttctgaaggaggaatggcctgcccttggggattcagaaattctaaaaaagcagctgaaacagtgcagacttttagtcagtgatattcagacaattcagcccagtctaaacagtgtcaatgaaggtgggcagaagataaagaatgaagcagagccagagtttgcttcgagacttgagacagaactcaaagaacttaacactcagtgggatcacatgtgccaacaggtctatgccagaaaggaggccttgaagggaggtttggagaaaactgtaagcctccagaaagatctatcagagatgcacgaatggatgacacaagctgaagaagagtatcttgagagagattttgaatataaaactccagatgaattacagaaagcagttgaagagatgaagagagctaaagaagaggcccaacaaaaagaagcgaaagtgaaactccttactgagtctgtaaatagtgtcatagctcaagctccacctgtagcacaagaggccttaaaaaaggaacttgaaactctaaccaccaactaccagtggctctgcactaggctgaatgggaaatgcaagactttggaagaagtttgggcatgttggcatgagttattgtcatacttggagaaagcaaacaagtggctaaatgaagtagaatttaaacttaaaaccactgaaaacattcctggcggagctgaggaaatctctgaggtgctagattcacttgaaaatttgatgcgacattcagaggataacccaaatcagattcgcatattggcacagaccctaacagatggcggagtcatggatgagctaatcaatgaggaacttgagacatttaattctcgttggagggaactacatgaagaggctgtaaggaggcaaaagttgcttgaacagagcatccagtctgcccaggagactgaaaaatccttacacttaatccaggagtccctcacattcattgacaagcagttggcagcttatattgcagacaaggtggacgcagctcaaatgcctcaggaagcccagaaaatccaatctgatttgacaagtcatgagatcagtttagaagaaatgaagaaacataatcaggggaaggaggctgcccaaagagtcctgtctcagattgatgttgcacagaaaaaattacaagatgtctccatgaagtttcgattattccagaaaccagccaattttgagcagcgtctacaagaaagtaagatgattttagatgaagtgaagatgcacttgcctgcattggaaacaaagagtgtggaacaggaagtagtacagtcacagctaaatcattgtgtgaacttgtataaaagtctgagtgaagtgaagtctgaagtggaaatggtgataaagactggacgtcagattgtacagaaaaagcagacggaaaatcccaaagaacttgatgaaagagtaacagctttgaaattgcattataatgagctgggagcaaaggtaacagaaagaaagcaacagttggagaaatgcttgaaattgtcccgtaagatgcgaaaggaaatgaatgtcttgacagaatggctggcagctacagatatggaattgacaaagagatcagcagttgaaggaatgcctagtaatttggattctgaagttgcctggggaaaggctactcaaaaagagattgagaaacagaaggtgcacctgaagagtatcacagaggtaggagaggccttgaaaacagttttgggcaagaaggagacgttggtggaagataaactcagtcttctgaatagtaactggatagctgtcacctcccgagcagaagagtggttaaatcttttgttggaataccagaaacacatggaaacttttgaccagaatgtggaccacatcacaaagtggatcattcaggctgacacacttttggatgaatcagagaaaaagaaaccccagcaaaaagaagacgtgcttaagcgtttaaaggcagaactgaatgacatacgcccaaaggtggactctacacgtgaccaagcagcaaacttgatggcaaaccgcggtgaccactgcaggaaattagtagagccccaaatctcagagctcaaccatcgatttgcagccatttcacacagaattaagactggaaaggcctccattcctttgaaggaattggagcagtttaactcagatatacaaaaattgcttgaaccactggaggctgaaattcagcagggggtgaatctgaaagaggaagacttcaataaagatatgaatgaagacaatgagggtactgtaaaagaattgttgcaaagaggagacaacttacaacaaagaatcacagatgagagaaagcgagaggaaataaagataaaacagcagctgttacagacaaaacataatgctctcaaggatttgaggtctcaaagaagaaaaaaggctctagaaatttctcatcagtggtatcagtacaagaggcaggctgatgatctcctgaaatgcttggatgacattgaaaaaaaattagccagcctacctgagcccagagatgaaaggaaaataaaggaaattgatcgggaattgcagaagaagaaagaggagctgaatgcagtgcgtaggcaagctgagggcttgtctgaggatggggccgcaatggcagtggagccaactcagatccagctcagcaagcgctggcgggaaattgagagcaaatttgctcagtttcgaagactcaactttgcacaaattcacactgtccgtgaagaaacgatgatggtgatgactgaagacatgcctttggaaatttcttatgtgccttctacttatttgactgaaatcactcatgtctcacaagccctattagaagtggaacaacttctcaatgctcctgacctctgtgctaaggactttgaagatctctttaagcaagaggagtctctgaagaatataaaagatagtctacaacaaagctcaggtcggattgacattattcatagcaagaagacagcagcattgcaaagtgcaacgcctgtggaaagggtgaagctacaggaagctctctcccagcttgatttccaatgggaaaaagttaacaaaatgtacaaggaccgacaagggcgatttgacagatctgttgagaaatggcggcgttttcattatgatataaagatatttaatcagtggctaacagaagctgaacagtttctcagaaagacacaaattcctgagaattgggaacatgctaaatacaaatggtatcttaaggaactccaggatggcattgggcagcggcaaactgttgtcagaacattgaatgcaactggggaagaaataattcagcaatcctcaaaaacagatgccagtattctacaggaaaaattgggaagcctgaatctgcggtggcaggaggtctgcaaacagctgtcagacagaaaaaagaggctagaagaacaaaagaatatcttgtcagaatttcaaagagatttaaatgaatttgttttatggttggaggaagcagataacattgctagtatcccacttgaacctggaaaagagcagcaactaaaagaaaagcttgagcaagtcaagttactggtggaagagttgcccctgcgccagggaattctcaaacaattaaatgaaactggaggacccgtgcttgtaagtgctcccataagcccagaagagcaagataaacttgaaaataagctcaagcagacaaatctccagtggataaaggtttccagagctttacctgagaaacaaggagaaattgaagctcaaataaaagaccttgggcagcttgaaaaaaagcttgaagaccttgaagagcagttaaatcatctgctgctgtggttatctcctattaggaatcagttggaaatttataaccaaccaaaccaagaaggaccatttgacgttcaggaaactgaaatagcagttcaagctaaacaaccggatgtggaagagattttgtctaaagggcagcatttgtacaaggaaaaaccagccactcagccagtgaagaggaagttagaagatctgagctctgagtggaaggcggtaaaccgtttacttcaagagctgagggcaaagcagcctgacctagctcctggactgaccactattggagcctctcctactcagactgttactctggtgacacaacctgtggttactaaggaaactgccatctccaaactagaaatgccatcttccttgatgttggaggtacctgctctggcagatttcaaccgggcttggacagaacttaccgactggctttctctgcttgatcaagttataaaatcacagagggtgatggtgggtgaccttgaggatatcaacgagatgatcatcaagcagaaggcaacaatgcaggatttggaacagaggcgtccccagttggaagaactcattaccgctgcccaaaatttgaaaaacaagaccagcaatcaagaggctagaacaatcattacggatcgaattgaaagaattcagaatcagtgggatgaagtacaagaacaccttcagaaccggaggcaacagttgaatgaaatgttaaaggattcaacacaatggctggaagctaaggaagaagctgagcaggtcttaggacaggccagagccaagcttgagtcatggaaggagggtccctatacagtagatgcaatccaaaagaaaatcacagaaaccaagcagttggccaaagacctccgccagtggcagacaaatgtagatgtggcaaatgacttggccctgaaacttctccgggattattctgcagatgataccagaaaagtccacatgataacagagaatatcaatgcctcttggagaagcattcataaaagggtgagtgagcgagaggctgctttggaagaaactcatagattactgcaacagttccccctggacctggaaaagtttcttgcctggcttacagaagctgaaacaactgccaatgtcctacaggatgctacccgtaaggaaaggctcctagaagactccaagggagtaaaagagctgatgaaacaatggcaagacctccaaggtgaaattgaagctcacacagatgtttatcacaacctggatgaaaacagccaaaaaatcctgagatccctggaaggttccgatgatgcagtcctgttacaaagacgtttggataacatgaacttcaagtggagtgaacttcggaaaaagtctctcaacattaggtcccatttggaagccagttctgaccagtggaagcgtctgcacctttctctgcaggaacttctggtgtggctacagctgaaagatgatgaattaagccggcaggcacctattggaggcgactttccagcagttcagaagcagaacgatgtacatagggccttcaagagggaattgaaaactaaagaacctgtaatcatgagtactcttgagactgtacgaatatttctgacagagcagcctttggaaggactagagaaactctaccaggagcccagagagctgcctcctgaggagagagcccagaatgtcactcggcttctacgaaagcaggctgaggaggtcaatactgagtgggaaaaattgaacctgcactccgctgactggcagagaaaaatagatgagacccttgaaagactccaggaacttcaagaggccacggatgagctggacctcaagctgcgccaagctgaggtgatcaagggatcctggcagcccgtgggcgatctcctcattgactctctccaagatcacctcgagaaagtcaaggcacttcgaggagaaattgcgcctctgaaagagaacgtgagccacgtcaatgaccttgctcgccagcttaccactttgggcattcagctctcaccgtataacctcagcactctggaagacctgaacaccagatggaagcttctgcaggtggccgtcgaggaccgagtcaggcagctgcatgaagcccacagggactttggtccagcatctcagcactttctttccacgtctgtccagggtccctgggagagagccatctcgccaaacaaagtgccctactatatcaaccacgagactcaaacaacttgctgggaccatcccaaaatgacagagctctaccagtctttagctgacctgaataatgtcagattctcagcttataggactgccatgaaactccgaagactgcagaaggccctttgcttggatctcttgagcctgtcagctgcatgtgatgccttggaccagcacaacctcaagcaaaatgaccagcccatggatatcctgcagattattaattgtttgaccactatttatgaccgcctggagcaagagcacaacaatttggtcaacgtccctctctgcgtggatatgtgtctgaactggctgctgaatgtttatgatacgggacgaacagggaggatccgtgtcctgtcttttaaaactggcatcatttccctgtgtaaagcacatttggaagacaagtacagataccttttcaagcaagtggcaagttcaacaggattttgtgaccagcgcaggctgggcctccttctgcatgattctatccaaattccaagacagttgggtgaagttgcatcctttgggggcagtaacattgagccaagtgtccggagctgcttccaatttgctaataataagccagagatcgaagcggccctcttcctagactggatgagactggaaccccagtccatggtgtggctgcccgtcctgcacagagtggctgctgcagaaactgccaagcatcaggccaaatgtaacatctgcaaagagtgtccaatcattggattcaggtacaggagtctaaagcactttaattatgacatctgccaaagctgctttttttctggtcgagttgcaaaaggccataaaatgcactatcccatggtggaatattgcactccgactacatcaggagaagatgttcgagactttgccaaggtactaaaaaacaaatttcgaaccaaaaggtattttgcgaagcatccccgaatgggctacctgccagtgcagactgtcttagagggggacaacatggaaactcccgttactctgatcaacttctggccagtagattctgcgcctgcctcgtcccctcagctttcacacgatgatactcattcacgcattgaacattatgctagcaggctagcagaaatggaaaacagcaatggatcttatctaaatgatagcatctctcctaatgagagcatagatgatgaacatttgttaatccagcattactgccaaagtttgaaccaggactcccccctgagccagcctcgtagtcctgcccagatcttgatttccttagagagtgaggaaagaggggagctagagagaatcctagcagatcttgaggaagaaaacaggaatctgcaagcagaatatgaccgtctaaagcagcagcacgaacataaaggcctgtccccactgccgtcccctcctgaaatgatgcccacctctccccagagtccccgggatgctgagctcattgctgaggccaagctactgcgtcaacacaaaggccgcctggaagccaggatgcaaatcctggaagaccacaataaacagctggagtcacagttacacaggctaaggcagctgctggagcaaccccaggcagaggccaaagtgaatggcacaacggtgtcctctccttctacctctctacagaggtccgacagcagtcagcctatgctgctccgagtggttggcagtcaaacttcggactccatgggtgaggaagatcttctcagtcctccccaggacacaagcacagggttagaggaggtgatggagcaactcaacaactccttccctagttcaagaggaagaaatacccctggaaagccaatgagagaggacacaatgtaggaagtcttttccacatggcagatgatttgggcagagcgatggagtccttagtatcagtcatgacagatgaagaaggagcagaataaatgttttacaactcctgattcccgcatggtttttataatattcatacaacaaagaggattagacagtaagagtttacaagaaataaatctatatttttgtgaagggtagtggtattatactgtagatttcagtagtttctaagtctgttattgttttgttaacaatggcaggttttacacgtctatgcaattgtacaaaaaagttataagaaaactacatgtaaaatcttgatagctaaataacttgccatttctttatatggaacgcattttgggttgtttaaaaatttataacagttataaagaaagattgtaaactaaagtgtgctttataaaaaaaagttgtttataaaaacccctaaaaacaaaacaaacacacacacacacacatacacacacacacacaaaactttgaggcagcgcattgttttgcatccttttggcgtgatatccatatgaaattcatggctttttctttttttgcatattaaagataagacttcctctaccaccacaccaaatgactactacacactgctcatttgagaactgtcagctgagtggggcaggcttgagttttcatttcatatatctatatgtctataagtatataaatactatagttatatagataaagagatacgaatttctatagactgactttttccattttttaaatgttcatgtcacatcctaatagaaagaaattacttctagtcagtcatccaggcttacctgcttggtctagaatggatttttcccggagccggaagccaggaggaaactacaccacactaaaacattgtctacagctccagatgtttctcattttaaacaactttccactgacaacgaaagtaaagtaaagtattggatttttttaaagggaacatgtgaatgaatacacaggacttattatatcagagtgagtaatcggttggttggttgattgattgattgattgatacattcagcttcctgctgctagcaatgccacgatttagatttaatgatgcttcagtggaaatcaatcagaaggtattctgaccttgtgaacatcagaaggtattttttaactcccaagcagtagcaggacgatgatagggctggagggctatggattcccagcccatccctgtgaaggagtaggccactctttaagtgaaggattggatgattgttcataatacataaagttctctgtaattacaactaaattattatgccctcttctcacagtcaaaaggaactgggtggtttggtttttgttgcttttttagatttattgtcccatgtgggatgagtttttaaatgccacaagacataatttaaaataaataaactttgggaaaaggtgtaagacagtagccccatcacatttgtgatactgacaggtatcaacccagaagcccatgaactgtgtttccatcctttgcatttctctgcgagtagttccacacaggtttgtaagtaagtaagaaagaaggcaaattgattcaaatgttacaaaaaaacccttcttggtggattagacaggttaaatatataaacaaacaaacaaaaattgctcaaaaaagaggagaaaagctcaagaggaaaagctaaggactggtaggaaaaagctttactctttcatgccattttatttctttttgatttttaaatcattcattcaatagataccaccgtgtgacctataattttgcaaatctgttacctctgacatcaagtgtaattagcttttggagagtgggctgacatcaagtgtaattagcttttggagagtgggttttgtccattattaataattaattaattaacatcaaacacggcttctcatgctatttctacctcactttggttttggggtgttcctgataattgtgcacacctgagttcacagcttcaccacttgtccattgcgttattttctttttcctttataattctttctttttccttcataattttcaaaagaaaacccaaagctctaaggtaacaaattaccaaattacatgaagatttggtttttgtcttgcatttttttcctttatgtgacgctggaccttttctttacccaaggatttttaaaactcagatttaaaacaaggggttactttacatcctactaagaagtttaagtaagtaagtttcattctaaaatcagaggtaaatagagtgcataaataattttgttttaatctttttgtttttcttttagacacattagctctggagtgagtctgtcataatatttgaacaaaaattgagagctttattgctgcattttaagcataattaatttggacattatttcgtgttgtgttctttataaccaccaagtattaaactgtaaatcataatgtaactgaagcataaacatcacatggcatgttttgtcattgttttcaggtactgagttcttacttgagtatcataatatattgtgttttaacaccaacactgtaacatttacgaattatttttttaaacttcagttttactgcattttcacaacatatcagacttcaccaaatatatgccttactattgtattatagtactgctttactgtgtatctcaataaagcacgcagttatgttacaaaaaagtaaaaac

SEQ ID NO: 319991 - DNA, 14096 bp, Homo sapiens
atgctgtctgtgaagctgaatctgtgagaacacctcactattcacggcaaccggagtggaagaaacaggtgcaaaaagattgtgtgtttgtctgcttttgtgaggctggtcagagattctgtgcctgctttatctgtgcttggctatgactctacctccaggtttaccataccccatagaatgtgtaagagaaaagtaccaacagggaaatcagcaaaaagctttcctatgaaggtgtgtagccagcctccgcagaatttgaaatgtctgaggtttcttctggtgagtaaaagctgcagataatcaacagccattcagaagaatgataaatgccacaagcatttggaaacaggcttccctaaagatgaaagagaagatgttcaaaagaaaacattcacaaaatgggtaaatgcacaattttctaagtttgggaagcagcatattgagaacctcttcagtgacctacaggatgggaggcgcctcctagacctcctcgaaggcctgacagggcaaaaactgccaaaagaaaaaggatccacaagagttcatgccctgaacaatgtcaacaaggcactgcgggttttgcagaacaataatgttgatttagtgaatattggaagtactgacatcgtagatggaaatcataaactgactcttggtttgatttggaatataatcctccactggcaggtcaaaaatgtaatgaaaaatatcatggctggattgcaacaaaccaacagtgaaaagattctcctgagctgggtccgacaatcaactcgtaattatccacaggttaatgtaatcaacttcaccaccagctggtctgatggcctggctttgaatgctctcatccatagtcataggccagacctatttgactggaatagtgtggtttgccagcagtcagccacacaacgactggaacatgcattcaacatcgccagatatcaattaggcatagagaaactactcgatcctgaagatgttgataccacctatccagataagaagtccatcttaatgtacatcacatcactcttccaagttttgcctcaacaagtgagcattgaagccatccaggaagtggaaatgttgccaaggccacctaaagtgactaaagaagaacattttcagttacatcatcaaatgcactattctcaacagatcacggtcagtctagcacagggatatgagagaacttcttcccctaagcctcgattcaagagctatgcctacacacaggctgcttatgtcaccacctctgaccctacacggagcccatttccttcacagcatttggaagctcctgaagacaagtcatttggcagttcattgatggagagtgaagtaaacctggaccgttatcaaacagctttagaagaagtattatcgtggcttctttctgctgaggacacattgcaagcacaaggagagatttctaatgatgtggaagtggtgaaagaccagtttcatactcatgaggggtacatgatggatttgacagcccatcagggccgggttggtaatattctacaattgggaagtaagctgattggaacaggaaaattatcagaagatgaagaaactgaagtacaagagcagatgaatctcctaaattcaagatgggaatgcctcagggtagctagcatggaaaaacaaagcaatttacatagagttttaatggatctccagaatcagaaactgaaagagttgaatgactggctaacaaaaacagaagaaagaacaaggaaaatggaggaagagcctcttggacctgatcttgaagacctaaaacgccaagtacaacaacataaggtgcttcaagaagatctagaacaagaacaagtcagggtcaattctctcactcacatggtggtggtagttgatgaatctagtggagatcacgcaactgctgctttggaagaacaacttaaggtattgggagatcgatgggcaaacatctgtagatggacagaagaccgctgggttcttttacaagacatccttctcaaatggcaacgtcttactgaagaacagtgcctttttagtgcatggctttcagaaaaagaagatgcagtgaacaagattcacacaactggctttaaagatcaaaatgaaatgttatcaagtcttcaaaaactggccgttttaaaagcggatctagaaaagaaaaagcaatccatgggcaaactgtattcactcaaacaagatcttctttcaacactgaagaataagtcagtgacccagaagacggaagcatggctggataactttgcccggtgttgggataatttagtccaaaaacttgaaaagagtacagcacagatttcacaggctgtcaccaccactcagccatcactaacacagacaactgtaatggaaacagtaactacggtgaccacaagggaacagatcctggtaaagcatgctcaagaggaacttccaccaccacctccccaaaagaagaggcagattactgtggattctgaaattaggaaaaggttggatgttgatataactgaacttcacagctggattactcgctcagaagctgtgttgcagagtcctgaatttgcaatctttcggaaggaaggcaacttctcagacttaaaagaaaaagtcaatgccatagagcgagaaaaagctgagaagttcagaaaactgcaagatgccagcagatcagctcaggccctggtggaacagatggtgaatgagggtgttaatgcagatagcatcaaacaagcctcagaacaactgaacagccggtggatcgaattctgccagttgctaagtgagagacttaactggctggagtatcagaacaacatcatcgctttctataatcagctacaacaattggagcagatgacaactactgctgaaaactggttgaaaatccaacccaccaccccatcagagccaacagcaattaaaagtcagttaaaaatttgtaaggatgaagtcaaccggctatcaggtcttcaacctcaaattgaacgattaaaaattcaaagcatagccctgaaagagaaaggacaaggacccatgttcctggatgcagactttgtggcctttacaaatcattttaagcaagtcttttctgatgtgcaggccagagagaaagagctacagacaatttttgacactttgccaccaatgcgctatcaggagaccatgagtgccatcaggacatgggtccagcagtcagaaaccaaactctccatacctcaacttagtgtcaccgactatgaaatcatggagcagagactcggggaattgcaggctttacaaagttctctgcaagagcaacaaagtggcctatactatctcagcaccactgtgaaagagatgtcgaagaaagcgccctctgaaattagccggaaatatcaatcagaatttgaagaaattgagggacgctggaagaagctctcctcccagctggttgagcattgtcaaaagctagaggagcaaatgaataaactccgaaaaattcagaatcacatacaaaccctgaagaaatggatggctgaagttgatgtttttctgaaggaggaatggcctgcccttggggattcagaaattctaaaaaagcagctgaaacagtgcagacttttagtcagtgatattcagacaattcagcccagtctaaacagtgtcaatgaaggtgggcagaagataaagaatgaagcagagccagagtttgcttcgagacttgagacagaactcaaagaacttaacactcagtgggatcacatgtgccaacaggtctatgccagaaaggaggccttgaagggaggtttggagaaaactgtaagcctccagaaagatctatcagagatgcacgaatggatgacacaagctgaagaagagtatcttgagagagattttgaatataaaactccagatgaattacagaaagcagttgaagagatgaagagagctaaagaagaggcccaacaaaaagaagcgaaagtgaaactccttactgagtctgtaaatagtgtcatagctcaagctccacctgtagcacaagaggccttaaaaaaggaacttgaaactctaaccaccaactaccagtggctctgcactaggctgaatgggaaatgcaagactttggaagaagtttgggcatgttggcatgagttattgtcatacttggagaaagcaaacaagtggctaaatgaagtagaatttaaacttaaaaccactgaaaacattcctggcggagctgaggaaatctctgaggtgctagattcacttgaaaatttgatgcgacattcagaggataacccaaatcagattcgcatattggcacagaccctaacagatggcggagtcatggatgagctaatcaatgaggaacttgagacatttaattctcgttggagggaactacatgaagaggctgtaaggaggcaaaagttgcttgaacagagcatccagtctgcccaggagactgaaaaatccttacacttaatccaggagtccctcacattcattgacaagcagttggcagcttatattgcagacaaggtggacgcagctcaaatgcctcaggaagcccagaaaatccaatctgatttgacaagtcatgagatcagtttagaagaaatgaagaaacataatcaggggaaggaggctgcccaaagagtcctgtctcagattgatgttgcacagaaaaaattacaagatgtctccatgaagtttcgattattccagaaaccagccaattttgagcagcgtctacaagaaagtaagatgattttagatgaagtgaagatgcacttgcctgcattggaaacaaagagtgtggaacaggaagtagtacagtcacagctaaatcattgtgtgaacttgtataaaagtctgagtgaagtgaagtctgaagtggaaatggtgataaagactggacgtcagattgtacagaaaaagcagacggaaaatcccaaagaacttgatgaaagagtaacagctttgaaattgcattataatgagctgggagcaaaggtaacagaaagaaagcaacagttggagaaatgcttgaaattgtcccgtaagatgcgaaaggaaatgaatgtcttgacagaatggctggcagctacagatatggaattgacaaagagatcagcagttgaaggaatgcctagtaatttggattctgaagttgcctggggaaaggctactcaaaaagagattgagaaacagaaggtgcacctgaagagtatcacagaggtaggagaggccttgaaaacagttttgggcaagaaggagacgttggtggaagataaactcagtcttctgaatagtaactggatagctgtcacctcccgagcagaagagtggttaaatcttttgttggaataccagaaacacatggaaacttttgaccagaatgtggaccacatcacaaagtggatcattcaggctgacacacttttggatgaatcagagaaaaagaaaccccagcaaaaagaagacgtgcttaagcgtttaaaggcagaactgaatgacatacgcccaaaggtggactctacacgtgaccaagcagcaaacttgatggcaaaccgcggtgaccactgcaggaaattagtagagccccaaatctcagagctcaaccatcgatttgcagccatttcacacagaattaagactggaaaggcctccattcctttgaaggaattggagcagtttaactcagatatacaaaaattgcttgaaccactggaggctgaaattcagcagggggtgaatctgaaagaggaagacttcaataaagatatgaatgaagacaatgagggtactgtaaaagaattgttgcaaagaggagacaacttacaacaaagaatcacagatgagagaaagcgagaggaaataaagataaaacagcagctgttacagacaaaacataatgctctcaaggatttgaggtctcaaagaagaaaaaaggctctagaaatttctcatcagtggtatcagtacaagaggcaggctgatgatctcctgaaatgcttggatgacattgaaaaaaaattagccagcctacctgagcccagagatgaaaggaaaataaaggaaattgatcgggaattgcagaagaagaaagaggagctgaatgcagtgcgtaggcaagctgagggcttgtctgaggatggggccgcaatggcagtggagccaactcagatccagctcagcaagcgctggcgggaaattgagagcaaatttgctcagtttcgaagactcaactttgcacaaattcacactgtccgtgaagaaacgatgatggtgatgactgaagacatgcctttggaaatttcttatgtgccttctacttatttgactgaaatcactcatgtctcacaagccctattagaagtggaacaacttctcaatgctcctgacctctgtgctaaggactttgaagatctctttaagcaagaggagtctctgaagaatataaaagatagtctacaacaaagctcaggtcggattgacattattcatagcaagaagacagcagcattgcaaagtgcaacgcctgtggaaagggtgaagctacaggaagctctctcccagcttgatttccaatgggaaaaagttaacaaaatgtacaaggaccgacaagggcgatttgacagatctgttgagaaatggcggcgttttcattatgatataaagatatttaatcagtggctaacagaagctgaacagtttctcagaaagacacaaattcctgagaattgggaacatgctaaatacaaatggtatcttaaggaactccaggatggcattgggcagcggcaaactgttgtcagaacattgaatgcaactggggaagaaataattcagcaatcctcaaaaacagatgccagtattctacaggaaaaattgggaagcctgaatctgcggtggcaggaggtctgcaaacagctgtcagacagaaaaaagaggctagaagaacaaaagaatatcttgtcagaatttcaaagagatttaaatgaatttgttttatggttggaggaagcagataacattgctagtatcccacttgaacctggaaaagagcagcaactaaaagaaaagcttgagcaagtcaagttactggtggaagagttgcccctgcgccagggaattctcaaacaattaaatgaaactggaggacccgtgcttgtaagtgctcccataagcccagaagagcaagataaacttgaaaataagctcaagcagacaaatctccagtggataaaggtttccagagctttacctgagaaacaaggagaaattgaagctcaaataaaagaccttgggcagcttgaaaaaaagcttgaagaccttgaagagcagttaaatcatctgctgctgtggttatctcctattaggaatcagttggaaatttataaccaaccaaaccaagaaggaccatttgacgttcaggaaactgaaatagcagttcaagctaaacaaccggatgtggaagagattttgtctaaagggcagcatttgtacaaggaaaaaccagccactcagccagtgaagaggaagttagaagatctgagctctgagtggaaggcggtaaaccgtttacttcaagagctgagggcaaagcagcctgacctagctcctggactgaccactattggagcctctcctactcagactgttactctggtgacacaacctgtggttactaaggaaactgccatctccaaactagaaatgccatcttccttgatgttggaggtacctgctctggcagatttcaaccgggcttggacagaacttaccgactggctttctctgcttgatcaagttataaaatcacagagggtgatggtgggtgaccttgaggatatcaacgagatgatcatcaagcagaaggcaacaatgcaggatttggaacagaggcgtccccagttggaagaactcattaccgctgcccaaaatttgaaaaacaagaccagcaatcaagaggctagaacaatcattacggatcgaattgaaagaattcagaatcagtgggatgaagtacaagaacaccttcagaaccggaggcaacagttgaatgaaatgttaaaggattcaacacaatggctggaagctaaggaagaagctgagcaggtcttaggacaggccagagccaagcttgagtcatggaaggagggtccctatacagtagatgcaatccaaaagaaaatcacagaaaccaagcagttggccaaagacctccgccagtggcagacaaatgtagatgtggcaaatgacttggccctgaaacttctccgggattattctgcagatgataccagaaaagtccacatgataacagagaatatcaatgcctcttggagaagcattcataaaagggtgagtgagcgagaggctgctttggaagaaactcatagattactgcaacagttccccctggacctggaaaagtttcttgcctggcttacagaagctgaaacaactgccaatgtcctacaggatgctacccgtaaggaaaggctcctagaagactccaagggagtaaaagagctgatgaaacaatggcaagacctccaaggtgaaattgaagctcacacagatgtttatcacaacctggatgaaaacagccaaaaaatcctgagatccctggaaggttccgatgatgcagtcctgttacaaagacgtttggataacatgaacttcaagtggagtgaacttcggaaaaagtctctcaacattaggtcccatttggaagccagttctgaccagtggaagcgtctgcacctttctctgcaggaacttctggtgtggctacagctgaaagatgatgaattaagccggcaggcacctattggaggcgactttccagcagttcagaagcagaacgatgtacatagggccttcaagagggaattgaaaactaaagaacctgtaatcatgagtactcttgagactgtacgaatatttctgacagagcagcctttggaaggactagagaaactctaccaggagcccagagagctgcctcctgaggagagagcccagaatgtcactcggcttctacgaaagcaggctgaggaggtcaatactgagtgggaaaaattgaacctgcactccgctgactggcagagaaaaatagatgagacccttgaaagactccaggaacttcaagaggccacggatgagctggacctcaagctgcgccaagctgaggtgatcaagggatcctggcagcccgtgggcgatctcctcattgactctctccaagatcacctcgagaaagtcaaggcacttcgaggagaaattgcgcctctgaaagagaacgtgagccacgtcaatgaccttgctcgccagcttaccactttgggcattcagctctcaccgtataacctcagcactctggaagacctgaacaccagatggaagcttctgcaggtggccgtcgaggaccgagtcaggcagctgcatgaagcccacagggactttggtccagcatctcagcactttctttccacgtctgtccagggtccctgggagagagccatctcgccaaacaaagtgccctactatatcaaccacgagactcaaacaacttgctgggaccatcccaaaatgacagagctctaccagtctttagctgacctgaataatgtcagattctcagcttataggactgccatgaaactccgaagactgcagaaggccctttgcttggatctcttgagcctgtcagctgcatgtgatgccttggaccagcacaacctcaagcaaaatgaccagcccatggatatcctgcagattattaattgtttgaccactatttatgaccgcctggagcaagagcacaacaatttggtcaacgtccctctctgcgtggatatgtgtctgaactggctgctgaatgtttatgatacgggacgaacagggaggatccgtgtcctgtcttttaaaactggcatcatttccctgtgtaaagcacatttggaagacaagtacagataccttttcaagcaagtggcaagttcaacaggattttgtgaccagcgcaggctgggcctccttctgcatgattctatccaaattccaagacagttgggtgaagttgcatcctttgggggcagtaacattgagccaagtgtccggagctgcttccaatttgctaataataagccagagatcgaagcggccctcttcctagactggatgagactggaaccccagtccatggtgtggctgcccgtcctgcacagagtggctgctgcagaaactgccaagcatcaggccaaatgtaacatctgcaaagagtgtccaatcattggattcaggtacaggagtctaaagcactttaattatgacatctgccaaagctgctttttttctggtcgagttgcaaaaggccataaaatgcactatcccatggtggaatattgcactccgactacatcaggagaagatgttcgagactttgccaaggtactaaaaaacaaatttcgaaccaaaaggtattttgcgaagcatccccgaatgggctacctgccagtgcagactgtcttagagggggacaacatggaaactcccgttactctgatcaacttctggccagtagattctgcgcctgcctcgtcccctcagctttcacacgatgatactcattcacgcattgaacattatgctagcaggctagcagaaatggaaaacagcaatggatcttatctaaatgatagcatctctcctaatgagagcatagatgatgaacatttgttaatccagcattactgccaaagtttgaaccaggactcccccctgagccagcctcgtagtcctgcccagatcttgatttccttagagagtgaggaaagaggggagctagagagaatcctagcagatcttgaggaagaaaacaggaatctgcaagcagaatatgaccgtctaaagcagcagcacgaacataaaggcctgtccccactgccgtcccctcctgaaatgatgcccacctctccccagagtccccgggatgctgagctcattgctgaggccaagctactgcgtcaacacaaaggccgcctggaagccaggatgcaaatcctggaagaccacaataaacagctggagtcacagttacacaggctaaggcagctgctggagcaaccccaggcagaggccaaagtgaatggcacaacggtgtcctctccttctacctctctacagaggtccgacagcagtcagcctatgctgctccgagtggttggcagtcaaacttcggactccatgggtgaggaagatcttctcagtcctccccaggacacaagcacagggttagaggaggtgatggagcaactcaacaactccttccctagttcaagaggaagaaatacccctggaaagccaatgagagaggacacaatgtaggaagtcttttccacatggcagatgatttgggcagagcgatggagtccttagtatcagtcatgacagatgaagaaggagcagaataaatgttttacaactcctgattcccgcatggtttttataatattcatacaacaaagaggattagacagtaagagtttacaagaaataaatctatatttttgtgaagggtagtggtattatactgtagatttcagtagtttctaagtctgttattgttttgttaacaatggcaggttttacacgtctatgcaattgtacaaaaaagttataagaaaactacatgtaaaatcttgatagctaaataacttgccatttctttatatggaacgcattttgggttgtttaaaaatttataacagttataaagaaagattgtaaactaaagtgtgctttataaaaaaaagttgtttataaaaacccctaaaaacaaaacaaacacacacacacacacatacacacacacacacaaaactttgaggcagcgcattgttttgcatccttttggcgtgatatccatatgaaattcatggctttttctttttttgcatattaaagataagacttcctctaccaccacaccaaatgactactacacactgctcatttgagaactgtcagctgagtggggcaggcttgagttttcatttcatatatctatatgtctataagtatataaatactatagttatatagataaagagatacgaatttctatagactgactttttccattttttaaatgttcatgtcacatcctaatagaaagaaattacttctagtcagtcatccaggcttacctgcttggtctagaatggatttttcccggagccggaagccaggaggaaactacaccacactaaaacattgtctacagctccagatgtttctcattttaaacaactttccactgacaacgaaagtaaagtaaagtattggatttttttaaagggaacatgtgaatgaatacacaggacttattatatcagagtgagtaatcggttggttggttgattgattgattgattgatacattcagcttcctgctgctagcaatgccacgatttagatttaatgatgcttcagtggaaatcaatcagaaggtattctgaccttgtgaacatcagaaggtattttttaactcccaagcagtagcaggacgatgatagggctggagggctatggattcccagcccatccctgtgaaggagtaggccactctttaagtgaaggattggatgattgttcataatacataaagttctctgtaattacaactaaattattatgccctcttctcacagtcaaaaggaactgggtggtttggtttttgttgcttttttagatttattgtcccatgtgggatgagtttttaaatgccacaagacataatttaaaataaataaactttgggaaaaggtgtaagacagtagccccatcacatttgtgatactgacaggtatcaacccagaagcccatgaactgtgtttccatcctttgcatttctctgcgagtagttccacacaggtttgtaagtaagtaagaaagaaggcaaattgattcaaatgttacaaaaaaacccttcttggtggattagacaggttaaatatataaacaaacaaacaaaaattgctcaaaaaagaggagaaaagctcaagaggaaaagctaaggactggtaggaaaaagctttactctttcatgccattttatttctttttgatttttaaatcattcattcaatagataccaccgtgtgacctataattttgcaaatctgttacctctgacatcaagtgtaattagcttttggagagtgggctgacatcaagtgtaattagcttttggagagtgggttttgtccattattaataattaattaattaacatcaaacacggcttctcatgctatttctacctcactttggttttggggtgttcctgataattgtgcacacctgagttcacagcttcaccacttgtccattgcgttattttctttttcctttataattctttctttttccttcataattttcaaaagaaaacccaaagctctaaggtaacaaattaccaaattacatgaagatttggtttttgtcttgcatttttttcctttatgtgacgctggaccttttctttacccaaggatttttaaaactcagatttaaaacaaggggttactttacatcctactaagaagtttaagtaagtaagtttcattctaaaatcagaggtaaatagagtgcataaataattttgttttaatctttttgtttttcttttagacacattagctctggagtgagtctgtcataatatttgaacaaaaattgagagctttattgctgcattttaagcataattaatttggacattatttcgtgttgtgttctttataaccaccaagtattaaactgtaaatcataatgtaactgaagcataaacatcacatggcatgttttgtcattgttttcaggtactgagttcttacttgagtatcataatatattgtgttttaacaccaacactgtaacatttacgaattatttttttaaacttcagttttactgcattttcacaacatatcagacttcaccaaatatatgccttactattgtattatagtactgctttactgtgtatctcaataaagcacgcagttatgttacaaaaaagtaaaaac

SEQ ID NO: 319992 - DNA, 9930 bp, Homo sapiens
gttcaagagatcaggaggaacattcgacctgagaaagacagattgcaatgactgagattattttgctaattttttttccagcctatttccttaatgtacgtgatattgtgattgattttcatgcagagatccctgatcctatagttttgtttgctatttatttttctccttcacattttttttctatcaacagagctgaatgagtgccaggaagctgcgaaatctgtcttacaaaaaggctgtaaggaggcaaaagttgcttgaacagagcatccagtctgcccaggagactgaaaaatccttacacttaatccaggagtccctcacattcattgacaagcagttggcagcttatattgcagacaaggtggacgcagctcaaatgcctcaggaagcccagaaaatccaatctgatttgacaagtcatgagatcagtttagaagaaatgaagaaacataatcaggggaaggaggctgcccaaagagtcctgtctcagattgatgttgcacagaaaaaattacaagatgtctccatgaagtttcgattattccagaaaccagccaattttgagcagcgtctacaagaaagtaagatgattttagatgaagtgaagatgcacttgcctgcattggaaacaaagagtgtggaacaggaagtagtacagtcacagctaaatcattgtgtgaacttgtataaaagtctgagtgaagtgaagtctgaagtggaaatggtgataaagactggacgtcagattgtacagaaaaagcagacggaaaatcccaaagaacttgatgaaagagtaacagctttgaaattgcattataatgagctgggagcaaaggtaacagaaagaaagcaacagttggagaaatgcttgaaattgtcccgtaagatgcgaaaggaaatgaatgtcttgacagaatggctggcagctacagatatggaattgacaaagagatcagcagttgaaggaatgcctagtaatttggattctgaagttgcctggggaaaggctactcaaaaagagattgagaaacagaaggtgcacctgaagagtatcacagaggtaggagaggccttgaaaacagttttgggcaagaaggagacgttggtggaagataaactcagtcttctgaatagtaactggatagctgtcacctcccgagcagaagagtggttaaatcttttgttggaataccagaaacacatggaaacttttgaccagaatgtggaccacatcacaaagtggatcattcaggctgacacacttttggatgaatcagagaaaaagaaaccccagcaaaaagaagacgtgcttaagcgtttaaaggcagaactgaatgacatacgcccaaaggtggactctacacgtgaccaagcagcaaacttgatggcaaaccgcggtgaccactgcaggaaattagtagagccccaaatctcagagctcaaccatcgatttgcagccatttcacacagaattaagactggaaaggcctccattcctttgaaggaattggagcagtttaactcagatatacaaaaattgcttgaaccactggaggctgaaattcagcagggggtgaatctgaaagaggaagacttcaataaagatatgaatgaagacaatgagggtactgtaaaagaattgttgcaaagaggagacaacttacaacaaagaatcacagatgagagaaagcgagaggaaataaagataaaacagcagctgttacagacaaaacataatgctctcaaggatttgaggtctcaaagaagaaaaaaggctctagaaatttctcatcagtggtatcagtacaagaggcaggctgatgatctcctgaaatgcttggatgacattgaaaaaaaattagccagcctacctgagcccagagatgaaaggaaaataaaggaaattgatcgggaattgcagaagaagaaagaggagctgaatgcagtgcgtaggcaagctgagggcttgtctgaggatggggccgcaatggcagtggagccaactcagatccagctcagcaagcgctggcgggaaattgagagcaaatttgctcagtttcgaagactcaactttgcacaaattcacactgtccgtgaagaaacgatgatggtgatgactgaagacatgcctttggaaatttcttatgtgccttctacttatttgactgaaatcactcatgtctcacaagccctattagaagtggaacaacttctcaatgctcctgacctctgtgctaaggactttgaagatctctttaagcaagaggagtctctgaagaatataaaagatagtctacaacaaagctcaggtcggattgacattattcatagcaagaagacagcagcattgcaaagtgcaacgcctgtggaaagggtgaagctacaggaagctctctcccagcttgatttccaatgggaaaaagttaacaaaatgtacaaggaccgacaagggcgatttgacagatctgttgagaaatggcggcgttttcattatgatataaagatatttaatcagtggctaacagaagctgaacagtttctcagaaagacacaaattcctgagaattgggaacatgctaaatacaaatggtatcttaaggaactccaggatggcattgggcagcggcaaactgttgtcagaacattgaatgcaactggggaagaaataattcagcaatcctcaaaaacagatgccagtattctacaggaaaaattgggaagcctgaatctgcggtggcaggaggtctgcaaacagctgtcagacagaaaaaagaggctagaagaacaaaagaatatcttgtcagaatttcaaagagatttaaatgaatttgttttatggttggaggaagcagataacattgctagtatcccacttgaacctggaaaagagcagcaactaaaagaaaagcttgagcaagtcaagttactggtggaagagttgcccctgcgccagggaattctcaaacaattaaatgaaactggaggacccgtgcttgtaagtgctcccataagcccagaagagcaagataaacttgaaaataagctcaagcagacaaatctccagtggataaaggtttccagagctttacctgagaaacaaggagaaattgaagctcaaataaaagaccttgggcagcttgaaaaaaagcttgaagaccttgaagagcagttaaatcatctgctgctgtggttatctcctattaggaatcagttggaaatttataaccaaccaaaccaagaaggaccatttgacgttcaggaaactgaaatagcagttcaagctaaacaaccggatgtggaagagattttgtctaaagggcagcatttgtacaaggaaaaaccagccactcagccagtgaagaggaagttagaagatctgagctctgagtggaaggcggtaaaccgtttacttcaagagctgagggcaaagcagcctgacctagctcctggactgaccactattggagcctctcctactcagactgttactctggtgacacaacctgtggttactaaggaaactgccatctccaaactagaaatgccatcttccttgatgttggaggtacctgctctggcagatttcaaccgggcttggacagaacttaccgactggctttctctgcttgatcaagttataaaatcacagagggtgatggtgggtgaccttgaggatatcaacgagatgatcatcaagcagaaggcaacaatgcaggatttggaacagaggcgtccccagttggaagaactcattaccgctgcccaaaatttgaaaaacaagaccagcaatcaagaggctagaacaatcattacggatcgaattgaaagaattcagaatcagtgggatgaagtacaagaacaccttcagaaccggaggcaacagttgaatgaaatgttaaaggattcaacacaatggctggaagctaaggaagaagctgagcaggtcttaggacaggccagagccaagcttgagtcatggaaggagggtccctatacagtagatgcaatccaaaagaaaatcacagaaaccaagcagttggccaaagacctccgccagtggcagacaaatgtagatgtggcaaatgacttggccctgaaacttctccgggattattctgcagatgataccagaaaagtccacatgataacagagaatatcaatgcctcttggagaagcattcataaaagggtgagtgagcgagaggctgctttggaagaaactcatagattactgcaacagttccccctggacctggaaaagtttcttgcctggcttacagaagctgaaacaactgccaatgtcctacaggatgctacccgtaaggaaaggctcctagaagactccaagggagtaaaagagctgatgaaacaatggcaagacctccaaggtgaaattgaagctcacacagatgtttatcacaacctggatgaaaacagccaaaaaatcctgagatccctggaaggttccgatgatgcagtcctgttacaaagacgtttggataacatgaacttcaagtggagtgaacttcggaaaaagtctctcaacattaggtcccatttggaagccagttctgaccagtggaagcgtctgcacctttctctgcaggaacttctggtgtggctacagctgaaagatgatgaattaagccggcaggcacctattggaggcgactttccagcagttcagaagcagaacgatgtacatagggccttcaagagggaattgaaaactaaagaacctgtaatcatgagtactcttgagactgtacgaatatttctgacagagcagcctttggaaggactagagaaactctaccaggagcccagagagctgcctcctgaggagagagcccagaatgtcactcggcttctacgaaagcaggctgaggaggtcaatactgagtgggaaaaattgaacctgcactccgctgactggcagagaaaaatagatgagacccttgaaagactccaggaacttcaagaggccacggatgagctggacctcaagctgcgccaagctgaggtgatcaagggatcctggcagcccgtgggcgatctcctcattgactctctccaagatcacctcgagaaagtcaaggcacttcgaggagaaattgcgcctctgaaagagaacgtgagccacgtcaatgaccttgctcgccagcttaccactttgggcattcagctctcaccgtataacctcagcactctggaagacctgaacaccagatggaagcttctgcaggtggccgtcgaggaccgagtcaggcagctgcatgaagcccacagggactttggtccagcatctcagcactttctttccacgtctgtccagggtccctgggagagagccatctcgccaaacaaagtgccctactatatcaaccacgagactcaaacaacttgctgggaccatcccaaaatgacagagctctaccagtctttagctgacctgaataatgtcagattctcagcttataggactgccatgaaactccgaagactgcagaaggccctttgcttggatctcttgagcctgtcagctgcatgtgatgccttggaccagcacaacctcaagcaaaatgaccagcccatggatatcctgcagattattaattgtttgaccactatttatgaccgcctggagcaagagcacaacaatttggtcaacgtccctctctgcgtggatatgtgtctgaactggctgctgaatgtttatgatacgggacgaacagggaggatccgtgtcctgtcttttaaaactggcatcatttccctgtgtaaagcacatttggaagacaagtacagataccttttcaagcaagtggcaagttcaacaggattttgtgaccagcgcaggctgggcctccttctgcatgattctatccaaattccaagacagttgggtgaagttgcatcctttgggggcagtaacattgagccaagtgtccggagctgcttccaatttgctaataataagccagagatcgaagcggccctcttcctagactggatgagactggaaccccagtccatggtgtggctgcccgtcctgcacagagtggctgctgcagaaactgccaagcatcaggccaaatgtaacatctgcaaagagtgtccaatcattggattcaggtacaggagtctaaagcactttaattatgacatctgccaaagctgctttttttctggtcgagttgcaaaaggccataaaatgcactatcccatggtggaatattgcactccgactacatcaggagaagatgttcgagactttgccaaggtactaaaaaacaaatttcgaaccaaaaggtattttgcgaagcatccccgaatgggctacctgccagtgcagactgtcttagagggggacaacatggaaactcccgttactctgatcaacttctggccagtagattctgcgcctgcctcgtcccctcagctttcacacgatgatactcattcacgcattgaacattatgctagcaggctagcagaaatggaaaacagcaatggatcttatctaaatgatagcatctctcctaatgagagcatagatgatgaacatttgttaatccagcattactgccaaagtttgaaccaggactcccccctgagccagcctcgtagtcctgcccagatcttgatttccttagagagtgaggaaagaggggagctagagagaatcctagcagatcttgaggaagaaaacaggaatctgcaagcagaatatgaccgtctaaagcagcagcacgaacataaaggcctgtccccactgccgtcccctcctgaaatgatgcccacctctccccagagtccccgggatgctgagctcattgctgaggccaagctactgcgtcaacacaaaggccgcctggaagccaggatgcaaatcctggaagaccacaataaacagctggagtcacagttacacaggctaaggcagctgctggagcaaccccaggcagaggccaaagtgaatggcacaacggtgtcctctccttctacctctctacagaggtccgacagcagtcagcctatgctgctccgagtggttggcagtcaaacttcggactccatgggtgaggaagatcttctcagtcctccccaggacacaagcacagggttagaggaggtgatggagcaactcaacaactccttccctagttcaagaggaagaaatacccctggaaagccaatgagagaggacacaatgtaggaagtcttttccacatggcagatgatttgggcagagcgatggagtccttagtatcagtcatgacagatgaagaaggagcagaataaatgttttacaactcctgattcccgcatggtttttataatattcatacaacaaagaggattagacagtaagagtttacaagaaataaatctatatttttgtgaagggtagtggtattatactgtagatttcagtagtttctaagtctgttattgttttgttaacaatggcaggttttacacgtctatgcaattgtacaaaaaagttataagaaaactacatgtaaaatcttgatagctaaataacttgccatttctttatatggaacgcattttgggttgtttaaaaatttataacagttataaagaaagattgtaaactaaagtgtgctttataaaaaaaagttgtttataaaaacccctaaaaacaaaacaaacacacacacacacacatacacacacacacacaaaactttgaggcagcgcattgttttgcatccttttggcgtgatatccatatgaaattcatggctttttctttttttgcatattaaagataagacttcctctaccaccacaccaaatgactactacacactgctcatttgagaactgtcagctgagtggggcaggcttgagttttcatttcatatatctatatgtctataagtatataaatactatagttatatagataaagagatacgaatttctatagactgactttttccattttttaaatgttcatgtcacatcctaatagaaagaaattacttctagtcagtcatccaggcttacctgcttggtctagaatggatttttcccggagccggaagccaggaggaaactacaccacactaaaacattgtctacagctccagatgtttctcattttaaacaactttccactgacaacgaaagtaaagtaaagtattggatttttttaaagggaacatgtgaatgaatacacaggacttattatatcagagtgagtaatcggttggttggttgattgattgattgattgatacattcagcttcctgctgctagcaatgccacgatttagatttaatgatgcttcagtggaaatcaatcagaaggtattctgaccttgtgaacatcagaaggtattttttaactcccaagcagtagcaggacgatgatagggctggagggctatggattcccagcccatccctgtgaaggagtaggccactctttaagtgaaggattggatgattgttcataatacataaagttctctgtaattacaactaaattattatgccctcttctcacagtcaaaaggaactgggtggtttggtttttgttgcttttttagatttattgtcccatgtgggatgagtttttaaatgccacaagacataatttaaaataaataaactttgggaaaaggtgtaagacagtagccccatcacatttgtgatactgacaggtatcaacccagaagcccatgaactgtgtttccatcctttgcatttctctgcgagtagttccacacaggtttgtaagtaagtaagaaagaaggcaaattgattcaaatgttacaaaaaaacccttcttggtggattagacaggttaaatatataaacaaacaaacaaaaattgctcaaaaaagaggagaaaagctcaagaggaaaagctaaggactggtaggaaaaagctttactctttcatgccattttatttctttttgatttttaaatcattcattcaatagataccaccgtgtgacctataattttgcaaatctgttacctctgacatcaagtgtaattagcttttggagagtgggctgacatcaagtgtaattagcttttggagagtgggttttgtccattattaataattaattaattaacatcaaacacggcttctcatgctatttctacctcactttggttttggggtgttcctgataattgtgcacacctgagttcacagcttcaccacttgtccattgcgttattttctttttcctttataattctttctttttccttcataattttcaaaagaaaacccaaagctctaaggtaacaaattaccaaattacatgaagatttggtttttgtcttgcatttttttcctttatgtgacgctggaccttttctttacccaaggatttttaaaactcagatttaaaacaaggggttactttacatcctactaagaagtttaagtaagtaagtttcattctaaaatcagaggtaaatagagtgcataaataattttgttttaatctttttgtttttcttttagacacattagctctggagtgagtctgtcataatatttgaacaaaaattgagagctttattgctgcattttaagcataattaatttggacattatttcgtgttgtgttctttataaccaccaagtattaaactgtaaatcataatgtaactgaagcataaacatcacatggcatgttttgtcattgttttcaggtactgagttcttacttgagtatcataatatattgtgttttaacaccaacactgtaacatttacgaattatttttttaaacttcagttttactgcattttcacaacatatcagacttcaccaaatatatgccttactattgtattatagtactgctttactgtgtatctcaataaagcacgcagttatgttacaaaaaagtaaaaac

SEQ ID NO: 319993 - DNA, 4617 bp, Homo sapiens
ctccgcagtgctttcagctgtgagcttgggcggcggcggcggcggcgctccactttcggggagcccggcggctctgggaagctcactcctccactcgtacccacactcgaccgcggagcccttgcagccatgagggaacagctcaaaggccacgagactcaaacaacttgctgggaccatcccaaaatgacagagctctaccagtctttagctgacctgaataatgtcagattctcagcttataggactgccatgaaactccgaagactgcagaaggccctttgcttggatctcttgagcctgtcagctgcatgtgatgccttggaccagcacaacctcaagcaaaatgaccagcccatggatatcctgcagattattaattgtttgaccactatttatgaccgcctggagcaagagcacaacaatttggtcaacgtccctctctgcgtggatatgtgtctgaactggctgctgaatgtttatgatacgggacgaacagggaggatccgtgtcctgtcttttaaaactggcatcatttccctgtgtaaagcacatttggaagacaagtacagataccttttcaagcaagtggcaagttcaacaggattttgtgaccagcgcaggctgggcctccttctgcatgattctatccaaattccaagacagttgggtgaagttgcatcctttgggggcagtaacattgagccaagtgtccggagctgcttccaatttgctaataataagccagagatcgaagcggccctcttcctagactggatgagactggaaccccagtccatggtgtggctgcccgtcctgcacagagtggctgctgcagaaactgccaagcatcaggccaaatgtaacatctgcaaagagtgtccaatcattggattcaggtacaggagtctaaagcactttaattatgacatctgccaaagctgctttttttctggtcgagttgcaaaaggccataaaatgcactatcccatggtggaatattgcactccgactacatcaggagaagatgttcgagactttgccaaggtactaaaaaacaaatttcgaaccaaaaggtattttgcgaagcatccccgaatgggctacctgccagtgcagactgtcttagagggggacaacatggaaacgcctgcctcgtcccctcagctttcacacgatgatactcattcacgcattgaacattatgctagcaggctagcagaaatggaaaacagcaatggatcttatctaaatgatagcatctctcctaatgagagcatagatgatgaacatttgttaatccagcattactgccaaagtttgaaccaggactcccccctgagccagcctcgtagtcctgcccagatcttgatttccttagagagtgaggaaagaggggagctagagagaatcctagcagatcttgaggaagaaaacaggaatctgcaagcagaatatgaccgtctaaagcagcagcacgaacataaaggcctgtccccactgccgtcccctcctgaaatgatgcccacctctccccagagtccccgggatgctgagctcattgctgaggccaagctactgcgtcaacacaaaggccgcctggaagccaggatgcaaatcctggaagaccacaataaacagctggagtcacagttacacaggctaaggcagctgctggagcaaccccaggcagaggccaaagtgaatggcacaacggtgtcctctccttctacctctctacagaggtccgacagcagtcagcctatgctgctccgagtggttggcagtcaaacttcggactccatgggtgaggaagatcttctcagtcctccccaggacacaagcacagggttagaggaggtgatggagcaactcaacaactccttccctagttcaagaggacacaatgtaggaagtcttttccacatggcagatgatttgggcagagcgatggagtccttagtatcagtcatgacagatgaagaaggagcagaataaatgttttacaactcctgattcccgcatggtttttataatattcatacaacaaagaggattagacagtaagagtttacaagaaataaatctatatttttgtgaagggtagtggtattatactgtagatttcagtagtttctaagtctgttattgttttgttaacaatggcaggttttacacgtctatgcaattgtacaaaaaagttataagaaaactacatgtaaaatcttgatagctaaataacttgccatttctttatatggaacgcattttgggttgtttaaaaatttataacagttataaagaaagattgtaaactaaagtgtgctttataaaaaaaagttgtttataaaaacccctaaaaacaaaacaaacacacacacacacacatacacacacacacacaaaactttgaggcagcgcattgttttgcatccttttggcgtgatatccatatgaaattcatggctttttctttttttgcatattaaagataagacttcctctaccaccacaccaaatgactactacacactgctcatttgagaactgtcagctgagtggggcaggcttgagttttcatttcatatatctatatgtctataagtatataaatactatagttatatagataaagagatacgaatttctatagactgactttttccattttttaaatgttcatgtcacatcctaatagaaagaaattacttctagtcagtcatccaggcttacctgcttggtctagaatggatttttcccggagccggaagccaggaggaaactacaccacactaaaacattgtctacagctccagatgtttctcattttaaacaactttccactgacaacgaaagtaaagtaaagtattggatttttttaaagggaacatgtgaatgaatacacaggacttattatatcagagtgagtaatcggttggttggttgattgattgattgattgatacattcagcttcctgctgctagcaatgccacgatttagatttaatgatgcttcagtggaaatcaatcagaaggtattctgaccttgtgaacatcagaaggtattttttaactcccaagcagtagcaggacgatgatagggctggagggctatggattcccagcccatccctgtgaaggagtaggccactctttaagtgaaggattggatgattgttcataatacataaagttctctgtaattacaactaaattattatgccctcttctcacagtcaaaaggaactgggtggtttggtttttgttgcttttttagatttattgtcccatgtgggatgagtttttaaatgccacaagacataatttaaaataaataaactttgggaaaaggtgtaagacagtagccccatcacatttgtgatactgacaggtatcaacccagaagcccatgaactgtgtttccatcctttgcatttctctgcgagtagttccacacaggtttgtaagtaagtaagaaagaaggcaaattgattcaaatgttacaaaaaaacccttcttggtggattagacaggttaaatatataaacaaacaaacaaaaattgctcaaaaaagaggagaaaagctcaagaggaaaagctaaggactggtaggaaaaagctttactctttcatgccattttatttctttttgatttttaaatcattcattcaatagataccaccgtgtgacctataattttgcaaatctgttacctctgacatcaagtgtaattagcttttggagagtgggctgacatcaagtgtaattagcttttggagagtgggttttgtccattattaataattaattaattaacatcaaacacggcttctcatgctatttctacctcactttggttttggggtgttcctgataattgtgcacacctgagttcacagcttcaccacttgtccattgcgttattttctttttcctttataattctttctttttccttcataattttcaaaagaaaacccaaagctctaaggtaacaaattaccaaattacatgaagatttggtttttgtcttgcatttttttcctttatgtgacgctggaccttttctttacccaaggatttttaaaactcagatttaaaacaaggggttactttacatcctactaagaagtttaagtaagtaagtttcattctaaaatcagaggtaaatagagtgcataaataattttgttttaatctttttgtttttcttttagacacattagctctggagtgagtctgtcataatatttgaacaaaaattgagagctttattgctgcattttaagcataattaatttggacattatttcgtgttgtgttctttataaccaccaagtattaaactgtaaatcataatgtaactgaagcataaacatcacatggcatgttttgtcattgttttcaggtactgagttcttacttgagtatcataatatattgtgttttaacaccaacactgtaacatttacgaattatttttttaaacttcagttttactgcattttcacaacatatcagacttcaccaaatatatgccttactattgtattatagtactgctttactgtgtatctcaataaagcacgcagttatgttacaaaaaagtaaaaac

SEQ ID NO: 319994 - DNA, 7392 bp, Homo sapiens
acactagcaatggcaaagctttgtgcggaggcattgctggctgctctgaactaaaagcatccgtggggaccgaaagaggtttttgcacaccttattaaggaactccaggatggcattgggcagcggcaaactgttgtcagaacattgaatgcaactggggaagaaataattcagcaatcctcaaaaacagatgccagtattctacaggaaaaattgggaagcctgaatctgcggtggcaggaggtctgcaaacagctgtcagacagaaaaaagaggctagaagaacaaaagaatatcttgtcagaatttcaaagagatttaaatgaatttgttttatggttggaggaagcagataacattgctagtatcccacttgaacctggaaaagagcagcaactaaaagaaaagcttgagcaagtcaagttactggtggaagagttgcccctgcgccagggaattctcaaacaattaaatgaaactggaggacccgtgcttgtaagtgctcccataagcccagaagagcaagataaacttgaaaataagctcaagcagacaaatctccagtggataaaggtttccagagctttacctgagaaacaaggagaaattgaagctcaaataaaagaccttgggcagcttgaaaaaaagcttgaagaccttgaagagcagttaaatcatctgctgctgtggttatctcctattaggaatcagttggaaatttataaccaaccaaaccaagaaggaccatttgacgttcaggaaactgaaatagcagttcaagctaaacaaccggatgtggaagagattttgtctaaagggcagcatttgtacaaggaaaaaccagccactcagccagtgaagaggaagttagaagatctgagctctgagtggaaggcggtaaaccgtttacttcaagagctgagggcaaagcagcctgacctagctcctggactgaccactattggagcctctcctactcagactgttactctggtgacacaacctgtggttactaaggaaactgccatctccaaactagaaatgccatcttccttgatgttggaggtacctgctctggcagatttcaaccgggcttggacagaacttaccgactggctttctctgcttgatcaagttataaaatcacagagggtgatggtgggtgaccttgaggatatcaacgagatgatcatcaagcagaaggcaacaatgcaggatttggaacagaggcgtccccagttggaagaactcattaccgctgcccaaaatttgaaaaacaagaccagcaatcaagaggctagaacaatcattacggatcgaattgaaagaattcagaatcagtgggatgaagtacaagaacaccttcagaaccggaggcaacagttgaatgaaatgttaaaggattcaacacaatggctggaagctaaggaagaagctgagcaggtcttaggacaggccagagccaagcttgagtcatggaaggagggtccctatacagtagatgcaatccaaaagaaaatcacagaaaccaagcagttggccaaagacctccgccagtggcagacaaatgtagatgtggcaaatgacttggccctgaaacttctccgggattattctgcagatgataccagaaaagtccacatgataacagagaatatcaatgcctcttggagaagcattcataaaagggtgagtgagcgagaggctgctttggaagaaactcatagattactgcaacagttccccctggacctggaaaagtttcttgcctggcttacagaagctgaaacaactgccaatgtcctacaggatgctacccgtaaggaaaggctcctagaagactccaagggagtaaaagagctgatgaaacaatggcaagacctccaaggtgaaattgaagctcacacagatgtttatcacaacctggatgaaaacagccaaaaaatcctgagatccctggaaggttccgatgatgcagtcctgttacaaagacgtttggataacatgaacttcaagtggagtgaacttcggaaaaagtctctcaacattaggtcccatttggaagccagttctgaccagtggaagcgtctgcacctttctctgcaggaacttctggtgtggctacagctgaaagatgatgaattaagccggcaggcacctattggaggcgactttccagcagttcagaagcagaacgatgtacatagggccttcaagagggaattgaaaactaaagaacctgtaatcatgagtactcttgagactgtacgaatatttctgacagagcagcctttggaaggactagagaaactctaccaggagcccagagagctgcctcctgaggagagagcccagaatgtcactcggcttctacgaaagcaggctgaggaggtcaatactgagtgggaaaaattgaacctgcactccgctgactggcagagaaaaatagatgagacccttgaaagactccaggaacttcaagaggccacggatgagctggacctcaagctgcgccaagctgaggtgatcaagggatcctggcagcccgtgggcgatctcctcattgactctctccaagatcacctcgagaaagtcaaggcacttcgaggagaaattgcgcctctgaaagagaacgtgagccacgtcaatgaccttgctcgccagcttaccactttgggcattcagctctcaccgtataacctcagcactctggaagacctgaacaccagatggaagcttctgcaggtggccgtcgaggaccgagtcaggcagctgcatgaagcccacagggactttggtccagcatctcagcactttctttccacgtctgtccagggtccctgggagagagccatctcgccaaacaaagtgccctactatatcaaccacgagactcaaacaacttgctgggaccatcccaaaatgacagagctctaccagtctttagctgacctgaataatgtcagattctcagcttataggactgccatgaaactccgaagactgcagaaggccctttgcttggatctcttgagcctgtcagctgcatgtgatgccttggaccagcacaacctcaagcaaaatgaccagcccatggatatcctgcagattattaattgtttgaccactatttatgaccgcctggagcaagagcacaacaatttggtcaacgtccctctctgcgtggatatgtgtctgaactggctgctgaatgtttatgatacgggacgaacagggaggatccgtgtcctgtcttttaaaactggcatcatttccctgtgtaaagcacatttggaagacaagtacagataccttttcaagcaagtggcaagttcaacaggattttgtgaccagcgcaggctgggcctccttctgcatgattctatccaaattccaagacagttgggtgaagttgcatcctttgggggcagtaacattgagccaagtgtccggagctgcttccaatttgctaataataagccagagatcgaagcggccctcttcctagactggatgagactggaaccccagtccatggtgtggctgcccgtcctgcacagagtggctgctgcagaaactgccaagcatcaggccaaatgtaacatctgcaaagagtgtccaatcattggattcaggtacaggagtctaaagcactttaattatgacatctgccaaagctgctttttttctggtcgagttgcaaaaggccataaaatgcactatcccatggtggaatattgcactccgactacatcaggagaagatgttcgagactttgccaaggtactaaaaaacaaatttcgaaccaaaaggtattttgcgaagcatccccgaatgggctacctgccagtgcagactgtcttagagggggacaacatggaaactcccgttactctgatcaacttctggccagtagattctgcgcctgcctcgtcccctcagctttcacacgatgatactcattcacgcattgaacattatgctagcaggctagcagaaatggaaaacagcaatggatcttatctaaatgatagcatctctcctaatgagagcatagatgatgaacatttgttaatccagcattactgccaaagtttgaaccaggactcccccctgagccagcctcgtagtcctgcccagatcttgatttccttagagagtgaggaaagaggggagctagagagaatcctagcagatcttgaggaagaaaacaggaatctgcaagcagaatatgaccgtctaaagcagcagcacgaacataaaggcctgtccccactgccgtcccctcctgaaatgatgcccacctctccccagagtccccgggatgctgagctcattgctgaggccaagctactgcgtcaacacaaaggccgcctggaagccaggatgcaaatcctggaagaccacaataaacagctggagtcacagttacacaggctaaggcagctgctggagcaaccccaggcagaggccaaagtgaatggcacaacggtgtcctctccttctacctctctacagaggtccgacagcagtcagcctatgctgctccgagtggttggcagtcaaacttcggactccatgggtgaggaagatcttctcagtcctccccaggacacaagcacagggttagaggaggtgatggagcaactcaacaactccttccctagttcaagaggacacaatgtaggaagtcttttccacatggcagatgatttgggcagagcgatggagtccttagtatcagtcatgacagatgaagaaggagcagaataaatgttttacaactcctgattcccgcatggtttttataatattcatacaacaaagaggattagacagtaagagtttacaagaaataaatctatatttttgtgaagggtagtggtattatactgtagatttcagtagtttctaagtctgttattgttttgttaacaatggcaggttttacacgtctatgcaattgtacaaaaaagttataagaaaactacatgtaaaatcttgatagctaaataacttgccatttctttatatggaacgcattttgggttgtttaaaaatttataacagttataaagaaagattgtaaactaaagtgtgctttataaaaaaaagttgtttataaaaacccctaaaaacaaaacaaacacacacacacacacatacacacacacacacaaaactttgaggcagcgcattgttttgcatccttttggcgtgatatccatatgaaattcatggctttttctttttttgcatattaaagataagacttcctctaccaccacaccaaatgactactacacactgctcatttgagaactgtcagctgagtggggcaggcttgagttttcatttcatatatctatatgtctataagtatataaatactatagttatatagataaagagatacgaatttctatagactgactttttccattttttaaatgttcatgtcacatcctaatagaaagaaattacttctagtcagtcatccaggcttacctgcttggtctagaatggatttttcccggagccggaagccaggaggaaactacaccacactaaaacattgtctacagctccagatgtttctcattttaaacaactttccactgacaacgaaagtaaagtaaagtattggatttttttaaagggaacatgtgaatgaatacacaggacttattatatcagagtgagtaatcggttggttggttgattgattgattgattgatacattcagcttcctgctgctagcaatgccacgatttagatttaatgatgcttcagtggaaatcaatcagaaggtattctgaccttgtgaacatcagaaggtattttttaactcccaagcagtagcaggacgatgatagggctggagggctatggattcccagcccatccctgtgaaggagtaggccactctttaagtgaaggattggatgattgttcataatacataaagttctctgtaattacaactaaattattatgccctcttctcacagtcaaaaggaactgggtggtttggtttttgttgcttttttagatttattgtcccatgtgggatgagtttttaaatgccacaagacataatttaaaataaataaactttgggaaaaggtgtaagacagtagccccatcacatttgtgatactgacaggtatcaacccagaagcccatgaactgtgtttccatcctttgcatttctctgcgagtagttccacacaggtttgtaagtaagtaagaaagaaggcaaattgattcaaatgttacaaaaaaacccttcttggtggattagacaggttaaatatataaacaaacaaacaaaaattgctcaaaaaagaggagaaaagctcaagaggaaaagctaaggactggtaggaaaaagctttactctttcatgccattttatttctttttgatttttaaatcattcattcaatagataccaccgtgtgacctataattttgcaaatctgttacctctgacatcaagtgtaattagcttttggagagtgggctgacatcaagtgtaattagcttttggagagtgggttttgtccattattaataattaattaattaacatcaaacacggcttctcatgctatttctacctcactttggttttggggtgttcctgataattgtgcacacctgagttcacagcttcaccacttgtccattgcgttattttctttttcctttataattctttctttttccttcataattttcaaaagaaaacccaaagctctaaggtaacaaattaccaaattacatgaagatttggtttttgtcttgcatttttttcctttatgtgacgctggaccttttctttacccaaggatttttaaaactcagatttaaaacaaggggttactttacatcctactaagaagtttaagtaagtaagtttcattctaaaatcagaggtaaatagagtgcataaataattttgttttaatctttttgtttttcttttagacacattagctctggagtgagtctgtcataatatttgaacaaaaattgagagctttattgctgcattttaagcataattaatttggacattatttcgtgttgtgttctttataaccaccaagtattaaactgtaaatcataatgtaactgaagcataaacatcacatggcatgttttgtcattgttttcaggtactgagttcttacttgagtatcataatatattgtgttttaacaccaacactgtaacatttacgaattatttttttaaacttcagttttactgcattttcacaacatatcagacttcaccaaatatatgccttactattgtattatagtactgctttactgtgtatctcaataaagcacgcagttatgttacaaaaaagtaaaaac

SEQ ID NO: 319995 - DNA, 7064 bp, Homo sapiens
acactagcaatggcaaagctttgtgcggaggcattgctggctgctctgaactaaaagcatccgtggggaccgaaagaggtttttgcacaccttattaaggaactccaggatggcattgggcagcggcaaactgttgtcagaacattgaatgcaactggggaagaaataattcagcaatcctcaaaaacagatgccagtattctacaggaaaaattgggaagcctgaatctgcggtggcaggaggtctgcaaacagctgtcagacagaaaaaagaggctagaagaacaaaagaatatcttgtcagaatttcaaagagatttaaatgaatttgttttatggttggaggaagcagataacattgctagtatcccacttgaacctggaaaagagcagcaactaaaagaaaagcttgagcaagtcaagttactggtggaagagttgcccctgcgccagggaattctcaaacaattaaatgaaactggaggacccgtgcttgtaagtgctcccataagcccagaagagcaagataaacttgaaaataagctcaagcagacaaatctccagtggataaaggtttccagagctttacctgagaaacaaggagaaattgaagctcaaataaaagaccttgggcagcttgaaaaaaagcttgaagaccttgaagagcagttaaatcatctgctgctgtggttatctcctattaggaatcagttggaaatttataaccaaccaaaccaagaaggaccatttgacgttcaggaaactgaaatagcagttcaagctaaacaaccggatgtggaagagattttgtctaaagggcagcatttgtacaaggaaaaaccagccactcagccagtgaagaggaagttagaagatctgagctctgagtggaaggcggtaaaccgtttacttcaagagctgagggcaaagcagcctgacctagctcctggactgaccactattggagcctctcctactcagactgttactctggtgacacaacctgtggttactaaggaaactgccatctccaaactagaaatgccatcttccttgatgttggaggtacctgctctggcagatttcaaccgggcttggacagaacttaccgactggctttctctgcttgatcaagttataaaatcacagagggtgatggtgggtgaccttgaggatatcaacgagatgatcatcaagcagaaggcaacaatgcaggatttggaacagaggcgtccccagttggaagaactcattaccgctgcccaaaatttgaaaaacaagaccagcaatcaagaggctagaacaatcattacggatcgaattgaaagaattcagaatcagtgggatgaagtacaagaacaccttcagaaccggaggcaacagttgaatgaaatgttaaaggattcaacacaatggctggaagctaaggaagaagctgagcaggtcttaggacaggccagagccaagcttgagtcatggaaggagggtccctatacagtagatgcaatccaaaagaaaatcacagaaaccaagcagttggccaaagacctccgccagtggcagacaaatgtagatgtggcaaatgacttggccctgaaacttctccgggattattctgcagatgataccagaaaagtccacatgataacagagaatatcaatgcctcttggagaagcattcataaaagggtgagtgagcgagaggctgctttggaagaaactcatagattactgcaacagttccccctggacctggaaaagtttcttgcctggcttacagaagctgaaacaactgccaatgtcctacaggatgctacccgtaaggaaaggctcctagaagactccaagggagtaaaagagctgatgaaacaatggcaagacctccaaggtgaaattgaagctcacacagatgtttatcacaacctggatgaaaacagccaaaaaatcctgagatccctggaaggttccgatgatgcagtcctgttacaaagacgtttggataacatgaacttcaagtggagtgaacttcggaaaaagtctctcaacattaggtcccatttggaagccagttctgaccagtggaagcgtctgcacctttctctgcaggaacttctggtgtggctacagctgaaagatgatgaattaagccggcaggcacctattggaggcgactttccagcagttcagaagcagaacgatgtacatagggccttcaagagggaattgaaaactaaagaacctgtaatcatgagtactcttgagactgtacgaatatttctgacagagcagcctttggaaggactagagaaactctaccaggagcccagagagctgcctcctgaggagagagcccagaatgtcactcggcttctacgaaagcaggctgaggaggtcaatactgagtgggaaaaattgaacctgcactccgctgactggcagagaaaaatagatgagacccttgaaagactccaggaacttcaagaggccacggatgagctggacctcaagctgcgccaagctgaggtgatcaagggatcctggcagcccgtgggcgatctcctcattgactctctccaagatcacctcgagaaagtcaaggcacttcgaggagaaattgcgcctctgaaagagaacgtgagccacgtcaatgaccttgctcgccagcttaccactttgggcattcagctctcaccgtataacctcagcactctggaagacctgaacaccagatggaagcttctgcaggtggccgtcgaggaccgagtcaggcagctgcatgaagcccacagggactttggtccagcatctcagcactttctttccacgtctgtccagggtccctgggagagagccatctcgccaaacaaagtgccctactatatcaaccacgagactcaaacaacttgctgggaccatcccaaaatgacagagctctaccagtctttagctgacctgaataatgtcagattctcagcttataggactgccatgaaactccgaagactgcagaaggccctttgcttggatctcttgagcctgtcagctgcatgtgatgccttggaccagcacaacctcaagcaaaatgaccagcccatggatatcctgcagattattaattgtttgaccactatttatgaccgcctggagcaagagcacaacaatttggtcaacgtccctctctgcgtggatatgtgtctgaactggctgctgaatgtttatgatacgggacgaacagggaggatccgtgtcctgtcttttaaaactggcatcatttccctgtgtaaagcacatttggaagacaagtacagataccttttcaagcaagtggcaagttcaacaggattttgtgaccagcgcaggctgggcctccttctgcatgattctatccaaattccaagacagttgggtgaagttgcatcctttgggggcagtaacattgagccaagtgtccggagctgcttccaatttgctaataataagccagagatcgaagcggccctcttcctagactggatgagactggaaccccagtccatggtgtggctgcccgtcctgcacagagtggctgctgcagaaactgccaagcatcaggccaaatgtaacatctgcaaagagtgtccaatcattggattcaggtacaggagtctaaagcactttaattatgacatctgccaaagctgctttttttctggtcgagttgcaaaaggccataaaatgcactatcccatggtggaatattgcactccgactacatcaggagaagatgttcgagactttgccaaggtactaaaaaacaaatttcgaaccaaaaggtattttgcgaagcatccccgaatgggctacctgccagtgcagaatctgcaagcagaatatgaccgtctaaagcagcagcacgaacataaaggcctgtccccactgccgtcccctcctgaaatgatgcccacctctccccagagtccccgggatgctgagctcattgctgaggccaagctactgcgtcaacacaaaggccgcctggaagccaggatgcaaatcctggaagaccacaataaacagctggagtcacagttacacaggctaaggcagctgctggagcaaccccaggcagaggccaaagtgaatggcacaacggtgtcctctccttctacctctctacagaggtccgacagcagtcagcctatgctgctccgagtggttggcagtcaaacttcggactccatgggtgaggaagatcttctcagtcctccccaggacacaagcacagggttagaggaggtgatggagcaactcaacaactccttccctagttcaagaggaagaaatacccctggaaagccaatgagagaggacacaatgtaggaagtcttttccacatggcagatgatttgggcagagcgatggagtccttagtatcagtcatgacagatgaagaaggagcagaataaatgttttacaactcctgattcccgcatggtttttataatattcatacaacaaagaggattagacagtaagagtttacaagaaataaatctatatttttgtgaagggtagtggtattatactgtagatttcagtagtttctaagtctgttattgttttgttaacaatggcaggttttacacgtctatgcaattgtacaaaaaagttataagaaaactacatgtaaaatcttgatagctaaataacttgccatttctttatatggaacgcattttgggttgtttaaaaatttataacagttataaagaaagattgtaaactaaagtgtgctttataaaaaaaagttgtttataaaaacccctaaaaacaaaacaaacacacacacacacacatacacacacacacacaaaactttgaggcagcgcattgttttgcatccttttggcgtgatatccatatgaaattcatggctttttctttttttgcatattaaagataagacttcctctaccaccacaccaaatgactactacacactgctcatttgagaactgtcagctgagtggggcaggcttgagttttcatttcatatatctatatgtctataagtatataaatactatagttatatagataaagagatacgaatttctatagactgactttttccattttttaaatgttcatgtcacatcctaatagaaagaaattacttctagtcagtcatccaggcttacctgcttggtctagaatggatttttcccggagccggaagccaggaggaaactacaccacactaaaacattgtctacagctccagatgtttctcattttaaacaactttccactgacaacgaaagtaaagtaaagtattggatttttttaaagggaacatgtgaatgaatacacaggacttattatatcagagtgagtaatcggttggttggttgattgattgattgattgatacattcagcttcctgctgctagcaatgccacgatttagatttaatgatgcttcagtggaaatcaatcagaaggtattctgaccttgtgaacatcagaaggtattttttaactcccaagcagtagcaggacgatgatagggctggagggctatggattcccagcccatccctgtgaaggagtaggccactctttaagtgaaggattggatgattgttcataatacataaagttctctgtaattacaactaaattattatgccctcttctcacagtcaaaaggaactgggtggtttggtttttgttgcttttttagatttattgtcccatgtgggatgagtttttaaatgccacaagacataatttaaaataaataaactttgggaaaaggtgtaagacagtagccccatcacatttgtgatactgacaggtatcaacccagaagcccatgaactgtgtttccatcctttgcatttctctgcgagtagttccacacaggtttgtaagtaagtaagaaagaaggcaaattgattcaaatgttacaaaaaaacccttcttggtggattagacaggttaaatatataaacaaacaaacaaaaattgctcaaaaaagaggagaaaagctcaagaggaaaagctaaggactggtaggaaaaagctttactctttcatgccattttatttctttttgatttttaaatcattcattcaatagataccaccgtgtgacctataattttgcaaatctgttacctctgacatcaagtgtaattagcttttggagagtgggctgacatcaagtgtaattagcttttggagagtgggttttgtccattattaataattaattaattaacatcaaacacggcttctcatgctatttctacctcactttggttttggggtgttcctgataattgtgcacacctgagttcacagcttcaccacttgtccattgcgttattttctttttcctttataattctttctttttccttcataattttcaaaagaaaacccaaagctctaaggtaacaaattaccaaattacatgaagatttggtttttgtcttgcatttttttcctttatgtgacgctggaccttttctttacccaaggatttttaaaactcagatttaaaacaaggggttactttacatcctactaagaagtttaagtaagtaagtttcattctaaaatcagaggtaaatagagtgcataaataattttgttttaatctttttgtttttcttttagacacattagctctggagtgagtctgtcataatatttgaacaaaaattgagagctttattgctgcattttaagcataattaatttggacattatttcgtgttgtgttctttataaccaccaagtattaaactgtaaatcataatgtaactgaagcataaacatcacatggcatgttttgtcattgttttcaggtactgagttcttacttgagtatcataatatattgtgttttaacaccaacactgtaacatttacgaattatttttttaaacttcagttttactgcattttcacaacatatcagacttcaccaaatatatgccttactattgtattatagtactgctttactgtgtatctcaataaagcacgcagttatgttacaaaaaagtaaaaac

SEQ ID NO: 319996 - DNA, 5637 bp, Homo sapiens
gggttttctcaggattgctatgcaacaggatcagtgctgtagtgcccggttcaagctgaaaatgttacacaggaagacataccatgtaaaggacctccaaggtgaaattgaagctcacacagatgtttatcacaacctggatgaaaacagccaaaaaatcctgagatccctggaaggttccgatgatgcagtcctgttacaaagacgtttggataacatgaacttcaagtggagtgaacttcggaaaaagtctctcaacattaggtcccatttggaagccagttctgaccagtggaagcgtctgcacctttctctgcaggaacttctggtgtggctacagctgaaagatgatgaattaagccggcaggcacctattggaggcgactttccagcagttcagaagcagaacgatgtacatagggccttcaagagggaattgaaaactaaagaacctgtaatcatgagtactcttgagactgtacgaatatttctgacagagcagcctttggaaggactagagaaactctaccaggagcccagagagctgcctcctgaggagagagcccagaatgtcactcggcttctacgaaagcaggctgaggaggtcaatactgagtgggaaaaattgaacctgcactccgctgactggcagagaaaaatagatgagacccttgaaagactccaggaacttcaagaggccacggatgagctggacctcaagctgcgccaagctgaggtgatcaagggatcctggcagcccgtgggcgatctcctcattgactctctccaagatcacctcgagaaagtcaaggcacttcgaggagaaattgcgcctctgaaagagaacgtgagccacgtcaatgaccttgctcgccagcttaccactttgggcattcagctctcaccgtataacctcagcactctggaagacctgaacaccagatggaagcttctgcaggtggccgtcgaggaccgagtcaggcagctgcatgaagcccacagggactttggtccagcatctcagcactttctttccacgtctgtccagggtccctgggagagagccatctcgccaaacaaagtgccctactatatcaaccacgagactcaaacaacttgctgggaccatcccaaaatgacagagctctaccagtctttagctgacctgaataatgtcagattctcagcttataggactgccatgaaactccgaagactgcagaaggccctttgcttggatctcttgagcctgtcagctgcatgtgatgccttggaccagcacaacctcaagcaaaatgaccagcccatggatatcctgcagattattaattgtttgaccactatttatgaccgcctggagcaagagcacaacaatttggtcaacgtccctctctgcgtggatatgtgtctgaactggctgctgaatgtttatgatacgggacgaacagggaggatccgtgtcctgtcttttaaaactggcatcatttccctgtgtaaagcacatttggaagacaagtacagataccttttcaagcaagtggcaagttcaacaggattttgtgaccagcgcaggctgggcctccttctgcatgattctatccaaattccaagacagttgggtgaagttgcatcctttgggggcagtaacattgagccaagtgtccggagctgcttccaatttgctaataataagccagagatcgaagcggccctcttcctagactggatgagactggaaccccagtccatggtgtggctgcccgtcctgcacagagtggctgctgcagaaactgccaagcatcaggccaaatgtaacatctgcaaagagtgtccaatcattggattcaggtacaggagtctaaagcactttaattatgacatctgccaaagctgctttttttctggtcgagttgcaaaaggccataaaatgcactatcccatggtggaatattgcactccgactacatcaggagaagatgttcgagactttgccaaggtactaaaaaacaaatttcgaaccaaaaggtattttgcgaagcatccccgaatgggctacctgccagtgcagactgtcttagagggggacaacatggaaactcccgttactctgatcaacttctggccagtagattctgcgcctgcctcgtcccctcagctttcacacgatgatactcattcacgcattgaacattatgctagcaggctagcagaaatggaaaacagcaatggatcttatctaaatgatagcatctctcctaatgagagcatagatgatgaacatttgttaatccagcattactgccaaagtttgaaccaggactcccccctgagccagcctcgtagtcctgcccagatcttgatttccttagagagtgaggaaagaggggagctagagagaatcctagcagatcttgaggaagaaaacaggaatctgcaagcagaatatgaccgtctaaagcagcagcacgaacataaaggcctgtccccactgccgtcccctcctgaaatgatgcccacctctccccagagtccccgggatgctgagctcattgctgaggccaagctactgcgtcaacacaaaggccgcctggaagccaggatgcaaatcctggaagaccacaataaacagctggagtcacagttacacaggctaaggcagctgctggagcaaccccaggcagaggccaaagtgaatggcacaacggtgtcctctccttctacctctctacagaggtccgacagcagtcagcctatgctgctccgagtggttggcagtcaaacttcggactccatgggtgaggaagatcttctcagtcctccccaggacacaagcacagggttagaggaggtgatggagcaactcaacaactccttccctagttcaagaggaagaaatacccctggaaagccaatgagagaggacacaatgtaggaagtcttttccacatggcagatgatttgggcagagcgatggagtccttagtatcagtcatgacagatgaagaaggagcagaataaatgttttacaactcctgattcccgcatggtttttataatattcatacaacaaagaggattagacagtaagagtttacaagaaataaatctatatttttgtgaagggtagtggtattatactgtagatttcagtagtttctaagtctgttattgttttgttaacaatggcaggttttacacgtctatgcaattgtacaaaaaagttataagaaaactacatgtaaaatcttgatagctaaataacttgccatttctttatatggaacgcattttgggttgtttaaaaatttataacagttataaagaaagattgtaaactaaagtgtgctttataaaaaaaagttgtttataaaaacccctaaaaacaaaacaaacacacacacacacacatacacacacacacacaaaactttgaggcagcgcattgttttgcatccttttggcgtgatatccatatgaaattcatggctttttctttttttgcatattaaagataagacttcctctaccaccacaccaaatgactactacacactgctcatttgagaactgtcagctgagtggggcaggcttgagttttcatttcatatatctatatgtctataagtatataaatactatagttatatagataaagagatacgaatttctatagactgactttttccattttttaaatgttcatgtcacatcctaatagaaagaaattacttctagtcagtcatccaggcttacctgcttggtctagaatggatttttcccggagccggaagccaggaggaaactacaccacactaaaacattgtctacagctccagatgtttctcattttaaacaactttccactgacaacgaaagtaaagtaaagtattggatttttttaaagggaacatgtgaatgaatacacaggacttattatatcagagtgagtaatcggttggttggttgattgattgattgattgatacattcagcttcctgctgctagcaatgccacgatttagatttaatgatgcttcagtggaaatcaatcagaaggtattctgaccttgtgaacatcagaaggtattttttaactcccaagcagtagcaggacgatgatagggctggagggctatggattcccagcccatccctgtgaaggagtaggccactctttaagtgaaggattggatgattgttcataatacataaagttctctgtaattacaactaaattattatgccctcttctcacagtcaaaaggaactgggtggtttggtttttgttgcttttttagatttattgtcccatgtgggatgagtttttaaatgccacaagacataatttaaaataaataaactttgggaaaaggtgtaagacagtagccccatcacatttgtgatactgacaggtatcaacccagaagcccatgaactgtgtttccatcctttgcatttctctgcgagtagttccacacaggtttgtaagtaagtaagaaagaaggcaaattgattcaaatgttacaaaaaaacccttcttggtggattagacaggttaaatatataaacaaacaaacaaaaattgctcaaaaaagaggagaaaagctcaagaggaaaagctaaggactggtaggaaaaagctttactctttcatgccattttatttctttttgatttttaaatcattcattcaatagataccaccgtgtgacctataattttgcaaatctgttacctctgacatcaagtgtaattagcttttggagagtgggctgacatcaagtgtaattagcttttggagagtgggttttgtccattattaataattaattaattaacatcaaacacggcttctcatgctatttctacctcactttggttttggggtgttcctgataattgtgcacacctgagttcacagcttcaccacttgtccattgcgttattttctttttcctttataattctttctttttccttcataattttcaaaagaaaacccaaagctctaaggtaacaaattaccaaattacatgaagatttggtttttgtcttgcatttttttcctttatgtgacgctggaccttttctttacccaaggatttttaaaactcagatttaaaacaaggggttactttacatcctactaagaagtttaagtaagtaagtttcattctaaaatcagaggtaaatagagtgcataaataattttgttttaatctttttgtttttcttttagacacattagctctggagtgagtctgtcataatatttgaacaaaaattgagagctttattgctgcattttaagcataattaatttggacattatttcgtgttgtgttctttataaccaccaagtattaaactgtaaatcataatgtaactgaagcataaacatcacatggcatgttttgtcattgttttcaggtactgagttcttacttgagtatcataatatattgtgttttaacaccaacactgtaacatttacgaattatttttttaaacttcagttttactgcattttcacaacatatcagacttcaccaaatatatgccttactattgtattatagtactgctttactgtgtatctcaataaagcacgcagttatgttacaaaaaagtaaaaac

SEQ ID NO: 319997 - DNA, 4688 bp, Homo sapiens
ctccgcagtgctttcagctgtgagcttgggcggcggcggcggcggcgctccactttcggggagcccggcggctctgggaagctcactcctccactcgtacccacactcgaccgcggagcccttgcagccatgagggaacagctcaaaggccacgagactcaaacaacttgctgggaccatcccaaaatgacagagctctaccagtctttagctgacctgaataatgtcagattctcagcttataggactgccatgaaactccgaagactgcagaaggccctttgcttggatctcttgagcctgtcagctgcatgtgatgccttggaccagcacaacctcaagcaaaatgaccagcccatggatatcctgcagattattaattgtttgaccactatttatgaccgcctggagcaagagcacaacaatttggtcaacgtccctctctgcgtggatatgtgtctgaactggctgctgaatgtttatgatacgggacgaacagggaggatccgtgtcctgtcttttaaaactggcatcatttccctgtgtaaagcacatttggaagacaagtacagataccttttcaagcaagtggcaagttcaacaggattttgtgaccagcgcaggctgggcctccttctgcatgattctatccaaattccaagacagttgggtgaagttgcatcctttgggggcagtaacattgagccaagtgtccggagctgcttccaatttgctaataataagccagagatcgaagcggccctcttcctagactggatgagactggaaccccagtccatggtgtggctgcccgtcctgcacagagtggctgctgcagaaactgccaagcatcaggccaaatgtaacatctgcaaagagtgtccaatcattggattcaggtacaggagtctaaagcactttaattatgacatctgccaaagctgctttttttctggtcgagttgcaaaaggccataaaatgcactatcccatggtggaatattgcactccgactacatcaggagaagatgttcgagactttgccaaggtactaaaaaacaaatttcgaaccaaaaggtattttgcgaagcatccccgaatgggctacctgccagtgcagactgtcttagagggggacaacatggaaactcccgttactctgatcaacttctggccagtagattctgcgcctgcctcgtcccctcagctttcacacgatgatactcattcacgcattgaacattatgctagcaggctagcagaaatggaaaacagcaatggatcttatctaaatgatagcatctctcctaatgagagcatagatgatgaacatttgttaatccagcattactgccaaagtttgaaccaggactcccccctgagccagcctcgtagtcctgcccagatcttgatttccttagagagtgaggaaagaggggagctagagagaatcctagcagatcttgaggaagaaaacaggaatctgcaagcagaatatgaccgtctaaagcagcagcacgaacataaaggcctgtccccactgccgtcccctcctgaaatgatgcccacctctccccagagtccccgggatgctgagctcattgctgaggccaagctactgcgtcaacacaaaggccgcctggaagccaggatgcaaatcctggaagaccacaataaacagctggagtcacagttacacaggctaaggcagctgctggagcaaccccaggcagaggccaaagtgaatggcacaacggtgtcctctccttctacctctctacagaggtccgacagcagtcagcctatgctgctccgagtggttggcagtcaaacttcggactccatgggtgaggaagatcttctcagtcctccccaggacacaagcacagggttagaggaggtgatggagcaactcaacaactccttccctagttcaagaggaagaaatacccctggaaagccaatgagagaggacacaatgtaggaagtcttttccacatggcagatgatttgggcagagcgatggagtccttagtatcagtcatgacagatgaagaaggagcagaataaatgttttacaactcctgattcccgcatggtttttataatattcatacaacaaagaggattagacagtaagagtttacaagaaataaatctatatttttgtgaagggtagtggtattatactgtagatttcagtagtttctaagtctgttattgttttgttaacaatggcaggttttacacgtctatgcaattgtacaaaaaagttataagaaaactacatgtaaaatcttgatagctaaataacttgccatttctttatatggaacgcattttgggttgtttaaaaatttataacagttataaagaaagattgtaaactaaagtgtgctttataaaaaaaagttgtttataaaaacccctaaaaacaaaacaaacacacacacacacacatacacacacacacacaaaactttgaggcagcgcattgttttgcatccttttggcgtgatatccatatgaaattcatggctttttctttttttgcatattaaagataagacttcctctaccaccacaccaaatgactactacacactgctcatttgagaactgtcagctgagtggggcaggcttgagttttcatttcatatatctatatgtctataagtatataaatactatagttatatagataaagagatacgaatttctatagactgactttttccattttttaaatgttcatgtcacatcctaatagaaagaaattacttctagtcagtcatccaggcttacctgcttggtctagaatggatttttcccggagccggaagccaggaggaaactacaccacactaaaacattgtctacagctccagatgtttctcattttaaacaactttccactgacaacgaaagtaaagtaaagtattggatttttttaaagggaacatgtgaatgaatacacaggacttattatatcagagtgagtaatcggttggttggttgattgattgattgattgatacattcagcttcctgctgctagcaatgccacgatttagatttaatgatgcttcagtggaaatcaatcagaaggtattctgaccttgtgaacatcagaaggtattttttaactcccaagcagtagcaggacgatgatagggctggagggctatggattcccagcccatccctgtgaaggagtaggccactctttaagtgaaggattggatgattgttcataatacataaagttctctgtaattacaactaaattattatgccctcttctcacagtcaaaaggaactgggtggtttggtttttgttgcttttttagatttattgtcccatgtgggatgagtttttaaatgccacaagacataatttaaaataaataaactttgggaaaaggtgtaagacagtagccccatcacatttgtgatactgacaggtatcaacccagaagcccatgaactgtgtttccatcctttgcatttctctgcgagtagttccacacaggtttgtaagtaagtaagaaagaaggcaaattgattcaaatgttacaaaaaaacccttcttggtggattagacaggttaaatatataaacaaacaaacaaaaattgctcaaaaaagaggagaaaagctcaagaggaaaagctaaggactggtaggaaaaagctttactctttcatgccattttatttctttttgatttttaaatcattcattcaatagataccaccgtgtgacctataattttgcaaatctgttacctctgacatcaagtgtaattagcttttggagagtgggctgacatcaagtgtaattagcttttggagagtgggttttgtccattattaataattaattaattaacatcaaacacggcttctcatgctatttctacctcactttggttttggggtgttcctgataattgtgcacacctgagttcacagcttcaccacttgtccattgcgttattttctttttcctttataattctttctttttccttcataattttcaaaagaaaacccaaagctctaaggtaacaaattaccaaattacatgaagatttggtttttgtcttgcatttttttcctttatgtgacgctggaccttttctttacccaaggatttttaaaactcagatttaaaacaaggggttactttacatcctactaagaagtttaagtaagtaagtttcattctaaaatcagaggtaaatagagtgcataaataattttgttttaatctttttgtttttcttttagacacattagctctggagtgagtctgtcataatatttgaacaaaaattgagagctttattgctgcattttaagcataattaatttggacattatttcgtgttgtgttctttataaccaccaagtattaaactgtaaatcataatgtaactgaagcataaacatcacatggcatgttttgtcattgttttcaggtactgagttcttacttgagtatcataatatattgtgttttaacaccaacactgtaacatttacgaattatttttttaaacttcagttttactgcattttcacaacatatcagacttcaccaaatatatgccttactattgtattatagtactgctttactgtgtatctcaataaagcacgcagttatgttacaaaaaagtaaaaac

SEQ ID NO: 319998 - DNA, 13951 bp, Homo sapiens
  misc_feature (2)..(3): n is a, c, g, or t
gnntcctggcatcagttactgtgttgactcactcagtgttgggatcactcactttccccctacaggactcagatctgggaggcaattaccttcggagaaaaacgaataggaaaaactgaagtgttactttttttaaagctgctgaagtttgttggtttctcattgtttttaagcctactggagcaataaagtttgaagaacttttaccaggttttttttatcgctgccttgatatacacttttcaaaatgctttggtgggaagaagtagaggactgttatgaaagagaagatgttcaaaagaaaacattcacaaaatgggtaaatgcacaattttctaagtttgggaagcagcatattgagaacctcttcagtgacctacaggatgggaggcgcctcctagacctcctcgaaggcctgacagggcaaaaactgccaaaagaaaaaggatccacaagagttcatgccctgaacaatgtcaacaaggcactgcgggttttgcagaacaataatgttgatttagtgaatattggaagtactgacatcgtagatggaaatcataaactgactcttggtttgatttggaatataatcctccactggcaggtcaaaaatgtaatgaaaaatatcatggctggattgcaacaaaccaacagtgaaaagattctcctgagctgggtccgacaatcaactcgtaattatccacaggttaatgtaatcaacttcaccaccagctggtctgatggcctggctttgaatgctctcatccatagtcataggccagacctatttgactggaatagtgtggtttgccagcagtcagccacacaacgactggaacatgcattcaacatcgccagatatcaattaggcatagagaaactactcgatcctgaagatgttgataccacctatccagataagaagtccatcttaatgtacatcacatcactcttccaagttttgcctcaacaagtgagcattgaagccatccaggaagtggaaatgttgccaaggccacctaaagtgactaaagaagaacattttcagttacatcatcaaatgcactattctcaacagatcacggtcagtctagcacagggatatgagagaacttcttcccctaagcctcgattcaagagctatgcctacacacaggctgcttatgtcaccacctctgaccctacacggagcccatttccttcacagcatttggaagctcctgaagacaagtcatttggcagttcattgatggagagtgaagtaaacctggaccgttatcaaacagctttagaagaagtattatcgtggcttctttctgctgaggacacattgcaagcacaaggagagatttctaatgatgtggaagtggtgaaagaccagtttcatactcatgaggggtacatgatggatttgacagcccatcagggccgggttggtaatattctacaattgggaagtaagctgattggaacaggaaaattatcagaagatgaagaaactgaagtacaagagcagatgaatctcctaaattcaagatgggaatgcctcagggtagctagcatggaaaaacaaagcaatttacatagagttttaatggatctccagaatcagaaactgaaagagttgaatgactggctaacaaaaacagaagaaagaacaaggaaaatggaggaagagcctcttggacctgatcttgaagacctaaaacgccaagtacaacaacataaggtgcttcaagaagatctagaacaagaacaagtcagggtcaattctctcactcacatggtggtggtagttgatgaatctagtggagatcacgcaactgctgctttggaagaacaacttaaggtattgggagatcgatgggcaaacatctgtagatggacagaagaccgctgggttcttttacaagacatccttctcaaatggcaacgtcttactgaagaacagtgcctttttagtgcatggctttcagaaaaagaagatgcagtgaacaagattcacacaactggctttaaagatcaaaatgaaatgttatcaagtcttcaaaaactggccgttttaaaagcggatctagaaaagaaaaagcaatccatgggcaaactgtattcactcaaacaagatcttctttcaacactgaagaataagtcagtgacccagaagacggaagcatggctggataactttgcccggtgttgggataatttagtccaaaaacttgaaaagagtacagcacagatttcacaggctgtcaccaccactcagccatcactaacacagacaactgtaatggaaacagtaactacggtgaccacaagggaacagatcctggtaaagcatgctcaagaggaacttccaccaccacctccccaaaagaagaggcagattactgtggattctgaaattaggaaaaggttggatgttgatataactgaacttcacagctggattactcgctcagaagctgtgttgcagagtcctgaatttgcaatctttcggaaggaaggcaacttctcagacttaaaagaaaaagtcaatgccatagagcgagaaaaagctgagaagttcagaaaactgcaagatgccagcagatcagctcaggccctggtggaacagatggtgaatgagggtgttaatgcagatagcatcaaacaagcctcagaacaactgaacagccggtggatcgaattctgccagttgctaagtgagagacttaactggctggagtatcagaacaacatcatcgctttctataatcagctacaacaattggagcagatgacaactactgctgaaaactggttgaaaatccaacccaccaccccatcagagccaacagcaattaaaagtcagttaaaaatttgtaaggatgaagtcaaccggctatcaggtcttcaacctcaaattgaacgattaaaaattcaaagcatagccctgaaagagaaaggacaaggacccatgttcctggatgcagactttgtggcctttacaaatcattttaagcaagtcttttctgatgtgcaggccagagagaaagagctacagacaatttttgacactttgccaccaatgcgctatcaggagaccatgagtgccatcaggacatgggtccagcagtcagaaaccaaactctccatacctcaacttagtgtcaccgactatgaaatcatggagcagagactcggggaattgcaggctttacaaagttctctgcaagagcaacaaagtggcctatactatctcagcaccactgtgaaagagatgtcgaagaaagcgccctctgaaattagccggaaatatcaatcagaatttgaagaaattgagggacgctggaagaagctctcctcccagctggttgagcattgtcaaaagctagaggagcaaatgaataaactccgaaaaattcagaatcacatacaaaccctgaagaaatggatggctgaagttgatgtttttctgaaggaggaatggcctgcccttggggattcagaaattctaaaaaagcagctgaaacagtgcagacttttagtcagtgatattcagacaattcagcccagtctaaacagtgtcaatgaaggtgggcagaagataaagaatgaagcagagccagagtttgcttcgagacttgagacagaactcaaagaacttaacactcagtgggatcacatgtgccaacaggtctatgccagaaaggaggccttgaagggaggtttggagaaaactgtaagcctccagaaagatctatcagagatgcacgaatggatgacacaagctgaagaagagtatcttgagagagattttgaatataaaactccagatgaattacagaaagcagttgaagagatgaagagagctaaagaagaggcccaacaaaaagaagcgaaagtgaaactccttactgagtctgtaaatagtgtcatagctcaagctccacctgtagcacaagaggccttaaaaaaggaacttgaaactctaaccaccaactaccagtggctctgcactaggctgaatgggaaatgcaagactttggaagaagtttgggcatgttggcatgagttattgtcatacttggagaaagcaaacaagtggctaaatgaagtagaatttaaacttaaaaccactgaaaacattcctggcggagctgaggaaatctctgaggtgctagattcacttgaaaatttgatgcgacattcagaggataacccaaatcagattcgcatattggcacagaccctaacagatggcggagtcatggatgagctaatcaatgaggaacttgagacatttaattctcgttggagggaactacatgaagaggctgtaaggaggcaaaagttgcttgaacagagcatccagtctgcccaggagactgaaaaatccttacacttaatccaggagtccctcacattcattgacaagcagttggcagcttatattgcagacaaggtggacgcagctcaaatgcctcaggaagcccagaaaatccaatctgatttgacaagtcatgagatcagtttagaagaaatgaagaaacataatcaggggaaggaggctgcccaaagagtcctgtctcagattgatgttgcacagaaaaaattacaagatgtctccatgaagtttcgattattccagaaaccagccaattttgagcagcgtctacaagaaagtaagatgattttagatgaagtgaagatgcacttgcctgcattggaaacaaagagtgtggaacaggaagtagtacagtcacagctaaatcattgtgtgaacttgtataaaagtctgagtgaagtgaagtctgaagtggaaatggtgataaagactggacgtcagattgtacagaaaaagcagacggaaaatcccaaagaacttgatgaaagagtaacagctttgaaattgcattataatgagctgggagcaaaggtaacagaaagaaagcaacagttggagaaatgcttgaaattgtcccgtaagatgcgaaaggaaatgaatgtcttgacagaatggctggcagctacagatatggaattgacaaagagatcagcagttgaaggaatgcctagtaatttggattctgaagttgcctggggaaaggctactcaaaaagagattgagaaacagaaggtgcacctgaagagtatcacagaggtaggagaggccttgaaaacagttttgggcaagaaggagacgttggtggaagataaactcagtcttctgaatagtaactggatagctgtcacctcccgagcagaagagtggttaaatcttttgttggaataccagaaacacatggaaacttttgaccagaatgtggaccacatcacaaagtggatcattcaggctgacacacttttggatgaatcagagaaaaagaaaccccagcaaaaagaagacgtgcttaagcgtttaaaggcagaactgaatgacatacgcccaaaggtggactctacacgtgaccaagcagcaaacttgatggcaaaccgcggtgaccactgcaggaaattagtagagccccaaatctcagagctcaaccatcgatttgcagccatttcacacagaattaagactggaaaggcctccattcctttgaaggaattggagcagtttaactcagatatacaaaaattgcttgaaccactggaggctgaaattcagcagggggtgaatctgaaagaggaagacttcaataaagatatgaatgaagacaatgagggtactgtaaaagaattgttgcaaagaggagacaacttacaacaaagaatcacagatgagagaaagcgagaggaaataaagataaaacagcagctgttacagacaaaacataatgctctcaaggatttgaggtctcaaagaagaaaaaaggctctagaaatttctcatcagtggtatcagtacaagaggcaggctgatgatctcctgaaatgcttggatgacattgaaaaaaaattagccagcctacctgagcccagagatgaaaggaaaataaaggaaattgatcgggaattgcagaagaagaaagaggagctgaatgcagtgcgtaggcaagctgagggcttgtctgaggatggggccgcaatggcagtggagccaactcagatccagctcagcaagcgctggcgggaaattgagagcaaatttgctcagtttcgaagactcaactttgcacaaattcacactgtccgtgaagaaacgatgatggtgatgactgaagacatgcctttggaaatttcttatgtgccttctacttatttgactgaaatcactcatgtctcacaagccctattagaagtggaacaacttctcaatgctcctgacctctgtgctaaggactttgaagatctctttaagcaagaggagtctctgaagaatataaaagatagtctacaacaaagctcaggtcggattgacattattcatagcaagaagacagcagcattgcaaagtgcaacgcctgtggaaagggtgaagctacaggaagctctctcccagcttgatttccaatgggaaaaagttaacaaaatgtacaaggaccgacaagggcgatttgacagatctgttgagaaatggcggcgttttcattatgatataaagatatttaatcagtggctaacagaagctgaacagtttctcagaaagacacaaattcctgagaattgggaacatgctaaatacaaatggtatcttaaggaactccaggatggcattgggcagcggcaaactgttgtcagaacattgaatgcaactggggaagaaataattcagcaatcctcaaaaacagatgccagtattctacaggaaaaattgggaagcctgaatctgcggtggcaggaggtctgcaaacagctgtcagacagaaaaaagaggctagaagaacaaaagaatatcttgtcagaatttcaaagagatttaaatgaatttgttttatggttggaggaagcagataacattgctagtatcccacttgaacctggaaaagagcagcaactaaaagaaaagcttgagcaagtcaagttactggtggaagagttgcccctgcgccagggaattctcaaacaattaaatgaaactggaggacccgtgcttgtaagtgctcccataagcccagaagagcaagataaacttgaaaataagctcaagcagacaaatctccagtggataaaggtttccagagctttacctgagaaacaaggagaaattgaagctcaaataaaagaccttgggcagcttgaaaaaaagcttgaagaccttgaagagcagttaaatcatctgctgctgtggttatctcctattaggaatcagttggaaatttataaccaaccaaaccaagaaggaccatttgacgttcaggaaactgaaatagcagttcaagctaaacaaccggatgtggaagagattttgtctaaagggcagcatttgtacaaggaaaaaccagccactcagccagtgaagaggaagttagaagatctgagctctgagtggaaggcggtaaaccgtttacttcaagagctgagggcaaagcagcctgacctagctcctggactgaccactattggagcctctcctactcagactgttactctggtgacacaacctgtggttactaaggaaactgccatctccaaactagaaatgccatcttccttgatgttggaggtacctgctctggcagatttcaaccgggcttggacagaacttaccgactggctttctctgcttgatcaagttataaaatcacagagggtgatggtgggtgaccttgaggatatcaacgagatgatcatcaagcagaaggcaacaatgcaggatttggaacagaggcgtccccagttggaagaactcattaccgctgcccaaaatttgaaaaacaagaccagcaatcaagaggctagaacaatcattacggatcgaattgaaagaattcagaatcagtgggatgaagtacaagaacaccttcagaaccggaggcaacagttgaatgaaatgttaaaggattcaacacaatggctggaagctaaggaagaagctgagcaggtcttaggacaggccagagccaagcttgagtcatggaaggagggtccctatacagtagatgcaatccaaaagaaaatcacagaaaccaagcagttggccaaagacctccgccagtggcagacaaatgtagatgtggcaaatgacttggccctgaaacttctccgggattattctgcagatgataccagaaaagtccacatgataacagagaatatcaatgcctcttggagaagcattcataaaagggtgagtgagcgagaggctgctttggaagaaactcatagattactgcaacagttccccctggacctggaaaagtttcttgcctggcttacagaagctgaaacaactgccaatgtcctacaggatgctacccgtaaggaaaggctcctagaagactccaagggagtaaaagagctgatgaaacaatggcaagacctccaaggtgaaattgaagctcacacagatgtttatcacaacctggatgaaaacagccaaaaaatcctgagatccctggaaggttccgatgatgcagtcctgttacaaagacgtttggataacatgaacttcaagtggagtgaacttcggaaaaagtctctcaacattaggtcccatttggaagccagttctgaccagtggaagcgtctgcacctttctctgcaggaacttctggtgtggctacagctgaaagatgatgaattaagccggcaggcacctattggaggcgactttccagcagttcagaagcagaacgatgtacatagggccttcaagagggaattgaaaactaaagaacctgtaatcatgagtactcttgagactgtacgaatatttctgacagagcagcctttggaaggactagagaaactctaccaggagcccagagagctgcctcctgaggagagagcccagaatgtcactcggcttctacgaaagcaggctgaggaggtcaatactgagtgggaaaaattgaacctgcactccgctgactggcagagaaaaatagatgagacccttgaaagactccaggaacttcaagaggccacggatgagctggacctcaagctgcgccaagctgaggtgatcaagggatcctggcagcccgtgggcgatctcctcattgactctctccaagatcacctcgagaaagtcaaggcacttcgaggagaaattgcgcctctgaaagagaacgtgagccacgtcaatgaccttgctcgccagcttaccactttgggcattcagctctcaccgtataacctcagcactctggaagacctgaacaccagatggaagcttctgcaggtggccgtcgaggaccgagtcaggcagctgcatgaagcccacagggactttggtccagcatctcagcactttctttccacgtctgtccagggtccctgggagagagccatctcgccaaacaaagtgccctactatatcaaccacgagactcaaacaacttgctgggaccatcccaaaatgacagagctctaccagtctttagctgacctgaataatgtcagattctcagcttataggactgccatgaaactccgaagactgcagaaggccctttgcttggatctcttgagcctgtcagctgcatgtgatgccttggaccagcacaacctcaagcaaaatgaccagcccatggatatcctgcagattattaattgtttgaccactatttatgaccgcctggagcaagagcacaacaatttggtcaacgtccctctctgcgtggatatgtgtctgaactggctgctgaatgtttatgatacgggacgaacagggaggatccgtgtcctgtcttttaaaactggcatcatttccctgtgtaaagcacatttggaagacaagtacagataccttttcaagcaagtggcaagttcaacaggattttgtgaccagcgcaggctgggcctccttctgcatgattctatccaaattccaagacagttgggtgaagttgcatcctttgggggcagtaacattgagccaagtgtccggagctgcttccaatttgctaataataagccagagatcgaagcggccctcttcctagactggatgagactggaaccccagtccatggtgtggctgcccgtcctgcacagagtggctgctgcagaaactgccaagcatcaggccaaatgtaacatctgcaaagagtgtccaatcattggattcaggtacaggagtctaaagcactttaattatgacatctgccaaagctgctttttttctggtcgagttgcaaaaggccataaaatgcactatcccatggtggaatattgcactccgactacatcaggagaagatgttcgagactttgccaaggtactaaaaaacaaatttcgaaccaaaaggtattttgcgaagcatccccgaatgggctacctgccagtgcagactgtcttagagggggacaacatggaaactcccgttactctgatcaacttctggccagtagattctgcgcctgcctcgtcccctcagctttcacacgatgatactcattcacgcattgaacattatgctagcaggctagcagaaatggaaaacagcaatggatcttatctaaatgatagcatctctcctaatgagagcatagatgatgaacatttgttaatccagcattactgccaaagtttgaaccaggactcccccctgagccagcctcgtagtcctgcccagatcttgatttccttagagagtgaggaaagaggggagctagagagaatcctagcagatcttgaggaagaaaacaggaatctgcaagcagaatatgaccgtctaaagcagcagcacgaacataaaggcctgtccccactgccgtcccctcctgaaatgatgcccacctctccccagagtccccgggatgctgagctcattgctgaggccaagctactgcgtcaacacaaaggccgcctggaagccaggatgcaaatcctggaagaccacaataaacagctggagtcacagttacacaggctaaggcagctgctggagcaaccccaggcagaggccaaagtgaatggcacaacggtgtcctctccttctacctctctacagaggtccgacagcagtcagcctatgctgctccgagtggttggcagtcaaacttcggactccatgggtgaggaagatcttctcagtcctccccaggacacaagcacagggttagaggaggtgatggagcaactcaacaactccttccctagttcaagaggaagaaatacccctggaaagccaatgagagaggacacaatgtaggaagtcttttccacatggcagatgatttgggcagagcgatggagtccttagtatcagtcatgacagatgaagaaggagcagaataaatgttttacaactcctgattcccgcatggtttttataatattcatacaacaaagaggattagacagtaagagtttacaagaaataaatctatatttttgtgaagggtagtggtattatactgtagatttcagtagtttctaagtctgttattgttttgttaacaatggcaggttttacacgtctatgcaattgtacaaaaaagttataagaaaactacatgtaaaatcttgatagctaaataacttgccatttctttatatggaacgcattttgggttgtttaaaaatttataacagttataaagaaagattgtaaactaaagtgtgctttataaaaaaaagttgtttataaaaacccctaaaaacaaaacaaacacacacacacacacatacacacacacacacaaaactttgaggcagcgcattgttttgcatccttttggcgtgatatccatatgaaattcatggctttttctttttttgcatattaaagataagacttcctctaccaccacaccaaatgactactacacactgctcatttgagaactgtcagctgagtggggcaggcttgagttttcatttcatatatctatatgtctataagtatataaatactatagttatatagataaagagatacgaatttctatagactgactttttccattttttaaatgttcatgtcacatcctaatagaaagaaattacttctagtcagtcatccaggcttacctgcttggtctagaatggatttttcccggagccggaagccaggaggaaactacaccacactaaaacattgtctacagctccagatgtttctcattttaaacaactttccactgacaacgaaagtaaagtaaagtattggatttttttaaagggaacatgtgaatgaatacacaggacttattatatcagagtgagtaatcggttggttggttgattgattgattgattgatacattcagcttcctgctgctagcaatgccacgatttagatttaatgatgcttcagtggaaatcaatcagaaggtattctgaccttgtgaacatcagaaggtattttttaactcccaagcagtagcaggacgatgatagggctggagggctatggattcccagcccatccctgtgaaggagtaggccactctttaagtgaaggattggatgattgttcataatacataaagttctctgtaattacaactaaattattatgccctcttctcacagtcaaaaggaactgggtggtttggtttttgttgcttttttagatttattgtcccatgtgggatgagtttttaaatgccacaagacataatttaaaataaataaactttgggaaaaggtgtaagacagtagccccatcacatttgtgatactgacaggtatcaacccagaagcccatgaactgtgtttccatcctttgcatttctctgcgagtagttccacacaggtttgtaagtaagtaagaaagaaggcaaattgattcaaatgttacaaaaaaacccttcttggtggattagacaggttaaatatataaacaaacaaacaaaaattgctcaaaaaagagcattttatttctttttgatttttaaatcattcattcaatagataccaccgtgtgacctataattttgcaaatctgttacctctgacatcaagtgtaattagcttttggagagtgggctgacatcaagtgtaattagcttttggagagtgggttttgtccattattaataattaattaattaacatcaaacacggcttctcatgctatttctacctcactttggttttggggtgttcctgataattgtgcacacctgagttcacagcttcaccacttgtccattgcgttattttctttttcctttataattctttctttttccttcataattttcaaaagaaaacccaaagctctaaggtaacaaattaccaaattacatgaagatttggtttttgtcttgcatttttttcctttatgtgacgctggaccttttctttacccaaggatttttaaaactcagatttaaaacaaggggttactttacatcctactaagaagtttaagtaagtaagtttcattctaaaatcagaggtaaatagagtgcataaataattttgttttaatctttttgtttttcttttagacacattagctctggagtgagtctgtcataatatttgaacaaaaattgagagctttattgctgcattttaagcataattaatttggacattatttcgtgttgtgttctttataaccaccaagtattaaactgtaaatcataatgtaactgaagcataaacatcacatggcatgttttgtcattgttttcaggtactgagttcttacttgagtatcataatatattgtgttttaacaccaacactgtaacatttacgaattatttttttaaacttcagttttactgcattttcacaacatatcagacttcaccaaatatatgccttactattgtattatagtactgctttactgtgtatctcaataaagcacgcagttatgttacaaaaaagtaaaaac

SEQ ID NO: 319999 - DNA, 9078 bp, Homo sapiens
  misc_feature (2)..(3): n is a, c, g, or t
gnntcctggcatcagttactgtgttgactcactcagtgttgggatcactcactttccccctacaggactcagatctgggaggcaattaccttcggagaaaaacgaataggaaaaactgaagtgttactttttttaaagctgctgaagtttgttggtttctcattgtttttaagcctactggagcaataaagtttgaagaacttttaccaggttttttttatcgctgccttgatatacacttttcaaaatgctttggtgggaagaagtagaggactgttatgaaagagaagatgttcaaaagaaaacattcacaaaatgggtaaatgcacaattttctaaggctactcaaaaagagattgagaaacagaaggtgcacctgaagagtatcacagaggtaggagaggccttgaaaacagttttgggcaagaaggagacgttggtggaagataaactcagtcttctgaatagtaactggatagctgtcacctcccgagcagaagagtggttaaatcttttgttggaataccagaaacacatggaaacttttgaccagaatgtggaccacatcacaaagtggatcattcaggctgacacacttttggatgaatcagagaaaaagaaaccccagcaaaaagaagacgtgcttaagcgtttaaaggcagaactgaatgacatacgcccaaaggtggactctacacgtgaccaagcagcaaacttgatggcaaaccgcggtgaccactgcaggaaattagtagagccccaaatctcagagctcaaccatcgatttgcagccatttcacacagaattaagactggaaaggcctccattcctttgaaggaattggagcagtttaactcagatatacaaaaattgcttgaaccactggaggctgaaattcagcagggggtgaatctgaaagaggaagacttcaataaagatatgaatgaagacaatgagggtactgtaaaagaattgttgcaaagaggagacaacttacaacaaagaatcacagatgagagaaagcgagaggaaataaagataaaacagcagctgttacagacaaaacataatgctctcaaggatttgaggtctcaaagaagaaaaaaggctctagaaatttctcatcagtggtatcagtacaagaggcaggctgatgatctcctgaaatgcttggatgacattgaaaaaaaattagccagcctacctgagcccagagatgaaaggaaaataaaggaaattgatcgggaattgcagaagaagaaagaggagctgaatgcagtgcgtaggcaagctgagggcttgtctgaggatggggccgcaatggcagtggagccaactcagatccagctcagcaagcgctggcgggaaattgagagcaaatttgctcagtttcgaagactcaactttgcacaaattcacactgtccgtgaagaaacgatgatggtgatgactgaagacatgcctttggaaatttcttatgtgccttctacttatttgactgaaatcactcatgtctcacaagccctattagaagtggaacaacttctcaatgctcctgacctctgtgctaaggactttgaagatctctttaagcaagaggagtctctgaagaatataaaagatagtctacaacaaagctcaggtcggattgacattattcatagcaagaagacagcagcattgcaaagtgcaacgcctgtggaaagggtgaagctacaggaagctctctcccagcttgatttccaatgggaaaaagttaacaaaatgtacaaggaccgacaagggcgatttgacagatctgttgagaaatggcggcgttttcattatgatataaagatatttaatcagtggctaacagaagctgaacagtttctcagaaagacacaaattcctgagaattgggaacatgctaaatacaaatggtatcttaaggaactccaggatggcattgggcagcggcaaactgttgtcagaacattgaatgcaactggggaagaaataattcagcaatcctcaaaaacagatgccagtattctacaggaaaaattgggaagcctgaatctgcggtggcaggaggtctgcaaacagctgtcagacagaaaaaagaggctagaagaacaaaagaatatcttgtcagaatttcaaagagatttaaatgaatttgttttatggttggaggaagcagataacattgctagtatcccacttgaacctggaaaagagcagcaactaaaagaaaagcttgagcaagtcaagttactggtggaagagttgcccctgcgccagggaattctcaaacaattaaatgaaactggaggacccgtgcttgtaagtgctcccataagcccagaagagcaagataaacttgaaaataagctcaagcagacaaatctccagtggataaaggtttccagagctttacctgagaaacaaggagaaattgaagctcaaataaaagaccttgggcagcttgaaaaaaagcttgaagaccttgaagagcagttaaatcatctgctgctgtggttatctcctattaggaatcagttggaaatttataaccaaccaaaccaagaaggaccatttgacgttcaggaaactgaaatagcagttcaagctaaacaaccggatgtggaagagattttgtctaaagggcagcatttgtacaaggaaaaaccagccactcagccagtgaagctcctactcagactgttactctggtgacacaacctgtggttactaaggaaactgccatctccaaactagaaatgccatcttccttgatgttggaggtacctgctctggcagatttcaaccgggcttggacagaacttaccgactggctttctctgcttgatcaagttataaaatcacagagggtgatggtgggtgaccttgaggatatcaacgagatgatcatcaagcagaaggcaacaatgcaggatttggaacagaggcgtccccagttggaagaactcattaccgctgcccaaaatttgaaaaacaagaccagcaatcaagaggctagaacaatcattacggatcgaattgaaagaattcagaatcagtgggatgaagtacaagaacaccttcagaaccggaggcaacagttgaatgaaatgttaaaggattcaacacaatggctggaagctaaggaagaagctgagcaggtcttaggacaggccagagccaagcttgagtcatggaaggagggtccctatacagtagatgcaatccaaaagaaaatcacagaaaccaagcagttggccaaagacctccgccagtggcagacaaatgtagatgtggcaaatgacttggccctgaaacttctccgggattattctgcagatgataccagaaaagtccacatgataacagagaatatcaatgcctcttggagaagcattcataaaagggtgagtgagcgagaggctgctttggaagaaactcatagattactgcaacagttccccctggacctggaaaagtttcttgcctggcttacagaagctgaaacaactgccaatgtcctacaggatgctacccgtaaggaaaggctcctagaagactccaagggagtaaaagagctgatgaaacaatggcaagacctccaaggtgaaattgaagctcacacagatgtttatcacaacctggatgaaaacagccaaaaaatcctgagatccctggaaggttccgatgatgcagtcctgttacaaagacgtttggataacatgaacttcaagtggagtgaacttcggaaaaagtctctcaacattaggtcccatttggaagccagttctgaccagtggaagcgtctgcacctttctctgcaggaacttctggtgtggctacagctgaaagatgatgaattaagccggcaggcacctattggaggcgactttccagcagttcagaagcagaacgatgtacatagggccttcaagagggaattgaaaactaaagaacctgtaatcatgagtactcttgagactgtacgaatatttctgacagagcagcctttggaaggactagagaaactctaccaggagcccagagagctgcctcctgaggagagagcccagaatgtcactcggcttctacgaaagcaggctgaggaggtcaatactgagtgggaaaaattgaacctgcactccgctgactggcagagaaaaatagatgagacccttgaaagactccaggaacttcaagaggccacggatgagctggacctcaagctgcgccaagctgaggtgatcaagggatcctggcagcccgtgggcgatctcctcattgactctctccaagatcacctcgagaaagtcaaggcacttcgaggagaaattgcgcctctgaaagagaacgtgagccacgtcaatgaccttgctcgccagcttaccactttgggcattcagctctcaccgtataacctcagcactctggaagacctgaacaccagatggaagcttctgcaggtggccgtcgaggaccgagtcaggcagctgcatgaagcccacagggactttggtccagcatctcagcactttctttccacgtctgtccagggtccctgggagagagccatctcgccaaacaaagtgccctactatatcaaccacgagactcaaacaacttgctgggaccatcccaaaatgacagagctctaccagtctttagctgacctgaataatgtcagattctcagcttataggactgccatgaaactccgaagactgcagaaggccctttgcttggatctcttgagcctgtcagctgcatgtgatgccttggaccagcacaacctcaagcaaaatgaccagcccatggatatcctgcagattattaattgtttgaccactatttatgaccgcctggagcaagagcacaacaatttggtcaacgtccctctctgcgtggatatgtgtctgaactggctgctgaatgtttatgatacgggacgaacagggaggatccgtgtcctgtcttttaaaactggcatcatttccctgtgtaaagcacatttggaagacaagtacagataccttttcaagcaagtggcaagttcaacaggattttgtgaccagcgcaggctgggcctccttctgcatgattctatccaaattccaagacagttgggtgaagttgcatcctttgggggcagtaacattgagccaagtgtccggagctgcttccaatttgctaataataagccagagatcgaagcggccctcttcctagactggatgagactggaaccccagtccatggtgtggctgcccgtcctgcacagagtggctgctgcagaaactgccaagcatcaggccaaatgtaacatctgcaaagagtgtccaatcattggattcaggtacaggagtctaaagcactttaattatgacatctgccaaagctgctttttttctggtcgagttgcaaaaggccataaaatgcactatcccatggtggaatattgcactccgactacatcaggagaagatgttcgagactttgccaaggtactaaaaaacaaatttcgaaccaaaaggtattttgcgaagcatccccgaatgggctacctgccagtgcagactgtcttagagggggacaacatggaaacgcctgcctcgtcccctcagctttcacacgatgatactcattcacgcattgaacattatgctagcaggctagcagaaatggaaaacagcaatggatcttatctaaatgatagcatctctcctaatgagagcatagatgatgaacatttgttaatccagcattactgccaaagtttgaaccaggactcccccctgagccagcctcgtagtcctgcccagatcttgatttccttagagagtgaggaaagaggggagctagagagaatcctagcagatcttgaggaagaaaacaggaatctgcaagcagaatatgaccgtctaaagcagcagcacgaacataaaggcctgtccccactgccgtcccctcctgaaatgatgcccacctctccccagagtccccgggatgctgagctcattgctgaggccaagctactgcgtcaacacaaaggccgcctggaagccaggatgcaaatcctggaagaccacaataaacagctggagtcacagttacacaggctaaggcagctgctggagcaaccccaggcagaggccaaagtgaatggcacaacggtgtcctctccttctacctctctacagaggtccgacagcagtcagcctatgctgctccgagtggttggcagtcaaacttcggactccatgggtgaggaagatcttctcagtcctccccaggacacaagcacagggttagaggaggtgatggagcaactcaacaactccttccctagttcaagaggacacaatgtaggaagtcttttccacatggcagatgatttgggcagagcgatggagtccttagtatcagtcatgacagatgaagaaggagcagaataaatgttttacaactcctgattcccgcatggtttttataatattcatacaacaaagaggattagacagtaagagtttacaagaaataaatctatatttttgtgaagggtagtggtattatactgtagatttcagtagtttctaagtctgttattgttttgttaacaatggcaggttttacacgtctatgcaattgtacaaaaaagttataagaaaactacatgtaaaatcttgatagctaaataacttgccatttctttatatggaacgcattttgggttgtttaaaaatttataacagttataaagaaagattgtaaactaaagtgtgctttataaaaaaaagttgtttataaaaacccctaaaaacaaaacaaacacacacacacacacatacacacacacacacaaaactttgaggcagcgcattgttttgcatccttttggcgtgatatccatatgaaattcatggctttttctttttttgcatattaaagataagacttcctctaccaccacaccaaatgactactacacactgctcatttgagaactgtcagctgagtggggcaggcttgagttttcatttcatatatctatatgtctataagtatataaatactatagttatatagataaagagatacgaatttctatagactgactttttccattttttaaatgttcatgtcacatcctaatagaaagaaattacttctagtcagtcatccaggcttacctgcttggtctagaatggatttttcccggagccggaagccaggaggaaactacaccacactaaaacattgtctacagctccagatgtttctcattttaaacaactttccactgacaacgaaagtaaagtaaagtattggatttttttaaagggaacatgtgaatgaatacacaggacttattatatcagagtgagtaatcggttggttggttgattgattgattgattgatacattcagcttcctgctgctagcaatgccacgatttagatttaatgatgcttcagtggaaatcaatcagaaggtattctgaccttgtgaacatcagaaggtattttttaactcccaagcagtagcaggacgatgatagggctggagggctatggattcccagcccatccctgtgaaggagtaggccactctttaagtgaaggattggatgattgttcataatacataaagttctctgtaattacaactaaattattatgccctcttctcacagtcaaaaggaactgggtggtttggtttttgttgcttttttagatttattgtcccatgtgggatgagtttttaaatgccacaagacataatttaaaataaataaactttgggaaaaggtgtaagacagtagccccatcacatttgtgatactgacaggtatcaacccagaagcccatgaactgtgtttccatcctttgcatttctctgcgagtagttccacacaggtttgtaagtaagtaagaaagaaggcaaattgattcaaatgttacaaaaaaacccttcttggtggattagacaggttaaatatataaacaaacaaacaaaaattgctcaaaaaagaggagaaaagctcaagaggaaaagctaaggactggtaggaaaaagctttactctttcatgccattttatttctttttgatttttaaatcattcattcaatagataccaccgtgtgacctataattttgcaaatctgttacctctgacatcaagtgtaattagcttttggagagtgggctgacatcaagtgtaattagcttttggagagtgggttttgtccattattaataattaattaattaacatcaaacacggcttctcatgctatttctacctcactttggttttggggtgttcctgataattgtgcacacctgagttcacagcttcaccacttgtccattgcgttattttctttttcctttataattctttctttttccttcataattttcaaaagaaaacccaaagctctaaggtaacaaattaccaaattacatgaagatttggtttttgtcttgcatttttttcctttatgtgacgctggaccttttctttacccaaggatttttaaaactcagatttaaaacaaggggttactttacatcctactaagaagtttaagtaagtaagtttcattctaaaatcagaggtaaatagagtgcataaataattttgttttaatctttttgtttttcttttagacacattagctctggagtgagtctgtcataatatttgaacaaaaattgagagctttattgctgcattttaagcataattaatttggacattatttcgtgttgtgttctttataaccaccaagtattaaactgtaaatcataatgtaactgaagcataaacatcacatggcatgttttgtcattgttttcaggtactgagttcttacttgagtatcataatatattgtgttttaacaccaacactgtaacatttacgaattatttttttaaacttcagttttactgcattttcacaacatatcagacttcaccaaatatatgccttactattgtattatagtactgctttactgtgtatctcaataaagcacgcagttatgttacaaaaaagtaaaaac

SEQ ID NO: 320000 - DNA, 6650 bp, Homo sapiens
tgagctcggtaccattcctaataggatataaccacagcaggaccattgacgttaaggaaactgaaatagcagttcaagctaaacaaccggatgtggaagagattttgtctaaagggcagcatttgtacaaggaaaaaccagccactcagccagtgaagaggaagttagaagatctgagctctgagtggaaggcggtaaaccgtttacttcaagagctgagggcaaagcagcctgacctagctcctggactgaccactattggagcctctcctactcagactgttactctggtgacacaacctgtggttactaaggaaactgccatctccaaactagaaatgccatcttccttgatgttggaggtacctgctctggcagatttcaaccgggcttggacagaacttaccgactggctttctctgcttgatcaagttataaaatcacagagggtgatggtgggtgaccttgaggatatcaacgagatgatcatcaagcagaaggcaacaatgcaggatttggaacagaggcgtccccagttggaagaactcattaccgctgcccaaaatttgaaaaacaagaccagcaatcaagaggctagaacaatcattacggatcgaattgaaagaattcagaatcagtgggatgaagtacaagaacaccttcagaaccggaggcaacagttgaatgaaatgttaaaggattcaacacaatggctggaagctaaggaagaagctgagcaggtcttaggacaggccagagccaagcttgagtcatggaaggagggtccctatacagtagatgcaatccaaaagaaaatcacagaaaccaagcagttggccaaagacctccgccagtggcagacaaatgtagatgtggcaaatgacttggccctgaaacttctccgggattattctgcagatgataccagaaaagtccacatgataacagagaatatcaatgcctcttggagaagcattcataaaagggtgagtgagcgagaggctgctttggaagaaactcatagattactgcaacagttccccctggacctggaaaagtttcttgcctggcttacagaagctgaaacaactgccaatgtcctacaggatgctacccgtaaggaaaggctcctagaagactccaagggagtaaaagagctgatgaaacaatggcaagacctccaaggtgaaattgaagctcacacagatgtttatcacaacctggatgaaaacagccaaaaaatcctgagatccctggaaggttccgatgatgcagtcctgttacaaagacgtttggataacatgaacttcaagtggagtgaacttcggaaaaagtctctcaacattaggtcccatttggaagccagttctgaccagtggaagcgtctgcacctttctctgcaggaacttctggtgtggctacagctgaaagatgatgaattaagccggcaggcacctattggaggcgactttccagcagttcagaagcagaacgatgtacatagggccttcaagagggaattgaaaactaaagaacctgtaatcatgagtactcttgagactgtacgaatatttctgacagagcagcctttggaaggactagagaaactctaccaggagcccagagagctgcctcctgaggagagagcccagaatgtcactcggcttctacgaaagcaggctgaggaggtcaatactgagtgggaaaaattgaacctgcactccgctgactggcagagaaaaatagatgagacccttgaaagactccaggaacttcaagaggccacggatgagctggacctcaagctgcgccaagctgaggtgatcaagggatcctggcagcccgtgggcgatctcctcattgactctctccaagatcacctcgagaaagtcaaggcacttcgaggagaaattgcgcctctgaaagagaacgtgagccacgtcaatgaccttgctcgccagcttaccactttgggcattcagctctcaccgtataacctcagcactctggaagacctgaacaccagatggaagcttctgcaggtggccgtcgaggaccgagtcaggcagctgcatgaagcccacagggactttggtccagcatctcagcactttctttccacgtctgtccagggtccctgggagagagccatctcgccaaacaaagtgccctactatatcaaccacgagactcaaacaacttgctgggaccatcccaaaatgacagagctctaccagtctttagctgacctgaataatgtcagattctcagcttataggactgccatgaaactccgaagactgcagaaggccctttgcttggatctcttgagcctgtcagctgcatgtgatgccttggaccagcacaacctcaagcaaaatgaccagcccatggatatcctgcagattattaattgtttgaccactatttatgaccgcctggagcaagagcacaacaatttggtcaacgtccctctctgcgtggatatgtgtctgaactggctgctgaatgtttatgatacgggacgaacagggaggatccgtgtcctgtcttttaaaactggcatcatttccctgtgtaaagcacatttggaagacaagtacagataccttttcaagcaagtggcaagttcaacaggattttgtgaccagcgcaggctgggcctccttctgcatgattctatccaaattccaagacagttgggtgaagttgcatcctttgggggcagtaacattgagccaagtgtccggagctgcttccaatttgctaataataagccagagatcgaagcggccctcttcctagactggatgagactggaaccccagtccatggtgtggctgcccgtcctgcacagagtggctgctgcagaaactgccaagcatcaggccaaatgtaacatctgcaaagagtgtccaatcattggattcaggtacaggagtctaaagcactttaattatgacatctgccaaagctgctttttttctggtcgagttgcaaaaggccataaaatgcactatcccatggtggaatattgcactccgactacatcaggagaagatgttcgagactttgccaaggtactaaaaaacaaatttcgaaccaaaaggtattttgcgaagcatccccgaatgggctacctgccagtgcagactgtcttagagggggacaacatggaaacgcctgcctcgtcccctcagctttcacacgatgatactcattcacgcattgaacattatgctagcaggctagcagaaatggaaaacagcaatggatcttatctaaatgatagcatctctcctaatgagagcatagatgatgaacatttgttaatccagcattactgccaaagtttgaaccaggactcccccctgagccagcctcgtagtcctgcccagatcttgatttccttagagagtgaggaaagaggggagctagagagaatcctagcagatcttgaggaagaaaacaggaatctgcaagcagaatatgaccgtctaaagcagcagcacgaacataaaggcctgtccccactgccgtcccctcctgaaatgatgcccacctctccccagagtccccgggatgctgagctcattgctgaggccaagctactgcgtcaacacaaaggccgcctggaagccaggatgcaaatcctggaagaccacaataaacagctggagtcacagttacacaggctaaggcagctgctggagcaaccccaggcagaggccaaagtgaatggcacaacggtgtcctctccttctacctctctacagaggtccgacagcagtcagcctatgctgctccgagtggttggcagtcaaacttcggactccatgggtgaggaagatcttctcagtcctccccaggacacaagcacagggttagaggaggtgatggagcaactcaacaactccttccctagttcaagaggacacaatgtaggaagtcttttccacatggcagatgatttgggcagagcgatggagtccttagtatcagtcatgacagatgaagaaggagcagaataaatgttttacaactcctgattcccgcatggtttttataatattcatacaacaaagaggattagacagtaagagtttacaagaaataaatctatatttttgtgaagggtagtggtattatactgtagatttcagtagtttctaagtctgttattgttttgttaacaatggcaggttttacacgtctatgcaattgtacaaaaaagttataagaaaactacatgtaaaatcttgatagctaaataacttgccatttctttatatggaacgcattttgggttgtttaaaaatttataacagttataaagaaagattgtaaactaaagtgtgctttataaaaaaaagttgtttataaaaacccctaaaaacaaaacaaacacacacacacacacatacacacacacacacaaaactttgaggcagcgcattgttttgcatccttttggcgtgatatccatatgaaattcatggctttttctttttttgcatattaaagataagacttcctctaccaccacaccaaatgactactacacactgctcatttgagaactgtcagctgagtggggcaggcttgagttttcatttcatatatctatatgtctataagtatataaatactatagttatatagataaagagatacgaatttctatagactgactttttccattttttaaatgttcatgtcacatcctaatagaaagaaattacttctagtcagtcatccaggcttacctgcttggtctagaatggatttttcccggagccggaagccaggaggaaactacaccacactaaaacattgtctacagctccagatgtttctcattttaaacaactttccactgacaacgaaagtaaagtaaagtattggatttttttaaagggaacatgtgaatgaatacacaggacttattatatcagagtgagtaatcggttggttggttgattgattgattgattgatacattcagcttcctgctgctagcaatgccacgatttagatttaatgatgcttcagtggaaatcaatcagaaggtattctgaccttgtgaacatcagaaggtattttttaactcccaagcagtagcaggacgatgatagggctggagggctatggattcccagcccatccctgtgaaggagtaggccactctttaagtgaaggattggatgattgttcataatacataaagttctctgtaattacaactaaattattatgccctcttctcacagtcaaaaggaactgggtggtttggtttttgttgcttttttagatttattgtcccatgtgggatgagtttttaaatgccacaagacataatttaaaataaataaactttgggaaaaggtgtaagacagtagccccatcacatttgtgatactgacaggtatcaacccagaagcccatgaactgtgtttccatcctttgcatttctctgcgagtagttccacacaggtttgtaagtaagtaagaaagaaggcaaattgattcaaatgttacaaaaaaacccttcttggtggattagacaggttaaatatataaacaaacaaacaaaaattgctcaaaaaagaggagaaaagctcaagaggaaaagctaaggactggtaggaaaaagctttactctttcatgccattttatttctttttgatttttaaatcattcattcaatagataccaccgtgtgacctataattttgcaaatctgttacctctgacatcaagtgtaattagcttttggagagtgggctgacatcaagtgtaattagcttttggagagtgggttttgtccattattaataattaattaattaacatcaaacacggcttctcatgctatttctacctcactttggttttggggtgttcctgataattgtgcacacctgagttcacagcttcaccacttgtccattgcgttattttctttttcctttataattctttctttttccttcataattttcaaaagaaaacccaaagctctaaggtaacaaattaccaaattacatgaagatttggtttttgtcttgcatttttttcctttatgtgacgctggaccttttctttacccaaggatttttaaaactcagatttaaaacaaggggttactttacatcctactaagaagtttaagtaagtaagtttcattctaaaatcagaggtaaatagagtgcataaataattttgttttaatctttttgtttttcttttagacacattagctctggagtgagtctgtcataatatttgaacaaaaattgagagctttattgctgcattttaagcataattaatttggacattatttcgtgttgtgttctttataaccaccaagtattaaactgtaaatcataatgtaactgaagcataaacatcacatggcatgttttgtcattgttttcaggtactgagttcttacttgagtatcataatatattgtgttttaacaccaacactgtaacatttacgaattatttttttaaacttcagttttactgcattttcacaacatatcagacttcaccaaatatatgccttactattgtattatagtactgctttactgtgtatctcaataaagcacgcagttatgttacaaaaaagtaaaaac

SEQ ID NO: 320001 - DNA, 11226 bp, Homo sapiens
cgttaaatgcaaacgctgctctggctcatgtgtttgctccgaggtataggttttgttcgactgacgtatcagatagtcagagtggttaccacaccgacgttgtagcagctgcataataaatgactgaaagaatcatgttaggcatgcccacctaacctaacttgaatcatgcgaaaggggagctgttggaattcaaatagactttctggttcccagcagtcggcagtaatagaatgctttcaggaagatgacagaatcaggagaaagatgctgttttgcactatcttgatttgttacagcagccaacttattggcatgatggagtgacaggaaaaacagctggcatggaagatgaaagagaagatgttcaaaagaaaacattcacaaaatgggtaaatgcacaattttctaagtttgggaagcagcatattgagaacctcttcagtgacctacaggatgggaggcgcctcctagacctcctcgaaggcctgacagggcaaaaactgccaaaagaaaaaggatccacaagagttcatgccctgaacaatgtcaacaaggcactgcgggttttgcagaacaataatgttgatttagtgaatattggaagtactgacatcgtagatggaaatcataaactgactcttggtttgatttggaatataatcctccactggcaggtcaaaaatgtaatgaaaaatatcatggctggattgcaacaaaccaacagtgaaaagattctcctgagctgggtccgacaatcaactcgtaattatccacaggttaatgtaatcaacttcaccaccagctggtctgatggcctggctttgaatgctctcatccatagtcataggccagacctatttgactggaatagtgtggtttgccagcagtcagccacacaacgactggaacatgcattcaacatcgccagatatcaattaggcatagagaaactactcgatcctgaagatgttgataccacctatccagataagaagtccatcttaatgtacatcacatcactcttccaagttttgcctcaacaagtgagcattgaagccatccaggaagtggaaatgttgccaaggccacctaaagtgactaaagaagaacattttcagttacatcatcaaatgcactattctcaacagatcacggtcagtctagcacagggatatgagagaacttcttcccctaagcctcgattcaagagctatgcctacacacaggctgcttatgtcaccacctctgaccctacacggagcccatttccttcacagcatttggaagctcctgaagacaagtcatttggcagttcattgatggagagtgaagtaaacctggaccgttatcaaacagctttagaagaagtattatcgtggcttctttctgctgaggacacattgcaagcacaaggagagatttctaatgatgtggaagtggtgaaagaccagtttcatactcatgaggggtacatgatggatttgacagcccatcagggccgggttggtaatattctacaattgggaagtaagctgattggaacaggaaaattatcagaagatgaagaaactgaagtacaagagcagatgaatctcctaaattcaagatgggaatgcctcagggtagctagcatggaaaaacaaagcaatttacatagagttttaatggatctccagaatcagaaactgaaagagttgaatgactggctaacaaaaacagaagaaagaacaaggaaaatggaggaagagcctcttggacctgatcttgaagacctaaaacgccaagtacaacaacataaggtgcttcaagaagatctagaacaagaacaagtcagggtcaattctctcactcacatggtggtggtagttgatgaatctagtggagatcacgcaactgctgctttggaagaacaacttaaggtattgggagatcgatgggcaaacatctgtagatggacagaagaccgctgggttcttttacaagacatccttctcaaatggcaacgtcttactgaagaacagtgcctttttagtgcatggctttcagaaaaagaagatgcagtgaacaagattcacacaactggctttaaagatcaaaatgaaatgttatcaagtcttcaaaaactggccgttttaaaagcggatctagaaaagaaaaagcaatccatgggcaaactgtattcactcaaacaagatcttctttcaacactgaagaataagtcagtgacccagaagacggaagcatggctggataactttgcccggtgttgggataatttagtccaaaaacttgaaaagagtacagcacagatttcacaggctgtcaccaccactcagccatcactaacacagacaactgtaatggaaacagtaactacggtgaccacaagggaacagatcctggtaaagcatgctcaagaggaacttccaccaccacctccccaaaagaagaggcagattactgtggattctgaaattaggaaaaggttggatgttgatataactgaacttcacagctggattactcgctcagaagctgtgttgcagagtcctgaatttgcaatctttcggaaggaaggcaacttctcagacttaaaagaaaaagtcaatgccatagagcgagaaaaagctgagaagttcagaaaactgcaagatgccagcagatcagctcaggccctggtggaacagatggtgaatgagggtgttaatgcagatagcatcaaacaagcctcagaacaactgaacagccggtggatcgaattctgccagttgctaagtgagagacttaactggctggagtatcagaacaacatcatcgctttctataatcagctacaacaattggagcagatgacaactactgctgaaaactggttgaaaatccaacccaccaccccatcagagccaacagcaattaaaagtcagttaaaaatttgtaaggatgaagtcaaccggctatcaggtcttcaacctcaaattgaacgattaaaaattcaaagcatagccctgaaagagaaaggacaaggacccatgttcctggatgcagactttgtggcctttacaaatcattttaagcaagtcttttctgatgtgcaggccagagagaaagagctacagacaatttttgacactttgccaccaatgcgctatcaggagaccatgagtgccatcaggacatgggtccagcagtcagaaaccaaactctccatacctcaacttagtgtcaccgactatgaaatcatggagcagagactcggggaattgcaggctttacaaagttctctgcaagagcaacaaagtggcctatactatctcagcaccactgtgaaagagatgtcgaagaaagcgccctctgaaattagccggaaatatcaatcagaatttgaagaaattgagggacgctggaagaagctctcctcccagctggttgagcattgtcaaaagctagaggagcaaatgaataaactccgaaaaattcagaatcacatacaaaccctgaagaaatggatggctgaagttgatgtttttctgaaggaggaatggcctgcccttggggattcagaaattctaaaaaagcagctgaaacagtgcagacttttagtcagtgatattcagacaattcagcccagtctaaacagtgtcaatgaaggtgggcagaagataaagaatgaagcagagccagagtttgcttcgagacttgagacagaactcaaagaacttaacactcagtgggatcacatgtgccaacaggtctatgccagaaaggaggccttgaagggaggtttggagaaaactgtaagcctccagaaagatctatcagagatgcacgaatggatgacacaagctgaagaagagtatcttgagagagattttgaatataaaactccagatgaattacagaaagcagttgaagagatgaagagagctaaagaagaggcccaacaaaaagaagcgaaagtgaaactccttactgagtctgtaaatagtgtcatagctcaagctccacctgtagcacaagaggccttaaaaaaggaacttgaaactctaaccaccaactaccagtggctctgcactaggctgaatgggaaatgcaagactttggaagaagtttgggcatgttggcatgagttattgtcatacttggagaaagcaaacaagtggctaaatgaagtagaatttaaacttaaaaccactgaaaacattcctggcggagctgaggaaatctctgaggtgctagattcacttgaaaatttgatgcgacattcagaggataacccaaatcagattcgcatattggcacagaccctaacagatggcggagtcatggatgagctaatcaatgaggaacttgagacatttaattctcgttggagggaactacatgaagaggctgtaaggaggcaaaagttgcttgaacagagcatccagtctgcccaggagactgaaaaatccttacacttaatccaggagtccctcacattcattgacaagcagttggcagcttatattgcagacaaggtggacgcagctcaaatgcctcaggaagcccagaaaatccaatctgatttgacaagtcatgagatcagtttagaagaaatgaagaaacataatcaggggaaggaggctgcccaaagagtcctgtctcagattgatgttgcacagaaaaaattacaagatgtctccatgaagtttcgattattccagaaaccagccaattttgagcagcgtctacaagaaagtaagatgattttagatgaagtgaagatgcacttgcctgcattggaaacaaagagtgtggaacaggaagtagtacagtcacagctaaatcattgtgtgaacttgtataaaagtctgagtgaagtgaagtctgaagtggaaatggtgataaagactggacgtcagattgtacagaaaaagcagacggaaaatcccaaagaacttgatgaaagagtaacagctttgaaattgcattataatgagctgggagcaaaggtaacagaaagaaagcaacagttggagaaatgcttgaaattgtcccgtaagatgcgaaaggaaatgaatgtcttgacagaatggctggcagctacagatatggaattgacaaagagatcagcagttgaaggaatgcctagtaatttggattctgaagttgcctggggaaaggctactcaaaaagagattgagaaacagaaggtgcacctgaagagtatcacagaggtaggagaggccttgaaaacagttttgggcaagaaggagacgttggtggaagataaactcagtcttctgaatagtaactggatagctgtcacctcccgagcagaagagtggttaaatcttttgttggaataccagaaacacatggaaacttttgaccagaatgtggaccacatcacaaagtggatcattcaggctgacacacttttggatgaatcagagaaaaagaaaccccagcaaaaagaagacgtgcttaagcgtttaaaggcagaactgaatgacatacgcccaaaggtggactctacacgtgaccaagcagcaaacttgatggcaaaccgcggtgaccactgcaggaaattagtagagccccaaatctcagagctcaaccatcgatttgcagccatttcacacagaattaagactggaaaggcctccattcctttgaaggaattggagcagtttaactcagatatacaaaaattgcttgaaccactggaggctgaaattcagcagggggtgaatctgaaagaggaagacttcaataaagatatgaatgaagacaatgagggtactgtaaaagaattgttgcaaagaggagacaacttacaacaaagaatcacagatgagagaaagcgagaggaaataaagataaaacagcagctgttacagacaaaacataatgctctcaaggatttgaggtctcaaagaagaaaaaaggctctagaaatttctcatcagtggtatcagtacaagaggcaggctgatgatctcctgaaatgcttggatgacattgaaaaaaaattagccagcctacctgagcccagagatgaaaggaaaataaaggaaattgatcgggaattgcagaagaagaaagaggagctgaatgcagtgcgtaggcaagctgagggcttgtctgaggatggggccgcaatggcagtggagccaactcagatccagctcagcaagcgctggcgggaaattgagagcaaatttgctcagtttcgaagactcaactttgcacaaattcacactgtccgtgaagaaacgatgatggtgatgactgaagacatgcctttggaaatttcttatgtgccttctacttatttgactgaaatcactcatgtctcacaagccctattagaagtggaacaacttctcaatgctcctgacctctgtgctaaggactttgaagatctctttaagcaagaggagtctctgaagaatataaaagatagtctacaacaaagctcaggtcggattgacattattcatagcaagaagacagcagcattgcaaagtgcaacgcctgtggaaagggtgaagctacaggaagctctctcccagcttgatttccaatgggaaaaagttaacaaaatgtacaaggaccgacaagggcgatttgacagatctgttgagaaatggcggcgttttcattatgatataaagatatttaatcagtggctaacagaagctgaacagtttctcagaaagacacaaattcctgagaattgggaacatgctaaatacaaatggtatcttaaggaactccaggatggcattgggcagcggcaaactgttgtcagaacattgaatgcaactggggaagaaataattcagcaatcctcaaaaacagatgccagtattctacaggaaaaattgggaagcctgaatctgcggtggcaggaggtctgcaaacagctgtcagacagaaaaaagaggctagaagaacaaaagaatatcttgtcagaatttcaaagagatttaaatgaatttgttttatggttggaggaagcagataacattgctagtatcccacttgaacctggaaaagagcagcaactaaaagaaaagcttgagcaagtcaagttactggtggaagagttgcccctgcgccagggaattctcaaacaattaaatgaaactggaggacccgtgcttgtaagtgctcccataagcccagaagagcaagataaacttgaaaataagctcaagcagacaaatctccagtggataaaggtttccagagctttacctgagaaacaaggagaaattgaagctcaaataaaagaccttgggcagcttgaaaaaaagcttgaagaccttgaagagcagttaaatcatctgctgctgtggttatctcctattaggaatcagttggaaatttataaccaaccaaaccaagaaggaccatttgacgttcaggaaactgaaatagcagttcaagctaaacaaccggatgtggaagagattttgtctaaagggcagcatttgtacaaggaaaaaccagccactcagccagtgaagctcctactcagactgttactctggtgacacaacctgtggttactaaggaaactgccatctccaaactagaaatgccatcttccttgatgttggaggtacctgctctggcagatttcaaccgggcttggacagaacttaccgactggctttctctgcttgatcaagttataaaatcacagagggtgatggtgggtgaccttgaggatatcaacgagatgatcatcaagcagaaggcaacaatgcaggatttggaacagaggcgtccccagttggaagaactcattaccgctgcccaaaatttgaaaaacaagaccagcaatcaagaggctagaacaatcattacggatcgaattgaaagaattcagaatcagtgggatgaagtacaagaacaccttcagaaccggaggcaacagttgaatgaaatgttaaaggattcaacacaatggctggaagctaaggaagaagctgagcaggtcttaggacaggccagagccaagcttgagtcatggaaggagggtccctatacagtagatgcaatccaaaagaaaatcacagaaaccaagcagttggccaaagacctccgccagtggcagacaaatgtagatgtggcaaatgacttggccctgaaacttctccgggattattctgcagatgataccagaaaagtccacatgataacagagaatatcaatgcctcttggagaagcattcataaaagggtgagtgagcgagaggctgctttggaagaaactcatagattactgcaacagttccccctggacctggaaaagtttcttgcctggcttacagaagctgaaacaactgccaatgtcctacaggatgctacccgtaaggaaaggctcctagaagactccaagggagtaaaagagctgatgaaacaatggcaagacctccaaggtgaaattgaagctcacacagatgtttatcacaacctggatgaaaacagccaaaaaatcctgagatccctggaaggttccgatgatgcagtcctgttacaaagacgtttggataacatgaacttcaagtggagtgaacttcggaaaaagtctctcaacattaggtcccatttggaagccagttctgaccagtggaagcgtctgcacctttctctgcaggaacttctggtgtggctacagctgaaagatgatgaattaagccggcaggcacctattggaggcgactttccagcagttcagaagcagaacgatgtacatagggccttcaagagggaattgaaaactaaagaacctgtaatcatgagtactcttgagactgtacgaatatttctgacagagcagcctttggaaggactagagaaactctaccaggagcccagagagctgcctcctgaggagagagcccagaatgtcactcggcttctacgaaagcaggctgaggaggtcaatactgagtgggaaaaattgaacctgcactccgctgactggcagagaaaaatagatgagacccttgaaagactccaggaacttcaagaggccacggatgagctggacctcaagctgcgccaagctgaggtgatcaagggatcctggcagcccgtgggcgatctcctcattgactctctccaagatcacctcgagaaagtcaaggcacttcgaggagaaattgcgcctctgaaagagaacgtgagccacgtcaatgaccttgctcgccagcttaccactttgggcattcagctctcaccgtataacctcagcactctggaagacctgaacaccagatggaagcttctgcaggtggccgtcgaggaccgagtcaggcagctgcatgaagcccacagggactttggtccagcatctcagcactttctttccacgtctgtccagggtccctgggagagagccatctcgccaaacaaagtgccctactatatcaaccacgagactcaaacaacttgctgggaccatcccaaaatgacagagctctaccagtctttagctgacctgaataatgtcagattctcagcttataggactgccatgaaactccgaagactgcagaaggccctttgcttggatctcttgagcctgtcagctgcatgtgatgccttggaccagcacaacctcaagcaaaatgaccagcccatggatatcctgcagattattaattgtttgaccactatttatgaccgcctggagcaagagcacaacaatttggtcaacgtccctctctgcgtggatatgtgtctgaactggctgctgaatgtttatgatacgggacgaacagggaggatccgtgtcctgtcttttaaaactggcatcatttccctgtgtaaagcacatttggaagacaagtacagataccttttcaagcaagtggcaagttcaacaggattttgtgaccagcgcaggctgggcctccttctgcatgattctatccaaattccaagacagttgggtgaagttgcatcctttgggggcagtaacattgagccaagtgtccggagctgcttccaatttgctaataataagccagagatcgaagcggccctcttcctagactggatgagactggaaccccagtccatggtgtggctgcccgtcctgcacagagtggctgctgcagaaactgccaagcatcaggccaaatgtaacatctgcaaagagtgtccaatcattggattcaggtacaggagtctaaagcactttaattatgacatctgccaaagctgctttttttctggtcgagttgcaaaaggccataaaatgcactatcccatggtggaatattgcactccgactacatcaggagaagatgttcgagactttgccaaggtactaaaaaacaaatttcgaaccaaaaggtattttgcgaagcatccccgaatgggctacctgccagtgcagactgtcttagagggggacaacatggaaacgcctgcctcgtcccctcagctttcacacgatgatactcattcacgcattgaacattatgctagcaggctagcagaaatggaaaacagcaatggatcttatctaaatgatagcatctctcctaatgagagcatagatgatgaacatttgttaatccagcattactgccaaagtttgaaccaggactcccccctgagccagcctcgtagtcctgcccagatcttgatttccttagagagtgaggaaagaggggagctagagagaatcctagcagatcttgaggaagaaaacaggaatctgcaagcagaatatgaccgtctaaagcagcagcacgaacataaaggcctgtccccactgccgtcccctcctgaaatgatgcccacctctccccagagtccccgggatgctgagctcattgctgaggccaagctactgcgtcaacacaaaggccgcctggaagccaggatgcaaatcctggaagaccacaataaacagctggagtcacagttacacaggctaaggcagctgctggagcaaccccaggcagaggccaaagtgaatggcacaacggtgtcctctccttctacctctctacagaggtccgacagcagtcagcctatgctgctccgagtggttggcagtcaaacttcggactccatgggtaagtgtcctagctactctcagattttgttgtctgaagaaaggtagagtcgtattacagggacatgaatatttggccgtaagtgtttgactcatcttggtatcagggagccactgaaaatcatataccaggc

SEQ ID NO: 320002 - DNA, 4039 bp, Homo sapiens
  misc_feature (3925)..(3925): n is a, c, g, or t
cgttaaatgcaaacgctgctctggctcatgtgtttgctccgaggtataggttttgttcgactgacgtatcagatagtcagagtggttaccacaccgacgttgtagcagctgcataataaatgactgaaagaatcatgttaggcatgcccacctaacctaacttgaatcatgcgaaaggggagctgttggaattcaaatagactttctggttcccagcagtcggcagtaatagaatgctttcaggaagatgacagaatcaggagaaagatgctgttttgcactatcttgatttgttacagcagccaacttattggcatgatggagtgacaggaaaaacagctggcatggaagatgaaagagaagatgttcaaaagaaaacattcacaaaatgggtaaatgcacaattttctaagtttgggaagcagcatattgagaacctcttcagtgacctacaggatgggaggcgcctcctagacctcctcgaaggcctgacagggcaaaaactgccaaaagaaaaaggatccacaagagttcatgccctgaacaatgtcaacaaggcactgcgggttttgcagaacaataatgttgatttagtgaatattggaagtactgacatcgtagatggaaatcataaactgactcttggtttgatttggaatataatcctccactggcaggtcaaaaatgtaatgaaaaatatcatggctggattgcaacaaaccaacagtgaaaagattctcctgagctgggtccgacaatcaactcgtaattatccacaggttaatgtaatcaacttcaccaccagctggtctgatggcctggctttgaatgctctcatccatagtcataggccagacctatttgactggaatagtgtggtttgccagcagtcagccacacaacgactggaacatgcattcaacatcgccagatatcaattaggcatagagaaactactcgatcctgaagatgttgataccacctatccagataagaagtccatcttaatgtacatcacatcactcttccaagttttgcctcaacaagtgagcattgaagccatccaggaagtggaaatgttgccaaggccacctaaagtgactaaagaagaacattttcagttacatcatcaaatgcactattctcaacagatcacggtcagtctagcacagggatatgagagaacttcttcccctaagcctcgattcaagagctatgcctacacacaggctgcttatgtcaccacctctgaccctacacggagcccatttccttcacagcatttggaagctcctgaagacaagtcatttggcagttcattgatggagagtgaagtaaacctggaccgttatcaaacagctttagaagaagtattatcgtggcttctttctgctgaggacacattgcaagcacaaggagagatttctaatgatgtggaagtggtgaaagaccagtttcatactcatgaggggtacatgatggatttgacagcccatcagggccgggttggtaatattctacaattgggaagtaagctgattggaacaggaaaattatcagaagatgaagaaactgaagtacaagagcagatgaatctcctaaattcaagatgggaatgcctcagggtagctagcatggaaaaacaaagcaatttacatagagttttaatggatctccagaatcagaaactgaaagagttgaatgactggctaacaaaaacagaagaaagaacaaggaaaatggaggaagagcctcttggacctgatcttgaagacctaaaacgccaagtacaacaacataaggtgcttcaagaagatctagaacaagaacaagtcagggtcaattctctcactcacatggtggtggtagttgatgaatctagtggagatcacgcaactgctgctttggaagaacaacttaaggtattgggagatcgatgggcaaacatctgtagatggacagaagaccgctgggttcttttacaagacatccttctcaaatggcaacgtcttactgaagaacagtgcctttttagtgcatggctttcagaaaaagaagatgcagtgaacaagattcacacaactggctttaaagatcaaaatgaaatgttatcaagtcttcaaaaactggccgttttaaaagcggatctagaaaagaaaaagcaatccatgggcaaactgtattcactcaaacaagatcttctttcaacactgaagaataagtcagtgacccagaagacggaagcatggctggataactttgcccggtgttgggataatttagtccaaaaacttgaaaagagtacagcacagatttcacaggctgtcaccaccactcagccatcactaacacagacaactgtaatggaaacagtaactacggtgaccacaagggaacagatcctggtaaagcatgctcaagaggaacttccaccaccacctccccaaaagaagaggcagattactgtggattctgaaattaggaaaaggttggatgttgatataactgaacttcacagctggattactcgctcagaagctgtgttgcagagtcctgaatttgcaatctttcggaaggaaggcaacttctcagacttaaaagaaaaagtcaatgccatagagcgagaaaaagctgagaagttcagaaaactgcaagatgccagcagatcagctcaggccctggtggaacagatggtgaatgagggtgttaatgcagatagcatcaaacaagcctcagaacaactgaacagccggtggatcgaattctgccagttgctaagtgagagacttaactggctggagtatcagaacaacatcatcgctttctataatcagctacaacaattggagcagatgacaactactgctgaaaactggttgaaaatccaacccaccaccccatcagagccaacagcaattaaaagtcagttaaaaatttgtaaggatgaagtcaaccggctatcaggtcttcaacctcaaattgaacgattaaaaattcaaagcatagccctgaaagagaaaggacaaggacccatgttcctggatgcagactttgtggcctttacaaatcattttaagcaagtcttttctgatgtgcaggccagagagaaagagctacagacaatttttgacactttgccaccaatgcgctatcaggagaccatgagtgccatcaggacatgggtccagcagtcagaaaccaaactctccatacctcaacttagtgtcaccgactatgaaatcatggagcagagactcggggaattgcaggctttacaaagttctctgcaagagcaacaaagtggcctatactatctcagcaccactgtgaaagagatgtcgaagaaagcgccctctgaaattagccggaaatatcaatcagaatttgaagaaattgagggacgctggaagaagctctcctcccagctggttgagcattgtcaaaagctagaggagcaaatgaataaactccgaaaaattcagaatcacatacaaaccctgaagaaatggatggctgaagttgatgtttttctgaaggaggaatggcctgcccttggggattcagaaattctaaaaaagcagctgaaacagtgcagacttttagtcagtgatattcagacaattcagcccagtctaaacagtgtcaatgaaggtgggcagaagataaagaatgaagcagagccagagtttgcttcgagacttgagacagaactcaaagaacttaacactcagtgggatcacatgtgccaacaggtctatgccagaaaggaggccttgaagggaggtttggagaaaactgtaagcctccagaaagatctatcagagatgcacgaatggatgacacaagctgaagaagagtatcttgagagagattttgaatataaaactccagatgaattacagaaagcagttgaagagatgaaggnaaaaaaaaaaaaagaaaaactaagtaaaacaaaggaaataaatggaaaaagaaagaaatgcaacaatgcttgaagttgtatacagtctgctctttcctggttctaagagaagag

SEQ ID NO: 320003 - DNA, 400 bp, Homo sapiens
gtcatgcctttcatatttgtaaacttcaaaggatgacaataaagggacaacagcctttgaaattttgagagaagtatttgctgcttgcaagtcggttgatgtggttagctaactgccctgggccctgtattggttttgctcaataggaaattgatcgggaattgcagaagaagaaagaggagctgaatgcagtgcgtaggcaagctgagggcttgtctgaggatggggccgcaatggcagtggagccaactcagatccagctcagcaagcgctggcgggaaattgagagcaaatttgctcagtttcgaagactcaactttgcacaaattgtgagttgttactggcaaacccacgtatgtgtttgcaactactactctattaacagaggcctactaataaa

SEQ ID NO: 320004 - DNA, 743 bp, Homo sapiens
ttagaggaagaaatggaaagggcccatgtttcatcctaattgataaaaagtttgatatactttagtattactaacgatttaaattgctactttgtaaggttttaagacattaacatgtttaacatgttttaaaacattaacatcaagactgatgattgaaatgctaattctgcagaagtgtctggtctttggaatagaaatctttttttctttcaattcaacatttgtaagtacctgcagaatacctggcacagtgctaggagaaggattcagagacgaatgtgacacattttcttccttcaaggtgtgctcataagtaagccatttatcatttatgtattacactacgtgttgaaatactctgaaaaaatttttttttttttttttggctgatgtacttttcccctttcagccagtaaaaaagaagaaaattaagcgtgaaataaagattttggagaatttgagaggaggtcccaacatcatcacactggcagacattgtaaaagaccctgtggtgagtatagtaggtgttagcaaggcccgccagagctgagatggtgtttgacctggagcacaactggcctctttttgttcctcccccaaccctcatcattaagtcctgctttgaaagtgcttaatcagatataccatttaactagcttgggtctttctttcaaagagacctccacccacagactatttcttattcttctaggctaagagactgatagcactggaaactg

SEQ ID NO: 320005 - DNA, 756 bp, Homo sapiens
ccccggaataccttacccttccctgtaagacctgtgaaaacgtatgagaccgtattcatctatccagcaaatatttattcatttttctcctgtatacccgcgctttatgtgaatttggaaaataccaagggtgaataaaccgtccctacccctaaggagcttgtcgtccatattgaaaaagaaaggtagaaaacataaagagtttaggttctgttaaagaaatatatctaaaattcagggggctgaagccaatgatcagacttcattgagaagctgacttaaatattccaaaagttaaggaaatgcttaccaataggattataggctgggtagtagggacattttagtcattgagcagtttaagaaatttgtaaaagcacaggtgagattgtgtcttccaggaacaaaatcatggagaaagaggtttgtcaagctaagaagttttattttcattctaaaggctataagtagtcagtggaggggtttcagtaaagagtgacgtgtctggtatattttatcaagagtatgctaatggcacagtgtgggtagcttagagaaagataagattgctcatggtttattctttttcagcctacgactaatagactggggtttggctgagttttatcatcctggccaagaatataatgtccgagttgcttcccgatacttcaaaggtcctgagctacttgtagactatcaggtaagaacagaagggcaggcacagttttgatcctgtgtttatttcgcacataa

SEQ ID NO: 320006 - DNA, 2672 bp, Homo sapiens
agcctcgctctggtccctgcggctggcggccgagccgtgtgtctcctcctccatcgccgccatattgtctgtgtgagcagaggggagagcggccgccgccgctgccgcttccaccacagtttgaagaaaacaggtctgaaacaaggtcttacccccagctgcttctgaacacagtgactgccagatctccaaacatcaagtccagctttgtccgccaacctgtctgacatgtcgggacccgtgccaagcagggccagagtttacacagatgttaatacacacagacctcgagaatactgggattacgagtcacatgtggtggaatggggaaatcaagatgactaccagctggttcgaaaattaggccgaggtaaatacagtgaagtatttgaagccatcaacatcacaaataatgaaaaagttgttgttaaaattctcaagccagtaaaaaagaagaaaattaagcgtgaaataaagattttggagaatttgagaggaggtcccaacatcatcacactggcagacattgtaaaagaccctgtgtcacgaacccccgccttggtttttgaacacgtaaacaacacagacttcaagcaattgtaccagacgttaacagactatgatattcgattttacatgtatgagattctgaaggccctggattattgtcacagcatgggaattatgcacagagatgtcaagccccataatgtcatgattgatcatgagcacagaaagctacgactaatagactggggtttggctgagttttatcatcctggccaagaatataatgtccgagttgcttcccgatacttcaaaggtcctgagctacttgtagactatcagatgtacgattatagtttggatatgtggagtttgggttgtatgctggcaagtatgatctttcggaaggagccatttttccatggacatgacaattatgatcagttggtgaggatagccaaggttctggggacagaagatttatatgactatattgacaaatacaacattgaattagatccacgtttcaatgatatcttgggcagacactctcgaaagcgatgggaacgctttgtccacagtgaaaatcagcaccttgtcagccctgaggccttggatttcctggacaaactgctgcgatatgaccaccagtcacggcttactgcaagagaggcaatggagcacccctatttctacactgttgtgaaggaccaggctcgaatgggttcatctagcatgccagggggcagtacgcccgtcagcagcgccaatatgatgtcagggatttcttcagtgccaaccccttcaccccttggacctctggcaggctcaccagtgattgctgctgccaacccccttgggatgcctgttccagctgccgctggcgctcagcagtaacggccctatctgtctcctgatgcctgagcagaggtgggggagtccaccctctccttgatgcagcttgcgcctggcggggaggggtgaaacacttcagaagcaccgtgtctgaaccgttgcttgtggatttatagtagttcagtcataaaaaaaaaattataataggctgattttcttttttctttttttttttaactcgaacttttcataactcaggggattccctgaaaaattacctgcaggtggaatatttcatggacaaatttttttttctcccctcccaaatttagttcctcatcacaaaagaacaaagataaaccagcctcaatcccggctgctgcatttaggtggagacttcttcccattcccaccattgttcctccaccgtcccacactttagggggttggtatctcgtgctcttctccagagattacaaaaatgtagcttctcaggggaggcaggaagaaaggaaggaaggaaagaaggaagggaggacccaatctataggagcagtggactgcttgctggtcgcttacatcactttactccataagcgcttcagtggggttatcctagtggctcttgtggaagtgtgtcttagttacatcaagatgttgaaaatctacccaaaatgcagacagatactaaaaacttctgttcagtaagaatcatgtcttactgatctaaccctaaatccaactcatttatacttttatttttagttcagtttaaaatgttgataccttccctcccaggctccttaccttggtcttttccctgttcatctcccaacatgctgtgctccatagctggtaggagagggaaggcaaaatctttcttagttttctttgtcttggccattttgaattcatttagttactgggcataacttactgctttttacaaaagaaacaaacattgtctgtacaggtttcatgctagagctaatgggagatgtggccacactgacttccattttaagctttctaccttcttttcctccgaccgtccccttccctcacatgccatccagtgagaagacctgctcctcagtcttgtaaatgtatcttgagaggtaggagcagagccactatctccattgaagctgaaatggtagacctgtaattgtgggaaaactataaactctcttgttacagccccgccaccccttgctgtgtgtatatatataatactttgtccttcatatgtgaaagatccagtgttggaattctttggtgtaaataaacgtttggttttatttatcaag

SEQ ID NO: 320007 - DNA, 2675 bp, Homo sapiens
cggtttttctccactgacatacaccaccctgacccctatgagaaaagaaagatcgaattttggcatattgtctgtgtgagcagaggggagagcggccgccgccgctgccgcttccaccacagtttgaagaaaacaggtctgaaacaaggtcttacccccagctgcttctgaacacagtgactgccagatctccaaacatcaagtccagctttgtccgccaacctgtctgacatgtcgggacccgtgccaagcagggccagagtttacacagatgttaatacacacagacctcgagaatactgggattacgagtcacatgtggtggaatggggaaatcaagatgactaccagctggttcgaaaattaggccgaggtaaatacagtgaagtatttgaagccatcaacatcacaaataatgaaaaagttgttgttaaaattctcaagccagtaaaaaagaagaaaattaagcgtgaaataaagattttggagaatttgagaggaggtcccaacatcatcacactggcagacattgtaaaagaccctgtgtcacgaacccccgccttggtttttgaacacgtaaacaacacagacttcaagcaattgtaccagacgttaacagactatgatattcgattttacatgtatgagattctgaaggccctggattattgtcacagcatgggaattatgcacagagatgtcaagccccataatgtcatgattgatcatgagcacagaaagctacgactaatagactggggtttggctgagttttatcatcctggccaagaatataatgtccgagttgcttcccgatacttcaaaggtcctgagctacttgtagactatcagatgtacgattatagtttggatatgtggagtttgggttgtatgctggcaagtatgatctttcggaaggagccatttttccatggacatgacaattatgatcagttggtgaggatagccaaggttctggggacagaagatttatatgactatattgacaaatacaacattgaattagatccacgtttcaatgatatcttgggcagacactctcgaaagcgatgggaacgctttgtccacagtgaaaatcagcaccttgtcagccctgaggccttggatttcctggacaaactgctgcgatatgaccaccagtcacggcttactgcaagagaggcaatggagcacccctatttctacactgttgtgaaggaccaggctcgaatgggttcatctagcatgccagggggcagtacgcccgtcagcagcgccaatatgatgtcagggatttcttcagtgccaaccccttcaccccttggacctctggcaggctcaccagtgattgctgctgccaacccccttgggatgcctgttccagctgccgctggcgctcagcagtaacggccctatctgtctcctgatgcctgagcagaggtgggggagtccaccctctccttgatgcagcttgcgcctggcggggaggggtgaaacacttcagaagcaccgtgtctgaaccgttgcttgtggatttatagtagttcagtcataaaaaaaaaattataataggctgattttcttttttctttttttttttaactcgaacttttcataactcaggggattccctgaaaaattacctgcaggtggaatatttcatggacaaatttttttttctcccctcccaaatttagttcctcatcacaaaagaacaaagataaaccagcctcaatcccggctgctgcatttaggtggagacttcttcccattcccaccattgttcctccaccgtcccacactttagggggttggtatctcgtgctcttctccagagattacaaaaatgtagcttctcaggggaggcaggaagaaaggaaggaaggaaagaaggaagggaggacccaatctataggagcagtggactgcttgctggtcgcttacatcactttactccataagcgcttcagtggggttatcctagtggctcttgtggaagtgtgtcttagttacatcaagatgttgaaaatctacccaaaatgcagacagatactaaaaacttctgttcagtaagaatcatgtcttactgatctaaccctaaatccaactcatttatacttttatttttagttcagtttaaaatgttgataccttccctcccaggctccttaccttggtcttttccctgttcatctcccaacatgctgtgctccatagctggtaggagagggaaggcaaaatctttcttagttttctttgtcttggccattttgaattcatttagttactgggcataacttactgctttttacaaaagaaacaaacattgtctgtacaggtttcatgctagagctaatgggagatgtggccacactgacttccattttaagctttctaccttcttttcctccgaccgtccccttccctcacatgccatccagtgagaagacctgctcctcagtcttgtaaatgtatcttgagaggtaggagcagagccactatctccattgaagctgaaatggtagacctgtaattgtgggaaaactataaactctcttgttacagccccgccaccccttgctgtgtgtatatatataatactttgtccttcatatgtgaaagatccagtgttggaattctttggtgtaaataaacgtttggttttatttatcaag

SEQ ID NO: 320008 - DNA, 5058 bp, Homo sapiens
agcctcgctctggtccctgcggctggcggccgagccgtgtgtctcctcctccatcgccgccatattgtctgtgtgagcagaggggagagcggccgccgccgctgccgcttccaccacagtttgaagaaaacaggtctgaaacaaggtcttacccccagctgcttctgaacacagtgactgccagatctccaaacatcaagtccagctttgtccgccaacctgtctgacatgtcgggacccgtgccaagcagggccagagtttacacagatgttaatacacacagacctcgagaatactgggattacgagtcacatgtggtggaatggggaaatcaagatgactaccagctggttcgaaaattaggccgaggtaaatacagtgaagtatttgaagccatcaacatcacaaataatgaaaaagttgttgttaaaattctcaagccagtaaaaaagaagaaaattaagcgtgaaataaagattttggagaatttgagaggaggtcccaacatcatcacactggcagacattgtaaaagaccctgtgtcacgaacccccgccttggtttttgaacacgtaaacaacacagacttcaagcaattgtaccagacgttaacagactatgatattcgattttacatgtatgagattctgaaggccctggattattgtcacagcatgggaattatgcacagagatgtcaagccccataatgtcatgattgatcatgagcacagaaagctacgactaatagactggggtttggctgagttttatcatcctggccaagaatataatgtccgagttgcttcccgatacttcaaaggtcctgagctacttgtagactatcagatgtacgattatagtttggatatgtggagtttgggttgtatgctggcaagtatgatctttcggaaggagccatttttccatggacatgacaattatgatcagttggtgaggatagccaaggttctggggacagaagatttatatgactatattgacaaatacaacattgaattagatccacgtttcaatgatatcttgggcagacactctcgaaagcgatgggaacgctttgtccacagtgaaaatcagcaccttgtcagccctgaggccttggatttcctggacaaactgctgcgatatgaccaccagtcacggcttactgcaagagaggcaatggagcacccctatttctacactgttgtgaaggaccaggctcgaatgggttcatctagcatgccagggggcagtacgcccgtcagcagcgccaatatgatgtcagggatttcttcagtgccaaccccttcaccccttggacctctggcaggctcaccagtgattgctgctgccaacccccttgggatgcctgttccagctgccgctggcgctcagcagtaacggccctatctgtctcctgatgcctgagcagaggtgggggagtccaccctctccttgatgcagcttgcgcctggcggggaggggtgaaacacttcagaagcaccgtgtctgaaccgttgcttgtggatttatagtagttcagtcataaaaaaaaaattataataggctgattttcttttttctttttttttttaactcgaacttttcataactcaggggattccctgaaaaattacctgcaggtggaatatttcatggacaaatttttttttctcccctcccaaatttagttcctcatcacaaaagaacaaagataaaccagcctcaatcccggctgctgcatttaggtggagacttcttcccattcccaccattgttcctccaccgtcccacactttagggggttggtatctcgtgctcttctccagagattacaaaaatgtagcttctcaggggaggcaggaagaaaggaaggaaggaaagaaggaagggaggacccaatctataggagcagtggactgcttgctggtcgcttacatcactttactccataagcgcttcagtggggttatcctagtggctcttgtggaagtgtgtcttagttacatcaagatgttgaaaatctacccaaaatgcagacagatactaaaaacttctgttcagtaagaatcatgtcttactgatctaaccctaaatccaactcatttatacttttatttttagttcagtttaaaatgttgataccttccctcccaggctccttaccttggtcttttccctgttcatctcccaacatgctgtgctccatagctggtaggagagggaaggcaaaatctttcttagttttctttgtcttggccattttgaattcatttagttactgggcataacttactgctttttacaaaagaaacaaacattgtctgtacaggtttcatgctagagctaatgggagatgtggccacactgacttccattttaagctttctaccttcttttcctccgaccgtccccttccctcacatgccatccagtgagaagacctgctcctcagtcttgtaaatgtatcttgagaggtaggagcagagccactatctccattgaagctgaaatggtagacctgtaattgtgggaaaactataaactctcttgttacagccccgccaccccttgctgtgtgtatatatataatactttgtccttcatatgtgaaagatccagtgttggaattctttggtgtaaataaacgtttggttttatttatcaaggttagatttaagttccctgtgtaaaggtcttgctgggtgggtgtctcatgttcacatctgaggggcctgcagccctgtaccgtggaggcttcccaaggcccccattttatacacccctcgttcgacccatggtaccgggcagagcagagaggccttaaaaaaaaagcaccacaagccaaagcgtctctggggattaaggatcctttgccataaaactcattttgtgtctcagcagtgcagggattggggatggaaaaagtcgccagtttttgtgtgtttgtgtgtgtgtgtaaagtggactttccactgtaatccaaccacctaagtttatcaggtgcttcactgaggaagcctagttttttaagcacaatagcaaaaccatcagctctgtattttctcctgttatttcattacagtagctgcttgtgggaactaggaaaaattcttccaacatattttaaggcctaaaatcttagttccccattctcctaccttatagattcacaggcctttctcgcctaggcatcatagataaacgtaattgtttggggagttgaatttaatgaacttatctaactttgtaacccatcttggctttagtaactttatcaaggtggtggctttagtgaatataatggtaaactttagaggacgctaaagcctccttttatagcgcttctcaacggtagggagagctgaagggaaaacattctgactgtgtggcagggtgattttcttccttatgaccacttacagtggatatttattgtacttgacccttttatgccctagaatgctgtgagggttaccatgttgaatttgtgcagaagctaaaagcaccagatgtgccagagatgcaatttgtgattatgtttgcactggattgtgatttgaacaggacacttataactaatgagttctttcttttgaggtggggagagggttgtaaatcaagacttcataccctatccttgtagctcggaaattgaggtgtagcttaggctgatgcggagagctgcagacagctggacctccttacacccatcagaccttggaataaaccgaaggtgaatgcagaggactctgaggtgccacccaagagccttttaaaataaatagaagtttttaaaaatgctacttaagagtcactgcagaagcatggagagagagaaaaaaaaaaaagacccaattgggtggggggtgggggggaggcaagggtttacagagtaacaacttacgtgttgttgtaaattacctcatctgtataccttgtattgggacactatttctcagcactacctgtgtctgcattgcttagatggcaggaaatggaatggccaacatgaaaggttatgttggcaattactctgaaagattttttaaagtatttttaaactttgtttgaagtggtccctcccctcttcctctgcttttttttaagtttgaagccagaaggccctccccaccttgctttattggttgtaattgtattgtaattggtatgactaaaccataactgtgctgggaagaagttgtgccatgaaggtctttaattttttttaataaaaacatttaaataaatgaaaaaaatgtccctgcagcctgagcaatatgcttctccaaccgacaccgtgtgtgatagatggctccgttttcacgttttgaattctgtttcttgtacttgaaatgcctgtccagcttacataagatagattaaattgttagagtgggactgtcagaggaatatatcttgtaaagtagatcctcagggtatggctaattactatagtcctaaagtagcagagaaaattagagattggttgacagatttgggaattttaatttcttcttagtttttaactttcatctttgcttcaccttttgacaagtatggttataattagaattgaccatttaagcatctcttgaaaaacctgattttgtcccaccagcaaattctctcccaagactggaattgggtttgcatagtagagagcctgtcttcccagggccttttcctagttaaagaaacacttaactaaaaaggctgtgtggtaaggtcatgctcagttccttcctcaaaaaatgagtctaaaattggtttatcctgaatccgacttcccccactgtcatcacttacccttgcccttctttttcctcagaacacctgaacttttgttgtattattttgtatctccccacttgcatgtaaactccctggtgaccttgcatgtcttatgcaatcctcattaaaaccttttgtttttttttaagtgggttcgttttccctcaggatcgaagagtattgaatggaatggcacgaggaaaatatttaacaccctacttggcttgtaataataggtgcttaataaattgtagttccact

SEQ ID NO: 320009 - DNA, 2741 bp, Homo sapiens
agcctcgctctggtccctgcggctggcggccgagccgtgtgtctcctcctccatcgccgccatattgtctgtgtgagcagaggggagagcggccgccgccgctgccgcttccaccacagtttgaagaaaacaggtctgaaacaaggtcttacccccagctgcttctgaacacagtgactgccagatctccaaacatcaagtccagctttgtccgccaacctgtctgacatgtcgggacccgtgccaagcagggccagagtttacacagatgttaatacacacagacctcgagaatactgggattacgagtcacatgtggtggaatggggaaatcaagatgactaccagctggttcgaaaattaggccgaggtaaatacagtgaagtatttgaagccatcaacatcacaaataatgaaaaagttgttgttaaaattctcaagccagtaaaaaagaagaaaattaagcgtgaaataaagattttggagaatttgagaggaggtcccaacatcatcacactggcagacattgtaaaagaccctgtgtcacgaacccccgccttggtttttgaacacgtaaacaacacagacttcaagcaattgtaccagacgttaacagactatgatattcgattttacatgtatgagattctgaaggccctggattattgtcacagcatgggaattatgcacagagatgtcaagccccataatgtcatgattgatcatgagcacagaaagctacgactaatagactggggtttggctgagttttatcatcctggccaagaatataatgtccgagttgcttcccgatacttcaaaggtcctgagctacttgtagactatcagatgtacgattatagtttggatatgtggagtttgggttgtatgctggcaagtatgatctttcggaaggagccatttttccatggacatgacaattatgatcagttggtgaggatagccaaggttctggggacagaagatttatatgactatattgacaaatacaacattgaattagatccacgtttcaatgatatcttgggcagacactctcgaaagcgatgggaacgctttgtccacagtgaaaatcagcaccttgtcagccctgaggccttggatttcctggacaaactgctgcgatatgaccaccagtcacggcttactgcaagagaggcaatggagcacccctatttctacactgttgtgaaggaccaggctcgaatgggttcatctagcatgccagggggcagtacgcccgtcagcagcgccaatatgatgtcagggatttcttcagtgccaaccccttcaccccttggacctctggcaggctcaccagtgattgctgctgccaacccccttgggatgcctgttccagctgccgctggcgctcagcagtaacggccctatctgtctcctgatgcctgagcagaggtgggggagtccaccctctccttgatgcagcttgcgcctggcggggaggggtgaaacacttcagaagcaccgtgtctgaaccgttgcttgtggatttatagtagttcagtcataaaaaaaaaattataataggctgattttcttttttctttttttttttaactcgaacttttcataactcaggggattccctgaaaaattacctgcaggtggaatatttcatggacaaatttttttttctcccctcccaaatttagttcctcatcacaaaagaacaaagataaaccagcctcaatcccggctgctgcatttaggtggagacttcttcccattcccaccattgttcctccaccgtcccacactttagggggttggtatctcgtgctcttctccagagattacaaaaatgtagcttctcaggggaggcaggaagaaaggaaggaaggaaagaaggaagggaggacccaatctataggagcagtggactgcttgctggtcgcttacatcactttactccataagcgcttcagtggggttatcctagtggctcttgtggaagtgtgtcttagttacatcaagatgttgaaaatctacccaaaatgcagacagatactaaaaacttctgttcagtaagaatcatgtcttactgatctaaccctaaatccaactcatttatacttttatttttagttcagtttaaaatgttgataccttccctcccaggctccttaccttggtcttttccctgttcatctcccaacatgctgtgctccatagctggtaggagagggaaggcaaaatctttcttagttttctttgtcttggccattttgaattcatttagttactgggcataacttactgctttttacaaaagaaacaaacattgtctgtacaggtttcatgctagagctaatgggagatgtggccacactgacttccattttaagctttctaccttcttttcctccgaccgtccccttccctcacatgccatccagtgagaagacctgctggtcgcttacatcactttactccataagcgcttcagtggggttatcctagtggctcttgtggaagtgtgcctcagtcttgtaaatgtatcttgagaggtaggagcagagccactatctccattgaagctgaaatggtagacctgtaattgtgggaaaactataaactctcttgttacagccccgccaccccttgctgtgtgtatatatataatactttgtccttcatatgtgaaagatccagtgttggaattctttggtgtaaataaacgtttggttttatttatcaag

SEQ ID NO: 320010 - DNA, 2730 bp, Homo sapiens
agcctcgctctggtccctgcggctggcggccgagccgtgtgtctcctcctccatcgccgcctctatcaaggcttgtcaagcagtgtgctcatcacatggtaaatcatgcagcgtggaacctcataaaatctccaagaaacatcattcacccatactgactagtttcacatctctttgtttgaagaaaacaggtctgaaacaaggtcttacccccagctgcttctgaacacagtgactgccagatctccaaacatcaagtccagctttgtccgccaacctgtctgacatgtcgggacccgtgccaagcagggccagagtttacacagatgttaatacacacagacctcgagaatactgggattacgagtcacatgtggtggaatggggaaatcaagatgactaccagctggttcgaaaattaggccgaggtaaatacagtgaagtatttgaagccatcaacatcacaaataatgaaaaagttgttgttaaaattctcaagccagtaaaaaagaagaaaattaagcgtgaaataaagattttggagaatttgagaggaggtcccaacatcatcacactggcagacattgtaaaagaccctgtgtcacgaacccccgccttggtttttgaacacgtaaacaacacagacttcaagcaattgtaccagacgttaacagactatgatattcgattttacatgtatgagattctgaaggccctggattattgtcacagcatgggaattatgcacagagatgtcaagccccataatgtcatgattgatcatgagcacagaaagctacgactaatagactggggtttggctgagttttatcatcctggccaagaatataatgtccgagttgcttcccgatacttcaaaggtcctgagctacttgtagactatcagatgtacgattatagtttggatatgtggagtttgggttgtatgctggcaagtatgatctttcggaaggagccatttttccatggacatgacaattatgatcagttggtgaggatagccaaggttctggggacagaagatttatatgactatattgacaaatacaacattgaattagatccacgtttcaatgatatcttgggcagacactctcgaaagcgatgggaacgctttgtccacagtgaaaatcagcaccttgtcagccctgaggccttggatttcctggacaaactgctgcgatatgaccaccagtcacggcttactgcaagagaggcaatggagcacccctatttctacactgttgtgaaggaccaggctcgaatgggttcatctagcatgccagggggcagtacgcccgtcagcagcgccaatatgatgtcagggatttcttcagtgccaaccccttcaccccttggacctctggcaggctcaccagtgattgctgctgccaacccccttgggatgcctgttccagctgccgctggcgctcagcagtaacggccctatctgtctcctgatgcctgagcagaggtgggggagtccaccctctccttgatgcagcttgcgcctggcggggaggggtgaaacacttcagaagcaccgtgtctgaaccgttgcttgtggatttatagtagttcagtcataaaaaaaaaattataataggctgattttcttttttctttttttttttaactcgaacttttcataactcaggggattccctgaaaaattacctgcaggtggaatatttcatggacaaatttttttttctcccctcccaaatttagttcctcatcacaaaagaacaaagataaaccagcctcaatcccggctgctgcatttaggtggagacttcttcccattcccaccattgttcctccaccgtcccacactttagggggttggtatctcgtgctcttctccagagattacaaaaatgtagcttctcaggggaggcaggaagaaaggaaggaaggaaagaaggaagggaggacccaatctataggagcagtggactgcttgctggtcgcttacatcactttactccataagcgcttcagtggggttatcctagtggctcttgtggaagtgtgtcttagttacatcaagatgttgaaaatctacccaaaatgcagacagatactaaaaacttctgttcagtaagaatcatgtcttactgatctaaccctaaatccaactcatttatacttttatttttagttcagtttaaaatgttgataccttccctcccaggctccttaccttggtcttttccctgttcatctcccaacatgctgtgctccatagctggtaggagagggaaggcaaaatctttcttagttttctttgtcttggccattttgaattcatttagttactgggcataacttactgctttttacaaaagaaacaaacattgtctgtacaggtttcatgctagagctaatgggagatgtggccacactgacttccattttaagctttctaccttcttttcctccgaccgtccccttccctcacatgccatccagtgagaagacctgctcctcagtcttgtaaatgtatcttgagaggtaggagcagagccactatctccattgaagctgaaatggtagacctgtaattgtgggaaaactataaactctcttgttacagccccgccaccccttgctgtgtgtatatatataatactttgtccttcatatgtgaaagatccagtgttggaattctttggtgtaaataaacgtttggttttatttatcaag

SEQ ID NO: 320011 - DNA, 2894 bp, Homo sapiens
tgggcagctggagtaggggccttcttagggtccctctgggcggggctgagcttcccacctgcagagtgggtgcgaggtggagagaaccccaggcggggttgctggggcgaaagggggaagggaccaagacgtggggcagaacgtctggagttggagttaaggactagttaggagcctggatagaaaaagagaacctcatccacacctgaatagatgaatgagatttgggacttctgaaatgataagctttagatgggaaacctttgggaccttgggatgggatggatgtattttgcatttgagagagagatgaatccttggaaaccagaaggcagactgcgtttgaagaaaacaggtctgaaacaaggtcttacccccagctgcttctgaacacagtgactgccagatctccaaacatcaagtccagctttgtccgccaacctgtctgacatgtcgggacccgtgccaagcagggccagagtttacacagatgttaatacacacagacctcgagaatactgggattacgagtcacatgtggtggaatggggaaatcaagatgactaccagctggttcgaaaattaggccgaggtaaatacagtgaagtatttgaagccatcaacatcacaaataatgaaaaagttgttgttaaaattctcaagccagtaaaaaagaagaaaattaagcgtgaaataaagattttggagaatttgagaggaggtcccaacatcatcacactggcagacattgtaaaagaccctgtgtcacgaacccccgccttggtttttgaacacgtaaacaacacagacttcaagcaattgtaccagacgttaacagactatgatattcgattttacatgtatgagattctgaaggccctggattattgtcacagcatgggaattatgcacagagatgtcaagccccataatgtcatgattgatcatgagcacagaaagctacgactaatagactggggtttggctgagttttatcatcctggccaagaatataatgtccgagttgcttcccgatacttcaaaggtcctgagctacttgtagactatcagatgtacgattatagtttggatatgtggagtttgggttgtatgctggcaagtatgatctttcggaaggagccatttttccatggacatgacaattatgatcagttggtgaggatagccaaggttctggggacagaagatttatatgactatattgacaaatacaacattgaattagatccacgtttcaatgatatcttgggcagacactctcgaaagcgatgggaacgctttgtccacagtgaaaatcagcaccttgtcagccctgaggccttggatttcctggacaaactgctgcgatatgaccaccagtcacggcttactgcaagagaggcaatggagcacccctatttctacactgttgtgaaggaccaggctcgaatgggttcatctagcatgccagggggcagtacgcccgtcagcagcgccaatatgatgtcagggatttcttcagtgccaaccccttcaccccttggacctctggcaggctcaccagtgattgctgctgccaacccccttgggatgcctgttccagctgccgctggcgctcagcagtaacggccctatctgtctcctgatgcctgagcagaggtgggggagtccaccctctccttgatgcagcttgcgcctggcggggaggggtgaaacacttcagaagcaccgtgtctgaaccgttgcttgtggatttatagtagttcagtcataaaaaaaaaattataataggctgattttcttttttctttttttttttaactcgaacttttcataactcaggggattccctgaaaaattacctgcaggtggaatatttcatggacaaatttttttttctcccctcccaaatttagttcctcatcacaaaagaacaaagataaaccagcctcaatcccggctgctgcatttaggtggagacttcttcccattcccaccattgttcctccaccgtcccacactttagggggttggtatctcgtgctcttctccagagattacaaaaatgtagcttctcaggggaggcaggaagaaaggaaggaaggaaagaaggaagggaggacccaatctataggagcagtggactgcttgctggtcgcttacatcactttactccataagcgcttcagtggggttatcctagtggctcttgtggaagtgtgtcttagttacatcaagatgttgaaaatctacccaaaatgcagacagatactaaaaacttctgttcagtaagaatcatgtcttactgatctaaccctaaatccaactcatttatacttttatttttagttcagtttaaaatgttgataccttccctcccaggctccttaccttggtcttttccctgttcatctcccaacatgctgtgctccatagctggtaggagagggaaggcaaaatctttcttagttttctttgtcttggccattttgaattcatttagttactgggcataacttactgctttttacaaaagaaacaaacattgtctgtacaggtttcatgctagagctaatgggagatgtggccacactgacttccattttaagctttctaccttcttttcctccgaccgtccccttccctcacatgccatccagtgagaagacctgctcctcagtcttgtaaatgtatcttgagaggtaggagcagagccactatctccattgaagctgaaatggtagacctgtaattgtgggaaaactataaactctcttgttacagccccgccaccccttgctgtgtgtatatatataatactttgtccttcatatgtgaaagatccagtgttggaattctttggtgtaaataaacgtttggttttatttatcaag

SEQ ID NO: 320012 - DNA, 2462 bp, Homo sapiens
agcctcgctctggtccctgcggctggcggccgagccgtgtgtctcctcctccatcgccgccatattgtctgtgtgagcagaggggagagcggccgccgccgctgccgcttccaccacagaaatcaagatgactaccagctggttcgaaaattaggccgaggtaaatacagtgaagtatttgaagccatcaacatcacaaataatgaaaaagttgttgttaaaattctcaagccagtaaaaaagaagaaaattaagcgtgaaataaagattttggagaatttgagaggaggtcccaacatcatcacactggcagacattgtaaaagaccctgtgtcacgaacccccgccttggtttttgaacacgtaaacaacacagacttcaagcaattgtaccagacgttaacagactatgatattcgattttacatgtatgagattctgaaggccctggattattgtcacagcatgggaattatgcacagagatgtcaagccccataatgtcatgattgatcatgagcacagaaagctacgactaatagactggggtttggctgagttttatcatcctggccaagaatataatgtccgagttgcttcccgatacttcaaaggtcctgagctacttgtagactatcagatgtacgattatagtttggatatgtggagtttgggttgtatgctggcaagtatgatctttcggaaggagccatttttccatggacatgacaattatgatcagttggtgaggatagccaaggttctggggacagaagatttatatgactatattgacaaatacaacattgaattagatccacgtttcaatgatatcttgggcagacactctcgaaagcgatgggaacgctttgtccacagtgaaaatcagcaccttgtcagccctgaggccttggatttcctggacaaactgctgcgatatgaccaccagtcacggcttactgcaagagaggcaatggagcacccctatttctacactgttgtgaaggaccaggctcgaatgggttcatctagcatgccagggggcagtacgcccgtcagcagcgccaatatgatgtcagggatttcttcagtgccaaccccttcaccccttggacctctggcaggctcaccagtgattgctgctgccaacccccttgggatgcctgttccagctgccgctggcgctcagcagtaacggccctatctgtctcctgatgcctgagcagaggtgggggagtccaccctctccttgatgcagcttgcgcctggcggggaggggtgaaacacttcagaagcaccgtgtctgaaccgttgcttgtggatttatagtagttcagtcataaaaaaaaaattataataggctgattttcttttttctttttttttttaactcgaacttttcataactcaggggattccctgaaaaattacctgcaggtggaatatttcatggacaaatttttttttctcccctcccaaatttagttcctcatcacaaaagaacaaagataaaccagcctcaatcccggctgctgcatttaggtggagacttcttcccattcccaccattgttcctccaccgtcccacactttagggggttggtatctcgtgctcttctccagagattacaaaaatgtagcttctcaggggaggcaggaagaaaggaaggaaggaaagaaggaagggaggacccaatctataggagcagtggactgcttgctggtcgcttacatcactttactccataagcgcttcagtggggttatcctagtggctcttgtggaagtgtgtcttagttacatcaagatgttgaaaatctacccaaaatgcagacagatactaaaaacttctgttcagtaagaatcatgtcttactgatctaaccctaaatccaactcatttatacttttatttttagttcagtttaaaatgttgataccttccctcccaggctccttaccttggtcttttccctgttcatctcccaacatgctgtgctccatagctggtaggagagggaaggcaaaatctttcttagttttctttgtcttggccattttgaattcatttagttactgggcataacttactgctttttacaaaagaaacaaacattgtctgtacaggtttcatgctagagctaatgggagatgtggccacactgacttccattttaagctttctaccttcttttcctccgaccgtccccttccctcacatgccatccagtgagaagacctgctcctcagtcttgtaaatgtatcttgagaggtaggagcagagccactatctccattgaagctgaaatggtagacctgtaattgtgggaaaactataaactctcttgttacagccccgccaccccttgctgtgtgtatatatataatactttgtccttcatatgtgaaagatccagtgttggaattctttggtgtaaataaacgtttggttttatttatcaag

SEQ ID NO: 320013 - DNA, 2582 bp, Homo sapiens
cggtttttctccactgacatacaccaccctgacccctatgagaaaagaaagatcgaattttggcatattgtctgtgtgagcagaggggagagcggccgccgccgctgccgcttccaccacagctctatcaaggcttgtcaagcagtgtgctcatcacatggtaaatcatgcagcgtggaacctcataaaatctccaagaaacatcattcacccatactgactagtttcacatctctttgaaatcaagatgactaccagctggttcgaaaattaggccgaggtaaatacagtgaagtatttgaagccatcaacatcacaaataatgaaaaagttgttgttaaaattctcaagccagtaaaaaagaagaaaattaagcgtgaaataaagattttggagaatttgagaggaggtcccaacatcatcacactggcagacattgtaaaagaccctgtgtcacgaacccccgccttggtttttgaacacgtaaacaacacagacttcaagcaattgtaccagacgttaacagactatgatattcgattttacatgtatgagattctgaaggccctggattattgtcacagcatgggaattatgcacagagatgtcaagccccataatgtcatgattgatcatgagcacagaaagctacgactaatagactggggtttggctgagttttatcatcctggccaagaatataatgtccgagttgcttcccgatacttcaaaggtcctgagctacttgtagactatcagatgtacgattatagtttggatatgtggagtttgggttgtatgctggcaagtatgatctttcggaaggagccatttttccatggacatgacaattatgatcagttggtgaggatagccaaggttctggggacagaagatttatatgactatattgacaaatacaacattgaattagatccacgtttcaatgatatcttgggcagacactctcgaaagcgatgggaacgctttgtccacagtgaaaatcagcaccttgtcagccctgaggccttggatttcctggacaaactgctgcgatatgaccaccagtcacggcttactgcaagagaggcaatggagcacccctatttctacactgttgtgaaggaccaggctcgaatgggttcatctagcatgccagggggcagtacgcccgtcagcagcgccaatatgatgtcagggatttcttcagtgccaaccccttcaccccttggacctctggcaggctcaccagtgattgctgctgccaacccccttgggatgcctgttccagctgccgctggcgctcagcagtaacggccctatctgtctcctgatgcctgagcagaggtgggggagtccaccctctccttgatgcagcttgcgcctggcggggaggggtgaaacacttcagaagcaccgtgtctgaaccgttgcttgtggatttatagtagttcagtcataaaaaaaaaattataataggctgattttcttttttctttttttttttaactcgaacttttcataactcaggggattccctgaaaaattacctgcaggtggaatatttcatggacaaatttttttttctcccctcccaaatttagttcctcatcacaaaagaacaaagataaaccagcctcaatcccggctgctgcatttaggtggagacttcttcccattcccaccattgttcctccaccgtcccacactttagggggttggtatctcgtgctcttctccagagattacaaaaatgtagcttctcaggggaggcaggaagaaaggaaggaaggaaagaaggaagggaggacccaatctataggagcagtggactgcttgctggtcgcttacatcactttactccataagcgcttcagtggggttatcctagtggctcttgtggaagtgtgtcttagttacatcaagatgttgaaaatctacccaaaatgcagacagatactaaaaacttctgttcagtaagaatcatgtcttactgatctaaccctaaatccaactcatttatacttttatttttagttcagtttaaaatgttgataccttccctcccaggctccttaccttggtcttttccctgttcatctcccaacatgctgtgctccatagctggtaggagagggaaggcaaaatctttcttagttttctttgtcttggccattttgaattcatttagttactgggcataacttactgctttttacaaaagaaacaaacattgtctgtacaggtttcatgctagagctaatgggagatgtggccacactgacttccattttaagctttctaccttcttttcctccgaccgtccccttccctcacatgccatccagtgagaagacctgctcctcagtcttgtaaatgtatcttgagaggtaggagcagagccactatctccattgaagctgaaatggtagacctgtaattgtgggaaaactataaactctcttgttacagccccgccaccccttgctgtgtgtatatatataatactttgtccttcatatgtgaaagatccagtgttggaattctttggtgtaaataaacgtttggttttatttatcaag

SEQ ID NO: 320014 - DNA, 2387 bp, Homo sapiens
cggtttttctccactgacatacaccaccctgacccctatgagaaaagaaagatcgaattttggcatattgtctgtgtgagcagaggggagagcggccgccgccgctgccgcttccaccacagtttgaagaaaacaggtctgaaacaaggtcttacccccagctgcttctgaacacagtgactgccagatctccaaacatcaagtccagctttgtccgccaacatcatcacactggcagacattgtaaaagaccctgtgtcacgaacccccgccttggtttttgaacacgtaaacaacacagacttcaagcaattgtaccagacgttaacagactatgatattcgattttacatgtatgagattctgaaggccctggattattgtcacagcatgggaattatgcacagagatgtcaagccccataatgtcatgattgatcatgagcacagaaagctacgactaatagactggggtttggctgagttttatcatcctggccaagaatataatgtccgagttgcttcccgatacttcaaaggtcctgagctacttgtagactatcagatgtacgattatagtttggatatgtggagtttgggttgtatgctggcaagtatgatctttcggaaggagccatttttccatggacatgacaattatgatcagttggtgaggatagccaaggttctggggacagaagatttatatgactatattgacaaatacaacattgaattagatccacgtttcaatgatatcttgggcagacactctcgaaagcgatgggaacgctttgtccacagtgaaaatcagcaccttgtcagccctgaggccttggatttcctggacaaactgctgcgatatgaccaccagtcacggcttactgcaagagaggcaatggagcacccctatttctacactgttgtgaaggaccaggctcgaatgggttcatctagcatgccagggggcagtacgcccgtcagcagcgccaatatgatgtcagggatttcttcagtgccaaccccttcaccccttggacctctggcaggctcaccagtgattgctgctgccaacccccttgggatgcctgttccagctgccgctggcgctcagcagtaacggccctatctgtctcctgatgcctgagcagaggtgggggagtccaccctctccttgatgcagcttgcgcctggcggggaggggtgaaacacttcagaagcaccgtgtctgaaccgttgcttgtggatttatagtagttcagtcataaaaaaaaaattataataggctgattttcttttttctttttttttttaactcgaacttttcataactcaggggattccctgaaaaattacctgcaggtggaatatttcatggacaaatttttttttctcccctcccaaatttagttcctcatcacaaaagaacaaagataaaccagcctcaatcccggctgctgcatttaggtggagacttcttcccattcccaccattgttcctccaccgtcccacactttagggggttggtatctcgtgctcttctccagagattacaaaaatgtagcttctcaggggaggcaggaagaaaggaaggaaggaaagaaggaagggaggacccaatctataggagcagtggactgcttgctggtcgcttacatcactttactccataagcgcttcagtggggttatcctagtggctcttgtggaagtgtgtcttagttacatcaagatgttgaaaatctacccaaaatgcagacagatactaaaaacttctgttcagtaagaatcatgtcttactgatctaaccctaaatccaactcatttatacttttatttttagttcagtttaaaatgttgataccttccctcccaggctccttaccttggtcttttccctgttcatctcccaacatgctgtgctccatagctggtaggagagggaaggcaaaatctttcttagttttctttgtcttggccattttgaattcatttagttactgggcataacttactgctttttacaaaagaaacaaacattgtctgtacaggtttcatgctagagctaatgggagatgtggccacactgacttccattttaagctttctaccttcttttcctccgaccgtccccttccctcacatgccatccagtgagaagacctgctcctcagtcttgtaaatgtatcttgagaggtaggagcagagccactatctccattgaagctgaaatggtagacctgtaattgtgggaaaactataaactctcttgttacagccccgccaccccttgctgtgtgtatatatataatactttgtccttcatatgtgaaagatccagtgttggaattctttggtgtaaataaacgtttggttttatttatcaag

SEQ ID NO: 320015 - DNA, 2643 bp, Homo sapiens
ttagaggaagaaatggaaagggcccatgtttcatcctaattgataaaaagtttgatatactttagtattactaacgatttaaattgctactttgtaaggttttaagacattaacatgtttaacatgttttaaaacattaacatcaagactgatgattgaaatgctaattctgcagaagtgtctggtctttggaatagaaatctttttttctttcaattcaacatttgtaagtacctgcagaatacctggcacagtgctaggagaaggattcagagacgaatgtgacacattttcttccttcaaggtgtgctcataagtaagccatttatcatttatgtattacactacgtgttgaaatactctgaaaaaatttttttttttttttttggctgatgtacttttcccctttcagccagtaaaaaagaagaaaattaagcgtgaaataaagattttggagaatttgagaggaggtcccaacatcatcacactggcagacattgtaaaagaccctgtgtcacgaacccccgccttggtttttgaacacgtaaacaacacagacttcaagcaattgtaccagacgttaacagactatgatattcgattttacatgtatgagattctgaaggccctggattattgtcacagcatgggaattatgcacagagatgtcaagccccataatgtcatgattgatcatgagcacagaaagctacgactaatagactggggtttggctgagttttatcatcctggccaagaatataatgtccgagttgcttcccgatacttcaaaggtcctgagctacttgtagactatcagatgtacgattatagtttggatatgtggagtttgggttgtatgctggcaagtatgatctttcggaaggagccatttttccatggacatgacaattatgatcagttggtgaggatagccaaggttctggggacagaagatttatatgactatattgacaaatacaacattgaattagatccacgtttcaatgatatcttgggcagacactctcgaaagcgatgggaacgctttgtccacagtgaaaatcagcaccttgtcagccctgaggccttggatttcctggacaaactgctgcgatatgaccaccagtcacggcttactgcaagagaggcaatggagcacccctatttctacactgttgtgaaggaccaggctcgaatgggttcatctagcatgccagggggcagtacgcccgtcagcagcgccaatatgatgtcagggatttcttcagtgccaaccccttcaccccttggacctctggcaggctcaccagtgattgctgctgccaacccccttgggatgcctgttccagctgccgctggcgctcagcagtaacggccctatctgtctcctgatgcctgagcagaggtgggggagtccaccctctccttgatgcagcttgcgcctggcggggaggggtgaaacacttcagaagcaccgtgtctgaaccgttgcttgtggatttatagtagttcagtcataaaaaaaaaattataataggctgattttcttttttctttttttttttaactcgaacttttcataactcaggggattccctgaaaaattacctgcaggtggaatatttcatggacaaatttttttttctcccctcccaaatttagttcctcatcacaaaagaacaaagataaaccagcctcaatcccggctgctgcatttaggtggagacttcttcccattcccaccattgttcctccaccgtcccacactttagggggttggtatctcgtgctcttctccagagattacaaaaatgtagcttctcaggggaggcaggaagaaaggaaggaaggaaagaaggaagggaggacccaatctataggagcagtggactgcttgctggtcgcttacatcactttactccataagcgcttcagtggggttatcctagtggctcttgtggaagtgtgtcttagttacatcaagatgttgaaaatctacccaaaatgcagacagatactaaaaacttctgttcagtaagaatcatgtcttactgatctaaccctaaatccaactcatttatacttttatttttagttcagtttaaaatgttgataccttccctcccaggctccttaccttggtcttttccctgttcatctcccaacatgctgtgctccatagctggtaggagagggaaggcaaaatctttcttagttttctttgtcttggccattttgaattcatttagttactgggcataacttactgctttttacaaaagaaacaaacattgtctgtacaggtttcatgctagagctaatgggagatgtggccacactgacttccattttaagctttctaccttcttttcctccgaccgtccccttccctcacatgccatccagtgagaagacctgctcctcagtcttgtaaatgtatcttgagaggtaggagcagagccactatctccattgaagctgaaatggtagacctgtaattgtgggaaaactataaactctcttgttacagccccgccaccccttgctgtgtgtatatatataatactttgtccttcatatgtgaaagatccagtgttggaattctttggtgtaaataaacgtttggttttatttatcaag

SEQ ID NO: 320016 - DNA, 2066 bp, Homo sapiens
ttgggatagtttgaaagggacattcatgtccattaactccaagggtcctcacaactgccctgtgatacaagttacagtgacctcatggtccaataaaaaatgactttgccaagccccagctgcggccgcagcctacgactaatagactggggtttggctgagttttatcatcctggccaagaatataatgtccgagttgcttcccgatacttcaaaggtcctgagctacttgtagactatcagatgtacgattatagtttggatatgtggagtttgggttgtatgctggcaagtatgatctttcggaaggagccatttttccatggacatgacaattatgatcagttggtgaggatagccaaggttctggggacagaagatttatatgactatattgacaaatacaacattgaattagatccacgtttcaatgatatcttgggcagacactctcgaaagcgatgggaacgctttgtccacagtgaaaatcagcaccttgtcagccctgaggccttggatttcctggacaaactgctgcgatatgaccaccagtcacggcttactgcaagagaggcaatggagcacccctatttctacactgttgtgaaggaccaggctcgaatgggttcatctagcatgccagggggcagtacgcccgtcagcagcgccaatatgatgtcagggatttcttcagtgccaaccccttcaccccttggacctctggcaggctcaccagtgattgctgctgccaacccccttgggatgcctgttccagctgccgctggcgctcagcagtaacggccctatctgtctcctgatgcctgagcagaggtgggggagtccaccctctccttgatgcagcttgcgcctggcggggaggggtgaaacacttcagaagcaccgtgtctgaaccgttgcttgtggatttatagtagttcagtcataaaaaaaaaattataataggctgattttcttttttctttttttttttaactcgaacttttcataactcaggggattccctgaaaaattacctgcaggtggaatatttcatggacaaatttttttttctcccctcccaaatttagttcctcatcacaaaagaacaaagataaaccagcctcaatcccggctgctgcatttaggtggagacttcttcccattcccaccattgttcctccaccgtcccacactttagggggttggtatctcgtgctcttctccagagattacaaaaatgtagcttctcaggggaggcaggaagaaaggaaggaaggaaagaaggaagggaggacccaatctataggagcagtggactgcttgctggtcgcttacatcactttactccataagcgcttcagtggggttatcctagtggctcttgtggaagtgtgtcttagttacatcaagatgttgaaaatctacccaaaatgcagacagatactaaaaacttctgttcagtaagaatcatgtcttactgatctaaccctaaatccaactcatttatacttttatttttagttcagtttaaaatgttgataccttccctcccaggctccttaccttggtcttttccctgttcatctcccaacatgctgtgctccatagctggtaggagagggaaggcaaaatctttcttagttttctttgtcttggccattttgaattcatttagttactgggcataacttactgctttttacaaaagaaacaaacattgtctgtacaggtttcatgctagagctaatgggagatgtggccacactgacttccattttaagctttctaccttcttttcctccgaccgtccccttccctcacatgccatccagtgagaagacctgctcctcagtcttgtaaatgtatcttgagaggtaggagcagagccactatctccattgaagctgaaatggtagacctgtaattgtgggaaaactataaactctcttgttacagccccgccaccccttgctgtgtgtatatatataatactttgtccttcatatgtgaaagatccagtgttggaattctttggtgtaaataaacgtttggttttatttatcaag

SEQ ID NO: 320017 - DNA, 2005 bp, Homo sapiens
ggactttcctgatgcaaaggcttttgctggccaattggcagagatgccaggaatatgtgtggggatgggaaataggcctggtgagctcagccacctgaccctccttgctacacagaagcggtcacgtcctgtcaagtaacctgaattatgtttcttaaaattgagaggactcagatgtcttttttcactctagctatgttgtttccagtctccagttagctttgttgtcccactcagtggcagagcggtgcaagactaccctcttgagtttggatccctctttgcttttgtctgggctgttagccactaagaaaaatgtaggaatgaaatgttgggcttctgtgcccacgtggcccatttctcatgccctcttttggtcctgcagacactctcgaaagcgatgggaacgctttgtccacagtgaaaatcagcaccttgtcagccctgaggccttggatttcctggacaaactgctgcgatatgaccaccagtcacggcttactgcaagagaggcaatggagcacccctatttctacactgttgtgaaggaccaggctcgaatgggttcatctagcatgccagggggcagtacgcccgtcagcagcgccaatatgatgtcagggatttcttcagtgccaaccccttcaccccttggacctctggcaggctcaccagtgattgctgctgccaacccccttgggatgcctgttccagctgccgctggcgctcagcagtaacggccctatctgtctcctgatgcctgagcagaggtgggggagtccaccctctccttgatgcagcttgcgcctggcggggaggggtgaaacacttcagaagcaccgtgtctgaaccgttgcttgtggatttatagtagttcagtcataaaaaaaaaattataataggctgattttcttttttctttttttttttaactcgaacttttcataactcaggggattccctgaaaaattacctgcaggtggaatatttcatggacaaatttttttttctcccctcccaaatttagttcctcatcacaaaagaacaaagataaaccagcctcaatcccggctgctgcatttaggtggagacttcttcccattcccaccattgttcctccaccgtcccacactttagggggttggtatctcgtgctcttctccagagattacaaaaatgtagcttctcaggggaggcaggaagaaaggaaggaaggaaagaaggaagggaggacccaatctataggagcagtggactgcttgctggtcgcttacatcactttactccataagcgcttcagtggggttatcctagtggctcttgtggaagtgtgtcttagttacatcaagatgttgaaaatctacccaaaatgcagacagatactaaaaacttctgttcagtaagaatcatgtcttactgatctaaccctaaatccaactcatttatacttttatttttagttcagtttaaaatgttgataccttccctcccaggctccttaccttggtcttttccctgttcatctcccaacatgctgtgctccatagctggtaggagagggaaggcaaaatctttcttagttttctttgtcttggccattttgaattcatttagttactgggcataacttactgctttttacaaaagaaacaaacattgtctgtacaggtttcatgctagagctaatgggagatgtggccacactgacttccattttaagctttctaccttcttttcctccgaccgtccccttccctcacatgccatccagtgagaagacctgctcctcagtcttgtaaatgtatcttgagaggtaggagcagagccactatctccattgaagctgaaatggtagacctgtaattgtgggaaaactataaactctcttgttacagccccgccaccccttgctgtgtgtatatatataatactttgtccttcatatgtgaaagatccagtgttggaattctttggtgtaaataaacgtttggttttatttatcaag

SEQ ID NO: 320018 - DNA, 2255 bp, Homo sapiens
agcctcgctctggtccctgcggctggcggccgagccgtgtgtctcctcctccatcgccgccatattgtctgtgtgagcagaggggagagcggccgccgccgctgccgcttccaccacagtttgaagaaaacaggtctgaaacaaggtcttacccccagctgcttctgaacacagtgactgccagatctccaaacatcaagtccagctttgtccgccaacctgtctgacatgtcgggacccgtgccaagcagggccagagtttacacagatgttaatacacacagacctcgagaatactgggattacgagtcacatgtggtggaatggggaaatcaagatgactaccagctggttcgaaaattaggccgaggtaaatacagtgaagtatttgaagccatcaacatcacaaataatgaaaaagttgttgttaaaattctcaagccagtaaaaaagaagaaaattaagcgtgaaataaagattttggagaatttgagaggaggtcccaacatcatcacactggcagacattgtaaaagaccctgtgtcacgaacccccgccttggtttttgaacacgtaaacaacacagacttcaagcaattgtaccagacgttaacagactatgatattcgattttacatgtatgagattctgaaggccctggattattgtcacagcatgggaattatgcacagagatgtcaagccccataatgtcatgattgatcatgagcacagaaagctacgactaatagactggggtttggctgagttttatcatcctggccaagaatataatgtccgagttgcttcccgatacttcaaaggtcctgagctacttgtagactatcagatgtacgattatagtttggatatgtggagtttgggttgtatgctggcaagtatgatctttcggaaggagccatttttccatggacatgacaattatgatcagttggtgaggatagccaaggttctggggacagaagatttatatgactatattgacaaatacaacattgaattagatccacgtttcaatgatatcttgggcagacactctcgaaagcgatgggaacgctttgtccacagtgaaaatcagcaccttgtcagccctgaggccttggatttcctggacaaactgctgcgatatgaccaccagtcacggcttactgcaagagaggcaatggagcacccctatttctacactgttgtgaaggaccaggctcgaatgggttcatctagcatgccagggggcagtacgcccgtcagcagcgccaatatgatgtcagagccccagtttgagggacagcgggatatccaccatgctgctgtgagactcgggcagttgtgactggtttagaagtggatacacagggagaggtcttctggaaaaggtcttctggagagctgagatcagaagacaatcaactggcttcaaatctaaggagagacaggcacaaaatggaagagatgacatgggcactggttacctggtaaacacaagtggacactggtgagggactgggtcatggagactgcagtagtctttacccttttcagcgtttttcaccatgaaccccactgggagcacacagaagattggagaaagttttaataaaatgtctcaagatctggaagaagacaatggcagctactgtgaaaggatcacagtgctccacccagacccttccctgtatcccctaccggacaaaagccttagtctgtggagggaaggacaccaaatcctgtcacccccttggatgaagctcccttgcatctgggggaatgaaacaggaacaaaacaaaactttccctgggcaggggcaggaatacacactgggcccagaactgggggaggaacaggagcactaaggaggacataaccccaaaatcagagacacaaagggcctgacagagactgagacttgatcagaacagagaattccctcctcccccacctgccaatggtaagctgacaagccttgagttagaagtaaaaatgttacaggagagagacaagagtatgggaagaagaccctttctgagggtcacaaagggaggacctaaagctgagcagggagcacacatggaaggagaaaatccctctggcaggccagcctgcaccctcagtccaaggtgtcattggaggaactggaagctgctgcattgggggtaaccatagcaacaataaacctcaaacctagcccaactcttttttttatttactttttagagacaaggtcttgctctattgcc

SEQ ID NO: 320019 - DNA, 1529 bp, Homo sapiens
agcctcgctctggtccctgcggctggcggccgagccgtgtgtctcctcctccatcgccgccatattgtctgtgtgagcagaggggagagcggccgccgccgctgccgcttccaccacagtttgaagaaaacaggtctgaaacaaggtcttacccccagctgcttctgaacacagtgactgccagatctccaaacatcaagtccagctttgtccgccaacctgtctgacatgtcgggacccgtgccaagcagggccagagtttacacagatgttaatacacacagacctcgagaatactgggattacgagtcacatgtggtggaatggggaaatcaagatgactaccagctggttcgaaaattaggccgaggtaaatacagtgaagtatttgaagccatcaacatcacaaataatgaaaaagttgttgttaaaattctcaagccagtaaaaaagaagaaaattaagcgtgaaataaagattttggagaatttgagaggaggtcccaacatcatcacactggcagacattgtaaaagaccctgtgtcacgaacccccgccttggtttttgaacacgtaaacaacacagacttcaagcaattgtaccagacgttaacagactatgatattcgattttacatgtatgagattctgaaggccctggattattgtcacagcatgggaattatgcacagagatgtcaagccccataatgtcatgattgatcatgagcacagaaagctacgactaatagactggggtttggctgagttttatcatcctggccaagaatataatgtccgagttgcttcccgatacttcaaaggtcctgagctacttgtagactatcagatgtacgattatagtttggatatgtggagtttgggttgtatgctggcaagtatgatctttcggaaggagccatttttccatggacatgacaattatgatcagttggtgaggatagccaaggttctggggacagaagatttatatgactatattgacaaatacaacattgaattagatccacgtttcaatgatatcttgggcagacactctcgaaagcgatgggaacgctttgtccacagtgaaaatcagcaccttgtcagccctgaggccttggatttcctggacaaactgctgcgatatgaccaccagtcacggcttactgcaagagaggcaatggagcacccctatttctacactgttgtgaaggaccaggctcgaatgggttcatctagcatgccagggggcagtacgcccgtcagcagcgccaatatgatgtcagggatttcttcagtgccaaccccttcaccccttggacctctggcaggctcaccagtgattgctgctgccaacccccttgggatgcctgttccagctgccgctggcgctcagcagtaacggccctatctgtctcctgatgccttcttttaccccatgccaccatagtggttcgctcccccaataaaatgctactaagctgagtggggaaacccagcaaggcctgtctgtctagattcttcttg

SEQ ID NO: 320020 - DNA, 4256 bp, Homo sapiens
agcctcgctctggtccctgcggctggcggccgagccgtgtgtctcctcctccatcgccgccatattgtctgtgtgagcagaggggagagcggccgccgccgctgccgcttccaccacagtttgaagaaaacaggtctgaaacaaggtcttacccccagctgcttctgaacacagtgactgccagatctccaaacatcaagtccagctttgtccgccaacctgtctgacatgtcgggacccgtgccaagcagggccagagtttacacagatgttaatacacacagacctcgagaatactgggattacgagtcacatgtggtggaatggggaaatcaagatgactaccagctggttcgaaaattaggccgaggtaaatacagtgaagtatttgaagccatcaacatcacaaataatgaaaaagttgttgttaaaattctcaagccagtaaaaaagaagaaaattaagcgtgaaataaagattttggagaatttgagaggaggtcccaacatcatcacactggcagacattgtaaaagaccctgtgtcacgaacccccgccttggtttttgaacacgtaaacaacacagacttcaagcaattgtaccagacgttaacagactatgatattcgattttacatgtatgagattctgaaggccctggattattgtcacagcatgggaattatgcacagagatgtcaagccccataatgtcatgattgatcatgagcacagaaagctacgactaatagactggggtttggctgagttttatcatcctggccaagaatataatgtccgagttgcttcccgatacttcaaaggtcctgagctacttgtagactatcagatgtacgattatagtttggatatgtggagtttgggttgtatgctggcaagtatgatctttcggaaggagccatttttccatggacatgacaattatgatcagttggtgaggatagccaaggttctggggacagaagatttatatgactatattgacaaatacaacattgaattagatccacgtttcaatgatatcttgggcagacactctcgaaagcgatgggaacgctttgtccacagtgaaaatcagcaccttgtcagccctgaggccttggatttcctggacaaactgctgcgatatgaccaccagtcacggcttactgcaagagaggcaatggagcacccctatttctacactgttgtgaaggaccaggctcgaatgggttcatctagcatgccagggggcagtacgcccgtcagcagcgccaatatgatgtcagggatttcttcagtgccaaccccttcaccccttggacctctggcaggctcaccagtgattgctgctgccaacccccttgggatgcctgttccagctgccgctggcgctcagcagtaacggccctatctgtctcctgatgcctgagcagaggtgggggagtccaccctctccttgatgcagcttgcgcctggcggggaggggtgaaacacttcagaagcaccgtgtctgaaccgttgcttgtggatttatagtagttcagtcataaaaaaaaaattataataggctgattttcttttttctttttttttttaactcgaacttttcataactcaggggattccctgaaaaattacctgcaggtggaatatttcatggacaaatttttttttctcccctcccaaatttagttcctcatcacaaaagaacaaagataaaccagcctcaatcccggctgctgcatttaggtggagacttcttcccattcccaccattgttcctccaccgtcccacactttagggggttggtatctcgtgctcttctccagagattacaaaaatgtagcttctcaggggaggcaggaagaaaggaaggaaggaaagaaggaagggaggacccaatctataggagcagtggactgcttgctggtcgcttacatcactttactccataagcgcttcagtggggttatcctagtggctcttgtggaagtgtgtcttagttacatcaagatgttgaaaatctacccaaaatgcagacagatactaaaaacttctgttcagtaagaatcatgtcttactgatctaaccctaaatccaactcatttatacttttatttttagttcagtttaaaatgttgataccttccctcccaggctccttaccttggtcttttccctgttcatctcccaacatgctgtgctccatagctggtaggagagggaaggcaaaatctttcttagttttctttgtcttggccattttgaattcatttagttactgggcataacttactgctttttacaaaagaaacaaacattgtctgtacaggtttcatgctagagctaatgggagatgtggccacactgacttccattttaagctttctaccttcttttcctccgaccgtccccttccctcacatgccatccagtgagaagacctgctcctcagtcttgtaaatgtatcttgagaggtaggagcagagccactatctccattgaagctgaaatggtagacctgtaattgtgggaaaactataaactctcttgttacagccccgccaccccttgctgtgtgtatatatataatactttgtccttcatatgtgaaagatccagtgttggaattctttggtgtaaataaacgtttggttttatttatcaaggttagatttaagttccctgtgtaaaggtcttgctgggtgggtgtctcatgttcacatctgaggggcctgcagccctgtaccgtggaggcttcccaaggcccccattttatacacccctcgttcgacccatggtaccgggcagagcagagaggccttaaaaaaaaagcaccacaagccaaagcgtctctggggattaaggatcctttgccataaaactcattttgtgtctcagcagtgcagggattggggatggaaaaagtcgccagtttttgtgtgtttgtgtgtgtgtgtaaagtggactttccactgtaatccaaccacctaagtttatcaggtgcttcactgaggaagcctagttttttaagcacaatagcaaaaccatcagctctgtattttctcctgttatttcattacagtagctgcttgtgggaactaggaaaaattcttccaacatattttaaggcctaaaatcttagttccccattctcctaccttatagattcacaggcctttctcgcctaggcatcatagataaacgtaattgtttggggagttgaatttaatgaacttatctaactttgtaacccatcttggctttagtaactttatcaaggtggtggctttagtgaatataatggtaaactttagaggacgctaaagcctccttttatagcgcttctcaacggtagggagagctgaagggaaaacattctgactgtgtggcagggtgattttcttccttatgaccacttacagtggatatttattgtacttgacccttttatgccctagaatgctgtgagggttaccatgttgaatttgtgcagaagctaaaagcaccagatgtgccagagatgcaatttgtgattatgtttgcactggattgtgatttgaacaggacacttataactaatgagttctttcttttgaggtggggagagggttgtaaatcaagacttcataccctatccttgtagctcggaaattgaggtgtagcttaggctgatgcggagagctgcagacagctggacctccttacacccatcagaccttggaataaaccgaaggtgaatgcagaggactctgaggtgccacccaagagccttttaaaataaatagaagtttttaaaaatgctacttaagagtcactgcagaagcatggagagagagaaaaaaaaaaaagacccaattgggtggggggtgggggggaggcaagggtttacagagtaacaacttacgtgttgttgtaaattacctcatctgtataccttgtattgggacactatttctcagcactacctgtgtctgcattgcttagatggcaggaaatggaatggccaacatgaaaggttatgttggcaattactctgaaagattttttaaagtatttttaaactttgtttgaagtggtccctcccctcttcctctgcttttttttaagtttgaagccagaaggccctccccaccttgctttattggttgtaattgtattgtaattggtatgactaaaccataactgtgctgggaagaagttgtgccatgaaggtctttaattttttttaataaaaacatttaaataaatga

SEQ ID NO: 320021 - DNA, 2784 bp, Homo sapiens
agcctcgctctggtccctgcggctggcggccgagccgtgtgtctcctcctccatcgccgccatattgtctgtgtgagcagaggggagagcggccgccgccgctgccgcttccaccacagtttgaagaaaacaggtctgaaacaaggtcttacccccagctgcttctgaacacagtgactgccagatctccaaacatcaagtccagctttgtccgccaacctgtctgacatgtcgggacccgtgccaagcagggccagagtttacacagatgttaatacacacagacctcgagaatactgggattacgagtcacatgtggtggaatggggaaatcaagatgactaccagctggttcgaaaattaggccgaggtaaatacagtgaagtatttgaagccatcaacatcacaaataatgaaaaagttgttgttaaaattctcaagccagtaaaaaagaagaaaattaagcgtgaaataaagattttggagaatttgagaggaggtcccaacatcatcacactggcagacattgtaaaagaccctgtgtcacgaacccccgccttggtttttgaacacgtaaacaacacagacttcaagcaattgtaccagacgttaacagactatgatattcgattttacatgtatgagattctgaaggccctggattattgtcacagcatgggaattatgcacagagatgtcaagccccataatgtcatgattgatcatgagcacagaaagctacgactaatagactggggtttggctgagttttatcatcctggccaagaatataatgtccgagttgcttcccgatacttcaaaggtcctgagctacttgtagactatcagatgtacgattatagtttggatatgtggagtttgggttgtatgctggcaagtatgatctttcggaaggagccatttttccatggacatgacaattatgatcagttggtgaggatagccaaggttctggggacagaagatttatatgactatattgacaaatacaacattgaattagatccacgtttcaatgatatcttgggcagacactctcgaaagcgatgggaacgctttgtccacagtgaaaatcagcaccttgtcagccctgaggccttggatttcctggacaaactgctgcgatatgaccaccagtcacggcttactgcaagagaggcaatggagcacccctatttctacactgttgtgaaggaccaggctcgaatgggttcatctagcatgccagggggcagtacgcccgtcagcagcgccaatatgatgtcagggatttcttcagtgccaaccccttcaccccttggacctctggcaggctcaccagtgattgctgctgccaacccccttgggatgcctgttccagctgccgctggcgctcagcagtaacggccctatctgtctcctgatgcctgagcagaggtgggggagtccaccctctccttgatgcagcttgcgcctggcggggaggggtgaaacacttcagaagcaccgtgtctgaaccgttgcttgtggatttatagtagttcagtcataaaaaaaaaattataataggctgattttcttttttctttttttttttaactcgaacttttcataactcaggggattccctgaaaaattacctgcaggtggaatatttcatggacaaatttttttttctcccctcccaaatttagttcctcatcacaaaagaacaaagataaaccagcctcaatcccggctgctgcatttaggtggagacttcttcccattcccaccattgttcctccaccgtcccacactttagggggttggtatctcgtgctcttctccagagattacaaaaatgtagcttctcaggggaggcaggaagaaaggaaggaaggaaagaaggaagggaggacccaatctataggagcagtggactgcttgctggtcgcttacatcactttactccataagcgcttcagtggggttatcctagtggctcttgtggaagtgtgtcttagttacatcaagatgttgaaaatctacccaaaatgcagacagatactaaaaacttctgttcagtaagaatcatgtcttactgatctaaccctaaatccaactcatttatacttttatttttagttcagtttaaaatgttgataccttccctcccaggctccttaccttggtcttttccctgttcatctcccaacatgctgtgctccatagctggtaggagagggaaggcaaaatctttcttagttttctttgtcttggccattttgaattcatttagttactgggcataacttactgctttttacaaaagaaacaaacattgtctgtacaggtttcatgctagagctaatgggagatgtggccacactgacttccattttaagctttctaccttcttttcctccgaccgtccccttccctcacatgccatccagtgagaagacctgctcctcagtcttgtaaatgtatcttgagaggtaggagcagagccactatctccattgaagctgaaatggtagacctgtaattgtgggaaaactataaactctcttgttacagccccgccaccccttgctgtgtgtatatatataatactttgtccttcatatgtgaaaggtggatcttgggtaataacgtggtttatcaaacacaacaaacaaaaaatttggggcgtgcccgaagttaaactcctgggggggcccaggaagacgggcaggtcggaacgggagggggtcccaaaaagcggggcaggttaaccgggtcgggggtctaaggcaggca

SEQ ID NO: 320022 - DNA, 2789 bp, Homo sapiens
agcctcgctctggtccctgcggctggcggccgagccgtgtgtctcctcctccatcgccgccatattgtctgtgtgagcagaggggagagcggccgccgccgctgccgcttccaccacagctctatcaaggcttgtcaagcagtgtgctcatcacatggtaaatcatgcagcgtggaacctcataaaatctccaagaaacatcattcacccatactgactagtttcacatctctttgtttgaagaaaacaggtctgaaacaaggtcttacccccagctgcttctgaacacagtgactgccagatctccaaacatcaagtccagctttgtccgccaacctgtctgacatgtcgggacccgtgccaagcagggccagagtttacacagatgttaatacacacagacctcgagaatactgggattacgagtcacatgtggtggaatggggaaatcaagatgactaccagctggttcgaaaattaggccgaggtaaatacagtgaagtatttgaagccatcaacatcacaaataatgaaaaagttgttgttaaaattctcaagccagtaaaaaagaagaaaattaagcgtgaaataaagattttggagaatttgagaggaggtcccaacatcatcacactggcagacattgtaaaagaccctgtgtcacgaacccccgccttggtttttgaacacgtaaacaacacagacttcaagcaattgtaccagacgttaacagactatgatattcgattttacatgtatgagattctgaaggccctggattattgtcacagcatgggaattatgcacagagatgtcaagccccataatgtcatgattgatcatgagcacagaaagctacgactaatagactggggtttggctgagttttatcatcctggccaagaatataatgtccgagttgcttcccgatacttcaaaggtcctgagctacttgtagactatcagatgtacgattatagtttggatatgtggagtttgggttgtatgctggcaagtatgatctttcggaaggagccatttttccatggacatgacaattatgatcagttggtgaggatagccaaggttctggggacagaagatttatatgactatattgacaaatacaacattgaattagatccacgtttcaatgatatcttgggcagacactctcgaaagcgatgggaacgctttgtccacagtgaaaatcagcaccttgtcagccctgaggccttggatttcctggacaaactgctgcgatatgaccaccagtcacggcttactgcaagagaggcaatggagcacccctatttctacactgttgtgaaggaccaggctcgaatgggttcatctagcatgccagggggcagtacgcccgtcagcagcgccaatatgatgtcagggatttcttcagtgccaaccccttcaccccttggacctctggcaggctcaccagtgattgctgctgccaacccccttgggatgcctgttccagctgccgctggcgctcagcagtaacggccctatctgtctcctgatgcctgagcagaggtgggggagtccaccctctccttgatgcagcttgcgcctggcggggaggggtgaaacacttcagaagcaccgtgtctgaaccgttgcttgtggatttatagtagttcagtcataaaaaaaaaattataataggctgattttcttttttctttttttttttaactcgaacttttcataactcaggggattccctgaaaaattacctgcaggtggaatatttcatggacaaatttttttttctcccctcccaaatttagttcctcatcacaaaagaacaaagataaaccagcctcaatcccggctgctgcatttaggtggagacttcttcccattcccaccattgttcctccaccgtcccacactttagggggttggtatctcgtgctcttctccagagattacaaaaatgtagcttctcaggggaggcaggaagaaaggaaggaaggaaagaaggaagggaggacccaatctataggagcagtggactgcttgctggtcgcttacatcactttactccataagcgcttcagtggggttatcctagtggctcttgtggaagtgtgtcttagttacatcaagatgttgaaaatctacccaaaatgcagacagatactaaaaacttctgttcagtaagaatcatgtcttactgatctaaccctaaatccaactcatttatacttttatttttagttcagtttaaaatgttgataccttccctcccaggctccttaccttggtcttttccctgttcatctcccaacatgctgtgctccatagctggtaggagagggaaggcaaaatctttcttagttttctttgtcttggccattttgaattcatttagttactgggcataacttactgctttttacaaaagaaacaaacattgtctgtacaggtttcatgctagagctaatgggagatgtggccacactgacttccattttaagctttctaccttcttttcctccgaccgtccccttccctcacatgccatccagtgagaagacctgctcctcagtcttgtaaatgtatcttgagaggtaggagcagagccactatctccattgaagctgaaatggtagacctgtaattgtgggaaaactataaactctcttgttacagccccgccaccccttgctgtgtgtatatatataatactttgtccttcatatgtgaaagatccagtgttggaattctttggtgtaaataaacgtttggttttatttatcaag

SEQ ID NO: 320023 - DNA, 2801 bp, Homo sapiens
agaaggaatgtgggcagcctctagtggcaaagaccagtccctggctgacaaccagaaagaaatggggacctcagttgtgcaaccagaaggaacctgaatttggtcaacaacctgattgagcttggaagtgaatttcccagtttccaccaaggaatgcaaccttgagacaccttgatttttggcctcgtgagaccctaagcaaaagacctagctagccaagcccacccaacttctgacctacaataacttttgaagaaaacaggtctgaaacaaggtcttacccccagctgcttctgaacacagtgactgccagatctccaaacatcaagtccagctttgtccgccaacctgtctgacatgtcgggacccgtgccaagcagggccagagtttacacagatgttaatacacacagacctcgagaatactgggattacgagtcacatgtggtggaatggggaaatcaagatgactaccagctggttcgaaaattaggccgaggtaaatacagtgaagtatttgaagccatcaacatcacaaataatgaaaaagttgttgttaaaattctcaagccagtaaaaaagaagaaaattaagcgtgaaataaagattttggagaatttgagaggaggtcccaacatcatcacactggcagacattgtaaaagaccctgtgtcacgaacccccgccttggtttttgaacacgtaaacaacacagacttcaagcaattgtaccagacgttaacagactatgatattcgattttacatgtatgagattctgaaggccctggattattgtcacagcatgggaattatgcacagagatgtcaagccccataatgtcatgattgatcatgagcacagaaagctacgactaatagactggggtttggctgagttttatcatcctggccaagaatataatgtccgagttgcttcccgatacttcaaaggtcctgagctacttgtagactatcagatgtacgattatagtttggatatgtggagtttgggttgtatgctggcaagtatgatctttcggaaggagccatttttccatggacatgacaattatgatcagttggtgaggatagccaaggttctggggacagaagatttatatgactatattgacaaatacaacattgaattagatccacgtttcaatgatatcttgggcagacactctcgaaagcgatgggaacgctttgtccacagtgaaaatcagcaccttgtcagccctgaggccttggatttcctggacaaactgctgcgatatgaccaccagtcacggcttactgcaagagaggcaatggagcacccctatttctacactgttgtgaaggaccaggctcgaatgggttcatctagcatgccagggggcagtacgcccgtcagcagcgccaatatgatgtcagggatttcttcagtgccaaccccttcaccccttggacctctggcaggctcaccagtgattgctgctgccaacccccttgggatgcctgttccagctgccgctggcgctcagcagtaacggccctatctgtctcctgatgcctgagcagaggtgggggagtccaccctctccttgatgcagcttgcgcctggcggggaggggtgaaacacttcagaagcaccgtgtctgaaccgttgcttgtggatttatagtagttcagtcataaaaaaaaaattataataggctgattttcttttttctttttttttttaactcgaacttttcataactcaggggattccctgaaaaattacctgcaggtggaatatttcatggacaaatttttttttctcccctcccaaatttagttcctcatcacaaaagaacaaagataaaccagcctcaatcccggctgctgcatttaggtggagacttcttcccattcccaccattgttcctccaccgtcccacactttagggggttggtatctcgtgctcttctccagagattacaaaaatgtagcttctcaggggaggcaggaagaaaggaaggaaggaaagaaggaagggaggacccaatctataggagcagtggactgcttgctggtcgcttacatcactttactccataagcgcttcagtggggttatcctagtggctcttgtggaagtgtgtcttagttacatcaagatgttgaaaatctacccaaaatgcagacagatactaaaaacttctgttcagtaagaatcatgtcttactgatctaaccctaaatccaactcatttatacttttatttttagttcagtttaaaatgttgataccttccctcccaggctccttaccttggtcttttccctgttcatctcccaacatgctgtgctccatagctggtaggagagggaaggcaaaatctttcttagttttctttgtcttggccattttgaattcatttagttactgggcataacttactgctttttacaaaagaaacaaacattgtctgtacaggtttcatgctagagctaatgggagatgtggccacactgacttccattttaagctttctaccttcttttcctccgaccgtccccttccctcacatgccatccagtgagaagacctgctcctcagtcttgtaaatgtatcttgagaggtaggagcagagccactatctccattgaagctgaaatggtagacctgtaattgtgggaaaactataaactctcttgttacagccccgccaccccttgctgtgtgtatatatataatactttgtccttcatatgtgaaagatccagtgttggaattctttggtgtaaataaacgtttggttttatttatcaag

SEQ ID NO: 320024 - DNA, 1572 bp, Homo sapiens
agcctcgctctggtccctgcggctggcggccgagccgtgtgtctcctcctccatcgccgccatattgtctgtgtgagcagaggggagagcggccgccgccgctgccgcttccaccacagtttgaagaaaacaggtctgaaacaaggtcttacccccagctgcttctgaacacagtgactgccagatctccaaacatcaagtccagctttgtccgccaacctgtctgacatgtcgggacccgtgccaagcagggccagagtttacacagatgttaatacacacagacctcgagaatactgggattacgagtcacatgtggtggaatggggaaatcaagatgactaccagctggttcgaaaattaggccgaggtaaatacagtgaagtatttgaagccatcaacatcacaaataatgaaaaagttgttgttaaaattctcaagccagtaaaaaagaagaaaattaagcgtgaaataaagattttggagaatttgagaggaggtcccaacatcatcacactggcagacattgtaaaagaccctgtgtcacgaacccccgccttggtttttgaacacgtaaacaacacagacttcaagcaattgtaccagacgttaacagactatgatattcgattttacatgtatgagattctgaaggccctggattattgtcacagcatgggaattatgcacagagatgtcaagccccataatgtcatgattgatcatgagcacagaaagctacgactaatagactggggtttggctgagttttatcatcctggccaagaatataatgtccgagttgcttcccgatacttcaaaggtcctgagctacttgtagactatcagatgtacgattatagtttggatatgtggagtttgggttgtatgctggcaagtatgatctttcggaaggagccatttttccatggacatgacaattatgatcagttggtgaggatagccaaggttctggggacagaagatttatatgactatattgacaaatacaacattgaattagatccacgtttcaatgatatcttgggcagacactctcgaaagcgatgggaacgctttgtccacagtgaaaatcagcaccttgtcagccctgaggccttggatttcctggacaaactgctgcgatatgaccaccagtcacggcttactgcaagagaggcaatggagcacccctatttctacactgttgtgaaggaccaggctcgaatgggttcatctagcatgccagggggcagtacgcccgtcagcagcgccaatatgatgtcagggatttcttcagtgccaaccccttcaccccttggacctctggcaggctcaccagtgattgctgctgccaacccccttgggatgcctgttccagctgccgctggcgctcagcagtaacggccctatctgtctcctgatgcctgagcagaggtgggggagtccaccctctccttgatgcagcttgcgcctggcggggaggggtgaaacacttcagaagcaccgtgtctgaaccgttgcttgtggatttatagtagttcagtcataaaaaaaaaattataataggct

SEQ ID NO: 320025 - DNA, 2121 bp, Homo sapiens
agcctcgctctggtccctgcggctggcggccgagccgtgtgtctcctcctccatcgccgccatattgtctgtgtgagcagaggggagagcggccgccgccgctgccgcttccaccacagtttgaagaaaacaggtctgaaacaaggtcttacccccagctgcttctgaacacagtgactgccagatctccaaacatcaagtccagctttgtccgccaacctgtctgacatgtcgggacccgtgccaagcagggccagagtttacacagatgttaatacacacagacctcgagaatactgggattacgagtcacatgtggtggaatggggaaatcaagatgactaccagctggttcgaaaattaggccgaggtaaatacagtgaagtatttgaagccatcaacatcacaaataatgaaaaagttgttgttaaaattctcaagccagtaaaaaagaagaaaattaagcgtgaaataaagattttggagaatttgagaggaggtcccaacatcatcacactggcagacattgtaaaagaccctgtgtcacgaacccccgccttggtttttgaacacgtaaacaacacagacttcaagcaattgtaccagacgttaacagactatgatattcgattttacatgtatgagattctgaaggccctggattattgtcacagcatgggaattatgcacagagatgtcaagccccataatgtcatgattgatcatgagcacagaaagctacgactaatagactggggtttggctgagttttatcatcctggccaagaatataatgtccgagttgcttcccgatacttcaaaggtcctgagctacttgtagactatcagatgtacgattatagtttggatatgtggagtttgggttgtatgctggcaagtatgatctttcggaaggagccatttttccatggacatgacaattatgatcagttggtgaggatagccaaggttctggggacagaagatttatatgactatattgacaaatacaacattgaattagatccacgtttcaatgatatcttgggcagacactctcgaaagcgatgggaacgctttgtccacagtgaaaatcagcaccttgtcagccctgaggccttggatttcctggacaaactgctgcgatatgaccaccagtcacggcttactgcaagagaggcaatggagcacccctatttctacactgttgtgaaggaccaggctcgaatgggttcatctagcatgccagggggcagtacgcccgtcagcagcgccaatatgatgtcagggatttcttcagtgccaaccccttcaccccttggacctctggcaggctcaccagtgattgctgctgccaacccccttgggatgcctgttccagctgccgctggcgctcagcagtaacggccctatctgtctcctgatgcctgagcagaggtgggggagtccaccctctccttgatgcagcttgcgcctggcggggaggggtgaaacacttcagaagcaccgtgtctgaaccgttgcttgtggatttatagtagttcagtcataaaaaaaaaattataataggctgattttcttttttctttttttttttaactcgaacttttcataactcaggggattccctgaaaaattacctgcaggtggaatatttcatggacaaatttttttttctcccctcccaaatttagttcctcatcacaaaagaacaaagataaaccagcctcaatcccggctgctgcatttaggtggagacttcttcccattcccaccattgttcctccaccgtcccacactttagggggttggtatctcgtgctcttctccagagattacaaaaatgtagcttctcaggggaggcaggaagaaaggaaggaaggaaagaaggaagggaggacccaatctataggagcagtggactgcttgctggtcgcttacatcatatctccattgaagctgaaatggtagacctgtaattgtgggaaaactataaactctcttgttacagccccgccaccccttgctgtgtgtatatatataatactttgtccttcatatgtgaaagatccagtgttggaattctttggtgtaaataaacgtttggttttatttatcaag

SEQ ID NO: 320026 - DNA, 2396 bp, Homo sapiens
agcctcgctctggtccctgcggctggcggccgagccgtgtgtctcctcctccatcgccgccatattgtctgtgtgagcagaggggagagcggccgccgccgctgccgcttccaccacagtttgaagaaaacaggtctgaaacaaggtcttacccccagctgcttctgaacacagtgactgccagatctccaaacatcaagtccagctttgtccgccaacctgtctgacatgtcgggacccgtgccaagcagggccagagtttacacagatgttaatacacacagacctcgagaatactgggattacgagtcacatgtggtggaatggggaaatcaagatgactaccagctggttcgaaaattaggccgaggtaaatacagtgaagtatttgaagccatcaacatcacaaataatgaaaaagttgttgttaaaattctcaagccagtaaaaaagaagaaaattaagcgtgaaataaagattttggagaatttgagaggaggtcccaacatcatcacactggcagacattgtaaaagaccctgtgtcacgaacccccgccttggtttttgaacacgtaaacaacacagacttcaagcaattgtaccagacgttaacagactatgatattcgattttacatgtatgagattctgaaggccctggattattgtcacagcatgggaattatgcacagagatgtcaagccccataatgtcatgattgatcatgagcacagaaagctacgactaatagactggggtttggctgagttttatcatcctggccaagaatataatgtccgagttgcttcccgatacttcaaaggtcctgagctacttgtagactatcagatgtacgattatagtttggatatgtggagtttgggttgtatgctggcaagtatgatctttcggaaggagccatttttccatggacatgacaattatgatcagttggtgaggatagccaaggttctggggacagaagatttatatgactatattgacaaatacaacattgaattagatccacgtttcaatgatatcttgggcagacactctcgaaagcgatgggaacgctttgtccacagtgaaaatcagcaccttgtcagccctgaggccttggatttcctggacaaactgctgcgatatgaccaccagtcacggcttactgcaagagaggcaatggagcacccctatttctacactgttgtgaaggaccaggctcgaatgggttcatctagcatgccagggggcagtacgcccgtcagcagcgccaatatgatgtcagggatttcttcagtgccaaccccttcaccccttggacctctggcaggctcaccagtgattgctgctgccaacccccttgggatgcctgttccagctgccgctggcgctcagcagtaacggccctatctgtctcctgatgcctagccccagtttgagggacagcgggatatccaccatgctgctgtgagactcgggcagttgtgactggtttagaagtggatacacagggagaggtcttctggaaaaggtcttctggagagctgagatcagaagacaatcaactggcttcaaatctaaggagagacaggcacaaaatggaagagatgacatgggcactggttacctggtaaacacaagtggacactggtgagggactgggtcatggagactgcagtagtctttacccttttcagcgtttttcaccatgaaccccactgggagcacacagaagattggagaaagttttaataaaatgtctcaagatctggaagaagacaatggcagctactgtgaaaggatcacagtgctccacccagacccttccctgtatcccctaccggacaaaagccttagtctgtggagggaaggacaccaaatcctgtcacccccttggatgaagctcccttgcatctgggggaatgaaacaggaacaaaacaaaactttccctgggcaggggcaggaatacacactgggcccagaactgggggaggaacaggagcactaaggaggacataaccccaaaatcagagacacaaagggcctgacagagactgagacttgatcagaacagagaattccctcctcccccacctgccaatggtaagctgacaagccttgagttagaagtaaaaatgttacaggagagagacaagagtatgggaagaagaccctttctgagggtcacaaagggaggacctaaagctgagcagggagcacacatggaaggagaaaatccctctggcaggccagcctgcaccctcagtccaaggtgtcattggaggaactggaagctgctgcattgggggtaaccatagcaacaataaacctcaaacctagcccaactcttttttttatttactttttagagacaaggtcttgctctattgcc

SEQ ID NO: 320027 - DNA, 822 bp, Homo sapiens
agcctcgctctggtccctgcggctggcggccgagccgtgtgtctcctcctccatcgccgccatattgtctgtgtgagcagaggggagagcggccgccgccgctgccgcttccaccacagtttgaagaaaacaggtctgaaacaaggtcttacccccagctgcttctgaacacagtgactgccagatctccaaacatcaagtccagctttgtccgccaacctgtctgacatgtcgggacccgtgccaagcagggccagagtttacacagatgttaatacacacagacctcgagaatactgggattacgagtcacatgtggtggaatggggaaatcaagatgactaccagctggttcgaaaattaggccgaggtaaatacagtgaagtatttgaagccatcaacatcacaaataatgaaaaagttgttgttaaaattctcaaggtgagtacaagagataatttcagaggtatttggaatatagatttttaaaagtagttttgaagacttttttaaaacagcatttaaaaggtttttggtgccaaagcaaataaataaaattttattgtatcctatgaactcaatagaacaagttctgcttatttgacagatcgggaaactgaagcaagagaagtgatttgagttgactcatatagctaggttgtggcagagtaagggagcaaaggtacagtctcttctctcccagttattgcctaatacttatttcctttacttttcattatataatgaggcttttgttttcaataaataaatcattgcctctactttgtaaagatgaggagtcacaggactcgagggggacag

SEQ ID NO: 320028 - DNA, 741 bp, Homo sapiens
ttaaggtcaggtacagctggcgcgagggtttaagtgcgtagattgactgagcctggtggttttacccccccgggacgaacccccggctgatggagctctgaagcgggcagaggagctcaagactcaggccaatgactacttcaaagccaaggactacgagaacgccatcaagttctacagccaggccatcgagctgaaccccagcaatgccatctactatggcaaccgcagcctggcctacctgcgcactgagtgctatggctacgcgctgggagacgccacgcgggccattgagctggacaagaagtacatcaagggttattaccgccgggctgccagcaacatggcactgggcaagttccgggccgcgctgcgagactacgagacggtggtcaaggtgaagccccatgacaaggatgccaaaatgaaataccaggagtgcaacaagatcgtgaagcagaaggcctttgagcgggccatcgcgggcgacgagcacaagcgctccgtggtggactcgctggacatcgagagcatgaccattgaggatgagtacagcggacccaagcttgaagacggcaaagtgacaatcagtttcatgaaggagctcatgcagtggtacaaggaccagaagaaactgcaccggaaatgtgcctaccagattctggtacaggtcaaagaggtcctctccaagctgagcacgctcgtggaaaccacactcaaagaggtgcgcgttgtggggca

SEQ ID NO: 320029 - DNA, 2436 bp, Homo sapiens
  misc_feature (2104)..(2104): n is a, c, g, or t
  misc_feature (2226)..(2226): n is a, c, g, or t
cagcggcggcggccacccggcgctccttcgcgacggttcggccgggtgccgctggcggccgttgccagggtaggggtcgctttgcggcatggcgatggcggagggcgagaggactgagtgtgctgagcccccccgggacgaacccccggctgatggagctctgaagcgggcagaggagctcaagactcaggccaatgactacttcaaagccaaggactacgagaacgccatcaagttctacagccaggccatcgagctgaaccccagcaatgccatctactatggcaaccgcagcctggcctacctgcgcactgagtgctatggctacgcgctgggagacgccacgcgggccattgagctggacaagaagtacatcaagggttattaccgccgggctgccagcaacatggcactgggcaagttccgggccgcgctgcgagactacgagacggtggtcaaggtgaagccccatgacaaggatgccaaaatgaaataccaggagtgcaacaagatcgtgaagcagaaggcctttgagcgggccatcgcgggcgacgagcacaagcgctccgtggtggactcgctggacatcgagagcatgaccattgaggatgagtacagcggacccaagcttgaagacggcaaagtgacaatcagtttcatgaaggagctcatgcagtggtacaaggaccagaagaaactgcaccggaaatgtgcctaccagattctggtacaggtcaaagaggtcctctccaagctgagcacgctcgtggaaaccacactcaaagagacagagaagattacagtatgtggggacacccatggccagttctatgacctcctcaacatattcgagctcaacggtttaccctcggagaccaacccctatatatttaatggtgactttgtggaccgaggctccttctctgtagaagtgatcctcacccttttcggcttcaagctcctgtacccagatcactttcacctccttcgaggcaaccacgagacagacaacatgaaccagatctacggtttcgagggtgaggtgaaggccaagtacacagcccagatgtacgagctctttagcgaggtgttcgagtggctcccgttggcccagtgcatcaacggcaaagtgctgatcatgcacggaggcctgttcagtgaagacggtgtcaccctggatgacatccggaaaattgagcggaatcgacaacccccagattcagggcccatgtgtgacctgctctggtcagatccacagccacagaacgggcgctcgatcagcaagcggggcgtgagctgtcagtttgggcctgacgtcaccaaggccttcttggaagagaacaacctggactatatcatccgcagccacgaagtcaaggccgagggctacgaggtggctcacggaggccgctgtgtcaccgtcttctctgcccccaactactgcgaccagatggggaacaaagcctcctacatccacctccagggctctgacctacggcctcagttccaccagttcacagcagtgcctcatcccaacgtcaagcccatggcctatgccaacacgctgctgcagctaggaatgatgtgaggtgacgggcggggcggcctgcatcccagggcccctccaatcccaccggacccaggccctgggctaggggcagagcaggccccgccccagggcaatgttggacccccttttactttgtaaagtttgtatttattcccctttaggtttgcagagggggtaggggcagagtcaggggctggccagagggtctgctccctggacagagaggaaggaggtggagcagctggggctgggggcacagcctgggcattctgtggggaggccgtcctcggggtggggtggggccgagtggctgccctgcccccctcatttgcatggctcctcccccactcaagcaatagggccccgccataggaagacccccagagagagggtcagcaggggggccccgcctgcgcctcccctcctatagccccatggtggggctaggctggggctcacccccctccccagctattttatgtctgtaattaaatatgttaaaataaagtcattatcggaagtcaaaaacaaaanaaaaaaaagatccgagggctgtcgtatgcgtcggcgtgtgcgcgggacaaagagcagtggtagttggagagttgggcccttatgggccaataaagcgtgtgttcccctgggacccaggcatntgccttgtgtcacccatcggtggggtaaagcatctgcgccgggtcgctcccttaattgagggtagaggtctcgcaaattgtacatttggcgaatataaggcccccggggtttaacccttggcctttaacgtgaaattccggggccaaaccttacaacataaccgaacgaccatgaaacatcatacacaggacacaggcatacaatcagga

SEQ ID NO: 320030 - DNA, 1944 bp, Homo sapiens
cagcggcggcggccacccggcgctccttcgcgacggttcggccgggtgccgctggcggccgttgccagggtaggggtcgctttgcggcatggcgatggcggagggcgagaggactgagtgtgctgagcccccccgggacgaacccccggctgatggagctctgaagcgggcagaggagctcaagactcaggccaatgactacttcaaagccaaggactacgagaacgccatcaagttctacagccaggccatcgagctgaaccccagcaatgccatctactatggcaaccgcagcctggcctacctgcgcactgagtgctatggctacgcgctgggagacgccacgcgggccattgagctggacaagaagtacatcaagggttattaccgccgggctgccagcaacatggcactgggcaagttccgggccgcgctgcgagactacgagacggtggtcaaggtgaagccccatgacaaggatgccaaaatgaaataccaggagtgcaacaagatcgtgaagcagaaggcctttgagcgggccatcgcgggcgacgagcacaagcgctccgtggtggactcgctggacatcgagagcatgaccattgaggatgagtacagcggacccaagcttgaagacggcaaagtgacaatcagtttcatgaaggagctcatgcagtggtacaaggaccagaagaaactgcaccggaaatgtgcctaccagattctggtacaggtcaaagaggtcctctccaagctgagcacgctcgtggaaaccacactcaaagagacagagaagattacagtatgtggggacacccatggccagttctatgacctcctcaacatattcgagctcaacggtttaccctcggagaccaacccctatatatttaatggtgactttgtggaccgaggctccttctctgtagaagtgatcctcacccttttcggcttcaagctcctgtacccagatcactttcacctccttcgaggcaaccacgagacagacaacatgaaccagatctacggtttcgagggtgaggtgaaggccaagtacacagcccagatgtacgagctctttagcgaggtgttcgagtggctcccgttggcccagtgcatcaacggcaaagtgctgatcatgcacggaggcctgttcagtgaagacggtgtcaccctggatgacatccggaaaattgagcggaatcgacaacccccagattcagggcccatgtgtgacctgctctggtcagatccacagccacagaacgggcgctcgatcagcaagcggggcgtgagctgtcagtttgggcctgacgtcaccaaggccttcttggaagagaacaacctggactatatcatccgcagccacgaagtcaaggccgagggctacgaggtggctcacggaggccgctgtgtcaccgtcttctctgcccccaactactgcgaccagatggggaacaaagcctcctacatccacctccagggctctgacctacggcctcagttccaccagttcacagcagtgcctcatcccaacgtcaagcccatggcctatgccaacacgctgctgcagctaggaatgatgtgaggtgacgggcggggcggcctgcatcccagggcccctccaatcccaccggacccaggccctgggctaggggcagagcaggccccgccccagggcaatgttggacccccttttactttgtaaagtttgtatttattcccctttaggtttgcagagggggtaggggcagagtcaggggctggccagagggtctgctccctggacagagaggaaggaggtggagcagctggggctgggggcacagcctgcgcctcccctcctatagccccatggtggggctaggctggggctcacccccctccccagctattttatgtctgtaattaaatatgttaaaataaagtcattatcggaagtca

SEQ ID NO: 320031 - DNA, 1977 bp, Homo sapiens
cagcggcggcggccacccggcgctccttcgcgacggttcggccgggtgccgctggcggccgttgccagggtaggggtcgctttgcggcatggcgatggcggagggcgagaggactgagtgtgctgagcccccccgggacgaacccccggctgatggagctctgaagcgggcagaggagctcaagactcaggccaatgactacttcaaagccaaggactacgagaacgccatcaagttctacagccaggccatcgagctgaaccccagcaatgccatctactatggcaaccgcagcctggcctacctgcgcactgagtgctatggctacgcgctgggagacgccacgcgggccattgagctggacaagaagtacatcaagggttattaccgccgggctgccagcaacatggcactgggcaagttccgggccgcgctgcgagactacgagacggtggtcaaggtgaagccccatgacaaggatgccaaaatgaaataccaggagtgcaacaagatcgtgaagcagaaggcctttgagcgggccatcgcgggcgacgagcacaagcgctccgtggtggactcgctggacatcgagagcatgaccattgaggatgagtacagcggacccaagcttgaagacggcaaagtgacaatcagtttcatgaaggagctcatgcagtggtacaaggaccagaagaaactgcaccggaaatgtgcctaccagattctggtacaggtcaaagaggtcctctccaagctgagcacgctcgtggaaaccacactcaaagagacagagaagattacagtatgtggggacacccatggccagttctatgacctcctcaacatattcgagctcaacggtttaccctcggagaccaacccctatatatttaatggtgactttgtggaccgaggctccttctctgtagaagtgatcctcacccttttcggcttcaagctcctgtacccagatcactttcacctccttcgaggcaaccacgagacagacaacatgaaccagatctacggtttcgagggtgaggtgaaggccaagtacacagcccagatgtacgagctctttagcgaggtgttcgagtggctcccgttggcccagtgcatcaacggcaaagtgctgatcatgcacggaggcctgttcagtgaagacggtgtcaccctggatgacatccggaaaattgagcggaatcgacaacccccagattcagggcccatgtgtgacctgctctggtcagatccacagccacagaacgggcgctcgatcagcaagcggggcgtgagctgtcagtttgggcctgacgtcaccaaggccttcttggaagagaacaacctggactatatcatccgcagccacgaagtcaaggccgagggctacgaggtggctcacggaggccgctgtgtcaccgtcttctctgcccccaactactgcgaccagatggggaacaaagcctcctacatccacctccagggctctgacctacggcctcagttccaccagttcacagcagtgggtaggcccagcagtggttcttgacatcacacgatgaggcgcgcatctcccgtcatccagggagaccagaggacccttgtctcactcccagttggctcttagtcacagccccgctttgtctttgacatggacgtttgtgatgatcacgttcctcccgctccccgtgtctgaagagtgctccctgactggctgccgtctcctccctgtcgggtctggctgggttctccagagggagtgctgcggaggggacacagcagaggccccatgctcgtgatgtatgttgcagatcattttcccccattctgtccttttttgttaaattgtggtaaaaagcacataacataaactgtaccaccttaaccatttgaaagtatatatcccagactgtcttttatctttagacttcacttgtggtttgttgccacagtacaagtttatttttatgaagccca

SEQ ID NO: 320032 - DNA, 1938 bp, Homo sapiens
cagcggcggcggccacccggcgctccttcgcgacggttcggccgggtgccgctggcggccgttgccagggtaggggtcgctttgcggcatggcgatggcggagggcgagaggactgagtgtgctgagcccccccgggacgaacccccggctgatggagctctgaagcgggcagaggagctcaagactcaggccaatgactacttcaaagccaaggactacgagaacgccatcaagttctacagccaggccatcgagctgaaccccagcaatgccatctactatggcaaccgcagcctggcctacctgcgcactgagtgctatggctacgcgctgggagacgccacgcgggccattgagctggacaagaagtacatcaagggttattaccgccgggctgccagcaacatggcactgggcaagttccgggccgcgctgcgagactacgagacggtggtcaaggtgaagccccatgacaaggatgccaaaatgaaataccaggagtgcaacaagatcgtgaagcagaaggcctttgagcgggccatcgcgggcgacgagcacaagcgctccgtggtggactcgctggacatcgagagcatgaccattgaggatgagtacagcggacccaagcttgaagacggcaaagtgacaatcagtttcatgaaggagctcatgcagtggtacaaggaccagaagaaactgcaccggaaatgtgcctaccagattctggtacaggtcaaagaggtcctctccaagctgagcacgctcgtggaaaccacactcaaagagacagagaagattacagtatgtggggacacccatggccagttctatgacctcctcaacatattcgagctcaacggtttaccctcggagaccaacccctatatatttaatggtgactttgtggaccgaggctccttctctgtagaagtgatcctcacccttttcggcttcaagctcctgtacccagatcactttcacctccttcgaggcaaccacgagacagacaacatgaaccagatctacggtttcgagggtgaggtgaaggccaagtacacagcccagatgtacgagctctttagcgaggtgttcgagtggctcccgttggcccagtgcatcaacggcaaagtgctgatcatgcacggaggcctgttcagtgaagacggtgtcaccctggatgacatccggaaaattgagcggaatcgacaacccccagattcagggcccatgtgtgacctgctctggtcagatccacagccacagaacgggcgctcgatcagcaagcggggcgtgagctgtcagtttgggcctgacgtcaccaaggccttcttggaagagaacaacctggactatatcatccgcagccacgaagtcaaggccgagggctacgaggtggctcacggaggccgctgtgtcaccgtcttctctgcccccaactactgcgaccagatggggaacaaagcctcctacatccacctccagggctctgacctacggcctcagttccaccagttcacagcagtgcctcatcccaacgtcaagcccatggcctatgccaacacgctgctgcagctaggaatgatgtgaggtgacgggcggggcggcctgcatcccagggcccctccaatcccaccggacccaggccctgggctaggggcagagcaggccccgccccagggcaatgttggacccccttttactttgtaaagtttgtatttattccccttcctgcccccctcatttgcatggctcctcccccactcaagcaatagggccccgccataggaagacccccagagagagggtcagcaggggggccccgcctgcgcctcccctcctatagccccatggtggggctaggctggggctcacccccctccccagctattttatgtctgtaattaaatatgttaaaataaagtcattatcggaagtca

SEQ ID NO: 320033 - DNA, 1653 bp, Homo sapiens
cagcggcggcggccacccggcgctccttcgcgacggttcggccgggtgccgctggcggccgttgccagggtaggggtcgctttgcggcatggcgatggcggagggcgagaggactgagtgtgctgagcccccccgggacgaacccccggctgatggagctctgaagcgggcagaggagctcaagactcaggccaatgactacttcaaagccaaggactacgagaacgccatcaagttctacagccaggccatcgagctgaaccccagcaatgccatctactatggcaaccgcagcctggcctacctgcgcactgagtgctatggctacgcgctgggagacgccacgcgggccattgagctggacaagaagtacatcaagggttattaccgccgggctgccagcaacatggcactgggcaagttccgggccgcgctgcgagactacgagacggtggtcaaggtgaagccccatgacaaggatgccaaaatgaaataccaggagtgcaacaagatcgtgaagcagaaggcctttgagcgggccatcgcgggcgacgagcacaagcgctccgtggtggactcgctggacatcgagagcatgaccattgaggatgagtacagcggacccaagcttgaagacggcaaagtgacaatcagtttcatgaaggagctcatgcagtggtacaaggaccagaagaaactgcaccggaaatgtgcctaccagattctggtacaggtcaaagaggtcctctccaagctgagcacgctcgtggaaaccacactcaaagagacagagaagattacagtatgtggggacacccatggccagttctatgacctcctcaacatattcgagctcaacggtttaccctcggagaccaacccctatatatttaatggtgactttgtggaccgaggctccttctctgtagaagtgatcctcacccttttcggcttcaagctcctgtacccagatcactttcacctccttcgaggcaaccacgagacagacaacatgaaccagatctacggtttcgagggtgaggtgaaggccaagtacacagcccagatgtacgagctctttagcgaggtgttcgagtggctcccgttggcccagtgcatcaacggcaaagtgctgatcatgcacggaggcctgttcagtgaagacggtgtcaccctggatgacatccggaaaattgagcggaatcgacaacccccagattcagggcccatgtgtgacctgctctggtcagatccacagccacagaacgggcgctcgatcagcaagcggggcgtgagctgtcagtttgggcctgacgtcaccaaggccttcttggaagagaacaacctggactatatcatccgcagccacgaagtcaaggccgagggctacgaggtggctcacggaggccgctgtgtcaccgtcttctctgcccccaactactgcctgcccccctcatttgcatggctcctcccccactcaagcaatagggccccgccataggaagacccccagagagagggtcagcaggggggccccgcctgcgcctcccctcctatagccccatggtggggctaggctggggctcacccccctccccagctattttatgtctgtaattaaatatgttaaaataaagtcattatcggaagtca

SEQ ID NO: 320034 - DNA, 1288 bp, Homo sapiens
cagcggcggcggccacccggcgctccttcgcgacggttcggccgggtgccgctggcggccgttgccagggtaggggtcgctttgcggcatggcgatggcggagggcgagaggactgagtgtgctgagcccccccgggacgaacccccggctgatggagctctgaagcgggcagaggagctcaagactcaggccaatgactacttcaaagccaaggactacgagaacgccatcaagttctacagccaggccatcgagctgaaccccagcaatgccatctactatggcaaccgcagcctggcctacctgcgcactgagtgctatggctacgcgctgggagacgccacgcgggccattgagctggacaagaagtacatcaagggttattaccgccgggctgccagcaacatggcactgggcaagttccgggccgcgctgcgagactacgagacggtggtcaaggtgaagccccatgacaaggatgccaaaatgaaataccaggagtgcaacaagatcgtgaagcagaaggcctttgagcgggccatcgcgggcgacgagcacaagcgctccgtggtggactcgctggacatcgagagcatgaccattgaggatgagtacagcggacccaagcttgaagacggcaaagtgacaatcagtttcatgaaggagctcatgcagtggtacaaggaccagaagaaactgcaccggaaatgtgcctaccagattctggtacaggtcaaagaggtcctctccaagctgagcacgctcgtggaaaccacactcaaagagacagagaagattacagtatgtggggacacccatggccagttctatgacctcctcaacatattcgagctcaacggtttaccctcggagaccaacccctatatatttaatggtgactttgtggaccgaggctccttctctgtagaagtgatcctcacccttttcggcttcaagctcctgtacccagatcactttcacctccttcgaggcaaccacgagacagacaacatgaaccagatctacggtttcgagggtgaggtgaaggccaagtacacagcccagatgtacgagctctttagcgaggtgttcgagtggctcccgttggcccagtgcatcaacggcaaagtgctgatcatgcacggaggcctgttcagtgaagacggtgtcaccctggatgacatccggaaaattgagcggaatcgacaacccccagattcagccccctccccagctattttatgtctgtaattaaatatgttaaaataaagtcattatcggaagtca

SEQ ID NO: 320035 - DNA, 1287 bp, Homo sapiens
cagcggcggcggccacccggcgctccttcgcgacggttcggccgggtgccgctggcggccgttgccagggtaggggtcgctttgcggcatggcgatggcggagggcgagaggactgagtgtgctgagcccccccgggacgaacccccggctgatggagctctgaagcgggcagaggagctcaagactcaggccaatgactacttcaaagccaaggactacgagaacgccatcaagttctacagccaggccatcgagctgaaccccagcaatgccatctactatggcaaccgcagcctggcctacctgcgcactgagtgctatggctacgcgctgggagacgccacgcgggccattgagctggacaagaagtacatcaagggttattaccgccgggctgccagcaacatggcactgggcaagttccgggccgcgctgcgagactacgagacggtggtcaaggtgaagccccatgacaaggatgccaaaatgaaataccaggagtgcaacaagatcgtgaagcagaaggcctttgagcgggccatcgcgggcgacgagcacaagcgctccgtggtggactcgctggacatcgagagcatgaccattgaggatgagtacagcggacccaagcttgaagacggcaaagtgacaatcagtttcatgaaggagctcatgcagtggtacaaggaccagaagaaactgcaccggaaatgtgcctaccagattctggtacaggtcaaagaggtcctctccaagctgagcacgctcgtggaaaccacactcaaagagacagagaagattacagtatgtggggacacccatggccagttctatgacctcctcaacatattcgagctcaacggtttaccctcggagaccaacccctatatatttaatggtgactttgtggaccgaggctccttctctgtagaagtgatcctcacccttttcggcttcaagctcctgagggtctgctccctggacagagaggaaggaggtggagcagctggggctgggggcacagcctgggcattctgtggggaggccgtcctcggggtggggtggggccgagtggctgccctgcccccctcatttgcatggctcctcccccactcaagcaatagggccccgccataggaagacccccagagagagggtcagcaggggggccccgcctgcgcctcccctcctatagccccatggtggggctaggctggggctcacccccctccccagctattttatgtctgtaattaaatatgttaaaataaagtcattatcggaagtca

SEQ ID NO: 320036 - DNA, 1029 bp, Homo sapiens
cagcggcggcggccacccggcgctccttcgcgacggttcggccgggtgccgctggcggccgttgccagggtaggggtcgctttgcggcatggcgatggcggagggcgagaggactgagtgtgctgagcccccccgggacgaacccccggctgatggagctctgaagcgggcagaggagctcaagactcaggccaatgactacttcaaagccaaggactacgagaacgccatcaagttctacagccaggccatcgagctgaaccccagcaatgccatctactatggcaaccgcagcctggcctacctgcgcactgagtgctatggctacgcgctgggagacgccacgcgggccattgagctggacaagaagtacatcaagggttattaccgccgggctgccagcaacatggcactgggcaagttccgggccgcgctgcgagactacgagacggtggtcaaggtgaagccccatgacaaggatgccaaaatgaaataccaggagtgcaacaagatcgtgaagcagaaggcctttgagcgggccatcgcgggcgacgagcacaagcgctccgtggtggactcgctggacatcgagagcatgaccattgaggatgagtacagcggacccaagcttgaagacggcaaagtgacaatcagtttcatgaaggagctcatgcagtggtacaaggaccagaagaaactgcaccggaaatgtgcctaccagattctggtacaggtcaaagaggtcctctccaagctgagcacgctcgtggaaaccacactcaaagagacagagaagattacagtatgtggggacacccatggccagttctatgacctcctcaacatattcgagctcaacggtttaccctcggagaccaacccctatatatttaatggtgactttgtggaccgaggctccttctctgtagaagtgatcctcacccttttcggcttcaagctcctgccccctccccagctattttatgtctgtaattaaatatgttaaaataaagtcattatcggaagtca

SEQ ID NO: 320037 - DNA, 1070 bp, Homo sapiens
cagcggcggcggccacccggcgctccttcgcgacggttcggccgggtgccgctggcggccgttgccagggtaggggtcgctttgcggcatggcgatggcggagggcgagaggactgagtgtgctgagcccccccgggacgaacccccggctgatggagctctgaagcgggcagaggagctcaagactcaggccaatgactacttcaaagccaaggactacgagaacgccatcaagttctacagccaggccatcgagctgaaccccagcaatgccatctactatggcaaccgcagcctggcctacctgcgcactgagtgctatggctacgcgctgggagacgccacgcgggccattgagctggacaagaagtacatcaagggttattaccgccgggctgccagcaacatggcactgggcaagttccgggccgcgctgcgagactacgagacggtggtcaaggtgaagccccatgacaaggatgccaaaatgaaataccaggacctcatcccaacgtcaagcccatggcctatgccaacacgctgctgcagctaggaatgatgtgaggtgacgggcggggcggcctgcatcccagggcccctccaatcccaccggacccaggccctgggctaggggcagagcaggccccgccccagggcaatgttggacccccttttactttgtaaagtttgtatttattcccctttaggtttgcagagggggtaggggcagagtcaggggctggccagagggtctgctccctggacagagaggaaggaggtggagcagctggggctgggggcacagcctgggcattctgtggggaggccgtcctcggggtggggtggggccgagtggctgccctgcccccctcatttgcatggctcctcccccactcaagcaatagggccccgccataggaagacccccagagagagggtcagcaggggggccccgcctgcgcctcccctcctatagccccatggtggggctaggctggggctcacccccctccccagctattttatgtctgtaattaaatatgttaaaataaagtcattatcggaagtca

SEQ ID NO: 320038 - DNA, 1045 bp, Homo sapiens
cagcggcggcggccacccggcgctccttcgcgacggttcggccgggtgccgctggcggccgttgccagggtaggggtcgctttgcggcatggcgatggcggagggcgagaggactgagtgtgctgagcccccccgggacgaacccccggctgatggagctctgaagcgggcagaggagctcaagactcaggccaatgactacttcaaagccaaggactacgagaacgccatcaagttctacagccaggccatcgagctgaaccccagcaatgccatctactatggcaaccgcagcctggcctacctgcgcactgagtgctatggctacgcgctgggagacgccacgcgggccattgagctggacaagaagtacatcaagggttattaccgccgggctgccagcaacatggcactgggcaagttccgggccgcgctgcgagactacgagacggtggtcaaggtgaagccccatgacaaggatgccaaaatgaaataccaggagtgcaacaagatcgtgaagcagaaggcctttgagcgggccatcgcgggcgacgagcacaagcgctccgtggtggactcgctggacatcgagagcatgaccattgaggatgagtacagcggacccaagcttgaagacggcaaagtgacaatcagtttcatgaaggagctcatgcagtggtacaaggaccagaagaaactgcaccggaaatgtgcctaccagattctggtacaggtcaaagaggtcctctccaagctgagcacgctcgtggaaaccacactcaaagagacagagaagattacagtatgtggggacacccatggccagttctatgaccctgcccccctcatttgcatggctcctcccccactcaagcaatagggccccgccataggaagacccccagagagagggtcagcaggggggccccgcctgcgcctcccctcctatagccccatggtggggctaggctggggctcacccccctccccagctattttatgtctgtaattaaatatgttaaaataaagtcattatcggaagtca

SEQ ID NO: 320039 - DNA, 838 bp, Homo sapiens
cagcggcggcggccacccggcgctccttcgcgacggttcggccgggtgccgctggcggccgttgccagggtaggggtcgctttgcggcatggcgatggcggagggcgagaggactgagtgtgctgagcccccccgggacgaacccccggctgatggagctctgaagcgggcagaggagctcaagactcaggccaatgactacttcaaagccaaggactacgagaacgccatcaagttctacagccaggccatcgagctgaaccccagcaatgccatctactatggcaaccgcagcctggcctacctgcgcactgagtgctatggctacgcgctgggagacgccacgcgggccattgagctggacaagaagtacatcaagggttattaccgccgggctgccagcaacatggcactgggcaagttccgggccgcgctgcgagactacgagacggtggtcaaggtgaagccccatgacaaggatgccaaaatgaaataccaggagtgcaacaagatcgtgaagcagaaggcctttgagcgggccatcgcgggcgacgagcacaagcgctccgtggtggactcgctggacatcgagagcatgatgccgagcgcgggcgcggggggcggagctcggcggagacggggaaggggtcgccgtggctgccggtcctcgagttgggggctgccgcggacactgctaggcagacggcgagtaccgagcgcgggtggcgcggtgtccgtgggccacgctcagctgcggtcagaggccgacatgagtgccgcggggctgctggcccgggcccgggccagctggagcgccgcggccccgagtactacccga

SEQ ID NO: 320040 - DNA, 2094 bp, Homo sapiens
cagcggcggcggccacccggcgctccttcgcgacggttcggccgggtgccgctggcggccgttgccagggtaggggtcgctttgcggcatggcgatggcggagggcgagaggactgagtgtgctgagcccccccgggacgaacccccggctgatggagctctgaagcgggcagaggagctcaagactcaggccaatgactacttcaaagccaaggactacgagaacgccatcaagttctacagccaggccatcgagctgaaccccagcaatgccatctactatggcaaccgcagcctggcctacctgcgcactgagtgctatggctacgcgctgggagacgccacgcgggccattgagctggacaagaagtacatcaagggttattaccgccgggctgccagcaacatggcactgggcaagttccgggccgcgctgcgagactacgagacggtggtcaaggtgaagccccatgacaaggatgccaaaatgaaataccaggagtgcaacaagatcgtgaagcagaaggcctttgagcgggccatcgcgggcgacgagcacaagcgctccgtggtggactcgctggacatcgagagcatgaccattgaggatgagtacagcggacccaagcttgaagacggcaaagtgacaatcagtttcatgaaggagctcatgcagtggtacaaggaccagaagaaactgcaccggaaatgtgcctaccagattctggtacaggtcaaagaggtcctctccaagctgagcacgctcgtggaaaccacactcaaagagacagagaagattacagtatgtggggacacccatggccagttctatgacctcctcaacatattcgagctcaacggtttaccctcggagaccaacccctatatatttaatggtgactttgtggaccgaggctccttctctgtagaagtgatcctcacccttttcggcttcaagctcctgtacccagatcactttcacctccttcgaggcaaccacgagacagacaacatgaaccagatctacggtttcgagggtgaggtgaaggccaagtacacagcccagatgtacgagctctttagcgaggtgttcgagtggctcccgttggcccagtgcatcaacggcaaagtgctgatcatgcacggaggcctgttcagtgaagacggtgtcaccctggatgacatccggaaaattgagcggaatcgacaacccccagattcagggcccatgtgtgacctgctctggtcagatccacagccacagaacgggcgctcgatcagcaagcggggcgtgagctgtcagtttgggcctgacgtcaccaaggccttcttggaagagaacaacctggactatatcatccgcagccacgaagtcaaggccgagggctacgaggtggctcacggaggccgctgtgtcaccgtcttctctgcccccaactactgcgaccagatggggaacaaagcctcctacatccacctccagggctctgacctacggcctcagttccaccagttcacagcagtgcctcatcccaacgtcaagcccatggcctatgccaacacgctgctgcagctaggaatgatgtgaggtgacgggcggggcggcctgcatcccagggcccctccaatcccaccggacccaggccctgggctaggggcagagcaggccccgccccagggcaatgttggacccccttttactttgtaaagtttgtatttattcccctttaggtttgcagagggggtaggggcagagtcaggggctggccagagggtctgctccctggacagagaggaaggaggtggagcagctggggctgggggcacagcctgggcattctgtggggaggccgtcctcggggtggggtggggccgagtggctgccctgcccccctcatttgcatggctcctcccccactcaagcaatagggccccgccataggaagacccccagagagagggtcagcaggggggccccgcctgcgcctcccctcctatagccccatggtggggctaggctggggctcacccccctccccagctattttatgtctgtaattaaatatgttaaaataaagtcattatcggaagtca

SEQ ID NO: 320041 - DNA, 457 bp, Homo sapiens
  misc_feature (8)..(8): n is a, c, g, or t
  misc_feature (13)..(13): n is a, c, g, or t
  misc_feature (31)..(31): n is a, c, g, or t
  misc_feature (38)..(38): n is a, c, g, or t
gttccctntgaancactttgacgaagtcacngtcaggncccacctggcttaacgctgcctggcgtcaccaaggccttcttggaagagaacaacctggactatatcatccgcagccacgaagtcaaggccgagggctacgaggtggctcacggaggccgctgtgtcaccgtcttctctgcccccaactactgctggtatgtctttgcctttccagcccagggcctctaccaagccacgggtttttgtcttggtttttgttttgcctttttatgatggaacatttcaaagacaggcaagagcagataaaagaacatgacgaacacccccgtatgtgtcacccacccatgcagcaccagtggggccagcctgtgagtgctgaccagctgccctgtgttacagcaagcccctggcacttcacctttctcccactgattgcccagcacttttcagaaggaaa

SEQ ID NO: 320042 - DNA, 2085 bp, Homo sapiens
cagcggcggcggccacccggcgctccttcgcgacggttcggccgggtgccgctggcggccgttgccagggtaggggtcgctttgcggcatggcgatggcggagggcgagaggactgagtgtgctgagcccccccgggacgaacccccggctgatggagctctgaagcgggcagaggagctcaagactcaggccaatgactacttcaaagccaaggactacgagaacgccatcaagttctacagccaggccatcgagctgaaccccagcaatgccatctactatggcaaccgcagcctggcctacctgcgcactgagtgctatggctacgcgctgggagacgccacgcgggccattgagctggacaagaagtacatcaagggttattaccgccgggctgccagcaacatggcactgggcaagttccgggccgcgctgcgagactacgagacggtggtcaaggtgaagccccatgacaaggatgccaaaatgaaataccaggagtgcaacaagatcgtgaagcagaaggcctttgagcgggccatcgcgggcgacgagcacaagcgctccgtggtggactcgctggacatcgagagcatgaccattgaggatgagtacagcggacccaagcttgaagacggcaaagtgacaatcagtttcatgaaggagctcatgcagtggtacaaggaccagaagaaactgcaccggaaatgtgcctaccagattctggtacaggtcaaagaggtcctctccaagctgagcacgctcgtggaaaccacactcaaagagacagagaagattacagtatgtggggacacccatggccagttctatgacctcctcaacatattcgagctcaacggtttaccctcggagaccaacccctatatatttaatggtgactttgtggaccgaggctccttctctgtagaagtgatcctcacccttttcggcttcaagctcctgtacccagatcactttcacctccttcgaggcaaccacgagacagacaacatgaaccagatctacggtttcgagggtgaggtgaaggccaagtacacagcccagatgtacgagctctttagcgaggtgttcgagtggctcccgttggcccagtgcatcaacggcaaagtgctgatcatgcacggaggcctgttcagtgaagacggtgtcaccctggatgacatccggaaaattgagcggaatcgacaacccccagattcagggcccatgtgtgacctgctctggtcagatccacagccacagaacgggcgctcgatcagcaagcggggcgtgagctgtcagtttgggcctgacgtcaccaaggccttcttggaagagaacaacctggactatatcatccgcagccacgaagtcaaggccgagggctacgaggtggctcacggaggccgctgtgtcaccgtcttctctgcccccaactactgcgaccagatggggaacaaagcctcctacatccacctccagggctctgacctacggcctcagttccaccagttcacagcagtgcctcatcccaacgtcaagcccatggcctatgccaacacgctgctgcagctaggaatgatgtgaggtgacgggcggggcggcctgcatcccagggcccctccaatcccaccggacccaggccctgggctaggggcagagcaggccccgccccagggcaatgttggacccccttttactttgtaaagtttgtatttattcccctttaggtttgcagagggggtaggggcagagtcaggggctggccagagggtctgctccctggacagagaggaaggaggtggagcagctggggctgggggcacagcctgggcattctgtggggaggccgtcctcggggtggggtggggccgagtggctgctggcgcccctcatgatggtctcccactcagcaaggccgcatagaaacccaaaaggacgggggcgctggctccctatgcaggggtggtggtaccctccgatttgtgtattgaagcttcgggcaaaaaaaaaaaggggaaccggccaaagccttgaagcaagaaagaggggaaggaaagggactgtgccacgaatggtggaga

SEQ ID NO: 320043 - DNA, 2021 bp, Homo sapiens
cagcggcggcggccacccggcgctccttcgcgacggttcggccgggtgccgctggcggccgttgccagggtaggggtcgctttgcggcatggcgatggcggagggcgagaggactgagtgtgctgagcccccccgggacgaacccccggctgatggagctctgaagcgggcagaggagctcaagactcaggccaatgactacttcaaagccaaggactacgagaacgccatcaagttctacagccaggccatcgagctgaaccccagcaatgccatctactatggcaaccgcagcctggcctacctgcgcactgagtgctatggctacgcgctgggagacgccacgcgggccattgagctggacaagaagtacatcaagggttattaccgccgggctgccagcaacatggcactgggcaagttccgggccgcgctgcgagactacgagacggtggtcaaggtgaagccccatgacaaggatgccaaaatgaaataccaggagtgcaacaagatcgtgaagcagaaggcctttgagcgggccatcgcgggcgacgagcacaagcgctccgtggtggactcgctggacatcgagagcatgaccattgaggatgagtacagcggacccaagcttgaagacggcaaagtgacaatcagtttcatgaaggagctcatgcagtggtacaaggaccagaagaaactgcaccggaaatgtgcctaccagattctggtacaggtcaaagaggtcctctccaagctgagcacgctcgtggaaaccacactcaaagagacagagaagattacagtatgtggggacacccatggccagttctatgacctcctcaacatattcgagctcaacggtttaccctcggagaccaacccctatatatttaatggtgactttgtggaccgaggctccttctctgtagaagtgatcctcacccttttcggcttcaagctcctgtacccagatcactttcacctccttcgaggcaaccacgagacagacaacatgaaccagatctacggtttcgagggtgaggtgaaggccaagtacacagcccagatgtacgagctctttagcgaggtgttcgagtggctcccgttggcccagtgcatcaacggcaaagtgctgatcatgcacggaggcctgttcagtgaagacggtgtcaccctggatgacatccggaaaattgagcggaatcgacaacccccagattcagggcccatgtgtgacctgctctggtcagatccacagccacagaacgggcgctcgatcagcaagcggggcgtgagctgtcagtttgggcctgacgtcaccaaggccttcttggaagagaacaacctggactatatcatccgcagccacgaagtcaaggccgagggctacgaggtggctcacggaggccgctgtgtcaccgtcttctctgcccccaactactgcgaccagatggggaacaaagcctcctacatccacctccagggctctgacctacggcctcagttccaccagttcacagcagtgcctcatcccaacgtcaagcccatggcctatgccaacacgctgctgcagctaggaatgatgtgaggtgacgggcggggcggcctgcatcccagggcccctccaatcccaccggacccaggccctgggctaggggcagagcaggccccgccccagggcaatgttggacccccttttactttgtaaagtttgtatttattcccctttaggtttgcagagggggtaggggcagagtcaggggctggccagagggtctgctccctggacagagaggaaggaggtggagcagcctgcccccctcatttgcatggctcctcccccactcaagcaatagggccccgccataggaagacccccagagagagggtcagcaggggggccccgcctgcgcctcccctcctatagccccatggtggggctaggctggggctcacccccctccccagctattttatgtctgtaattaaatatgttaaaataaagtcattatcggaagtca

SEQ ID NO: 320044 - DNA, 1822 bp, Homo sapiens
cagcggcggcggccacccggcgctccttcgcgacggttcggccgggtgccgctggcggccgttgccagggtaggggtcgctttgcggcatggcgatggcggagggcgagaggactgagtgtgctgagcccccccgggacgaacccccggctgatggagctctgaagcgggcagaggagctcaagactcaggccaatgactacttcaaagccaaggactacgagaacgccatcaagttctacagccaggccatcgagctgaaccccagcaatgccatctactatggcaaccgcagcctggcctacctgcgcactgagtgctatggctacgcgctgggagacgccacgcgggccattgagctggacaagaagtacatcaagggttattaccgccgggctgccagcaacatggcactgggcaagttccgggccgcgctgcgagactacgagacggtggtcaaggtgaagccccatgacaaggatgccaaaatgaaataccaggagtgcaacaagatcgtgaagcagaaggcctttgagcgggccatcgcgggcgacgagcacaagcgctccgtggtggactcgctggacatcgagagcatgaccattgaggatgagtacagcggacccaagcttgaagacggcaaagtgacaatcagtttcatgaaggagctcatgcagtggtacaaggaccagaagaaactgcaccggaaatgtgcctaccagattctggtacaggtcaaagaggtcctctccaagctgagcacgctcgtggaaaccacactcaaagagacagagaagattacagtatgtggggacacccatggccagttctatgacctcctcaacatattcgagctcaacggtttaccctcggagaccaacccctatatatttaatggtgactttgtggaccgaggctccttctctgtagaagtgatcctcacccttttcggcttcaagctcctgtacccagatcactttcacctccttcgaggcaaccacgagacagacaacatgaaccagatctacggtttcgagggtgaggtgaaggccaagtacacagcccagatgtacgagctctttagcgaggtgttcgagtggctcccgttggcccagtgcatcaacggcaaagtgctgatcatgcacggaggcctgttcagtgaagacggtgtcaccctggatgacatccggaaaattgagcggaatcgacaacccccagattcagggcccatgtgtgacctgctctggtcagatccacagccacagaacgggcgctcgatcagcaagcggggcgtgagctgtcagtttgggcctgacgtcaccaaggccttcttggaagagaacaacctggactatatcatccgcagccacgaagtcaaggccgagggctacgaggtggctcacggaggccgctgtgtcaccgtcttctctgcccccaactactgcgaccagatggggaacaaagcctcctacatccacctccagggctctgacctacggcctcagttccaccagttcacagcagtgcctcatcccaacgtcaagcccatggcctatgccaacacgctgctgcagctaggaatgatgtgaggtgacgggcggggcggcctgcatcccagggcccctccaatcccaccggacccaggccctgggctaggggcagagcaggccccgccccagggcaatgttggacccccttttactttgtaaagtttgtatttattccccttccccatggtggggctaggctggggctcacccccctccccagctattttatgtctgtaattaaatatgttaaaataaagtcattatcggaagtca

SEQ ID NO: 320045 - DNA, 2028 bp, Homo sapiens
cagcggcggcggccacccggcgctccttcgcgacggttcggccgggtgccgctggcggccgttgccagggtaggggtcgctttgcggcatggcgatggcggagggcgagaggactgagtgtgctgagcccccccgggacgaacccccggctgatggagctctgaagcgggcagaggagctcaagactcaggccaatgactacttcaaagccaaggactacgagaacgccatcaagttctacagccaggccatcgagctgaaccccagcaatgccatctactatggcaaccgcagcctggcctacctgcgcactgagtgctatggctacgcgctgggagacgccacgcgggccattgagctggacaagaagtacatcaagggttattaccgccgggctgccagcaacatggcactgggcaagttccgggccgcgctgcgagactacgagacggtggtcaaggtgaagccccatgacaaggatgccaaaatgaaataccaggagtgcaacaagatcgtgaagcagaaggcctttgagcgggccatcgcgggcgacgagcacaagcgctccgtggtggactcgctggacatcgagagcatgaccattgaggatgagtacagcggacccaagcttgaagacggcaaagtgacaatcagtttcatgaaggagctcatgcagtggtacaaggaccagaagaaactgcaccggaaatgtgcctaccagacagagaagattacagtatgtggggacacccatggccagttctatgacctcctcaacatattcgagctcaacggtttaccctcggagaccaacccctatatatttaatggtgactttgtggaccgaggctccttctctgtagaagtgatcctcacccttttcggcttcaagctcctgtacccagatcactttcacctccttcgaggcaaccacgagacagacaacatgaaccagatctacggtttcgagggtgaggtgaaggccaagtacacagcccagatgtacgagctctttagcgaggtgttcgagtggctcccgttggcccagtgcatcaacggcaaagtgctgatcatgcacggaggcctgttcagtgaagacggtgtcaccctggatgacatccggaaaattgagcggaatcgacaacccccagattcagggcccatgtgtgacctgctctggtcagatccacagccacagaacgggcgctcgatcagcaagcggggcgtgagctgtcagtttgggcctgacgtcaccaaggccttcttggaagagaacaacctggactatatcatccgcagccacgaagtcaaggccgagggctacgaggtggctcacggaggccgctgtgtcaccgtcttctctgcccccaactactgcgaccagatggggaacaaagcctcctacatccacctccagggctctgacctacggcctcagttccaccagttcacagcagtgcctcatcccaacgtcaagcccatggcctatgccaacacgctgctgcagctaggaatgatgtgaggtgacgggcggggcggcctgcatcccagggcccctccaatcccaccggacccaggccctgggctaggggcagagcaggccccgccccagggcaatgttggacccccttttactttgtaaagtttgtatttattcccctttaggtttgcagagggggtaggggcagagtcaggggctggccagagggtctgctccctggacagagaggaaggaggtggagcagctggggctgggggcacagcctgggcattctgtggggaggccgtcctcggggtggggtggggccgagtggctgccctgcccccctcatttgcatggctcctcccccactcaagcaatagggccccgccataggaagacccccagagagagggtcagcaggggggccccgcctgcgcctcccctcctatagccccatggtggggctaggctggggctcacccccctccccagctattttatgtctgtaattaaatatgttaaaataaagtcattatcggaagtca

SEQ ID NO: 320046 - DNA, 1519 bp, Homo sapiens
ctccctctctccctcacaccccacccctgtgcctttcctcctgaatatcccatttctctcctggcctcttggtcttcgtttgtgttccctgcttgtgtctcttgcatgattcttcttggtctactgtgaactcttacccttcccctcacctctgccccctccccacgtctctctctcggcccgtccctctccggtggcctcttttctttcagacagagaagattacagtatgtggggacacccatggccagttctatgacctcctcaacatattcgagctcaacggtttaccctcggagaccaacccctatatatttaatggtgactttgtggaccgaggctccttctctgtagaagtgatcctcacccttttcggcttcaagctcctgtacccagatcactttcacctccttcgaggcaaccacgagacagacaacatgaaccagatctacggtttcgagggtgaggtgaaggccaagtacacagcccagatgtacgagctctttagcgaggtgttcgagtggctcccgttggcccagtgcatcaacggcaaagtgctgatcatgcacggaggcctgttcagtgaagacggtgtcaccctggatgacatccggaaaattgagcggaatcgacaacccccagattcagggcccatgtgtgacctgctctggtcagatccacagccacagaacgggcgctcgatcagcaagcggggcgtgagctgtcagtttgggcctgacgtcaccaaggccttcttggaagagaacaacctggactatatcatccgcagccacgaagtcaaggccgagggctacgaggtggctcacggaggccgctgtgtcaccgtcttctctgcccccaactactgcgaccagatggggaacaaagcctcctacatccacctccagggctctgacctacggcctcagttccaccagttcacagcagtgcctcatcccaacgtcaagcccatggcctatgccaacacgctgctgcagctaggaatgatgtgaggtgacgggcggggcggcctgcatcccagggcccctccaatcccaccggacccaggccctgggctaggggcagagcaggccccgccccagggcaatgttggacccccttttactttgtaaagtttgtatttattcccctttaggtttgcagagggggtaggggcagagtcaggggctggccagagggtctgctccctggacagagaggaaggaggtggagcagctggggctgggggcacagcctgggcattctgtggggaggccgtcctcggggtggggtggggccgagtggctgccctgcccccctcatttgcatggctcctcccccactcaagcaatagggccccgccataggaagacccccagagagagggtcagcaggggggccccgcctgcgcctcccctcctatagccccatggtggggctaggctggggctcacccccctccccagctattttatgtctgtaattaaatatgttaaaataaagtcattatcggaagtca

SEQ ID NO: 320047 - DNA, 1334 bp, Homo sapiens
ggggcagagtcagggctggccagagggtctgctccctggacagagaggaaggaggtggagcagctggggctgggggcacagcctgggcattctgtggggaggccgtcctcggagaccaacccctatatatttaatggtgactttgtggaccgaggctccttctctgtagaagtgatcctcacccttttcggcttcaagctcctgtacccagatcactttcacctccttcgaggcaaccacgagacagacaacatgaaccagatctacggtttcgagggtgaggtgaaggccaagtacacagcccagatgtacgagctctttagcgaggtgttcgagtggctcccgttggcccagtgcatcaacggcaaagtgctgatcatgcacggaggcctgttcagtgaagacggtgtcaccctggatgacatccggaaaattgagcggaatcgacaacccccagattcagggcccatgtgtgacctgctctggtcagatccacagccacagaacgggcgctcgatcagcaagcggggcgtgagctgtcagtttgggcctgacgtcaccaaggccttcttggaagagaacaacctggactatatcatccgcagccacgaagtcaaggccgagggctacgaggtggctcacggaggccgctgtgtcaccgtcttctctgcccccaactactgcgaccagatggggaacaaagcctcctacatccacctccagggctctgacctacggcctcagttccaccagttcacagcagtgcctcatcccaacgtcaagcccatggcctatgccaacacgctgctgcagctaggaatgatgtgaggtgacgggcggggcggcctgcatcccagggcccctccaatcccaccggacccaggccctgggctaggggcagagcaggccccgccccagggcaatgttggacccccttttactttgtaaagtttgtatttattcccctttaggtttgcagagggggtaggggcagagtcaggggctggccagagggtctgctccctggacagagaggaaggaggtggagcagctggggctgggggcacagcctgggcattctgtggggaggccgtcctcggggtggggtggggccgagtggctgccctgcccccctcatttgcatggctcctcccccactcaagcaatagggccccgccataggaagacccccagagagagggtcagcaggggggccccgcctgcgcctcccctcctatagccccatggtggggctaggctggggctcacccccctccccagctattttatgtctgtaattaaatatgttaaaataaagtcattatcggaagtca

SEQ ID NO: 320048 - DNA, 592 bp, Homo sapiens
gcggggacgtgtgaggtcacttcctgcgtgttgggtggcttcctgcggcgtttccactctcgctctcctttcgttgcctgatcgccgccatcatgggtcgcatgcatgctcccgggaagggcctgtcccagtcggctttaccctatcgacgcagcgtccccacttggttgaagttgacatctgacgacgtgaaggagcagatttacaaactggccaagaagggccttactccttcacagatcggtgtaatcctgagagattcacatggtgttgcacaagtacgttttgtgacaggcaataaaattttaagaattcttaagtctaagggacttgctcctgatcttcctgaagatctctaccatttaattaagaaagcagttgctgttcgaaagcatcttgagaggaacagaaaggataaggatgctaaattccgtctgattctaatagagagccggattcaccgtttggctcgatattataagaccaagcgagtcctccctcccaattggaaatatgaatcatctacagcctctgccctggtcgcataaatttgtctgtgtactcaagcaataaaatgattgtttaactaaaa

SEQ ID NO: 320049 - DNA, 555 bp, Homo sapiens
  misc_feature (17)..(17): n is a, c, g, or t
  misc_feature (19)..(19): n is a, c, g, or t
gtatcaacgcagagtgncnattacggccggggttcgttgcctgatcgccgccatcatgggtcgcatgcatgctcccgggaagggcctgtcccagtcggctttaccctatcgacgcagcgtccccacttggttgaagttgacatctgacgacgtgaaggagcagatttacaaactggccaagaagggccttactccttcacagatcggtgtaatcctgagagattcacatggtgttgcacaagtacgttttgtgacaggcaataaaattttaagaattcttaagtctaagggacttgctcctgatcttcctgaagatctctaccatttaattaagaaagcagttgctgttcgaaagcatcttgagaggaacagaaaggataaggatgctaaattccgtctgattctaatagagagccggattcaccgtttggctcgatattataagaccaagcgagtcctccctcccaattggaaatatgaatcatctacagcctctgccctggtcgcataaatttgtctgtgtactcaagcaataaaatgattgtttaactaaaa

SEQ ID NO: 320050 - DNA, 615 bp, Homo sapiens
gcggggacgtgtgaggtcacttcctgcgtgttgggtggcttcctgcggcgtttccactctcgctctcctttcgttgcctgatcgccgccatcatgggtcgcatgcatgctcccgggaagggcctgtcccagtcggctttaccctatcgacgcagcgtccccacttggttgaagttgacatctgacgacgtgaaggagcagatttacaaactggccaagaagggccttactccttcacagatcggtgtaatcctgagagattcacatggtgttgcacaagtacgttttgtgacaggcaataaaattttaagaattcttaagtctaagggacttgctcctgatcttcctgaagatctctaccatttaattaagaaagcagttgctgttcgaaagcatcttgagaggaacagaaaggataaggatgctaaattccgtctgattctaatagagagccggattcaccgtttggctcgatattataagaccaagcgagtcctccctcccaattggaaatatgaatcatctacagcctctgccctggtcgcataaatttgtctgtgtactcaagcaataaaatgattgtttaactaaaaaaaaagtttcatatttattttcc

SEQ ID NO: 320051 - DNA, 750 bp, Homo sapiens
  misc_feature (17)..(17): n is a, c, g, or t
  misc_feature (19)..(19): n is a, c, g, or t
  misc_feature (580)..(580): n is a, c, g, or t
gtatcaacgcagagtgncnattacggccggggttcgttgcctgatcgccgccatcatgggtcgcatgcatgctcccgggaagggcctgtcccagtcggctttaccctatcgacgcagcgtccccacttggttgaagttgacatctgacgacgtgaaggagcagatttacaaactggccaagaagggccttactccttcacagatcggtgtaatcctgagagattcacatggtgttgcacaagtacgttttgtgacaggcaataaaattttaagaattcttaagtctaagggacttgctcctgatcttcctgaagatctctaccatttaattaagaaagcagttgctgttcgaaagcatcttgagaggaacagaaaggataaggatgctaaattccgtctgattctaatagagagccggattcaccgtttggctcgatattataagaccaagcgagtcctccctcccaattggaaatatgaatcatctacagcctctgccctggtcgcataaatttgtctgtgtactcaagcaataaaatgattgtttaactaaaaaaaaaaaaagagacacaacgcacanagaacacaacaaccaacaacaaacttttgtgtggccgcccttggcccctgggaagagttttctaaaacccttcctgtgggggcccggggccccgtgtgggttttgtggaccccggggcccccacgttgtcccgggagaacccgggcccagcctggtgtggggtttcccca

SEQ ID NO: 320052 - DNA, 598 bp, Homo sapiens
aattcgcggccgcgtcgacgcgagaagacgacagaaggggttcgttgcctgatcgccgccatcatgggtcgcatgcatgctcccgggaagggcctgtcccagtcggctttaccctatcgacgcagcgtccccacttggttgaagttgacatctgacgacgtgaaggagcagatttacaaactggccaagaagggccttactccttcacagatcggtgtaatcctgagagattcacatggtgttgcacaagtacgttttgtgacaggcaataaaattttaagaattcttaagtctaagggacttgctcctgatcttcctgaagatctctaccatttaattaagaaagcagttgctgttcgaaagcatcttgagaggaacagaaaggataaggatgctaaattccgtctgattctaatagagagccggattcaccgtttggctcgatattataagaccaagcgagtcctccctcccaattggaaatatgaatcatctacagcctctgccctggtcgcataaatttgtctgtgtactcaagcaataaaatgattgtttaactaaaaaaaaaaataacgagctctaacaacatgtcgtcccg

SEQ ID NO: 320053 - DNA, 467 bp, Homo sapiens
cggacgccgtgggtgaccacgcgtcgcagcgtccccacttggttgaagttgacatctgacgacgtgaaggagcagatttacaaactggccaagaagggccttactccttcacagatcggtgtaatcctgagagattcacatggtgttgcacaagtacgttttgtgacaggcaataaaattttaagaattcttaagtctaagggacttgctcctgatcttcctgaagatctctaccatttaattaagaaagcagttgctgttcgaaagcatcttgagaggaacagaaaggataaggatgctaaattccgtctgattctaatagagagccggattcaccgtttggctcgatattataagaccaagcgagtcctccctcccaattggaaatatgaatcatctacagcctctgccctggtcgcataaatttgtctgtgtactcaagcaataaaatgattgtttaactaaaa

SEQ ID NO: 320054 - DNA, 508 bp, Homo sapiens
gcggccgcctactactactaaattcgcggccgcgtcgacatgggtcgcatgcatgctcccgggaagggcctgtcccagtcggctttaccctatcgacgcagcgtccccacttggttgaagttgacatctgacgacgtgaaggagcagatttacaaactggccaagaagggccttactccttcacagatcggtgtaatcctgagagattcacatggtgttgcacaagtacgttttgtgacaggcaataaaattttaagaattcttaagtctaagggacttgctcctgatcttcctgaagatctctaccatttaattaagaaagcagttgctgttcgaaagcatcttgagaggaacagaaaggataaggatgctaaattccgtctgattctaatagagagccggattcaccgtttggctcgatattataagaccaagcgagtcctccctcccaattggaaatatgaactcatctacagcctctgcccagcccagtgcttccacagtgcag

SEQ ID NO: 320055 - DNA, 283 bp, Homo sapiens
tcgtgccgctgttcttaattaaatggtagaatcttcctgaagatctctaccatttaattaagaaagcagttgctgttcgaaagcatcttgagaggaacagaaaggataaggatgctaaattccgtctgattctaatagagagccggattcaccgtttggctcgatattataagaccaagcgagtcctccctcccaattggaaatatgaatcatctacagcctctgccctggtcgcataaatttgtctgtgtactcaagcaataaaatgattgtttaactaaaa

SEQ ID NO: 320056 - DNA, 366 bp, Homo sapiens
aggcgtagtcggatgatactatgacatgattgacattggatgtggcgcgcgtaccgtgtccgtgatccagtgtccccctattatgaagtgctcatggtcgtgattgccgacttatcttcctgaagatctctaccatttaattaagaaagcagttgctgttcgaaagcatcttgagaggaacagaaaggataaggatgctaaattccgtctgattctaatagagagccggattcaccgtttggctcgatattataagaccaagcgagtcctccctcccaattggaaatatgaatcatctacagcctctgccctggtcgcataaatttgtctgtgtactcaagcaataaaatgattgtttaactaaaa

SEQ ID NO: 320057 - DNA, 396 bp, Homo sapiens
  misc_feature (24)..(24): n is a, c, g, or t
  misc_feature (99)..(99): n is a, c, g, or t
tgacccgggaaaatctccagttgnggaattggacttttgcctaaagacctgaaggaattgaggccagcttgaccaatgaatttgggtattctgcgcaangagcattccaagccaaggaagcagtaagtgtgaaggctctgaggccctgaaggtagggaactgttttaggaacagccaggaagttgctgttcgaaagcatcttgagaggaacagaaaggataaggatgctaaattccgtctgattctaatagagagccggattcaccgtttggctcgatattataagaccaagcgagtcctccctcccaattggaaatatgaatcatctacagcctctgccctggtcgcataaatttgtctgtgtactcaagcaataaaatgattgtttaactaaaa

SEQ ID NO: 320058 - DNA, 444 bp, Homo sapiens
gcggccgcctactactactactactactactgctcgaattcaagcttctaacgatgtacggggacatggtgttgcacaagtacgttttgtgacaggcaataaaattttaagaattcttaagtctaagggacttgctcctgatcttcctgaagatctctaccatttaattaagaaagcagttgctgttcgaaagcatcttgagaggaacagaaaggataaggatgctaaattccgtctgattctaatagagagccggattcaccgtttggctcgatattataagaccaagcgagtcctccctcccaattggaaatatgaatcatctacagcctctgccctggtcgcataaatttgtctgtgtactcaagcaataaaatgattgtttaactaaaaaaaatcaataataaatgaaaacatgcggccgaatttcgagctaattggccc

SEQ ID NO: 320059 - DNA, 237 bp, Homo sapiens
gcggccgcctactactactactactactattcgaaagcatcttgagaggaacagaaaggataaggatgctaaattccgtctgattctaatagagagccggattcaccgtttggctcgatattataagaccaagcgagtcctccctcccaattggaaatatgaatcatctacagcctctgccctggtcgcataaatttgtctgtgtactcaagcaataaaatgattgtttaactaaaa

SEQ ID NO: 320060 - DNA, 848 bp, Homo sapiens
agtgtgtaaagtattgttgaatatgaaataccagttgccaattcaggtggtgttctggattgcattttcaagtttcgcttcagctgccaaaccggggccagggactgcttcagtttctctgccttgctctttgtcagtgatgaccagggtgtaaaggtatctgctgcatcgaactgttaaacttcacgttgtccttatttttcttgatcttgacagatttggcatcctttcgtcgggctgtgagcaggaagtccttgatttcctcaattttgccgaggcatggcgagcgaggcgcgctgggctctggcgcggaccaggacctttctcacccacgtatcaccctagagacactcacaggaagggcctgtcccagtcggctttaccctatcgacgcagcgtccccacttggttgaagttgacatctgacgacgtgaaggagcagatttacaaactggccaagaagggccttactccttcacagatcggtgtaatcctgagagattcacatggtgttgcacaagtacgttttgtgacaggcaataaaattttaagaattcttaagtctaagggacttgctcctgatcttcctgaagatctctaccatttaattaagaaagcagttgctgttcgaaagcatcttgagaggaacagaaaggtaagctaataaataaaacctggtgctaagtaggactgcttgtactaaattttttcggtaaaatgtaatgcatctggtttgaattatccaaggcttagtacacaaaccagtgtagtgctgctttgaagttcaaattctatccaaagagattttcattatagaaagtgcatggtagctctacattctcttatta

SEQ ID NO: 320061 - DNA, 1055 bp, Homo sapiens
  misc_feature (24)..(24): n is a, c, g, or t
  misc_feature (99)..(99): n is a, c, g, or t
tgacccgggaaaatctccagttgnggaattggacttttgcctaaagacctgaaggaattgaggccagcttgaccaatgaatttgggtattctgcgcaangagcattccaagccaaggaagcagtaagtgtgaaggctctgaggccctgaaggtagggaactgttttaggaacagccaggaagttgctgttcgaaagcatcttgagaggaacagaaaggataaggatgctaaattccgtctgattctaatagagagccggattcaccgtttggctcgatattataagaccaagcgagtcctccctcccaattggaaatatgaatcatctacagcctctgccctggtcgcataaatttgtctgtgtactcaagcaataaaatgattgtttaactaaaaaaaaaaaaaaaaaaaaaaaaaaaaaaaaaaaaaaaaaaaaaaaaaaaaaaaaaaaaaaaaaaaaaaaaaaaaaaaaaaaaaaaaaaaaaaaaagaggggggcgcgcgccggcaaaatactccccctgcagggggcgcccacaagagacgacaccaacgcgtgtctagagaagagagagggacccacaaaagaggggcatgttttattatatacaagcagagagcaggagggcgcggagtcgtatataaacaaaaacgggggagaggacggaaaaaaacataggcggggcgacgctcgactcttattgttataaaacaaaaccaccctactaaattctcgatgcgagggaaggaaataattatgtggaccaaaccaaccacaccacgagccaaggagagatacactacaccccaaccgaccaggagcggagcacacaaaaaccaacacaaagcaaagaggaaggaggggacgaacgagcgggagggagggagaaaacaacaaacagaaggcgcaagaagaggagctggacggggcggcggcgaagccaaaagagagacggaagccggaagaacagcgaggcacgaacacaagacgaacgaaggcacacaaatcttttccaccggggacgggcaaacaaacaagaacgacaacgggggggc

SEQ ID NO: 320062 - DNA, 314 bp, Homo sapiens
gcggccgcctactactactaaattcgcggccgcgtcgacatcttcctgaagatctctaccatttaattaagaaagcagttgctgttcgaaagcatcttgagaggaacagaaaggataaggatgctaaattccgtctgattctaatagagagccggattcaccgtttggctcgatattataagaccaagcgagtcctccctcccaattggaaatatgaatcattttattgcttgagtacacagacaaatttatgcgaccagggcagaggctgtagatgattcgtcgacgcggccgcgaatttagtagtagtagta

SEQ ID NO: 320063 - DNA, 383 bp, Homo sapiens
aaaatatgtcatagattgtaagtagtcagagctcattagaggtttaaaagaaataacgtgtaaagtttttagaagaatatctgaccagagttctcagtaaatgttagctgtggaatctcattaatccctttggtcatctgtattccagcaagctcactgtgatgatggttttccaacattcgcagtttccaccagaaaggttttccttagtgttgggtaaaccttccttggatgtctgagtgagctttatgtgcattctcacgttggtttctgtgatgtataaaagtatacccccatcttacagataggaaactatgccctgatttctgagccttgacatcatcacattctccagtttgtgtttcgtgttgaaagttaaaacg

SEQ ID NO: 320064 - DNA, 1097 bp, Homo sapiens
  misc_feature (896)..(896): n is a, c, g, or t
gcggggacgtgtgaggtcacttcctgcgtgttgggtggcttcctgcggcgtttccactctcgctctcctttcgttgcctgatcgccgccatcatgggtcgcatgcatgctcccgggaagggcctgtcccagtcggctttaccctatcgacgcagcgtccccacttggttgaagttgacatctgacgacgtgaaggagcagatttacaaactggccaagaagggccttactccttcacagatcggtgtaatcctgagagattcacatggtgttgcacaagtacgttttgtgacaggcaataaaattttaagaattcttaagtctaagggacttgctcctgatcttcctgaagatctctaccatttaattaagaaagcagttgctgttcgaaagcatcttgagaggaacagaaaggataaggatgctaaattccgtctgattctaatagagagccggattcaccgtttggctcgatattataagaccaagcgagtcctccctcccaattggaaatatgaatcatctacagcctctgccctggtcgcataaatttgtctgtgtactcaagcaataaaatgattgtttaactaaaaaaaaaaaaaaaaaaaaaaaaaaaaaaaaaaaaaaaaaaaaaaaaaaaaaaaaaaaaaaaaaaaaaaaaaaaaaaaaaaaaaaaaaaaacaggggggggggggcgccaaaaaaacccccgggggggccccttccccccccctttcttggaaaggggccccccggggcgaaaaaaaccgacagacgcggcagtcaaaaaccgggcgagagaggaaacaaagctgcgtggggctcgtggagaaaccccatcggtgcgcggggccaaacaggggaccacccacaagtcaacgggccagcaaacaaaantggcggtgcgtgccagaccgcgttctgcgcgcggcgaattctgggttcataataagcgggtgtatgaaatacaggtggctctgtctatacgcgatccgtcgcagcactacctgcttcgccatgccatctgcacctcggttcatatccgacgtagtcaccgtacgttgctatgtagtaaaagtacgctaagcactgcttccc

SEQ ID NO: 320065 - DNA, 696 bp, Homo sapiens
  misc_feature (17)..(17): n is a, c, g, or t
  misc_feature (19)..(19): n is a, c, g, or t
gtatcaacgcagagtgncnattacggccggggttcgttgcctgatcgccgccatcatgggtcgcatgcatgctcccgggtgagctcggggcatcaagccggattgctgggcggggggtgggaggaagacagggagtgtgggcagcgggccgaggggatgatgttctgggctgctctggcactagccgccacctcacctcgagactgcttctctccccaggaagggcctgtcccagtcggctttaccctatcgacgcagcgtccccacttggttgaagttgacatctgacgacgtgaaggagcagatttacaaactggccaagaagggccttactccttcacagatcggtgtaatcctgagagattcacatggtgttgcacaagtacgttttgtgacaggcaataaaattttaagaattcttaagtctaagggacttgctcctgatcttcctgaagatctctaccatttaattaagaaagcagttgctgttcgaaagcatcttgagaggaacagaaaggataaggatgctaaattccgtctgattctaatagagagccggattcaccgtttggctcgatattataagaccaagcgagtcctccctcccaattggaaatatgaatcatctacagcctctgccctggtcgcataaatttgtctgtgtactcaagcaataaaatgattgtttaactaaaa

SEQ ID NO: 320066 - DNA, 539 bp, Homo sapiens
gcggccgcctactactactaaattcgcggccgcgtcgacatgggtcgcatgcatgctcccgggaagggcctgtcccagtcggctttaccctatcgacgcagcgtccccacttggttgaagttgacatctgacgacgtgaaggagcagatttacaaactggccaagaagggccttactccttcacagatcggtgtaatcctgagagattcacatggtgttgcacaagtacgttttgtgacaggcaataaaattttaagaattcttaagtctaagggacttgctcctgatcttcctgaagatctctaccatttaattaagaaagcagttgctgttcgaaagcatcttgagaggaacagaaaggataaggatgctaaattccgtctgattctaatagagagccggattcaccgtttggctcgatattataagaccaagcgagtcctccctcccaattggaaatatgaatcatctacagcctctgccctggtcgcataaatttgtctgtgtactcaagcaataaaatgattgtttaactaaaa

SEQ ID NO: 320067 - DNA, 558 bp, Homo sapiens
  misc_feature (29)..(29): n is a, c, g, or t
  misc_feature (31)..(31): n is a, c, g, or t
ctctctctctctctctctctctctctctntntctctctctctctctctcctcgtgccgatgggtcgcatgcatgctcccgggaagggcctgtcccagtcggctttaccctatcgacgcagcgtccccacttggttgaagttgacatctgacgacgtgaaggagcagatttacaaactggccaagaagggccttactccttcacagatcggtgtaatcctgagagattcacatggtgttgcacaagtacgttttgtgacaggcaataaaattttaagaattcttaagtctaagggacttgctcctgatcttcctgaagatctctaccatttaattaagaaagcagttgctgttcgaaagcatcttgagaggaacagaaaggataaggatgctaaattccgtctgattctaatagagagccggattcaccgtttggctcgatattataagaccaagcgagtcctccctcccaattggaaatatgaatcatctacagcctctgccctggtcgcataaatttgtctgtgtactcaagcaataaaatgattgtttaactaaaa

SEQ ID NO: 320068 - DNA, 770 bp, Homo sapiens
gcggggacgtgtgaggtcacttcctgcgtgttgggtggcttcctgcggcgtttccactctcgctctcctttcgttgcctgatcgccgccatcatgggtcgcatgcatgctcccgggaagggcctgtcccagtcggctttaccctatcgacgcagcgtccccacttggttgaagttgacatctgacgacgtgaaggagcagatttacaaactggccaagaagggccttactccttcacagatcggtgtaatcctgagagattcacatggtgttgcacaagtacgttttgtgacaggcaataaaattttaagaattcttaagtctaagggacttgctcctgatcttcctgaagatctctaccatttaattaagaaagcagttgctgttcgaaagcatcttgagaggaacagaaaggataaggatgctaaattccgtctgattctaatagagagccggattcaccgtttggctcgatattataagaccaagcgagtcctccctcccaattggaaatatgaatcatctacagcctctgccctggtcgcataaatttgtctgtgtactcaagcaataaaatgattgtttaactaaaaaaaaacaaaaaaacaaaacaaaaaaacaaaaaatccgggagaatatcatctcgcgggcatcccgaggggcacaaacacctgtgtggtgggacacagcgggtcttagggcgcaacaacagtcggggaacaaaggccgagaaaagagataccccccggagaacaaaccctcggaggggag

SEQ ID NO: 320069 - DNA, 904 bp, Homo sapiens
gcggggacgtgtgaggtcacttcctgcgtgttgggtggcttcctgcggcgtttccactctcgctctcctttcgttgcctgatcgccgccatcatgggtcgcatgcatgctcccgggaagggcctgtcccagtcggctttaccctatcgacgcagcgtccccacttggttgaagttgacatctgacgacgtgaaggagcagatttacaaactggccaagaagggccttactccttcacagatcggtgtaatcctgagagattcacatggtgttgcacaagtacgttttgtgacaggcaataaaattttaagaattcttaagtctaagggacttgctcctgatcttcctgaagatctctaccatttaattaagaaagcagttgctgttcgaaagcatcttgagaggaacagaaaggataaggatgctaaattccgtctgattctaatagagagccggattcaccgtttggctcgatattataagaccaagcgagtcctccctcccaattggaaatatgaatcatctacagcctctgccctggtcgcataaatttgtctgtgtactcaagcaataaaatgattgtttaactaaaaaaaaaaaagggaaaaaaaaaaaaattttttggggggcttgggccctggaaaaagtttttaaaaccatttggtttgggggcggggcgcccagttaggctacatggtgacccgtgcgcacataaggtgtgttccccaagggaaatccgcgggccatcgaccataggggtctggggattcttcccccatttataaaaagggcccggggggggaacacggagggttcttggaccaattcccagaagggagttctcggaggacacatacgggatccattcacaggggagtgtccaagagagctcgatatcatttacc

SEQ ID NO: 320070 - DNA, 627 bp, Homo sapiens
gcggggacgtgtgaggtcacttcctgcgtgttgggtggcttcctgcggcgtttccactctcgctctcctttcgttgcctgatcgccgccatcatgggtcgcatgcatgctcccgggaagggcctgtcccagtcggctttaccctatcgacgcagcgtccccacttggttgaagttgacatctgacgacgtgaaggagcagatttacaaactggccaagaagggccttactccttcacagatcggtgtaatcctgagagattcacatggtgttgcacaagtacgttttgtgacaggcaataaaattttaagaattcttaagtctaagggacttgctcctgatcttcctgaagatctctaccatttaattaagaaagcagttgctgttcgaaagcatcttgagaggaacagaaaggataaggatgctaaattccgtctgattctaatagagagccggattcaccgtttggctcgatattataagaccaagcgagtcctccctcccaattggaaatatgaatcatctacagcctctgccctggtcgcataaatttgtctgtgtactcaagcaataaaatgattgtttaactaaaaaaaaaaataacgagctctaacaacatgtcgtcccg

SEQ ID NO: 320071 - DNA, 787 bp, Homo sapiens
  misc_feature (617)..(617): n is a, c, g, or t
gcggggacgtgtgaggtcacttcctgcgtgttgggtggcttcctgcggcgtttccactctcgctctcctttcgttgcctgatcgccgccatcatgggtcgcatgcatgctcccgggaagggcctgtcccagtcggctttaccctatcgacgcagcgtccccacttggttgaagttgacatctgacgacgtgaaggagcagatttacaaactggccaagaagggccttactccttcacagatcggtgtaatcctgagagattcacatggtgttgcacaagtacgttttgtgacaggcaataaaattttaagaattcttaagtctaagggacttgctcctgatcttcctgaagatctctaccatttaattaagaaagcagttgctgttcgaaagcatcttgagaggaacagaaaggataaggatgctaaattccgtctgattctaatagagagccggattcaccgtttggctcgatattataagaccaagcgagtcctccctcccaattggaaatatgaatcatctacagcctctgccctggtcgcataaatttgtctgtgtactcaagcaataaaatgattgtttaactaaaaaaaaaaaaagagacacaacgcacanagaacacaacaaccaacaacaaacttttgtgtggccgcccttggcccctgggaagagttttctaaaacccttcctgtgggggcccggggccccgtgtgggttttgtggaccccggggcccccacgttgtcccgggagaacccgggcccagcctggtgtggggtttcccca

SEQ ID NO: 320072 - DNA, 771 bp, Homo sapiens
gcggggacgtgtgaggtcacttcctgcgtgttgggtggcttcctgcggcgtttccactctcgctctcctttcgttgcctgatcgccgccatcatgggtcgcatgcatgctcccgggaagggcctgtcccagtcggctttaccctatcgacgcagcgtccccacttggttgaagttgacatctgacgacgtgaaggagcagatttacaaactggccaagaagggccttactccttcacagatcggtgtaatcctgagagattcacatggtgttgcacaagtacgttttgtgacaggcaataaaattttaagaattcttaagtctaagggacttgctcctgatcttcctgaagatctctaccatttaattaagaaagcagttgctgttcgaaagcatcttgagaggaacagaaaggataaggatgctaaattccgtctgattctaatagagagccggattcaccgtttggctcgatattataagaccaagcgagtcctccctcccaattggaaatatgaatcatctacagcctctgccctggtcgcataaatttgtctgtgtactcaagcaataaaatgattgtttaactaaaaaaaaaaaacacaaccataccaaacactctcttggggccgcttggcccctgagagaaggttttctacacccatccggtggggggccgggcccccatgggtagggcaactggccaacggggcccacaggaaccctggcctcacacgggctggttttccacataaaaaagccgggggcacgg

SEQ ID NO: 320073 - DNA, 727 bp, Homo sapiens
gcggggacgtgtgaggtcacttcctgcgtgttgggtggcttcctgcggcgtttccactctcgctctcctttcgttgcctgatcgccgccatcatgggtcgcatgcatgctcccgggaagggcctgtcccagtcggctttaccctatcgacgcagcgtccccacttggttgaagttgacatctgacgacgtgaaggagcagatttacaaactggccaagaagggccttactccttcacagatcggtgtaatcctgagagattcacatggtgttgcacaagtacgttttgtgacaggcaataaaattttaagaattcttaagtctaagggacttgctcctgatcttcctgaagatctctaccatttaattaagaaagcagttgctgttcgaaagcatcttgagaggaacagaaaggataaggatgctaaattccgtctgattctaatagagagccggattcaccgtttggctcgatattataagaccaagcgagtcctccctcccaattggaaatatgaatcatctacagcctctgccctggtcgcataaatttgtctgtgtactcaagcaataaaatgattgtttaactaaaaaaaaaaaaaaaaactcgagagactagttctctctctctccagggcctccccggtctggtggctacctgggggcccgggtctcctccgggccccattcggcgctgcgatgaagcgccactgtccggggaacttttg

SEQ ID NO: 320074 - DNA, 739 bp, Homo sapiens
gcggggacgtgtgaggtcacttcctgcgtgttgggtggcttcctgcggcgtttccactctcgctctcctttcgttgcctgatcgccgccatcatgggtcgcatgcatgctcccgggaagggcctgtcccagtcggctttaccctatcgacgcagcgtccccacttggttgaagttgacatctgacgacgtgaaggagcagatttacaaactggccaagaagggccttactccttcacagatcggtgtaatcctgagagattcacatggtgttgcacaagtacgttttgtgacaggcaataaaattttaagaattcttaagtctaagggacttgctcctgatcttcctgaagatctctaccatttaattaagaaagcagttgctgttcgaaagcatcttgagaggaacagaaaggataaggatgctaaattccgtctgattctaatagagagccggattcaccgtttggctcgatattataagaccaagcgagtcctccctcccaattggaaatatgaatcatctacagcctctgccctggtcgcataaatttgtatggggtctcggcgtgtgcatgcacacgccgagggcccatacatctcaacaacaaaattgtataaaaatggacaaataatctgaacagacacttcttaaaaagaagacatccaaatgaccaacaaatatatgaaaaaatgctcaccatcatcaatcatcagggaaatgcaaatctgcaaatcaaa

SEQ ID NO: 320075 - DNA, 1222 bp, Homo sapiens
gcggggacgtgtgaggtcacttcctgcgtgttgggtggcttcctgcggcgtttccactctcgctctcctttcgttgcctgatcgccgccatcatgggtcgcatgcatgctcccgggaagggcctgtcccagtcggctttaccctatcgacgcagcgtccccacttggttgaagttgacatctgacgacgtgaaggagcagatttacaaactggccaagaagggccttactccttcacagatcggtgtaatcctgagagattcacatggtgttgcacaagtacgttttgtgacaggcaataaaattttaagaattcttaagtctaagggacttgctcctgatcttcctgaagatctctaccatttaattaagaaagcagttgctgttcgaaagcatcttgagaggaacagaaaggataaggatgctaaattccgtctgattctaatagagagccggattcaccgtttggctcgatattataagaccaagcgagtcctccctcccaattggaaatagtaagtatcaactcttttgtcgttgttatcaagaataggagtcagccagtagtaaaagtcctagtagtaaatatgttcagccttgggggctagtagtaaatatgttcagccttgggggctattttgttaactgctctttgagctctggcctggtagtgggaaagcagccacaggcaatacataatcgaatgggtgtggctgcttgtctttaataaagacaagcagagggccatagttgcagaccccagatttagaccatgaataagccctttgactctcttttagatagtaggtagattttcctttcatacctctactcccaggagtttgaattaattttcacatgaattgctcactatgatgattggttgccagacattcgcagtttccaccagaaatgtttttccttatgttggccagttcttccttggacgtctgagtgagcatcttcattcattgtgcttgaacacaatgagttggttcaggtattcagaagtttggtgcactttatatagtttggatttattaactgtttgagaatagcaccattagtggggagattctgttaatgaatgtggagggactagtattaatcctgattttctttctttccccttttttctttttcagtgaatcatctacagcctctgccctggtcgcataaatttgtctgtgtactcaagcaataaaatgattgtttaactaaaa

SEQ ID NO: 320076 - DNA, 561 bp, Homo sapiens
gcggggacgtgtgaggtcacttcctgcgtgttgggtggcttcctgcggcgtttccactctcgctctcctttcgttgcctgatcgccgccatcatgggtcgcatgcatgctcccgggaagggcctgtcccagtcggctttaccctatcgacgcagcgtccccacttggttgaagttgacatctgacgacgtgaaggagcagatttacaaactggccaagaagggccttactccttcacagatcggtgtaatcctgagagattcacatggtgttgcacaagtacgttttgtgacaggcaataaaattttaagaattcttaagtctaagggacttgctcctgatcttcctgaagatctctaccatttaattaagaaagcagttgctgttcgaaagcatcttgagaggaacagaaaggataaggatgctaaattccgtctgattctaatagagagccggattcaccgtttggctcgatattataagaccaagcgagtcctccctcccaattggaaatatgaactcatctacagcctctgcccagcccagtgcttccacagtgcag

SEQ ID NO: 320077 - DNA, 558 bp, Homo sapiens
gcggggacgtgtgaggtcacttcctgcgtgttgggtggcttcctgcggcgtttccactctcgctctcctttcgttgcctgatcgccgccatcatgggtcgcatgcatgctcccgggaagggcctgtcccagtcggctttaccctatcgacgcagcgtccccacttggttgaagttgacatctgacgacgtgaaggagcagatttacaaactggccaagaagggccttactccttcacagatcggtgtaatcctgagagattcacatggtgttgcacaagtacgttttgtgacaggcaataaaattttaagaattcttaagtctaagggacttgctcctgatcttcctgaagatctctaccatttaattaagaaagcagttgctgttcgaaagcatcttgagaggaacagaaagagagccggattcaccgtttggctcgatattataagaccaagcgagtcctccctcccaattggaaatatgaatcatctacagcctctgccctggtcgcataaatttgtctgtgtactcaagcaataaaatgattgtttaactaaaa

SEQ ID NO: 320078 - DNA, 606 bp, Homo sapiens
gcggggacgtgtgaggtcacttcctgcgtgttgggtggcttcctgcggcgtttccactctcgctctcctttcgttgcctgatcgccgccatcatgggtcgcatgcatgctcccgggaagggcctgtcccagtcggctttaccctatcgacgcagcgtccccacttggttgaagttgacatctgacgacgtgaaggagcagatttacaaactggccaagaagggccttactccttcacagatcggtgtaatcctgagagattcacatggtgttgcacaagtacgttttgtgacaggcaataaaattttaagaattcttaagtctaagggacttgctcctgatcttcctgaagatctctaccatttaattaagaaagcagttgctgttcgaaagcatcttgagaggaacagaaaggtaagctaataaataaaacctggtgctaagtaggactgcttgtactaaattttttcggtaaaatgtaatgcatctggtttgaattatccaaggcttagtacacaaaccagtgtagtgctgctttgaagttcaaattctatccaaagagattttcattatagaaagtgcatggtagctctacattctcttatta

SEQ ID NO: 320079 - DNA, 697 bp, Homo sapiens
gcggggacgtgtgaggtcacttcctgcgtgttgggtggcttcctgcggcgtttccactctcgctctcctttcgttgcctgatcgccgccatcatgggtcgcatgcatgctcccgggaagggcctgtcccagtcggctttaccctatcgacgcagcgtccccacttggttgaagttgacatctgacgacgtgaaggagcagatttacaaactggccaagaagggccttactccttcacagatcgtcttgctcttgtcgcccagtctggagtgcagtggcgcgatctcagctcactgcaacctccacctcctggattcaagcgattctcctgcctcagcctcccgaataggtgtaatcctgagagattcacatggtgttgcacaagtacgttttgtgacaggcaataaaattttaagaattcttaagtctaagggacttgctcctgatcttcctgaagatctctaccatttaattaagaaagcagttgctgttcgaaagcatcttgagaggaacagaaaggataaggatgctaaattccgtctgattctaatagagagccggattcaccgtttggctcgatattataagaccaagcgagtcctccctcccaattggaaatatgaatcatctacagcctctgccctggtcgcataaatttgtctgtgtactcaagcaataaaatgattgtttaactaaaa

SEQ ID NO: 320080 - DNA, 432 bp, Homo sapiens
  misc_feature (418)..(419): n is a, c, g, or t
  misc_feature (425)..(425): n is a, c, g, or t
gcggggacgtgtgaggtcacttcctgcgtgttgggtggcttcctgcggcgtttccactctcgctctcctttcgttgcctgatcgccgccatcatgggtcgcatgcatgctcccgggaagggcctgtcccagtcggctttaccctatcgacgcagcgtccccacttggttgaagttgacatctgacgacgtgaaggagcagatttacaaactggccaagaagggccttactccttcacagatcggtgtaatcctgagagattcacatggtgttgcacaagtacgttttgtgacaggcaataaaattttaagaattcttaagtctaagggacttgctcctgatcttcctgaagatctctaccatttaattaagaaagcagttgctgttcgaaaggctccaaggtgattggaggatcctcnngagtcntccaaag

SEQ ID NO: 320081 - DNA, 875 bp, Homo sapiens
  misc_feature (17)..(17): n is a, c, g, or t
  misc_feature (19)..(19): n is a, c, g, or t
gtatcaacgcagagtgncnattacggccggggttcgttgcctgatcgccgccatcatgggtcgcatgcatgctcccgggtgagctcggggcatcaagccggattgctgggcggggggtgggaggaagacagggagtgtgggcagcgggccgaggggatgatgttctgggctgctctggcactagccgccacctcacctcgagactgcttctctccccaggaagggcctgtcccagtcggctttaccctatcgacgcagcgtccccacttggttgaagttgacatctgacgacgtgaaggagcagatttacaaactggccaagaagggccttactccttcacagatcggtgtaatcctgagagattcacatggtgttgcacaagtacgttttgtgacaggcaataaaattttaagaattcttaagtctaagggacttgctcctgatcttcctgaagatctctaccatttaattaagaaagcagttgctgttcgaaagcatcttgagaggaacagaaaggataaggatgctaaattccgtctgattctaatagagagccggattcaccgtttggctcgatattataagaccaagcgagtcctccctcccaattggaaatatgaatcatctacagcctctgccctggtcgcataaatttgtctgtgtactcaagcaataaaatgattgtttaactaaaaaaaaaaaacacaaccataccaaacactctcttggggccgcttggcccctgagagaaggttttctacacccatccggtggggggccgggcccccatgggtagggcaactggccaacggggcccacaggaaccctggcctcacacgggctggttttccacataaaaaagccgggggcacgg

SEQ ID NO: 320082 - DNA, 664 bp, Homo sapiens
  misc_feature (8)..(8): n is a, c, g, or t
  misc_feature (21)..(21): n is a, c, g, or t
  misc_feature (23)..(23): n is a, c, g, or t
ccccggangcagaattcgcanangccatcatgggtcgcatgcatgctcccgggaagggcctgtcccagtcggctttaccctatcgacgcagcgtccccacttggttgaagttgacatctgacgacgtgaaggagcagatttacaaactggccaagaagggccttactccttcacagatcggtgtaatcctgagagattcacatggtgttgcacaagtacgttttgtgacaggcaataaaattttaagaattcttaagtctaagggacttgctcctgatcttcctgaagatctctaccatttaattaagaaagcagttgctgttcgaaagcatcttgagaggaacagaaaggataaggatgctaaattccgtctgattctaatagagagccggattcaccgtttggctcgatattataagaccaagcgagtcctccctcccaattggaaatatgaatcatctacagcctctgccctggtcgcataaatttgtctgtgtactcaagcaataaaatgattgtttaactaaaaaaaaaaaaaaaaactcgagagactagttctctctctctccagggcctccccggtctggtggctacctgggggcccgggtctcctccgggccccattcggcgctgcgatgaagcgccactgtccggggaacttttg

SEQ ID NO: 320083 - DNA, 393 bp, Homo sapiens
gcggccgcctactactactactactactactgctcgaattcaagcttctaacgatgtacggggacatggtgttgcacaagtacgttttgtgacaggcaataaaattttaagaattcttaagtctaagggacttgctcctgatcttcctgaagatctctaccatttaattaagaaagcagttgctgttcgaaagcatcttgagaggaacagaaaggataaggatgctaaattccgtctgattctaatagagagccggattcaccgtttggctcgatattataagaccaagcgagtcctccctcccaattggaaatatgaatcatctacagcctctgccctggtcgcataaatttgtctgtgtactcaagcaataaaatgattgtttaactaaaa

SEQ ID NO: 320084 - DNA, 336 bp, Homo sapiens
gcggccgcctactactactaaattcgcggccgcgtcgaccaataaaattttaagaattcttaagtctaagggacttgctcctgatcttcctgaagatctctaccatttaattaagaaagcagttgctgttcgaaagcatcttgagaggaacagaaaggataaggatgctaaattccgtctgattctaatagagagccggattcaccgtttggctcgatattataagaccaagcgagtcctccctcccaattggaaatatgaatcatctacagcctctgccctggtcgcataaatttgtctgtgtactcaagcaataaaatgattgtttaactaaaa

SEQ ID NO: 320085 - DNA, 440 bp, Homo sapiens
gcggggacgtgtgaggtcacttcctgcgtgttgggtggcttcctgcggcgtttccactctcgctctcctttcgttgcctgatcgccgccatcatgggtcgcatgcatgctcccgggaagggcctgtcccagtcggctttaccctatcgacgcagcgtccccacttggttgaagttgacatctgacgacgtgaaggagcagatttacaaactggccaagaagggccttactccttcacagatcggtgtaatcctgagagattcacatggtgttgcacaagtacgttttgtgacaggcaataaaattttaagaattcttaagtctaagggacttgctcctgtgttgcccaggccaggctggagtgcagtggcatgagctcggcccactgcacccgtgacctcctgcgctcaagcgattctcccatctcagcccacttcaggc

SEQ ID NO: 320086 - DNA, 548 bp, Homo sapiens
gcggggacgtgtgaggtcacttcctgcgtgttgggtggcttcctgcggcgtttccactctcgctctcctttcgttgcctgatcgccgccatcatgggtcgcatgcatgctcccgggaagggcctgtcccagtcggctttaccctatcgacgcagcgtccccacttggttgaagttgacatctgacgacgtgaaggagcagatttacaaactggccaagaagggccttactccttcacagatcggtgtaatcctgagagattcacatggtgttgcacaagtacgttttgtgacaggatcttcctgaagatctctaccatttaattaagaaagcagttgctgttcgaaagcatcttgagaggaacagaaaggataaggatgctaaattccgtctgattctaatagagagccggattcaccgtttggctcgatattataagaccaagcgagtcctccctcccaattggaaatatgaatcatctacagcctctgccctggtcgcataaatttgtctgtgtactcaagcaataaaatgattgtttaactaaaa

SEQ ID NO: 320087 - DNA, 352 bp, Homo sapiens
  misc_feature (114)..(114): n is a, c, g, or t
  misc_feature (140)..(140): n is a, c, g, or t
gttaatgtcatttaaaaagtaaagcaatggaaattattagcatgctttgatttatagataatggctaagattgatgcttggtaaaaccctaattttcctgttttaatgaaaaanaaaaaaaaaaaaaaaaaaaaactggngactttcgaaagcatcttgagaggaacagaaaggataaggatgctaaattccgtctgattctaatagagagccggattcaccgtttggctcgatattataagaccaagcgagtcctccctcccaattggaaatatgaatcatctacagcctctgccctggtcgcataaatttgtctgtgtactcaagcaataaaatgattgtttaactaaaa

SEQ ID NO: 320088 - DNA, 398 bp, Homo sapiens
  misc_feature (29)..(29): n is a, c, g, or t
  misc_feature (31)..(31): n is a, c, g, or t
  misc_feature (384)..(385): n is a, c, g, or t
  misc_feature (391)..(391): n is a, c, g, or t
ctctctctctctctctctctctctctctntntctctctctctctctctcctcgtgccgatgggtcgcatgcatgctcccgggaagggcctgtcccagtcggctttaccctatcgacgcagcgtccccacttggttgaagttgacatctgacgacgtgaaggagcagatttacaaactggccaagaagggccttactccttcacagatcggtgtaatcctgagagattcacatggtgttgcacaagtacgttttgtgacaggcaataaaattttaagaattcttaagtctaagggacttgctcctgatcttcctgaagatctctaccatttaattaagaaagcagttgctgttcgaaaggctccaaggtgattggaggatcctcnngagtcntccaaag

SEQ ID NO: 320089 - DNA, 422 bp, Homo sapiens
gcggggacgtgtgaggtcacttcctgcgtgttgggtggcttcctgcggcgtttccactctcgctctcctttcgttgcctgatcgccgccatcatgggtcgcatgcatgctcccgggaagggcctgtcccagtcggctttaccctatcgacgcagcgtccccacttggttgaagttgacatctgacgacgtgaaggagcagatttacaaactggccaagaagggccttactccttcacagatcggataaggatgctaaattccgtctgattctaatagagagccggattcaccgtttggctcgatattataagaccaagcgagtcctccctcccaattggaaatatgaatcatctacagcctctgccctggtcgcataaatttgtctgtgtactcaagcaataaaatgattgtttaactaaaa

SEQ ID NO: 320090 - DNA, 562 bp, Homo sapiens
  misc_feature (10)..(10): n is a, c, g, or t
cgccctcgantaggtgcgagagacgacagaggggcccgcttcgttgcctgatcgccgccatcatgggtcgcatgcatgctcccgggaagggcctgtcccagtcggctttaccctatcgacgcagcgtccccacttggttgaagttgacatctgacgacgtgaaggagcagatttacaaactggccaagaagggccttactccttcacagatcggtgtaatcctgagagattcacatggtgttgcacaagtacgttttgtgacaggcaataaaattttaagaattcttaagtctaagggacttgctcctgatcttcctgaagatctctaccatttaattaagaaagcagttgctgttcgaaagcatcttgagaggaacagaaaggataaggatgctaaattccgtctgattctaatagagagccggattcaccgtttggctcgatattataagaccaagcgagtcctccctcccaattggaaatatgaatcatctacagcctctgccctggtcgcataaatttgtctgtgtactcaagcaataaaatgattgtttaactaaaa

SEQ ID NO: 320091 - DNA, 540 bp, Homo sapiens
gacccacgcgtccggacccacgcgtcgcatcgccgccatcatgggtcgcatgcatgctcccgggaagggcctgtcccagtcggctttaccctatcgacgcagcgtccccacttggttgaagttgacatctgacgacgtgaaggagcagatttacaaactggccaagaagggccttactccttcacagatcggtgtaatcctgagagattcacatggtgttgcacaagtacgttttgtgacaggcaataaaattttaagaattcttaagtctaagggacttgctcctgatcttcctgaagatctctaccatttaattaagaaagcagttgctgttcgaaagcatcttgagaggaacagaaaggataaggatgctaaattccgtctgattctaatagagagccggattcaccgtttggctcgatattataagaccaagcgagtcctccctcccaattggaaatatgaatcatctacagcctctgccctggtcgcataaatttgtctgtgtactcaagcaataaaatgattgtttaactaaaa

SEQ ID NO: 320092 - DNA, 529 bp, Homo sapiens
  misc_feature (8)..(8): n is a, c, g, or t
  misc_feature (21)..(21): n is a, c, g, or t
  misc_feature (23)..(23): n is a, c, g, or t
ccccggangcagaattcgcanangccatcatgggtcgcatgcatgctcccgggaagggcctgtcccagtcggctttaccctatcgacgcagcgtccccacttggttgaagttgacatctgacgacgtgaaggagcagatttacaaactggccaagaagggccttactccttcacagatcggtgtaatcctgagagattcacatggtgttgcacaagtacgttttgtgacaggcaataaaattttaagaattcttaagtctaagggacttgctcctgatcttcctgaagatctctaccatttaattaagaaagcagttgctgttcgaaagcatcttgagaggaacagaaaggataaggatgctaaattccgtctgattctaatagagagccggattcaccgtttggctcgatattataagaccaagcgagtcctccctcccaattggaaatatgaatcatctacagcctctgccctggtcgcataaatttgtctgtgtactcaagcaataaaatgattgtttaactaaaa

SEQ ID NO: 320093 - DNA, 740 bp, Homo sapiens
  misc_feature (10)..(10): n is a, c, g, or t
cgccctcgantaggtgcgagagacgacagaggggcccgcttcgttgcctgatcgccgccatcatgggtcgcatgcatgctcccgggaagggcctgtcccagtcggctttaccctatcgacgcagcgtccccacttggttgaagttgacatctgacgacgtgaaggagcagatttacaaactggccaagaagggccttactccttcacagatcggtgtaatcctgagagattcacatggtgttgcacaagtacgttttgtgacaggcaataaaattttaagaattcttaagtctaagggacttgctcctgatcttcctgaagatctctaccatttaattaagaaagcagttgctgttcgaaagcatcttgagaggaacagaaaggataaggatgctaaattccgtctgattctaatagagagccggattcaccgtttggctcgatattataagaccaagcgagtcctccctcccaattggaaatatgaatcatctacagcctctgccctggtcgcataaatttgtctgtgtactcaagcaataaaatgattgtttaactaaaaaaaaacaaaaaaacaaaacaaaaaaacaaaaaatccgggagaatatcatctcgcgggcatcccgaggggcacaaacacctgtgtggtgggacacagcgggtcttagggcgcaacaacagtcggggaacaaaggccgagaaaagagataccccccggagaacaaaccctcggaggggag

SEQ ID NO: 320094 - DNA, 951 bp, Homo sapiens
  misc_feature (620)..(620): n is a, c, g, or t
  misc_feature (652)..(652): n is a, c, g, or t
cggctaggtagaggctggggtaaatcggcagagggggtcgcatgcgtgctcccgggaagggcctgtcccagtcggctttaccctatcgacgcagcgtccccacttggttgaagttgacatctgacgacgtgaaggagcagatttacaaactggccaagaagggccttactccttcacagatcggtgtaatcctgagagattcacatggtgttgcacaagtacgttttgtgacaggcaataaaattttaagaattcttaagtctaagggacttgctcctgatcttcctgaagatctctaccatttaattaagaaagcagttgctgttcgaaagcatcttgagaggaacagaaaggataaggatgctaaattccgtctgattctaatagagagccggattcaccgtttggctcgatattataagaccaagcgagtcctccctcccaattggaaatatgaatcatctacagcctctgccctggtcgcataaatttgtctgtgtactcaagcaataaaatgattgtttaactaaaaaaaaaaaaaaaaaaccgagactaattctctctctccttttcttcccatggtctcagagcctgttcgagccattcaggtaaatggtctncattattacctggtcacaccagattttccccnagattcagaccatccagtctgattccccgtttctgggctcaagtttgactctaaaatctgtttgctattttaaaaagtccaagctgggtccccaggaagaagttttgccaccccggaaactttcaggaagaccgtgcaggcttcgaaggagctcccaagtcacagaaagcgctattgagacagggaggtccccaaatggtcctctgaagccggggtcaccaagtcagtccagatcacagttctgtgagcagcctgaaccttaagaaggggatacggccgttatctggaacaggcccggt

SEQ ID NO: 320095 - DNA, 563 bp, Homo sapiens
aattcgcggccgcgtcgacgcgagaagacgacagaaggggttcgttgcctgatcgccgccatcatgggtcgcatgcatgctcccgggaagggcctgtcccagtcggctttaccctatcgacgcagcgtccccacttggttgaagttgacatctgacgacgtgaaggagcagatttacaaactggccaagaagggccttactccttcacagatcggtgtaatcctgagagattcacatggtgttgcacaagtacgttttgtgacaggcaataaaattttaagaattcttaagtctaagggacttgctcctgatcttcctgaagatctctaccatttaattaagaaagcagttgctgttcgaaagcatcttgagaggaacagaaaggataaggatgctaaattccgtctgattctaatagagagccggattcaccgtttggctcgatattataagaccaagcgagtcctccctcccaattggaaatatgaatcatctacagcctctgccctggtcgcataaatttgtctgtgtactcaagcaataaaatgattgtttaactaaaa

SEQ ID NO: 320096 - DNA, 971 bp, Homo sapiens
gcggggacgtgtgaggtcacttcctgcgtgttgggtggcttcctgcggcgtttccactctcgctctcctttcgttgcctgatcgccgccatcatgggtcgcatgcatgctcccgggaagggcctgtcccagtcggctttaccctatcgacgcagcgtccccacttggttgaagttgacatctgacgacgtgaaggagcagatttacaaactggccaagaagggccttactccttcacagatcggtgtaatcctgagagattcacatggtgttgcacaagtacgttttgtgacaggcaataaaattttaagaattcttaagtctaagggacttgctcctgatcttcctgaagatctctaccatttaattaagaaagcagttgctgttcgaaagcatcttgagaggaacagaaaggataaggatgctaaattccgtctgattctaatagagagccggattcaccgtttggctcgatattataagaccaagcgagtcctccctcccaattggaaatatgaatcatctacagcctctgccctggtcgcataaatttgtctgtgtactcaagcaataaaatgattgtttaactaaaaaaaaaaaaaaaaaaaaaaaaaaaaaaaaaaaaaaaaaaaaaaaaaaaaaaaaaaaaaaaaaaaaaaaaaaaaaaaaaaaaaaaaaaaaaaaaaaaaaaaaaaaagacaaaagaaaaaaagaggaaacgaaaaagaggagagagaagaaaaacagaacaaagacagaaagatagagcagaataagaaaggagggggggacgcaggatggaggagagaacaagagcggaggaggggagaaggaacgagaatagtaggaaggagatgcgagcgagggagaggggtagagaggtggggagaccggaagaaggagaggagggagaggagggggagcaggagaaggaggaaggagggaggaggaggagcgagcagagtggggagg

SEQ ID NO: 320097 - DNA, 510 bp, Homo sapiens
  misc_feature (17)..(18): n is a, c, g, or t
  misc_feature (27)..(27): n is a, c, g, or t
  misc_feature (30)..(30): n is a, c, g, or t
  misc_feature (32)..(32): n is a, c, g, or t
aggaattcggcacgagnnccatcaggntcncnggaagggcctgtcccagtcggctttaccctatcgacgcagcgtccccacttggttgaagttgacatctgacgacgtgaaggagcagatttacaaactggccaagaagggccttactccttcacagatcggtgtaatcctgagagattcacatggtgttgcacaagtacgttttgtgacaggcaataaaattttaagaattcttaagtctaagggacttgctcctgatcttcctgaagatctctaccatttaattaagaaagcagttgctgttcgaaagcatcttgagaggaacagaaaggataaggatgctaaattccgtctgattctaatagagagccggattcaccgtttggctcgatattataagaccaagcgagtcctccctcccaattggaaatatgaatcatctacagcctctgccctggtcgcataaatttgtctgtgtactcaagcaataaaatgattgtttaactaaaa

SEQ ID NO: 320098 - DNA, 675 bp, Homo sapiens
gacccacgcgtccggacccacgcgtcgcatcgccgccatcatgggtcgcatgcatgctcccgggaagggcctgtcccagtcggctttaccctatcgacgcagcgtccccacttggttgaagttgacatctgacgacgtgaaggagcagatttacaaactggccaagaagggccttactccttcacagatcggtgtaatcctgagagattcacatggtgttgcacaagtacgttttgtgacaggcaataaaattttaagaattcttaagtctaagggacttgctcctgatcttcctgaagatctctaccatttaattaagaaagcagttgctgttcgaaagcatcttgagaggaacagaaaggataaggatgctaaattccgtctgattctaatagagagccggattcaccgtttggctcgatattataagaccaagcgagtcctccctcccaattggaaatatgaatcatctacagcctctgccctggtcgcataaatttgtctgtgtactcaagcaataaaatgattgtttaactaaaaaaaaaaaaaaaaactcgagagactagttctctctctctccagggcctccccggtctggtggctacctgggggcccgggtctcctccgggccccattcggcgctgcgatgaagcgccactgtccggggaacttttg

SEQ ID NO: 320099 - DNA, 645 bp, Homo sapiens
  misc_feature (17)..(18): n is a, c, g, or t
  misc_feature (27)..(27): n is a, c, g, or t
  misc_feature (30)..(30): n is a, c, g, or t
  misc_feature (32)..(32): n is a, c, g, or t
aggaattcggcacgagnnccatcaggntcncnggaagggcctgtcccagtcggctttaccctatcgacgcagcgtccccacttggttgaagttgacatctgacgacgtgaaggagcagatttacaaactggccaagaagggccttactccttcacagatcggtgtaatcctgagagattcacatggtgttgcacaagtacgttttgtgacaggcaataaaattttaagaattcttaagtctaagggacttgctcctgatcttcctgaagatctctaccatttaattaagaaagcagttgctgttcgaaagcatcttgagaggaacagaaaggataaggatgctaaattccgtctgattctaatagagagccggattcaccgtttggctcgatattataagaccaagcgagtcctccctcccaattggaaatatgaatcatctacagcctctgccctggtcgcataaatttgtctgtgtactcaagcaataaaatgattgtttaactaaaaaaaaaaaaaaaaactcgagagactagttctctctctctccagggcctccccggtctggtggctacctgggggcccgggtctcctccgggccccattcggcgctgcgatgaagcgccactgtccggggaacttttg

SEQ ID NO: 320100 - DNA, 5685 bp, Homo sapiens
ggcggctggtccagctgggcagagtggtcaccctgctccaaccgctgtggccgaggctggcagaagcgcacccggacctgcaccaaccccgctccactcaacggaggggccttctgcgagggccaggcattccagaagaccgcctgcaccaccatctgcccagtcgatggggcgtggacggagtggagcaagtggtcagcctgcagcactgagtgtgcccactggcgtagccgcgagtgcatggcgcccccaccccagaacggaggccgtgactgcagcgggacgctgctcgactctaagaactgcacagatgggctgtgcatgcaaaataagaaaactctaagcgaccccaacagccacctgctggaggcctcaggggatgcggcgctgtatgcggggctcgtggtggccatcttcgtggtcgtggcaatcctcatggcggtgggggtggtggtgtaccgccgcaactgccgtgacttcgacacagacatcactgactcatctgctgccctgactggtggtttccaccccgtcaactttaagacggcaaggcccagcaacccgcagctcctacacccctctgtgcctcctgacctgacagccagcgccggcatctaccgcggacccgtgtatgccctgcaggactccaccgacaaaatccccatgaccaactctcctctgctggaccccttacccagccttaaggtcaaggtctacagctccagcaccacgggctctgggccaggcctggcagatggggctgacctgctgggggtcttgccgcctggcacataccctagcgatttcgcccgggacacccacttcctgcacctgcgcagcgccagcctcggttcccagcagctcttgggcctgccccgagacccagggagcagcgtcagcggcacctttggctgcctgggtgggaggctcagcatccccggcacaggggtcagcttgctggtgcccaatggagccattccccagggcaagttctacgagatgtatctactcatcaacaaggcagaaagtaccctcccgctttcagaagggacccagacagtattgagcccctcggtgacctgtggacccacaggcctcctgctgtgccgccccgtcatcctcaccatgccccactgtgccgaagtcagtgcccgtgactggatctttcagctcaagacccaggcccaccagggccactgggaggaggtggtgaccctggatgaggagaccctgaacacaccctgctactgccagctggagcccagggcctgtcacatcctgctggaccagctgggcacctacgtgttcacgggcgagtcctattcccgctcagcagtcaagcggctccagctggccgtcttcgcccccgccctctgcacctccctggagtacagcctccgggtctactgcctggaggacacgcctgtagcactgaaggaggtgctggagctggagcggactctgggcggatacttggtggaggagccgaaaccgctaatgttcaaggacagttaccacaacctgcgcctctccctccatgacctcccccatgcccattggaggagcaagctgctggccaaataccaggagatccccttctatcacatttggagtggcagccagaaggccctccactgcactttcaccctggagaggcacagcttggcctccacagagctcacctgcaagatctgcgtgcggcaagtggaaggggagggccagatattccagctgcataccactctggcagagacacctgctggctccctggacactctctgctctgcccctggcagcactgtcaccacccagctgggaccttatgccttcaagatcccactgtccatccgccagaagatatgcaacagcctagatgcccccaactcacggggcaatgactggcggatgttagcacagaagctctctatggaccggtacctgaattactttgccaccaaagcgagccccacgggtgtgatcctggacctctgggaagctctgcagcaggacgatggggacctcaacagcctggcgagtgccttggaggagatgggcaagagtgagatgctggtggctgtggccaccgacggggactgctgagcctcctgggacagcgggctggcagggactggcaggaggcaggtgcagggaggcctggggcagcctcctgatggggatgtttggcctctgcttcctcccagttcacagccagagttgcctctcctcctcctcttccccaacccccagaccatgaccagccttagaaaatccatgtactctgttgttagagggcccagagttccttctccacccccgctctctctctcttggcctgagatctctgtgcaggaaccaagatggggctgaagcctctggaggcagttggttgggggcgggcaggcaggaggccctccctccacccccccaccctcagcccggcaacttctgggttccatgggttttagttccgttcttcgttttcttcctccgttattgatttctcctttctccctaagcccccttctgcttccacgcccttttcctctttgaagagtcaagtacaattcagacaaactgctttctcctgtccaaaagcaaaaaggcaaaggaaagaaagaaagcttcagaccgctagtaaggctcaaagaagaagaaaaacaccaaaaccacaagggaaaagaaaaacccagtttcttaggaaacgcaaacgatttattatccagattatttggataagtcctttttaagaaaaaaaaaagaaaatgaaaaacaacacaaaaaaaatagaaaactcttttcttgagtgtggatgagaatgggcacgctcacacttctggccagggtgaatgtgcctgtgtgtgtgtgtgtgtgtgtgtgtgtgtgtacatgtacgcgtgtgcattgaggagagagagactgaacagagagtacttgctgctaacgaatccatcttggactaaattctgacaaggcctcagtttccccagttgtgcagggagtaggtcagacagggttttcactgtctagatttagctggttagattttcctctaaaatcttaagcagatgctgaatccataaagccaaggagtgctgagggctggagtgggtgggccctccctcccacagccccagggagatacatctggactcctgggaatctggattaagaaagttgggatgaaagaggaggactgctcaggccagttgtgagccagggagaatgttccagtctggttttggtctggtggctcctagaaagggatgtggcccagaagtgggactcaaacagagagatgaagtaggggaggggagtcctccacgggcatctctctcctggcggctggatagctttaccctagggtggggccagccctgacaccctcatcccctcctcagcccagcagcctctagagcagcgtggtgctctcttgatggccaggaatccagaatctgcccttccccaaccttggtttctccttctgtaaagcagagtgatggctgagaagtcctctctagctgcagaagcctgagcttcccggtgtcagtcagctctgcaacgtgggagccttggaggcgggtggcctggctgtgcttcatatgcccaggagtggagaaggaggctgagaagctggtttcccagctctgatctccacaggcacctcctataaccctcctctcacccaccccgctacggtctgagagatctgaaataacctttcccagtgggcagggttgccagggttgaggggacagcacataccacccccacccaacctgttcgaggggccctgcatggcacgggatgagtccctgccctgtgcagctgcctggcagtggctgggacaaggatcttgcagccagcacagaggcctcttcaaaggcctctccctcttggcactccaggcaaggcaggtgcccgcttccccaacacctccaggcagtgaccctagggcatgccccagcaggtctccgagcagccactgggacccgtctcagcacatcctggcctttgaaagtctgatatcctgagaggagggcaggttttagggccgcagttccagccagcgtccccagcctggcttccctgccatggactcagtagctcgtggggcttcttaccacccaccagccccgctggggtgcggcctggctgtgggcaaaggaggacttgcctggagatttgagagaagattccttctaccagggctgctgaggggccaggcctgcatcaggggctaggctctggctgggcccggaggctgagactaaggctttcgaccctggtgcctccatgtggatgctgcctcagacaaaggcagtgagccttccctgccaaagtgcccatcccatgggctcggcctcactggtcactgttagcccatgaacacgtgtgggcctcggtcacgtggctttgagggcagtctgaccaggctagaccacacgtgccgtgacagggggtgccattcccctcgcaggctctaatgtgcccacatgtagcctggcagtccaaagaccaagaatcaacttgcaaatctgccattaaactgctgtgcgacttcaggcatatcactgccttctctgggcttcagtgtccttttcatacctagaagtctgcggtctgaggctctttgggttcagacacactgttctaggcttctgtaggggaccttgtgatctgccgtgcccctcctccctgttcttttctgtcctccccaccccaccctcagaagctgcttgctctgcccccaggacaggagcttgacggatgaagtgcagccagccacccaggtgccatttccagtctgacttccagaaatgtgcaccatgtcctagagcacagacccattggctggagcctcctgggagggttcaaaccatcagctctatgagaaatgcccagaaaggctttgccgactccatccgtctgtggaggctgcctgcctccggggtgggatgggtggtttctcctccaattcagacccaagaggtagcccccgagggcatgtacctggtgggaagcagctcaggtacccttgggggttgcagggcccttacgcaggtatttctctctctctcctctctggggtgcgtgtgtgcgtgcgcgtgtgcgtgcctatgcttttctctgtgggcacatcaggatgcccctcggagagcatgtgcacgtgtccccacctgagcgagcgtgtgtgtgtgctcctctgcgtcccaggtttggacgtctagggtttggtgtgcctgtcttctgccctccctgagcccacagggtcagtcaatgtatcttctacgtgcctctccctctgccttctctcacagtgcccccggctccagagctcaggggtaggggttctcctgagggtgcaggggatccttctcatctcctggaccctccagggcactctggtccctattccccagctcctaggcagctgagccgggtcccttaggggaggtgaccaggagctttggtgcagggagctcttggtggggcaaagggctggacccctgccaggtctgtggacatggttatatgcccgggagaggggggtgcagggccccagggatggcccccaatcccacctctgtttattctgtaaactgcaacctataaataacctttagcattcctattgtaacaaaattaatttttatgaaataaattatatttcctagtctaataaaa

SEQ ID NO: 320101 - DNA, 5321 bp, Homo sapiens
ggcggctggtccagctgggcagagtggtcaccctgctccaaccgctgtggccgaggctggcagaagcgcacccggacctgcaccaaccccgctccactcaacggaggggccttctgcgagggccaggcattccagaagaccgcctgcaccaccatctgcccagtcgatggggcgtggacggagtggagcaagtggtcagcctgcagcactgagtgtgcccactggcgtagccgcgagtgcatggcgcccccaccccagaacggaggccgtgactgcagcgggacgctgctcgactctaagaactgcacagatgggctgtgcatgcaaaataagaaaactctaagcgaccccaacagccacctgctggaggcctcaggggatgcggcgctgtatgcggggctcgtggtggccatcttcgtggtcgtggcaatcctcatggcggtgggggtggtggtgtaccgccgcaactgccgtgacttcgacacagacatcactgactcatctgctgccctgactggtggtttccaccccgtcaactttaagacggcaaggcccagcaacccgcagctcctacacccctctgtgcctcctgacctgacagccagcgccggcatctaccgcggacccgtgtatgccctgcaggactccaccgacaaaatccccatgaccaactctcctctgctggaccccttacccagccttaaggtcaaggtctacagctccagcaccacgggctctgggccaggcctggcagatggggctgacctgctgggggtcttgccgcctggcacataccctagcgatttcgcccgggacacccacttcctgcacctgcgcagcgccagcctcggttcccagcagctcttgggcctgccccgagacccagggagcagcgtcagcggcacctttggctgcctgggtgggaggctcagcatccccggcacaggggtcagcttgctggtgcccaatggagccattccccagggcaagttctacgagatgtatctactcatcaacaaggcagaaagtaccctcccgctttcagaagggacccagacagtattgagcccctcggtgacctgtggacccacaggcctcctgctgtgccgccccgtcatcctcaccatgccccactgtgccgaagtcagtgcccgtgactggatctttcagctcaagacccaggcccaccagggccactgggaggaggtggtgaccctggatgaggagaccctgaacacaccctgctactgccagctggagcccagggcctgtcacatcctgctggaccagctgggcacctacgtgttcacgggcgagtcctattcccgctcagcagtcaagcggctccagctggccgtcttcgcccccgccctctgcacctccctggagtacagcctccgggtctactgcctggaggacacgcctgtagcactgaaggaggtgctggagctggagcggactctgggcggatacttggtggaggagccgaaaccgctaatgttcaaggacagttaccacaacctgcgcctctccctccatgacctcccccatgcccattggaggagcaagctgctggccaaataccaggagatccccttctatcacatttggagtggcagccagaaggccctccactgcactttcaccctggagaggcacagcttggcctccacagagctcacctgcaagatctgcgtgcggcaagtggaaggggagggccagatattccagctgcataccactctggcagagacacctgctggctccctggacactctctgctctgcccctggcagcactgtcaccacccagctgggaccttatgccttcaagatcccactgtccatccgccagaagatatgcaacagcctagatgcccccaactcacggggcaatgactggcggatgttagcacagaagctctctatggaccggtacctgaattactttgccaccaaagcgagccccacgggtgtgatcctggacctctgggaagctctgcagcaggacgatggggacctcaacagcctggcgagtgccttggaggagatgggcaagagtgagatgctggtggctgtggccaccgacggggactgctgagcctcctgggacagcgggctggcagggactggcaggaggcaggtgcagggaggcctggggcagcctcctgatggggatgtttggcctctgcttcctcccagttcacagccagagttgcctctcctcctcctcttccccaacccccagaccatgaccagccttagaaaatccatgtactctgttgttagagggcccagagttccttctccacccccgctctctctctcttggcctgagatctctgtgcaggaaccaagatggggctgaagcctctggaggcagttggttgggggcgggcaggcaggaggccctccctccacccccccaccctcagcccggcaacttctgggttccatgggttttagttccgttcttcgttttcttcctccgttattgatttctcctttctccctaagcccccttctgcttccacgcccttttcctctttgaagagtcaagtacaattcagacaaactgctttctcctgtccaaaagcaaaaaggcaaaggaaagaaagaaagcttcagaccgctagtaaggctcaaagaagaagaaaaacaccaaaaccacaagggaaaagaaaaacccagtttcttaggaaacgcaaacgatttattatccagattatttggataagtcctttttaagaaaaaaaaaagaaaatgaaaaacaacacaaaaaaaatagaaaactcttttcttgagtgtggatgagaatgggcacgctcacacttctggccagggtgaatgtgcctgtgtgtgtgtgtgtgtgtgtgtgtgtgtgtacatgtacgcgtgtgcattgaggagagagagactgaacagagagtacttgctgctaacgaatccatcttggactaaattctgacaaggcctcagtttccccagttgtgcagggagtaggtcagacagggttttcactgtctagatttagctggttagattttcctctaaaatcttaagcagatgctgaatccataaagccaaggagtgctgagggctggagtgggtgggccctccctcccacagccccagggagatacatctggactcctgggaatctggattaagaaagttgggatgaaagaggaggactgctcaggccagttgtgagccagggagaatgttccagtctggttttggtctggtggctcctagaaagggatgtggcccagaagtgggactcaaacagagagatgaagtaggggaggggagtcctccacgggcatctctctcctggcggctggatagctttaccctagggtggggccagccctgacaccctcatcccctcctcagcccagcagcctctagagcagcgtggtgctctcttgatggccaggaatccagaatctgcccttccccaaccttggtttctccttctgtaaagcagagtgatggctgagaagtcctctctagctgcagaagcctgagcttcccggtgtcagtcagctctgcaacgtgggagccttggaggcgggtggcctggctgtgcttcatatgcccaggagtggagaaggaggctgagaagctggtttcccagctctgatctccacaggcacctcctataaccctcctctcacccaccccgctacggtctgagagatctgaaataacgcttccctgccatggactcagtagctcgtggggcttcttaccacccaccagccccgctggggtgcggcctggctgtgggcaaaggaggacttgcctggagatttgagagaagattccttctaccagggctgctgaggggccaggcctgcatcaggggctaggctctggctgggcccggaggctgagactaaggctttcgaccctggtgcctccatgtggatgctgcctcagacaaaggcagtgagccttccctgccaaagtgcccatcccatgggctcggcctcactggtcactgttagcccatgaacacgtgtgggcctcggtcacgtggctttgagggcagtctgaccaggctagaccacacgtgccgtgacagggggtgccattcccctcgcaggctctaatgtgcccacatgtagcctggcagtccaaagaccaagaatcaacttgcaaatctgccattaaactgctgtgcgacttcaggcatatcactgccttctctgggcttcagtgtccttttcatacctagaagtctgcggtctgaggctctttgggttcagacacactgttctaggcttctgtaggggaccttgtgatctgccgtgcccctcctccctgttcttttctgtcctccccaccccaccctcagaagctgcttgctctgcccccaggacaggagcttgacggatgaagtgcagccagccacccaggtgccatttccagtctgacttccagaaatgtgcaccatgtcctagagcacagacccattggctggagcctcctgggagggttcaaaccatcagctctatgagaaatgcccagaaaggctttgccgactccatccgtctgtggaggctgcctgcctccggggtgggatgggtggtttctcctccaattcagacccaagaggtagcccccgagggcatgtacctggtgggaagcagctcaggtacccttgggggttgcagggcccttacgcaggtatttctctctctctcctctctggggtgcgtgtgtgcgtgcgcgtgtgcgtgcctatgcttttctctgtgggcacatcaggatgcccctcggagagcatgtgcacgtgtccccacctgagcgagcgtgtgtgtgtgctcctctgcgtcccaggtttggacgtctagggtttggtgtgcctgtcttctgccctccctgagcccacagggtcagtcaatgtatcttctacgtgcctctccctctgccttctctcacagtgcccccggctccagagctcaggggtaggggttctcctgagggtgcaggggatccttctcatctcctggaccctccagggcactctggtccctattccccagctcctaggcagctgagccgggtcccttaggggaggtgaccaggagctttggtgcagggagctcttggtggggcaaagggctggacccctgccaggtctgtggacatggttatatgcccgggagaggggggtgcagggccccagggatggcccccaatcccacctctgtttattctgtaaactgcaacctataaataacctttagcattcctattgtaacaaaattaatttttatgaaataaattatatttcctagtctaataaaa

SEQ ID NO: 320102 - DNA, 3624 bp, Homo sapiens
ggcggctggtccagctgggcagagtggtcaccctgctccaaccgctgtggccgaggctggcagaagcgcacccggacctgcaccaaccccgctccactcaacggaggggccttctgcgagggccaggcattccagaagaccgcctgcaccaccatctgcccagtcgatggggcgtggacggagtggagcaagtggtcagcctgcagcactgagtgtgcccactggcgtagccgcgagtgcatggcgcccccaccccagaacggaggccgtgactgcagcgggacgctgctcgactctaagaactgcacagatgggctgtgcatgcaaaataagaaaactctaagcgaccccaacagccacctgctggaggcctcaggggatgcggcgctgtatgcggggctcgtggtggccatcttcgtggtcgtggcaatcctcatggcggtgggggtggtggtgtaccgccgcaactgccgtgacttcgacacagacatcactgactcatctgctgccctgactggtggtttccaccccgtcaactttaagacggcaaggcccagcaacccgcagctcctacacccctctgtgcctcctgacctgacagccagcgccggcatctaccgcggacccgtgtatgccctgcaggactccaccgacaaaatccccatgaccaactctcctctgctggaccccttacccagccttaaggtcaaggtctacagctccagcaccacgggctctgggccaggcctggcagatggggctgacctgctgggggtcttgccgcctggcacataccctagcgatttcgcccgggacacccacttcctgcacctgcgcagcgccagcctcggttcccagcagctcttgggcctgccccgagacccagggagcagcgtcagcggcacctttggctgcctgggtgggaggctcagcatccccggcacaggggtcagcttgctggtgcccaatggagccattccccagggcaagttctacgagatgtatctactcatcaacaaggcagaaagtaccctcccgctttcagaagggacccagacagtattgagcccctcggtgacctgtggacccacaggcctcctgctgtgccgccccgtcatcctcaccatgccccactgtgccgaagtcagtgcccgtgactggatctttcagctcaagacccaggcccaccagggccactgggaggaggtggtgaccctggatgaggagaccctgaacacaccctgctactgccagctggagcccagggcctgtcacatcctgctggaccagctgggcacctacgtgttcacgggcgagtcctattcccgctcagcagtcaagcggctccagctggccgtcttcgcccccgccctctgcacctccctggagtacagcctccgggtctactgcctggaggacacgcctgtagcactgaaggaggtgctggagctggagcggactctgggcggatacttggtggaggagccgaaaccgctaatgttcaaggacagttaccacaacctgcgcctctccctccatgacctcccccatgcccattggaggagcaagctgctggccaaataccaggagatccccttctatcacatttggagtggcagccagaaggccctccactgcactttcaccctggagaggcacagcttggcctccacagagctcacctgcaagatctgcgtgcggcaagtggaaggggagggccagatattccagctgcataccactctggcagagacacctgctggctccctggacactctctgctctgcccctggcagcactgtcaccacccagctgggaccttatgccttcaagatcccactgtccatccgccagaagatatgcaacagcctagatgcccccaactcacggggcaatgactggcggatgttagcacagaagctctctatggaccggtacctgaattactttgccaccaaagcgagccccacgggtgtgatcctggacctctgggaagctctgcagcaggacgatggggacctcaacagcctggcgagtgccttggaggagatgggcaagagtgagatgctggtggctgtggccaccgacggggactgctgagcctcctgggacagcgggctggcagggactggcaggaggcaggtgcagggaggcctggggcagcctcctgatggggatgtttggcctctgcttcctcccagttcacagccagagttgcctctcctcctcctcttccccaacccccagaccatgaccagccttagaaaatccatgtactctgttgttagagggcccagagttccttctccacccccgctctctctctcttggcctgagatctctgtgcaggaaccaagatggggctgaagcctctggaggcagttggttgggggcgggcaggcaggaggccctccctccacccccccaccctcagcccggcaacttctgggttccatgggttttagttccgttcttcgttttcttcctccgttattgatttctcctttctccctaagcccccttctgcttccacgcccttttcctctttgaagagtcaagtacaattcagacaaactgctttctcctgtccaaaagcaaaaaggcaaaggaaagaaagaaagcttcagaccgctagtaaggctcaaagaagaagaaaaacaccaaaaccacaagggaaaagaaaaacccagtttcttaggaaacgcaaacgatttattatccagattatttggataagtcctttttaagaaaaaaaaaagaaaatgaaaaacaacacaaaaaaaatagaaaactcttttcttgagtgtggatgagaatgggcacgctcacacttctggccagggtgaatgtgcctgtgtgtgtgtgtgtgtgtgtgtgtgtgtgtacatgtacgcgtgtgcattgaggagagagagactgaacagagagtacttgctgctaacgaatccatcttggactaaattctgacaaggcctcagtttccccagttgtgcagggagtaggtcagacagggttttcactgtctagatttagctggttagattttcctctaaaatcttaagcagatgctgaatccataaagccaaggagtgctgagggctggagtgggtgggccctccctcccacagccccagggagatacatctggactcctgggaatctggattaagaaagttgggatgaaagaggaggactgctcaggccagttgtgagccagggagaatgttccagtctggttttggtctggtggctcctagaaagggatgtggcccagaagtgggactcaaacagagagatgaagtaggggaggggagtcctccacgggcatctctctcctggcggctggatagctttaccctagggtggggccagccctgacaccctcatcccctcctcagcccagcagcctctagagcagcgtggtgctggggcaaagggctggacccctgccaggtctgtggacatggttatatgcccgggagaggggggtgcagggccccagggatggcccccaatcccacctctgtttattctgtaaactgcaacctataaataacctttagcattcctattgtaacaaaattaatttttatgaaataaattatatttcctagtctaataaaa

SEQ ID NO: 320103 - DNA, 2602 bp, Homo sapiens
tccctcttggcactccaggcaaggcaggtgcccgcttccccaacacctccaggagatacatctggactcctgggaatctggattaagaaagttgggatgaaagaggaggactgctcaggccagttgtgagccagggagaatgttccagtctggttttggtctggtggctcctagaaagggatgtggcccagaagtgggactcaaacagagagatgaagtaggggaggggagtcctccacgggcatctctctcctggcggctggatagctttaccctagggtggggccagccctgacaccctcatcccctcctcagcccagcagcctctagagcagcgtggtgctctcttgatggccaggaatccagaatctgcccttccccaaccttggtttctccttctgtaaagcagagtgatggctgagaagtcctctctagctgcagaagcctgagcttcccggtgtcagtcagctctgcaacgtgggagccttggaggcgggtggcctggctgtgcttcatatgcccaggagtggagaaggaggctgagaagctggtttcccagctctgatctccacaggcacctcctataaccctcctctcacccaccccgctacggtctgagagatctgaaataacctttcccagtgggcagggttgccagggttgaggggacagcacataccacccccacccaacctgttcgaggggccctgcatggcacgggatgagtccctgccctgtgcagctgcctggcagtggctgggacaaggatcttgcagccagcacagaggcctcttcaaaggcctctccctcttggcactccaggcaaggcaggtgcccgcttccccaacacctccaggcagtgaccctagggcatgccccagcaggtctccgagcagccactgggacccgtctcagcacatcctggcctttgaaagtctgatatcctgagaggagggcaggttttagggccgcagttccagccagcgtccccagcctggcttccctgccatggactcagtagctcgtggggcttcttaccacccaccagccccgctggggtgcggcctggctgtgggcaaaggaggacttgcctggagatttgagagaagattccttctaccagggctgctgaggggccaggcctgcatcaggggctaggctctggctgggcccggaggctgagactaaggctttcgaccctggtgcctccatgtggatgctgcctcagacaaaggcagtgagccttccctgccaaagtgcccatcccatgggctcggcctcactggtcactgttagcccatgaacacgtgtgggcctcggtcacgtggctttgagggcagtctgaccaggctagaccacacgtgccgtgacagggggtgccattcccctcgcaggctctaatgtgcccacatgtagcctggcagtccaaagaccaagaatcaacttgcaaatctgccattaaactgctgtgcgacttcaggcatatcactgccttctctgggcttcagtgtccttttcatacctagaagtctgcggtctgaggctctttgggttcagacacactgttctaggcttctgtaggggaccttgtgatctgccgtgcccctcctccctgttcttttctgtcctccccaccccaccctcagaagctgcttgctctgcccccaggacaggagcttgacggatgaagtgcagccagccacccaggtgccatttccagtctgacttccagaaatgtgcaccatgtcctagagcacagacccattggctggagcctcctgggagggttcaaaccatcagctctatgagaaatgcccagaaaggctttgccgactccatccgtctgtggaggctgcctgcctccggggtgggatgggtggtttctcctccaattcagacccaagaggtagcccccgagggcatgtacctggtgggaagcagctcaggtacccttgggggttgcagggcccttacgcaggtatttctctctctctcctctctggggtgcgtgtgtgcgtgcgcgtgtgcgtgcctatgcttttctctgtgggcacatcaggatgcccctcggagagcatgtgcacgtgtccccacctgagcgagcgtgtgtgtgtgctcctctgcgtcccaggtttggacgtctagggtttggtgtgcctgtcttctgccctccctgagcccacagggtcagtcaatgtatcttctacgtgcctctccctctgccttctctcacagtgcccccggctccagagctcaggggtaggggttctcctgagggtgcaggggatccttctcatctcctggaccctccagggcactctggtccctattccccagctcctaggcagctgagccgggtcccttaggggaggtgaccaggagctttggtgcagggagctcttggtggggcaaagggctggacccctgccaggtctgtggacatggttatatgcccgggagaggggggtgcagggccccagggatggcccccaatcccacctctgtttattctgtaaactgcaacctataaataacctttagcattcctattgtaacaaaattaatttttatgaaataaattatatttcctagtctaataaaa

SEQ ID NO: 320104 - DNA, 315 bp, Homo sapiens
cacatttggagtggcagccagaaggccctccactgcactttcaccctggagaggcacagcttggcctccacagagctcacctgcaagatctgcgtgcggcaagtggaaggggagggccagatattccagctgcataccactctggcagaggtgagggaagtcggggccacatattccagctgcacaccacactggcggaggtgagggaagggtggggcagatattccagctgcacaccacgctggcggaggtgagggaagggtggggcagatattccagctgcacaccacgctggcggaggtgagggaagggtgg

SEQ ID NO: 320105 - DNA, 358 bp, Homo sapiens
ttctcctgagggtgcaggggatccttctcatctcctggaccctccagggcactctggtccctattccccagctcctaggcagctgagccgggtcccttaggggaggtgaccaggagctttggtgcagggagctcttggtggggcaaagggctggacccctgccaggtctgtggacatggttatatgcccgggagaggggggtgcagggccccagggatggcccccaatcccacctctgtttattctgtaaactgcaacctataaataacctttagcattcctattgtaacaaaattaatttttatgaaataaattatatttcctagtctaataaaatccgggttgcatttggctgtct

SEQ ID NO: 320106 - DNA, 5300 bp, Homo sapiens
ggcggctggtccagctgggcagagtggtcaccctgctccaaccgctgtggccgaggctggcagaagcgcacccggacctgcaccaaccccgctccactcaacggaggggccttctgcgagggccaggcattccagaagaccgcctgcaccaccatctgcccagtcgatggggcgtggacggagtggagcaagtggtcagcctgcagcactgagtgtgcccactggcgtagccgcgagtgcatggcgcccccaccccagaacggaggccgtgactgcagcgggacgctgctcgactctaagaactgcacagatgggctgtgcatgcaaaataagaaaactctaagcgaccccaacagccacctgctggaggcctcaggggatgcggcgctgtatgcggggctcgtggtggccatcttcgtggtcgtggcaatcctcatggcggtgggggtggtggtgtaccgccgcaactgccgtgacttcgacacagacatcactgactcatctgctgccctgactggtggtttccaccccgtcaactttaagacggcaaggcccagcaacccgcagctcctacacccctctgtgcctcctgacctgacagccagcgccggcatctaccgcggacccgtgtatgccctgcaggactccaccgacaaaatccccatgaccaactctcctctgctggaccccttacccagccttaaggtcaaggtctacagctccagcaccacgggctctgggccaggcctggcagatggggctgacctgctgggggtcttgccgcctggcacataccctagcgatttcgcccgggacacccacttcctgcacctgcgcagcgccagcctcggttcccagcagctcttgggcctgccccgagacccagggagcagcgtcagcggcacctttggctgcctgggtgggaggctcagcatccccggcacaggggtcagcttgctggtgcccaatggagccattccccagggcaagttctacgagatgtatctactcatcaacaaggcagaaagtaccctcccgctttcagaagggacccagacagtattgagcccctcggtgacctgtggacccacaggcctcctgctgtgccgccccgtcatcctcaccatgccccactgtgccgaagtcagtgcccgtgactggatctttcagctcaagacccaggcccaccagggccactgggaggaggtggtgaccctggatgaggagaccctgaacacaccctgctactgccagctggagcccagggcctgtcacatcctgctggaccagctgggcacctacgtgttcacgggcgagtcctattcccgctcagcagtcaagcggctccagctggccgtcttcgcccccgccctctgcacctccctggagtacagcctccgggtctactgcctggaggacacgcctgtagcactgaaggaggtgctggagctggagcggactctgggcggatacttggtggaggagccgaaaccgctaatgttcaaggacagttaccacaacctgcgcctctccctccatgacctcccccatgcccattggaggagcaagctgctggccaaataccaggagatccccttctatcacatttggagtggcagccagaaggccctccactgcactttcaccctggagaggcacagcttggcctccacagagctcacctgcaagatctgcgtgcggcaagtggaaggggagggccagatattccagctgcataccactctggcagagacacctgctggctccctggacactctctgctctgcccctggcagcactgtcaccacccagctgggaccttatgccttcaagatcccactgtccatccgccagaagatatgcaacagcctagatgcccccaactcacggggcaatgactggcggatgttagcacagaagctctctatggaccggtacctgaattactttgccaccaaagcgagccccacgggtgtgatcctggacctctgggaagctctgcagcaggacgatggggacctcaacagcctggcgagtgccttggaggagatgggcaagagtgagatgctggtggctgtggccaccgacggggactgctgagcctcctgggacagcgggctggcagggactggcaggaggcaggtgcagggaggcctggggcagcctcctgatggggatgtttggcctctgcttcctcccagttcacagccagagttgcctctcctcctcctcttccccaacccccagaccatgaccagccttagaaaatccatgtactctgttgttagagggcccagagttccttctccacccccgctctctctctcttggcctgagatctctgtgcaggaaccaagatggggctgaagcctctggaggcagttggttgggggcgggcaggcaggaggccctccctccacccccccaccctcagcccggcaacttctgggttccatgggttttagttccgttcttcgttttcttcctccgttattgatttctcctttctccctaagcccccttctgcttccacgcccttttcctctttgaagagtcaagtacaattcagacaaactgctttctcctgtccaaaagcaaaaaggcaaaggaaagaaagaaagcttcagaccgctagtaaggctcaaagaagaagaaaaacaccaaaaccacaagggaaaagaaaaacccagtttcttaggaaacgcaaacgatttattatccagattatttggataagtcctttttaagaaaaaaaaaagaaaatgaaaaacaacacaaaaaaaatagaaaactcttttcttgagtgtggatgagaatgggcacgctcacacttctggccagggtgaatgtgcctgtgtgtgtgtgtgtgtgtgtgtgtgtgtgtacatgtacgcgtgtgcattgaggagagagagactgaacagagagtacttgctgctaacgaatccatcttggactaaattctgacaaggcctcagtttccccagttgtgcagggagtaggtcagacagggttttcactgtctagatttagctggttagattttcctctaaaatcttaagcagatgctgaatccataaagccaaggagtgctgagggctggagtgggtgggccctccctcccacagccccagggagatacatctggactcctgggaatctggattaagaaagttgggatgaaagaggaggactgctcaggccagttgtgagccagggagaatgttccagtctggttttggtctggtggctcctagaaagggatgtggcccagaagtgggactcaaacagagagatgaagtaggggaggggagtcctccacgggcatctctctcctggcggctggatagctttaccctagggtggggccagccctgacaccctcatcccctcctcagcccagcagcctctagagcagcgtggtgctctcttgatggccaggaatccagaatctgcccttccccaaccttggtttctccttctgtaaagcagagtgatggctgagaagtcctctctagctgcagaagcctgagcttcccggtgtcagtcagctctgcaacgtgggagccttggaggcgggtggcctggctgtgcttcatatgcccaggagtggagaaggaggctgagaagctggtttcccagctctgatctccacaggcacctcctataaccctcctctcacccaccccgctacggtctgagagatctgaaataacctttcccagtgggcagggttgccagggttgaggggacagcacataccacccccacccaacctgttcgaggggccctgcatggcacgggatgagtccctgccctgtgcagctgcctggcagtggctgggacaaggatcttgcagccagcacagaggcctcttcaaaggcctctccctcttggcactccaggcaaggcaggtgcccgcttccccaacacctccaggcagtgaccctagggcatgccccagcaggtctccgagcagccactgggacccgtctcagcacatcctggcctttgaaagtctgatatcctgagaggagggcaggttttagggccgcagttccagccagcgtccccagcctggcttccctgccatggactcagtagctcgtggggcttcttaccacccaccagccccgctggggtgcggcctggctgtgggcaaaggaggacttgcctggagatttgagagaagattccttctaccagggctgctgaggggccaggcctgcatcaggggctaggctctggctgggcccggaggctgagactaaggctttcgaccctggtgcctccatgtggatgctgcctcagacaaaggcagtgagccttccctgccaaagtgcccatcccatgggctcggcctcactggtcactgttagcccatgaacacgtgtgggcctcggtcacgtggctttgagggcagtctgaccaggctagaccacacgtgccgtgacagggggtgccattcccctcgcaggctctaatgtgcccacatgtagcctggcagtccaaagaccaagaatcaacttgcaaatctgccattaaactgctgtgcgacttcaggcatatcactgccttctctgggcttcagtgtccttttcatacctagaagtctgcggtctgaggctctttgggttcagacacactgttctaggcttctgtaggggaccttgtgatctgccgtgcccctcctccctgttcttttctgtcctccccaccccaccctcagaagctgcttgctctgcccccaggacaggagcttgacggatgaagtgcagccagccacccaggtgccatttccagtctgacttccagaaatgtgcaccatgtcctagagcacagacccattggctggagcctcctgggagggttcaaaccatcagctctatgagaaatgcccagaaaggctttgccgactccatccgtctgtggaggctgcctgcctccggggtgggatgggtggtttctcctgagggtgcaggggatccttctcatctcctggaccctccagggcactctggtccctattccccagctcctaggcagctgagccgggtcccttaggggaggtgaccaggagctttggtgcagggagctcttggtggggcaaagggctggacccctgccaggtctgtggacatggttatatgcccgggagaggggggtgcagggccccagggatggcccccaatcccacctctgtttattctgtaaactgcaacctataaataacctttagcattcctattgtaacaaaattaatttttatgaaataaattatatttcctagtctaataaaa

SEQ ID NO: 320107 - DNA, 3537 bp, Homo sapiens
ggcggctggtccagctgggcagagtggtcaccctgctccaaccgctgtggccgaggctggcagaagcgcacccggacctgcaccaaccccgctccactcaacggaggggccttctgcgagggccaggcattccagaagaccgcctgcaccaccatctgcccagtcgatggggcgtggacggagtggagcaagtggtcagcctgcagcactgagtgtgcccactggcgtagccgcgagtgcatggcgcccccaccccagaacggaggccgtgactgcagcgggacgctgctcgactctaagaactgcacagatgggctgtgcatgcaaaataagaaaactctaagcgaccccaacagccacctgctggaggcctcaggggatgcggcgctgtatgcggggctcgtggtggccatcttcgtggtcgtggcaatcctcatggcggtgggggtggtggtgtaccgccgcaactgccgtgacttcgacacagacatcactgactcatctgctgccctgactggtggtttccaccccgtcaactttaagacggcaaggcccagcaacccgcagctcctacacccctctgtgcctcctgacctgacagccagcgccggcatctaccgcggacccgtgtatgccctgcaggactccaccgacaaaatccccatgaccaactctcctctgctggaccccttacccagccttaaggtcaaggtctacagctccagcaccacgggctctgggccaggcctggcagatggggctgacctgctgggggtcttgccgcctggcacataccctagcgatttcgcccgggacacccacttcctgcacctgcgcagcgccagcctcggttcccagcagctcttgggcctgccccgagacccagggagcagcgtcagcggcacctttggctgcctgggtgggaggctcagcatccccggcacaggggtcagcttgctggtgcccaatggagccattccccagggcaagttctacgagatgtatctactcatcaacaaggcagaaagtaccctcccgctttcagaagggacccagacagtattgagcccctcggtgacctgtggacccacaggcctcctgctgtgccgccccgtcatcctcaccatgccccactgtgccgaagtcagtgcccgtgactggatctttcagctcaagacccaggcccaccagggccactgggaggaggtggtgaccctggatgaggagaccctgaacacaccctgctactgccagctggagcccagggcctgtcacatcctgctggaccagctgggcacctacgtgttcacgggcgagtcctattcccgctcagcagtcaagcggctccagctggccgtcttcgcccccgccctctgcacctccctggagtacagcctccgggtctactgcctggaggacacgcctgtagcactgaaggaggtgctggagctggagcggactctgggcggatacttggtggaggagccgaaaccgctaatgttcaaggacagttaccacaacctgcgcctctccctccatgacctcccccatgcccattggaggagcaagctgctggccaaataccaggagatccccttctatcacatttggagtggcagccagaaggccctccactgcactttcaccctggagaggcacagcttggcctccacagagctcacctgcaagatctgcgtgcggcaagtggaaggggagggccagatattccagctgcataccactctggcagagacacctgctggctccctggacactctctgctctgcccctggcagcactgtcaccacccagctgggaccttatgccttcaagatcccactgtccatccgccagaagatatgcaacagcctagatgcccccaactcacggggcaatgactggcggatgttagcacagaagctctctatggaccggtacctgaattactttgccaccaaagcgagccccacgggtgtgatcctggacctctgggaagctctgcagcaggacgatggggacctcaacagcctggcgagtgccttggaggagatgggcaagagtgagatgctggtggctgtggccaccgacggggactgctgagcctcctgggacagcgggctggcagggactggcaggaggcaggtgcagggaggcctggggcagcctcctgatggggatgtttggcctctgcttcctcccagttcacagccagagttgcctctcctcctcctcttccccaacccccagaccatgaccagccttagaaaatccatgtactctgttgttagagggcccagagttccttctccacccccgctctctctctcttggcctgagatctctgtgcaggaaccaagatggggctgaagcctctggaggcagttggttgggggcgggcaggcaggaggccctccctccacccccccaccctcagcccggcaacttctgggttccatgggttttagttccgttcttcgttttcttcctccgttattgatttctcctttctccctaagcccccttctgcttccacgcccttttcctctttgaagagtcaagtacaattcagacaaactgctttctcctgtccaaaagcaaaaaggcaaaggaaagaaagaaagcttcagaccgctagtaaggctcaaagaagaagaaaaacaccaaaaccacaagggaaaagaaaaacccagtttcttaggaaacgcaaacgatttattatccagattatttggataagtcctttttaagaaaaaaaaaagaaaatgaaaaacaacacaaaaaaaatagaaaactcttttcttgagtgtggatgagaatgggcacgctcacacttctggccagggtgaatgtgcctgtgtgtgtgtgtgtgtgtgtgtgtgtgtgtacatgtacgcgtgtgcattgaggagagagagactgaacagagagtacttgctgctaacgaatccatcttggactaaattctgacaaggcctcagtttccccagttgtgcagggagtaggtcagacagggttttcactgtctagatttagctggttagattttcctctaaaatcttaagcagatgctgaatccataaagccaaggagtgctgagggctggagtgggtgggccctccctcccacagccccagggagatacatctggactcctgggaatctggattaagaaagttgggatgaaagaggaggactgctcaggccagttgtgagccagggagaatgttccagtctggttttggtctggtggctcctagaaagggatgtggcccagaagtgggactcaaacagagagatgaagtaggggaggggagtcctccacgggcatctctctcctggcggggcaaagggctggacccctgccaggtctgtggacatggttatatgcccgggagaggggggtgcagggccccagggatggcccccaatcccacctctgtttattctgtaaactgcaacctataaataacctttagcattcctattgtaacaaaattaatttttatgaaataaattatatttcctagtctaataaaa

SEQ ID NO: 320108 - DNA, 2685 bp, Homo sapiens
gattgtggtttgggatcggcatgtgcccactactgtatatggaatggatagatcagtggtaacctggtctatagcacagggcatgaaagccctcgacatgaatcatatcgagggcctccctcccacagccccagggagatacatctggactcctgggaatctggattaagaaagttgggatgaaagaggaggactgctcaggccagttgtgagccagggagaatgttccagtctggttttggtctggtggctcctagaaagggatgtggcccagaagtgggactcaaacagagagatgaagtaggggaggggagtcctccacgggcatctctctcctggcggctggatagctttaccctagggtggggccagccctgacaccctcatcccctcctcagcccagcagcctctagagcagcgtggtgctctcttgatggccaggaatccagaatctgcccttccccaaccttggtttctccttctgtaaagcagagtgatggctgagaagtcctctctagctgcagaagcctgagcttcccggtgtcagtcagctctgcaacgtgggagccttggaggcgggtggcctggctgtgcttcatatgcccaggagtggagaaggaggctgagaagctggtttcccagctctgatctccacaggcacctcctataaccctcctctcacccaccccgctacggtctgagagatctgaaataacctttcccagtgggcagggttgccagggttgaggggacagcacataccacccccacccaacctgttcgaggggccctgcatggcacgggatgagtccctgccctgtgcagctgcctggcagtggctgggacaaggatcttgcagccagcacagaggcctcttcaaaggcctctccctcttggcactccaggcaaggcaggtgcccgcttccccaacacctccaggcagtgaccctagggcatgccccagcaggtctccgagcagccactgggacccgtctcagcacatcctggcctttgaaagtctgatatcctgagaggagggcaggttttagggccgcagttccagccagcgtccccagcctggcttccctgccatggactcagtagctcgtggggcttcttaccacccaccagccccgctggggtgcggcctggctgtgggcaaaggaggacttgcctggagatttgagagaagattccttctaccagggctgctgaggggccaggcctgcatcaggggctaggctctggctgggcccggaggctgagactaaggctttcgaccctggtgcctccatgtggatgctgcctcagacaaaggcagtgagccttccctgccaaagtgcccatcccatgggctcggcctcactggtcactgttagcccatgaacacgtgtgggcctcggtcacgtggctttgagggcagtctgaccaggctagaccacacgtgccgtgacagggggtgccattcccctcgcaggctctaatgtgcccacatgtagcctggcagtccaaagaccaagaatcaacttgcaaatctgccattaaactgctgtgcgacttcaggcatatcactgccttctctgggcttcagtgtccttttcatacctagaagtctgcggtctgaggctctttgggttcagacacactgttctaggcttctgtaggggaccttgtgatctgccgtgcccctcctccctgttcttttctgtcctccccaccccaccctcagaagctgcttgctctgcccccaggacaggagcttgacggatgaagtgcagccagccacccaggtgccatttccagtctgacttccagaaatgtgcaccatgtcctagagcacagacccattggctggagcctcctgggagggttcaaaccatcagctctatgagaaatgcccagaaaggctttgccgactccatccgtctgtggaggctgcctgcctccggggtgggatgggtggtttctcctccaattcagacccaagaggtagcccccgagggcatgtacctggtgggaagcagctcaggtacccttgggggttgcagggcccttacgcaggtatttctctctctctcctctctggggtgcgtgtgtgcgtgcgcgtgtgcgtgcctatgcttttctctgtgggcacatcaggatgcccctcggagagcatgtgcacgtgtccccacctgagcgagcgtgtgtgtgtgctcctctgcgtcccaggtttggacgtctagggtttggtgtgcctgtcttctgccctccctgagcccacagggtcagtcaatgtatcttctacgtgcctctccctctgccttctctcacagtgcccccggctccagagctcaggggtaggggttctcctgagggtgcaggggatccttctcatctcctggaccctccagggcactctggtccctattccccagctcctaggcagctgagccgggtcccttaggggaggtgaccaggagctttggtgcagggagctcttggtggggcaaagggctggacccctgccaggtctgtggacatggttatatgcccgggagaggggggtgcagggccccagggatggcccccaatcccacctctgtttattctgtaaactgcaacctataaataacctttagcattcctattgtaacaaaattaatttttatgaaataaattatatttcctagtctaataaaa

SEQ ID NO: 320109 - DNA, 753 bp, Homo sapiens
agggaggaacctcggcatgtagctggtgtttatcggacgaggcgcgtctagcgacatgcgggcccctgcgcgccccgctgctcctgctggccatcctggccgtggccctggccgtgagccccgcggccggctccagtcccggcaagccgccgcgcctggtgggaggccccatggacgccagcgtggaggaggagggtgtgcggcgtgcactggactttgccgtcggcgagtacaacaaagccagcaacgacatgtaccacagccgcgcgctgcaggtggtgcgcgcccgcaagcagatcgtagctggggtgaactacttcttggacgtggagctgggccgaaccacgtgtaccaagacccagcccaacttggacaactgccccttccatgaccagccacatctgaaaaggaaagcattctgctctttccagatctacgctgtgccttggcagggcacaatgaccttgtcgaaatccacctgtcaggacgcctaggggtctgtaccgggctggcctgtgcctatcacctcttatgcacacctcccaccccctgtattcccacccctggactggtggcccctgccttggggaaggtctccccatgtgcctgcaccaggagacagacagagaaggcagcaggcggcctttgttgctcagcaaggggctctgccctccctccttccttcttgcttctcatagccccggtgtgcggtgcatacacccccacctcctgcaataaaatagtagcatcggc

SEQ ID NO: 320110 - DNA, 461 bp, Homo sapiens
gcggccgcctactactactaaattcgcggccgcgtcgacgctgggccgaaccacgtgtaccaagacccagcccaacttggacaactgccccttccatgaccagccacatctgaaaaggaaagcattctgctctttccagatctacgctgtgccttggcagggcacaatgaccttgtcgaaatccacctgtcaggacgcctaggggtctgtaccgggctggcctgtgcctatcacctcttatgcacacctcccaccccctgtattcccacccctggactggtggcccctgccttggggaaggtctccccatgtgcctgcaccaggagacagacagagaaggcagcaggcggcctttgttgctcagcaaggggctctgccctccctccttccttcttgcttctcatagccccggtgtgcggtgcatacacccccacctcctgcaataaaatagtagcatcggc

SEQ ID NO: 320111 - DNA, 399 bp, Homo sapiens
ggaaaggggaggggaaacaaagaccacacaggaaacaggagagaaaggaagaggaagtggaaagacgcaaaaaagggaaaagggcccaaagggcaaagaaaacggcaggaggatcgaaatccacctgtcaggacgcctaggggtctgtaccgggctggcctgtgcctatcacctcttatgcacacctcccaccccctgtattcccacccctggactggtggcccctgccttggggaaggtctccccatgtgcctgcaccaggagacagacagagaaggcagcaggcggcctttgttgctcagcaaggggctctgccctccctccttccttcttgcttctcatagccccggtgtgcggtgcatacacccccacctcctgcaataaaatagtagcatcggc

SEQ ID NO: 320112 - DNA, 403 bp, Homo sapiens
  misc_feature (3)..(3): n is a, c, g, or t
ggncattgtgccctgccaaggcacagcgtagatctggaaagagcagaatgctttccttttcagatgtggctggtcatggaaggggcagttgtccaagttgggctgggtcttggtacatcgaaatccacctgtcaggacgcctaggggtctgtaccgggctggcctgtgcctatcacctcttatgcacacctcccaccccctgtattcccacccctggactggtggcccctgccttggggaaggtctccccatgtgcctgcaccaggagacagacagagaaggcagcaggcggcctttgttgctcagcaaggggctctgccctccctccttccttcttgcttctcatagccccggtgtgcggtgcatacacccccacctcctgcaataaaatagtagcatcggc

SEQ ID NO: 320113 - DNA, 456 bp, Homo sapiens
cttttttttttttgtttccacgaagggggccccaaaggtaaaaaagttttgtgtggtaacactccccccaagggaaatggggcctgtgcaaattccgccgcatttccctaaaaattaaataatttttggcaaaaaaaccctatccgccttgtaaccgcgctttttctttggggaaatcctggtttcaggacaccaaagggttaaaaaaggtttggcctgtgcctatcacctcttatgcacacctcccaccccctgtattcccacccctggactggtggcccctgccttggggaaggtctccccatgtgcctgcaccaggagacagacagagaaggcagcaggcggcctttgttgctcagcaaggggctctgccctccctccttccttcttgcttctcatagccccggtgtgcggtgcatacacccccacctcctgcaataaaatagtagcatcggc

SEQ ID NO: 320114 - DNA, 864 bp, Homo sapiens
gcaggccgcggtggggtggggcggcgaaggccggaagggataaaaccgcagtcgccggcctcgcggggctcacggcctcgcctcggtatcgcagcgggtcctctctatctagctccagcctctcgcctgcgccccactccccgcgtcccgcgtcctagccgaccatggccgggcccctgcgcgccccgctgctcctgctggccatcctggccgtggccctggccgtgagccccgcggccggctccagtcccggcaagccgccgcgcctggtgggaggccccatggacgccagcgtggaggaggagggtgtgcggcgtgcactggactttgccgtcggcgagtacaacaaagccagcaacgacatgtaccacagccgcgcgctgcaggtggtgcgcgcccgcaagcagatcgtagctggggtgaactacttcttggacgtggagctgggccgaaccacgtgtaccaagacccagcccaacttggacaactgccccttccatgaccagccacatctgaaaaggaaagcattctgctctttccagatctacgctgtgccttggcagggcacaatgaccttgtcgaaatccacctgtcaggacgcctaggggtctgtaccgggctggcctgtgcctatcacctcttatgcacacctcccaccccctgtattcccacccctggactggtggcccctgccttggggaaggtctccccatgtgcctgcaccaggagacagacagagaaggcagcaggcggcctttgttgctcagcaaggggctctgccctccctccttccttcttgcttctcatagccccggtgtgcggtgcatacacccccacctcctgcaataaaatagtagcatcggc

SEQ ID NO: 320115 - DNA, 816 bp, Homo sapiens
tgtcgactcggtgatggtatcgcagcgggtctctctatctagccagcgggtcctctctatctagctccagcctctcgcctgcgccccactccccgcgtcccgcgtcctagccgaccatggccgggcccctgcgcgccccgctgctcctgctggccatcctggccgtggccctggccgtgagccccgcggccggctccagtcccggcaagccgccgcgcctggtgggaggccccatggacgccagcgtggaggaggagggtgtgcggcgtgcactggactttgccgtcggcgagtacaacaaagccagcaacgacatgtaccacagccgcgcgctgcaggtggtgcgcgcccgcaagcagatcgtagctggggtgaactacttcttggacgtggagctgggccgaaccacgtgtaccaagacccagcccaacttggacaactgccccttccatgaccagccacatctgaaaaggaaagcattctgctctttccagatctacgctgtgccttggcagggcacaatgaccttgtcgaaatccacctgtcaggacgcctaggggtctgtaccgggctggcctgtgcctatcacctcttatgcacacctcccaccccctgtattcccacccctggactggtggcccctgccttggggaaggtctccccatgtgcctgcaccaggagacagacagagaaggcagcaggcggcctttgttgctcagcaaggggctctgccctccctccttccttcttgcttctcatagccccggtgtgcggtgcatacacccccacctcctgcaataaaatagtagcatcggc

SEQ ID NO: 320116 - DNA, 824 bp, Homo sapiens
tggccccggggataatttttatgtgggatttcgtcgaccacgcgtcgctagcagcgggtcctctctatctagctccagcctctcgcctgcgccccactccccgcgtcccgcgtcctagccgaccatggccgggcccctgcgcgccccgctgctcctgctggccatcctggccgtggccctggccgtgagccccgcggccggctccagtcccggcaagccgccgcgcctggtgggaggccccatggacgccagcgtggaggaggagggtgtgcggcgtgcactggactttgccgtcggcgagtacaacaaagccagcaacgacatgtaccacagccgcgcgctgcaggtggtgcgcgcccgcaagcagatcgtagctggggtgaactacttcttggacgtggagctgggccgaaccacgtgtaccaagacccagcccaacttggacaactgccccttccatgaccagccacatctgaaaaggaaagcattctgctctttccagatctacgctgtgccttggcagggcacaatgaccttgtcgaaatccacctgtcaggacgcctaggggtctgtaccgggctggcctgtgcctatcacctcttatgcacacctcccaccccctgtattcccacccctggactggtggcccctgccttggggaaggtctccccatgtgcctgcaccaggagacagacagagaaggcagcaggcggcctttgttgctcagcaaggggctctgccctccctccttccttcttgcttctcatagccccggtgtgcggtgcatacacccccacctcctgcaataaaatagtagcatcggc

SEQ ID NO: 320117 - DNA, 687 bp, Homo sapiens
gcaggccgcggtggggtggggcggcgaaggccggaagggataaaaccgcagtccccgcggccggctccagtcccggcaagccgccgcgcctggtgggaggccccatggacgccagcgtggaggaggagggtgtgcggcgtgcactggactttgccgtcggcgagtacaacaaagccagcaacgacatgtaccacagccgcgcgctgcaggtggtgcgcgcccgcaagcagatcgtagctggggtgaactacttcttggacgtggagctgggccgaaccacgtgtaccaagacccagcccaacttggacaactgccccttccatgaccagccacatctgaaaaggaaagcattctgctctttccagatctacgctgtgccttggcagggcacaatgaccttgtcgaaatccacctgtcaggacgcctaggggtctgtaccgggctggcctgtgcctatcacctcttatgcacacctcccaccccctgtattcccacccctggactggtggcccctgccttggggaaggtctccccatgtgcctgcaccaggagacagacagagaaggcagcaggcggcctttgttgctcagcaaggggctctgccctccctccttccttcttgcttctcatagccccggtgtgcggtgcatacacccccacctcctgcaataaaatagtagcatcggc

SEQ ID NO: 320118 - DNA, 798 bp, Homo sapiens
catccccaaaggcttcttatgataatgagaagcatgattataactgtctaactcttctgcgttcatattgatgttaatgggactaaattaccttgctagcttaatgagataagattttaaatgggtgttttatgtactctgtgtgtgtgtatttaatgaagacttggtggtcgcttctgatttacacttgggaatcaattcccctcttgccgccgttcctaggaacggcggcaagagagggtgtgcggcgtgcactggactttgccgtcggcgagtacaacaaagccagcaacgacatgtaccacagccgcgcgctgcaggtggtgcgcgcccgcaagcagatcgtagctggggtgaactacttcttggacgtggagctgggccgaaccacgtgtaccaagacccagcccaacttggacaactgccccttccatgaccagccacatctgaaaaggaaagcattctgctctttccagatctacgctgtgccttggcagggcacaatgaccttgtcgaaatccacctgtcaggacgcctaggggtctgtaccgggctggcctgtgcctatcacctcttatgcacacctcccaccccctgtattcccacccctggactggtggcccctgccttggggaaggtctccccatgtgcctgcaccaggagacagacagagaaggcagcaggcggcctttgttgctcagcaaggggctctgccctccctccttccttcttgcttctcatagccccggtgtgcggtgcatacacccccacctcctgcaataaaatagtagcatcggc

SEQ ID NO: 320119 - DNA, 1010 bp, Homo sapiens
gcaggccgcggtggggtggggcggcgaaggccggaagggataaaaccgcagtcgccggcctcgcggggctcacggcctcgcctcggtatcgcagcgggtcctctctatctagctccagcctctcgcctgcgccccactccccgcgtcccgcgtcctagccgaccatggccgggcccctgcgcgccccgctgctcctgctggccatcctggccgtggccctggccgtgagccccgcggccggctccagtcccggcaagccgccgcgcctggtgggaggccccatggacgccagcgtggaggaggagggtgtgcggcgtgcactggactttgccgtcggcgagtacaacaaagccagcaacgacatgtaccacagccgcgcgctgcaggtggtgcgcgcccgcaagcagatcgtagctggggtgaactacttcttggacgtggagctgggccgaaccacgtgtaccaagacccagcccaacttggacaactgccccttccatgaccagccacatctgaaaaggaaagcattctgctctttccagatctacgctgtgccttggcagggcacaatgaccttgtcgaaatccacctgtcaggacgcctaggggtctgtaccgggctggcctgtgcctatcacctcttatgcacacctcccaccccctgtattcccacccctggactggtggcccctgccttggggaaggtctccccatgtgcctgcaccaggagacagacagagaaggcagcaggcggcctttgttgctcagcaaggggctctgccctccctccttccttcttgcttctcatagccccggtgtgcggtgcatacacccccacctcctgcaataaaatagtagcatcggcaaaaaaaaaaaacaaaaaaaaaaaaaaaacaggggggcacaaaatacccgaggcaacacacaggcccacatttgaaaaaaggcccaaaggtgtaaaacgcaacgggcgggtaacacgcgaggagaagcggaactggacaccactgg

SEQ ID NO: 320120 - DNA, 992 bp, Homo sapiens
  misc_feature (946)..(946): n is a, c, g, or t
  misc_feature (953)..(953): n is a, c, g, or t
  misc_feature (955)..(955): n is a, c, g, or t
  misc_feature (963)..(965): n is a, c, g, or t
  misc_feature (970)..(970): n is a, c, g, or t
  misc_feature (981)..(981): n is a, c, g, or t
gcaggccgcggtggggtggggcggcgaaggccggaagggataaaaccgcagtcgccggcctcgcggggctcacggcctcgcctcggtatcgcagcgggtcctctctatctagctccagcctctcgcctgcgccccactccccgcgtcccgcgtcctagccgaccatggccgggcccctgcgcgccccgctgctcctgctggccatcctggccgtggccctggccgtgagccccgcggccggctccagtcccggcaagccgccgcgcctggtgggaggccccatggacgccagcgtggaggaggagggtgtgcggcgtgcactggactttgccgtcggcgagtacaacaaagccagcaacgacatgtaccacagccgcgcgctgcaggtggtgcgcgcccgcaagcagatcgtagctggggtgaactacttcttggacgtggagctgggccgaaccacgtgtaccaagacccagcccaacttggacaactgccccttccatgaccagccacatctgaaaaggaaagcattctgctctttccagatctacgctgtgccttggcagggcacaatgaccttgtcgaaatccacctgtcaggacgcctaggggtctgtaccgggctggcctgtgcctatcacctcttatgcacacctcccaccccctgtattcccacccctggactggtggcccctgccttggggaaggtctccccatgtgcctgcaccaggagacagacagagaaggcagcaggcggcctttgttgctcagcaaggggctctgccctccctccttccttcttgcttctcatagccccggtgtgcggtgcatacacccccacctcctgcaataaaatagtagcatcggcaaaaaaaaaaaacaaaaaaaaaaaaaaaaaaaaaaaaaaaaaaaaaaaagggggggcgcgcaaaaaattctccccggggggngcccaantnaggacccnnnttttngaaaagggggncccaaaagggg

SEQ ID NO: 320121 - DNA, 1204 bp, Homo sapiens
gcaggccgcggtggggtggggcggcgaaggccggaagggataaaaccgcagtcgccggcctcgcggggctcacggcctcgcctcggtatcgcagcgggtcctctctatctagctccagcctctcgcctgcgccccactccccgcgtcccgcgtcctagccgaccatggccgggcccctgcgcgccccgctgctcctgctggccatcctggccgtggccctggccgtgagccccgcggccggctccagtcccggcaagccgccgcgcctggtgggaggccccatggacgccagcgtggaggaggagggtgtgcggcgtgcactggactttgccgtcggcgagtacaacaaagccagcaacgacatgtaccacagccgcgcgctgcaggtggtgcgcgcccgcaagcagatcgtagctggggtgaactacttcttggacgtggagctgggccgaaccacgtgtaccaagacccagcccaacttggacaactgccccttccatgaccagccacatctgaaaaggaaagcattctgctctttccagatctacgctgtgccttggcagggcacaatgaccttgtcgaaatccacctgtcaggacgcctaggggtctgtaccgggctggcctgtgcctatcacctcttatgcacacctcccaccccctgtattcccacccctggactggtggcccctgccttggggaaggtctccccatgtgcctgcaccaggagacagacagagaaggcagcaggcggcctttgttgctcagcaaggggctctgccctccctccttccttcttgcttctcatagccccggtgtgcggtgcatacacccccacctcctgcaataaaatagtagcatcggcaaaaaaccacaccaccaccacaccccccaccccacccaccaccacggcgggcccccccacaacaacacccccccgaggcgcccccgcccacgccccccgccccgccccccaaggcgcccacaagcgacgcgccaacaacacaccccggccccgctgtacacaccccgacaacggtgccaccgcctcccgcgacccccgggcacagaaccccccctccgggagccaccacacgggccacccctccccgcctcacaccccagcgcaaccacacaccgcggactaccgcgcccacacccgccaaccgcccccgcacacccgcacgagccccccgcactccacg

SEQ ID NO: 320122 - DNA, 969 bp, Homo sapiens
  misc_feature (923)..(923): n is a, c, g, or t
  misc_feature (930)..(930): n is a, c, g, or t
  misc_feature (932)..(932): n is a, c, g, or t
  misc_feature (940)..(942): n is a, c, g, or t
  misc_feature (947)..(947): n is a, c, g, or t
  misc_feature (958)..(958): n is a, c, g, or t
gcaggccgcggtggggtggggcggcgaaggccggaagggataaaaccgcagtcgccggcctcgcggggctcacggcctcgcctcggtatcgcagcgggtcctctctatctagctccagcctctcgcctgcgccccactccccgcgtcccgcgtcctagccgaccatggccgggcccctgcgcgccccgctgctcctgctggccatcctggccgtggccctggccgtgagccccgcggccggctccagtcccggcaagccgccgcgcctggtgggaggccccatggacgccagcgtggaggaggagggtgtgcggcgtgcactggactttgccgtcggcgagtacaacaaagccagcaacgacatgtaccacagccgcgcgctgcaggtggtgcgcgcccgcaagcagatcgtagctggggtgaactacttcttggacgtggagctgggccgaaccacgtgtaccaagacccagcccaacttggacaactgccccttccatgaccagccacatctgaaaaggaaagcattctgctctttccagatctacgctgtgccttggcagggcacaatgaccttgtcgaaatccacctgtcaggacgcctaggggtctgtaccgggctggcctgtgcctatcacctcttatgcacacctcccaccccctgtattcccacccctggactggtggcccctgccttggggaaggtctccccatgtgcctgcaccaggagacagacagagaaggcagcaggcggcctttgttgctcagcaaggggctctgccctccctccttccttcttgcttctcatagccccggtgtgcggtgcatacacccccacctcctgcaataaaatagtagcatcggcaaaaaaaaaaaaaaaaaaaaaaaaaagggggggcgcgcaaaaaattctccccggggggngcccaantnaggacccnnnttttngaaaagggggncccaaaagggg

SEQ ID NO: 320123 - DNA, 1018 bp, Homo sapiens
  misc_feature (1018)..(1018): n is a, c, g, or t
gcaggccgcggtggggtggggcggcgaaggccggaagggataaaaccgcagtcgccggcctcgcggggctcacggcctcgcctcggtatcgcagcgggtcctctctatctagctccagcctctcgcctgcgccccactccccgcgtcccgcgtcctagccgaccatggccgggcccctgcgcgccccgctgctcctgctggccatcctggccgtggccctggccgtgagccccgcggccggctccagtcccggcaagccgccgcgcctggtgggaggccccatggacgccagcgtggaggaggagggtgtgcggcgtgcactggactttgccgtcggcgagtacaacaaagccagcaacgacatgtaccacagccgcgcgctgcaggtggtgcgcgcccgcaagcagatcgtagctggggtgaactacttcttggacgtggagctgggccgaaccacgtgtaccaagacccagcccaacttggacaactgccccttccatgaccagccacatctgaaaaggaaagcattctgctctttccagatctacgctgtgccttggcagggcacaatgaccttgtcgaaatccacctgtcaggacgcctaggggtctgtaccgggctggcctgtgcctatcacctcttatgcacacctcccaccccctgtattcccacccctggactggtggcccctgccttggggaaggtctccccatgtgcctgcaccaggagacagacagagaaggcagcaggcggcctttgttgctcagcaaggggctctgccctccctccttccttcttgcttctcatagccccggtgtgcggtgcatacacccccactctgattaatagtggcttgggagaaaacaaaaaaagggccggataattccggagggccaacttccgtcccttcttatcaagggcctagcgggataaagcaaaggcggtaaaggcgagggaccgcggattgagacattcgggggaagcacaccaaccgaaagtgattgcccctgggactaan

SEQ ID NO: 320124 - DNA, 846 bp, Homo sapiens
gcaggccgcggtggggtggggcggcgaaggccggaagggataaaaccgcagtcgccggcctcgcggggctcacggcctcgcctcggtatcgcagcgggtcctctctatctagctccagcctctcgcctgcgccccactccccgcgtcccgcgtcctagccgaccatggccgggcccctgcgcgccccgctgctcctgctggccatcctggccgtggccctggccgtgagccccgcggccggctccagtcccggcaagccgccgcgcctggtgggaggccccatggacgccagcgtggaggaggagggtgtgcggcgtgcactggactttgccgtcggcgagtacaacaaagccagcaacgacatgtaccacagccgcgcgctgcaggtggtgcgcgcccgcaagcagatcgtagctggggtgaactacttcttggacgtggagctgggccgaaccacgtgtaccaagacccagcccaacttggacaactgccccttccatgaccagccacatctgaaaaggaaagcattctgctctttccagatctacgctgtgccttggcagggcacaatgaccttgtcgaaatccacctgtcaggacgcctaggggtctgtaccgggctggcctgtgcctatcacctcttatgcacacctcccaccccctgtattcccacccctggactggtggcccctgccttggggaaggtctccccacgtccccgcatcaacgccactaagcactccgctggcccttgttcccagcaaggggtctgcacctccttctccttctggctccacagccccctgtcggggcctccacccccttctcgatcacaaattcctcgcct

SEQ ID NO: 320125 - DNA, 685 bp, Homo sapiens
gcaggccgcggtggggtggggcggcgaaggccggaagggataaaaccgcagtcgccggcctcgcggggctcacggcctcgcctcggtatcgcagcgggtcctctctatctagctccagcctctcgcctgcgccccactccccgcgtcccgcgtcctagccgaccatggccgggcccctgcgcgccccgctgctcctgctggccatcctggccgtggccctggccgtgagccccgcggccggctccagtcccggcaagccgccgcgcctggtgggaggccccatggacgccagcgtggaggaggagggtgtgcggcgtgcactggactttgccgtcggcgagtacaacaaagccagcaacgacatgtaccacagccgcgcgctgcaggtggtgcgcgcccgcaagcagatcgtagctggggtgaactacttcttggacgtggagctgggccgaaccacgtgtaccaagacccagcccaacttggacaactgccccttccatgaccagccacatctgaaaaggaaagcattctgctctttccagatctacgctgtgccttggcagggcacaatgaccttgtcgaaatccacctgtcaggacgcctaggggtctgtaccgggctggcctgtgcctatcacctcttatgcacacacccccacctcctgcaataaaatagtagcatcggc

SEQ ID NO: 320126 - DNA, 807 bp, Homo sapiens
gcaggccgcggtggggtggggcggcgaaggccggaagggataaaaccgcagtcgccggcctcgcggggctcacggcctcgcctcggtatcgcagcgggtcctctctatctagctccagcctctcgcctgcgccccactccccgcgtcccgcgtcctagccgaccatggccgggcccctgcgcgccccgctgctcctgctggccatcctggccgtggccctggccgtgagccccgcggccggctccagtcccggcaagccgccgcgcctggtgggaggccccatggacgccagcgtggaggaggagggtgtgcggcgtgcactggactttgccgtcggcgagtacaacaaagccagcaacgacatgtaccacagccgcgcgctgcaggtggtgcgcgcccgcaagcagatcgtagctggggtgaactacttcttggacgtggagctgggccgaaccacgtgtaccaagacccagcccaacttggacaactgccccttccatgaccagccacatctgaaaaggtcgaaatccacctgtcaggacgcctaggggtctgtaccgggctggcctgtgcctatcacctcttatgcacacctcccaccccctgtattcccacccctggactggtggcccctgccttggggaaggtctccccatgtgcctgcaccaggagacagacagagaaggcagcaggcggcctttgttgctcagcaaggggctctgccctccctccttccttcttgcttctcatagccccggtgtgcggtgcatacacccccacctcctgcaataaaatagtagcatcggc

SEQ ID NO: 320127 - DNA, 441 bp, Homo sapiens
gcaggccgcggtggggtggggcggcgaaggccggaagggataaaaccgcagtcgccggcctcgcggggctcacggcctcgcctcggtatcgcagcgggtcctctctatctagctccagcctctcgcctgcgccccactccccgcgtcccgcgtcctagccgaccatggccgggcccctgcgcgccccgctgctcctgctggccatcctggccgtggccctggccgtgagccccgcggccggctccagtcccggcaagccgccgcgcctggtgggaggccccatggacgccagcgtggaggaggaggtcaaaatgtaattaaccatctccccgagcgtttgctccattttccctcagtgggaggcgatccatggttcgcgcactggcttgtgggccaacacccccaaagcaaactgagggccttgtggtgaaaccgcatccc

SEQ ID NO: 320128 - DNA, 118 bp, Homo sapiens
tcagcaaggggctctgccctccctccttccttcttgcttctcatagccccggtgtgcggtgcatacacccccacctcctgcaataaaatagtagcatcggcctccctctgagttcttg

SEQ ID NO: 320129 - DNA, 864 bp, Homo sapiens; identical to SEQ ID NO: 320114

SEQ ID NO: 320130 - DNA, 687 bp, Homo sapiens; identical to SEQ ID NO: 320117

SEQ ID NO: 320131 - DNA, 952 bp, Homo sapiens
  misc_feature (842)..(842): n is a, c, g, or t
tgtcgactcggtgatggtatcgcagcgggtctctctatctagccagcgggtcctctctatctagctccagcctctcgcctgcgccccactccccgcgtcccgcgtcctagccgaccatggccgggcccctgcgcgccccgctgctcctgctggccatcctggccgtggccctggccgtgagccccgcggccggctccagtcccggcaagccgccgcgcctggtgggaggccccatggacgccagcgtggaggaggagggtgtgcggcgtgcactggactttgccgtcggcgagtacaacaaagccagcaacgacatgtaccacagccgcgcgctgcaggtggtgcgcgcccgcaagcagatcgtagctggggtgaactacttcttggacgtggagctgggccgaaccacgtgtaccaagacccagcccaacttggacaactgccccttccatgaccagccacatctgaaaaggaaagcattctgctctttccagatctacgctgtgccttggcagggcacaatgaccttgtcgaaatccacctgtcaggacgcctaggggtctgtaccgggctggcctgtgcctatcacctcttatgcacacctcccaccccctgtattcccacccctggactggtggcccctgccttggggaaggtctccccatgtgcctgcaccaggagacagacagagaaggcagcaggcggcctttgttgctcagcaaggggctctgccctccctccttccttcttgcttctcatagccccggtgtgcggtgcatacacccccacctcctgcaataaaatagtagcatcggcaaaaaaaaaaaacaaaaaaaaaaggngggcggaaaaaacaccagggggcccataacacaccgttttgaaaagggccaagggaaaaaaaagagagggcggaaaagggagggaaagctggttgggacgccctcggggg

SEQ ID NO: 320132 - DNA, 750 bp, Homo sapiens
tggccccggggataatttttatgtgggatttcgtcgaccacgcgtcgctagcagcgggtcctctctatctagctccagcctctcgcctgcgccccactccccgcgtcccgcgtcctagccgaccatggccgggcccctgcgcgccccgctgctcctgctggccatcctggccgtggccctggccgtgagccccgcggccggctccagtcccggcaagccgccgcgcctggtgggaggccccatggacgccagcgtggaggaggagggtgtgcggcgtgcactggactttgccgtcggcgagtacaacaaagccagcaacgacatgtaccacagccgcgcgctgcaggtggtgcgcgcccgcaagcagatcgtagctggggtgaactacttcttggacgtggagctgggccgaaccacgtgtaccaagacccagcccaacttggacaactgccccttccatgaccagccacatctgaaaaggaaagcattctgctctttccagatctacgctgtgccttggcagggcacaatgaccttgtcgaaatccacctgtcaggacgcctaggggtctgtaccgggctggcctgtgcctatcacctcttatgcacacctcccaccccctgtattcccacccctggactggtggcccctgccttggggaaggtctccccatgtgctgactctgagaagaccgaggacgagggggcttgtgtcgggcgctgcttcctcttcttctggtctatagccgtt

SEQ ID NO: 320133 - DNA, 820 bp, Homo sapiens
  misc_feature (35)..(35): n is a, c, g, or t
  misc_feature (47)..(47): n is a, c, g, or t
cacgcgtcgccacgcgtcgcggacgcgtgggtcgnccacgcgtccgncagcgggtcctctctatctagctccagcctctcgcctgcgccccactccccgcgtcccgcgtcctagccgaccatggccgggcccctgcgcgccccgctgctcctgctggccatcctggccgtggccctggccgtgagccccgcggccggctccagtcccggcaagccgccgcgcctggtgggaggccccatggacgccagcgtggaggaggagggtgtgcggcgtgcactggactttgccgtcggcgagtacaacaaagccagcaacgacatgtaccacagccgcgcgctgcaggtggtgcgcgcccgcaagcagatcgtagctggggtgaactacttcttggacgtggagctgggccgaaccacgtgtaccaagacccagcccaacttggacaactgccccttccatgaccagccacatctgaaaaggaaagcattctgctctttccagatctacgctgtgccttggcagggcacaatgaccttgtcgaaatccacctgtcaggacgcctaggggtctgtaccgggctggcctgtgcctatcacctcttatgcacacctcccaccccctgtattcccacccctggactggtggcccctgccttggggaaggtctccccatgtgcctgcaccaggagacagacagagaaggcagcaggcggcctttgttgctcagcaaggggctctgccctccctccttccttcttgcttctcatagccccggtgtgcggtgcatacacccccacctcctgcaataaaatagtagcatcggc

SEQ ID NO: 320134 - DNA, 786 bp, Homo sapiens
gcaggccgcggtggggtggggcggcgaaggccggaagggataaaaccgcagtcgccggcctcgcggggctcacggcctcgcctcggtatcgcagcgggtcctctctatctagctccagcctctcgcctgcgccccactccccgcgtcccgcccccgcggccggctccagtcccggcaagccgccgcgcctggtgggaggccccatggacgccagcgtggaggaggagggtgtgcggcgtgcactggactttgccgtcggcgagtacaacaaagccagcaacgacatgtaccacagccgcgcgctgcaggtggtgcgcgcccgcaagcagatcgtagctggggtgaactacttcttggacgtggagctgggccgaaccacgtgtaccaagacccagcccaacttggacaactgccccttccatgaccagccacatctgaaaaggaaagcattctgctctttccagatctacgctgtgccttggcagggcacaatgaccttgtcgaaatccacctgtcaggacgcctaggggtctgtaccgggctggcctgtgcctatcacctcttatgcacacctcccaccccctgtattcccacccctggactggtggcccctgccttggggaaggtctccccatgtgcctgcaccaggagacagacagagaaggcagcaggcggcctttgttgctcagcaaggggctctgccctccctccttccttcttgcttctcatagccccggtgtgcggtgcatacacccccacctcctgcaataaaatagtagcatcggc

SEQ ID NO: 320135 - DNA, 786 bp, Homo sapiens; identical to SEQ ID NO: 320134

SEQ ID NO: 320136 - DNA, 1000 bp, Homo sapiens
  misc_feature (890)..(890): n is a, c, g, or t
gcaggccgcggtggggtggggcggcgaaggccggaagggataaaaccgcagtcgccggcctcgcggggctcacggcctcgcctcggtatcgcagcgggtcctctctatctagctccagcctctcgcctgcgccccactccccgcgtcccgcgtcctagccgaccatggccgggcccctgcgcgccccgctgctcctgctggccatcctggccgtggccctggccgtgagccccgcggccggctccagtcccggcaagccgccgcgcctggtgggaggccccatggacgccagcgtggaggaggagggtgtgcggcgtgcactggactttgccgtcggcgagtacaacaaagccagcaacgacatgtaccacagccgcgcgctgcaggtggtgcgcgcccgcaagcagatcgtagctggggtgaactacttcttggacgtggagctgggccgaaccacgtgtaccaagacccagcccaacttggacaactgccccttccatgaccagccacatctgaaaaggaaagcattctgctctttccagatctacgctgtgccttggcagggcacaatgaccttgtcgaaatccacctgtcaggacgcctaggggtctgtaccgggctggcctgtgcctatcacctcttatgcacacctcccaccccctgtattcccacccctggactggtggcccctgccttggggaaggtctccccatgtgcctgcaccaggagacagacagagaaggcagcaggcggcctttgttgctcagcaaggggctctgccctccctccttccttcttgcttctcatagccccggtgtgcggtgcatacacccccacctcctgcaataaaatagtagcatcggcaaaaaaaaaaaacaaaaaaaaaaggngggcggaaaaaacaccagggggcccataacacaccgttttgaaaagggccaagggaaaaaaaagagagggcggaaaagggagggaaagctggttgggacgccctcggggg

SEQ ID NO: 320137 - DNA, 1313 bp, Homo sapiens
gcaggccgcggtggggtggggcggcgaaggccggaagggataaaaccgcagtcgccggcctcgcggggctcacggcctcgcctcggtatcgcagcgggtcctctctatctagctccagcctctcgcctgcgccccactccccgcgtcccgcgtcctagccgaccatggccgggcccctgcgcgccccgctgctcctgctggccatcctggccgtggccctggccgtgagccccgcggccggctccagtcccggcaagccgccgcgcctggtgggaggccccatggacgccagcgtggaggaggagggtgtgcggcgtgcactggactttgccgtcggcgagtacaacaaagccagcaacgacatgtaccacagccgcgcgctgcaggtggtgcgcgcccgcaagcagatcgtagctggggtgaactacttcttggacgtggagctgggccgaaccacgtgtaccaagacccagcccaacttggacaactgccccttccatgaccagccacatctgaaaaggaaagcattctgctctttccagatctacgctgtgccttggcagggcacaatgaccttgtcgaaatccacctgtcaggacgcctaggggtctgtaccgggctggcctgtgcctatcacctcttatgcacacctcccaccccctgtattcccacccctggactggtggcccctgccttggggaaggtctccccatgtgcctgcaccaggagacagacagagaaggcagcaggcggcctttgttgctcagcaaggggctctgccctccctccttccttcttgcttctcatagccccggtgtgcggtgcatacacccccacctcctgcaataaaatagtagcatcggcaaaaaaaacaaaaaacaaaaaaaaaaaaacaaaaaaaaaaaaaaaaaaaaaaaaaaaaaaaaaaaaaaaaaaaaaaaaaaaaaaaaaaaaaaaaaaaaaaaaacctcgggggggggcccggtcccaaattgcccctatagggggtcgttttacaattaacgggccgtggtttaaaaacgtcggaacgggaaaaaccctggggttcccaaactaaatcgcctggcagcaaatccccttttggccagttggcgtattagcaaaaaggccccaaccgttcgcctttccaaacagtggcccagcctaaatggcaaatggcaaattgaaagcgtaaatttttggtaaaaattcgcgttaaattttgtgaaaaccagcttatttttaaaccaatagcgccaaattgggcccaattttggaacaagagccccttttttaagaacgggggcctcaac

SEQ ID NO: 320138 - DNA, 852 bp, Homo sapiens
gcaggccgcggtggggtggggcggcgaaggccggaagggataaaaccgcagtcgccggcctcgcggggctcacggcctcgcctcggtatcgcagcgggtcctctctatctagctccagcctctcgcctgcgccccactccccgcgtcccgcgtcctagccgaccatggccgggcccctgcgcgccccgctgctcctgctggccatcctggccgtggccctggccgtgagccccgcggccggctccagtcccggcaagccgccgcgcctggtgggaggccccatggacgccagcgtggaggaggagggtgtgcggcgtgcactggactttgccgtcggcgagtacaacaaagccagcaacgacatgtaccacagccgcgcgctgcaggtggtgcgcgcccgcaagcagatcgtagctggggtgaactacttcttggacgtggagctgggccgaaccacgtgtaccaagacccagcccaacttggacaactgccccttccatgaccagccacatctgaaaaggaaagcattctgctctttccagatctacgctgtgccttggcagggcacaatgaccttgtcgaaatccacctgtcaggacgcctaggggtctgtaccgggctggcctgtgcctatcacctcttatgcacacctcccaccccctgtattcccacccctggactggtggcccctgccttggggaaggtctccccatgtgcctgcaccaggagacagacagagaaggcagcaggcggcctttgttgctcagcaagggagcttttggccctacattaactttctttttgggtttcaaaaaaaccccccggaggggctggaggcattaaacccctaaa

SEQ ID NO: 320139 - DNA, 676 bp, Homo sapiens
gcaggccgcggtggggtggggcggcgaaggccggaagggataaaaccgcagtcgccggcctcgcggggctcacggcctcgcctcggtatcgcagcgggtcctctctatctagctccagcctctcgcctgcgccccactccccgcgtcccgcgtcctagccgaccatggccgggcccctgcgcgccccgctgctcctgctggccatcctggccgtggccctggccgtgagccccgcggccggctccagtcccggcaagccgccgcgccacgtgtaccaagacccagcccaacttggacaactgccccttccatgaccagccacatctgaaaaggaaagcattctgctctttccagatctacgctgtgccttggcagggcacaatgaccttgtcgaaatccacctgtcaggacgcctaggggtctgtaccgggctggcctgtgcctatcacctcttatgcacacctcccaccccctgtattcccacccctggactggtggcccctgccttggggaaggtctccccatgtgcctgcaccaggagacagacagagaaggcagcaggcggcctttgttgctcagcaaggggctctgccctccctccttccttcttgcttctcatagccccggtgtgcggtgcatacacccccacctcctgcaataaaatagtagcatcggc

SEQ ID NO: 320140 - DNA, 682 bp, Homo sapiens
gcaggccgcggtggggtggggcggcgaaggccggaagggataaaaccgcagtcgccggcctcgcggggctcacggcctcgcctcggtatcgcagcgggtcctctctatctagctccagcctctcgcctgcgccccactccccgcgtcccgcgtcctagccgaccatggccgggcccctgcgcgccccgctgctcctgctggccatcctggccgtggccctggccgtgagccccgcggccggctccagtcccggcaagccgccgcgcctggtgggaggccccatggacgccagcgtggaggaggagggtgtgcggcgtgcactggactttgccgtcggcgagtacaacaaagccagcaacgacatgtaccacagccgcgcgctgcaggtggtgcgcgcccgcaagcagatcgtagctggggtgaactacttcttggacgtggagctgggccgaaccacgtgtaccaagacccagcccaacttggacaactgccccttccatgaccagccacatctgaaaaggaaagcattctgctctttccagatctacgctgtgccttggcagggcacaatgaccttgtcgaaatccacctgtcaggacgcctaggggtctgtaccgggcaccctgatgaaaagactgaggaaaatgctgcctttcctgaatggctaccaggcagggaatga

SEQ ID NO: 320141 - DNA, 842 bp, Homo sapiens
atgacccaaaacttttatctataaaaagaaactgacaaatagtcaatcataacttggtgttggaaactgacctaagccaatttgcttatacacagcatccaagttatgtctagaaactgctggattatctaagttttaggtgggtatcgttcagctgctccccgcagacttacgagctagtgatagtgaaaatacatttcatgataaatgctgctgtacatacagatatgtatttattatctatttactagttatttttattatttattattatctatgatttattagtaatcaggcacaaaacagctctactatcctagtttctaagcctaatgaagttccagctgtctctttaggcactccaccacatctcgcaggaagagtttactcaaggtgcgtcacaacgtggatgtgactactccaggggcaaaattttgtccttactgtgaaccatcctctaacctagtgactggacatgctatttcagagttaagcctcaggcatcaccctagggccttgctagataaagtctttcaccttgcttatgtaggagtagggagtagttagcagtgagggaccttttctaacctgctattctaacaagccactgtagcgctcattatttttaatagccagtcttcatactgatcagtgataaaattaacaaaagagcttgtagtaggcagttctgcaatgtgacatttctgattagaatgctcactgcatctagagggttcctttctgtgcttcagacttatacagtgtttgtggattattctaaagtgagttacactgttgtactgaaacaatcattctattgagtcataaactaccggaaaaaa

SEQ ID NO: 320142 - DNA, 992 bp, Homo sapiens
gttttcttactgcgttcatggatgcatgaaaacaatggtatctgtcaggcctttgtttctttcgttgtaccattaagtgaggtttttaaaaagagggttttcatcatttataatgtgttaatacagtagaattctttttttgaaggacaacattgaaagtcttttcagacaaatatttaatacactaattacatagctaaacttttgtcatattaaagatacctcttttctgcatgtgcattgtactaggaaaaaagtacacactgtcttaaaatttgcccaagtcatctgtgatgtatgtgatcagtggcctgaaactgtttgcagttactttaaaaatgtataaatgtgtgtaaataaaaagattacttaataggatgaatgaatacatgcccacagaagccaattcagcaaaattaaatgtcaaggagtaaacatagattgctttgtgtttagagagttatttgttaattagagttcatagacttgattcatgccttttgggatctttattagagcacgtctgacatgttttacccatgtattttggtaaatacacagcttgctcatgtgttcttatggaaatttcttttagtgatcacttgtaatagctgccacttagtaggcactcagtaagtgcataataagtggatgtgttcccacatacttcagacttgtagtcagtctttttgtattgtcgatcagcatgactttctcaatctcaggtagtctgtatttagcctacatttttttggaaattatgctcataaaggtaattttaccatccatcccagggtagtttcctcacttctaatccttccaacctctccatagcatgggagactttagaactaaattatttgtccatgcatttattcattcaataaattaataaagacattgtatcattttcagggccattttatctgtagtctgctttcgtttttctgctttctcttcctttttgtgtctgatattgtctctcacccttg

SEQ ID NO: 320143 - DNA, 1395 bp, Homo sapiens
ttccagcactgtcacaccaggcagggaacctgagcagaacattcactgccaagattactgtgagcaagtaggaagtaatgcacacaccaagtgctgccacagcaaaagcaggtgctctaggatgggtagtggctgctctgcttaaaagtgggatgcccttactgggtgcgatggctcacacctataatcccagcattctgggaggctgaggcaggcagatcacctgaggtcaggagttcgagaccagcctggacaacatggtgaaaccccatctctactaaaaatgcaaacattagctgggcgtgatggtgggcgcctgtaatcccagctactcgggaggctgaggcaagagaatcgcttgaacccaggagatggaggttgcagtgagccaagatcgcgccactgcactgcaacctgggcgacagaccgagactccgtctcaaaacaacaacaacaacaacaacaacaaaaaaacctgggatgccctagagagagggtgtctgcctggggtcccccataaaaagactgcttttagcctgtctagagtgagagaagaccccagaggaggcagaggataccatcagaatgccctcaggtgctgtttgcaaggaacagcctccccatatatgtcgtatttattttggcaataggagtattgggtaggagaggaaaaaacagtgcaaacctcctttgtgcaacttccagaatctcgtctttggagggctgttcccgtgacacgagtggggcgcctcccccaccactaaaacagaagtgaatgaaattggtgcttgtgcgccccctcctggcaaaatgcggctgtgcgtccaggatgcctggatcttccctgtggcccaggactgcaggaggcgttctgagctgtggccctcttaccaggggtggagcctctggggctgctgaaccagctgtagggatggtgctgctgttcttcctggcatccatcctaggcatcttcatacctcccactttatccctgctgtttcctgattcaagggctgccccattatacaagttctggtctcctcagtggggacaataagaaaaacatttgattcgataacatataaaccactagtgtgagattcatgcagcatcataggaaggggggtgatgtgtttgcagtgagcaggctaatgtattaatctgctaattctgtctcctgagttttctctcttttcctccctcctgccacatgaagtgtgcttggcttcttacctaccataattagacatcttttcttcctcagaaggccgcggatggatggagtatccgcaactcagcgatttagccgatatggccgggtacccaggaccgcggtcaccgggacccaccataatgccccctgcccaagggggtagggaagggacctgggggccg

SEQ ID NO: 320144 - DNA, 4136 bp, Homo sapiens
cgggcggcgcaggggcggggctttacggacgcaagcacgtcgaagcgctgctcctggagccgcggagggtgcgggtttggctgcggtggtttctgtggcggttgctgtggcggagtttggaggttggagagaaatccaggtactcactagactggtaccttctgccaccatgggggagcttttccggagtgaagaaatgacactggcccagctttttctacagtcagaggctgcttattgttgtgtcagtgaattaggagaacttggaaaggttcagtttcgtgacttaaatccagatgtgaatgttttccaacggaaatttgtgaatgaagttagaagatgtgaagaaatggatcgaaagcttcgatttgttgagaaagagataagaaaagctaacattccgattatggacaccggtgaaaacccagaggttcccttcccccgggacatgattgacttagaggccaattttgagaagattgaaaatgaactgaaggaaatcaacacaaaccaggaagctctgaagagaaacttcctggaactgaccgaattaaaatttatacttcgcaaaactcagcaattttttgatgagatggcggatccagacttgttggaagagtcctcatccctcttggagccaagtgagatgggaagaggcactcctttaagacttggcttcgtggctggtgtcattaaccgggagcgcatccctacttttgagcgcatgctttggcgggtatgccggggaaatgtgttcctgcgacaggctgaaatcgagaaccccctggaggatcctgtgactggcgactacgtgcacaagtctgtgtttatcattttcttccaaggcgatcagctgaaaaacagagtcaagaaaatctgtgaagggttccgagcctcactctatccctgtcctgagacaccacaggagaggaaggaaatggcttctggagtgaataccaggattgatgatctccaaatggttctgaatcaaacggaggatcaccgccagagggttctgcaggcagctgctaagaacatccgtgtctggttcatcaaagtgcggaagatgaaggccatctatcacaccctgaacctgtgcaacatagatgtgactcagaaatgcttgattgcagaggtctggtgccctgtcaccgaccttgactccatccagtttgcactcagaaggggcacggaacacagtggttccactgtaccttccattttgaacaggatgcagacaaaccagactcccccaacctataacaaaaccaacaagtttacctatggctttcagaacatagtagatgcttatggaattggaacttaccgagagataaatccagctccgtatactattatcacgttcccttttctatttgctgtgatgtttggagacttcggtcatggcattttaatgaccctttttgctgtgtggatggtactgagggagagccggatcctttcccagaagaatgagaatgagatgtttagcactgtgttcagtggtcgatacattattttattgatgggtgtgttctccatgtacactggcctcatctacaatgattgcttttccaagtctcttaatatctttgggtcatcctggagtgtacggccgatgtttacttataattggactgaagagacgcttcgggggaaccctgttctacagctgaacccagccctccctggagtgtttggtggaccatacccttttggcattgatccaatttggaacattgctaccaataaactgacgttcttgaactcctttaagatgaagatgtctgttatccttggtatcatccatatgctgtttggagtcagcctgagtctgttcaaccatatctatttcaagaagcccctgaatatctactttggatttattcctgaaataatcttcatgacctctttgtttggctatttggttatccttattttttacaagtggacggcctatgatgctcatacctctgagaatgcaccaagccttctgatccatttcataaacatgttcctcttttcctacccagagtctggttattcaatgttgtattctggacagaaaggaattcagtgtttcctggtagtggttgcactactgtgtgtaccttggatgctgctgtttaaaccattggtccttcgccgtcagtatttgaggagaaagcatttgggaactctcaactttggtgggatcagggtgggcaacggaccgacagaggaggatgctgagattattcagcatgaccagctctccacccactcagaggacgcagacgagtttgactttggggacaccatggtccaccaggccatccacaccatcgagtactgcctgggctgcatctccaacactgcctcctacttgcggctctgggccctcagcctcgctcatgcgcagctgtctgaggtgctttggaccatggtgatccacatcggcctgagcgtgaagagcttggcgggaggtttggtgctgttcttcttcttcactgcctttgccaccctgaccgtggccatcctcctgatcatggagggcctctcggcctttctccacgcactgcgcttacactgggttgagttccagaataaattctacagcgggaccggtttcaagttcttacccttctccttcgagcatattcgggaagggaagtttgaagagtgagtccctgtgagggccgtgtgccccatgctaccctccccgcctccctccacagtgatcagctgtgcctctctgcctgttggttgtgatctgtgggcaccagctcattcgtgtcaccctgtctgtgagtcatttagatagaatagtcctccttgggtctcccaccacccctagctttgtgtgtagtgtagtgattttctggctgtcactcatactcactgggcaccagccttgccctcttagcctccatccatccagacagcccttcccacctcctggtggtgagccagtctgcattcccacgccatcccaaagccctttcatcttccccgtgcattgtagatggaaggagcacccatgccattcacatctagactttgagttccctgcatctgccaccgtagtttctagcaggagtagtggggggagtaatacagattcttccctagaaggggacactggtaacatgtcccactcttggattagcaggggtgggtccaggaagatgatatttgcgtcttttgcccacccccctggcattcagctggacccaactaggccatcatgagtggcttctccctgtcatccccaggggtcataggatatctacaccgcctttctgaccccaccctgcactcccatcctttcctctctccccgttcatgccctgcactacatagcacagccgggatgcttggaacagaggccttggctgctccgcagtgcacagggcttccctctctcggggttggcttcttcccaggccttgcatgggccctgcccacaagcacaccctcaggccgagggtgcagactgatgctcttccctgatggagaccctgagatcttccccacccccaatcatgatgtcttcagtgtgggactggggtcctcttggttctgcctgcagcctgcctggctccgcccctagtgccccctcctcaccacactggccccaggtctcaggaggggtgtcctgggcagggaaggtcagtgtcactgatggtttgctgtttggaagccattggcagggctgccgtgcatgtggctgtgagggctgcacagtcctgccaaggggcttcctccttgtcaccccgaaccttgtaatcgtgtgctggcgtggcagccctggctaagttaatccccaccgctttcagtggtagaaagaattccctgagtgggccaggctggtgccctcctcctaccctggcttttctgagtgagctgcctggagccctcatcccctctcccaggctgggctggccctgggcggggccactgtgtgctggcccactgtgacctgacccgaccttgtgcagcccccctgccctggtgtcctgggttttcgtgatgatctttgctctgtttccagtggggtttgaagcagagttcagggaaccctgcccaaggtcctcctgttcagacattcctatgttgaataaagtatgtttgacttccccggaaaaaaaaaaaag

SEQ ID NO: 320145 - DNA, 4157 bp, Homo sapiens
cgggcggcgcaggggcggggctttacggacgcaagcacgtcgaagcgctgctcctggagccgcggagggtgcgggtttggctgcggtggtttctgtggcggttgctgtggcggagtttggaggttggagagaaatccaggtactcactagactggtaccttctgccaccatgggggagcttttccggagtgaagaaatgacactggcccagctttttctacagtcagaggctgcttattgttgtgtcagtgaattaggagaacttggaaaggttcagtttcgtgacttaaatccagatgtgaatgttttccaacggaaatttgtgaatgaagttagaagatgtgaagaaatggatcgaaagcttcgatttgttgagaaagagataagaaaagctaacattccgattatggacaccggtgaaaacccagaggttcccttcccccgggacatgattgacttagaggccaattttgagaagattgaaaatgaactgaaggaaatcaacacaaaccaggaagctctgaagagaaacttcctggaactgaccgaattaaaatttatacttcgcaaaactcagcaattttttgatgaggctgaattgcatcatcagcagatggcggatccagacttgttggaagagtcctcatccctcttggagccaagtgagatgggaagaggcactcctttaagacttggcttcgtggctggtgtcattaaccgggagcgcatccctacttttgagcgcatgctttggcgggtatgccggggaaatgtgttcctgcgacaggctgaaatcgagaaccccctggaggatcctgtgactggcgactacgtgcacaagtctgtgtttatcattttcttccaaggcgatcagctgaaaaacagagtcaagaaaatctgtgaagggttccgagcctcactctatccctgtcctgagacaccacaggagaggaaggaaatggcttctggagtgaataccaggattgatgatctccaaatggttctgaatcaaacggaggatcaccgccagagggttctgcaggcagctgctaagaacatccgtgtctggttcatcaaagtgcggaagatgaaggccatctatcacaccctgaacctgtgcaacatagatgtgactcagaaatgcttgattgcagaggtctggtgccctgtcaccgaccttgactccatccagtttgcactcagaaggggcacggaacacagtggttccactgtaccttccattttgaacaggatgcagacaaaccagactcccccaacctataacaaaaccaacaagtttacctatggctttcagaacatagtagatgcttatggaattggaacttaccgagagataaatccagctccgtatactattatcacgttcccttttctatttgctgtgatgtttggagacttcggtcatggcattttaatgaccctttttgctgtgtggatggtactgagggagagccggatcctttcccagaagaatgagaatgagatgtttagcactgtgttcagtggtcgatacattattttattgatgggtgtgttctccatgtacactggcctcatctacaatgattgcttttccaagtctcttaatatctttgggtcatcctggagtgtacggccgatgtttacttataattggactgaagagacgcttcgggggaaccctgttctacagctgaacccagccctccctggagtgtttggtggaccatacccttttggcattgatccaatttggaacattgctaccaataaactgacgttcttgaactcctttaagatgaagatgtctgttatccttggtatcatccatatgctgtttggagtcagcctgagtctgttcaaccatatctatttcaagaagcccctgaatatctactttggatttattcctgaaataatcttcatgacctctttgtttggctatttggttatccttattttttacaagtggacggcctatgatgctcatacctctgagaatgcaccaagccttctgatccatttcataaacatgttcctcttttcctacccagagtctggttattcaatgttgtattctggacagaaaggaattcagtgtttcctggtagtggttgcactactgtgtgtaccttggatgctgctgtttaaaccattggtccttcgccgtcagtatttgaggagaaagcatttgggaactctcaactttggtgggatcagggtgggcaacggaccgacagaggaggatgctgagattattcagcatgaccagctctccacccactcagaggacgcagacgagtttgactttggggacaccatggtccaccaggccatccacaccatcgagtactgcctgggctgcatctccaacactgcctcctacttgcggctctgggccctcagcctcgctcatgcgcagctgtctgaggtgctttggaccatggtgatccacatcggcctgagcgtgaagagcttggcgggaggtttggtgctgttcttcttcttcactgcctttgccaccctgaccgtggccatcctcctgatcatggagggcctctcggcctttctccacgcactgcgcttacactgggttgagttccagaataaattctacagcgggaccggtttcaagttcttacccttctccttcgagcatattcgggaagggaagtttgaagagtgagtccctgtgagggccgtgtgccccatgctaccctccccgcctccctccacagtgatcagctgtgcctctctgcctgttggttgtgatctgtgggcaccagctcattcgtgtcaccctgtctgtgagtcatttagatagaatagtcctccttgggtctcccaccacccctagctttgtgtgtagtgtagtgattttctggctgtcactcatactcactgggcaccagccttgccctcttagcctccatccatccagacagcccttcccacctcctggtggtgagccagtctgcattcccacgccatcccaaagccctttcatcttccccgtgcattgtagatggaaggagcacccatgccattcacatctagactttgagttccctgcatctgccaccgtagtttctagcaggagtagtggggggagtaatacagattcttccctagaaggggacactggtaacatgtcccactcttggattagcaggggtgggtccaggaagatgatatttgcgtcttttgcccacccccctggcattcagctggacccaactaggccatcatgagtggcttctccctgtcatccccaggggtcataggatatctacaccgcctttctgaccccaccctgcactcccatcctttcctctctccccgttcatgccctgcactacatagcacagccgggatgcttggaacagaggccttggctgctccgcagtgcacagggcttccctctctcggggttggcttcttcccaggccttgcatgggccctgcccacaagcacaccctcaggccgagggtgcagactgatgctcttccctgatggagaccctgagatcttccccacccccaatcatgatgtcttcagtgtgggactggggtcctcttggttctgcctgcagcctgcctggctccgcccctagtgccccctcctcaccacactggccccaggtctcaggaggggtgtcctgggcagggaaggtcagtgtcactgatggtttgctgtttggaagccattggcagggctgccgtgcatgtggctgtgagggctgcacagtcctgccaaggggcttcctccttgtcaccccgaaccttgtaatcgtgtgctggcgtggcagccctggctaagttaatccccaccgctttcagtggtagaaagaattccctgagtgggccaggctggtgccctcctcctaccctggcttttctgagtgagctgcctggagccctcatcccctctcccaggctgggctggccctgggcggggccactgtgtgctggcccactgtgacctgacccgaccttgtgcagcccccctgccctggtgtcctgggttttcgtgatgatctttgctctgtttccagtggggtttgaagcagagttcagggaaccctgcccaaggtcctcctgttcagacattcctatgttgaataaagtatgtttgacttccccggaaaaaaaaaaaag

SEQ ID NO: 320146 - DNA, 3678 bp, Homo sapiens
cgggcggcgcaggggcggggctttacggacgcaagcacgtcgaagcgctgctcctggagccgcggagggtgcgggtttggctgcggtggtttctgtggcggttgctgtggcggagtttggaggttggagagaaatccaggtactcactagactggtaccttctgccaccatgggggagcttttccggagtgaagaaatgacactggcccagctttttctacagtcagaggctgcttattgttgtgtcagtgaattaggagaacttggaaaggttcagtttcgtgacttaaatccagatgtgaatgttttccaacggaaatttgtgaatgaagttagaagatgtgaagaaatggatcgaaagcttcgatttgttgagaaagagataagaaaagctaacattccgattatggacaccggtgaaaacccagaggttcccttcccccgggacatgattgacttagaggccaattttgagaagattgaaaatgaactgaaggaaatcaacacaaaccaggaagctctgaagagaaacttcctggaactgaccgaattaaaatttatacttcgcaaaactcagcaattttttgatgagatggcggatccagacttgttggaagagtcctcatccctcttggagccaagtgagatgggaagaggcactcctttaagacttggcttcgtggctggtgtcattaaccgggagcgcatccctacttttgagcgcatgctttggcgggtatgccggggaaatgtgttcctgcgacaggctgaaatcgagaaccccctggaggatcctgtgactggcgactacgtgcacaagtctgtgtttatcattttcttccaaggcgatcagctgaaaaacagagtcaagaaaatctgtgaagggttccgagcctcactctatccctgtcctgagacaccacaggagaggaaggaaatggcttctggagtgaataccaggattgatgatctccaaatggttctgaatcaaacggaggatcaccgccagagggttctgcaggcagctgctaagaacatccgtgtctggttcatcaaagtgcggaagatgaaggccatctatcacaccctgaacctgtgcaacatagatgtgactcagaaatgcttgattgcagaggtctggtgccctgtcaccgaccttgactccatccagtttgcactcagaaggggcacggaacacagtggttccactgtaccttccattttgaacaggatgcagacaaaccagactcccccaacctataacaaaaccaacaagtttacctatggctttcagaacatagtagatgcttatggaattggaacttaccgagagataaatccagctccgtatactattatcacgttcccttttctatttgctgtgatgtttggagacttcggtcatggcattttaatgaccctttttgctgtgtggatggtactgagggagagccggatcctttcccagaagaatgagaatgagatgtttagcactgtgttcagtggtcgatacattattttattgatgggtgtgttctccatgtacactggcctcatctacaatgattgcttttccaagtctcttaatatctttgggtcatcctggagtgtacggccgatgtttacttataattggactgaagagacgcttcgggggaaccctgttctacagctgaacccagccctccctggagtgtttggtggaccatacccttttggcattgatccaatttggaacattgctaccaataaactgacgttcttgaactcctttaagatgaagatgtctgttatccttggtatcatccatatgctgtttggagtcagcctgagtctgttcaaccatatctatttcaagaagcccctgaatatctactttggatttattcctgaaataatcttcatgacctctttgtttggctatttggttatccttattttttacaagtggacggcctatgatgctcatacctctgagaatgcaccaagccttctgatccatttcataaacatgttcctcttttcctacccagagtctggttattcaatgttgtattctggacagaaaggaattcagtgtttcctggtagtggttgcactactgtgtgtaccttggatgctgctgtttaaaccattggtccttcgccgtcagtatttgaggagaaagcatttgggaactctcaactttggtgggatcagggtgggcaacggaccgacagaggaggatgctgagattattcagcatgaccagctctccacccactcagaggacgcagacgagtttgactttggggacaccatggtccaccaggccatccacaccatcgagtactgcctgggctgcatctccaacactgcctcctacttgcggctctgggccctcagcctcgctcatgcgcagctgtctgaggtgctttggaccatggtgatccacatcggcctgagcgtgaagagcttggcgggaggtttggtgctgttcttcttcttcactgcctttgccaccctgaccgtggccatcctcctgatcatggagggcctctcggcctttctccacgcactgcgcttacactgggttgagttccagaataaattctacagcgggaccggtttcaagttcttacccttctccttcgagcatattcgggaagggaagtttgaagagtgagtccctgtgagggccgtgtgccccatgctaccctccccgcctccctccacagtgatcagctgtgcctctctgcctgttggttgtgatctgtgggcaccagctcattcgtgtcaccctgtctgtgagtcatttagatagaatagtcctccttgggtctcccaccacccctagctttgtgtgtagtgtagtgattttctggctgtcactcatactcactgggcaccagccttgccctcttagcctccatccatccagacagcccttcccacctcctggtggtgagccagtctgcattcccacgccatcccaaagccctttcatcttccccgtgcattgtagatggaaggagcacccatgccattcacatctagactttgagttccctgcatctgccaccgtagtttctagcaggagtagtggggggagtaatacagattcttccctagaaggggacactggtaacatgtcccactcttggattagcaggggtgggtccaggaagatgatatttgcgtcttttgcccacccccctggcattcagctggacccaactaggccatcatgagtggcttctccctgtcatccccaggggtcataggatatctacaccgcctttctgaccccaccctgcactcccatcctttcctctctccccgttcatgccctgcactacatagcacagccgggatgcttggaacagaggccttggctgctccgcagtgcacagggcttccctctctcggggttggcttcttcccaggccttgcatgggccctgcccacaagcacaccctcaggccgagggtgcagactgatgctcttccctgatggagaccctgagatcttccccacccccaatcatgatgccctggtgtcctgggttttcgtgatgatctttgctctgtttccagtggggtttgaagcagagttcagggaaccctgcccaaggtcctcctgttcagacattcctatgttgaataaagtatgtttgacttccccggaaaaaaaaaaaag

SEQ ID NO: 320147 - DNA, 3471 bp, Homo sapiens
gtggatttgttaatttgtcagctcctgggcttgtgatgcctactgagttacattccccacatagaaagtcgttgctctttaataagccaagttaaaggcagtgacctacatttgttgtgccttggattggtggtaagattgaacatatatagaaaagctaaactattttctcaggtttctttttaggttgaagctaaataaaagtgaatgttagtaactagaactctaatttcttgtaatttggaaaaaagaaaccattctagccagaggaagaaaaagacaattccctggcaactcttttcagaaagctatgcctctttgccattcataccctgagatctaaaactggtgttaaaaggatccctcgcttgttccttttctccccaaaggttctgaggaagatgaaggccatctatcacaccctgaacctgtgcaacatagatgtgactcagaaatgcttgattgcagaggtctggtgccctgtcaccgaccttgactccatccagtttgcactcagaaggggcacggaacacagtggttccactgtaccttccattttgaacaggatgcagacaaaccagactcccccaacctataacaaaaccaacaagtttacctatggctttcagaacatagtagatgcttatggaattggaacttaccgagagataaatccagctccgtatactattatcacgttcccttttctatttgctgtgatgtttggagacttcggtcatggcattttaatgaccctttttgctgtgtggatggtactgagggagagccggatcctttcccagaagaatgagaatgagatgtttagcactgtgttcagtggtcgatacattattttattgatgggtgtgttctccatgtacactggcctcatctacaatgattgcttttccaagtctcttaatatctttgggtcatcctggagtgtacggccgatgtttacttataattggactgaagagacgcttcgggggaaccctgttctacagctgaacccagccctccctggagtgtttggtggaccatacccttttggcattgatccaatttggaacattgctaccaataaactgacgttcttgaactcctttaagatgaagatgtctgttatccttggtatcatccatatgctgtttggagtcagcctgagtctgttcaaccatatctatttcaagaagcccctgaatatctactttggatttattcctgaaataatcttcatgacctctttgtttggctatttggttatccttattttttacaagtggacggcctatgatgctcatacctctgagaatgcaccaagccttctgatccatttcataaacatgttcctcttttcctacccagagtctggttattcaatgttgtattctggacagaaaggaattcagtgtttcctggtagtggttgcactactgtgtgtaccttggatgctgctgtttaaaccattggtccttcgccgtcagtatttgaggagaaagcatttgggaactctcaactttggtgggatcagggtgggcaacggaccgacagaggaggatgctgagattattcagcatgaccagctctccacccactcagaggacgcagacgagtttgactttggggacaccatggtccaccaggccatccacaccatcgagtactgcctgggctgcatctccaacactgcctcctacttgcggctctgggccctcagcctcgctcatgcgcagctgtctgaggtgctttggaccatggtgatccacatcggcctgagcgtgaagagcttggcgggaggtttggtgctgttcttcttcttcactgcctttgccaccctgaccgtggccatcctcctgatcatggagggcctctcggcctttctccacgcactgcgcttacactgggttgagttccagaataaattctacagcgggaccggtttcaagttcttacccttctccttcgagcatattcgggaagggaagtttgaagagtgagtccctgtgagggccgtgtgccccatgctaccctccccgcctccctccacagtgatcagctgtgcctctctgcctgttggttgtgatctgtgggcaccagctcattcgtgtcaccctgtctgtgagtcatttagatagaatagtcctccttgggtctcccaccacccctagctttgtgtgtagtgtagtgattttctggctgtcactcatactcactgggcaccagccttgccctcttagcctccatccatccagacagcccttcccacctcctggtggtgagccagtctgcattcccacgccatcccaaagccctttcatcttccccgtgcattgtagatggaaggagcacccatgccattcacatctagactttgagttccctgcatctgccaccgtagtttctagcaggagtagtggggggagtaatacagattcttccctagaaggggacactggtaacatgtcccactcttggattagcaggggtgggtccaggaagatgatatttgcgtcttttgcccacccccctggcattcagctggacccaactaggccatcatgagtggcttctccctgtcatccccaggggtcataggatatctacaccgcctttctgaccccaccctgcactcccatcctttcctctctccccgttcatgccctgcactacatagcacagccgggatgcttggaacagaggccttggctgctccgcagtgcacagggcttccctctctcggggttggcttcttcccaggccttgcatgggccctgcccacaagcacaccctcaggccgagggtgcagactgatgctcttccctgatggagaccctgagatcttccccacccccaatcatgatgtcttcagtgtgggactggggtcctcttggttctgcctgcagcctgcctggctccgcccctagtgccccctcctcaccacactggccccaggtctcaggaggggtgtcctgggcagggaaggtcagtgtcactgatggtttgctgtttggaagccattggcagggctgccgtgcatgtggctgtgagggctgcacagtcctgccaaggggcttcctccttgtcaccccgaaccttgtaatcgtgtgctggcgtggcagccctggctaagttaatccccaccgctttcagtggtagaaagaattccctgagtgggccaggctggtgccctcctcctaccctggcttttctgagtgagctgcctggagccctcatcccctctcccaggctgggctggccctgggcggggccactgtgtgctggcccactgtgacctgacccgaccttgtgcagcccccctgccctggtgtcctgggttttcgtgatgatctttgctctgtttccagtggggtttgaagcagagttcagggaaccctgcccaaggtcctcctgttcagacattcctatgttgaataaagtatgtttgacttccccggaaaaaaaaaaaag

SEQ ID NO: 320148 - DNA, 1778 bp, Homo sapiens
acccccccgactagcccgacagccaaactgcctccctcacagccaaaccaccacgctgactgtacctctccctcacggccaaactgccacgaggaccgttcctctccctcacagccaaactaccttcttcactgcctttgccaccctgaccgtggccatcctcctgatcatggagggcctctcggcctttctccacgcactgcgcttacactgggttgagttccagaataaattctacagcgggaccggtttcaagttcttacccttctccttcgagcatattcgggaagggaagtttgaagagtgagtccctgtgagggccgtgtgccccatgctaccctccccgcctccctccacagtgatcagctgtgcctctctgcctgttggttgtgatctgtgggcaccagctcattcgtgtcaccctgtctgtgagtcatttagatagaatagtcctccttgggtctcccaccacccctagctttgtgtgtagtgtagtgattttctggctgtcactcatactcactgggcaccagccttgccctcttagcctccatccatccagacagcccttcccacctcctggtggtgagccagtctgcattcccacgccatcccaaagccctttcatcttccccgtgcattgtagatggaaggagcacccatgccattcacatctagactttgagttccctgcatctgccaccgtagtttctagcaggagtagtggggggagtaatacagattcttccctagaaggggacactggtaacatgtcccactcttggattagcaggggtgggtccaggaagatgatatttgcgtcttttgcccacccccctggcattcagctggacccaactaggccatcatgagtggcttctccctgtcatccccaggggtcataggatatctacaccgcctttctgaccccaccctgcactcccatcctttcctctctccccgttcatgccctgcactacatagcacagccgggatgcttggaacagaggccttggctgctccgcagtgcacagggcttccctctctcggggttggcttcttcccaggccttgcatgggccctgcccacaagcacaccctcaggccgagggtgcagactgatgctcttccctgatggagaccctgagatcttccccacccccaatcatgatgtcttcagtgtgggactggggtcctcttggttctgcctgcagcctgcctggctccgcccctagtgccccctcctcaccacactggccccaggtctcaggaggggtgtcctgggcagggaaggtcagtgtcactgatggtttgctgtttggaagccattggcagggctgccgtgcatgtggctgtgagggctgcacagtcctgccaaggggcttcctccttgtcaccccgaaccttgtaatcgtgtgctggcgtggcagccctggctaagttaatccccaccgctttcagtggtagaaagaattccctgagtgggccaggctggtgccctcctcctaccctggcttttctgagtgagctgcctggagccctcatcccctctcccaggctgggctggccctgggcggggccactgtgtgctggcccactgtgacctgacccgaccttgtgcagcccccctgccctggtgtcctgggttttcgtgatgatctttgctctgtttccagtggggtttgaagcagagttcagggaaccctgcccaaggtcctcctgttcagacattcctatgttgaataaagtatgtttgacttccccggaaaaaaaaaaaag

SEQ ID NO: 320149 - DNA, 3485 bp, Homo sapiens
ttccagcactgtcacaccaggcagggaacctgagcagaacattcactgccaagattactgtgagcaagtaggaagtaatgcacacaccaagtgctgccacagcaaaagcaggtgctctaggatgggtagtggctgctctgcttaaaagtgggatgcccttactgggtgcgatggctcacacctataatcccagcattctgggaggctgaggcaggcagatcacctgaggtcaggagttcgagaccagcctggacaacatggtgaaaccccatctctactaaaaatgcaaacattagctgggcgtgatggtgggcgcctgtaatcccagctactcgggaggctgaggcaagagaatcgcttgaacccaggagatggaggttgcagtgagccaagatcgcgccactgcactgcaacctgggcgacagaccgagactccgtctcaaaacaacaacaacaacaacaacaacaaaaaaacctgggatgccctagagagagggtgtctgcctggggtcccccataaaaagactgcttttagcctgtctagagtgagagaagaccccagaggaggcagaggataccatcagaatgccctcaggtgctgtttgcaaggaacagcctccccatatatgtcgtatttattttggcaataggagtattgggtaggagaggaaaaaacagtgcaaacctcctttgtgcaacttccagaatctcgtctttggagggctgttcccgtgacacgagtggggcgcctcccccaccactaaaacagaagtgaatgaaattggtgcttgtgcgccccctcctggcaaaatgcggctgtgcgtccaggatgcctggatcttccctgtggcccaggactgcaggaggcgttctgagctgtggccctcttaccaggggtggagcctctggggctgctgaaccagctgtagggatggtgctgctgttcttcctggcatccatcctaggcatcttcatacctcccactttatccctgctgtttcctgattcaagggctgccccattatacaagttctggtctcctcagtggggacaataagaaaaacatttgattcgataacatataaaccactagtgtgagattcatgcagcatcataggaaggggggtgatgtgtttgcagtgagcaggctaatgtattaatctgctaattctgtctcctgagttttctctcttttcctccctcctgccacatgaagtgtgcttggcttcttacctaccataattagacatcttttcttcctcagagaaggcatgagacagggatttgattgtagttatcactgtaaacatcaaactgatttttatgcagaactattgccccagggcataccttccaaggaacctggtctctccttacctagcgaattccacatacacatagatgtacacctacctgtacactcacagattgggtggtgattaaagggacagaatcggggaccagcttcttgttaggaatgcagtgttgccacggcatgacagcatggagcagttgagggaatggctgcccaggagaactcagaactcttgaaatgtagttccaggctgccatcattgccctgatattcaggccgtcagacagatgtgtgttgtaggccctgaacggcacagagagtggcagaacaggctacataaacagctcagcccagaattgtctttccagactgcctgccctcagtcacaacccccaccagggaagggaagcggccccaagactccttcctccttcacccactcgaggaaacagagttcctgttacgtggcatgaatgatgtcttttggccccagttaatccctctgagtcaccaggtggcctttgccaagtgctggagctggaagagatgatagagacactcatctggcgtcctgaggctctcctcacagctgttgaattctagagggttgagttccagaataaattctacagcgggaccggtttcaagttcttacccttctccttcgagcatattcgggaagggaagtttgaagagtgagtccctgtgagggccgtgtgccccatgctaccctccccgcctccctccacagtgatcagctgtgcctctctgcctgttggttgtgatctgtgggcaccagctcattcgtgtcaccctgtctgtgagtcatttagatagaatagtcctccttgggtctcccaccacccctagctttgtgtgtagtgtagtgattttctggctgtcactcatactcactgggcaccagccttgccctcttagcctccatccatccagacagcccttcccacctcctggtggtgagccagtctgcattcccacgccatcccaaagccctttcatcttccccgtgcattgtagatggaaggagcacccatgccattcacatctagactttgagttccctgcatctgccaccgtagtttctagcaggagtagtggggggagtaatacagattcttccctagaaggggacactggtaacatgtcccactcttggattagcaggggtgggtccaggaagatgatatttgcgtcttttgcccacccccctggcattcagctggacccaactaggccatcatgagtggcttctccctgtcatccccaggggtcataggatatctacaccgcctttctgaccccaccctgcactcccatcctttcctctctccccgttcatgccctgcactacatagcacagccgggatgcttggaacagaggccttggctgctccgcagtgcacagggcttccctctctcggggttggcttcttcccaggccttgcatgggccctgcccacaagcacaccctcaggccgagggtgcagactgatgctcttccctgatggagaccctgagatcttccccacccccaatcatgatgtcttcagtgtgggactggggtcctcttggttctgcctgcagcctgcctggctccgcccctagtgccccctcctcaccacactggccccaggtctcaggaggggtgtcctgggcagggaaggtcagtgtcactgatggtttgctgtttggaagccattggcagggctgccgtgcatgtggctgtgagggctgcacagtcctgccaaggggcttcctccttgtcaccccgaaccttgtaatcgtgtgctggcgtggcagccctggctaagttaatccccaccgctttcagtggtagaaagaattccctgagtgggccaggctggtgccctcctcctaccctggcttttctgagtgagctgcctggagccctcatcccctctcccaggctgggctggccctgggcggggccactgtgtgctggcccactgtgacctgacccgaccttgtgcagcccccctgccctggtgtcctgggttttcgtgatgatctttgctctgtttccagtggggtttgaagcagagttcagggaaccctgcccaaggtcctcctgttcagacattcctatgttgaataaagtatgtttgacttccccggaaaaaaaaaaaag

SEQ ID NO: 320150 - DNA, 1979 bp, Homo sapiens
agcaaacagaggtgcttgcccagtgtctctggaggggcttcccttagaggtgggctgtgtgatcccctgccaggagggggcgatgggggccacttgttcattaacgatgttaggctcaaggtaactgaactttttttgcacatgcctctctgcagagagttgtgcataaacacactgctcggcaggacagagcaagattgggaactgagggcaaatcccttcctccgtgcgtcgaactcttgatcccaggccttaaaagtgggatctctgcactctgggctttctctagcttccccagggaagggaggctcggggtgaggtgggcacggggcatctttcctgcccaactgtgaagtcctaaaaagcttcacaaagtttctattgaatgacagctttcttcttctctttctccagggttgagttccagaataaattctacagcgggaccggtttcaagttcttacccttctccttcgagcatattcgggaagggaagtttgaagagtgagtccctgtgagggccgtgtgccccatgctaccctccccgcctccctccacagtgatcagctgtgcctctctgcctgttggttgtgatctgtgggcaccagctcattcgtgtcaccctgtctgtgagtcatttagatagaatagtcctccttgggtctcccaccacccctagctttgtgtgtagtgtagtgattttctggctgtcactcatactcactgggcaccagccttgccctcttagcctccatccatccagacagcccttcccacctcctggtggtgagccagtctgcattcccacgccatcccaaagccctttcatcttccccgtgcattgtagatggaaggagcacccatgccattcacatctagactttgagttccctgcatctgccaccgtagtttctagcaggagtagtggggggagtaatacagattcttccctagaaggggacactggtaacatgtcccactcttggattagcaggggtgggtccaggaagatgatatttgcgtcttttgcccacccccctggcattcagctggacccaactaggccatcatgagtggcttctccctgtcatccccaggggtcataggatatctacaccgcctttctgaccccaccctgcactcccatcctttcctctctccccgttcatgccctgcactacatagcacagccgggatgcttggaacagaggccttggctgctccgcagtgcacagggcttccctctctcggggttggcttcttcccaggccttgcatgggccctgcccacaagcacaccctcaggccgagggtgcagactgatgctcttccctgatggagaccctgagatcttccccacccccaatcatgatgtcttcagtgtgggactggggtcctcttggttctgcctgcagcctgcctggctccgcccctagtgccccctcctcaccacactggccccaggtctcaggaggggtgtcctgggcagggaaggtcagtgtcactgatggtttgctgtttggaagccattggcagggctgccgtgcatgtggctgtgagggctgcacagtcctgccaaggggcttcctccttgtcaccccgaaccttgtaatcgtgtgctggcgtggcagccctggctaagttaatccccaccgctttcagtggtagaaagaattccctgagtgggccaggctggtgccctcctcctaccctggcttttctgagtgagctgcctggagccctcatcccctctcccaggctgggctggccctgggcggggccactgtgtgctggcccactgtgacctgacccgaccttgtgcagcccccctgccctggtgtcctgggttttcgtgatgatctttgctctgtttccagtggggtttgaagcagagttcagggaaccctgcccaaggtcctcctgttcagacattcctatgttgaataaagtatgtttgacttccccggaaaaaaaaaaaag

SEQ ID NO: 320151 - DNA, 1304 bp, Homo sapiens
ggtgacttagaggatcccccccgactagcccgacagctcgcgaacgtgttatccccccgccttgccctcttagcctccatccatccagacagcccttcccacctcctggtggtgagccagtctgcattcccacgccatcccaaagccctttcatcttccccgtgcattgtagatggaaggagcacccatgccattcacatctagactttgagttccctgcatctgccaccgtagtttctagcaggagtagtggggggagtaatacagattcttccctagaaggggacactggtaacatgtcccactcttggattagcaggggtgggtccaggaagatgatatttgcgtcttttgcccacccccctggcattcagctggacccaactaggccatcatgagtggcttctccctgtcatccccaggggtcataggatatctacaccgcctttctgaccccaccctgcactcccatcctttcctctctccccgttcatgccctgcactacatagcacagccgggatgcttggaacagaggccttggctgctccgcagtgcacagggcttccctctctcggggttggcttcttcccaggccttgcatgggccctgcccacaagcacaccctcaggccgagggtgcagactgatgctcttccctgatggagaccctgagatcttccccacccccaatcatgatgtcttcagtgtgggactggggtcctcttggttctgcctgcagcctgcctggctccgcccctagtgccccctcctcaccacactggccccaggtctcaggaggggtgtcctgggcagggaaggtcagtgtcactgatggtttgctgtttggaagccattggcagggctgccgtgcatgtggctgtgagggctgcacagtcctgccaaggggcttcctccttgtcaccccgaaccttgtaatcgtgtgctggcgtggcagccctggctaagttaatccccaccgctttcagtggtagaaagaattccctgagtgggccaggctggtgccctcctcctaccctggcttttctgagtgagctgcctggagccctcatcccctctcccaggctgggctggccctgggcggggccactgtgtgctggcccactgtgacctgacccgaccttgtgcagcccccctgccctggtgtcctgggttttcgtgatgatctttgctctgtttccagtggggtttgaagcagagttcagggaaccctgcccaaggtcctcctgttcagacattcctatgttgaataaagtatgtttgacttccccggaaaaaaaaaaaag

SEQ ID NO: 320152 - DNA, 3169 bp, Homo sapiens
cgggcggcgcaggggcggggctttacggacgcaagcacgtcgaagcgctgctcctggagccgcggagggtgcgggtttggctgcggtggtttctgtggcggttgctgtggcggagtttggaggttggagagaaatccaggtactcactagactggtaccttctgccaccatgggggagcttttccggagtgaagaaatgacactggcccagctttttctacagtcagaggctgcttattgttgtgtcagtgaattaggagaacttggaaaggttcagtttcgtgacttaaatccagatgtgaatgttttccaacggaaatttgtgaatgaagttagaagatgtgaagaaatggatcgaaagcttcgatttgttgagaaagagataagaaaagctaacattccgattatggacaccggtgaaaacccagaggttcccttcccccgggacatgattgacttagaggccaattttgagaagattgaaaatgaactgaaggaaatcaacacaaaccaggaagctctgaagagaaacttcctggaactgaccgaattaaaatttatacttcgcaaaactcagcaattttttgatgagatggcggatccagacttgttggaagagtcctcatccctcttggagccaagtgagatgggaagaggcactcctttaagacttggcttcgtggctggtgtcattaaccgggagcgcatccctacttttgagcgcatgctttggcgggtatgccggggaaatgtgttcctgcgacaggctgaaatcgagaaccccctggaggatcctgtgactggcgactacgtgcacaagtctgtgtttatcattttcttccaaggcgatcagctgaaaaacagagtcaagaaaatctgtgaagggttccgagcctcactctatccctgtcctgagacaccacaggagaggaaggaaatggcttctggagtgaataccaggattgatgatctccaaatggttctgaatcaaacggaggatcaccgccagagggttctgcaggcagctgctaagaacatccgtgtctggttcatcaaagtgcggaagatgaaggccatctatcacaccctgaacctgtgcaacatagatgtgactcagaaatgcttgattgcagaggtctggtgccctgtcaccgaccttgactccatccagtttgcactcagaaggggcacggaacacagtggttccactgtaccttccattttgaacaggatgcagacaaaccagactcccccaacctataacaaaaccaacaagtttacctatggctttcagaacatagtagatgcttatggaattggaacttaccgagagataaatccagctccgtatactattatcacgttcccttttctatttgctgtgatgtttggagacttcggtcatggcattttaatgaccctttttgctgtgtggatggtactgagggagagccggatcctttcccagaagaatgagaatgagatgtttagcactgtgttcagtggtcgatacattattttattgatgggtgtgttctccatgtacactggcctcatctacaatgattgcttttccaagtctcttaatatctttgggtcatcctggagtgtacggccgatgtttacttataattggactgaagagacgcttcgggggaaccctgttctacagctgaacccagccctccctggagtgtttggtggaccatacccttttggcattgatccaatttggaacattgctaccaataaactgacgttcttgaactcctttaagatgaagatgtctgttatccttggtatcatccatatgctgtttggagtcagcctgagtctgttcaaccatatctatttcaagaagcccctgaatatctactttggatttattcctgaaataatcttcatgacctctttgtttggctatttggttatccttattttttacaagtggacggcctatgatgctcatacctctgagaatgcaccaagccttctgatccatttcataaacatgttcctcttttcctacccagagtctggttattcaatgttgtattctggacagaaaggaattcagtgtttcctggtagtggttgcactactgtgtgtaccttggatgctgctgtttaaaccattggtccttcgccgtcagtatttgaggagaaagcatttgggaactctcaactttggtgggatcagggtgggcaacggaccgacagaggaggatgctgagattattcagcatgaccagctctccacccactcagaggacgcagacgagtttgactttggggacaccatggtccaccaggccatccacaccatcgagtactgcctgggctgcatctccaacactgcctcctacttgcggctctgggccctcagcctcgctcatgcgcagctgtctgaggtgctttggaccatggtgatccacatcggcctgagcgtgaagagcttggcgggaggtttggtgctgttcttcttcttcactgcctttgccaccctgaccgtggccatcctcctgatcatggagggcctctcggcctttctccacgcactgcgcttacactggtgaggggcagtggggcagggcgggcatgggggtggatgtgtccttagctgcggtgagagggcagcttttctcccacacacagccctgcagctctgtgcaggaaagatgagctggccctgcactagcttcacctcaggacaccccagcaccggcattgccacagagtttcggaaaatggtcacagaaaagcacagctcagccttccctaggctctagggagatgtccctggtgagtggtgtcaggtcccgctccctgcctttagctgtccccagtgctcctgattttggcttaaaggggctgctggggtcttagggtttctggttttctctctgatgtgtaactcttctgtcttcagaacagtggaagcagctctggaatgtatgttaagtgcaggaaaggctagaacacgctgcaccccagctttatcctctttgttctgtcattgtgccaggggtctttgagttggacccctggcagctccattgtggaccggagggattcctggctctatagggtggaggtcggtacactcacgcagcttcttcacatgggcaggtttggggtggttctgtttgttttctttaatgaagcttgtg

SEQ ID NO: 320153 - DNA, 2205 bp, Homo sapiens
cgggcggcgcaggggcggggctttacggacgcaagcacgtcgaagcgctgctcctggagccgcggagggtgcgggtttggctgcggtggtttctgtggcggttgctgtggcggagtttggaggttggagagaaatccaggtactcactagactggtaccttctgccaccatgggggagcttttccggagtgaagaaatgacactggcccagctttttctacagtcagaggctgcttattgttgtgtcagtgaattaggagaacttggaaaggttcagtttcgtgacttaaatccagatgtgaatgttttccaacggaaatttgtgaatgaagttagaagatgtgaagaaatggatcgaaagcttcgatttgttgagaaagagataagaaaagctaacattccgattatggacaccggtgaaaacccagaggttcccttcccccgggacatgattgacttagaggccaattttgagaagattgaaaatgaactgaaggaaatcaacacaaaccaggaagctctgaagagaaacttcctggaactgaccgaattaaaatttatacttcgcaaaactcagcaattttttgatgagatggcggatccagacttgttggaagagtcctcatccctcttggagccaagtgagatgggaagaggcactcctttaagacttggcttcgtggctggtgtcattaaccgggagcgcatccctacttttgagcgcatgctttggcgggtatgccggggaaatgtgttcctgcgacaggctgaaatcgagaaccccctggaggatcctgtgactggcgactacgtgcacaagtctgtgtttatcattttcttccaaggcgatcagctgaaaaacagagtcaagaaaatctgtgaagggttccgagcctcactctatccctgtcctgagacaccacaggagaggaaggaaatggcttctggagtgaataccaggattgatgatctccaaatggttctgaatcaaacggaggatcaccgccagagggttctgcaggcagctgctaagaacatccgtgtctggttcatcaaagtgcggaagatgaaggccatctatcacaccctgaacctgtgcaacatagatgtgactcagaaatgcttgattgcagaggtctggtgccctgtcaccgaccttgactccatccagtttgcactcagaaggggcacggaacacagtggttccactgtaccttccattttgaacaggatgcagacaaaccagactcccccaacctataacaaaaccaacaagtttacctatggctttcagaacatagtagatgcttatggaattggaacttaccgagagataaatccagctccgtatactattatcacgttcccttttctatttgctgtgatgtttggagacttcggtcatggcattttaatgaccctttttgctgtgtggatggtactgagggagagccggatcctttcccagaagaatgagaatgagatgtttagcactgtgttcagtggtcgatacattattttattgatgggtgtgttctccatgtacactggcctcatctacaatgattgcttttccaagtctcttaatatctttgggtcatcctggagtgtacggccgatgtttacttataattggactgaagagacgcttcgggggaaccctgttctacagctgaacccagccctccctggagtgtttggtggaccatacccttttggcattgatccaatttggaacattgctaccaataaactgacgttcttgaactcctttaagatgaagatgtctgttatccttggtatcatccatatgctgtttggagtcagcctgagtctgttcaaccatatctatttcaagaagcccctgaatatctactttggatttattcctgaaataatcttcatgacctctttgtttggctatttggttatccttattttttacaagtggacggcctatgatgctcatacctctgagaatgcaccaagccttctgatccatttcataaacatgttcctcttttcctacccagagtctggttattcaatgttgtattctggacagaaaggaattcagtgtttcctggtagtggttgcactactgtgtgtaccttggatgctgctgtttaaaccattggtccttcgccgtcagtatttgaggagaaagcatttggtaggtgtatttctattgctaaaagttactag

SEQ ID NO: 320154 - DNA, 1606 bp, Homo sapiens
  misc_feature (1577)..(1577): n is a, c, g, or t
cgggcggcgcaggggcggggctttacggacgcaagcacgtcgaagcgctgctcctggagccgcggagggtgcgggtttggctgcggtggtttctgtggcggttgctgtggcggagtttggaggttggagagaaatccaggtactcactagactggtaccttctgccaccatgggggagcttttccggagtgaagaaatgacactggcccagctttttctacagtcagaggctgcttattgttgtgtcagtgaattaggagaacttggaaaggttcagtttcgtgacttaaatccagatgtgaatgttttccaacggaaatttgtgaatgaagttagaagatgtgaagaaatggatcgaaagcttcgatttgttgagaaagagataagaaaagctaacattccgattatggacaccggtgaaaacccagaggttcccttcccccgggacatgattgacttagaggccaattttgagaagattgaaaatgaactgaaggaaatcaacacaaaccaggaagctctgaagagaaacttcctggaactgaccgaattaaaatttatacttcgcaaaactcagcaattttttgatgagatggcggatccagacttgttggaagagtcctcatccctcttggagccaagtgagatgggaagaggcactcctttaagacttggcttcgtggctggtgtcattaaccgggagcgcatccctacttttgagcgcatgctttggcgggtatgccggggaaatgtgttcctgcgacaggctgaaatcgagaaccccctggaggatcctgtgactggcgactacgtgcacaagtctgtgtttatcattttcttccaaggcgatcagctgaaaaacagagtcaagaaaatctgtgaagggttccgagcctcactctatccctgtcctgagacaccacaggagaggaaggaaatggcttctggagtgaataccaggattgatgatctccaaatggttctgaatcaaacggaggatcaccgccagagggttctgcaggcagctgctaagaacatccgtgtctggttcatcaaagtgcggaagatgaaggccatctatcacaccctgaacctgtgcaacatagatgtgactcagaaatgcttgattgcagaggtctggtgccctgtcaccgaccttgactccatccagtttgcactcagaaggggcacggaacacagtggttccactgtaccttccattttgaacaggatgcagacaaaccagactcccccaacctataacaaaaccaacaagtttacctatggctttcagaacatagtagatgcttatggaattggaacttaccgagagataaatccagctccgtatactattatcacgttcccttttctatttgctgtgatgtttggagacttcggtcatggcattttaatgaccctttttgctgtgtggatggtactgagggagagccggatcctttcccagaagaatgagaatgaggtaatgtttaagttacatctgcattgaactgaaattttataatttcccaagcattcattatgaaaattatgatctggaagtcttttatccatgnaatttatcaaaaggaagtagagaagttat

SEQ ID NO: 320155 - DNA, 2140 bp, Homo sapiens
ttccagcactgtcacaccaggcagggaacctgagcagaacattcactgccaagattactgtgagcaagtaggaagtaatgcacacaccaagtgctgccacagcaaaagcaggtgctctaggatgggtagtggctgctctgcttaaaagtgggatgcccttactgggtgcgatggctcacacctataatcccagcattctgggaggctgaggcaggcagatcacctgaggtcaggagttcgagaccagcctggacaacatggtgaaaccccatctctactaaaaatgcaaacattagctgggcgtgatggtgggcgcctgtaatcccagctactcgggaggctgaggcaagagaatcgcttgaacccaggagatggaggttgcagtgagccaagatcgcgccactgcactgcaacctgggcgacagaccgagactccgtctcaaaacaacaacaacaacaacaacaacaaaaaaacctgggatgccctagagagagggtgtctgcctggggtcccccataaaaagactgcttttagcctgtctagagtgagagaagaccccagaggaggcagaggataccatcagaatgccctcaggtgctgtttgcaaggaacagcctccccatatatgtcgtatttattttggcaataggagtattgggtaggagaggaaaaaacagtgcaaacctcctttgtgcaacttccagaatctcgtctttggagggctgttcccgtgacacgagtggggcgcctcccccaccactaaaacagaagtgaatgaaattggtgcttgtgcgccccctcctggcaaaatgcggctgtgcgtccaggatgcctggatcttccctgtggcccaggactgcaggaggcgttctgagctgtggccctcttaccaggggtggagcctctggggctgctgaaccagctgtagggatggtgctgctgttcttcctggcatccatcctaggcatcttcatacctcccactttatccctgctgtttcctgattcaagggctgccccattatacaagttctggtctcctcagtggggacaataagaaaaacatttgattcgataacatataaaccactagtgtgagattcatgcagcatcataggaaggggggtgatgtgtttgcagtgagcaggctaatgtattaatctgctaattctgtctcctgagttttctctcttttcctccctcctgccacatgaagtgtgcttggcttcttacctaccataattagacatcttttcttcctcagagaaggcatgagacagggatttgattgtagttatcactgtaaacatcaaactgatttttatgcagaactattgccccagggcataccttccaaggaacctggtctctccttacctagcgaattccacatacacatagatgtacacctacctgtacactcacagattgggtggtgattaaagggacagaatcggggaccagcttcttgttaggaatgcagtgttgccacggcatgacagcatggagcagttgagggaatggctgcccaggagaactcagaactcttgaaatgtagttccaggctgccatcattgccctgatattcaggccgtcagacagatgtgtgttgtaggccctgaacggcacagagagtggcagaacaggctacataaacagctcagcccagaattgtctttccagactgcctgccctcagtcacaacccccaccagggaagggaagcggccccaagactccttcctccttcacccactcgaggaaacagagttcctgttacgtggcatgaatgatgtcttttggccccagttaatccctctgagtcaccaggtggcctttgccaagtgctggagctggaagagatgatagagacactcatctggcgtcctgaggctctcctcacagctgttgaattctagagggttgagttccagaataaattctacagcgggaccggtttcaagttcttacccttctccttcgagcatattcgggaactcaacccagtgtaagcgcagtgcgtggagaaggccgagagccctccatgatcaggaggatgccacggtcagggtgcaaaggcagtgaagaagaagacgccaacctcccacatgctcatcaccggatgggatcctctaaatcgg

SEQ ID NO: 320156 - DNA, 627 bp, Homo sapiens
  misc_feature (393)..(393): n is a, c, g, or t
aggatttccctgtgcatggtggtgaaatcatgtagggaaaaaaaaattcaccgtgtaatctctttagaagtcacaaaagaaaaagaaggttatcttgctcccaaaaggctgtaaaaagaataagtaaagtggccatagaggcctagtcttctcaggacagtgtccgggttgagagtctgtctcctgaagcgcactctggggaaaatcccttcctgccctcctgcaggtccttagggtcccagacccagacagtcactttctcaacagagtgccgtcaactcagcacacactcctctcttgagcacagagccccagagggagaagaacaaatgtgttgaaaagaatcttattaagatgtagttaattaaaatgtaatgtattgaggggaatggnaggtgtcccaggtgagggctaagtcaggcaggatttttggggaaggcattgccgaaatcaccacctgagctcaacactgggtgcttctggcccctccagagttgaggtgccatccatgggaagtgcagtcccctgccctggcccaggttcaaagcgccaagtagccacaactcagaatgcctgcacgttcccctcctagccttatatcttctctctggtttcctcccacgacag

SEQ ID NO: 320157 - DNA, 444 bp, Homo sapiens
aaaaccaacaagtttacctatggctttcagaacatagtagatgcttatggaattggaacttaccgagagataaatccaggtaaaaaaaagcttgttatctttttcctctagagttttttttgtttgtttggttggtttggtttgttttgagacagagtctccctctgtcacccaggctggagtgcagcagcacgactgtagttcactgcagcctcaaactcctggcctcaagagatcctcccaactcagtctcctgtatagctaggaccacaggcgcacagcaccacacctggctaattttttattttatgatttttttttgactgggtctcattctgttgcctaggctgtagtgcaatggtgaaatcacggcttacagcagcctcaacctcgtgggctcaagtgattctcccgcctgaacctctggagtagctgggactacag

SEQ ID NO: 320158 - DNA, 408 bp, Homo sapiens
  misc_feature (396)..(396): n is a, c, g, or t
ctttctgagattatttaaattagataagttaagaaacttcgatgttcttatattccaggttccgagcctcactctatccctgtcctgagacaccacaggagaggaaggaaatggcttctggagtgaataccaggattgatgatctccaaatggtatgcagaaggctggagggaatttgtttttgtgaaatactggaatacgagaccattatccttccttgaaatgctgatattctataaggtacctgtagcaaaccaggataccaaaaaaagaaatgtacatgggtaatatgtccttctgggagctgagaaagtatcagggaatgatggttaaaaatagcattagccatcctcaaacgagacaggaatgtaaagcatctagaatcgttgttgcctnagcatattctca

SEQ ID NO: 320159 - DNA, 348 bp, Homo sapiens
  misc_feature (14)..(14): n is a, c, g, or t
  misc_feature (68)..(68): n is a, c, g, or t
tgattgtgtgtttngtgtgtttaatttttctttttgtcattttggatccctcagtctcagctgctagntctctcctctttatttttcccctcccattttattgaagagacaagatagctacagtaatttattttggggtcagtttctggacccttgttgtttccctctcttgttcaaaaataatgtgactttttccctgtcatggtagtgaagagacgcttcgggggaaccctgttctacagctgaacccagccctccctggagtgtttggtggaccatacccttttggcattgatccagtaagaggacttccttcctatatgctaacctcaaattttttaacactaa

SEQ ID NO: 320160 - DNA, 2148 bp, Homo sapiens
ggggaggcggtggttggggtggaacagttgtttgattttacttagccgttcagtcagtgggttttgtttttgttgttagacatatgcttttctgaggtttgtgttactaaccatcgcccttcccacctcacagaatgtcatgttaaagcccaggcaaattctactctttctgttcatctgtgtagggaactctcaactttggtgggatcagggtgggcaacggaccgacagaggaggatgctgagattattcagcatgaccagctctccacccactcagaggacgcagacgagtttgactttggggacaccatggtccaccaggccatccacaccatcgagtactgcctgggctgcatctccaacactgcctcctacttgcggctctgggccctcagcctcgctcatgcgcagctgtctgaggtgctttggaccatggtgatccacatcggcctgagcgtgaagagcttggcgggaggtttggtgctgttcttcttcttcactgcctttgccaccctgaccgtggccatcctcctgatcatggagggcctctcggcctttctccacgcactgcgcttacactgggttgagttccagaataaattctacagcgggaccggtttcaagttcttacccttctccttcgagcatattcgggaagggaagtttgaagagtgagtccctgtgagggccgtgtgccccatgctaccctccccgcctccctccacagtgatcagctgtgcctctctgcctgttggttgtgatctgtgggcaccagctcattcgtgtcaccctgtctgtgagtcatttagatagaatagtcctccttgggtctcccaccacccctagctttgtgtgtagtgtagtgattttctggctgtcactcatactcactgggcaccagccttgccctcttagcctccatccatccagacagcccttcccacctcctggtggtgagccagtctgcattcccacgccatcccaaagccctttcatcttccccgtgcattgtagatggaaggagcacccatgccattcacatctagactttgagttccctgcatctgccaccgtagtttctagcaggagtagtggggggagtaatacagattcttccctagaaggggacactggtaacatgtcccactcttggattagcaggggtgggtccaggaagatgatatttgcgtcttttgcccacccccctggcattcagctggacccaactaggccatcatgagtggcttctccctgtcatccccaggggtcataggatatctacaccgcctttctgaccccaccctgcactcccatcctttcctctctccccgttcatgccctgcactacatagcacagccgggatgcttggaacagaggccttggctgctccgcagtgcacagggcttccctctctcggggttggcttcttcccaggccttgcatgggccctgcccacaagcacaccctcaggccgagggtgcagactgatgctcttccctgatggagaccctgagatcttccccacccccaatcatgatgtcttcagtgtgggactggggtcctcttggttctgcctgcagcctgcctggctccgcccctagtgccccctcctcaccacactggccccaggtctcaggaggggtgtcctgggcagggaaggtcagtgtcactgatggtttgctgtttggaagccattggcagggctgccgtgcatgtggctgtgagggctgcacagtcctgccaaggggcttcctccttgtcaccccgaaccttgtaatcgtgtgctggcgtggcagccctggctaagttaatccccaccgctttcagtggtagaaagaattccctgagtgggccaggctggtgccctcctcctaccctggcttttctgagtgagctgcctggagccctcatcccctctcccaggctgggctggccctgggcggggccactgtgtgctggcccactgtgacctgacccgaccttgtgcagcccccctgccctggtgtcctgggttttcgtgatgatctttgctctgtttccagtggggtttgaagcagagttcagggaaccctgcccaaggtcctcctgttcagacattcctatgttgaataaagtatgtttgacttccccggaaaaaaaaaaaag

SEQ ID NO: 320161 - DNA, 725 bp, Homo sapiens
cgggcggcgcaggggcggggctttacggacgcaagcacgtcgaagcgctgctcctggagccgcggagggtgcgggtttggctgcggtggtttctgtggcggttgctgtggcggagtttggaggttggagagaaatccaggtactcactagactggtaccttctgccaccatgggggagcttttccggagtgaagaaatgacactggcccagctttttctacagtcagaggctgcttattgttgtgtcagtgaattaggagaacttggaaaggttcagtttcgtgacttaaatccagatgtgaatgttttccaacggaaatttgtgaatgaagttagaagatgtgaagaaatggatcgaaagcttcgatttgttgagaaagagataagaaaagctaacattccgattatggacaccggtgaaaacccagaggttcccttcccccgggacatgattgacttagaggccaattttgagaagattgaaaatgaactgaaggaaatcaacacaaaccaggaagctctgaagagaaacttcctggaactgaccgaattaaaatttatacttcgcaaaactcagcaattttttgatgaggtcagactattgtttcttttagtatttgagcagctgatattatactcacacaagtgggccatatttttattccagtaattattttaatttgctagtttggaagcaatgccatttttgcaccctgttttagtta

SEQ ID NO: 320162 - DNA, 4009 bp, Homo sapiens
cgggcggcgcaggggcggggctttacggacgcaagcacgtcgaagcgctgctcctggagccgcggagggtgcgggtttggctgcggtggtttctgtggcggttgctgtggcggagtttggaggttggagagaaatccaggtactcactagactggtaccttctgccaccatgggggagcttttccggagtgaagaaatgacactggcccagctttttctacagtcagaggctgcttattgttgtgtcagtgaattaggagaacttggaaaggttcagtttcgtgacttaaatccagatgtgaatgttttccaacggaaatttgtgaatgaagttagaagatgtgaagaaatggatcgaaagcttcgatttgttgagaaagagataagaaaagctaacattccgattatggacaccggtgaaaacccagaggttcccttcccccgggacatgattgacttagaggccaattttgagaagattgaaaatgaactgaaggaaatcaacacaaaccaggaagctctgaagagaaacttcctggaactgaccgaattaaaatttatacttcgcaaaactcagcaattttttgatgagatggcggatccagacttgttggaagagtcctcatccctcttggagccaagtgagatgggaagaggcactcctttaagacttggcttcgtggctggtgtcattaaccgggagcgcatccctacttttgagcgcatgctttggcgggtatgccggggaaatgtgttcctgcgacaggctgaaatcgagaaccccctggaggatcctgtgactggcgactacgtgcacaagtctgtgtttatcattttcttccaaggcgatcagctgaaaaacagagtcaagaaaatctgtgaagggttccgagcctcactctatccctgtcctgagacaccacaggagaggaaggaaatggcttctggagtgaataccaggattgatgatctccaaatggttctgaatcaaacggaggatcaccgccagagggttctgcaggcagctgctaagaacatccgtgtctggttcatcaaagtgcggaagatgaaggccatctatcacaccctgaacctgtgcaacatagatgtgactcagaaatgcttgattgcagaggtctggtgccctgtcaccgaccttgactccatccagtttgcactcagaaggggcacggaacacagtggttccactgtaccttccattttgaacaggatgcagacaaaccagactcccccaacctataacaaaaccaacaagtttacctatggctttcagaacatagtagatgcttatggaattggaacttaccgagagataaatccagctccgtatactattatcacgttcccttttctatttgctgtgatgtttggagacttcggtcatggcattttaatgaccctttttgctgtgtggatggtactgagggagagccggatcctttcccagaagaatgagaatgagatgtttagcactgtgttcagtggtcgatacattattttattgatgggtgtgttctccatgtacactggcctcatctacaatgattgcttttccaagtctcttaatatctttgggtcatcctggagtgtacggccgatgtttacttataattggactgaagagacgcttcgggggaaccctgttctacagctgaacccagccctccctggagtgtttggtggaccatacccttttggcattgatccaatttggaacattgctaccaataaactgacgttcttgaactcctttaagatgaagatgtctgttatccttggtatcatccatatgctgtttggagtcagcctgagtctgttcaaccatatctatttcaagaagcccctgaatatctactttggatttattcctgaaataatcttcatgacctctttgtttggctatttggttatccttattttttacaagtggacggcctatgatgctcatacctctgagaatgcaccaagccttctgatccatttcataaacatgttcctcttttcctacccagagtctggttattcaatgttgtattctggacagaaaggaattcagtgtttcctggtagtggttgcactactgtgtgtaccttggatgctgctgtttaaaccattggtccttcgccgtcagtatttgaggagaaagcatttgggaactctcaactttggtgggatcagggtgggcaacggaccgacagaggaggatgctgagattattcagcatgaccagctctccacccactcagaggacgcagacgagtttgactttggggacaccatggtccaccaggccatccacaccatcgagtactgcctgggctgcatctccaacactgcctcctacttgcggctctgggccctcagcctcgctcatgcgcagctgtctgaggtgctttggaccatggtgatccacatcggcctgagcgtgaagagcttggcgggaggtttggtgctgttcttcttcttcactgcctttgccaccctgaccgtggccatcctcctgatcatggagggcctctcggcctttctccacgcactgcgcttacactgggttgagttccagaataaattctacagcgggaccggtttcaagttcttacccttctccttcgagcatattcgggaagggaagtttgaagagtgagtccctgtgagggccgtgtgccccatgctaccctccccgcctccctccacagtgatcagctgtgcctctctgcctgttggttgtgatctgtgggcaccagctcattcgtgtcaccctgtctgtgagtcatttagatagaatagtcctccttgggtctcccaccacccctagctttgtgtgtagtgtagtgattttctggctgtcactcatactcactgggcaccagccttgccctcttagcctccatccatccagacagcccttcccacctcctggtggtgagccagtctgcattcccacgccatcccaaagccctttcatcttccccgtgcattgtagatggaaggagcacccatgccattcacatctagactttgagttccctgcatctgccaccgtagtttctagcaggagtagtggggggagtaatacagattcttccctagaaggggacactggtaacatgtcccactcttggattagcaggggtgggtccaggaagatgatatttgcgtcttttgcccacccccctggcattcagctggacccaactaggccatcatgagtggcttctccctgtcatccccaggggtcataggatatctacaccgcctttctgaccccaccctgcactcccatcctttcctctctccccgttcatgccctgcactacatagcacagccgggatgcttggaacagaggccttggctgctccgcagtgcacagggcttccctctctcggggttggcttcttcccagctcttggttctgcctgcagcctgcctggctccgcccctagtgccccctcctcaccacactggccccaggtctcaggaggggtgtcctgggcagggaaggtcagtgtcactgatggtttgctgtttggaagccattggcagggctgccgtgcatgtggctgtgagggctgcacagtcctgccaaggggcttcctccttgtcaccccgaaccttgtaatcgtgtgctggcgtggcagccctggctaagttaatccccaccgctttcagtggtagaaagaattccctgagtgggccaggctggtgccctcctcctaccctggcttttctgagtgagctgcctggagccctcatcccctctcccaggctgggctggccctgggcggggccactgtgtgctggcccactgtgacctgacccgaccttgtgcagcccccctgccctggtgtcctgggttttcgtgatgatctttgctctgtttccagtggggtttgaagcagagttcagggaaccctgcccaaggtcctcctgttcagacattcctatgttgaataaagtatgtttgacttccccggaaaaaaaaaaaag

SEQ ID NO: 320163 - DNA, 3970 bp, Homo sapiens
  misc_feature (3907)..(3907): n is a, c, g, or t
cgggcggcgcaggggcggggctttacggacgcaagcacgtcgaagcgctgctcctggagccgcggagggtgcgggtttggctgcggtggtttctgtggcggttgctgtggcggagtttggaggttggagagaaatccaggtactcactagactggtaccttctgccaccatgggggagcttttccggagtgaagaaatgacactggcccagctttttctacagtcagaggctgcttattgttgtgtcagtgaattaggagaacttggaaaggttcagtttcgtgacttaaatccagatgtgaatgttttccaacggaaatttgtgaatgaagttagaagatgtgaagaaatggatcgaaagcttcgatttgttgagaaagagataagaaaagctaacattccgattatggacaccggtgaaaacccagaggttcccttcccccgggacatgattgacttagaggccaattttgagaagattgaaaatgaactgaaggaaatcaacacaaaccaggaagctctgaagagaaacttcctggaactgaccgaattaaaatttatacttcgcaaaactcagcaattttttgatgagatggcggatccagacttgttggaagagtcctcatccctcttggagccaagtgagatgggaagaggcactcctttaagacttggcttcgtggctggtgtcattaaccgggagcgcatccctacttttgagcgcatgctttggcgggtatgccggggaaatgtgttcctgcgacaggctgaaatcgagaaccccctggaggatcctgtgactggcgactacgtgcacaagtctgtgtttatcattttcttccaaggcgatcagctgaaaaacagagtcaagaaaatctgtgaagggttccgagcctcactctatccctgtcctgagacaccacaggagaggaaggaaatggcttctggagtgaataccaggattgatgatctccaaatggttctgaatcaaacggaggatcaccgccagagggttctgcaggcagctgctaagaacatccgtgtctggttcatcaaagtgcggaagatgaaggccatctatcacaccctgaacctgtgcaacatagatgtgactcagaaatgcttgattgcagaggtctggtgccctgtcaccgaccttgactccatccagtttgcactcagaaggggcacggaacacagtggttccactgtaccttccattttgaacaggatgcagacaaaccagactcccccaacctataacaaaaccaacaagtttacctatggctttcagaacatagtagatgcttatggaattggaacttaccgagagataaatccagctccgtatactattatcacgttcccttttctatttgctgtgatgtttggagacttcggtcatggcattttaatgaccctttttgctgtgtggatggtactgagggagagccggatcctttcccagaagaatgagaatgagatgtttagcactgtgttcagtggtcgatacattattttattgatgggtgtgttctccatgtacactggcctcatctacaatgattgcttttccaagtctcttaatatctttgggtcatcctggagtgtacggccgatgtttacttataattggactgaagagacgcttcgggggaaccctgttctacagctgaacccagccctccctggagtgtttggtggaccatacccttttggcattgatccaatttggaacattgctaccaataaactgacgttcttgaactcctttaagatgaagatgtctgttatccttggtatcatccatatgctgtttggagtcagcctgagtctgttcaaccatatctatttcaagaagcccctgaatatctactttggatttattcctgaaataatcttcatgacctctttgtttggctatttggttatccttattttttacaagtggacggcctatgatgctcatacctctgagaatgcaccaagccttctgatccatttcataaacatgttcctcttttcctacccagagtctggttattcaatgttgtattctggacagaaaggaattcagtgtttcctggtagtggttgcactactgtgtgtaccttggatgctgctgtttaaaccattggtccttcgccgtcagtatttgaggagaaagcatttgggaactctcaactttggtgggatcagggtgggcaacggaccgacagaggaggatgctgagattattcagcatgaccagctctccacccactcagaggacgcagacgagtttgactttggggacaccatggtccaccaggccatccacaccatcgagtactgcctgggctgcatctccaacactgcctcctacttgcggctctgggccctcagcctcgctcatgcgcagctgtctgaggtgctttggaccatggtgatccacatcggcctgagcgtgaagagcttggcgggaggtttggtgctgttcttcttcttcactgcctttgccaccctgaccgtggccatcctcctgatcatggagggcctctcggcctttctccacgcactgcgcttacactgggttgagttccagaataaattctacagcgggaccggtttcaagttcttacccttctccttcgagcatattcgggaagggaagtttgaagagtgagtccctgtgagggccgtgtgccccatgctaccctccccgcctccctccacagtgatcagctgtgcctctctgcctgttggttgtgatctgtgggcaccagctcattcgtgtcaccctgtctgtgagtcatttagatagaatagtcctccttgggtctcccaccacccctagctttgtgtgtagtgtagtgattttctggctgtcactcatactcactgggcaccagccttgccctcttagcctccatccatccagacagcccttcccacctcctggtggtgagccagtctgcattcccacgccatcccaaagccctttcatcttccccgtgcattgtagatggaaggagcacccatgccattcacatctagactttgagttccctgcatctgccaccgtagtttctagcaggagtagtggggggagtaatacagattcttccctagaaggggacactggtaacatgtcccactcttggattagcaggggtgggtccaggaagatgatatttgcgtcttttgcccacccccctggcattcagctggacccaactaggccatcatgagtggcttctccctgtcatccccaggggtcataggatatctacaccgcctttctgaccccaccctgcactcccatcctttcctctctccccgttcatgccctgcactacatagcacagccgggatgcttggaacagaggccttggctgctccgcagtgcacagggcttccctctctcggggttggcttcttcccaggccttgcatgggccctgcccacaagcacaccctcaggccgagggtgcagactgatgctcttccctgatggagaccctgagatcttccccacccccaatcatgatgtcttcagtgtgggactggggtcctcttggttctgcctgcagcctgcctggctccgcccctagtgccccctcctcaccacactggccccaggtctcaggaggggtgtcctgggcagggaaggtcagtgtcactgatggtttgctgtttggaagccattggcagggctgccgtgcatgtggctgtgagggctgcacagtcctgccaaggggcttcctccttgtcaccccgaaccttgtaatcgtgtgctggcgtggcagccctggctaagttaatccccaccgctttcagtggtagaaagaattccctcttagcctccatccatccagacagcccttcccacctcctggtggtgagccagtctgcatttccacggcatnccaaagcccttttcatcttccccgtgcattgtagatggaaggagcacccatggccattcacat

SEQ ID NO: 320164 - DNA, 3964 bp, Homo sapiens
cgggcggcgcaggggcggggctttacggacgcaagcacgtcgaagcgctgctcctggagccgcggagggtgcgggtttggctgcggtggtttctgtggcggttgctgtggcggagtttggaggttggagagaaatccaggtactcactagactggtaccttctgccaccatgggggagcttttccggagtgaagaaatgacactggcccagctttttctacagtcagaggctgcttattgttgtgtcagtgaattaggagaacttggaaaggttcagtttcgtgacttaaatccagatgtgaatgttttccaacggaaatttgtgaatgaagttagaagatgtgaagaaatggatcgaaagcttcgatttgttgagaaagagataagaaaagctaacattccgattatggacaccggtgaaaacccagaggttcccttcccccgggacatgattgacttagaggccaattttgagaagattgaaaatgaactgaaggaaatcaacacaaaccaggaagctctgaagagaaacttcctggaactgaccgaattaaaatttatacttcgcaaaactcagcaattttttgatgagatggcggatccagacttgttggaagagtcctcatccctcttggagccaagtgagatgggaagaggcactcctttaagacttggcttcgtggctggtgtcattaaccgggagcgcatccctacttttgagcgcatgctttggcgggtatgccggggaaatgtgttcctgcgacaggctgaaatcgagaaccccctggaggatcctgtgactggcgactacgtgcacaagtctgtgtttatcattttcttccaaggcgatcagctgaaaaacagagtcaagaaaatctgtgaagggttccgagcctcactctatccctgtcctgagacaccacaggagaggaaggaaatggcttctggagtgaataccaggattgatgatctccaaatggttctgaatcaaacggaggatcaccgccagagggttctgcaggcagctgctaagaacatccgtgtctggttcatcaaagtgcggaagatgaaggccatctatcacaccctgaacctgtgcaacatagatgtgactcagaaatgcttgattgcagaggtctggtgccctgtcaccgaccttgactccatccagtttgcactcagaaggggcacggaacacagtggttccactgtaccttccattttgaacaggatgcagacaaaccagactcccccaacctataacaaaaccaacaagtttacctatggctttcagaacatagtagatgcttatggaattggaacttaccgagagataaatccagctccgtatactattatcacgttcccttttctatttgctgtgatgtttggagacttcggtcatggcattttaatgaccctttttgctgtgtggatggtactgagggagagccggatcctttcccagaagaatgagaatgagatgtttagcactgtgttcagtggtcgatacattattttattgatgggtgtgttctccatgtacactggcctcatctacaatgattgcttttccaagtctcttaatatctttgggtcatcctggagtgtacggccgatgtttacttataattggactgaagagacgcttcgggggaaccctgttctacagctgaacccagccctccctggagtgtttggtggaccatacccttttggcattgatccaatttggaacattgctaccaataaactgacgttcttgaactcctttaagatgaagatgtctgttatccttggtatcatccatatgctgtttggagtcagcctgagtctgttcaaccatatctatttcaagaagcccctgaatatctactttggatttattcctgaaataatcttcatgacctctttgtttggctatttggttatccttattttttacaagtggacggcctatgatgctcatacctctgagaatgcaccaagccttctgatccatttcataaacatgttcctcttttcctacccagagtctggttattcaatgttgtattctggacagaaaggaattcagtgtttcctggtagtggttgcactactgtgtgtaccttggatgctgctgtttaaaccattggtccttcgccgtcagtatttgaggagaaagcatttgggaactctcaactttggtgggatcagggtgggcaacggaccgacagaggaggatgctgagattattcagcatgaccagctctccacccactcagaggacgcagacgagtttgactttggggacaccatggtccaccaggccatccacaccatcgagtactgcctgggctgcatctccaacactgcctcctacttgcggctctgggccctcagcctcgctcatgcgcggttgagttccagaataaattctacagcgggaccggtttcaagttcttacccttctccttcgagcatattcgggaagggaagtttgaagagtgagtccctgtgagggccgtgtgccccatgctaccctccccgcctccctccacagtgatcagctgtgcctctctgcctgttggttgtgatctgtgggcaccagctcattcgtgtcaccctgtctgtgagtcatttagatagaatagtcctccttgggtctcccaccacccctagctttgtgtgtagtgtagtgattttctggctgtcactcatactcactgggcaccagccttgccctcttagcctccatccatccagacagcccttcccacctcctggtggtgagccagtctgcattcccacgccatcccaaagccctttcatcttccccgtgcattgtagatggaaggagcacccatgccattcacatctagactttgagttccctgcatctgccaccgtagtttctagcaggagtagtggggggagtaatacagattcttccctagaaggggacactggtaacatgtcccactcttggattagcaggggtgggtccaggaagatgatatttgcgtcttttgcccacccccctggcattcagctggacccaactaggccatcatgagtggcttctccctgtcatccccaggggtcataggatatctacaccgcctttctgaccccaccctgcactcccatcctttcctctctccccgttcatgccctgcactacatagcacagccgggatgcttggaacagaggccttggctgctccgcagtgcacagggcttccctctctcggggttggcttcttcccaggccttgcatgggccctgcccacaagcacaccctcaggccgagggtgcagactgatgctcttccctgatggagaccctgagatcttccccacccccaatcatgatgtcttcagtgtgggactggggtcctcttggttctgcctgcagcctgcctggctccgcccctagtgccccctcctcaccacactggccccaggtctcaggaggggtgtcctgggcagggaaggtcagtgtcactgatggtttgctgtttggaagccattggcagggctgccgtgcatgtggctgtgagggctgcacagtcctgccaaggggcttcctccttgtcaccccgaaccttgtaatcgtgtgctggcgtggcagccctggctaagttaatccccaccgctttcagtggtagaaagaattccctgagtgggccaggctggtgccctcctcctaccctggcttttctgagtgagctgcctggagccctcatcccctctcccaggctgggctggccctgggcggggccactgtgtgctggcccactgtgacctgacccgaccttgtgcagcccccctgccctggtgtcctgggttttcgtgatgatctttgctctgtttccagtggggtttgaagcagagttcagggaaccctgcccaaggtcctcctgttcagacattcctatgttgaataaagtatgtttgacttccccggaaaaaaaaaaaag

SEQ ID NO: 320165 - DNA, 1425 bp, Homo sapiens
cgggcggcgcaggggcggggctttacggacgcaagcacgtcgaagcgctgctcctggagccgcggagggtgcgggtttggctgcggtggtttctgtggcggttgctgtggcggagtttggaggttggagagaaatccaggtactcactagactggtaccttctgccaccatgggggagcttttccggagtgaagaaatgacactggcccagctttttctacagtcagaggctgcttattgttgtgtcagtgaattaggagaacttggaaaggttcagtttcgtgacttaaatccagatgtgaatgttttccaacggaaatttgtgaatgaagttagaagatgtgaagaaatggatcgaaagcttcgatttgttgagaaagagataagaaaagctaacattccgattatggacaccggtgaaaacccagaggttcccttcccccgggacatgattgacttagaggccaattttgagaagattgaaaatgaactgaaggaaatcaacacaaaccaggaagctctgaagagaaacttcctggaactgaccgaattaaaatttatacttcgcaaaactcagcaattttttgatgagatggcggatccagacttgttggaagagtcctcatccctcttggagccaagtgagatgggaagaggcactcctttaagacttggcttcgtggctggtgtcattaaccgggagcgcatccctacttttgagcgcatgctttggcgggtatgccggggaaatgtgttcctgcgacaggctgaaatcgagaaccccctggaggatcctgtgactggcgactacgtgcacaagtctgtgtttatcattttcttccaaggcgatcagctgaaaaacagagtcaagaaaatctgtgaagggttccgagcctcactctatccctgtcctgagacaccacaggagaggaaggaaatggcttctggagtgaataccaggattgatgatctccaaatggttctgaatcaaacggaggatcaccgccagagggttctgcaggcagctgctaagaacatccgtgtctggttcatcaaagtgcggaagatgaaggccatctatcacaccctgaacctgtgcaacatagatgtgactcagaaatgcttgattgcagaggtctggtgccctgtcaccgaccttgactccatccagtttgcactcagaaggggcacggaacacagtggttccactgtaccttccattttgaacaggatgcagacaaaccagactcccccaacctataacaaaaccaacaagtttacctatggctttcagaacatagtagatgcttatggaattggaacttaccgagagataaatccagctccgtatactattatcacgttcccttttctatttgctgtgatgtttgggctccggcgtgtgcaggggataactctagagtc

SEQ ID NO: 320166 - DNA, 780 bp, Homo sapiens
gttgttatttatttgtgaaccactggctgacagggtatcagagtgatacttactacttgcatattttcagtgctcatctctcagagatctagaacttgcctaccaagtacatggccttttaaaaaccggagacaactggaaattcattggacctgatcaacatcgtaatttctattagtaagtgtgttggaaacatatccttttgcatgagttaccagattctgcaagtgggaggctgttgatgtcccttcatacctcacctctggtttcaggcaacatgccaatgatctaataggacatgttaattgagcacttaggaattaaagcagtggtaaaactgccagatttgaaagactagtttgtgtcctttaagggttttttttttttttttttgcaacactgtaaaatccacatatctttttcctctaccccctctcattttacattttcaaattgttatagcagggtgagccctgaagatttcctttcacctcccttgcttttgtattcaaagatgaagatactggaacctagagatactccctaaatgggtttgcttttaggcagataagaacatgaatttaagaaggcagcatgttaacagatgtgtgagaattgttttctgtgtatccaaatccttgtttcacattgaatgtttttaaaatgaatttgaaattcagtatctattcaccatgacctaagagtatacagaggaaacagttagaaatgaccagttgagggtagggtgtttaattgagaagtcagcacacactggcagct

SEQ ID NO: 320167 - DNA, 544 bp, Homo sapiens
cttagagtaggtaccttgcatgcacatgcacactgtagctccttcccacaccccgacactcttcaatttttagggcccagattttgggccagcaggatagacattgccatgctttcactctttttgtgtcctttaagggttttttttttttttttttgcaacactgtaaaatccacatatctttttcctctaccccctctcattttacattttcaaattgttatagcagggtgagccctgaagatttcctttcacctcccttgcttttgtattcaaagatgaagatactggaacctagagatactccctaaatgggtttgcttttaggcagataagaacatgaatttaagaaggcagcatgttaacagatgtgtgagaattgttttctgtgtatccaaatccttgtttcacattgaatgtttttaaaatgaatttgaaattcagtatctattcaccatgacctaagagtatacagaggaaacagttagaaatgaccagttgagggtagggtgtttaattgagaagtcagcacacactggcagct

SEQ ID NO: 320168 - DNA, 5472 bp, Homo sapiens
cttcctgaaggtcgaggcacgctttcccaacatgctctgcagagaaatcaaagatggcggttgtatctgctgttcgctggctgggcctccgcagcaggcttggccagccgctgacgggtcggcgggcgggtttgtgtgaacaggcacgcagctgcagattttattctggtagtgcaaccctctcaaaggttgaaggaactgatgtaacagggattgaagaagtagtaattccaaaaaagaaaacttgggataaagtagccgttcttcaggcacttgcatccacagtaaacagggataccacagctgtgccttatgtgtttcaagatgatccttaccttatgccagcatcatctttggaatctcgttcatttttactggcaaagaaatccggggagaatgtggccaagtttattattaattcataccccaaatattttcagaaggacatagctgaacctcatataccgtgtttaatgcctgagtactttgaacctcagatcaaagacataagtgaagccgccctgaaggaacgaattgagctcagaaaagtcaaagcctctgtggacatgtttgatcagcttttgcaagcaggaaccactgtgtctcttgaaacaacaaatagtctcttggatttattgtgttactatggtgaccaggagccctcaactgattaccattttcaacaaactggacagtcagaagcattggaagaggaaaatgatgagacatctaggaggaaagctggtcatcagtttggagttacatggcgagcaaaaaacaacgctgagagaatcttttctctaatgccagagaaaaatgaacattcctattgcacaatgatccgaggaatggtgaagcaccgagcttatgagcaggcattaaacttgtacactgagttactaaacaacagactccatgctgatgtatacacatttaatgcattgattgaagcaacagtatgtgcgataaatgagaaatttgaggaaaaatggagtaaaatactggagctgctaagacacatggttgcacagaaggtgaaaccaaatcttcagacttttaataccattctgaaatgtctccgaagatttcatgtgtttgcaagatcgccagccttacaggttttacgtgaaatgaaagccattggaatagaaccctcgcttgcaacatatcaccatattattcgcctgtttgatcaacctggagaccctttaaagagatcatccttcatcatttatgatataatgaatgaattaatgggaaagagattttctccaaaggacccggatgatgataagttttttcagtcagccatgagcatatgctcatctctcagagatctagaacttgcctaccaagtacatggccttttaaaaaccggagacaactggaaattcattggacctgatcaacatcgtaatttctattattccaagttcttcgatttgatttgtctaatggaacaaattgatgttaccttgaagtggtatgaggacctgataccttcagcctactttccccactcccaaacaatgatacatcttctccaagcattggatgtggccaatcggctagaagtgattcctaaaatttggaaagatagtaaagaatatggtcatactttccgcagtgacctgagagaagagatcctgatgctcatggcaagggacaagcacccaccagagcttcaggtggcatttgctgactgtgctgctgatatcaaatctgcgtatgaaagccaacccatcagacagactgctcaggattggccagccacctctctcaactgtatagctatcctctttttaagggctgggagaactcaggaagcctggaaaatgttggggcttttcaggaagcataataagattcctagaagtgagttgctgaatgagcttatggacagtgcaaaagtgtctaacagcccttcccaggccattgaagtagtagagctggcaagtgccttcagcttacctatttgtgagggcctcacccagagagtaatgagtgattttgcaatcaaccaggaacaaaaggaagccctaagtaatctaactgcattgaccagtgacagtgatactgacagcagcagtgacagcgacagtgacaccagtgaaggcaaatgaaagtggagattcaggagcagcaatggtctcaccatagctgctggaatcacacctgagaactgagatataccaatatttaacattgttacaaagaagaaaagatacagatttggtgaatttgttactgtgaggtacagtcagtacacagctgacttatgtagatttaagctgctaatatgctacttaaccatctattaatgcaccattaaaggcttagcatttaagtagcaacattgcggttttcagacacatggtgaggtccatggctcttgtcatcaggataagcctgcacacctagagtgtcggtgagctgacctcacgatgctgtcctcgtgcgattgccctctcctgctgctggacttctgcctttgttggcctgatgtgctgctgtgatgctggtccttcatcttaggtgttcatgcagttctaacacagttggggttgggtcaatagtttcccaatttcaggatatttcgatgtcagaaataacgcatcttaggaatgactaaacaagataatggcagtttaggctgcacaactggtaaaatgactgtagataaatgttgtaattagtgtacacgtttgtatttttgttaatatagccgctgccatagttttctaacttgaacagccatgaatgtttcatgtctccctttttttttgtctatagctgttacctattttagtggttgaaatgagagctagtgatgacagaaggatgtggaatgtcttcttgacatcattgtgtattgctggtaatcaagttggtaacgactacttctagcagctcttaccactatgacttaagtggtcctggaaggcagtaagtggaggtttgcagcattcctgccttcatgagggcttctaccactgaccactttgcacgtacctggctcccagatttacttaggtaccccacgagtcgtccacataagcagcttcatctttaccttgccagagttgacaattatgggatactctagtctacttatacttgtgttcccatctgtctgccatcctctgaaggccaggacccagtcatacatccttagaaaccaaagtatggtttttgttttctcttggaatgtcaggtcttaaggcatttaattgagggacaaaaaaaaaaaaagccgatatagtagctagctacttaagcatccatgggtattgctccatatcaaagcagatttgcaggacagaaagagtaaattagccttcagtcttggtttacagcttccaaggagagccttggccacctgaaatgttaactcggtcccttcctgtctctagttcatcagcacctgcagatgcctgactcttgttagccttactattcaatacagtccttagattcacggtatgcctcttcctatccaggcacctattctgaatcaccatgttgctctgcagctagagttgataggagaaaatccatttgggtagatggcctatgaatttgtagtagactttcaaaatgagtgatttgttagcttggtacttttaagtttgtggtacagatcctccaaacccatactctgagcaattaactgccttgaacatagagaaaaattaaggcctcacaggatgagtctccattctctgtaaatgcttattttatcatagtctttagcctctactatgagtaaaatgttctcttcggccgggtgtggtgactcacacctgtaacctcagcactttgggaggcagaggtgggaggatcacttaggtccaggagttcgagactagcctgggcaacatagtgagacaccggatctacaaaaaaataaaaagccagactggtggtatgtatctgtgtcccagctaattgggagggtgagatgggaggattgtttgagcctaggagagggaggttgcagtgagccgtgattgcaccactgcactccagcctgggcaacagagcaagaccctgtcttggagaaaccagaattttggaagagcaaatggggctgagtgcagtggctcatgcctgtaatcccagcacttagggtgccaatgtggattacctgagcccaggagtttgagaccagcctgggtaacagtgagacccccctccctacaaaagattttaataattagttgggcgtagtggtgcatgcctgtaatcccagctactctggagacaggtggaggggattgcttgagcctgggaagctgaggctgcagtagccatgactgcaccactgcattccagcctggttgacagagtgacccttgtctccaagaaaaaaaaaaagcaaatgggattaaggactcatggaatgggaaggggaaggggagtcttactatatgtggaataaacttgctcagtgttgccacagagttacattaccaatgtgtagaagtcagaaactagacttctagtttggttcaacatttgagggttgttttatagccatcaaagtattcaagaggttggatggcactcaaaagattctacatgtctagaatcaaactcaaatctggcacgtaggtgcttcttagtaaatgcttaatgaatgccaccaactctgcaaagtattcattgattttgagaccttagtcatgttgctactaaaagtagggcatatgaccgcctaagaaacagaacttcgagaagtcctaacgtaaccacagtaaagcagactcccctttcagcaacctcaaagcaaaaaaaaaaaaaaaaaaaccagttagctgctatataaacactataccaagcactaggcttagaggaaaagatgtcagattgtactgtcactggctatgtacccatattctctaagacagggtagcatttgtctttcaaactgcagggtttgaaatcagtttttgtgggtgattgcaattttttaatgaaatgcattagaacatctaagcacgtcacctacagttttgtgatggtgcatttttgcattgcagtatagatctgtgcatagatatatgcattaagtgtagcaaatcgtgatgtaaattttttactgctggtcatggtcaaaaagtaagatacgctaggaaattgagtcactaggagcatggatgtataaggcaggttttatagaaccatttagattcaacattaatggtagagtggcattttaccaaaaaaatgggtgtatttgatttgggtgctgtaaggcaatttgctaggacatgggataatcagattacacaaaatctaggcagtgaacaagtcttcatcctggcccaggaaatagcctattaaaaaatgctgtccaggccaggcacagtggctcacacctgtaatcccaggacttcgggaggctgaggctggaggattgcttgagttcaagaccagcctgagcaacacagtgaaaacccatctcaaaaa

SEQ ID NO: 320169 - DNA, 6107 bp, Homo sapiens
cttcctgaaggtcgaggcacgctttcccaacatgctctgcagagaaatcaaagatggcggttgtatctgctgttcgctggctgggcctccgcagcaggcttggccagccgctgacgggtcggcgggcgggtttgtgtgaacaggcacgcagctgcagattttattctggtagtgcaaccctctcaaaggttgaaggaactgatgtaacagggattgaagaagtagtaattccaaaaaagaaaacttgggataaagtagccgttcttcaggcacttgcatccacagtaaacagggataccacagctgtgccttatgtgtttcaagatgatccttaccttatgccagcatcatctttggaatctcgttcatttttactggcaaagaaatccggggagaatgtggccaagtttattattaattcataccccaaatattttcagaaggacatagctgaacctcatataccgtgtttaatgcctgagtactttgaacctcagatcaaagacataagtgaagccgccctgaaggaacgaattgagctcagaaaagtcaaagcctctgtggacatgtttgatcagcttttgcaagcaggaaccactgtgtctcttgaaacaacaaatagtctcttggatttattgtgttactatggtgaccaggagccctcaactgattaccattttcaacaaactggacagtcagaagcattggaagaggaaaatgatgagacatctaggaggaaagctggtcatcagtttggagttacatggcgagcaaaaaacaacgctgagagaatcttttctctaatgccagagaaaaatgaacattcctattgcacaatgatccgaggaatggtgaagcaccgagcttatgagcaggcattaaacttgtacactgagttactaaacaacagactccatgctgatgtatacacatttaatgcattgattgaagcaacagtatgtgcgataaatgagaaatttgaggaaaaatggagtaaaatactggagctgctaagacacatggttgcacagaaggtgaaaccaaatcttcagacttttaataccattctgaaatgtctccgaagatttcatgtgtttgcaagatcgccagccttacaggttttacgtgaaatgaaagccattggaataggtgaggatgcgcccttgagttctctgaggacagagactgtgccagccagaggtttcagggctacataagcaaagagctttaaattattcttgtgcttacataatatgttggaaattttctttccatgtttggcacatttacttacatgtacttattatagtgggagtgcctttatcatcttagtgttcattagtattttaggtactttgtttatggatctgttgaatctgaggagaagtgattgctttgagttagctagttttaaattcatgacattttcccaacataattaggtatttgaacctaagtgtgtgctagtgtattgtatatttttcattaattactttattgaaagttgctttgggaatcaattcacttcaatatattttactgttctcagtgaagaatgtgactaataagtatttggactttcaaaaagtgatacagtctttgtgatagttttttacctttacattaatgagttggaaaataactttgttcaaaggaatagaaatgcatattttgcttaaatattaacaatatgtttttaattcagtgtgtctcagtaaactatgttttggattgctgtgtttttacctcattgtttattttttctgtctacctggtaatttgagaaccctcgcttgcaacatatcaccatattattcgcctgtttgatcaacctggagaccctttaaagagatcatccttcatcatttatgatataatgaatgaattaatgggaaagagattttctccaaaggacccggatgatgataagttttttcagtcagccatgagcatatgctcatctctcagagatctagaacttgcctaccaagtacatggccttttaaaaaccggagacaactggaaattcattggacctgatcaacatcgtaatttctattattccaagttcttcgatttgatttgtctaatggaacaaattgatgttaccttgaagtggtatgaggacctgataccttcagcctactttccccactcccaaacaatgatacatcttctccaagcattggatgtggccaatcggctagaagtgattcctaaaatttggaaagatagtaaagaatatggtcatactttccgcagtgacctgagagaagagatcctgatgctcatggcaagggacaagcacccaccagagcttcaggtggcatttgctgactgtgctgctgatatcaaatctgcgtatgaaagccaacccatcagacagactgctcaggattggccagccacctctctcaactgtatagctatcctctttttaagggctgggagaactcaggaagcctggaaaatgttggggcttttcaggaagcataataagattcctagaagtgagttgctgaatgagcttatggacagtgcaaaagtgtctaacagcccttcccaggccattgaagtagtagagctggcaagtgccttcagcttacctatttgtgagggcctcacccagagagtaatgagtgattttgcaatcaaccaggaacaaaaggaagccctaagtaatctaactgcattgaccagtgacagtgatactgacagcagcagtgacagcgacagtgacaccagtgaaggcaaatgaaagtggagattcaggagcagcaatggtctcaccatagctgctggaatcacacctgagaactgagatataccaatatttaacattgttacaaagaagaaaagatacagatttggtgaatttgttactgtgaggtacagtcagtacacagctgacttatgtagatttaagctgctaatatgctacttaaccatctattaatgcaccattaaaggcttagcatttaagtagcaacattgcggttttcagacacatggtgaggtccatggctcttgtcatcaggataagcctgcacacctagagtgtcggtgagctgacctcacgatgctgtcctcgtgcgattgccctctcctgctgctggacttctgcctttgttggcctgatgtgctgctgtgatgctggtccttcatcttaggtgttcatgcagttctaacacagttggggttgggtcaatagtttcccaatttcaggatatttcgatgtcagaaataacgcatcttaggaatgactaaacaagataatggcagtttaggctgcacaactggtaaaatgactgtagataaatgttgtaattagtgtacacgtttgtatttttgttaatatagccgctgccatagttttctaacttgaacagccatgaatgtttcatgtctccctttttttttgtctatagctgttacctattttagtggttgaaatgagagctagtgatgacagaaggatgtggaatgtcttcttgacatcattgtgtattgctggtaatcaagttggtaacgactacttctagcagctcttaccactatgacttaagtggtcctggaaggcagtaagtggaggtttgcagcattcctgccttcatgagggcttctaccactgaccactttgcacgtacctggctcccagatttacttaggtaccccacgagtcgtccacataagcagcttcatctttaccttgccagagttgacaattatgggatactctagtctacttatacttgtgttcccatctgtctgccatcctctgaaggccaggacccagtcatacatccttagaaaccaaagtatggtttttgttttctcttggaatgtcaggtcttaaggcatttaattgagggacaaaaaaaaaaaaagccgatatagtagctagctacttaagcatccatgggtattgctccatatcaaagcagatttgcaggacagaaagagtaaattagccttcagtcttggtttacagcttccaaggagagccttggccacctgaaatgttaactcggtcccttcctgtctctagttcatcagcacctgcagatgcctgactcttgttagccttactattcaatacagtccttagattcacggtatgcctcttcctatccaggcacctattctgaatcaccatgttgctctgcagctagagttgataggagaaaatccatttgggtagatggcctatgaatttgtagtagactttcaaaatgagtgatttgttagcttggtacttttaagtttgtggtacagatcctccaaacccatactctgagcaattaactgccttgaacatagagaaaaattaaggcctcacaggatgagtctccattctctgtaaatgcttattttatcatagtctttagcctctactatgagtaaaatgttctcttcggccgggtgtggtgactcacacctgtaacctcagcactttgggaggcagaggtgggaggatcacttaggtccaggagttcgagactagcctgggcaacatagtgagacaccggatctacaaaaaaataaaaagccagactggtggtatgtatctgtgtcccagctaattgggagggtgagatgggaggattgtttgagcctaggagagggaggttgcagtgagccgtgattgcaccactgcactccagcctgggcaacagagcaagaccctgtcttggagaaaccagaattttggaagagcaaatggggctgagtgcagtggctcatgcctgtaatcccagcacttagggtgccaatgtggattacctgagcccaggagtttgagaccagcctgggtaacagtgagacccccctccctacaaaagattttaataattagttgggcgtagtggtgcatgcctgtaatcccagctactctggagacaggtggaggggattgcttgagcctgggaagctgaggctgcagtagccatgactgcaccactgcattccagcctggttgacagagtgacccttgtctccaagaaaaaaaaaaagcaaatgggattaaggactcatggaatgggaaggggaaggggagtcttactatatgtggaataaacttgctcagtgttgccacagagttacattaccaatgtgtagaagtcagaaactagacttctagtttggttcaacatttgagggttgttttatagccatcaaagtattcaagaggttggatggcactcaaaagattctacatgtctagaatcaaactcaaatctggcacgtaggtgcttcttagtaaatgcttaatgaatgccaccaactctgcaaagtattcattgattttgagaccttagtcatgttgctactaaaagtagggcatatgaccgcctaagaaacagaacttcgagaagtcctaacgtaaccacagtaaagcagactcccctttcagcaacctcaaagcaaaaaaaaaaaaaaaaaaaccagttagctgctatataaacactataccaagcactaggcttagaggaaaagatgtcagattgtactgtcactggctatgtacccatattctctaagacagggtagcatttgtctttcaaactgcagggtttgaaatcagtttttgtgggtgattgcaattttttaatgaaatgcattagaacatctaagcacgtcacctacagttttgtgatggtgcatttttgcattgcagtatagatctgtgcatagatatatgcattaagtgtagcaaatcgtgatgtaaattttttactgctggtcatggtcaaaaagtaagatacgctaggaaattgagtcactaggagcatggatgtataaggcaggttttatagaaccatttagattcaacattaatggtagagtggcattttaccaaaaaaatgggtgtatttgatttgggtgctgtaaggcaatttgctaggacatgggataatcagattacacaaaatctaggcagtgaacaagtcttcatcctggcccaggaaatagcctattaaaaaatgctgtccaggccaggcacagtggctcacacctgtaatcccaggacttcgggaggctgaggctggaggattgcttgagttcaagaccagcctgagcaacacagtgaaaacccatctcaaaaa

SEQ ID NO: 320170 - DNA, 6085 bp, Homo sapiens
cttcctgaaggtcgaggcacgctttcccaacatgctctgcagagaaatcaaagatggcggttgtatctgctgttcgctggctgggcctccgcagcaggcttggccagccgctgacgggtcggcgggcgggtttgtgtgaacaggcacgcagctgcagattttattctggtagtgcaaccctctcaaaggttgaaggaactgatgtaacagggattgaagaagtagtaattccaaaaaagaaaacttgggataaagtagccgttcttcaggcacttgcatccacagtaaacagggataccacagctgtgccttatgtgtttcaagatgatccttaccttatgccagcatcatctttggaatctcgttcatttttactggcaaagaaatccggggagaatgtggccaagtttattattaattcataccccaaatattttcagaaggacatagctgaacctcatataccgtgtttaatgcctgagtactttgaacctcagatcaaagacataagtgaagccgccctgaaggaacgaattgagctcagaaaagtcaaagcctctgtggacatgtttgatcagcttttgcaagcaggaaccactgtgtctcttgaaacaacaaatagtctcttggatttattgtgttactatggtgaccaggagccctcaactgattaccattttcaacaaactggacagtcagaagcattggaagaggaaaatgatgagacatctaggaggaaagctggtcatcagtttggagttacatggcgagcaaaaaacaacgctgagagaatcttttctctaatgccagagaaaaatgaacattcctattgcacaatgatccgaggaatggtgaagcaccgagcttatgagcaggcattaaacttgtacactgagttactaaacaacagactccatgctgatgtatacacatttaatgcattgattgaagcaacagtatgtgcgataaatgagaaatttgaggaaaaatggagtaaaatactggagctgctaagacacatggttgcacagaaggtgaaaccaaatcttcagacttttaataccattctgaaatgtctccgaagatttcatgtgtttgcaagatcgccagccttacaggttttacgtgaaatgaaagccattggaataggtgaggatgcgcccttgagttctctgaggacagagactgtgccagccagaggtttcagggctacataagcaaagagctttaaattattcttgtgcttacataatatgttggaaattttctttccatgtttggcacatttacttacatgtacttattatagtgggagtgcctttatcatcttagtgttcattagtattttaggtactttgtttatggatctgttgaatctgaggagaagtgattgctttgagttagctagttttaaattcatgacattttcccaacataattaggtatttgaacctaagtgtgtgctagtgtattgtatatttttcattaattactttattgaaagttgctttgggaatcaattcacttcaatatattttactgttctcagtgaagaatgtgactaataagtatttggactttcaaaaagtgatacagtctttgtgatagttttttacctttacattaatgagttggaaaataactttgttcaaaggaatagaaatgcatattttgcttaaatattaacaatatgtttttaattcagtgtgtctcagtaaactatgttttggattgctgtgtttttacctcattgtttattttttctgtctacctggtaatttgagaaccctcgcttgcaacatatcaccatattattcgcctgtttgatcaacctggagaccctttaaagagatcatccttcatcatttatgatataatgaatgaattaatgggaaagagattttctccaaaggacccggatgatgataagttttttcagtcagccatgagcatatgctcatctctcagagatctagaacttgcctaccaagtacatggccttttaaaaaccggagacaactggaaattcattggacctgatcaacatcgtaatttctattattccaagttcttcgatttgatttgtctaatggaacaaattgatgttaccttgaagtggcctactttccccactcccaaacaatgatacatcttctccaagcattggatgtggccaatcggctagaagtgattcctaaaatttggaaagatagtaaagaatatggtcatactttccgcagtgacctgagagaagagatcctgatgctcatggcaagggacaagcacccaccagagcttcaggtggcatttgctgactgtgctgctgatatcaaatctgcgtatgaaagccaacccatcagacagactgctcaggattggccagccacctctctcaactgtatagctatcctctttttaagggctgggagaactcaggaagcctggaaaatgttggggcttttcaggaagcataataagattcctagaagtgagttgctgaatgagcttatggacagtgcaaaagtgtctaacagcccttcccaggccattgaagtagtagagctggcaagtgccttcagcttacctatttgtgagggcctcacccagagagtaatgagtgattttgcaatcaaccaggaacaaaaggaagccctaagtaatctaactgcattgaccagtgacagtgatactgacagcagcagtgacagcgacagtgacaccagtgaaggcaaatgaaagtggagattcaggagcagcaatggtctcaccatagctgctggaatcacacctgagaactgagatataccaatatttaacattgttacaaagaagaaaagatacagatttggtgaatttgttactgtgaggtacagtcagtacacagctgacttatgtagatttaagctgctaatatgctacttaaccatctattaatgcaccattaaaggcttagcatttaagtagcaacattgcggttttcagacacatggtgaggtccatggctcttgtcatcaggataagcctgcacacctagagtgtcggtgagctgacctcacgatgctgtcctcgtgcgattgccctctcctgctgctggacttctgcctttgttggcctgatgtgctgctgtgatgctggtccttcatcttaggtgttcatgcagttctaacacagttggggttgggtcaatagtttcccaatttcaggatatttcgatgtcagaaataacgcatcttaggaatgactaaacaagataatggcagtttaggctgcacaactggtaaaatgactgtagataaatgttgtaattagtgtacacgtttgtatttttgttaatatagccgctgccatagttttctaacttgaacagccatgaatgtttcatgtctccctttttttttgtctatagctgttacctattttagtggttgaaatgagagctagtgatgacagaaggatgtggaatgtcttcttgacatcattgtgtattgctggtaatcaagttggtaacgactacttctagcagctcttaccactatgacttaagtggtcctggaaggcagtaagtggaggtttgcagcattcctgccttcatgagggcttctaccactgaccactttgcacgtacctggctcccagatttacttaggtaccccacgagtcgtccacataagcagcttcatctttaccttgccagagttgacaattatgggatactctagtctacttatacttgtgttcccatctgtctgccatcctctgaaggccaggacccagtcatacatccttagaaaccaaagtatggtttttgttttctcttggaatgtcaggtcttaaggcatttaattgagggacaaaaaaaaaaaaagccgatatagtagctagctacttaagcatccatgggtattgctccatatcaaagcagatttgcaggacagaaagagtaaattagccttcagtcttggtttacagcttccaaggagagccttggccacctgaaatgttaactcggtcccttcctgtctctagttcatcagcacctgcagatgcctgactcttgttagccttactattcaatacagtccttagattcacggtatgcctcttcctatccaggcacctattctgaatcaccatgttgctctgcagctagagttgataggagaaaatccatttgggtagatggcctatgaatttgtagtagactttcaaaatgagtgatttgttagcttggtacttttaagtttgtggtacagatcctccaaacccatactctgagcaattaactgccttgaacatagagaaaaattaaggcctcacaggatgagtctccattctctgtaaatgcttattttatcatagtctttagcctctactatgagtaaaatgttctcttcggccgggtgtggtgactcacacctgtaacctcagcactttgggaggcagaggtgggaggatcacttaggtccaggagttcgagactagcctgggcaacatagtgagacaccggatctacaaaaaaataaaaagccagactggtggtatgtatctgtgtcccagctaattgggagggtgagatgggaggattgtttgagcctaggagagggaggttgcagtgagccgtgattgcaccactgcactccagcctgggcaacagagcaagaccctgtcttggagaaaccagaattttggaagagcaaatggggctgagtgcagtggctcatgcctgtaatcccagcacttagggtgccaatgtggattacctgagcccaggagtttgagaccagcctgggtaacagtgagacccccctccctacaaaagattttaataattagttgggcgtagtggtgcatgcctgtaatcccagctactctggagacaggtggaggggattgcttgagcctgggaagctgaggctgcagtagccatgactgcaccactgcattccagcctggttgacagagtgacccttgtctccaagaaaaaaaaaaagcaaatgggattaaggactcatggaatgggaaggggaaggggagtcttactatatgtggaataaacttgctcagtgttgccacagagttacattaccaatgtgtagaagtcagaaactagacttctagtttggttcaacatttgagggttgttttatagccatcaaagtattcaagaggttggatggcactcaaaagattctacatgtctagaatcaaactcaaatctggcacgtaggtgcttcttagtaaatgcttaatgaatgccaccaactctgcaaagtattcattgattttgagaccttagtcatgttgctactaaaagtagggcatatgaccgcctaagaaacagaacttcgagaagtcctaacgtaaccacagtaaagcagactcccctttcagcaacctcaaagcaaaaaaaaaaaaaaaaaaaccagttagctgctatataaacactataccaagcactaggcttagaggaaaagatgtcagattgtactgtcactggctatgtacccatattctctaagacagggtagcatttgtctttcaaactgcagggtttgaaatcagtttttgtgggtgattgcaattttttaatgaaatgcattagaacatctaagcacgtcacctacagttttgtgatggtgcatttttgcattgcagtatagatctgtgcatagatatatgcattaagtgtagcaaatcgtgatgtaaattttttactgctggtcatggtcaaaaagtaagatacgctaggaaattgagtcactaggagcatggatgtataaggcaggttttatagaaccatttagattcaacattaatggtagagtggcattttaccaaaaaaatgggtgtatttgatttgggtgctgtaaggcaatttgctaggacatgggataatcagattacacaaaatctaggcagtgaacaagtcttcatcctggcccaggaaatagcctattaaaaaatgctgtccaggccaggcacagtggctcacacctgtaatcccaggacttcgggaggctgaggctggaggattgcttgagttcaagaccagcctgagcaacacagtgaaaacccatctcaaaaa

SEQ ID NO: 320171 - DNA, 2694 bp, Homo sapiens
cttcctgaaggtcgaggcacgctttcccaacatgctctgcagagaaatcaaagatggcggttgtatctgctgttcgctggctgggcctccgcagcaggcttggccagccgctgacgggtcggcgggcgggtttgtgtgaacaggcacgcagctgcagattttattctggtagtgcaaccctctcaaaggttgaaggaactgatgtaacagggattgaagaagtagtaattccaaaaaagaaaacttgggataaagtagccgttcttcaggcacttgcatccacagtaaacagggataccacagctgtgccttatgtgtttcaagatgatccttaccttatgccagcatcatctttggaatctcgttcatttttactggcaaagaaatccggggagaatgtggccaagtttattattaattcataccccaaatattttcagaaggacatagctgaacctcatataccgtgtttaatgcctgagtactttgaacctcagatcaaagacataagtgaagccgccctgaaggaacgaattgagctcagaaaagtcaaagcctctgtggacatgtttgatcagcttttgcaagcaggaaccactgtgtctcttgaaacaacaaatagtctcttggatttattgtgttactatggtgaccaggagccctcaactgattaccattttcaacaaactggacagtcagaagcattggaagaggaaaatgatgagacatctaggaggaaagctggtcatcagtttggagttacatggcgagcaaaaaacaacgctgagagaatcttttctctaatgccagagaaaaatgaacattcctattgcacaatgatccgaggaatggtgaagctgatgtatacacatttaatgcattgattgaagcaacagtatgtgcgataaatgagaaatttgaggaaaaatggagtaaaatactggagctgctaagacacatggttgcacagaaggtgaaaccaaatcttcagacttttaataccattctgaaatgtctccgaagatttcatgtgtttgcaagatcgccagccttacaggttttacgtgaaatgaaagccattggaatagaaccctcgcttgcaacatatcaccatattattcgcctgtttgatcaacctggagaccctttaaagagatcatccttcatcatttatgatataatgaatgaattaatgggaaagagattttctccaaaggacccggatgatgataagttttttcagtcagccatgagcatatgctcatctctcagagatctagaacttgcctaccaagtacatggccttttaaaaaccggagacaactggaaattcattggacctgatcaacatcgtaatttctattattccaagttcttcgatttgatttgtctaatggaacaaattgatgttaccttgaagtggtatgaggacctgataccttcagcctactttccccactcccaaacaatgatacatcttctccaagcattggatgtggccaatcggctagaagtgattcctaaaatttggaaagatagtaaagaatatggtcatactttccgcagtgacctgagagaagagatcctgatgctcatggcaagggacaagcacccaccagagcttcaggtggcatttgctgactgtgctgctgatatcaaatctgcgtatgaaagccaacccatcagacagactgctcaggattggccagccacctctctcaactgtatagctatcctctttttaagggctgggagaactcaggaagcctggaaaatgttggggcttttcaggaagcataataagattcctagaagtgagttgctgaatgagcttatggacagtgcaaaagtgtctaacagcccttcccaggccattgaagtagtagagctggcaagtgccttcagcttacctatttgtgagggcctcacccagagagtaatgagtgattttgcaatcaaccaggaacaaaaggaagccctaagtaatctaactgcattgaccagtgacagtgatactgacagcagcagtgacagcgacagtgacaccagtgaaggcaaatgaaagtggagattcaggagcagcaatggtctcaccatagctgctggaatcacacctgagaactgagatataccaatatttaacattgttacaaagaagaaaagatacagatttggtgaatttgttactgtgaggtacagtcagtacacagctgacttatgtagatttaagctgctaatatgctacttaaccatctattaatgcaccattaaaggcttagcatttaagtagcaacattgcggttttcagacacatggtgaggtccatggctcttgtcatcaggataagcctgcacacctagagtgtcggtgagctgacctcacgatgctgtcctcgtgcgattgccctctcctgctgctggacttctgcctttgttggcctgatgtgctgctgtgatgctggtccttcatcttaggtgttcatgcagttctaacacagttggggttgggtcaatagtttcccaatttcaggatatttcgatgtcagaaataacgcatcttaggaatgactaaacaagataatggcagtttaggctgcacaactggtaaaatgactgtagataaatgttgtaattagtgtacacgtttgtatttttgttaatatagccgctgccatagttttctaacttgaacagc

SEQ ID NO: 320172 - DNA, 2179 bp, Homo sapiens
cttcctgaaggtcgaggcacgctttcccaacatgctctgcagagaaatcaaagatggcggttgtatctgctgttcgctggctgggcctccgcagcaggcttggccagccgctgacgggtcggcgggcgggtttgtgtgaacaggcacgcagctgcagattttattctggtagtgcaaccctctcaaaggttgaaggaactgatgtaacagggattgaagaagtagtaattccaaaaaagaaaacttgggataaagtagccgttcttcaggcacttgcatccacagtaaacagggataccacagctgtgccttatgtgtttcaagatgatccttaccttatgccagcatcatctttggaatctcgttcatttttactggcaaagaaatccggggagaatgtggccaagtttattattaattcataccccaaatattttcagaaggacatagctgaacctcatataccgtgtttaatgcctgagtactttgaacctcagatcaaagacataagtgaagccgccctgaaggaacgaattgagctcagaaaagtcaaagcctctgtggacatgtttgatcagcttttgcaagcaggaaccactgtgtctcttgaaacaacaaatagtctcttggatttattgtgttactatggtgaccaggagccctcaactgattaccattttcaacaaactggacagtcagaagcattggaagaggaaaatgatgagacatctaggaggaaagctggtcatcagtttggagttacatggcgagcaaaaaacaacgctgagagaatcttttctctaatgccagagaaaaatgaacattcctattgcacaatgatccgaggaatggtgaagcaccgagcttatgagcaggcattaaacttgtacactgagttactaaacaacagactccatgctgatgtatacacatttaatgcattgattgaagcaacagtatgtgcgataaatgagaaatttgaggaaaaatggagtaaaatactggagctgctaagacacatggttgcacagaaggtgaaaccaaatcttcagacttttaataccattctgaaatgtctccgaagatttcatgtgtttgcaagatcgccagccttacaggttttacgtgaaatgaaagccattggaatagaaccctcgcttgcaacatatcaccatattattcgcctgtttgatcaacctggagaccctttaaagagatcatccttcatcatttatgatataatgaatgaattaatgggaaagagattttctccaaaggacccggatgatgataagttttttcagtcagccatgagcatatgctcatctctcagagatctagaacttgcctaccaagtacatggccttttaaaaaccggagacaactggaaattcattggacctgatcaacatcgtaatttctattattccaagttcttcgatttgatttgtctaatggaacaaattgatgttaccttgaagtggtatgaggacctgataccttcagcctactttccccactcccaaacaatgatacatcttctccaagcattggatgtggccaatcggctagaagtgattcctaaaatttggaaagatagtaaagaatatggtcatactttccgcagtgacctgagagaagagatcctgatgctcatggcaagggacaagcacccaccagagcttcaggtggcatttgctgactgtgctgctgatatcaaatctgcgtatgaaagccaacccatcagacagactgctcaggattggccagccacctctctcaactgtatagctatcctctttttaagggctgggagaactcaggaagcctggaaaatgttggggcttttcaggaagcataataagattcctaggtaagttgaaatcagccagctctctttgggtacagcctggaagtagccacatttggaatttcttcaccagccttagccaccacatttgggcactcttctgttaggcaagcataccgtcaactccctactatccagggcatcctgaggcaagcagttttttatctgtgttcacggatcatcatacattggggctacattgaatagatcatcatgaagtcatactgaatgaatgttgataatccatttggccctttagactttctaacctcactggaaacaagtaaaaataaatgttagacttcatct

SEQ ID NO: 320173 - DNA, 2664 bp, Homo sapiens
cttcctgaaggtcgaggcacgctttcccaacatgctctgcagagaaatcaaagatggcggttgtatctgctgttcgctggctgggcctccgcagcaggcttggccagccgctgacgggtcggcgggcgggtttgtgtgaacaggcacgcagctgcagattttattctggtagtgcaaccctctcaaaggttgaaggaactgatgtaacagggattgaagaagtagtaattccaaaaaagaaaacttgggataaagtagccgttcttcaggcacttgcatccacagtaaacagggataccacagctgtgccttatgtgtttcaagatgatccttaccttatgccagcatcatctttggaatctcgttcatttttactggcaaagaaatccggggagaatgtggccaagtttattattaattcataccccaaatattttcagaaggacatagctgaacctcatataccgtgtttaatgcctgagtactttgaacctcagatcaaagacataagtgaagccgccctgaaggaacgaattgagctcagaaaagtcaaagcctctgtggacatgtttgatcagcttttgcaagcaggaaccactgtgtctcttgaaacaacaaatagtctcttggatttattgtgttactatggtgaccaggagccctcaactgattaccattttcaacaaactggacagtcagaagcattggaagaggaaaatgatgagacatctaggaggaaagctggtcatcagtttggagttacatggcgagcaaaaaacaacgctgagagaatcttttctctaatgccagagaaaaatgaacattcctattgcacaatgatccgaggaatggtgaagcaccgagcttatgagcaggcattaaacttgtacactgagttactaaacaacagactccatgctgatgtatacacatttaatgcattgattgaagcaacagtatgtgcgataaatgagaaatttgaggaaaaatggagtaaaatactggagctgctaagacacatggttgcacagaaggtgaaaccaaatcttcagacttttaataccattctgaaatgtctccgaagatttcatgtgtttgcaagatcgccagccttacaggttttacgtgaaatgaaagccattggaataggtgaggatgcgcccttgagttctctgaggacagagactgtgccagccagaggtttcagggctacataagcaaagagctttaaattattcttgtgcttacataatatgttggaaattttctttccatgtttggcacatttacttacatgtacttattatagtgggagtgcctttatcatcttagtgttcattagtattttaggtactttgtttatggatctgttgaatctgaggagaagtgattgctttgagttagctagttttaaattcatgacattttcccaacataattaggtatttgaacctaagtgtgtgctagtgtattgtatatttttcattaattactttattgaaagttgctttgggaatcaattcacttcaatatattttactgttctcagtgaagaatgtgactaataagtatttggactttcaaaaagtgatacagtctttgtgatagttttttacctttacattaatgagttggaaaataactttgttcaaaggaatagaaatgcatattttgcttaaatattaacaatatgtttttaattcagtgtgtctcagtaaactatgttttggattgctgtgtttttacctcattgtttattttttctgtctacctggtaatttgagaaccctcgcttgcaacatatcaccatattattcgcctgtttgatcaacctggagaccctttaaagagatcatccttcatcatttatgatataatgaatgaattaatgggaaagagattttctccaaaggacccggatgatgataagttttttcagtcagccatgagcatatgctcatctctcagagatctagaacttgcctaccaagtacatggccttttaaaaaccggagacaactggaaattcattggacctgatcaacatcgtaatttctattagtaagtgtgttggaaacatatccttttgcatgagttaccagattctgcaagtgggaggctgttgatgtcccttcatacctcacctctggtttcaggcaacatgccaatgatctaataggacatgttaattgagcacttaggaattaaagcagtggtaaaactgccagatttgaaagactagtttgtgtcctttaagggttttttttttttttttttgcaacactgtaaaatccacatatctttttcctctaccccctctcattttacattttcaaattgttatagcagggtgagccctgaagatttcctttcacctcccttgcttttgtattcaaagatgaagatactggaacctagagatactccctaaatgggtttgcttttaggcagataagaacatgaatttaagaaggcagcatgttaacagatgtgtgagaattgttttctgtgtatccaaatccttgtttcacattgaatgtttttaaaatgaatttgaaattcagtatctattcaccatgacctaagagtatacagaggaaacagttagaaatgaccagttgagggtagggtgtttaattgagaagtcagcacacactggcagct

SEQ ID NO: 320174 - DNA, 3254 bp, Homo sapiens
tcataggttcgcaggcacacagtgcacagcaggttctggataattcggccgatttggcaaaacgctttcgcaaactgggcgcgccggtggtgatggttcgcgtcggttggtctgacacctttgcagaagcgctgaagcaagaagtggatcgcccgtcccctgcgaacctatctcttgtcatcaggataagcctgcacacctagagtgtcggtgagctgacctcacgatgctgtcctcgtgcgattgccctctcctgctgctggacttctgcctttgttggcctgatgtgctgctgtgatgctggtccttcatcttaggtgttcatgcagttctaacacagttggggttgggtcaatagtttcccaatttcaggatatttcgatgtcagaaataacgcatcttaggaatgactaaacaagataatggcagtttaggctgcacaactggtaaaatgactgtagataaatgttgtaattagtgtacacgtttgtatttttgttaatatagccgctgccatagttttctaacttgaacagccatgaatgtttcatgtctccctttttttttgtctatagctgttacctattttagtggttgaaatgagagctagtgatgacagaaggatgtggaatgtcttcttgacatcattgtgtattgctggtaatcaagttggtaacgactacttctagcagctcttaccactatgacttaagtggtcctggaaggcagtaagtggaggtttgcagcattcctgccttcatgagggcttctaccactgaccactttgcacgtacctggctcccagatttacttaggtaccccacgagtcgtccacataagcagcttcatctttaccttgccagagttgacaattatgggatactctagtctacttatacttgtgttcccatctgtctgccatcctctgaaggccaggacccagtcatacatccttagaaaccaaagtatggtttttgttttctcttggaatgtcaggtcttaaggcatttaattgagggacaaaaaaaaaaaaagccgatatagtagctagctacttaagcatccatgggtattgctccatatcaaagcagatttgcaggacagaaagagtaaattagccttcagtcttggtttacagcttccaaggagagccttggccacctgaaatgttaactcggtcccttcctgtctctagttcatcagcacctgcagatgcctgactcttgttagccttactattcaatacagtccttagattcacggtatgcctcttcctatccaggcacctattctgaatcaccatgttgctctgcagctagagttgataggagaaaatccatttgggtagatggcctatgaatttgtagtagactttcaaaatgagtgatttgttagcttggtacttttaagtttgtggtacagatcctccaaacccatactctgagcaattaactgccttgaacatagagaaaaattaaggcctcacaggatgagtctccattctctgtaaatgcttattttatcatagtctttagcctctactatgagtaaaatgttctcttcggccgggtgtggtgactcacacctgtaacctcagcactttgggaggcagaggtgggaggatcacttaggtccaggagttcgagactagcctgggcaacatagtgagacaccggatctacaaaaaaataaaaagccagactggtggtatgtatctgtgtcccagctaattgggagggtgagatgggaggattgtttgagcctaggagagggaggttgcagtgagccgtgattgcaccactgcactccagcctgggcaacagagcaagaccctgtcttggagaaaccagaattttggaagagcaaatggggctgagtgcagtggctcatgcctgtaatcccagcacttagggtgccaatgtggattacctgagcccaggagtttgagaccagcctgggtaacagtgagacccccctccctacaaaagattttaataattagttgggcgtagtggtgcatgcctgtaatcccagctactctggagacaggtggaggggattgcttgagcctgggaagctgaggctgcagtagccatgactgcaccactgcattccagcctggttgacagagtgacccttgtctccaagaaaaaaaaaaagcaaatgggattaaggactcatggaatgggaaggggaaggggagtcttactatatgtggaataaacttgctcagtgttgccacagagttacattaccaatgtgtagaagtcagaaactagacttctagtttggttcaacatttgagggttgttttatagccatcaaagtattcaagaggttggatggcactcaaaagattctacatgtctagaatcaaactcaaatctggcacgtaggtgcttcttagtaaatgcttaatgaatgccaccaactctgcaaagtattcattgattttgagaccttagtcatgttgctactaaaagtagggcatatgaccgcctaagaaacagaacttcgagaagtcctaacgtaaccacagtaaagcagactcccctttcagcaacctcaaagcaaaaaaaaaaaaaaaaaaaccagttagctgctatataaacactataccaagcactaggcttagaggaaaagatgtcagattgtactgtcactggctatgtacccatattctctaagacagggtagcatttgtctttcaaactgcagggtttgaaatcagtttttgtgggtgattgcaattttttaatgaaatgcattagaacatctaagcacgtcacctacagttttgtgatggtgcatttttgcattgcagtatagatctgtgcatagatatatgcattaagtgtagcaaatcgtgatgtaaattttttactgctggtcatggtcaaaaagtaagatacgctaggaaattgagtcactaggagcatggatgtataaggcaggttttatagaaccatttagattcaacattaatggtagagtggcattttaccaaaaaaatgggtgtatttgatttgggtgctgtaaggcaatttgctaggacatgggataatcagattacacaaaatctaggcagtgaacaagtcttcatcctggcccaggaaatagcctattaaaaaatgctgtccaggccaggcacagtggctcacacctgtaatcccaggacttcgggaggctgaggctggaggattgcttgagttcaagaccagcctgagcaacacagtgaaaacccatctcaaaaa

SEQ ID NO: 320175 - DNA, 606 bp, Homo sapiens
cttcaggtggcatttgctgactgtgctgctgatatcaaatctgcgtatgaaagccaacccatcagacagactgctcaggattggccagccacctctctcaactgtatagctatcctctttttaagggctgggagaactcaggaagcctgggtgagtacagtaccacaagtatacactttagaagcttttgtatttgaatctaaaacattggcccacgctggtagaggttctttcatttggccacataacacgtatttgattcgggaacttgcaaataccaactaaaaagcaaacttttggaagaagacagtatgcatgatgtagttgagataaggcatagttctctcaaaccatacgctgagaattatctttctactttctgtgtctatggacaagtaagtcacttaacctcattattccacttaaatgaactaaagatcaaagaaatatatgatcaaagaaacgtagttttgaaaatggtttggtcatttgggttattgaagtatttttggatgcttctcccatcccactctccagcttaaaatgtgggctgtgtacttagacttctggaagctggcatttacgcacattaactaaacttggcct

SEQ ID NO: 320176 - DNA, 232 bp, Homo sapiens
ggtgtatatagcttagtaatatttgccatggtctttctgagaaagccaaaattgtggtacattcctgcctctcttaagtttttatgttcttagctttatcttgcatgttaccagttttgttggcaggatttttgttaatgttactgacttgaaaatatattttatccattgtaaccaaagctcttgtgaactttgattttcagataagttttttcagtcagccatgagcata

SEQ ID NO: 320177 - DNA, 331 bp, Homo sapiens
ctttcatccatctgcccattcaaaatgttcatagctttctatcccttctatttcctttcaaaaagtcagaatgtagtaatttaatgactatttcatttgtcatgcaagtcaggaaagcctatagatttgactgttagaagctttttgtttctaatatagtttaatgcaactgcagggtccctttttctgatttcaaaactgacaggctataggtgagtgtcagagacaccgagaaccccagcacccagttgaattgcagtgtaatcctccattttcttttcttaacagggaagccctaagtaatctaactgcattgaccagtgacagtgat

SEQ ID NO: 320178 - DNA, 347 bp, Homo sapiens
acaacgtcttaaccacgtggagctggtggctgctcccatgtagtgcacatgccgtgatgaacacgtcactggagcaaggcccaggcattggcttttacatttgttccactgtgaatcctggtgggtttctggaatcctgggataagcctagaataaataacagcaacttatttttacctaccaaaaaataggttgacagtgaacaaaagtgtgttggttttacataacaatgatcactccttgttcctttcttgtttcaagatagtaaagaatatggtcatactttccgcagtgacctgagagaagagatcctgatgctcatggcaagggacaagcacccaccagag

SEQ ID NO: 320179 - DNA, 401 bp, Homo sapiens
tccccattttcaaaatgataataaccataataccctgtaagaattgagataatgtatataaagtacttggcacattgcctagaacataataaaccgtcagtaaatggtggtagctctcattggtatttcttattgcctgggttcacatttactctcttgtgtctagagcaaaaaacaacgctgagagaatcttttctctaatgccagagaaaaatgaacattcctattgcacaatgatccgaggaatggtgaagggtacatttgttttatttatttttgtctttcatttccaccgatcagggtgtttcagcctcagaactactaacattttgggtcaggtaatttgttgtggggtctgtcctgtgcattgtaggatgttagtagctccctggcttctaccc

SEQ ID NO: 320180 - DNA, 462 bp, Homo sapiens
ttttttttgtctatagctgttacctattttagtggttgaaatgagagctagtgatgacagaaggatgtggaatgtcttcttgacatcattgtgtattgctggtaatcaagttggtaacgactacttctagcagctcttaccactatgacttaagtggtcctggaaggcagtaagtggaggtttgcagcattcctgccttcatgagggcttctaccactgaccactttgcacgtacctggctcccagatttacttaggtaccccacgagtcgtccacataagcagcttcatctttaccttgccagagttgacaattatgggatactctagtctacttatacttgtgttcccatctgtctgccatcctctgaaggccaggacccagtcatacatccttagaaaccaaagtatggtttttgttttctcttggaatgtcaggtcttaaggcatttaattgagggac

SEQ ID NO: 320181 - DNA, 4801 bp, Homo sapiens
cttcctgaaggtcgaggcacgctttcccaacatgctctgcagagaaatcaaagatggcggttgtatctgctgttcgctggctgggcctccgcagcaggcttggccagccgctgacgggtcggcgggcgggtttgtgtgaacaggcacgcagctgcagattttattctggtagtgcaaccctctcaaaggttgaaggaactgatgtaacagggattgaagaagtagtaattccaaaaaagaaaacttgggataaagtagccgttcttcaggcacttgcatccacagtaaacagggataccacagctgtgccttatgtgtttcaagatgatccttaccttatgccagcatcatctttggaatctcgttcatttttactggcaaagaaatccggggagaatgtggccaagtttattattaattcataccccaaatattttcagaaggacatagctgaacctcatataccgtgtttaatgcctgagtactttgaacctcagatcaaagacataagtgaagccgccctgaaggaacgaattgagctcagaaaagtcaaagcctctgtggacatgtttgatcagcttttgcaagcaggaaccactgtgtctcttgaaacaacaaatagtctcttggatttattgtgttactatggtgaccaggagccctcaactgattaccattttcaacaaactggacagtcagaagcattggaagaggaaaatgatgagacatctaggaggaaagctggtcatcagtttggagttacatggcgagcaaaaaacaacgctgagagaatcttttctctaatgccagagaaaaatgaacattcctattgcacaatgatccgaggaatggtgaagcaccgagcttatgagcaggcattaaacttgtacactgagttactaaacaacagactccatgctgatgtatacacatttaatgcattgattgaagcaacagtatgtgcgataaatgagaaatttgaggaaaaatggagtaaaatactggagctgctaagacacatggttgcacagaaggtgaaaccaaatcttcagacttttaataccattctgaaatgtctccgaagatttcatgtgtttgcaagatcgccagccttacaggttttacgtgaaatgaaagccattggaatagaaccctcgcttgcaacatatcaccatattattcgcctgtttgatcaacctggagaccctttaaagagatcatccttcatcatttatgatataatgaatgaattaatgggaaagagattttctccaaaggacccggatgatgataagttttttcagtcagccatgagcatatgctcatctctcagagatctagaacttgcctaccaagtacatggccttttaaaaaccggagacaactggaaattcattggacctgatcaacatcgtaatttctattattccaagttcttcgatttgatttgtctaatggaacaaattgatgttaccttgaagtggtatgaggacctgataccttcagcctactttccccactcccaaacaatgatacatcttctccaagcattggatgtggccaatcggctagaagtgattcctaaaatttggaaagatagtaaagaatatggtcatactttccgcagtgacctgagagaagagatcctgatgctcatggcaagggacaagcacccaccagagcttcaggtggcatttgctgactgtgctgctgatatcaaatctgcgtatgaaagccaacccatcagacagactgctcaggattggccagccacctctctcaactgtatagctatcctctttttaagggctgggagaactcaggaagcctggaaaatgttggggcttttcaggaagcataataagattcctagaagtgagttgctgaatgagcttatggacagtgcaaaagtgtctaacagcccttcccaggccattgaagtagtagagctggcaagtgccttcagcttacctatttgtgagggcctcacccagagagtaatgagtgattttgcaatcaaccaggaacaaaaggaagccctaagtaatctaactgcattgaccagtgacagtgatactgacagcagcagtgacagcgacagtgacaccagtgaaggcaaatgaaagtggagattcaggagcagcaatggtctcaccatagctgctggaatcacacctgagaactgagatataccaatatttaacattgttacaaagaagaaaagatacagatttggtgaatttgttactgtgaggtacagtcagtacacagctgacttatgtagatttaagctgctaatatgctacttaaccatctattaatgcaccattaaaggcttagcatttaagtagcaacattgcggttttcagacacatggtgaggtccatggctcttgtcatcaggataagcctgcacacctagagtgtcggtgagctgacctcacgatgctgtcctcgtgcgattgccctctcctgctgctggacttctgcctttgttggcctgatgtgctgctgtgatgctggtccttcatcttaggtgttcatgcagttctaacacagttggggttgggtcaatagtttcccaatttcaggatatttcgatgtcagaaataacgcatcttaggaatgactaaacaagataatggcagtttaggctgcacaactggtaaaatgactgtagataaatgttgtaattagtgtacacgtttgtatttttgttaatatagccgctgccatagttttctaacttgaacagccatgaatgtttcatgtctccctttttttttgtctatagctgttacctattttagtggttgaaatgagagctagtgatgacagaaggatgtggaatgtcttcttgacatcattgtgtattgctggtaatcaagttggtaacgactacttctagcagctcttaccactatgacttaagtggtcctggaaggcagtaagtggaggtttgcagcattcctgccttcatgagggcttctaccactgaccactttgcacgtacctggctcccagatttacttaggtaccccacgagtcgtccacataagcagcttcatctttaccttgccagagttgacaattatgggatactctagtctacttatacttgtgttcccatctgtctgccatcctctgaaggccaggacccagtcatacatccttagaaaccaaagtatggtttttgttttctcttggaatgtcaggtcttaaggcatttaattgagggacaaaaaaaaaaaaagccgatatagtagctagctacttaagcatccatgggtattgctccatatcaaagcagatttgcaggacagaaagagtaaattagccttcagtcttggtttacagcttccaaggagagccttggccacctgaaatgttaactcggtcccttcctgtctctagttcatcagcactgcagtggctcatgcctgtaatcccagcacttagggtgccaatgtggattacctgagcccaggagtttgagaccagcctgggtaacagtgagacccccctccctacaaaagattttaataattagttgggcgtagtggtgcatgcctgtaatcccagctactctggagacaggtggaggggattgcttgagcctgggaagctgaggctgcagtagccatgactgcaccactgcattccagcctggttgacagagtgacccttgtctccaagaaaaaaaaaaagcaaatgggattaaggactcatggaatgggaaggggaaggggagtcttactatatgtggaataaacttgctcagtgttgccacagagttacattaccaatgtgtagaagtcagaaactagacttctagtttggttcaacatttgagggttgttttatagccatcaaagtattcaagaggttggatggcactcaaaagattctacatgtctagaatcaaactcaaatctggcacgtaggtgcttcttagtaaatgcttaatgaatgccaccaactctgcaaagtattcattgattttgagaccttagtcatgttgctactaaaagtagggcatatgaccgcctaagaaacagaacttcgagaagtcctaacgtaaccacagtaaagcagactcccctttcagcaacctcaaagcaaaaaaaaaaaaaaaaaaaccagttagctgctatataaacactataccaagcactaggcttagaggaaaagatgtcagattgtactgtcactggctatgtacccatattctctaagacagggtagcatttgtctttcaaactgcagggtttgaaatcagtttttgtgggtgattgcaattttttaatgaaatgcattagaacatctaagcacgtcacctacagttttgtgatggtgcatttttgcattgcagtatagatctgtgcatagatatatgcattaagtgtagcaaatcgtgatgtaaattttttactgctggtcatggtcaaaaagtaagatacgctaggaaattgagtcactaggagcatggatgtataaggcaggttttatagaaccatttagattcaacattaatggtagagtggcattttaccaaaaaaatgggtgtatttgatttgggtgctgtaaggcaatttgctaggacatgggataatcagattacacaaaatctaggcagtgaacaagtcttcatcctggcccaggaaatagcctattaaaaaatgctgtccaggccaggcacagtggctcacacctgtaatcccaggacttcgggaggctgaggctggaggattgcttgagttcaagaccagcctgagcaacacagtgaaaacccatctcaaaaa

SEQ ID NO: 320182 - DNA, 5421 bp, Homo sapiens
cttcctgaaggtcgaggcacgctttcccaacatgctctgcagagaaatcaaagatggcggttgtatctgctgttcgctggctgggcctccgcagcaggcttggccagccgctgacgggtcggcgggcgggtttgtgtgaacaggcacgcagctgcagattttattctggtagtgcaaccctctcaaaggttgaaggaactgatgtaacagggattgaagaagtagtaattccaaaaaagaaaacttgggataaagtagccgttcttcaggcacttgcatccacagtaaacagggataccacagctgtgccttatgtgtttcaagatgatccttaccttatgccagcatcatctttggaatctcgttcatttttactggcaaagaaatccggggagaatgtggccaagtttattattaattcataccccaaatattttcagaaggacatagctgaacctcatataccgtgtttaatgcctgagtactttgaacctcagatcaaagacataagtgaagccgccctgaaggaacgaattgagctcagaaaagtcaaagcctctgtggacatgtttgatcagcttttgcaagcaggaaccactgtgtctcttgaaacaacaaatagtctcttggatttattgtgttactatggtgaccaggagccctcaactgattaccattttcaacaaactggacagtcagaagcattggaagaggaaaatgatgagacatctaggaggaaagctggtcatcagtttggagttacatggcgagcaaaaaacaacgctgagagaatcttttctctaatgccagagaaaaatgaacattcctattgcacaatgatccgaggaatggtgaagcaccgagcttatgagcaggcattaaacttgtacactgagttactaaacaacagactccatgctgatgtatacacatttaatgcattgattgaagcaacagtatgtgcgataaatgagaaatttgaggaaaaatggagtaaaatactggagctgctaagacacatggttgcacagaaggtgaaaccaaatcttcagacttttaataccattctgaaatgtctccgaagatttcatgtgtttgcaagatcgccagccttacaggttttacgtgaaatgaaagccattggaataggagaccctttaaagagatcatccttcatcatttatgatataatgaatgaattaatgggaaagagattttctccaaaggacccggatgatgataagttttttcagtcagccatgagcatatgctcatctctcagagatctagaacttgcctaccaagtacatggccttttaaaaaccggagacaactggaaattcattggacctgatcaacatcgtaatttctattattccaagttcttcgatttgatttgtctaatggaacaaattgatgttaccttgaagtggtatgaggacctgataccttcagcctactttccccactcccaaacaatgatacatcttctccaagcattggatgtggccaatcggctagaagtgattcctaaaatttggaaagatagtaaagaatatggtcatactttccgcagtgacctgagagaagagatcctgatgctcatggcaagggacaagcacccaccagagcttcaggtggcatttgctgactgtgctgctgatatcaaatctgcgtatgaaagccaacccatcagacagactgctcaggattggccagccacctctctcaactgtatagctatcctctttttaagggctgggagaactcaggaagcctggaaaatgttggggcttttcaggaagcataataagattcctagaagtgagttgctgaatgagcttatggacagtgcaaaagtgtctaacagcccttcccaggccattgaagtagtagagctggcaagtgccttcagcttacctatttgtgagggcctcacccagagagtaatgagtgattttgcaatcaaccaggaacaaaaggaagccctaagtaatctaactgcattgaccagtgacagtgatactgacagcagcagtgacagcgacagtgacaccagtgaaggcaaatgaaagtggagattcaggagcagcaatggtctcaccatagctgctggaatcacacctgagaactgagatataccaatatttaacattgttacaaagaagaaaagatacagatttggtgaatttgttactgtgaggtacagtcagtacacagctgacttatgtagatttaagctgctaatatgctacttaaccatctattaatgcaccattaaaggcttagcatttaagtagcaacattgcggttttcagacacatggtgaggtccatggctcttgtcatcaggataagcctgcacacctagagtgtcggtgagctgacctcacgatgctgtcctcgtgcgattgccctctcctgctgctggacttctgcctttgttggcctgatgtgctgctgtgatgctggtccttcatcttaggtgttcatgcagttctaacacagttggggttgggtcaatagtttcccaatttcaggatatttcgatgtcagaaataacgcatcttaggaatgactaaacaagataatggcagtttaggctgcacaactggtaaaatgactgtagataaatgttgtaattagtgtacacgtttgtatttttgttaatatagccgctgccatagttttctaacttgaacagccatgaatgtttcatgtctccctttttttttgtctatagctgttacctattttagtggttgaaatgagagctagtgatgacagaaggatgtggaatgtcttcttgacatcattgtgtattgctggtaatcaagttggtaacgactacttctagcagctcttaccactatgacttaagtggtcctggaaggcagtaagtggaggtttgcagcattcctgccttcatgagggcttctaccactgaccactttgcacgtacctggctcccagatttacttaggtaccccacgagtcgtccacataagcagcttcatctttaccttgccagagttgacaattatgggatactctagtctacttatacttgtgttcccatctgtctgccatcctctgaaggccaggacccagtcatacatccttagaaaccaaagtatggtttttgttttctcttggaatgtcaggtcttaaggcatttaattgagggacaaaaaaaaaaaaagccgatatagtagctagctacttaagcatccatgggtattgctccatatcaaagcagatttgcaggacagaaagagtaaattagccttcagtcttggtttacagcttccaaggagagccttggccacctgaaatgttaactcggtcccttcctgtctctagttcatcagcacctgcagatgcctgactcttgttagccttactattcaatacagtccttagattcacggtatgcctcttcctatccaggcacctattctgaatcaccatgttgctctgcagctagagttgataggagaaaatccatttgggtagatggcctatgaatttgtagtagactttcaaaatgagtgatttgttagcttggtacttttaagtttgtggtacagatcctccaaacccatactctgagcaattaactgccttgaacatagagaaaaattaaggcctcacaggatgagtctccattctctgtaaatgcttattttatcatagtctttagcctctactatgagtaaaatgttctcttcggccgggtgtggtgactcacacctgtaacctcagcactttgggaggcagaggtgggaggatcacttaggtccaggagttcgagactagcctgggcaacatagtgagacaccggatctacaaaaaaataaaaagccagactggtggtatgtatctgtgtcccagctaattgggagggtgagatgggaggattgtttgagcctaggagagggaggttgcagtgagccgtgattgcaccactgcactccagcctgggcaacagagcaagaccctgtcttggagaaaccagaattttggaagagcaaatggggctgagtgcagtggctcatgcctgtaatcccagcacttagggtgccaatgtggattacctgagcccaggagtttgagaccagcctgggtaacagtgagacccccctccctacaaaagattttaataattagttgggcgtagtggtgcatgcctgtaatcccagctactctggagacaggtggaggggattgcttgagcctgggaagctgaggctgcagtagccatgactgcaccactgcattccagcctggttgacagagtgacccttgtctccaagaaaaaaaaaaagcaaatgggattaaggactcatggaatgggaaggggaaggggagtcttactatatgtggaataaacttgctcagtgttgccacagagttacattaccaatgtgtagaagtcagaaactagacttctagtttggttcaacatttgagggttgttttatagccatcaaagtattcaagaggttggatggcactcaaaagattctacatgtctagaatcaaactcaaatctggcacgtaggtgcttcttagtaaatgcttaatgaatgccaccaactctgcaaagtattcattgattttgagaccttagtcatgttgctactaaaagtagggcatatgaccgcctaagaaacagaacttcgagaagtcctaacgtaaccacagtaaagcagactcccctttcagcaacctcaaagcaaaaaaaaaaaaaaaaaaaccagttagctgctatataaacactataccaagcactaggcttagaggaaaagatgtcagattgtactgtcactggctatgtacccatattctctaagacagggtagcatttgtctttcaaactgcagggtttgaaatcagtttttgtgggtgattgcaattttttaatgaaatgcattagaacatctaagcacgtcacctacagttttgtgatggtgcatttttgcattgcagtatagatctgtgcatagatatatgcattaagtgtagcaaatcgtgatgtaaattttttactgctggtcatggtcaaaaagtaagatacgctaggaaattgagtcactaggagcatggatgtataaggcaggttttatagaaccatttagattcaacattaatggtagagtggcattttaccaaaaaaatgggtgtatttgatttgggtgctgtaaggcaatttgctaggacatgggataatcagattacacaaaatctaggcagtgaacaagtcttcatcctggcccaggaaatagcctattaaaaaatgctgtccaggccaggcacagtggctcacacctgtaatcccaggacttcgggaggctgaggctggaggattgcttgagttcaagaccagcctgagcaacacagtgaaaacccatctcaaaaa

SEQ ID NO: 320183 - DNA, 5411 bp, Homo sapiens
cttcctgaaggtcgaggcacgctttcccaacatgctctgcagagaaatcaaagatggcggttgtatctgctgttcgctggctgggcctccgcagcaggcttggccagccgctgacgggtcggcgggcgggtttgtgtgaacaggcacgcagctgcagattttattctggtagtgcaaccctctcaaaggttgaaggaactgatgtaacagggattgaagaagtagtaattccaaaaaagaaaacttgggataaagtagccgttcttcaggcacttgcatccacagtaaacagggataccacagctgtgccttatgtgtttcaagatgatccttaccttatgccagcatcatctttggaatctcgttcatttttactggcaaagaaatccggggagaatgtggccaagtttattattaattcataccccaaatattttcagaaggacatagctgaacctcatataccgtgtttaatgcctgagtactttgaacctcagatcaaagacataagtgaagccgccctgaaggaacgaattgagctcagaaaagtcaaagcctctgtggacatgtttgatcagcttttgcaagcaggaaccactgtgtctcttgaaacaacaaatagtctcttggatttattgtgttactatggtgaccaggagccctcaactgattaccattttcaacaaactggacagtcagaagcattggaagaggaaaatgatgagacatctaggaggaaagctggtcatcagtttggagttacatggcgagcaaaaaacaacgctgagagaatcttttctctaatgccagagaaaaatgaacattcctattgcacaatgatccgaggaatggtgaagctgatgtatacacatttaatgcattgattgaagcaacagtatgtgcgataaatgagaaatttgaggaaaaatggagtaaaatactggagctgctaagacacatggttgcacagaaggtgaaaccaaatcttcagacttttaataccattctgaaatgtctccgaagatttcatgtgtttgcaagatcgccagccttacaggttttacgtgaaatgaaagccattggaatagaaccctcgcttgcaacatatcaccatattattcgcctgtttgatcaacctggagaccctttaaagagatcatccttcatcatttatgatataatgaatgaattaatgggaaagagattttctccaaaggacccggatgatgataagttttttcagtcagccatgagcatatgctcatctctcagagatctagaacttgcctaccaagtacatggccttttaaaaaccggagacaactggaaattcattggacctgatcaacatcgtaatttctattattccaagttcttcgatttgatttgtctaatggaacaaattgatgttaccttgaagtggtatgaggacctgataccttcagcctactttccccactcccaaacaatgatacatcttctccaagcattggatgtggccaatcggctagaagtgattcctaaaatttggaaagatagtaaagaatatggtcatactttccgcagtgacctgagagaagagatcctgatgctcatggcaagggacaagcacccaccagagcttcaggtggcatttgctgactgtgctgctgatatcaaatctgcgtatgaaagccaacccatcagacagactgctcaggattggccagccacctctctcaactgtatagctatcctctttttaagggctgggagaactcaggaagcctggaaaatgttggggcttttcaggaagcataataagattcctagaagtgagttgctgaatgagcttatggacagtgcaaaagtgtctaacagcccttcccaggccattgaagtagtagagctggcaagtgccttcagcttacctatttgtgagggcctcacccagagagtaatgagtgattttgcaatcaaccaggaacaaaaggaagccctaagtaatctaactgcattgaccagtgacagtgatactgacagcagcagtgacagcgacagtgacaccagtgaaggcaaatgaaagtggagattcaggagcagcaatggtctcaccatagctgctggaatcacacctgagaactgagatataccaatatttaacattgttacaaagaagaaaagatacagatttggtgaatttgttactgtgaggtacagtcagtacacagctgacttatgtagatttaagctgctaatatgctacttaaccatctattaatgcaccattaaaggcttagcatttaagtagcaacattgcggttttcagacacatggtgaggtccatggctcttgtcatcaggataagcctgcacacctagagtgtcggtgagctgacctcacgatgctgtcctcgtgcgattgccctctcctgctgctggacttctgcctttgttggcctgatgtgctgctgtgatgctggtccttcatcttaggtgttcatgcagttctaacacagttggggttgggtcaatagtttcccaatttcaggatatttcgatgtcagaaataacgcatcttaggaatgactaaacaagataatggcagtttaggctgcacaactggtaaaatgactgtagataaatgttgtaattagtgtacacgtttgtatttttgttaatatagccgctgccatagttttctaacttgaacagccatgaatgtttcatgtctccctttttttttgtctatagctgttacctattttagtggttgaaatgagagctagtgatgacagaaggatgtggaatgtcttcttgacatcattgtgtattgctggtaatcaagttggtaacgactacttctagcagctcttaccactatgacttaagtggtcctggaaggcagtaagtggaggtttgcagcattcctgccttcatgagggcttctaccactgaccactttgcacgtacctggctcccagatttacttaggtaccccacgagtcgtccacataagcagcttcatctttaccttgccagagttgacaattatgggatactctagtctacttatacttgtgttcccatctgtctgccatcctctgaaggccaggacccagtcatacatccttagaaaccaaagtatggtttttgttttctcttggaatgtcaggtcttaaggcatttaattgagggacaaaaaaaaaaaaagccgatatagtagctagctacttaagcatccatgggtattgctccatatcaaagcagatttgcaggacagaaagagtaaattagccttcagtcttggtttacagcttccaaggagagccttggccacctgaaatgttaactcggtcccttcctgtctctagttcatcagcacctgcagatgcctgactcttgttagccttactattcaatacagtccttagattcacggtatgcctcttcctatccaggcacctattctgaatcaccatgttgctctgcagctagagttgataggagaaaatccatttgggtagatggcctatgaatttgtagtagactttcaaaatgagtgatttgttagcttggtacttttaagtttgtggtacagatcctccaaacccatactctgagcaattaactgccttgaacatagagaaaaattaaggcctcacaggatgagtctccattctctgtaaatgcttattttatcatagtctttagcctctactatgagtaaaatgttctcttcggccgggtgtggtgactcacacctgtaacctcagcactttgggaggcagaggtgggaggatcacttaggtccaggagttcgagactagcctgggcaacatagtgagacaccggatctacaaaaaaataaaaagccagactggtggtatgtatctgtgtcccagctaattgggagggtgagatgggaggattgtttgagcctaggagagggaggttgcagtgagccgtgattgcaccactgcactccagcctgggcaacagagcaagaccctgtcttggagaaaccagaattttggaagagcaaatggggctgagtgcagtggctcatgcctgtaatcccagcacttagggtgccaatgtggattacctgagcccaggagtttgagaccagcctgggtaacagtgagacccccctccctacaaaagattttaataattagttgggcgtagtggtgcatgcctgtaatcccagctactctggagacaggtggaggggattgcttgagcctgggaagctgaggctgcagtagccatgactgcaccactgcattccagcctggttgacagagtgacccttgtctccaagaaaaaaaaaaagcaaatgggattaaggactcatggaatgggaaggggaaggggagtcttactatatgtggaataaacttgctcagtgttgccacagagttacattaccaatgtgtagaagtcagaaactagacttctagtttggttcaacatttgagggttgttttatagccatcaaagtattcaagaggttggatggcactcaaaagattctacatgtctagaatcaaactcaaatctggcacgtaggtgcttcttagtaaatgcttaatgaatgccaccaactctgcaaagtattcattgattttgagaccttagtcatgttgctactaaaagtagggcatatgaccgcctaagaaacagaacttcgagaagtcctaacgtaaccacagtaaagcagactcccctttcagcaacctcaaagcaaaaaaaaaaaaaaaaaaaccagttagctgctatataaacactataccaagcactaggcttagaggaaaagatgtcagattgtactgtcactggctatgtacccatattctctaagacagggtagcatttgtctttcaaactgcagggtttgaaatcagtttttgtgggtgattgcaattttttaatgaaatgcattagaacatctaagcacgtcacctacagttttgtgatggtgcatttttgcattgcagtatagatctgtgcatagatatatgcattaagtgtagcaaatcgtgatgtaaattttttactgctggtcatggtcaaaaagtaagatacgctaggaaattgagtcactaggagcatggatgtataaggcaggttttatagaaccatttagattcaacattaatggtagagtggcattttaccaaaaaaatgggtgtatttgatttgggtgctgtaaggcaatttgctaggacatgggataatcagattacacaaaatctaggcagtgaacaagtcttcatcctggcccaggaaatagcctattaaaaaatgctgtccaggccaggcacagtggctcacacctgtaatcccaggacttcgggaggctgaggctggaggattgcttgagttcaagaccagcctgagcaacacagtgaaaacccatctcaaaaa

SEQ ID NO: 320184 - DNA, 5335 bp, Homo sapiens
tgttgctcaggtgagagagagcacaaggagggaagtgccacacacttttaaaccatcagatctcttggaactcactcactatcatgagaatagcaggtggatcacttgaggtcaggggtttgagaccagcctggccaacatggtgaaacctcatctctactaaaaatacaacaattagctaggcgtggtggcacgtgcctgtaattccagctactcgagaggtggaggcaggagaatcacttaaacccaggaggtggaggttatggaatgagagaagagttaaaagtacatatgctagaatatgaccagaaggatccaaaagaaaccgttttgcctctgggaagtagtatctgaagattgaagaaaggtgaggaaactttactagggactttgtcatacagttgcttcttgtttttaatagcacagatatttatatacttgtttataaacttttcattttcaattgtaattctgccacttaacctgcgaagccctgacaacacattaagatcgttaagtcttgattttccccattttcaaaatgataataaccataataccctgtaagaattgagataatgtatataaagtacttggcacattgcctagaacataataaaccgtcagtaaatggtggtagctctcattggtatttcttattgcctgggttcacatttactctcttgtgtctagagcaaaaaacaacgctgagagaatcttttctctaatgccagagaaaaatgaacattcctattgcacaatgatccgaggaatggtgaagctgatgtatacacatttaatgcattgattgaagcaacagtatgtgcgataaatgagaaatttgaggaaaaatggagtaaaatactggagctgctaagacacatggttgcacagaaggtgaaaccaaatcttcagacttttaataccattctgaaatgtctccgaagatttcatgtgtttgcaagatcgccagccttacaggttttacgtgaaatgaaagccattggaatagaaccctcgcttgcaacatatcaccatattattcgcctgtttgatcaacctggagaccctttaaagagatcatccttcatcatttatgatataatgaatgaattaatgggaaagagattttctccaaaggacccggatgatgataagttttttcagtcagccatgagcatatgctcatctctcagagatctagaacttgcctaccaagtacatggccttttaaaaaccggagacaactggaaattcattggacctgatcaacatcgtaatttctattattccaagttcttcgatttgatttgtctaatggaacaaattgatgttaccttgaagtggtatgaggacctgataccttcagcctactttccccactcccaaacaatgatacatcttctccaagcattggatgtggccaatcggctagaagtgattcctaaaatttggaaagatagtaaagaatatggtcatactttccgcagtgacctgagagaagagatcctgatgctcatggcaagggacaagcacccaccagagcttcaggtggcatttgctgactgtgctgctgatatcaaatctgcgtatgaaagccaacccatcagacagactgctcaggattggccagccacctctctcaactgtatagctatcctctttttaagggctgggagaactcaggaagcctggaaaatgttggggcttttcaggaagcataataagattcctagaagtgagttgctgaatgagcttatggacagtgcaaaagtgtctaacagcccttcccaggccattgaagtagtagagctggcaagtgccttcagcttacctatttgtgagggcctcacccagagagtaatgagtgattttgcaatcaaccaggaacaaaaggaagccctaagtaatctaactgcattgaccagtgacagtgatactgacagcagcagtgacagcgacagtgacaccagtgaaggcaaatgaaagtggagattcaggagcagcaatggtctcaccatagctgctggaatcacacctgagaactgagatataccaatatttaacattgttacaaagaagaaaagatacagatttggtgaatttgttactgtgaggtacagtcagtacacagctgacttatgtagatttaagctgctaatatgctacttaaccatctattaatgcaccattaaaggcttagcatttaagtagcaacattgcggttttcagacacatggtgaggtccatggctcttgtcatcaggataagcctgcacacctagagtgtcggtgagctgacctcacgatgctgtcctcgtgcgattgccctctcctgctgctggacttctgcctttgttggcctgatgtgctgctgtgatgctggtccttcatcttaggtgttcatgcagttctaacacagttggggttgggtcaatagtttcccaatttcaggatatttcgatgtcagaaataacgcatcttaggaatgactaaacaagataatggcagtttaggctgcacaactggtaaaatgactgtagataaatgttgtaattagtgtacacgtttgtatttttgttaatatagccgctgccatagttttctaacttgaacagccatgaatgtttcatgtctccctttttttttgtctatagctgttacctattttagtggttgaaatgagagctagtgatgacagaaggatgtggaatgtcttcttgacatcattgtgtattgctggtaatcaagttggtaacgactacttctagcagctcttaccactatgacttaagtggtcctggaaggcagtaagtggaggtttgcagcattcctgccttcatgagggcttctaccactgaccactttgcacgtacctggctcccagatttacttaggtaccccacgagtcgtccacataagcagcttcatctttaccttgccagagttgacaattatgggatactctagtctacttatacttgtgttcccatctgtctgccatcctctgaaggccaggacccagtcatacatccttagaaaccaaagtatggtttttgttttctcttggaatgtcaggtcttaaggcatttaattgagggacaaaaaaaaaaaaagccgatatagtagctagctacttaagcatccatgggtattgctccatatcaaagcagatttgcaggacagaaagagtaaattagccttcagtcttggtttacagcttccaaggagagccttggccacctgaaatgttaactcggtcccttcctgtctctagttcatcagcacctgcagatgcctgactcttgttagccttactattcaatacagtccttagattcacggtatgcctcttcctatccaggcacctattctgaatcaccatgttgctctgcagctagagttgataggagaaaatccatttgggtagatggcctatgaatttgtagtagactttcaaaatgagtgatttgttagcttggtacttttaagtttgtggtacagatcctccaaacccatactctgagcaattaactgccttgaacatagagaaaaattaaggcctcacaggatgagtctccattctctgtaaatgcttattttatcatagtctttagcctctactatgagtaaaatgttctcttcggccgggtgtggtgactcacacctgtaacctcagcactttgggaggcagaggtgggaggatcacttaggtccaggagttcgagactagcctgggcaacatagtgagacaccggatctacaaaaaaataaaaagccagactggtggtatgtatctgtgtcccagctaattgggagggtgagatgggaggattgtttgagcctaggagagggaggttgcagtgagccgtgattgcaccactgcactccagcctgggcaacagagcaagaccctgtcttggagaaaccagaattttggaagagcaaatggggctgagtgcagtggctcatgcctgtaatcccagcacttagggtgccaatgtggattacctgagcccaggagtttgagaccagcctgggtaacagtgagacccccctccctacaaaagattttaataattagttgggcgtagtggtgcatgcctgtaatcccagctactctggagacaggtggaggggattgcttgagcctgggaagctgaggctgcagtagccatgactgcaccactgcattccagcctggttgacagagtgacccttgtctccaagaaaaaaaaaaagcaaatgggattaaggactcatggaatgggaaggggaaggggagtcttactatatgtggaataaacttgctcagtgttgccacagagttacattaccaatgtgtagaagtcagaaactagacttctagtttggttcaacatttgagggttgttttatagccatcaaagtattcaagaggttggatggcactcaaaagattctacatgtctagaatcaaactcaaatctggcacgtaggtgcttcttagtaaatgcttaatgaatgccaccaactctgcaaagtattcattgattttgagaccttagtcatgttgctactaaaagtagggcatatgaccgcctaagaaacagaacttcgagaagtcctaacgtaaccacagtaaagcagactcccctttcagcaacctcaaagcaaaaaaaaaaaaaaaaaaaccagttagctgctatataaacactataccaagcactaggcttagaggaaaagatgtcagattgtactgtcactggctatgtacccatattctctaagacagggtagcatttgtctttcaaactgcagggtttgaaatcagtttttgtgggtgattgcaattttttaatgaaatgcattagaacatctaagcacgtcacctacagttttgtgatggtgcatttttgcattgcagtatagatctgtgcatagatatatgcattaagtgtagcaaatcgtgatgtaaattttttactgctggtcatggtcaaaaagtaagatacgctaggaaattgagtcactaggagcatggatgtataaggcaggttttatagaaccatttagattcaacattaatggtagagtggcattttaccaaaaaaatgggtgtatttgatttgggtgctgtaaggcaatttgctaggacatgggataatcagattacacaaaatctaggcagtgaacaagtcttcatcctggcccaggaaatagcctattaaaaaatgctgtccaggccaggcacagtggctcacacctgtaatcccaggacttcgggaggctgaggctggaggattgcttgagttcaagaccagcctgagcaacacagtgaaaacccatctcaaaaa

SEQ ID NO: 320185 - DNA, 2755 bp, Homo sapiens
cttcctgaaggtcgaggcacgctttcccaacatgctctgcagagaaatcaaagatggcggttgtatctgctgttcgctggctgggcctccgcagcaggcttggccagccgctgacgggtcggcgggcgggtttgtgtgaacaggcacgcagctgcagattttattctggtagtgcaaccctctcaaaggttgaaggaactgatgtaacagggattgaagaagtagtaattccaaaaaagaaaacttgggataaagtagccgttcttcaggcacttgcatccacagtaaacagggataccacagctgtgccttatgtgtttcaagatgatccttaccttatgccagcatcatctttggaatctcgttcatttttactggcaaagaaatccggggagaatgtggccaagtttattattaattcataccccaaatattttcagaaggacatagctgaacctcatataccgtgtttaatgcctgagtactttgaacctcagatcaaagacataagtgaagccgccctgaaggaacgaattgagctcagaaaagtcaaagcctctgtggacatgtttgatcagcttttgcaagcaggaaccactgtgtctcttgaaacaacaaatagtctcttggatttattgtgttactatggtgaccaggagccctcaactgattaccattttcaacaaactggacagtcagaagcattggaagaggaaaatgatgagacatctaggaggaaagctggtcatcagtttggagttacatggcgagcaaaaaacaacgctgagagaatcttttctctaatgccagagaaaaatgaacattcctattgcacaatgatccgaggaatggtgaagcaccgagcttatgagcaggcattaaacttgtacactgagttactaaacaacagactccatgctgatgtatacacatttaatgcattgattgaagcaacagtatgtgcgataaatgagaaatttgaggaaaaatggagtaaaatactggagctgctaagacacatggttgcacagaaggtgaaaccaaatcttcagacttttaataccattctgaaatgtctccgaagatttcatgtgtttgcaagatcgccagccttacaggttttacgtgaaatgaaagccattggaatagaaccctcgcttgcaacatatcaccatattattcgcctgtttgatcaacctggagaccctttaaagagatcatccttcatcatttatgatataatgaatgaattaatgggaaagagattttctccaaaggacccggatgatgataagttttttcagtcagccatgagcatatgctcatctctcagagatctagaacttgcctaccaagtacatggccttttaaaaaccggagacaactggaaattcattggacctgatcaacatcgtaatttctattattccaagttcttcgatttgatttgtctaatggaacaaattgatgttaccttgaagtggtatgaggacctgataccttcagcctactttccccactcccaaacaatgatacatcttctccaagcattggatgtggccaatcggctagaagtgattcctaaaatttggaaagatagtaaagaatatggtcatactttccgcagtgacctgagagaagagatcctgatgctcatggcaagggacaagcacccaccagagcttcaggtggcatttgctgactgtgctgctgatatcaaatctgcgtatgaaagccaacccatcagacagactgctcaggattggccagccacctctctcaactgtatagctatcctctttttaagggctgggagaactcaggaagcctggaaaatgttggggcttttcaggaagcataataagattcctagaagtgagttgctgaatgagcttatggacagtgcaaaagtgtctaacagcccttcccaggccattgaagtagtagagctggcaagtgccttcagcttacctatttgtgagggcctcacccagagagtaatgagtgattttgcaatcaaccaggaacaaaaggaagccctaagtaatctaactgcattgaccagtgacagtgatactgacagcagcagtgacagcgacagtgacaccagtgaaggcaaatgaaagtggagattcaggagcagcaatggtctcaccatagctgctggaatcacacctgagaactgagatataccaatatttaacattgttacaaagaagaaaagatacagatttggtgaatttgttactgtgaggtacagtcagtacacagctgacttatgtagatttaagctgctaatatgctacttaaccatctattaatgcaccattaaaggcttagcatttaagtagcaacattgcggttttcagacacatggtgaggtccatggctcttgtcatcaggataagcctgcacacctagagtgtcggtgagctgacctcacgatgctgtcctcgtgcgattgccctctcctgctgctggacttctgcctttgttggcctgatgtgctgctgtgatgctggtccttcatcttaggtgttcatgcagttctaacacagttggggttgggtcaatagtttcccaatttcaggatatttcgatgtcagaaataacgcatcttaggaatgactaaacaagataatggcagtttaggctgcacaactggtaaaatgactgtagataaatgttgtaattagtgtacacgtttgtatttttgttaatatagccgctgccatagttttctaacttgaacagc

SEQ ID NO: 320186 - DNA, 5426 bp, Homo sapiens
cttcctgaaggtcgaggcacgctttcccaacatgctctgcagagaaatcaaagatggcggttgtatctgctgttcgctggctgggcctccgcagcaggcttggccagccgctgacgggtcggcgggcgggtttgtgtgaacaggcacgcagctgcagattttattctggtagtgcaaccctctcaaaggttgaaggaactgatgtaacagggattgaagaagtagtaattccaaaaaagaaaacttggataccacagctgtgccttatgtgtttcaagatgatccttaccttatgccagcatcatctttggaatctcgttcatttttactggcaaagaaatccggggagaatgtggccaagtttattattaattcataccccaaatattttcagaaggacatagctgaacctcatataccgtgtttaatgcctgagtactttgaacctcagatcaaagacataagtgaagccgccctgaaggaacgaattgagctcagaaaagtcaaagcctctgtggacatgtttgatcagcttttgcaagcaggaaccactgtgtctcttgaaacaacaaatagtctcttggatttattgtgttactatggtgaccaggagccctcaactgattaccattttcaacaaactggacagtcagaagcattggaagaggaaaatgatgagacatctaggaggaaagctggtcatcagtttggagttacatggcgagcaaaaaacaacgctgagagaatcttttctctaatgccagagaaaaatgaacattcctattgcacaatgatccgaggaatggtgaagcaccgagcttatgagcaggcattaaacttgtacactgagttactaaacaacagactccatgctgatgtatacacatttaatgcattgattgaagcaacagtatgtgcgataaatgagaaatttgaggaaaaatggagtaaaatactggagctgctaagacacatggttgcacagaaggtgaaaccaaatcttcagacttttaataccattctgaaatgtctccgaagatttcatgtgtttgcaagatcgccagccttacaggttttacgtgaaatgaaagccattggaatagaaccctcgcttgcaacatatcaccatattattcgcctgtttgatcaacctggagaccctttaaagagatcatccttcatcatttatgatataatgaatgaattaatgggaaagagattttctccaaaggacccggatgatgataagttttttcagtcagccatgagcatatgctcatctctcagagatctagaacttgcctaccaagtacatggccttttaaaaaccggagacaactggaaattcattggacctgatcaacatcgtaatttctattattccaagttcttcgatttgatttgtctaatggaacaaattgatgttaccttgaagtggtatgaggacctgataccttcagcctactttccccactcccaaacaatgatacatcttctccaagcattggatgtggccaatcggctagaagtgattcctaaaatttggaaagatagtaaagaatatggtcatactttccgcagtgacctgagagaagagatcctgatgctcatggcaagggacaagcacccaccagagcttcaggtggcatttgctgactgtgctgctgatatcaaatctgcgtatgaaagccaacccatcagacagactgctcaggattggccagccacctctctcaactgtatagctatcctctttttaagggctgggagaactcaggaagcctggaaaatgttggggcttttcaggaagcataataagattcctagaagtgagttgctgaatgagcttatggacagtgcaaaagtgtctaacagcccttcccaggccattgaagtagtagagctggcaagtgccttcagcttacctatttgtgagggcctcacccagagagtaatgagtgattttgcaatcaaccaggaacaaaaggaagccctaagtaatctaactgcattgaccagtgacagtgatactgacagcagcagtgacagcgacagtgacaccagtgaaggcaaatgaaagtggagattcaggagcagcaatggtctcaccatagctgctggaatcacacctgagaactgagatataccaatatttaacattgttacaaagaagaaaagatacagatttggtgaatttgttactgtgaggtacagtcagtacacagctgacttatgtagatttaagctgctaatatgctacttaaccatctattaatgcaccattaaaggcttagcatttaagtagcaacattgcggttttcagacacatggtgaggtccatggctcttgtcatcaggataagcctgcacacctagagtgtcggtgagctgacctcacgatgctgtcctcgtgcgattgccctctcctgctgctggacttctgcctttgttggcctgatgtgctgctgtgatgctggtccttcatcttaggtgttcatgcagttctaacacagttggggttgggtcaatagtttcccaatttcaggatatttcgatgtcagaaataacgcatcttaggaatgactaaacaagataatggcagtttaggctgcacaactggtaaaatgactgtagataaatgttgtaattagtgtacacgtttgtatttttgttaatatagccgctgccatagttttctaacttgaacagccatgaatgtttcatgtctccctttttttttgtctatagctgttacctattttagtggttgaaatgagagctagtgatgacagaaggatgtggaatgtcttcttgacatcattgtgtattgctggtaatcaagttggtaacgactacttctagcagctcttaccactatgacttaagtggtcctggaaggcagtaagtggaggtttgcagcattcctgccttcatgagggcttctaccactgaccactttgcacgtacctggctcccagatttacttaggtaccccacgagtcgtccacataagcagcttcatctttaccttgccagagttgacaattatgggatactctagtctacttatacttgtgttcccatctgtctgccatcctctgaaggccaggacccagtcatacatccttagaaaccaaagtatggtttttgttttctcttggaatgtcaggtcttaaggcatttaattgagggacaaaaaaaaaaaaagccgatatagtagctagctacttaagcatccatgggtattgctccatatcaaagcagatttgcaggacagaaagagtaaattagccttcagtcttggtttacagcttccaaggagagccttggccacctgaaatgttaactcggtcccttcctgtctctagttcatcagcacctgcagatgcctgactcttgttagccttactattcaatacagtccttagattcacggtatgcctcttcctatccaggcacctattctgaatcaccatgttgctctgcagctagagttgataggagaaaatccatttgggtagatggcctatgaatttgtagtagactttcaaaatgagtgatttgttagcttggtacttttaagtttgtggtacagatcctccaaacccatactctgagcaattaactgccttgaacatagagaaaaattaaggcctcacaggatgagtctccattctctgtaaatgcttattttatcatagtctttagcctctactatgagtaaaatgttctcttcggccgggtgtggtgactcacacctgtaacctcagcactttgggaggcagaggtgggaggatcacttaggtccaggagttcgagactagcctgggcaacatagtgagacaccggatctacaaaaaaataaaaagccagactggtggtatgtatctgtgtcccagctaattgggagggtgagatgggaggattgtttgagcctaggagagggaggttgcagtgagccgtgattgcaccactgcactccagcctgggcaacagagcaagaccctgtcttggagaaaccagaattttggaagagcaaatggggctgagtgcagtggctcatgcctgtaatcccagcacttagggtgccaatgtggattacctgagcccaggagtttgagaccagcctgggtaacagtgagacccccctccctacaaaagattttaataattagttgggcgtagtggtgcatgcctgtaatcccagctactctggagacaggtggaggggattgcttgagcctgggaagctgaggctgcagtagccatgactgcaccactgcattccagcctggttgacagagtgacccttgtctccaagaaaaaaaaaaagcaaatgggattaaggactcatggaatgggaaggggaaggggagtcttactatatgtggaataaacttgctcagtgttgccacagagttacattaccaatgtgtagaagtcagaaactagacttctagtttggttcaacatttgagggttgttttatagccatcaaagtattcaagaggttggatggcactcaaaagattctacatgtctagaatcaaactcaaatctggcacgtaggtgcttcttagtaaatgcttaatgaatgccaccaactctgcaaagtattcattgattttgagaccttagtcatgttgctactaaaagtagggcatatgaccgcctaagaaacagaacttcgagaagtcctaacgtaaccacagtaaagcagactcccctttcagcaacctcaaagcaaaaaaaaaaaaaaaaaaaccagttagctgctatataaacactataccaagcactaggcttagaggaaaagatgtcagattgtactgtcactggctatgtacccatattctctaagacagggtagcatttgtctttcaaactgcagggtttgaaatcagtttttgtgggtgattgcaattttttaatgaaatgcattagaacatctaagcacgtcacctacagttttgtgatggtgcatttttgcattgcagtatagatctgtgcatagatatatgcattaagtgtagcaaatcgtgatgtaaattttttactgctggtcatggtcaaaaagtaagatacgctaggaaattgagtcactaggagcatggatgtataaggcaggttttatagaaccatttagattcaacattaatggtagagtggcattttaccaaaaaaatgggtgtatttgatttgggtgctgtaaggcaatttgctaggacatgggataatcagattacacaaaatctaggcagtgaacaagtcttcatcctggcccaggaaatagcctattaaaaaatgctgtccaggccaggcacagtggctcacacctgtaatcccaggacttcgggaggctgaggctggaggattgcttgagttcaagaccagcctgagcaacacagtgaaaacccatctcaaaaa

SEQ ID NO: 320187 - DNA, 2101 bp, Homo sapiens
cttcctgaaggtcgaggcacgctttcccaacatgctctgcagagaaatcaaagatggcggttgtatctgctgttcgctggctgggcctccgcagcaggcttggccagccgctgacgggtcggcgggcgggtttgtgtgaacaggcacgcagctgcagattttattctggtagtgcaaccctctcaaaggttgaaggaactgatgtaacagggattgaagaagtagtaattccaaaaaagaaaacttgggataaagtagccgttcttcaggcacttgcatccacagtaaacagggataccacagctgtgccttatgtgtttcaagatgatccttaccttatgccagcatcatctttggaatctcgttcatttttactggcaaagaaatccggggagaatgtggccaagtttattattaattcataccccaaatattttcagaaggacatagctgaacctcatataccgtgtttaatgcctgagtactttgaacctcagatcaaagacataagtgaagccgccctgaaggaacgaattgagctcagaaaagtcaaagcctctgtggacatgtttgatcagcttttgcaagcaggaaccactgtgtctcttgaaacaacaaatagtctcttggatttattgtgttactatggtgaccaggagccctcaactgattaccattttcaacaaactggacagtcagaagcattggaagaggaaaatgatgagacatctaggaggaaagctggtcatcagtttggagttacatggcgagcaaaaaacaacgctgagagaatcttttctctaatgccagagaaaaatgaacattcctattgcacaatgatccgaggaatggtgaagcaccgagcttatgagcaggcattaaacttgtacactgagttactaaacaacagactccatgctgatgtatacacatttaatgcattgattgaagcaacagtatgtgcgataaatgagaaatttgaggaaaaatggagtaaaatactggagctgctaagacacatggttgcacagaaggtgaaaccaaatcttcagacttttaataccattctgaaatgtctccgaagatttcatgtgtttgcaagatcgccagccttacaggttttacgtgaaatgaaagccattggaatagaaccctcgcttgcaacatatcaccatattattcgcctgtttgatcaacctggagaccctttaaagagatcatccttcatcatttatgatataatgaatgaattaatgggaaagagattttctccaaaggacccggatgatgataagttttttcagtcagccatgagcatatgctcatctctcagagatctagaacttgcctaccaagtacatggccttttaaaaaccggagacaactggaaattcattggacctgatcaacatcgtaatttctattattccaagttcttcgatttgatttgtctaatggaacaaattgatgttaccttgaagtggtatgaggacctgataccttcagcctactttccccactcccaaacaatgatacatcttctccaagcattggatgtggccaatcggctagaagtgattcctaaaatttggaaagatagtaaagaatatggtcatactttccgcagtgacctgagagaagagatcctgatgctcatggcaagggacaagcacccaccagagcttcaggtggcatttgctgactgtgctgctgatatcaaatctgcgtatgaaagccaacccatcagacagactgctcaggattggccagccacctctctcaactgtatagctatcctctttttaagggctgggagaactcaggaagcctgctggaagtagccacatttggaatttcttcaccagccttagccaccacatttgggcactcttctgttaggcaagcataccgtcaactccctactatccagggcatcctgaggcaagcagttttttatctgtgttcacggatcatcatacattggggctacattgaatagatcatcatgaagtcatactgaatgaatgttgataatccatttggccctttagactttctaacctcactggaaacaagtaaaaataaatgttagacttcatct

SEQ ID NO: 320188 - DNA, 1090 bp, Homo sapiens
cttcctgaaggtcgaggcacgctttcccaacatgctctgcagagaaatcaaagatggcggttgtatctgctgttcgctggctgggcctccgcagcaggcttggccagccgctgacgggtcggcgggcgggtttgtgtgaacaggcacgcagctgcagattttattctggtagtgcaaccctctcaaaggttgaaggaactgatgtaacagggattgaagaagtagtaattccaaaaaagaaaacttgggataaagtagccgttcttcaggcacttgcatccacagtaaacagggataccacagctgtgccttatgtgtttcaagatgatccttaccttatgccagcatcatctttggaatctcgttcatttttactggcaaagaaatccggggagaatgtggccaagtttattattaattcataccccaaatattttcagaaggacatagctgaacctcatataccgtgtttaatgcctgagtactttgaacctcagatcaaagacataagtgaagccgccctgaaggaacgaattgagctcagaaaagtcaaagcctctgtggacatgtttgatcagcttttgcaagcaggaaccactgtgtctcttgaaacaacaaatagtctcttggatttattgtgttactatggtgaccaggagccctcaactgattaccattttcaacaaactggacagtcagaagcattggaagaggaaaatgatgagacatctaggaggaaagctggtcatcagtttggagttacatggcgagcaaaaaacaacgctgagagaatcttttctctaatgccagagaaaaatgaacattcctattgcacaatgatccgaggaatggtgaagcctgaaccaactgttttgagcctactttggggataaaggattatttggtcttctggatttggaggcaatcagcggacagcatggaagatgtgtgctctggctcggataagagatgggacatcattcagtcactagttggatggcacaaggctcttcacagacgcatctgtagcagagtggaacttgtactaacttatgatagaatgtatcagaataaatgtttttaacagtga

SEQ ID NO: 320189 - DNA, 653 bp, Homo sapiens
acaacagaatagaaaatggttttagggctaatgtacctgtgggtgacttcatttgccagattttatatagggttctttttatttctcatcttaaaacaaatttatgtattactgcctggcatagacaccaggtgttcaacaaatatttgttgaatggataatgaatgggtatttgaatggaaatgaacttctaaaatttcattttagatagcttgtgtatttaagagtctacatgtagatggtcaggagttgacttttattcataaaaatgactctttaatgggtaaaaatgaggacagaaagaaagctgggtttcccctaagataacattactttatgccaagctagggtacttgtttcaagttttttaaaaattaaaaaaaagaaaattaaaggtgtgagatactagctcctgtgatgtcatatggaagcctttttctacttttccagtctctaggctacttcttatttcttctattaccgaaactctcttgctttcactgggctttcaaggtgtgagctcttcatgtgaggattctctgactgtgattttctccaaagtgatctcaggcagtaacttcatttcttttcggtgaggtaaatgctttgtcagcattttaaaatcatattcttaaaaaaaaaataatttattt

SEQ ID NO: 320190 - DNA, 294 bp, Homo sapiens
cccatctccctctgaagccactaagctgcttctctccactttacagcagcaaaatttccctaacgagctgtcgatattcacctcacttcctattctctcttcgaagcatcccaatgtggcttggaccacttgtcaaaacagtcaccatcatgttgtcaaatccaaatagacatttctctattctcattgtgtaacttctcagcagcatttgacagaggtgaccattccctctttcttgaaaataataaaatactctcccactttaatggctgaaccttttcagtctcctttgcc

SEQ ID NO: 320191 - DNA, 620 bp, Homo sapiens
acacagtcttgctctgtcggctgggttggagtgcaacaatgtgagtacagctcaccacagcatcgacctcccagtctcaagtgatcctcttccctcagcctcttgagtagctaggactgcaggtgcatgccaccatgctttttcttatttttgtaaagacggagtcttgccattctgctcaggctggtcttgaactagtaggttcaagtaatcctcccaccttggcctcccaaagtgctgggattacaggtgtgagccactgcgtccagcctatatgtatttagatatataccatctatatataaaccaatcaagattggtttacatataaagaatggcttataataacagcagttactgattttatggaccttaaaagtcactgatggaactaaaatcaagagaatgaaaatgtgaaatgggatttgcaattaaaaataatccagctcttcctgccatcatgaagcctgtcgaggcctgcttggaacatgacttctaaaaggcaagtatttctggaaggctgtcatccaaggccatttttgcgctataagcagggtctctggaaccaaagggagcacacaaatcttcttaaaactgaaggtgtttatgcccaagatgaa

SEQ ID NO: 320192 - DNA, 1253 bp, Homo sapiens
aaccaaaaaaactgtccagctgtggactttcaggattcaggactgctggggatcaagcccaaggatgtttttcagagctctgtgatttaagatgctcgaaaagagtgtccaagaggagtaaaggtcatgacagaatttactcccaggacaatctaagttctgccacaagtacccgtggtgtctgttcccacaacaatggccctttcacaagctcttgcctcacaacccctgcagaagtccttcaacaaaactaataatagactagtgaaacctactcctcacatgggtaagagttgcagtgggcaggtgaccctcctccctgcccccatcctttgcttcctcaagctccctgccaacctctggatacatcaatgggaaggaaaccagggaagcatagacctatagtacaacaggggtgtagtgaccactggacctgatgaagcgaatctgcctgaaatttaatacgcctttttatttcccttctgtgttaaatcaaatgatctgttctgcactgagccaagcaagttacttttaaaactggtggcaccactcatttgggacttggagactgcttttatccagaacctgttaagagaacaggggatttaaatacaaaggaatatgaaggtggtgtgccttaaagacagtctaaaattaggttttagtttgttacattattttgaaatattaaacatgaaaatgttaaatcaggatgtgtgagttttaagatgttgaacactgtcctacatcagtgaggagggaggcaataaagtaatttcagagtaaaacagattgaggatgaaaccaagacagaagtgatgatttggctttttatgatttttgctgtggaaatggcagtcgtgtgacttttcacttgcagtttaaatgaaagggtgaagagaagcctacctgccctaatggctcagggctatatccacctcccggataaccctggcccttgggactccatcatctccttgaagtagcactgagaatccaagaagaggctccgctgctttttgcacatgttactgagttacatctcaggaagatttttaagcacgaggaaggaaaatacaggcctggccaagcagggtccccttttcggtatcatctttgttcctaataagcaatcaagggggtgggtgtgttggctggtaaaggaactactaagattcagaagcttgtagtcttcattattttgttttacaggttaaaataaaccacttgactgggcacggtggctcacacct

SEQ ID NO: 320193 - DNA, 1019 bp, Homo sapiens
  misc_feature (761)..(761): n is a, c, g, or t
  misc_feature (868)..(868): n is a, c, g, or t
  misc_feature (874)..(876): n is a, c, g, or t
caccactatcaacccaagaagtggcctgatgagagaaagatcgatgggcaagaaagaatgctgggcttttcattcttgcttttggcacaggatcttttagaacttaagcacaaagcgggagatacttcacagagcagttctaagaattaactgggataattaaaattgaacctaccacatacccatgagcaaattccattgctcccagcattataattgttagtagccatgtcctttcaccaagcatgaacttgaatcaatgtcaacgttattagcgatagaaaggaccacttgctctctctgccagtattccctgcttatctcctgaggagataaccaggaggaatggggaaagaagcaagttgggcaggatatggcctacttccataggcttttcttttttcaggtttgatgtaagcatgggcttacatcccccaggtacatacttttacttattgtgggataacctggcactagtaggcaggtaaagtcacaaatttggtgtcttttcaccttttgactgttgacttaatagctcctctcactctgcctggagatacttcctgcctcagatgaggagccagaagaaacagagcccgacttgaatgaactcagctcagagttctaaggaccagcattctgggggccattttctctacaggcaaatggaattgcttttccataacatccaaattgtaatgtggttgctgctgaaggaggaggcagcagcgaggtcctgcttatctggtactgcccattgngagatggggacattgggacctcagcaatgaagaacccttgtgaagtaaccaggaggaatggggaaagaagcaagttgggcaggatatggcctacttccataggcttntctttnnncaggtttgatgtaagcatgggcttacatcccccaggtacatacttttacttattgtgggatacctggcactagtaggcaggtaagtcacaattggtgtctttcaccttttgactgttgaattaatagctcctctcactctgcc

SEQ ID NO: 320194 - DNA, 1801 bp, Homo sapiens
aaagaactgaatcaggcaccccaagaatgtcaatttcttacattctcaccctaaggactcttaattccatctgtagtgaccaagttatggcttaggaagtttcatgttgggaagatggtacatggtcctcatttatagcaaccttttagttagaaatgaatcatatttatattctatgatgacagctgttccctgagagtgaaaggtacattttgtccagaggcagcaatagaacagtagccttctttgtccatcttttctcggcgtaagacccagttctggggcctgaaggctaattggcccacttgaaggaatctctgatttctgcctgcattccaacattggcaccaaaatgtagccatggagatttaagaattcagtgctgtggcttgcttctcttggtgtacaagttatcctctgcaacctgtgtcttcaactttttgtagttctcaactatgtcagttatctcattattttaggacattatcctacttgaaatatagtcattctcacgtcattcctgtcctcgttatccattgaaaactgagctttctcttcaatttggatcgaattcaaagattcagaagccctaatggtatgtaattgagtgcactgagggcttcagttttcccttagagaaaatgggacaaataccagcctgcataggtgtttagacaggccaggaaggcttaggccatatagattctgaggacccaagctgaaaatagtgtcatttcggtgtgtacaaggatcagggaggacgtagatgtctcctctaggttttataaggccactttacagaagtagttatataaaaggtaaacatttgtgcgtaggctgtgttgccagtttgggcattaggagaaattctaattcctcattttccctttggctattaattctgtttaatatgctcagactgaccataccaccacccgcagatgggtattgcagcattggaacaggtgctgagtatagtaggaactttgtttggtggccatgtgacaggtggcttaatagacccttttgggtaaaacttcttaactgcatttaggtttcttccatgctctgctttctgttctggcctggccacgtgactcctgcttagtgttagtatgtttcctggttcctcacctatggctgtcatgcgaggaaagacttaaaatctcgagttttagtacacttggaaaacctctggggctgtgtttgtgtacacacatactcataaaggcacttttagccaggactcctttaaaaagaaaaaagaaggatttaagagtttcctgtgtatgtgcatcctgcctgctagggcctcttgggtgtttggggattaatggatttggttgtgtacatacttgttttcttaccactaaacctcccatttccagatttttccccctccccttaaggtaagctatgacttgcacagaatagacttcttaacctatatttaaactcaccttattcccttttagcaacttttcttgaaatatgtcacagtttccatacttttgcagccaaagtctccttttcagtcgaacgttcagagacctcattttgttctgttttttcaccgaatctttatagtggatgtcactgctttttttctctctactcacagtagcttctcctccagccattcctcaccacttctagtgtcagacagtcctgctttgttttcccagacttgcattctctgtctgcattccttacttcttatgttgtagcgttagaatatgtgtgttttatataagcccctgtcattcagaaagtaacctctaacttgtgttttctttctttt

SEQ ID NO: 320195 - DNA, 3632 bp, Homo sapiens
cggcggcggggggggcgggacctggggcggagagcggttcgcgcgcttcgggcctagtccggactcgccgccgccgccgccatattcccgtggcatcttccttactttgtccatcctccggactcgcgatcttccttccggagccatgtcagaaggagtggacttgattgatatatatgctgacgaggagttcaaccaggacccagagttcaacaatacagatcagattgacctgtatgatgatgtgctgacagccacctcacagccctcagatgacagaagcagcagcactgaaccacctcctcctgttcgccaggagccatctcccaagcccaacaacaagacccctgcaattctgtatacctacagtggcctgcgtaatagacgagctgccgtttatgtgggcagcttctcctggtggaccacagaccagcagctgatccaggttattcgctctataggagtctatgatgtggtggagttgaaatttgcagagaatcgagcaaatggccagtccaaagggtatgctgaggtggtggtagcctctgaaaactctgtccacaaattgttggaactcctaccagggaaagttcttaatggagaaaaagtggacgtgaggccggccacccggcagaacctgtcacagtttgaggcacaggctcggaaacgtgagtgtgtccgagtcccaagagggggaatacctccacgggcccattcccgagattctagtgattctgctgatggacgggccacaccctctgagaaccttgtaccctcatctgctcgtgtggataagccccccagtgtgctgccctacttcaatcgtcctccttcggcccttcccctgatgggtctgcccccaccaccaattccacccccaccacctctctcctcaagctttggggtccctcctcctcctcctggtatccactaccagcatctcatgcccccacctcctcgattacctcctcatcttgctgtacctccccctggggccatcccacctgcccttcacctcaatccagccttcttccccccaccaaacgctacagtggggcctccaccagatacttacatgaaggcctctgccccctataaccaccatggcagccgagattcgggccctccaccctctacagtgagtgaagccgaatttgaagatatcatgaagcgaaacagagcaatttccagcagtgccatttccaaagcagtatctggagccagtgcaggggattacagtgacgcaattgagacgctgctcacagccattgcggttatcaaacagtcccgggttgccaatgatgagcgttgccgtgtcctcatctcctctcttaaggactgtcttcatggcattgaagccaagtcctacagtgtgggtgccagtgggagctcttccaggaaaagacatcgctcccgggaaaggtcacctagccggtcccgggagagcagcaggaggcaccgggatctgcttcataatgaagatcggcatgatgattatttccaagaaaggaaccgggagcatgagagacaccgggatagagaacgggaccggcaccactgagaaaggagtctggttggaagcaaatgtttttttaatggacttgcatctcctcaccttgatcaggactaaaggacggaggccgccccacccccttccctttcctccaaacccctaactccctccagacacccagggaataccctctgccccacaggattgaagactgcttggcagtcctcccaatcccacacctcctgtttgccaggggaaagaacctaaagacttcgtgtgattgggaggggtggcagacaggaagaaaacatgtccaggcccctggtctccatagagaatggtgctttgtccaagaaaacgtatgagtttctgattctccgggagccgttcaatggtgaggttgatgggaagacttccttcccaaagaaaatagatcctccatgcaggatctaggagagtgactgggtgtgccaaaatatgcccagggtcctgccctcagcactagatttaatggggccaagagggtccaaaccccttgctaacataccacttctttgtttaactcctttacctttccagccctttgaggagggaccatgagaacagaaattaccttatgaaaagctacttctgttcctgctttccctctcacgtattgacggtttatttctttgacctcccagagggctgaactctttcaactctgcgctgcccagccttctcagtggacttgcccctcctaagcagagaaggcctatgaggttgcttgctgctgggaagcctggcagagccaattaccaccctctgctgcttagtgcttgggtacctcttgcaataaccagctcttagttgttccctttccctggggcttttccatttaacacatggagcccttcccccagaaggctacttccttgttttagaggaaggtactgcccattgggagatggggacattgggacctcagcaatgaagaacccttgtgaagtaaccaggaggaatggggaaagaagcaagttgggcaggatatggcctacttccataggcttttcttttttcaggtttgatgtaagcatgggcttacatcccccaggtacatacttttacttattgtgggataacctggcactagtaggcaggtaaagtcacaaatttggtgtcttttcaccttttgactgttgacttaatagctcctctcactctgcctggagatacttcctgcctcagatgaggagccagaagaaacagagcccgacttgaatgaactcagctcagagttctaaggaccagcattctgggggccattttctctacaggcaaatggaattgcttttccataacatccaaattgtaatgtggttgctgctgaaggaggaggcagcagcgaggtcctgcggtacccatggggtgatgctacttctgcatgcatctacagggcatctgacacctaacatgagacgtggcatgtgagatgagacttggcatgtgagacatagggtcactagagacccttctgggtcagaggagagagactgaattggactaaacccgtcctctgttcccagcacgtttctcatatagccctcagtcactgagggagtcccccgcaggattggagaggcacattcccttgggacagaggctacaggttggagctttttttcccctgtcccccaaccccatccccacctccacttcagaacatggcaccccacccaactggccaagtgttaagtgatgtgcttattgagagcaactccgggtgtcttttaaaatgtagagaaaaggtgacagtttaaggaaaaatatatatagaataccagaaatgccgtttacccggagaatttttttctccccatttgttttgtttttactcaatgacaccatttttagttttatttcctgatagcaaaaggaaaaaaaacacccatccctcaaaaaggccaaggtcccgtccccctgttgtcggtgatttgtttgtctttctgataggttgaaaattgtgtaataaacttgatgacgctgtcaatcttttatactgcattgtatttttttccttttgtaacaaaatatttttaaataataaatggggtgtgagctgttttatggaaaaaaaatt

SEQ ID NO: 320196 - DNA, 4171 bp, Homo sapiens
tgctttttctgccatcttgttactgcccctgaccctggggctttatgtctagcagggtcatctgagggacgagatttcagagtgaacaccttgaactcttggtggtcattagatggtcctgtgataatggtgggtgatggggattaaagaccttgataactctagtatacttggggtaggtggtgactgttgttctgcaagttattttgtgatgttttggggctggtggtgggggtggtttttccaaattaggaagtatatttactgtgggggaagttctggcaatggtcaactctagcctgacagatctataattaaaaaattgctagctgtcaatgtttgaactgatgaccagccagcccaaacggcagtcaaagttacaataagttttaatcttcgtaatctctaaagatggagattgggggtgagtgggtttggaattctgtatgggtgaggacaataagaaaagtctgcactaattgaaatattgccaggcttttgagtttcctctggggggacttagttgtgactagaatcctgggtttgggacattggcgggcgggggtgtagctcttgacatctcttccttttccatcttgccggccccagtggaccacagaccagcagctgatccaggttattcgctctataggagtctatgatgtggtggagttgaaatttgcagagaatcgagcaaatggccagtccaaagggtgaggtctggatttgagaagccccttttaatttgtaaccattgggataaaagatctgtactatattttggccctggattttaatcactcccacccctggcccagcttactgccttggttttggcaaactgccttagaaagggacctagctgcagtgtagtagaatatccatctgttaaggggcgaagaatactgatttttaattccaaaaaaataaagatttaggctgtctctttgttgtcagtgctgtatgtgtgtttagtttagcaagatgtcctttgctttatcaatttttactaaaagtggaagagaatttcttttttcttctcttggctgtctacagatttcattcatttttaatttttctttcctaaggtatgctgaggtggtggtagcctctgaaaactctgtccacaaattgttggaactcctaccagggaaagttcttaatggagaaaaagtggacgtgaggccggccacccggcagaacctgtcacagtttgaggcacaggctcggaaacgaatacctccacgggcccattcccgagattctagtgattctgctgatggacgggccacaccctctgagaaccttgtaccctcatctgctcgtgtggataagccccccagtgtgctgccctacttcaatcgtcctccttcggcccttcccctgatgggtctgcccccaccaccaattccacccccaccacctctctcctcaagctttggggtccctcctcctcctcctggtatccactaccagcatctcatgcccccacctcctcgattacctcctcatcttgctgtacctccccctggggccatcccacctgcccttcacctcaatccagccttcttccccccaccaaacgctacagtggggcctccaccagatacttacatgaaggcctctgccccctataaccaccatggcagccgagattcgggccctccaccctctacagtgagtgaagccgaatttgaagatatcatgaagcgaaacagagcaatttccagcagtgccatttccaaagcagtatctggagccagtgcaggggattacagtgacgcaattgagacgctgctcacagccattgcggttatcaaacagtcccgggttgccaatgatgagcgttgccgtgtcctcatctcctctcttaaggactgtcttcatggcattgaagccaagtcctacagtgtgggtgccagtgggagctcttccaggaaaagacatcgctcccgggaaaggtcacctagccggtcccgggagagcagcaggaggcaccgggatctgcttcataatgaagatcggcatgatgattatttccaagaaaggaaccgggagcatgagagacaccgggatagagaacgggaccggcaccactgagaaaggagtctggttggaagcaaatgtttttttaatggacttgcatctcctcaccttgatcaggactaaaggacggaggccgccccacccccttccctttcctccaaacccctaactccctccagacacccagggaataccctctgccccacaggattgaagactgcttggcagtcctcccaatcccacacctcctgtttgccaggggaaagaacctaaagacttcgtgtgattgggaggggtggcagacaggaagaaaacatgtccaggcccctggtctccatagagaatggtgctttgtccaagaaaacgtatgagtttctgattctccgggagccgttcaatggtgaggttgatgggaagacttccttcccaaagaaaatagatcctccatgcaggatctaggagagtgactgggtgtgccaaaatatgcccagggtcctgccctcagcactagatttaatggggccaagagggtccaaaccccttgctaacataccacttctttgtttaactcctttacctttccagccctttgaggagggaccatgagaacagaaattaccttatgaaaagctacttctgttcctgctttccctctcacgtattgacggtttatttctttgacctcccagagggctgaactctttcaactctgcgctgcccagccttctcagtggacttgcccctcctaagcagagaaggcctatgaggttgcttgctgctgggaagcctggcagagccaattaccaccctctgctgcttagtgcttgggtacctcttgcaataaccagctcttagttgttccctttccctggggcttttccatttaacacatggagcccttcccccagaaggctacttccttgttttagaggaaggtactgcccattgggagatggggacattgggacctcagcaatgaagaacccttgtgaagtaaccaggaggaatggggaaagaagcaagttgggcaggatatggcctacttccataggcttttcttttttcaggtttgatgtaagcatgggcttacatcccccaggtacatacttttacttattgtgggataacctggcactagtaggcaggtaaagtcacaaatttggtgtcttttcaccttttgactgttgacttaatagctcctctcactctgcctggagatacttcctgcctcagatgaggagccagaagaaacagagcccgacttgaatgaactcagctcagagttctaaggaccagcattctgggggccattttctctacaggcaaatggaattgcttttccataacatccaaattgtaatgtggttgctgctgaaggaggaggcagcagcgaggtcctgcggtacccatggggtgatgctacttctgcatgcatctacagggcatctgacacctaacatgagacgtggcatgtgagatgagacttggcatgtgagacatagggtcactagagacccttctgggtcagaggagagagactgaattggactaaacccgtcctctgttcccagcacgtttctcatatagccctcagtcactgagggagtcccccgcaggattggagaggcacattcccttgggacagaggctacaggttggagctttttttcccctgtcccccaaccccatccccacctccacttcagaacatggcaccccacccaactggccaagtgttaagtgatgtgcttattgagagcaactccgggtgtcttttaaaatgtagagaaaaggtgacagtttaaggaaaaatatatatagaataccagaaatgccgtttacccggagaatttttttctccccatttgttttgtttttactcaatgacaccatttttagttttatttcctgatagcaaaaggaaaaaaaacacccatccctcaaaaaggccaaggtcccgtccccctgttgtcggtgatttgtttgtctttctgataggttgaaaattgtgtaataaacttgatgacgctgtcaatcttttatactgcattgtatttttttccttttgtaacaaaatatttttaaataataaatggggtgtgagctgttttatggaaaaaaaatt

SEQ ID NO: 320197 - DNA, 3671 bp, Homo sapiens
cggcggcggggggggcgggacctggggcggagagcggttcgcgcgcttcgggcctagtccggactcgccgccgccgccgccatattcccgtggcatcttccttactttgtccatcctccggactcgcgatcttccttccggagccatgtcagaaggagtggacttgattgatatatatgctgacgaggagttcaaccaggacccagagttcaacaatacagatcagattgacctgtatgatgatgtgctgacagccacctcacagccctcagatgacagaagcagcagcactgaaccacctcctcctgttcgccaggagccatctcccaagcccaacaacaagacccctgcaattctgtatacctacagtggcctgcgtaatagacgagctgccgtttatgtgggcagcttctcctgggttggattgatctctgaaagagaactatcctgaggacgtactggtgccgaagaaagcaatgattaatggaccacagaccagcagctgatccaggttattcgctctataggagtctatgatgtggtggagttgaaatttgcagagaatcgagcaaatggccagtccaaagggtatgctgaggtggtggtagcctctgaaaactctgtccacaaattgttggaactcctaccagggaaagttcttaatggagaaaaagtggacgtgaggccggccacccggcagaacctgtcacagtttgaggcacaggctcggaaacgaatacctccacgggcccattcccgagattctagtgattctgctgatggacgggccacaccctctgagaaccttgtaccctcatctgctcgtgtggataagccccccagtgtgctgccctacttcaatcgtcctccttcggcccttcccctgatgggtctgcccccaccaccaattccacccccaccacctctctcctcaagctttggggtccctcctcctcctcctggtatccactaccagcatctcatgcccccacctcctcgattacctcctcatcttgctgtacctccccctggggccatcccacctgcccttcacctcaatccagccttcttccccccaccaaacgctacagtggggcctccaccagatacttacatgaaggcctctgccccctataaccaccatggcagccgagattcgggccctccaccctctacagtgagtgaagccgaatttgaagatatcatgaagcgaaacagagcaatttccagcagtgccatttccaaagcagtatctggagccagtgcaggggattacagtgacgcaattgagacgctgctcacagccattgcggttatcaaacagtcccgggttgccaatgatgagcgttgccgtgtcctcatctcctctcttaaggactgtcttcatggcattgaagccaagtcctacagtgtgggtgccagtgggagctcttccaggaaaagacatcgctcccgggaaaggtcacctagccggtcccgggagagcagcaggaggcaccgggatctgcttcataatgaagatcggcatgatgattatttccaagaaaggaaccgggagcatgagagacaccgggatagagaacgggaccggcaccactgagaaaggagtctggttggaagcaaatgtttttttaatggacttgcatctcctcaccttgatcaggactaaaggacggaggccgccccacccccttccctttcctccaaacccctaactccctccagacacccagggaataccctctgccccacaggattgaagactgcttggcagtcctcccaatcccacacctcctgtttgccaggggaaagaacctaaagacttcgtgtgattgggaggggtggcagacaggaagaaaacatgtccaggcccctggtctccatagagaatggtgctttgtccaagaaaacgtatgagtttctgattctccgggagccgttcaatggtgaggttgatgggaagacttccttcccaaagaaaatagatcctccatgcaggatctaggagagtgactgggtgtgccaaaatatgcccagggtcctgccctcagcactagatttaatggggccaagagggtccaaaccccttgctaacataccacttctttgtttaactcctttacctttccagccctttgaggagggaccatgagaacagaaattaccttatgaaaagctacttctgttcctgctttccctctcacgtattgacggtttatttctttgacctcccagagggctgaactctttcaactctgcgctgcccagccttctcagtggacttgcccctcctaagcagagaaggcctatgaggttgcttgctgctgggaagcctggcagagccaattaccaccctctgctgcttagtgcttgggtacctcttgcaataaccagctcttagttgttccctttccctggggcttttccatttaacacatggagcccttcccccagaaggctacttccttgttttagaggaaggtactgcccattgggagatggggacattgggacctcagcaatgaagaacccttgtgaagtaaccaggaggaatggggaaagaagcaagttgggcaggatatggcctacttccataggcttttcttttttcaggtttgatgtaagcatgggcttacatcccccaggtacatacttttacttattgtgggataacctggcactagtaggcaggtaaagtcacaaatttggtgtcttttcaccttttgactgttgacttaatagctcctctcactctgcctggagatacttcctgcctcagatgaggagccagaagaaacagagcccgacttgaatgaactcagctcagagttctaaggaccagcattctgggggccattttctctacaggcaaatggaattgcttttccataacatccaaattgtaatgtggttgctgctgaaggaggaggcagcagcgaggtcctgcggtacccatggggtgatgctacttctgcatgcatctacagggcatctgacacctaacatgagacgtggcatgtgagatgagacttggcatgtgagacatagggtcactagagacccttctgggtcagaggagagagactgaattggactaaacccgtcctctgttcccagcacgtttctcatatagccctcagtcactgagggagtcccccgcaggattggagaggcacattcccttgggacagaggctacaggttggagctttttttcccctgtcccccaaccccatccccacctccacttcagaacatggcaccccacccaactggccaagtgttaagtgatgtgcttattgagagcaactccgggtgtcttttaaaatgtagagaaaaggtgacagtttaaggaaaaatatatatagaataccagaaatgccgtttacccggagaatttttttctccccatttgttttgtttttactcaatgacaccatttttagttttatttcctgatagcaaaaggaaaaaaaacacccatccctcaaaaaggccaaggtcccgtccccctgttgtcggtgatttgtttgtctttctgataggttgaaaattgtgtaataaacttgatgacgctgtcaatcttttatactgcattgtatttttttccttttgtaacaaaatatttttaaataataaatggggtgtgagctgttttatggaaaaaaaatt

SEQ ID NO: 320198 - DNA, 3086 bp, Homo sapiens
cggcggcggggggggcgggacctggggcggagagcggttcgcgcgcttcgggcctagtccggactcgccgccgccgccgccatattcccgtggcatcttccttactttgtccatcctccggactcgcgatcttccttccggagccatgtcagaaggagtggacttgattgatatatatgctgacgaggagttcaaccaggacccagagttcaacaatacagatcagattgacctgtatgatgatgtgctgacagccacctcacagccctacttcaatcgtcctccttcggcccttcccctgatgggtctgcccccaccaccaattccacccccaccacctctctcctcaagctttggggtccctcctcctcctcctggtatccactaccagcatctcatgcccccacctcctcgattacctcctcatcttgctgtacctccccctggggccatcccacctgcccttcacctcaatccagccttcttccccccaccaaacgctacagtggggcctccaccagatacttacatgaaggcctctgccccctataaccaccatggcagccgagattcgggccctccaccctctacagtgagtgaagccgaatttgaagatatcatgaagcgaaacagagcaatttccagcagtgccatttccaaagcagtatctggagccagtgcaggggattacagtgacgcaattgagacgctgctcacagccattgcggttatcaaacagtcccgggttgccaatgatgagcgttgccgtgtcctcatctcctctcttaaggactgtcttcatggcattgaagccaagtcctacagtgtgggtgccagtgggagctcttccaggaaaagacatcgctcccgggaaaggtcacctagccggtcccgggagagcagcaggaggcaccgggatctgcttcataatgaagatcggcatgatgattatttccaagaaaggaaccgggagcatgagagacaccgggatagagaacgggaccggcaccactgagaaaggagtctggttggaagcaaatgtttttttaatggacttgcatctcctcaccttgatcaggactaaaggacggaggccgccccacccccttccctttcctccaaacccctaactccctccagacacccagggaataccctctgccccacaggattgaagactgcttggcagtcctcccaatcccacacctcctgtttgccaggggaaagaacctaaagacttcgtgtgattgggaggggtggcagacaggaagaaaacatgtccaggcccctggtctccatagagaatggtgctttgtccaagaaaacgtatgagtttctgattctccgggagccgttcaatggtgaggttgatgggaagacttccttcccaaagaaaatagatcctccatgcaggatctaggagagtgactgggtgtgccaaaatatgcccagggtcctgccctcagcactagatttaatggggccaagagggtccaaaccccttgctaacataccacttctttgtttaactcctttacctttccagccctttgaggagggaccatgagaacagaaattaccttatgaaaagctacttctgttcctgctttccctctcacgtattgacggtttatttctttgacctcccagagggctgaactctttcaactctgcgctgcccagccttctcagtggacttgcccctcctaagcagagaaggcctatgaggttgcttgctgctgggaagcctggcagagccaattaccaccctctgctgcttagtgcttgggtacctcttgcaataaccagctcttagttgttccctttccctggggcttttccatttaacacatggagcccttcccccagaaggctacttccttgttttagaggaaggtactgcccattgggagatggggacattgggacctcagcaatgaagaacccttgtgaagtaaccaggaggaatggggaaagaagcaagttgggcaggatatggcctacttccataggcttttcttttttcaggtttgatgtaagcatgggcttacatcccccaggtacatacttttacttattgtgggataacctggcactagtaggcaggtaaagtcacaaatttggtgtcttttcaccttttgactgttgacttaatagctcctctcactctgcctggagatacttcctgcctcagatgaggagccagaagaaacagagcccgacttgaatgaactcagctcagagttctaaggaccagcattctgggggccattttctctacaggcaaatggaattgcttttccataacatccaaattgtaatgtggttgctgctgaaggaggaggcagcagcgaggtcctgcggtacccatggggtgatgctacttctgcatgcatctacagggcatctgacacctaacatgagacgtggcatgtgagatgagacttggcatgtgagacatagggtcactagagacccttctgggtcagaggagagagactgaattggactaaacccgtcctctgttcccagcacgtttctcatatagccctcagtcactgagggagtcccccgcaggattggagaggcacattcccttgggacagaggctacaggttggagctttttttcccctgtcccccaaccccatccccacctccacttcagaacatggcaccccacccaactggccaagtgttaagtgatgtgcttattgagagcaactccgggtgtcttttaaaatgtagagaaaaggtgacagtttaaggaaaaatatatatagaataccagaaatgccgtttacccggagaatttttttctccccatttgttttgtttttactcaatgacaccatttttagttttatttcctgatagcaaaaggaaaaaaaacacccatccctcaaaaaggccaaggtcccgtccccctgttgtcggtgatttgtttgtctttctgataggttgaaaattgtgtaataaacttgatgacgctgtcaatcttttatactgcattgtatttttttccttttgtaacaaaatatttttaaataataaatggggtgtgagctgttttatggaaaaaaaatt

SEQ ID NO: 320199 - DNA, 2827 bp, Homo sapiens
  misc_feature (86)..(86): n is a, c, g, or t
caagaaaggaaccgggagcatgagagacaccgggatagagaacgggaccggcaccactgagaaaggagtctggttggaagcaaatntttttttaatggacttgcatctcctcctcctggtatccactaccagcatctcatgcccccacctcctcgattacctcctcatcttgctgtacctccccctggggccatcccacctgcccttcacctcaatccagccttcttccccccaccaaacgctacagtggggcctccaccagatacttacatgaaggcctctgccccctataaccaccatggcagccgagattcgggccctccaccctctacagtgagtgaagccgaatttgaagatatcatgaagcgaaacagagcaatttccagcagtgccatttccaaagcagtatctggagccagtgcaggggattacagtgacgcaattgagacgctgctcacagccattgcggttatcaaacagtcccgggttgccaatgatgagcgttgccgtgtcctcatctcctctcttaaggactgtcttcatggcattgaagccaagtcctacagtgtgggtgccagtgggagctcttccaggaaaagacatcgctcccgggaaaggtcacctagccggtcccgggagagcagcaggaggcaccgggatctgcttcataatgaagatcggcatgatgattatttccaagaaaggaaccgggagcatgagagacaccgggatagagaacgggaccggcaccactgagaaaggagtctggttggaagcaaatgtttttttaatggacttgcatctcctcaccttgatcaggactaaaggacggaggccgccccacccccttccctttcctccaaacccctaactccctccagacacccagggaataccctctgccccacaggattgaagactgcttggcagtcctcccaatcccacacctcctgtttgccaggggaaagaacctaaagacttcgtgtgattgggaggggtggcagacaggaagaaaacatgtccaggcccctggtctccatagagaatggtgctttgtccaagaaaacgtatgagtttctgattctccgggagccgttcaatggtgaggttgatgggaagacttccttcccaaagaaaatagatcctccatgcaggatctaggagagtgactgggtgtgccaaaatatgcccagggtcctgccctcagcactagatttaatggggccaagagggtccaaaccccttgctaacataccacttctttgtttaactcctttacctttccagccctttgaggagggaccatgagaacagaaattaccttatgaaaagctacttctgttcctgctttccctctcacgtattgacggtttatttctttgacctcccagagggctgaactctttcaactctgcgctgcccagccttctcagtggacttgcccctcctaagcagagaaggcctatgaggttgcttgctgctgggaagcctggcagagccaattaccaccctctgctgcttagtgcttgggtacctcttgcaataaccagctcttagttgttccctttccctggggcttttccatttaacacatggagcccttcccccagaaggctacttccttgttttagaggaaggtactgcccattgggagatggggacattgggacctcagcaatgaagaacccttgtgaagtaaccaggaggaatggggaaagaagcaagttgggcaggatatggcctacttccataggcttttcttttttcaggtttgatgtaagcatgggcttacatcccccaggtacatacttttacttattgtgggataacctggcactagtaggcaggtaaagtcacaaatttggtgtcttttcaccttttgactgttgacttaatagctcctctcactctgcctggagatacttcctgcctcagatgaggagccagaagaaacagagcccgacttgaatgaactcagctcagagttctaaggaccagcattctgggggccattttctctacaggcaaatggaattgcttttccataacatccaaattgtaatgtggttgctgctgaaggaggaggcagcagcgaggtcctgcggtacccatggggtgatgctacttctgcatgcatctacagggcatctgacacctaacatgagacgtggcatgtgagatgagacttggcatgtgagacatagggtcactagagacccttctgggtcagaggagagagactgaattggactaaacccgtcctctgttcccagcacgtttctcatatagccctcagtcactgagggagtcccccgcaggattggagaggcacattcccttgggacagaggctacaggttggagctttttttcccctgtcccccaaccccatccccacctccacttcagaacatggcaccccacccaactggccaagtgttaagtgatgtgcttattgagagcaactccgggtgtcttttaaaatgtagagaaaaggtgacagtttaaggaaaaatatatatagaataccagaaatgccgtttacccggagaatttttttctccccatttgttttgtttttactcaatgacaccatttttagttttatttcctgatagcaaaaggaaaaaaaacacccatccctcaaaaaggccaaggtcccgtccccctgttgtcggtgatttgtttgtctttctgataggttgaaaattgtgtaataaacttgatgacgctgtcaatcttttatactgcattgtatttttttccttttgtaacaaaatatttttaaataataaatggggtgtgagctgttttatggaaaaaaaatt

SEQ ID NO: 320200 - DNA, 3551 bp, Homo sapiens
cggcggcggggggggcgggacctggggcggagagcggttcgcgcgcttcgggcctagtccggactcgccgccgccgccgccatattcccgtggcatcttccttactttgtccatcctccggactcgcgatcttccttccggagccatgtcagaaggagtggacttgattgatatatatgctgacgaggagttcaaccaggacccagagttcaacaatacagatcagattgacctgtatgatgatgtgctgacagccacctcacagccctcagatgacagaagcagcagcactgaaccacctcctcctgttcgccaggagccatctcccaagcccaacaacaagacccctgcaattctgtatacctacagtggcctgcgtaatagacgagctgccgtttatgtgggcagcttctcctggtggaccacagaccagcagctgatccaggttattcgctctataggagtctatgatgtggtggagttgaaatttgcagagaatcgagcaaatggccagtccaaagggtatgctgaggtggtggtagcctctgaaaactctgtccacaaattgttggaactcctaccagggaaagttcttaatggagaaaaagtggacgtgaggccggccacccggcagaacctgtcacagtttgaggcacaggctcggaaacgaatacctccacgggcccattcccgagattctagtgattctgctgatggacgggccacaccctctgagaaccttgtaccctcatctgctcgtgtggataagccccccagtgtgctgccctacttcaatcgtcctccttcggcccttcccctgatgggtctgcccccaccaccaattccacccccaccacctctctcctcaagctttggggtccctcctcctcctcctggtatccactaccagcatctcatgcccccacctcctcgattacctcctcatcttgctgtacctccccctggggccatcccacctgcccttcacctcaatccagccttcttccccccaccaaacgctacagtggggcctccaccagatacttacatgaaggcctctgccccctataaccaccatggcagccgagattcgggccctccaccctctacagtgagtgaagccgaatttgaagatatcatgaagcgaaacagagcaatttccagcagtgccatttccaaagcagtatctggagccagtgcaggggattacagtgacgcaattgagacgctgctcacagccattgcggttatcaaacagtcccgggttgccaatgatgagcgttgccgtgtcctcatctcctctcttaaggactgtcttcatggcattgaagccaagtcctacagtgtgggtgccagtgggagctcttccaggaaaagacatcgctcccgggaaaggtcacctagccggtcccgggagagcagcaggaggcaccgggatctgcttcataatgaagatcggcatgatgattatttccaagaaaggaaccgggagcatgagagacaccgggatagagaacgggaccggcaccactgagaaaggagtctggttggaagcaaatgtttttttaatggacttgcatctcctcaccttgatcaggactaaaggacggaggccgccccacccccttccctttcctccaaacccctaactccctccagacacccagggaataccctctgccccacaggattgaagactgcttggcagtcctcccaatcccacacctcctgtttgccaggggaaagaacctaaagacttcgtgtgattgggaggggtggcagacaggaagaaaacatgtccaggcccctggtctccatagagaatggtgctttgtccaagaaaacgtatgagtttctgattctccgggagccgttcaatggtgaggttgatgggaagacttccttcccaaagaaaatagatcctccatgcaggatctaggagagtgactgggtgtgccaaaatatgcccagggtcctgccctcagcactagatttaatggggccaagagggtccaaaccccttgctaacataccacttctttgtttaactcctttacctttccagccctttgaggagggaccatgagaacagaaattaccttatggacctcccagagggctgaactctttcaactctgcgctgcccagccttctcagtggacttgcccctcctaagcagagaaggcctatgaggttgcttgctgctgggaagcctggcagagccaattaccaccctctgctgcttagtgcttgggtacctcttgcaataaccagctcttagttgttccctttccctggggcttttccatttaacacatggagcccttcccccagaaggctacttccttgttttagaggaaggtactgcccattgggagatggggacattgggacctcagcaatgaagaacccttgtgaagtaaccaggaggaatggggaaagaagcaagttgggcaggatatggcctacttccataggcttttcttttttcaggtttgatgtaagcatgggcttacatcccccaggtacatacttttacttattgtgggataacctggcactagtaggcaggtaaagtcacaaatttggtgtcttttcaccttttgactgttgacttaatagctcctctcactctgcctggagatacttcctgcctcagatgaggagccagaagaaacagagcccgacttgaatgaactcagctcagagttctaaggaccagcattctgggggccattttctctacaggcaaatggaattgcttttccataacatccaaattgtaatgtggttgctgctgaaggaggaggcagcagcgaggtcctgcggtacccatggggtgatgctacttctgcatgcatctacagggcatctgacacctaacatgagacgtggcatgtgagatgagacttggcatgtgagacatagggtcactagagacccttctgggtcagaggagagagactgaattggactaaacccgtcctctgttcccagcacgtttctcatatagccctcagtcactgagggagtcccccgcaggattggagaggcacattcccttgggacagaggctacaggttggagctttttttcccctgtcccccaaccccatccccacctccacttcagaacatggcaccccacccaactggccaagtgttaagtgatgtgcttattgagagcaactccgggtgtcttttaaaatgtagagaaaaggtgacagtttaaggaaaaatatatatagaataccagaaatgccgtttacccggagaatttttttctccccatttgttttgtttttactcaatgacaccatttttagttttatttcctgatagcaaaaggaaaaaaaacacccatccctcaaaaaggccaaggtcccgtccccctgttgtcggtgatttgtttgtctttctgataggttgaaaattgtgtaataaacttgatgacgctgtcaatcttttatactgcattgtatttttttccttttgtaacaaaatatttttaaataataaatggggtgtgagctgttttatggaaaaaaaatt

SEQ ID NO: 320201 - DNA, 2661 bp, Homo sapiens
aaagaactgaatcaggcaccccaagaatgtcaatttcttacattctcaccctaaggactcttaattccatctgtagtgaccaagttatggcttaggaagtttcatgttgggaagatggtacatggtcctcatttatagcaaccttttagttagaaatgaatcatatttatattctatgatgacagctgttccctgagagtgaaaggtacattttgtccagaggcagcaatagaacagtagccttctttgtccatcttttctcggcgtaagacccagttctggggcctgaaggctaattggcccacttgaaggaatctctgatttctgcctgcattccaacattggcaccaaaatgtagccatggagatttaagaattcagtgctgtggcttgcttctcttggtgtacaagttatcctctgcaacctgtgtcttcaactttttgtagttctcaactatgtcagttatctcattattttaggacattatcctacttgaaatatagtcattctcacgtcattcctgtcctcgttatccattgaaaactgagctttctcttcaatttggatcgaattcaaagattcagaagccctaatggagtctggttggaagcaaatgtttttttaatggacttgcatctcctcaccttgatcaggactaaaggacggaggccgccccacccccttccctttcctccaaacccctaactccctccagacacccagggaataccctctgccccacaggattgaagactgcttggcagtcctcccaatcccacacctcctgtttgccaggggaaagaacctaaagacttcgtgtgattgggaggggtggcagacaggaagaaaacatgtccaggcccctggtctccatagagaatggtgctttgtccaagaaaacgtatgagtttctgattctccgggagccgttcaatggtgaggttgatgggaagacttccttcccaaagaaaatagatcctccatgcaggatctaggagagtgactgggtgtgccaaaatatgcccagggtcctgccctcagcactagatttaatggggccaagagggtccaaaccccttgctaacataccacttctttgtttaactcctttacctttccagccctttgaggagggaccatgagaacagaaattaccttatgaaaagctacttctgttcctgctttccctctcacgtattgacggtttatttctttgacctcccagagggctgaactctttcaactctgcgctgcccagccttctcagtggacttgcccctcctaagcagagaaggcctatgaggttgcttgctgctgggaagcctggcagagccaattaccaccctctgctgcttagtgcttgggtacctcttgcaataaccagctcttagttgttccctttccctggggcttttccatttaacacatggagcccttcccccagaaggctacttccttgttttagaggaaggtactgcccattgggagatggggacattgggacctcagcaatgaagaacccttgtgaagtaaccaggaggaatggggaaagaagcaagttgggcaggatatggcctacttccataggcttttcttttttcaggtttgatgtaagcatgggcttacatcccccaggtacatacttttacttattgtgggataacctggcactagtaggcaggtaaagtcacaaatttggtgtcttttcaccttttgactgttgacttaatagctcctctcactctgcctggagatacttcctgcctcagatgaggagccagaagaaacagagcccgacttgaatgaactcagctcagagttctaaggaccagcattctgggggccattttctctacaggcaaatggaattgcttttccataacatccaaattgtaatgtggttgctgctgaaggaggaggcagcagcgaggtcctgcggtacccatggggtgatgctacttctgcatgcatctacagggcatctgacacctaacatgagacgtggcatgtgagatgagacttggcatgtgagacatagggtcactagagacccttctgggtcagaggagagagactgaattggactaaacccgtcctctgttcccagcacgtttctcatatagccctcagtcactgagggagtcccccgcaggattggagaggcacattcccttgggacagaggctacaggttggagctttttttcccctgtcccccaaccccatccccacctccacttcagaacatggcaccccacccaactggccaagtgttaagtgatgtgcttattgagagcaactccgggtgtcttttaaaatgtagagaaaaggtgacagtttaaggaaaaatatatatagaataccagaaatgccgtttacccggagaatttttttctccccatttgttttgtttttactcaatgacaccatttttagttttatttcctgatagcaaaaggaaaaaaaacacccatccctcaaaaaggccaaggtcccgtccccctgttgtcggtgatttgtttgtctttctgataggttgaaaattgtgtaataaacttgatgacgctgtcaatcttttatactgcattgtatttttttccttttgtaacaaaatatttttaaataataaatggggtgtgagctgttttatggaaaaaaaatt

SEQ ID NO: 320202 - DNA, 3491 bp, Homo sapiens
  misc_feature (3425)..(3425): n is a, c, g, or t
  misc_feature (3433)..(3433): n is a, c, g, or t
  misc_feature (3490)..(3490): n is a, c, g, or t
cggcggcggggggggcgggacctggggcggagagcggttcgcgcgcttcgggcctagtccggactcgccgccgccgccgccatattcccgtggcatcttccttactttgtccatcctccggactcgcgatcttccttccggagccatgtcagaaggagtggacttgattgatatatatgctgacgaggagttcaaccaggacccagagttcaacaatacagatcagattgacctgtatgatgatgtgctgacagccacctcacagccctcagatgacagaagcagcagcactgaaccacctcctcctgttcgccaggagccatctcccaagcccaacaacaagacccctgcaattctgtatacctacagtggcctgcgtaatagacgagctgccgtttatgtgggcagcttctcctggtggaccacagaccagcagctgatccaggttattcgctctataggagtctatgatgtggtggagttgaaatttgcagagaatcgagcaaatggccagtccaaagggtatgctgaggtggtggtagcctctgaaaactctgtccacaaattgttggaactcctaccagggaaagttcttaatggagaaaaagtggacgtgaggccggccacccggcagaacctgtcacagtttgaggcacaggctcggaaacgaatacctccacgggcccattcccgagattctagtgattctgctgatggacgggccacaccctctgagaaccttgtaccctcatctgctcgtgtggataagccccccagtgtgctgccctacttcaatcgtcctccttcggcccttcccctgatgggtctgcccccaccaccaattccacccccaccacctctctcctcaagctttggggtccctcctcctcctcctggtatccactaccagcatctcatgcccccacctcctcgattacctcctcatcttgctgtacctccccctggggccatcccacctgcccttcacctcaatccagccttcttccccccaccaaacgctacagtggggcctccaccagatacttacatgaaggcctctgccccctataaccaccatggcagccgagattcgggccctccaccctctacagtgagtgaagccgaatttgaagatatcatgaagcgaaacagagcaatttccagcagtgccatttccaaagcagtatctggagccagtgcaggggattacagtgacgcaattgagacgctgctcacagccattgcggttatcaaacagtcccgggttgccaatgatgagcgttgccgtgtcctcatctcctctcttaaggactgtcttcatggcattgaagccaagtcctacagtgtgggtgccagtgggagctcttccaggaaaagacatcgctcccgggaaaggtcacctagccggtcccgggagagcagcaggaggcaccgggatctgcttcataatgaagatcggcatgatgattatttccaagaaaggaaccgggagcatgagagacaccgggatagagaacgggaccggcaccactgagaaaggagtctggttggaagcaaatgtttttttaatggacttgcatctcctcaccttgatcaggactaaaggacggaggccgccccacccccttccctttcctccaaacccctaactccctccagacacccagggaataccctctgccccacaggattgaagactgcttggcagtcctcccaatcccacacctcctgtttgccaggggaaagaacctaaagacttcgtgtgattgggaggggtggcagacaggaagaaaacatgtccaggcccctggtctccatagagaatggtgctttgtccaagaaaacgtatgagtttctgattctccgggagccgttcaatggtgaggttgatgggaagacttccttcccaaagaaaatagatcctccatgcaggatctaggagagtgactgggtgtgccaaaatatgcccagggtcctgccctcagcactagatttaatggggccaagagggtccaaaccccttgctaacataccacttctttgtttaactcctttacctttccagccctttgaggagggaccatgagaacagaaattaccttatgaaaagctacttctgttcctgctttccctctcacgtattgacggtttatttctttgacctcccagagggctgaactctttcaactctgcgctgcccagccttctcagtggacttgcccctcctaagcagagaaggcctatgaggttgcttgctgctgggaagcctggcagagccaattaccaccctctgctgcttagtgcttgggtacctcttgcaataaccagctcttagttgttccctttccctggggcttttccatttaacacatggagcccttcccccagaaggctacttccttgttttagaggaaggtactgcccattgggagatggggacattgggacctcagcaatgaagaacccttgtgaagtaaccaggaggaatggggaaagaagcaagttgggcaggatatggcctacttccataggcttttcttttttcaggtttgatgtaagcatgggcttacatcccccaggtacatacttttacttattgtgggataacctggcactagtaggcaggtaaagtcacaaatttggtgtcttttcaccttttgactgttgacttaatagctcctctcactctgcctggagatacttcctgcctcagatgaggagccagaagaaacagagcccgacttgaatgaactcagctcagagttctaaggaccagcattctgggggccattttctctacaggcaaatggaattgcttttccataacatccaaattgtaatgtggttgctgctgaaggaggaggcagcagcgaggtcctgcggtacccatggggtgatgctacttctgcatgcatctacagggcatctgacacctaacatgagacgtggcatgtgagatgagacttggcatgtgagacatagggtcactagagacccttctgggtcagaggagagagactgaattggactaaacccgtcctctgttcccagcacgtttctcatatagccctcagtcactgagggagtcccccgcaggattggagaggcacattcccttgggacagaggctacaggttggagctttttttcccctgtcccccaaccccatccccacctccacttcagaacatggcaccccacccaactggccaagtgttaagtgatgtgcttattgagagcaactccgggtgtcttttaaaatgtagagaaaaggtgacagtttaaggaaaaatatatatagaataccagaaatgccgtttacccggagaatttttttctccccatttgttttgtttttactcaatgacaccatttttagttttatttcctgatagcaaaagcacctcctcaaaaggcaggtccgnccctgtgncgggttggttgcttctgtggtgaattggtataattgtgagtgcatcttttctgatgnt

SEQ ID NO: 320203 - DNA, 3160 bp, Homo sapiens
  misc_feature (2902)..(2902): n is a, c, g, or t
  misc_feature (3009)..(3009): n is a, c, g, or t
  misc_feature (3015)..(3017): n is a, c, g, or t
cggcggcggggggggcgggacctggggcggagagcggttcgcgcgcttcgggcctagtccggactcgccgccgccgccgccatattcccgtggcatcttccttactttgtccatcctccggactcgcgatcttccttccggagccatgtcagaaggagtggacttgattgatatatatgctgacgaggagttcaaccaggacccagagttcaacaatacagatcagattgacctgtatgatgatgtgctgacagccacctcacagccctcagatgacagaagcagcagcactgaaccacctcctcctgttcgccaggagccatctcccaagcccaacaacaagacccctgcaattctgtatacctacagtggcctgcgtaatagacgagctgccgtttatgtgggcagcttctcctggtggaccacagaccagcagctgatccaggttattcgctctataggagtctatgatgtggtggagttgaaatttgcagagaatcgagcaaatggccagtccaaagggtatgctgaggtggtggtagcctctgaaaactctgtccacaaattgttggaactcctaccagggaaagttcttaatggagaaaaagtggacgtgaggccggccacccggcagaacctgtcacagtttgaggcacaggctcggaaacgaatacctccacgggcccattcccgagattctagtgattctgctgatggacgggccacaccctctgagaaccttgtaccctcatctgctcgtgtggataagccccccagtgtgctgccctacttcaatcgtcctccttcggcccttcccctgatgggtctgcccccaccaccaattccacccccaccacctctctcctcaagctttggggtccctcctcctcctcctggtatccactaccagcatctcatgcccccacctcctcgattacctcctcatcttgctgtacctccccctggggccatcccacctgcccttcacctcaatccagccttcttccccccaccaaacgctacagtggggcctccaccagatacttacatgaaggcctctgccccctataaccaccatggcagccgagattcgggccctccaccctctacagtgagtgaagccgaatttgaagatatcatgaagcgaaacagagcaatttccagcagtgccatttccaaagcagtatctggagccagtgcaggggattacagtgacgcaattgagacgctgctcacagccattgcggttatcaaacagtcccgggttgccaatgatgagcgttgccgtgtcctcatctcctctcttaaggactgtcttcatggcattgaagccaagtcctacagtgtgggtgccagtgggagctcttccaggaaaagacatcgctcccgggaaaggtcacctagccggtcccgggagagcagcaggaggcaccgggatctgcttcataatgaagatcggcatgatgattatttccaagaaaggaaccgggagcatgagagacaccgggatagagaacgggaccggcaccactgagaaaggagtctggttggaagcaaatgtttttttaatggacttgcatctcctcaccttgatcaggactaaaggacggaggccgccccacccccttccctttcctccaaacccctaactccctccagacacccagggaataccctctgccccacaggattgaagactgcttggcagtcctcccaatcccacacctcctgtttgccaggggaaagaacctaaagacttcgtgtgattgggaggggtggcagacaggaagaaaacatgtccaggcccctggtctccatagagaatggtgctttgtccaagaaaacgtatgagtttctgattctccgggagccgttcaatggtgaggttgatgggaagacttccttcccaaagaaaatagatcctccatgcaggatctaggagagtgactgggtgtgccaaaatatgcccagggtcctgccctcagcactagatttaatggggccaagagggtccaaaccccttgctaacataccacttctttgtttaactcctttacctttccagccctttgaggagggaccatgagaacagaaattaccttatgaaaagctacttctgttcctgctttccctctcacgtattgacggtttatttctttgacctcccagagggctgaactctttcaactctgcgctgcccagccttctcagtggacttgcccctcctaagcagagaaggcctatgaggttgcttgctgctgggaagcctggcagagccaattaccaccctctgctgcttagtgcttgggtacctcttgcaataaccagctcttagttgttccctttccctggggcttttccatttaacacatggagcccttcccccagaaggctacttccttgttttagaggaaggtactgcccattgggagatggggacattgggacctcagcaatgaagaacccttgtgaagtaaccaggaggaatggggaaagaagcaagttgggcaggatatggcctacttccataggcttttcttttttcaggtttgatgtaagcatgggcttacatcccccaggtacatacttttacttattgtgggataacctggcactagtaggcaggtaaagtcacaaatttggtgtcttttcaccttttgactgttgacttaatagctcctctcactctgcctggagatacttcctgcctcagatgaggagccagaagaaacagagcccgacttgaatgaactcagctcagagttctaaggaccagcattctgggggccattttctctacaggcaaatggaattgcttttccataacatccaaattgtaatgtggttgctgctgaaggaggaggcagcagcgaggtcctgcttatctggtactgcccattgngagatggggacattgggacctcagcaatgaagaacccttgtgaagtaaccaggaggaatggggaaagaagcaagttgggcaggatatggcctacttccataggcttntctttnnncaggtttgatgtaagcatgggcttacatcccccaggtacatacttttacttattgtgggatacctggcactagtaggcaggtaagtcacaattggtgtctttcaccttttgactgttgaattaatagctcctctcactctgcc

SEQ ID NO: 320204 - DNA, 1914 bp, Homo sapiens
cggcggcggggggggcgggacctggggcggagagcggttcgcgcgcttcgggcctagtccggactcgccgccgccgccgccatattcccgtggcatcttccttactttgtccatcctccggactcgcgatcttccttccggagccatgtcagaaggagtggacttgattgatatatatgctgacgaggagttcaaccaggacccagagttcaacaatacagatcagattgacctgtatgatgatgtgctgacagccacctcacagccctcagatgacagaagcagcagcactgaaccacctcctcctgttcgccaggagccatctcccaagcccaacaacaagacccctgcaattctgtatacctacagtggcctgcgtaatagacgagctgccgtttatgtgggcagcttctcctggtggaccacagaccagcagctgatccaggttattcgctctataggagtctatgatgtggtggagttgaaatttgcagagaatcgagcaaatggccagtccaaagggtatgctgaggtggtggtagcctctgaaaactctgtccacaaattgttggaactcctaccagggaaagttcttaatggagaaaaagtggacgtgaggccggccacccggcagaacctgtcacagtttgaggcacaggctcggaaacgaatacctccacgggcccattcccgagattctagtgattctgctgatggacgggccacaccctctgagaaccttgtaccctcatctgctcgtgtggataagccccccagtgtgctgccctacttcaatcgtcctccttcggcccttcccctgatgggtctgcccccaccaccaattccacccccaccacctctctcctcaagctttggggtccctcctcctcctcctggtatccactaccagcatctcatgcccccacctcctcgattacctcctcatcttgctgtacctccccctggggccatcccacctgcccttcacctcaatccagccttcttccccccaccaaacgctacagtggggcctccaccagatacttacatgaaggcctctgccccctataaccaccatggcagccgagattcgggccctccaccctctacagtgagtgaagccgaatttgaagatatcatgaagcgaaacagagcaatttccagcagtgccatttccaaagcagtatctggagccagtgcaggggattacagtgacgcaattgagacgctgctcacagccattgcggttatcaaacagtcccgggttgccaatgatgagcgttgccgtgtcctcatctcctctcttaaggactgtcttcatggcattgaagccaagtcctacagtgtgggtgccagtgggagctcttccaggaaaagacatcgctcccgggaaaggtcacctagccggtcccgggagagcagcaggaggcaccgggatctgcttcataatgaagatcggcatgatgattatttccaagaaaggaaccgggagcatgagagacaccgggatagagaacgggaccggcaccactgagaaaggtggggagaagccccgttcctggctgctgggggattttttattaaaaaaagatttatagtgaagaattctctctctttaaagcaaaagtaaatgcagcaagggtagggggaacttctgatttacataactggaatttcagggcagattttctgcacatttatggggagtcttaccctgagattcagctgtttctgcttgtttcttgactgccttaacctggtatctgagtgagagtatggtgtctgcattcaggtaccaatttgaatcccagtttctccactaataattggccatattactttctgttccacagtttcatttgtaaatgaagataataaaagcaactgtcccagtgacttgctaagttttagtga

SEQ ID NO: 320205 - DNA, 1494 bp, Homo sapiens
cggcggcggggggggcgggacctggggcggagagcggttcgcgcgcttcgggcctagtccggactcgccgccgccgccgccatattcccgtggcatcttccttactttgtccatcctccggactcgcgatcttccttccggagccatgtcagaaggagtggacttgattgatatatatgctgacgaggagttcaaccaggacccagagttcaacaatacagatcagattgacctgtatgatgatgtgctgacagccacctcacagccctcagatgacagaagcagcagcactgaaccacctcctcctgttcgccaggagccatctcccaagcccaacaacaagacccctgcaattctgtatacctacagtggcctgcgtaatagacgagctgccgtttatgtgggcagcttctcctggtggaccacagaccagcagctgatccaggttattcgctctataggagtctatgatgtggtggagttgaaatttgcagagaatcgagcaaatggccagtccaaagggtatgctgaggtggtggtagcctctgaaaactctgtccacaaattgttggaactcctaccagggaaagttcttaatggagaaaaagtggacgtgaggccggccacccggcagaacctgtcacagtttgaggcacaggctcggaaacgaatacctccacgggcccattcccgagattctagtgattctgctgatggacgggccacaccctctgagaaccttgtaccctcatctgctcgtgtggataagccccccagtgtgctgccctacttcaatcgtcctccttcggcccttcccctgatgggtctgcccccaccaccaattccacccccaccacctctctcctcaagctttggggtccctcctcctcctcctggtatccactaccagcatctcatgcccccacctcctcgattacctcctcatcttgctgtacctccccctggggccatcccacctgcccttcacctcaatccagccttcttccccccaccaaacgctacagtggggcctccaccagatacttacatgaaggcctctgccccctataaccaccatggcagccgagattcgggccctccaccctctacagtgagtgaagccgaatttgaagatatcatgaagcgaaacagagcaatttccagcagtgccatttccaaagcagtatctggagccagtgcaggtaactcagtgcttacctttgctgccttctccttaacctttacttttttttcctgattttgtcatttctactggcaaaagttcaacaagataaagttggagtactgtagatatcaagagcggcatactttgaagagcaatatgtaacctgatttcttggccttggggaagctccggcagtattacttagtctgtatctaggcctgccctcatgaaaaccaacttaatgcctagaatataaataattaataccatctcgatgtggtgtcagggatcctctagatacaccagga

SEQ ID NO: 320206 - DNA, 1120 bp, Homo sapiens
cggcggcggggggggcgggacctggggcggagagcggttcgcgcgcttcgggcctagtccggactcgccgccgccgccgccatattcccgtggcatcttccttactttgtccatcctccggactcgcgatcttccttccggagccatgtcagaaggagtggacttgattgatatatatgctgacgaggagttcaaccaggacccagagttcaacaatacagatcagattgacctgtatgatgatgtgctgacagccacctcacagccctcagatgacagaagcagcagcactgaaccacctcctcctgttcgccaggagccatctcccaagcccaacaacaagacccctgcaattctgtatacctacagtggcctgcgtaatagacgagctgccgtttatgtgggcagcttctcctggtggaccacagaccagcagctgatccaggttattcgctctataggagtctatgatgtggtggagttgaaatttgcagagaatcgagcaaatggccagtccaaagggtatgctgaggtggtggtagcctctgaaaactctgtccacaaattgttggaactcctaccagggaaagttcttaatggagaaaaagtggacgtgaggccggccacccggcagaacctgtcacagtttgaggcacaggctcggaaacgtgagtgtgtccgagtcccaagagggggaatacctccacgggcccattcccgagattctagtgattctgctgatggacgggccacaccctctgagaaccttgtaccctcatctgctcgtgtggataagccccccagtgtgctgccctacttcaatcgtcctccttcggcccttcccctgatgggtctgcccccaccaccaattccacccccaccacctctctcctcaagctttggggtccctcctcctcctcctggtatccactaccagcatctcatgcccccacctcctcgattacctcctcatcttgctgtacctccccctggggccatcccacctgcccttcacctcaatccagccttcttccccccaccaaacgctacagtggggcctccaccagatacttacatgaaggcctctggtcgagcggccgttaatttagtagtagtaggc

SEQ ID NO: 320207 - DNA, 353 bp, Homo sapiens
atggggattcatcatgttgaccaggctggcctcaaactcctgacttcaagcgatctccccgctttggcctcccaaagtgctgggattgcaggtgtgagccaccgcgcctggccctaaatagattttttaaaatggatgcttagcaagaagaaaaaaaacacccatccctcaaaaaggccaaggtcccgtccccctgttgtcggtgatttgtttgtctttctgataggttgaaaattgtgtaataaacttgatgacgctgtcaatcttttatactgcattgtatttttttccttttgtaacaaaatatttttaaataataaatggggtgtgagctgttttatggaaaaaaaatt

SEQ ID NO: 320208 - DNA, 345 bp, Homo sapiens
gtgagtgtgggtaaccaaaaatgcttaggggtgggctggagggagagcactgggaggtgatggcattttcagaaactactgttgcactgttttgtgctctgatggggttggatttctttttcctgggatcaggttggattgatctctgaaagagaactatcctgaggacgtactggtgccgaagaaagcaatgattaagtgggtagttgctttttctgccatcttgttactgcccctgaccctggggctttatgtctagcagggtcatctgagggacgagatttcagagtgaacaccttgaactcttggtggtcattagatggtcctgtgataatggtgggtgat

SEQ ID NO: 320209 - DNA, 3605 bp, Homo sapiens
cggcggcggggggggcgggacctggggcggagagcggttcgcgcgcttcgggcctagtccggactcgccgccgccgccgccatattcccgtggcatcttccttactttgtccatcctccggactcgcgatcttccttccggagccatgtcagaaggagtggacttgattgatatatatgctgacgaggagttcaaccaggacccagagttcaacaatacagatcagattgacctgtatgatgatgtgctgacagccacctcacagccctcagatgacagaagcagcagcactgaaccacctcctcctgttcgccaggagccatctcccaagcccaacaacaagacccctgcaattctgtatacctacagtggcctgcgtaatagacgagctgccgtttatgtgggcagcttctcctggtggaccacagaccagcagctgatccaggttattcgctctataggagtctatgatgtggtggagttgaaatttgcagagaatcgagcaaatggccagtccaaagggtatgctgaggtggtggtagcctctgaaaactctgtccacaaattgttggaactcctaccagggaaagttcttaatggagaaaaagtggacgtgaggccggccacccggcagaacctgtcacagtttgaggcacaggctcggaaacgaatacctccacgggcccattcccgagattctagtgattctgctgatggacgggccacaccctctgagaaccttgtaccctcatctgctcgtgtggataagccccccagtgtgctgccctacttcaatcgtcctccttcggcccttcccctgatgggtctgcccccaccaccaattccacccccaccacctctctcctcaagctttggggtccctcctcctcctcctggtatccactaccagcatctcatgcccccacctcctcgattacctcctcatcttgctgtacctccccctggggccatcccacctgcccttcacctcaatccagccttcttccccccaccaaacgctacagtggggcctccaccagatacttacatgaaggcctctgccccctataaccaccatggcagccgagattcgggccctccaccctctacagtgagtgaagccgaatttgaagatatcatgaagcgaaacagagcaatttccagcagtgccatttccaaagcagtatctggagccagtgcaggggattacagtgacgcaattgagacgctgctcacagccattgcggttatcaaacagtcccgggttgccaatgatgagcgttgccgtgtcctcatctcctctcttaaggactgtcttcatggcattgaagccaagtcctacagtgtgggtgccagtgggagctcttccaggaaaagacatcgctcccgggaaaggtcacctagccggtcccgggagagcagcaggaggcaccgggatctgcttcataatgaagatcggcatgatgattatttccaagaaaggaaccgggagcatgagagacaccgggatagagaacgggaccggcaccactgagaaaggagtctggttggaagcaaatgtttttttaatggacttgcatctcctcaccttgatcaggactaaaggacggaggccgccccacccccttccctttcctccaaacccctaactccctccagacacccagggaataccctctgccccacaggattgaagactgcttggcagtcctcccaatcccacacctcctgtttgccaggggaaagaacctaaagacttcgtgtgattgggaggggtggcagacaggaagaaaacatgtccaggcccctggtctccatagagaatggtgctttgtccaagaaaacgtatgagtttctgattctccgggagccgttcaatggtgaggttgatgggaagacttccttcccaaagaaaatagatcctccatgcaggatctaggagagtgactgggtgtgccaaaatatgcccagggtcctgccctcagcactagatttaatggggccaagagggtccaaaccccttgctaacataccacttctttgtttaactcctttacctttccagccctttgaggagggaccatgagaacagaaattaccttatgaaaagctacttctgttcctgctttccctctcacgtattgacggtttatttctttgacctcccagagggctgaactctttcaactctgcgctgcccagccttctcagtggacttgcccctcctaagcagagaaggcctatgaggttgcttgctgctgggaagcctggcagagccaattaccaccctctgctgcttagtgcttgggtacctcttgcaataaccagctcttagttgttccctttccctggggcttttccatttaacacatggagcccttcccccagaaggctacttccttgttttagaggaaggtactgcccattgggagatggggacattgggacctcagcaatgaagaacccttgtgaagtaaccaggaggaatggggaaagaagcaagttgggcaggatatggcctacttccataggcttttcttttttcaggtttgatgtaagcatgggcttacatcccccaggtacatacttttacttattgtgggataacctggcactagtaggcaggtaaagtcacaaatttggtgtcttttcaccttttgactgttgacttaatagctcctctcactctgcctggagatacttcctgcctcagatgaggagccagaagaaacagagcccgacttgaatgaactcagctcagagttctaaggaccagcattctgggggccattttctctacaggcaaatggaattgcttttccataacatccaaattgtaatgtggttgctgctgaaggaggaggcagcagcgaggtcctgcggtacccatggggtgatgctacttctgcatgcatctacagggcatctgacacctaacatgagacgtggcatgtgagatgagacttggcatgtgagacatagggtcactagagacccttctgggtcagaggagagagactgaattggactaaacccgtcctctgttcccagcacgtttctcatatagccctcagtcactgagggagtcccccgcaggattggagaggcacattcccttgggacagaggctacaggttggagctttttttcccctgtcccccaaccccatccccacctccacttcagaacatggcaccccacccaactggccaagtgttaagtgatgtgcttattgagagcaactccgggtgtcttttaaaatgtagagaaaaggtgacagtttaaggaaaaatatatatagaataccagaaatgccgtttacccggagaatttttttctccccatttgttttgtttttactcaatgacaccatttttagttttatttcctgatagcaaaaggaaaaaaaacacccatccctcaaaaaggccaaggtcccgtccccctgttgtcggtgatttgtttgtctttctgataggttgaaaattgtgtaataaacttgatgacgctgtcaatcttttatactgcattgtatttttttccttttgtaacaaaatatttttaaataataaatggggtgtgagctgttttatggaaaaaaaatt

SEQ ID NO: 320210 - DNA, 3567 bp, Homo sapiens
gaggaggcagagcgcgccgggccggtggcatcttccttactttgtccatcctccggactcgcgatcttccttccggagccatgtcagaaggagtggacttgattgatatatatgctgacgaggagttcaaccaggacccagagttcaacaatacagatcagattgacctgtatgatgatgtgctgacagccacctcacagccctcagatgacagaagcagcagcactgaaccacctcctcctgttcgccaggagccatctcccaagcccaacaacaagacccctgcaattctgtatacctacagtggcctgcgtaatagacgagctgccgtttatgtgggcagcttctcctggtggaccacagaccagcagctgatccaggttattcgctctataggagtctatgatgtggtggagttgaaatttgcagagaatcgagcaaatggccagtccaaagggtatgctgaggtggtggtagcctctgaaaactctgtccacaaattgttggaactcctaccagggaaagttcttaatggagaaaaagtggacgtgaggccggccacccggcagaacctgtcacagtttgaggcacaggctcggaaacgtgagtgtgtccgagtcccaagagggggaatacctccacgggcccattcccgagattctagtgattctgctgatggacgggccacaccctctgagaaccttgtaccctcatctgctcgtgtggataagccccccagtgtgctgccctacttcaatcgtcctccttcggcccttcccctgatgggtctgcccccaccaccaattccacccccaccacctctctcctcaagctttggggtccctcctcctcctcctggtatccactaccagcatctcatgcccccacctcctcgattacctcctcatcttgctgtacctccccctggggccatcccacctgcccttcacctcaatccagccttcttccccccaccaaacgctacagtggggcctccaccagatacttacatgaaggcctctgccccctataaccaccatggcagccgagattcgggccctccaccctctacagtgagtgaagccgaatttgaagatatcatgaagcgaaacagagcaatttccagcagtgccatttccaaagcagtatctggagccagtgcaggggattacagtgacgcaattgagacgctgctcacagccattgcggttatcaaacagtcccgggttgccaatgatgagcgttgccgtgtcctcatctcctctcttaaggactgtcttcatggcattgaagccaagtcctacagtgtgggtgccagtgggagctcttccaggaaaagacatcgctcccgggaaaggtcacctagccggtcccgggagagcagcaggaggcaccgggatctgcttcataatgaagatcggcatgatgattatttccaagaaaggaaccgggagcatgagagacaccgggatagagaacgggaccggcaccactgagaaaggagtctggttggaagcaaatgtttttttaatggacttgcatctcctcaccttgatcaggactaaaggacggaggccgccccacccccttccctttcctccaaacccctaactccctccagacacccagggaataccctctgccccacaggattgaagactgcttggcagtcctcccaatcccacacctcctgtttgccaggggaaagaacctaaagacttcgtgtgattgggaggggtggcagacaggaagaaaacatgtccaggcccctggtctccatagagaatggtgctttgtccaagaaaacgtatgagtttctgattctccgggagccgttcaatggtgaggttgatgggaagacttccttcccaaagaaaatagatcctccatgcaggatctaggagagtgactgggtgtgccaaaatatgcccagggtcctgccctcagcactagatttaatggggccaagagggtccaaaccccttgctaacataccacttctttgtttaactcctttacctttccagccctttgaggagggaccatgagaacagaaattaccttatgaaaagctacttctgttcctgctttccctctcacgtattgacggtttatttctttgacctcccagagggctgaactctttcaactctgcgctgcccagccttctcagtggacttgcccctcctaagcagagaaggcctatgaggttgcttgctgctgggaagcctggcagagccaattaccaccctctgctgcttagtgcttgggtacctcttgcaataaccagctcttagttgttccctttccctggggcttttccatttaacacatggagcccttcccccagaaggctacttccttgttttagaggaaggtactgcccattgggagatggggacattgggacctcagcaatgaagaacccttgtgaagtaaccaggaggaatggggaaagaagcaagttgggcaggatatggcctacttccataggcttttcttttttcaggtttgatgtaagcatgggcttacatcccccaggtacatacttttacttattgtgggataacctggcactagtaggcaggtaaagtcacaaatttggtgtcttttcaccttttgactgttgacttaatagctcctctcactctgcctggagatacttcctgcctcagatgaggagccagaagaaacagagcccgacttgaatgaactcagctcagagttctaaggaccagcattctgggggccattttctctacaggcaaatggaattgcttttccataacatccaaattgtaatgtggttgctgctgaaggaggaggcagcagcgaggtcctgcggtacccatggggtgatgctacttctgcatgcatctacagggcatctgacacctaacatgagacgtggcatgtgagatgagacttggcatgtgagacatagggtcactagagacccttctgggtcagaggagagagactgaattggactaaacccgtcctctgttcccagcacgtttctcatatagccctcagtcactgagggagtcccccgcaggattggagaggcacattcccttgggacagaggctacaggttggagctttttttcccctgtcccccaaccccatccccacctccacttcagaacatggcaccccacccaactggccaagtgttaagtgatgtgcttattgagagcaactccgggtgtcttttaaaatgtagagaaaaggtgacagtttaaggaaaaatatatatagaataccagaaatgccgtttacccggagaatttttttctccccatttgttttgtttttactcaatgacaccatttttagttttatttcctgatagcaaaaggaaaaaaaacacccatccctcaaaaaggccaaggtcccgtccccctgttgtcggtgatttgtttgtctttctgataggttgaaaattgtgtaataaacttgatgacgctgtcaatcttttatactgcattgtatttttttccttttgtaacaaaatatttttaaataataaatggggtgtgagctgttttatggaaaaaaaatt

SEQ ID NO: 320211 - DNA, 3528 bp, Homo sapiens
cggcggcggggggggcgggacctggggcggagagcggttcgcgcgcttcgggcctagtccggactcgccgccgccgccgccatattcccgtggcatcttccttactttgtccatcctccggactcgcgatcttccttccggagccatgtcagaaggagtggacttgattgatatatatgctgacgaggagttcaaccaggacccagagttcaacaatacagatcagattgacctgtatgatgatgtgctgacagccacctcacagccctcagatgacagaagcagcagcactgaaccacctcctcctgttcgccaggagccatctcccaagcccaacaacaagacccctgcaattctgtatacctacagtggcctgcgtaatagacgagctgccgtttatgtgggcagcttctcctgggtatgctgaggtggtggtagcctctgaaaactctgtccacaaattgttggaactcctaccagggaaagttcttaatggagaaaaagtggacgtgaggccggccacccggcagaacctgtcacagtttgaggcacaggctcggaaacgtgagtgtgtccgagtcccaagagggggaatacctccacgggcccattcccgagattctagtgattctgctgatggacgggccacaccctctgagaaccttgtaccctcatctgctcgtgtggataagccccccagtgtgctgccctacttcaatcgtcctccttcggcccttcccctgatgggtctgcccccaccaccaattccacccccaccacctctctcctcaagctttggggtccctcctcctcctcctggtatccactaccagcatctcatgcccccacctcctcgattacctcctcatcttgctgtacctccccctggggccatcccacctgcccttcacctcaatccagccttcttccccccaccaaacgctacagtggggcctccaccagatacttacatgaaggcctctgccccctataaccaccatggcagccgagattcgggccctccaccctctacagtgagtgaagccgaatttgaagatatcatgaagcgaaacagagcaatttccagcagtgccatttccaaagcagtatctggagccagtgcaggggattacagtgacgcaattgagacgctgctcacagccattgcggttatcaaacagtcccgggttgccaatgatgagcgttgccgtgtcctcatctcctctcttaaggactgtcttcatggcattgaagccaagtcctacagtgtgggtgccagtgggagctcttccaggaaaagacatcgctcccgggaaaggtcacctagccggtcccgggagagcagcaggaggcaccgggatctgcttcataatgaagatcggcatgatgattatttccaagaaaggaaccgggagcatgagagacaccgggatagagaacgggaccggcaccactgagaaaggagtctggttggaagcaaatgtttttttaatggacttgcatctcctcaccttgatcaggactaaaggacggaggccgccccacccccttccctttcctccaaacccctaactccctccagacacccagggaataccctctgccccacaggattgaagactgcttggcagtcctcccaatcccacacctcctgtttgccaggggaaagaacctaaagacttcgtgtgattgggaggggtggcagacaggaagaaaacatgtccaggcccctggtctccatagagaatggtgctttgtccaagaaaacgtatgagtttctgattctccgggagccgttcaatggtgaggttgatgggaagacttccttcccaaagaaaatagatcctccatgcaggatctaggagagtgactgggtgtgccaaaatatgcccagggtcctgccctcagcactagatttaatggggccaagagggtccaaaccccttgctaacataccacttctttgtttaactcctttacctttccagccctttgaggagggaccatgagaacagaaattaccttatgaaaagctacttctgttcctgctttccctctcacgtattgacggtttatttctttgacctcccagagggctgaactctttcaactctgcgctgcccagccttctcagtggacttgcccctcctaagcagagaaggcctatgaggttgcttgctgctgggaagcctggcagagccaattaccaccctctgctgcttagtgcttgggtacctcttgcaataaccagctcttagttgttccctttccctggggcttttccatttaacacatggagcccttcccccagaaggctacttccttgttttagaggaaggtactgcccattgggagatggggacattgggacctcagcaatgaagaacccttgtgaagtaaccaggaggaatggggaaagaagcaagttgggcaggatatggcctacttccataggcttttcttttttcaggtttgatgtaagcatgggcttacatcccccaggtacatacttttacttattgtgggataacctggcactagtaggcaggtaaagtcacaaatttggtgtcttttcaccttttgactgttgacttaatagctcctctcactctgcctggagatacttcctgcctcagatgaggagccagaagaaacagagcccgacttgaatgaactcagctcagagttctaaggaccagcattctgggggccattttctctacaggcaaatggaattgcttttccataacatccaaattgtaatgtggttgctgctgaaggaggaggcagcagcgaggtcctgcggtacccatggggtgatgctacttctgcatgcatctacagggcatctgacacctaacatgagacgtggcatgtgagatgagacttggcatgtgagacatagggtcactagagacccttctgggtcagaggagagagactgaattggactaaacccgtcctctgttcccagcacgtttctcatatagccctcagtcactgagggagtcccccgcaggattggagaggcacattcccttgggacagaggctacaggttggagctttttttcccctgtcccccaaccccatccccacctccacttcagaacatggcaccccacccaactggccaagtgttaagtgatgtgcttattgagagcaactccgggtgtcttttaaaatgtagagaaaaggtgacagtttaaggaaaaatatatatagaataccagaaatgccgtttacccggagaatttttttctccccatttgttttgtttttactcaatgacaccatttttagttttatttcctgatagcaaaaggaaaaaaaacacccatccctcaaaaaggccaaggtcccgtccccctgttgtcggtgatttgtttgtctttctgataggttgaaaattgtgtaataaacttgatgacgctgtcaatcttttatactgcattgtatttttttccttttgtaacaaaatatttttaaataataaatggggtgtgagctgttttatggaaaaaaaatt

SEQ ID NO: 320212 - DNA, 3404 bp, Homo sapiens
cggcggcggggggggcgggacctggggcggagagcggttcgcgcgcttcgggcctagtccggactcgccgccgccgccgccatattcccgtggcatcttccttactttgtccatcctccggactcgcgatcttccttccggagccatgtcagaaggagtggacttgattgatatatatgctgacgaggagttcaaccaggacccagagttcaacaatacagatcagattgacctgtatgatgatgtgctgacagccacctcacagccctcagatgacagaagcagcagcactgaaccacctcctcctgttcgccaggagccatctcccaagcccaacaacaagacccctgcaattctgtatacctacagtggcctgcgtaatagacgagctgccgtttatgtgggcagcttctcctggtggaccacagaccagcagctgatccaggttattcgctctataggagtctatgatgtggtggagttgaaatttgcagagaatcgagcaaatggccagtccaaagggtatgctgaggtggtggtagcctctgaaaactctgtccacaaattgttggaactcctaccagggaaagttcttaatggagaaaaagtggacgtgaggccggccacccggcagaacctgtcacagtttgaggcacaggctcggaaacgaatacctccacgggcccattcccgagattctagtgattctgctgatggacgggccacaccctctgagaaccttgtaccctcatctgctcgtgtggataagccccccagtgtgctgccctacttcaatcgtcctccttcggcccttcccctgatggtggggcctccaccagatacttacatgaaggcctctgccccctataaccaccatggcagccgagattcgggccctccaccctctacagtgagtgaagccgaatttgaagatatcatgaagcgaaacagagcaatttccagcagtgccatttccaaagcagtatctggagccagtgcaggggattacagtgacgcaattgagacgctgctcacagccattgcggttatcaaacagtcccgggttgccaatgatgagcgttgccgtgtcctcatctcctctcttaaggactgtcttcatggcattgaagccaagtcctacagtgtgggtgccagtgggagctcttccaggaaaagacatcgctcccgggaaaggtcacctagccggtcccgggagagcagcaggaggcaccgggatctgcttcataatgaagatcggcatgatgattatttccaagaaaggaaccgggagcatgagagacaccgggatagagaacgggaccggcaccactgagaaaggagtctggttggaagcaaatgtttttttaatggacttgcatctcctcaccttgatcaggactaaaggacggaggccgccccacccccttccctttcctccaaacccctaactccctccagacacccagggaataccctctgccccacaggattgaagactgcttggcagtcctcccaatcccacacctcctgtttgccaggggaaagaacctaaagacttcgtgtgattgggaggggtggcagacaggaagaaaacatgtccaggcccctggtctccatagagaatggtgctttgtccaagaaaacgtatgagtttctgattctccgggagccgttcaatggtgaggttgatgggaagacttccttcccaaagaaaatagatcctccatgcaggatctaggagagtgactgggtgtgccaaaatatgcccagggtcctgccctcagcactagatttaatggggccaagagggtccaaaccccttgctaacataccacttctttgtttaactcctttacctttccagccctttgaggagggaccatgagaacagaaattaccttatgaaaagctacttctgttcctgctttccctctcacgtattgacggtttatttctttgacctcccagagggctgaactctttcaactctgcgctgcccagccttctcagtggacttgcccctcctaagcagagaaggcctatgaggttgcttgctgctgggaagcctggcagagccaattaccaccctctgctgcttagtgcttgggtacctcttgcaataaccagctcttagttgttccctttccctggggcttttccatttaacacatggagcccttcccccagaaggctacttccttgttttagaggaaggtactgcccattgggagatggggacattgggacctcagcaatgaagaacccttgtgaagtaaccaggaggaatggggaaagaagcaagttgggcaggatatggcctacttccataggcttttcttttttcaggtttgatgtaagcatgggcttacatcccccaggtacatacttttacttattgtgggataacctggcactagtaggcaggtaaagtcacaaatttggtgtcttttcaccttttgactgttgacttaatagctcctctcactctgcctggagatacttcctgcctcagatgaggagccagaagaaacagagcccgacttgaatgaactcagctcagagttctaaggaccagcattctgggggccattttctctacaggcaaatggaattgcttttccataacatccaaattgtaatgtggttgctgctgaaggaggaggcagcagcgaggtcctgcggtacccatggggtgatgctacttctgcatgcatctacagggcatctgacacctaacatgagacgtggcatgtgagatgagacttggcatgtgagacatagggtcactagagacccttctgggtcagaggagagagactgaattggactaaacccgtcctctgttcccagcacgtttctcatatagccctcagtcactgagggagtcccccgcaggattggagaggcacattcccttgggacagaggctacaggttggagctttttttcccctgtcccccaaccccatccccacctccacttcagaacatggcaccccacccaactggccaagtgttaagtgatgtgcttattgagagcaactccgggtgtcttttaaaatgtagagaaaaggtgacagtttaaggaaaaatatatatagaataccagaaatgccgtttacccggagaatttttttctccccatttgttttgtttttactcaatgacaccatttttagttttatttcctgatagcaaaaggaaaaaaaacacccatccctcaaaaaggccaaggtcccgtccccctgttgtcggtgatttgtttgtctttctgataggttgaaaattgtgtaataaacttgatgacgctgtcaatcttttatactgcattgtatttttttccttttgtaacaaaatatttttaaataataaatggggtgtgagctgttttatggaaaaaaaatt

SEQ ID NO: 320213 - DNA, 2764 bp, Homo sapiens
gcactgaatccttgttctttcccttatagacattctgttatcatagcattgactcctgggaagtagtaccatgtcctttatacccctttttaaggtgcttaattaaatgcgggagcaggtgttatgaatgctacagatgtctagcattgttctgtgttatgccaaaattaccaaagtgttgtagagtacagtaaaaataataagggatgtgagcaatcaaggatggtattttctctgtacagccgagattcgggccctccaccctctacagtgagtgaagccgaatttgaagatatcatgaagcgaaacagagcaatttccagcagtgccatttccaaagcagtatctggagccagtgcaggggattacagtgacgcaattgagacgctgctcacagccattgcggttatcaaacagtcccgggttgccaatgatgagcgttgccgtgtcctcatctcctctcttaaggactgtcttcatggcattgaagccaagtcctacagtgtgggtgccagtgggagctcttccaggaaaagacatcgctcccgggaaaggtcacctagccggtcccgggagagcagcaggaggcaccgggatctgcttcataatgaagatcggcatgatgattatttccaagaaaggaaccgggagcatgagagacaccgggatagagaacgggaccggcaccactgagaaaggagtctggttggaagcaaatgtttttttaatggacttgcatctcctcaccttgatcaggactaaaggacggaggccgccccacccccttccctttcctccaaacccctaactccctccagacacccagggaataccctctgccccacaggattgaagactgcttggcagtcctcccaatcccacacctcctgtttgccaggggaaagaacctaaagacttcgtgtgattgggaggggtggcagacaggaagaaaacatgtccaggcccctggtctccatagagaatggtgctttgtccaagaaaacgtatgagtttctgattctccgggagccgttcaatggtgaggttgatgggaagacttccttcccaaagaaaatagatcctccatgcaggatctaggagagtgactgggtgtgccaaaatatgcccagggtcctgccctcagcactagatttaatggggccaagagggtccaaaccccttgctaacataccacttctttgtttaactcctttacctttccagccctttgaggagggaccatgagaacagaaattaccttatgaaaagctacttctgttcctgctttccctctcacgtattgacggtttatttctttgacctcccagagggctgaactctttcaactctgcgctgcccagccttctcagtggacttgcccctcctaagcagagaaggcctatgaggttgcttgctgctgggaagcctggcagagccaattaccaccctctgctgcttagtgcttgggtacctcttgcaataaccagctcttagttgttccctttccctggggcttttccatttaacacatggagcccttcccccagaaggctacttccttgttttagaggaaggtactgcccattgggagatggggacattgggacctcagcaatgaagaacccttgtgaagtaaccaggaggaatggggaaagaagcaagttgggcaggatatggcctacttccataggcttttcttttttcaggtttgatgtaagcatgggcttacatcccccaggtacatacttttacttattgtgggataacctggcactagtaggcaggtaaagtcacaaatttggtgtcttttcaccttttgactgttgacttaatagctcctctcactctgcctggagatacttcctgcctcagatgaggagccagaagaaacagagcccgacttgaatgaactcagctcagagttctaaggaccagcattctgggggccattttctctacaggcaaatggaattgcttttccataacatccaaattgtaatgtggttgctgctgaaggaggaggcagcagcgaggtcctgcggtacccatggggtgatgctacttctgcatgcatctacagggcatctgacacctaacatgagacgtggcatgtgagatgagacttggcatgtgagacatagggtcactagagacccttctgggtcagaggagagagactgaattggactaaacccgtcctctgttcccagcacgtttctcatatagccctcagtcactgagggagtcccccgcaggattggagaggcacattcccttgggacagaggctacaggttggagctttttttcccctgtcccccaaccccatccccacctccacttcagaacatggcaccccacccaactggccaagtgttaagtgatgtgcttattgagagcaactccgggtgtcttttaaaatgtagagaaaaggtgacagtttaaggaaaaatatatatagaataccagaaatgccgtttacccggagaatttttttctccccatttgttttgtttttactcaatgacaccatttttagttttatttcctgatagcaaaaggaaaaaaaacacccatccctcaaaaaggccaaggtcccgtccccctgttgtcggtgatttgtttgtctttctgataggttgaaaattgtgtaataaacttgatgacgctgtcaatcttttatactgcattgtatttttttccttttgtaacaaaatatttttaaataataaatggggtgtgagctgttttatggaaaaaaaatt

SEQ ID NO: 320214 - DNA, 3491 bp, Homo sapiens
cggcggcggggggggcgggacctggggcggagagcggttcgcgcgcttcgggcctagtccggactcgccgccgccgccgccatattcccgtggcatcttccttactttgtccatcctccggactcgcgatcttccttccggagccatgtcagaaggagtggacttgattgatatatatgctgacgaggagttcaaccaggacccagagttcaacaatacagatcagattgacctgtatgatgatgtgctgacagccacctcacagccctcagatgacagaagcagcagcactgaaccacctcctcctgttcgccaggagccatctcccaagcccaacaacaagacccctgcaattctgtatacctacagtggcctgcgtaatagacgagctgccgtttatgtgggcagcttctcctggtggaccacagaccagcagctgatccaggttattcgctctataggagtctatgatgtggtggagttgaaatttgcagagaatcgagcaaatggccagtccaaagggtatgctgaggtggtggtagcctctgaaaactctgtccacaaattgttggaactcctaccagggaaagttcttaatggagaaaaagtggacgtgaggccggccacccggcagaacctgtcacagtttgaggcacaggctcggaaacgaatacctccacgggcccattcccgagattctagtgattctgctgatggacgggccacaccctctgagaaccttgtaccctcatctgctcgtgtggataagccccccagtgtgctgccctacttcaatcgtcctccttcggcccttcccctgatgggtctgcccccaccaccaattccacccccaccacctctctcctcaagctttggggtccctcctcctcctcctggtatccactaccagcatctcatgcccccacctcctcgattacctcctcatcttgctgtacctccccctggggccatcccacctgcccttcacctcaatccagccttcttccccccaccaaacgctacagtggggcctccaccagatacttacatgaaggcctctgccccctataaccaccatggcagccgagattcgggccctccaccctctacagtgagtgaagccgaatttgaagatatcatgaagcgaaacagagcaatttccagcagtgccatttccaaagcagtatctggagccagtgcaggggattacagtgacgcaattgagacgctgctcacagccattgcggttatcaaacagtcccgggttgccaatgatgagcgttgccgtgtcctcatctcctctcttaaggactgtcttcatggcattgaagccaagtcctacagtgtgggtgccagtgggagctcttccaggaaaagacatcgctcccgggaaaggtcacctagccggtcccgggagagcagcaggaggcaccgggatctgcttcataatgaagatcggcatgatgattatttccaagaaaggaaccgggagcatgagagacaccgggatagagaacgggaccggcaccactgagaaaggagtctggttggaagcaaatgtttttttaatggacttgcatctcctcaccttgatcaggactaaaggacggaggccgccccacccccttccctttcctccaaacccctaactccctccagacacccagggaataccctctgccccacaggattgaagactgcttggcagtcctcccaatcccacacctcctgtttgccaggggaaagaacctaaagacttcgtgtgattgggaggggtggcagacaggaagaaaacatgtccaggcccctggtctccatagagaatggtgctttgtccaagaaaacgtatgagtttctgattctccgggagccgttcaatggtgaggttgatgggaagacttccttcccaaagaaaatagatcctccatgcaggatctaggagagtgactgggtgtgccaaaatatgcccagggtcctgccctcagcactagatttaatggggccaagagggtccaaaccccttgctaacataccacttctttgtttaactcctttacctttccagccctttgaggagggaccatgagaacagaaattaccttatgaaaagctacttctgttcctgctttccctctcacgtattgacggtttatttctttgacctcccagagggctgaactctttcaactctgcgctgcccagccttctcagtggacttgcccctcctaagcagagaaggcctatgaggttgcttgctgctgggaagcctggcagagccaattaccaccctctgctgcttagtgcttgggtacctcttgcaataaccagctcttagttgttccctttccctggggcttttccatttaacacatggagcccttcccccagaaggctacttccttgttttagaggaaggtactgcccattgggagatggggacattgggacctcagcaatgaagaacccttgtgaagtaaccaggaggaatggggaaagaagcaagttgggcaggatatggcctacttccataggcttttcttttttcaggtttgatgtaagcatgggcttacatcccccaggtacatacttttacttattgtgggataacctggcactagtaggcaggtaaagtcacaaatttggtgtcttttcaccttttgactgttgacttaatagctcctctcactctgcctggagatacttcctgcctcagatgaggagccagaagaaacagagcccgacttgaatgaactcagctcagagttctaaggaccagcattctgggggccattttctctacaggcaaatggaattgcttttccataacatccaaattgtaatgtggttgctgctgaaggaggaggcagcagcgaggtcctgcggtacccatggggtgatgctacttctgcatgcatctacagggcatctgacacctaacatgagacgtggcatgtgagatgagacttggcatgtgagacatagggtcactagagacccttctgggtcagaggagagagactgaattggactaaacccgtcctctgttcccagcacgtttctcatatagccctcagtcactgagggagtcccccgcaggattggagaggcacattcccttgggacagaggctacaggttggagctttttttcccctgtcccccaaccccatccccacctccacttcagaacatggcaccccacccaactggccaagtgttaagtgatgtgcttattgagagcaactccgggtgtcttttaaaatgtagagaaaaggtgacagtttaaggaaaaatatatatagaataccagaaatgccgtttacccggagaatttttttctccccatttgtttgtctttctgataggttgaaaattgtgtaataaacttgatgacgctgtcaatcttttatactgcattgtatttttttccttttgtaacaaaatatttttaaataataaatggggtgtgagctgttttatggaaaaaaaatt

SEQ ID NO: 320215 - DNA, 1464 bp, Homo sapiens
caccactatcaacccaagaagtggcctgatgagagaaagatcgatgggcaagaaagaatgctgggcttttcattcttgcttttggcacaggatcttttagaacttaagcacaaagcgggagatacttcacagagcagttctaagaattaactgggataattaaaattgaacctaccacatacccatgagcaaattccattgctcccagcattataattgttagtagccatgtcctttcaccaagcatgaacttgaatcaatgtcaacgttattagcgatagaaaggaccacttgctctctctgccagtattccctgcttatctcctgaggagataaccaggaggaatggggaaagaagcaagttgggcaggatatggcctacttccataggcttttcttttttcaggtttgatgtaagcatgggcttacatcccccaggtacatacttttacttattgtgggataacctggcactagtaggcaggtaaagtcacaaatttggtgtcttttcaccttttgactgttgacttaatagctcctctcactctgcctggagatacttcctgcctcagatgaggagccagaagaaacagagcccgacttgaatgaactcagctcagagttctaaggaccagcattctgggggccattttctctacaggcaaatggaattgcttttccataacatccaaattgtaatgtggttgctgctgaaggaggaggcagcagcgaggtcctgcggtacccatggggtgatgctacttctgcatgcatctacagggcatctgacacctaacatgagacgtggcatgtgagatgagacttggcatgtgagacatagggtcactagagacccttctgggtcagaggagagagactgaattggactaaacccgtcctctgttcccagcacgtttctcatatagccctcagtcactgagggagtcccccgcaggattggagaggcacattcccttgggacagaggctacaggttggagctttttttcccctgtcccccaaccccatccccacctccacttcagaacatggcaccccacccaactggccaagtgttaagtgatgtgcttattgagagcaactccgggtgtcttttaaaatgtagagaaaaggtgacagtttaaggaaaaatatatatagaataccagaaatgccgtttacccggagaatttttttctccccatttgttttgtttttactcaatgacaccatttttagttttatttcctgatagcaaaaggaaaaaaaacacccatccctcaaaaaggccaaggtcccgtccccctgttgtcggtgatttgtttgtctttctgataggttgaaaattgtgtaataaacttgatgacgctgtcaatcttttatactgcattgtatttttttccttttgtaacaaaatatttttaaataataaatggggtgtgagctgttttatggaaaaaaaatt

SEQ ID NO: 320216 - DNA, 1985 bp, Homo sapiens
cggcggcggggggggcgggacctggggcggagagcggttcgcgcgcttcgggcctagtccggactcgccgccgccgccgccatattcccgtggcatcttccttactttgtccatcctccggactcgcgatcttccttccggagccatgtcagaaggagtggacttgattgatatatatgctgacgaggagttcaaccaggacccagagttcaacaatacagatcagattgacctgtatgatgatgtgctgacagccacctcacagccctcagatgacagaagcagcagcactgaaccacctcctcctgttcgccaggagccatctcccaagcccaacaacaagacccctgcaattctgtatacctacagtggcctgcgtaatagacgagctgccgtttatgtgggcagcttctcctggtggaccacagaccagcagctgatccaggttattcgctctataggagtctatgatgtggtggagttgaaatttgcagagaatcgagcaaatggccagtccaaagggtatgctgaggtggtggtagcctctgaaaactctgtccacaaattgttggaactcctaccagggaaagttcttaatggagaaaaagtggacgtgaggccggccacccggcagaacctgtcacagtttgaggcacaggctcggaaacgaatacctccacgggcccattcccgagattctagtgattctgctgatggacgggccacaccctctgagaaccttgtaccctcatctgctcgtgtggataagccccccagtgtgctgccctacttcaatcgtcctccttcggcccttcccctgatgggtctgcccccaccaccaattccacccccaccacctctctcctcaagctttggggtccctcctcctcctcctggtatccactaccagcatctcatgcccccacctcctcgattacctcctcatcttgctgtacctccccctggggccatcccacctgcccttcacctcaatccagccttcttccccccaccaaacgctacagtggggcctccaccagatacttacatgaaggcctctgccccctataaccaccatggcagccgagattcgggccctccaccctctacagtgagtgaagccgaatttgaagatatcatgaagcgaaacagagcaatttccagcagtgccatttccaaagcagtatctggagccagtgcaggtaactcagtgcttacctttgctgccttctccttaacctttacttttttttcctgattttgtcatttctactggcaaaagttcaacaagataaagttggagtactgtagatatcaagagcggcatactttgaagagcaatatgtaacctgatttcttggccttggggaagctccggcagtattacttagtctgtatctaggcctgccctcatgaaaaccaacttaatgcctagaatataaataattaataccatctcgatgtggtgtttgctgtagagtgaaattcctgccttgtggaaatctccatctcagtggttgatctttagatctagtgtctgtgtagtagacccaataccagatatagaccctgggtcttctttaggaatgatgttttgactggataatgtgttttttgttgttgtttgagagggagtcttgccctgtcgcccaggctggagtgcagtggtgcagtcttggctcactacggcctccacctcctggtttcaagcgattctcctgcctcagcctcccaagtagctgggattgcgggcacttgccaccacgcccggctaatttttgtatttttttgtagagacagggtttcatcatatgtggccaggatggtcttgaactcctgaccacaggtgatccgcctgtctcggcctcccaaggtgctgggattacaggtgtgagccaccacgtccagcctagataatggtttgctatgaaatctgattacatttaggagtctaagcagagctggtaggtagcctatcctaaaaa

SEQ ID NO: 320217 - DNA, 341 bp, Homo sapiens
cggcggcggggggggcgggacctggggcggagagcggttcgcgcgcttcgggcctagtccggactcgccgccgccgccgccatattcccgtggcatcttccttactttgtccatcctccggactcgcgatcttccttccggagccatgtcagaaggagtggacttgattgatatatatgctgacgaggagttcaaccaggacccagagttcaacaatacagatcagattgacctgtatgatgatgtgctgacagccacctcacagccctcagatgacagaagcagcagcactgaaccaccacgacgaattccggacgaccacgacgaattccggcacgacg

SEQ ID NO: 320218 - DNA, 3252 bp, Homo sapiens
ggcacgaggcgcgcacgcagccagcgagcggccggagcggacggcagacggggcgggcggcgtcagggtcgcagcgtctacagctgctcgggggcggtttcttggcggaggcttggccggctcctctctcccggctccgcggcggctgcgaaggcggcggctcctgccctctcgctttccctctcgcgtctctggctgcaggtgaaaggaaagcaagccaggatggatatttacgacactcaaaccttgggggttgtggtctttggaggattcatggttgtttctgccattggcatcttcctggtgtcgactttctccatgaaggaaacgtcatatgaagaagccctagccaaccagcgcaaggagatggcgaaaactcaccaccagaaagtcgagaagaaaaagaaggagaaaacagtggagaagaaaggaaagaccaagaaaaaggaagagaaacctaatgggaagatacctgatcatgatccagcccccaatgtgactgtcctccttcgagaaccagtgcgggctcctgctgtggctgtggctccaaccccagtgcagccccccattatcgttgctcctgtcgccacagttccagccatgccccaggagaagctggcctcctcccccaaggacaaaaagaagaaggagaaaaaagtggcaaaagtggaaccagctgtcagctctgtagtgaattccatccaggttctcacttcgaaggctgccatcttggaaactgctcccaaggagggcagaaatacagatgtggcccagagcccagaggcaccaaagcaagaggctcctgccaagaagaagtctggttcaaagaaaaaaggtgagcctgggcccccagatgccgacggccctctctacctcccctacaagacgctggtctccacggttgggagcatggtgttcaacgagggcgaggcccagcggctcatcgagatcctgtctgagaaggctggcatcattcaggacacctggcacaaggccactcagaagggtgaccctgtggcgattctgaaacgccagctggaagagaaggaaaaactgctggccacagaacaggaagatgcggctgtcgccaagagcaaactgagggagctcaacaaggagatggcagcagaaaaggccaaagcagcagccggggaggccaaagtgaaaaagcagctggtggcccgggagcaggagatcacggctgtgcaggcacgcatgcaggccagctaccgggagcacgtgaaggaggtgcagcagctgcagggcaagatccggactcttcaggagcagctggagaatggccccaacacgcagctggcccgcctgcagcaggagaactccatcctgcgggatgccttgaaccaggccacgagccaggtggagagcaagcagaacgcagagctggccaagcttcggcaggagctcagcaaggtcagcaaagagctggtggagaagtcagaggctgtgcggcaagatgagcagcagcggaaagctctggaagccaaggcagctgccttcgagaagcaggtcctgcagctgcaggcgtcccacagggagagtgaggaggccctgcagaagcgcctggacgaggtcagccgggagctgtgccacacgcagagcagccacgccagcctccgggcggatgccgagaaggcccaggagcaacagcagcagatggccgagctgcacagcaagttacagtcctccgaggcggaggtgcgcagcaaatgcgaggagctgagtggcctccacgggcagctccaggaggccagggcggagaactcccagctcacagagagaatccgttccattgaggccctgctggaggcgggccaggcgcgggatgcccaggacgtccaggccagccaggcggaggctgaccagcagcagactcgcctcaaggagctggagtcccaggtgtcgggtctggagaaggaggccatcgagctcagggaggccgtcgagcagcagaaagtgaagaacaatgacctccgggagaagaactggaaggccatggaggcactggccacggccgagcaggcctgcaaggagaagctgcactccctgacccaggccaaggaggaatcggagaagcagctctgtctgattgaggcgcagaccatggaggccctgctggctctgctcccagaactctctgtcttggcacaacagaattacaccgagtggctgcaggatctcaaagagaaaggccccacgctgctgaagcacccgccagctcccgcggagccctcctcggacctggcctccaagttgagggaggccgaggagacgcagagcacactgcaggccgagtgtgaccagtaccgcagcatcctggcggagacggagggcatgctcagagacctgcagaagagcgtggaggaggaggagcaggtgtggagggccaaggtgggcgccgcagaggaggagctccagaagtcccgggtcacagtgaagcatctcgaagagattgtagagaagctaaaaggagaacttgaaagttcggaccaggtgagggagcacacgtcgcatttggaggcagagctggaaaagcacatggcggccgccagcgccgagtgccagaactacgccaaggaggtggcagggctgaggcaacttctcctagaatctcaatctcagctcgatgccgccaagagcgaagcccagaaacagagcgatgagcttgccctggtcaggcagcagttgagtgaaatgaagagccacgtagaggatggtgacatagctggggccccagcttcctccccagaggcgcccccagccgagcaggaccccgttcagctgaagacgcagctggagtggacagaagccatcctggaggatgagcagacacagcggcagaagctcacggccgagtttgaggaggctcagacctcggcatgtcggttacaagaagaattggagaagctccgcacagccggccccctagagtcttcagaaacagaggaggcctcacagctgaaggagagactagaaaaagagaagaagttaacaagtgacctggggcgcgccgccacgagactgcaggagcttctgaagacgacccaggagcagctggcaagggagaaggacacggtgaagaagctgcaggaacagctggaaaaggcagaggacggcagcagctcaaaggagggcacctctgtctgagtttcctctttggaaaaagaagttactgttcaacttaccaaaatgccttacacattccttacaaataaaccaaccaacctacacagc

SEQ ID NO: 320219 - DNA, 906 bp, Homo sapiens
attctgctgctcctcttcagaaggacatggacagtcgagacattcctgcgcatggtgcagtgccgctcgtggagggcagctgtggcttctaggtgcccgagtagcatcctgtgaccctccccagtgcagccccccattatcgttgctcctgtcgccacagttccagccatgccccaggagaagctggcctcctcccccaaggacaaaaagaagaaggagaaaaaagtggcaaaagtggaaccagctgtcagctctgtagtgaattccatccaggttctcacttcgaaggctgccatcttggaaactgctcccaaggaggtgccgatggtggtggtgcccccagtgggtgccaagggcaacacaccagccactggcactactcagggcaaaaaggcggaggggactcagaatcaaagcaaaaaggctgaaggagccccaaaccagggcagaaaggcagagggaaccccaaaccagggcaaaaagacagagggaaccccaaaccaagggaaaaaggcagagggaaccccaaaccaaggcaaaaaggcagaaggaaccccaaaccaaggcaaaaaggcggagggggcccagaaccagggtaaaaaggtagatacaaccccaaaccaggggaaaaaggtggagggggccccaacccagggcagaaaggccgagggggctcagaaccaggccaaaaaggtagaaggggcccagaaccagggcaaaaaggcagagggggcccagaatcagggcaaaaagggagagggggcccagaaccagggcaagaaggccgagggggcccagaatcagggcaagaaggccgagggggcccagaatcagggcaagaagccgaggggcccagaatcagggcaagaagccgaggggcccagaatcaggcagaaggctgagggg

SEQ ID NO: 320220 - DNA, 395 bp, Homo sapiens
tttttcaagttttatgatttatttaacttgtggaacaaaaataaaccagattaaccacaaccatgccttactttatcaaatgtataagaagtaaatatgaatcttatatgacaaaatgtttcattcattataacaaatttccaataatcctgtcaattatatttctaaattttcccccaaattctaagcagagtatgtaaattggaagttaacttatgcacgcttaactatcttaacaagctttgagtgcaagagattgaagagttcaaatctgaccaagatgttgatgttggataagagaattctctgcccctcacccctagacgttgccaaccagaactgacgtgtgacctcctgggtgttgatgccattaaaaccaacgttggtgcccggtg

SEQ ID NO: 320221 - DNA, 3745 bp, Homo sapiens
ggcacgaggcgcgcacgcagccagcgagcggccggagcggacggcagacggggcgggcggcgtcagggtcgcagcgtctacagctgctcgggggcggtttcttggcggaggcttggccggctcctctctcccggctccgcggcggctgcgaaggcggcggctcctgccctctcgctttccctctcgcgtctctggctgcagaaagaagcttccggttctgaggtcctggaggtgccatttccctctctgttgaagcaaaggccggggcagacctcctagtgaaaggaaagcaagccaggatggatatttacgacactcaaaccttgggggttgtggtctttggaggattcatggttgtttctgccattggcatcttcctggtgtcgactttctccatgaaggaaacgtcatatgaagaagccctagccaaccagcgcaaggagatggcgaaaactcaccaccagaaagtcgagaagaaaaagaaggagaaaacagtggagaagaaaggaaagaccaagaaaaaggaagagaaacctaatgggaagatacctgatcatgatccagcccccaatgtgactgtcctccttcgagaaccagtgcgggctcctgctgtggctgtggctccaaccccagtgcagccccccattatcgttgctcctgtcgccacagttccagccatgccccaggagaagctggcctcctcccccaaggacaaaaagaagaaggagaaaaaagtggcaaaagtggaaccagctgtcagctctgtagtgaattccatccaggttctcacttcgaaggctgccatcttggaaactgctcccaaggagggcagaaatacagatgtggcccagagcccagaggcaccaaagcaagaggctcctgccaagaagaagtctggttcaaagaaaaaaggtgagcctgggcccccagatgccgacggccctctctacctcccctacaagacgctggtctccacggttgggagcatggtgttcaacgagggcgaggcccagcggctcatcgagatcctgtctgagaaggctggcatcattcaggacacctggcacaaggccactcagaagggtgaccctgtggcgattctgaaacgccagctggaagagaaggaaaaactgctggccacagaacaggaagatgcggctgtcgccaagagcaaactgagggagctcaacaaggagatggcagcagaaaaggccaaagcagcagccggggaggccaaagtgaaaaagcagctggtggcccgggagcaggagatcacggctgtgcaggcacgcatgcaggccagctaccgggagcacgtgaaggaggtgcagcagctgcagggcaagatccggactcttcaggagcagctggagaatggccccaacacgcagctggcccgcctgcagcaggagaactccatcctgcgggatgccttgaaccaggccacgagccaggtggagagcaagcagaacgcagagctggccaagcttcggcaggagctcagcaaggtcagcaaagagctggtggagaagtcagaggctgtgcggcaagatgagcagcagcggaaagctctggaagccaaggcagctgccttcgagaagcaggtcctgcagctgcaggcgtcccacagggagagtgaggaggccctgcagaagcgcctggacgaggtcagccgggagctgtgccacacgcagagcagccacgccagcctccgggcggatgccgagaaggcccaggagcaacagcagcagatggccgagctgcacagcaagttacagtcctccgaggcggaggtgcgcagcaaatgcgaggagctgagtggcctccacgggcagctccaggaggccagggcggagaactcccagctcacagagagaatccgttccattgaggccctgctggaggcgggccaggcgcgggatgcccaggacgtccaggccagccaggcggaggctgaccagcagcagactcgcctcaaggagctggagtcccaggtgtcgggtctggagaaggaggccatcgagctcagggaggccgtcgagcagcagaaagtgaagaacaatgacctccgggagaagaactggaaggccatggaggcactggccacggccgagcaggcctgcaaggagaagctgcactccctgacccaggccaaggaggaatcggagaagcagctctgtctgattgaggcgcagaccatggaggccctgctggctctgctcccagaactctctgtcttggcacaacagaattacaccgagtggctgcaggatctcaaagagaaaggccccacgctgctgaagcacccgccagctcccgcggagccctcctcggacctggcctccaagttgagggaggccgaggagacgcagagcacactgcaggccgagtgtgaccagtaccgcagcatcctggcggagacggagggcatgctcagagacctgcagaagagcgtggaggaggaggagcaggtgtggagggccaaggtgggcgccgcagaggaggagctccagaagtcccgggtcacagtgaagcatctcgaagagattgtagagaagctaaaaggagaacttgaaagttcggaccaggtgagggagcacacgtcgcatttggaggcagagctggaaaagcacatggcggccgccagcgccgagtgccagaactacgccaaggaggtggcagggctgaggcaacttctcctagaatctcaatctcagctcgatgccgccaagagcgaagcccagaaacagagcgatgagcttgccctggtcaggcagcagttgagtgaaatgaagagccacgtagaggatggtgacatagctggggccccagcttcctccccagaggcgcccccagccgagcaggaccccgttcagctgaagacgcagctggagtggacagaagccatcctggaggatgagcagacacagcggcagaagctcacggccgagtttgaggaggctcagacctcggcatgtcggttacaagaagaattggagaagctccgcacagccggccccctagagtcttcagaaacagaggaggcctcacagctgaaggagagactagaaaaagagaagaagttaacaagtgacctggggcgcgccgccacgagactgcaggagcttctgaagacgacccaggagcagctggcaagggagaaggacacggtgaagaagctgcaggaacagctggaaaaggcagaggacggcagcagctcaaaggagggcacctctgtctgagtttcctctttggaaaaagaagttactgttcaacttaccaaaatgccttacacattccttacaaataaaccaaccaacctacacagcgttatccaggcccaacttccggtactccgagagaagccatgagagacaagtctcttagagccacagaagtagaccttccagagccccagtttgtaaatgaacctgtgtcacatttgataaacactatcctgggcgcagccccgggccaccgccgagtgacgccaaagccctggttgactctgacagccccgtgggtgtgtgggaggccgggcgctctggggtctgtctgtcagtgcaatcgtttagtgttttttcagtggggcggggcgggaagcgggtgggaccgggcagccagttctcaaaggctgtggggccgactggaggccacagcccctcacccctagacgttgccaaccagaactgacgtgtgacctcctgggtgttgatgccattaaaaccaacgttggtgcccggtg

SEQ ID NO: 320222 - DNA, 3821 bp, Homo sapiens
  misc_feature (3578)..(3578): n is a, c, g, or t
  misc_feature (3820)..(3821): n is a, c, g, or t
catgttgtcgtgacttttgagtacgccaggcttaggctgcagttatttgaactcgagaggggcccagaaccagggcaagaaggccgagggggcccagaaccagggcaagaaggccgagggtgctcagaaccagggcaaaaaagtagaaggggcccagaaccagggcaagaaggctgagggggcccagaaccagggcaagaaggccgagggggctcagaaccagggcaaaaaggccgagggagcccagaaccagggccaaaaaggagagggagcccagaatcagggtaaaaagacagaaggggctcagggcaaaaaggcagaaaggagtcccaaccaaggcaaaaaaggagagggagctcccatccagggcaaaaaggcagattcggttgctaatcagggcacaaaggtagagggtattacaaaccaggggaaaaaagcagaagggtcccccagtgaaggcaaaaaggcagaagggtcccccaaccaaggcaaaaaggcagacgcagctgccaatcagggtaaaaagacagagtcagcttctgtccagggcagaaatacagatgtggcccagagcccagaggcaccaaagcaagaggctcctgccaagaagaagtctggttcaaagaaaaaaggtgagcctgggcccccagatgccgacggccctctctacctcccctacaagacgctggtctccacggttgggagcatggtgttcaacgagggcgaggcccagcggctcatcgagatcctgtctgagaaggctggcatcattcaggacacctggcacaaggccactcagaagggtgaccctgtggcgattctgaaacgccagctggaagagaaggaaaaactgctggccacagaacaggaagatgcggctgtcgccaagagcaaactgagggagctcaacaaggagatggcagcagaaaaggccaaagcagcagccggggaggccaaagtgaaaaagcagctggtggcccgggagcaggagatcacggctgtgcaggcacgcatgcaggccagctaccgggagcacgtgaaggaggtgcagcagctgcagggcaagatccggactcttcaggagcagctggagaatggccccaacacgcagctggcccgcctgcagcaggagaactccatcctgcgggatgccttgaaccaggccacgagccaggtggagagcaagcagaacgcagagctggccaagcttcggcaggagctcagcaaggtcagcaaagagctggtggagaagtcagaggctgtgcggcaagatgagcagcagcggaaagctctggaagccaaggcagctgccttcgagaagcaggtcctgcagctgcaggcgtcccacagggagagtgaggaggccctgcagaagcgcctggacgaggtcagccgggagctgtgccacacgcagagcagccacgccagcctccgggcggatgccgagaaggcccaggagcaacagcagcagatggccgagctgcacagcaagttacagtcctccgaggcggaggtgcgcagcaaatgcgaggagctgagtggcctccacgggcagctccaggaggccagggcggagaactcccagctcacagagagaatccgttccattgaggccctgctggaggcgggccaggcgcgggatgcccaggacgtccaggccagccaggcggaggctgaccagcagcagactcgcctcaaggagctggagtcccaggtgtcgggtctggagaaggaggccatcgagctcagggaggccgtcgagcagcagaaagtgaagaacaatgacctccgggagaagaactggaaggccatggaggcactggccacggccgagcaggcctgcaaggagaagctgcactccctgacccaggccaaggaggaatcggagaagcagctctgtctgattgaggcgcagaccatggaggccctgctggctctgctcccagaactctctgtcttggcacaacagaattacaccgagtggctgcaggatctcaaagagaaaggccccacgctgctgaagcacccgccagctcccgcggagccctcctcggacctggcctccaagttgagggaggccgaggagacgcagagcacactgcaggccgagtgtgaccagtaccgcagcatcctggcggagacggagggcatgctcagagacctgcagaagagcgtggaggaggaggagcaggtgtggagggccaaggtgggcgccgcagaggaggagctccagaagtcccgggtcacagtgaagcatctcgaagagattgtagagaagctaaaaggagaacttgaaagttcggaccaggtgagggagcacacgtcgcatttggaggcagagctggaaaagcacatggcggccgccagcgccgagtgccagaactacgccaaggaggtggcagggctgaggcaacttctcctagaatctcaatctcagctcgatgccgccaagagcgaagcccagaaacagagcgatgagcttgccctggtcaggcagcagttgagtgaaatgaagagccacgtagaggatggtgacatagctggggccccagcttcctccccagaggcgcccccagccgagcaggaccccgttcagctgaagacgcagctggagtggacagaagccatcctggaggatgagcagacacagcggcagaagctcacggccgagtttgaggaggctcagacctcggcatgtcggttacaagaagaattggagaagctccgcacagccggccccctagagtcttcagaaacagaggaggcctcacagctgaaggagagactagaaaaagagaagaagttaacaagtgacctggggcgcgccgccacgagactgcaggagcttctgaagacgacccaggagcagctggcaagggagaaggacacggtgaagaagctgcaggaacagctggaaaaggcagaggacggcagcagctcaaaggagggcacctctgtctgagtttcctctttggaaaaagaagttactgttcaacttaccaaaatgccttacacattccttacaaataaaccaaccaacctacacagcgttatccaggcccaacttccggtactccgagagaagccatgagagacaagtctcttagagccacagaagtagaccttccagagccccagtttgtaaatgaacctgtgtcacatttgataaacactatcctgggcgcagccccgggccaccgccgagtgacgccaaagccctggttgactctgacagccccgtgggtgtgtgggaggccgggcgctctggggtctgtctgtcagtgcaatcgtttagtgttttttcagtggggcggggcgggaagcgggtgggaccgggcagccagttctcaaaggctgtggggccgactggaggccacagcccctcacccctagacgttgccaaccagaactgacgtgtgacctcctgggtgttgatgccattaaaaccaacgttggtgcccggtgaaaaaaaaaacaagaaacgaaacaaaaaaaaggggcagaccgaagaaaagataccccaggaaggggcccaagtaaaagagtgacacagtgtcgtggaacaaagtgggcacaanaaggagggcacataagcacgtaaagagactgggccactgatattaacaacgtatgggatgggggacgaaaatgtttctgatggcaactatgtgcgagggacacctcatattagtgggtggaacaattattgggagaactctttacaagaatatgaggacttaggggcactataacgtgaaggggtataggggtatacacagcagacatagtatagaggtgacactgcttcagatattaatcnn

SEQ ID NO: 320223 - DNA, 4033 bp, Homo sapiens
catgttgtcgtgacttttgagtacgccaggcttaggctgcagttatttgaactcgagaggggcccagaaccagggcaagaaggccgagggggcccagaaccagggcaagaaggccgagggtgctcagaaccagggcaaaaaagtagaaggggcccagaaccagggcaagaaggctgagggggcccagaaccagggcaagaaggccgagggggctcagaaccagggcaaaaaggccgagggagcccagaaccagggccaaaaaggagagggagcccagaatcagggtaaaaagacagaaggggctcagggcaaaaaggcagaaaggagtcccaaccaaggcaaaaaaggagagggagctcccatccagggcaaaaaggcagattcggttgctaatcagggcacaaaggtagagggtattacaaaccaggggaaaaaagcagaagggtcccccagtgaaggcaaaaaggcagaagggtcccccaaccaaggcaaaaaggcagacgcagctgccaatcagggtaaaaagacagagtcagcttctgtccagggcagaaatacagatgtggcccagagcccagaggcaccaaagcaagaggctcctgccaagaagaagtctggttcaaagaaaaaaggtgagcctgggcccccagatgccgacggccctctctacctcccctacaagacgctggtctccacggttgggagcatggtgttcaacgagggcgaggcccagcggctcatcgagatcctgtctgagaaggctggcatcattcaggacacctggcacaaggccactcagaagggtgaccctgtggcgattctgaaacgccagctggaagagaaggaaaaactgctggccacagaacaggaagatgcggctgtcgccaagagcaaactgagggagctcaacaaggagatggcagcagaaaaggccaaagcagcagccggggaggccaaagtgaaaaagcagctggtggcccgggagcaggagatcacggctgtgcaggcacgcatgcaggccagctaccgggagcacgtgaaggaggtgcagcagctgcagggcaagatccggactcttcaggagcagctggagaatggccccaacacgcagctggcccgcctgcagcaggagaactccatcctgcgggatgccttgaaccaggccacgagccaggtggagagcaagcagaacgcagagctggccaagcttcggcaggagctcagcaaggtcagcaaagagctggtggagaagtcagaggctgtgcggcaagatgagcagcagcggaaagctctggaagccaaggcagctgccttcgagaagcaggtcctgcagctgcaggcgtcccacagggagagtgaggaggccctgcagaagcgcctggacgaggtcagccgggagctgtgccacacgcagagcagccacgccagcctccgggcggatgccgagaaggcccaggagcaacagcagcagatggccgagctgcacagcaagttacagtcctccgaggcggaggtgcgcagcaaatgcgaggagctgagtggcctccacgggcagctccaggaggccagggcggagaactcccagctcacagagagaatccgttccattgaggccctgctggaggcgggccaggcgcgggatgcccaggacgtccaggccagccaggcggaggctgaccagcagcagactcgcctcaaggagctggagtcccaggtgtcgggtctggagaaggaggccatcgagctcagggaggccgtcgagcagcagaaagtgaagaacaatgacctccgggagaagaactggaaggccatggaggcactggccacggccgagcaggcctgcaaggagaagctgcactccctgacccaggccaaggaggaatcggagaagcagctctgtctgattgaggcgcagaccatggaggccctgctggctctgctcccagaactctctgtcttggcacaacagaattacaccgagtggctgcaggatctcaaagagaaaggccccacgctgctgaagcacccgccagctcccgcggagccctcctcggacctggcctccaagttgagggaggccgaggagacgcagagcacactgcaggccgagtgtgaccagtaccgcagcatcctggcggagacggagggcatgctcagagacctgcagaagagcgtggaggaggaggagcaggtgtggagggccaaggtgggcgccgcagaggaggagctccagaagtcccgggtcacagtgaagcatctcgaagagattgtagagaagctaaaaggagaacttgaaagttcggaccaggtatgtgctctgctcagagaactctttctcttgtcccgggagcctctttgaaagtgacgttaatgcagaggacacttcactgatttcttcctcatggaccgtgtgccttaagagaggcattctctctcaagccaagggatcttgtccatcctgtttttccttaatgagagacattgactacctcagaggaccctgagacccagccacgggccctgtgcagacctgcccagccctggtgaacagggcttctgccacggccttcacagtcaaggtggccccactgcccccttcagacgccacagggagccctggagaaggtacccttggtacctgcttttgcaagtaaatctaagagcatgtcagtccccaggagtgcccgggtgcagcctgccactttccgtaaggggttctcttgccgcggactagtttctcgtttgcttggtagctggtgggcctcagggatctcccgagaggcctcacctatcccagggccagcctgctccctgaggtgagtgccctttgagcagaggctgctggcgcatgcgtgtgcgtgtctgtgcatctgtccgtgagggagcacacgtcgcatttggaggcagagctggaaaagcacatggcggccgccagcgccgagtgccagaactacgccaaggaggtggcagggctgaggcaacttctcctagaatctcaatctcagctcgatgccgccaagagcgaagcccagaaacagagcgatgagcttgccctggtcaggcagcagttgagtgaaatgaagagccacgtagaggatggtgacatagctggggccccagcttcctccccagaggcgcccccagccgagcaggaccccgttcagctgaagacgcagctggagtggacagaagccatcctggaggatgagcagacacagcggcagaagctcacggccgagtttgaggaggctcagacctcggcatgtcggttacaagaagaattggagaagctccgcacagccggccccctagagtcttcagaaacagaggaggcctcacagctgaaggagagactagaaaaagagaagaagttaacaagtgacctggggcgcgccgccacgagactgcaggagcttctgaagacgacccaggagcagctggcaagggagaaggacacggtgaagaagctgcaggaacagctggaaaaggcagaggacggcagcagctcaaaggagggcacctctgtctgagtttcctctttggaaaaagaagttactgttcaacttaccaaaatgccttacacattccttacaaataaaccaaccaacctacacagcgttatccaggcccaacttccggtactccgagagaagccatgagagacaagtctcttagagccacagaagtagaccttccagagccccagtttgtaaatgaacctgtgtcacatttgataaacactatcctgggcgcagccccgggccaccgccgagtgacgccaaagccctggttgactctgacagccccgtgggtgtgtgggaggccgggcgctctggggtctgtctgtcagtgcaatcgtttagtgttttttcagtggggcggggcgggaagcgggtgggaccgggcagccagttctcaaaggctgtggggccgactggaggccacagcccctcacccctagacgttgccaaccagaactgacgtgtgacctcctgggtgttgatgccattaaaaccaacgttggtgcccggtg

SEQ ID NO: 320224 - DNA, 3782 bp, Homo sapiens
catgttgtcgtgacttttgagtacgccaggcttaggctgcagttatttgaactcgagaggggcccagaaccagggcaagaaggccgagggggcccagaaccagggcaagaaggccgagggtgctcagaaccagggcaaaaaagtagaaggggcccagaaccagggcaagaaggctgagggggcccagaaccagggcaagaaggccgagggggctcagaaccagggcaaaaaggccgagggagcccagaaccagggccaaaaaggagagggagcccagaatcagggtaaaaagacagaaggggctcagggcaaaaaggcagaaaggagtcccaaccaaggcaaaaaaggagagggagctcccatccagggcaaaaaggcagattcggttgctaatcagggcacaaaggtagagggtattacaaaccaggggaaaaaagcagaagggtcccccagtgaaggcaaaaaggcagaagggtcccccaaccaaggcaaaaaggcagacgcagctgccaatcagggtaaaaagacagagtcagcttctgtccagggcagaaatacagatgtggcccagagcccagaggcaccaaagcaagaggctcctgccaagaagaagtctggttcaaagaaaaaaggtgagcctgggcccccagatgccgacggccctctctacctcccctacaagacgctggtctccacggttgggagcatggtgttcaacgagggcgaggcccagcggctcatcgagatcctgtctgagaaggctggcatcattcaggacacctggcacaaggccactcagaagggtgaccctgtggcgattctgaaacgccagctggaagagaaggaaaaactgctggccacagaacaggaagatgcggctgtcgccaagagcaaactgagggagctcaacaaggagatggcagcagaaaaggccaaagcagcagccggggaggccaaagtgaaaaagcagctggtggcccgggagcaggagatcacggctgtgcaggcacgcatgcaggccagctaccgggagcacgtgaaggaggtgcagcagctgcagggcaagatccggactcttcaggagcagctggagaatggccccaacacgcagctggcccgcctgcagcaggagaactccatcctgcgggatgccttgaaccaggccacgagccaggtggagagcaagcagaacgcagagctggccaagcttcggcaggagctcagcaaggtcagcaaagagctggtggagaagtcagaggctgtgcggcaagatgagcagcagcggaaagctctggaagccaaggcagctgccttcgagaagcaggtcctgcagctgcaggcgtcccacagggagagtgaggaggccctgcagaagcgcctggacgaggtcagccgggagctgtgccacacgcagagcagccacgccagcctccgggcggatgccgagaaggcccaggagcaacagcagcagatggccgagctgcacagcaagttacagtcctccgaggcggaggtgcgcagcaaatgcgaggagctgagtggcctccacgggcagctccaggaggccagggcggagaactcccagctcacagagagaatccgttccattgaggccctgctggaggcgggccaggcgcgggatgcccaggacgtccaggccagccaggcggaggctgaccagcagcagactcgcctcaaggagctggagtcccaggtgtcgggtctggagaaggaggccatcgagctcagggaggccgtcgagcagcagaaagtgaagaacaatgacctccgggagaagaactggaaggccatggaggcactggccacggccgagcaggcctgcaaggagaagctgcactccctgacccaggccaaggaggaatcggagaagcagctctgtctgattgaggcgcagaccatggaggccctgctggctctgctcccagaactctctgtcttggcacaacagaattacaccgagtggctgcaggatctcaaagagaaaggccccacgctgctgaagcacccgccagctcccgcggagccctcctcggacctggcctccaagttgagggaggccgaggagacgcagagcacactgcaggccgagtgtgaccagtaccgcagcatcctggcggagacggagggcatgctcagagacctgcagaagagcgtggaggaggaggagcaggtgtggagggccaaggtgggcgccgcagaggaggagctccagaagtcccgggtcacagtgaagcatctcgaagagattgtagagaagctaaaaggagaacttgaaagttcggaccaggtatgtgctctgctcagagaactctttctcttgtcccgggagcctctttgaaagtgacgttaatgcagaggacacttcactgatttcttcctcatggaccgtgtgccttaagagaggcattctctctcaagccaagggatcttgtccatcctgtttttccttaatgagagacattgactacctcagaggaccctgagacccagccacgggccctgtgcagacctgcccagccctggtgaacagggcttctgccacggccttcacagtcaaggtggccccactgcccccttcagacgccacagggagccctggagaaggtgagggagcacacgtcgcatttggaggcagagctggaaaagcacatggcggccgccagcgccgagtgccagaactacgccaaggaggtggcagggctgaggcaacttctcctagaatctcaatctcagctcgatgccgccaagagcgaagcccagaaacagagcgatgagcttgccctggtcaggcagcagttgagtgaaatgaagagccacgtagaggatggtgacatagctggggccccagcttcctccccagaggcgcccccagccgagcaggaccccgttcagctgaagacgcagctggagtggacagaagccatcctggaggatgagcagacacagcggcagaagctcacggccgagtttgaggaggctcagacctcggcatgtcggttacaagaagaattggagaagctccgcacagccggccccctagagtcttcagaaacagaggaggcctcacagctgaaggagagactagaaaaagagaagaagttaacaagtgacctggggcgcgccgccacgagactgcaggagcttctgaagacgacccaggagcagctggcaagggagaaggacacggtgaagaagctgcaggaacagctggaaaaggcagaggacggcagcagctcaaaggagggcacctctgtctgagtttcctctttggaaaaagaagttactgttcaacttaccaaaatgccttacacattccttacaaataaaccaaccaacctacacagcgttatccaggcccaacttccggtactccgagagaagccatgagagacaagtctcttagagccacagaagtagaccttccagagccccagtttgtaaatgaacctgtgtcacatttgataaacactatcctgggcgcagccccgggccaccgccgagtgacgccaaagccctggttgactctgacagccccgtgggtgtgtgggaggccgggcgctctggggtctgtctgtcagtgcaatcgtttagtgttttttcagtggggcggggcgggaagcgggtgggaccgggcagccagttctcaaaggctgtggggccgactggaggccacagcccctcacccctagacgttgccaaccagaactgacgtgtgacctcctgggtgttgatgccattaaaaccaacgttggtgcccggtg

SEQ ID NO: 320225 - DNA, 3411 bp, Homo sapiens
catgttgtcgtgacttttgagtacgccaggcttaggctgcagttatttgaactcgagaggggcccagaaccagggcaagaaggccgagggggcccagaaccagggcaagaaggccgagggtgctcagaaccagggcaaaaaagtagaaggggcccagaaccagggcaagaaggctgagggggcccagaaccagggcaagaaggccgagggggctcagaaccagggcaaaaaggccgagggagcccagaaccagggccaaaaaggagagggagcccagaatcagggtaaaaagacagaaggggctcagggcaaaaaggcagaaaggagtcccaaccaaggcaaaaaaggagagggagctcccatccagggcaaaaaggcagattcggttgctaatcagggcacaaaggtagagggtattacaaaccaggggaaaaaagcagaagggtcccccagtgaaggcaaaaaggcagaagggtcccccaaccaaggcaaaaaggcagacgcagctgccaatcagggtaaaaagacagagtcagcttctgtccagggcagaaatacagatgtggcccagagcccagaggcaccaaagcaagaggctcctgccaagaagaagtctggttcaaagaaaaaaggtgagcctgggcccccagatgccgacggccctctctacctcccctacaagacgctggtctccacggttgggagcatggtgttcaacgagggcgaggcccagcggctcatcgagatcctgtctgagaaggctggcatcattcaggacacctggcacaaggccactcagaagggtgaccctgtggcgattctgaaacgccagctggaagagaaggaaaaactgctggccacagaacaggaagatgcggctgtcgccaagagcaaactgagggagctcaacaaggagatggcagcagaaaaggccaaagcagcagccggggaggccaaagtgaaaaagcagctggtggcccgggagcaggagatcacggctgtgcaggcacgcatgcaggccagctaccgggagcacgtgaaggaggtgcagcagctgcagggcaagatccggactcttcaggagcagctggagaatggccccaacacgcagctggcccgcctgcagcaggagaactccatcctgcgggatgccttgaaccaggccacgagccaggtggagagcaagcagaacgcagagctggccaagcttcggcaggagctcagcaaggtcagcaaagagctggtggagaagtcagaggctgtgcggcaagatgagcagcagcggaaagctctggaagccaaggcagctgccttcgagaagcaggtcctgcagctgcaggcgtcccacagggagagtgaggaggccctgcagaagcgcctggacgaggtcagccgggagctgtgccacacgcagagcagccacgccagcctccgggcggatgccgagaaggcccaggagcaacagcagcagatggccgagctgcacagcaagttacagtcctccgaggcggaggtgcgcagcaaatgcgaggagctgagtggcctccacgggcagctccaggaggccagggcggagaactcccagctcacagagagaatccgttccattgaggccctgctggaggcgggccaggcgcgggatgcccaggacgtccaggccagccaggcggaggctgaccagcagcagactcgcctcaaggagctggagtcccaggtgtcgggtctggagaaggaggccatcgagctcagggaggccgtcgagcagcagaaagtgaagaacaatgacctccgggagaagaactggaaggccatggaggcactggccacggccgagcaggcctgcaaggagaagctgcactccctgacccaggccaaggaggaatcggagaagcagctctgtctgattgaggcgcagaccatggaggccctgctggctctgctcccagaactctctgtcttggcacaacagaattacaccgagtggctgcaggatctcaaagagaaaggccccacgctgctgaagcacccgccagctcccgcggagccctcctcggacctggcctccaagttgagggaggccgaggagacgcagagcacactgcaggccgagtgtgaccagtaccgcagcatcctggcggagacggagggcatgctcagagacctgcagaagagcgtggaggaggaggagcaggtgtggagggccaaggtgggcgccgcagaggaggagctccagaagtcccgggtcacagtgaagcatctcgaagagattgtagagaagctaaaaggagaacttgaaagttcggaccaggtgagggagcacacgtcgcatttggaggcagagctggaaaagcacatggcggccgccagcgccgagtgccagaactacgccaaggaggtggcagggctgaggcaacttctcctagaatctcaatctcagctcgatgccgccaagagcgaagcccagaaacagagcgatgagcttgccctggtcaggcagcagttgagtgaaatgaagagccacgtagaggatggtgacatagctggggccccagcttcctccccagaggcgcccccagccgagcaggaccccgttcagctgaagacgcagctggagtggacagaagccatcctggaggatgagcagacacagcggcagaagctcacggccgagtttgaggaggctcagacctcggcatgtcggttacaagaagaattggagaagctccgcacagccggccccctagagtcttcagaaacagaggaggcctcacagctgaaggagagactagaaaaagagaagaagttaacaagtgacctggggcgcgccgccacgagactgcaggagcttctgaagacgacccaggagcagctggcaagggagaaggacacggtgaagaagctgcaggaacagctggaaaaggcagaggacggcagcagctcaaaggagggcacctctgtctgagtttcctctttggaaaaagaagttactgttcaagttatccaggcccaacttccggtactccgagagaagccatgagagacaagtctcttagagccacagaagtagaccttccagagccccagtttgtaaatgaacctgtgtcacatttgataaacactatcctgggcgcagccccgggccaccgccgagtgacgccaaagccctggttgactctgacagccccgtgggtgtgtgggaggccgggcgctctggggtctgtctgtcagtgcaatcgtttagtgttttttcagtggggcggggcgggaagcgggtgggaccgggcagccagttctcaaaggctgtggggccgactggaggccacagcccctcacccctagacgttgccaaccagaactgacgtgtgacctcctgggtgttgatgccattaaaaccaacgttggtgcccggtg

SEQ ID NO: 320226 - DNA, 3413 bp, Homo sapiens
catgttgtcgtgacttttgagtacgccaggcttaggctgcagttatttgaactcgagaggggcccagaaccagggcaagaaggccgagggggcccagaaccagggcaagaaggccgagggtgctcagaaccagggcaaaaaagtagaaggggcccagaaccagggcaagaaggctgagggggcccagaaccagggcaagaaggccgagggggctcagaaccagggcaaaaaggccgagggagcccagaaccagggccaaaaaggagagggagcccagaatcagggtaaaaagacagaaggggctcagggcaaaaaggcagaaaggagtcccaaccaaggcaaaaaaggagagggagctcccatccagggcaaaaaggcagattcggttgctaatcagggcacaaaggtagagggtattacaaaccaggggaaaaaagcagaagggtcccccagtgaaggcaaaaaggcagaagggtcccccaaccaaggcaaaaaggcagacgcagctgccaatcagggtaaaaagacagagtcagcttctgtccagggcagaaatacagatgtggcccagagcccagaggcaccaaagcaagaggctcctgccaagaagaagtctggttcaaagaaaaaaggtgagcctgggcccccagatgccgacggccctctctacctcccctacaagacgctggtctccacggttgggagcatggtgttcaacgagggcgaggcccagcggctcatcgagatcctgtctgagaaggctggcatcattcaggacacctggcacaaggccactcagaagggtgaccctgtggcgattctgaaacgccagctggaagagaaggaaaaactgctggccacagaacaggaagatgcggctgtcgccaagagcaaactgagggagctcaacaaggagatggcagcagaaaaggccaaagcagcagccggggaggccaaagtgaaaaagcagctggtggcccgggagcaggagatcacggctgtgcaggcacgcatgcaggccagctaccgggagcacgtgaaggaggtgcagcagctgcagggcaagatccggactcttcaggagcagctggagaatggccccaacacgcagctggcccgcctgcagcaggagaactccatcctgcgggatgccttgaaccaggccacgagccaggtggagagcaagcagaacgcagagctggccaagcttcggcaggagctcagcaaggtcagcaaagagctggtggagaagtcagaggctgtgcggcaagatgagcagcagcggaaagctctggaagccaaggcagctgccttcgagaagcaggtcctgcagctgcaggcgtcccacagggagagtgaggaggccctgcagaagcgcctggacgaggtcagccgggagctgtgccacacgcagagcagccacgccagcctccgggcggatgccgagaaggcccaggagcaacagcagcagatggccgagctgcacagcaagttacagtcctccgaggcggaggtgcgcagcaaatgcgaggagctgagtggcctccacgggcagctccaggaggccagggcggagaactcccagctcacagagagaatccgttccattgaggccctgctggaggcgggccaggcgcgggatgcccaggacgtccaggccagccaggcggaggctgaccagcagcagactcgcctcaaggagctggagtcccaggtgtcgggtctggagaaggaggccatcgagctcagggaggccgtcgagcagcagaaagtgaagaacaatgacctccgggagaagaactggaaggccatggaggcactggccacggccgagcaggcctgcaaggagaagctgcactccctgacccaggccaaggaggaatcggagaagcagctctgtctgattgaggcgcagaccatggaggccctgctggctctgctcccagaactctctgtcttggcacaacagaattacaccgagtggctgcaggatctcaaagagaaaggccccacgctgctgaagcacccgccagctcccgcggagccctcctcggacctggcctccaagttgagggaggccgaggagacgcagagcacactgcaggccgagtgtgaccagtaccgcagcatcctggcggagacggagggcatgctcagagacctgcagaagagcgtggaggaggaggagcaggtgtggagggccaaggtgggcgccgcagaggaggagctccagaagtcccgggtcacagtgaagcatctcgaagagattgtagagaagctaaaaggagaacttgaaagttcggaccaggtgagggagcacacgtcgcatttggaggcagagctggaaaagcacatggcggccgccagcgccgagtgccagaactacgccaaggaggtggcagggctgaggcaacttctcctagaatctcaatctcagctcgatgccgccaagagcgaagcccagaaacagagcgatgagcttgccctggtcaggcagcagttgagtgaaatgaagagccacgtagaggatggtgacatagctggggccccagcttcctccccagaggcgcccccagccgagcaggaccccgttcagctgaagacgcagctggagtggacagaagccatcctggaggatgagcagacacagcggcagaagctcacggccgagtttgaggaggctcagacctcggcatgtcggttacaagaagaattggagaagctccgcacagccggccccctagagtcttcagaaacagaggaggcctcacagctgaaggagagactagaaaaagagaagaagttaacaagtgacctggggcgcgccgccacgagactgcaggagcttctgaagacgacccaggagcagctggcaagggagaaggacacggtgaagaagctgcaggaacagctggaaaaggcagaggacggcagcagctcaaaggagggcacctctgtctgagtttcctctttggaaaaagaagttactgttcaacttaccaaaatgccttacacattccttacaaataaaccaaccaacctacacagcgttatccaggcccaacttccggtactccgagagaagccatgagagacaagtctcttagaatttgataaacactatcctgggcgcagccccgggccaccgccgagtgacgccaaagccctggttgactctgacagccccgtgggtgtgtgggaggccgggcgctctggggtctgtctgtcagtgcaatcgtttagtgttttttcagtggggcggggcgggaagcgggtgggaccgggcagccagttctcaaaggctgtggggccgactggaggccacagcccctcacccctagacgttgccaaccagaactgacgtgtgacctcctgggtgttgatgccattaaaaccaacgttggtgcccggtg

SEQ ID NO: 320227 - DNA, 3206 bp, Homo sapiens
catgttgtcgtgacttttgagtacgccaggcttaggctgcagttatttgaactcgagaggggcccagaaccagggcaagaaggccgagggggcccagaaccagggcaagaaggccgagggtgctcagaaccagggcaaaaaagtagaaggggcccagaaccagggcaagaaggctgagggggcccagaaccagggcaagaaggccgagggggctcagaaccagggcaaaaaggccgagggagcccagaaccagggccaaaaaggagagggagcccagaatcagggtaaaaagacagaaggggctcagggcaaaaaggcagaaaggagtcccaaccaaggcaaaaaaggagagggagctcccatccagggcaaaaaggcagattcggttgctaatcagggcacaaaggtagagggtattacaaaccaggggaaaaaagcagaagggtcccccagtgaaggcaaaaaggcagaagggtcccccaaccaaggcaaaaaggcagacgcagctgccaatcagggtaaaaagacagagtcagcttctgtccagggcagaaatacagatgtggcccagagcccagaggcaccaaagcaagaggctcctgccaagaagaagtctggttcaaagaaaaaaggtgagcctgggcccccagatgccgacggccctctctacctcccctacaagacgctggtctccacggttgggagcatggtgttcaacgagggcgaggcccagcggctcatcgagatcctgtctgagaaggctggcatcattcaggacacctggcacaaggccactcagaagggtgaccctgtggcgattctgaaacgccagctggaagagaaggaaaaactgctggccacagaacaggaagatgcggctgtcgccaagagcaaactgagggagctcaacaaggagatggcagcagaaaaggccaaagcagcagccggggaggccaaagtgaaaaagcagctggtggcccgggagcaggagatcacggctgtgcaggcacgcatgcaggccagctaccgggagcacgtgaaggaggtgcagcagctgcagggcaagatccggactcttcaggagcagctggagaatggccccaacacgcagctggcccgcctgcagcaggagaactccatcctgcgggatgccttgaaccaggccacgagccaggtggagagcaagcagaacgcagagctggccaagcttcggcaggagctcagcaaggtcagcaaagagctggtggagaagtcagaggctgtgcggcaagatgagcagcagcggaaagctctggaagccaaggcagctgccttcgagaagcaggtcctgcagctgcaggcgtcccacagggagagtgaggaggccctgcagaagcgcctggacgaggtcagccgggagctgtgccacacgcagagcagccacgccagcctccgggcggatgccgagaaggcccaggagcaacagcagcagatggccgagctgcacagcaagttacagtcctccgaggcggaggtgcgcagcaaatgcgaggagctgagtggcctccacgggcagctccaggaggccagggcggagaactcccagctcacagagagaatccgttccattgaggccctgctggaggcgggccaggcgcgggatgcccaggacgtccaggccagccaggcggaggctgaccagcagcagactcgcctcaaggagctggagtcccaggtgtcgggtctggagaaggaggccatcgagctcagggaggccgtcgagcagcagaaagtgaagaacaatgacctccgggagaagaactggaaggccatggaggcactggccacggccgagcaggcctgcaaggagaagctgcactccctgacccaggccaaggaggaatcggagaagcagctctgtctgattgaggcgcagaccatggaggccctgctggctctgctcccagaactctctgtcttggcacaacagaattacaccgagtggctgcaggatctcaaagagaaaggccccacgctgctgaagcacccgccagctcccgcggagccctcctcggacctggcctccaagttgagggaggccgaggagacgcagagcacactgcaggccgagtgtgaccagtaccgcagcatcctggcggagacggagggcatgctcagagacctgcagaagagcgtggaggaggaggagcaggtgtggagggccaaggtgggcgccgcagaggaggagctccagaagtcccgggtcacagtgaagcatctcgaagagattgtagagaagctaaaaggagaacttgaaagttcggaccaggtgagggagcacacgtcgcatttggaggcagagctggaaaagcacatggcggccgccagcgccgagtgccagaactacgccaaggaggtggcagggctgaggcaacttctcctagaatctcaatctcagctcgatgccgccaagagcgaagcccagaaacagagcgatgagcttgccctggtcaggcagcagttgagtgaaatgaagagccacgtagaggatggtgacatagctggggccccagcttcctccccagaggcgcccccagccgagcaggaccccgttcagctgaagacgcagctggagtggacagaagccatcctggaggatgagcagacacagcggcagaagctcacggccgagtttgaggaggctcagacctcggcatgtcggttacaagaagaattggagaagctccgcacagccggccccctagagtcttcagaaacagaggaggcctcacagctgaaggagagactagaaaaagagaagaagttaacaagtgacctggggcgcgccgccacgagactgcaggagcttctgaagacgacccaggagcagctggcaagggagaaggacacggtgaagaagctgcaggaacagctggaaaaggcagaggacggcagcagctcaaaggagggcacctctgtctgagtttcctctttggaaaaagaagttactgttcaagctttggcaacaggcaggcagctttatcagcagcttggcaacattctgtaaaagcagctttataccttttagcaaagaaaaggagttccggggcataaaagtaaggatgtcttctggcaatttcatataagtattttttcaaaaatgtctcttcattgtcatgaaaagcagtgcacatcacatcaacctctggtctcaccaatcgggggag

SEQ ID NO: 320228 - DNA, 3069 bp, Homo sapiens
ggcacgaggcgcgcacgcagccagcgagcggccggagcggacggcagacggggcgggcggcgtcagggtcgcagcgtctacagctgctcgggggcggtttcttggcggaggcttggccggctcctctctcccggctccgcggcggctgcgaaggcggcggctcctgccctctcgctttccctctcgcgtctctggctgcagaaagaagcttccggttctgaggtcctggaggtgccatttccctctctgttgaagcaaaggccggggcagacctcctagtgaaaggaaagcaagccaggatggatatttacgacactcaaaccttgggggttgtggtctttggaggattcatggttgtttctgccattggcatcttcctggtgtcgactttctccatgaaggaaacgtcatatgaagaagccctagccaaccagcgcaaggagatggcgaaaactcaccaccagaaagtcgagaagaaaaagaaggagaaaacagtggagaagaaaggaaagaccaagaaaaaggaagagaaacctaatgggaagatacctgatcatgatccagcccccaatgtgactgtcctccttcgagaaccagtgcgggctcctgctgtggctgtggctccaaccccagtgcagccccccattatcgttgctcctgtcgccacagttccagccatgccccaggagaagctggcctcctcccccaaggacaaaaagaagaaggagaaaaaagtggcaaaagtggaaccagctgtcagctctgtagtgaattccatccaggttctcacttcgaaggctgccatcttggaaactgctcccaaggagggcagaaatacagatgtggcccagagcccagaggcaccaaagcaagaggctcctgccaagaagaagtctggttcaaagaaaaaaggtgagcctgggcccccagatgccgacggccctctctacctcccctacaagacgctggtctccacggttgggagcatggtgttcaacgagggcgaggcccagcggctcatcgagatcctgtctgagaaggctggcatcattcaggacacctggcacaaggccactcagaagggtgaccctgtggcgattctgaaacgccagctggaagagaaggaaaaactgctggccacagaacaggaagatgcggctgtcgccaagagcaaactgagggagctcaacaaggagatggcagcagaaaaggccaaagcagcagccggggaggccaaagtgaaaaagcagctggtggcccgggagcaggagatcccgggtcacagtgaagcatctcgaagagattgtagagaagctaaaaggagaacttgaaagttcggaccaggtatgtgctctgctcagagaactctttctcttgtcccgggagcctctttgaaagtgacgttaatgcagaggacacttcactgatttcttcctcatggaccgtgtgccttaagagaggcattctctctcaagccaagggatcttgtccatcctgtttttccttaatgagagacattgactacctcagaggaccctgagacccagccacgggccctgtgcagacctgcccagccctggtgaacagggcttctgccacggccttcacagtcaaggtggccccactgcccccttcagacgccacagggagccctggagaaggtacccttggtacctgcttttgcaagtaaatctaagagcatgtcagtccccaggagtgcccgggtgcagcctgccactttccgtaaggggttctcttgccgcggactagtttctcgtttgcttggtagctggtgggcctcagggatctcccgagaggcctcacctatcccagggccagcctgctccctgaggtgagtgccctttgagcagaggctgctggcgcatgcgtgtgcgtgtctgtgcatctgtccgtgagggagcacacgtcgcatttggaggcagagctggaaaagcacatggcggccgccagcgccgagtgccagaactacgccaaggaggtggcagggctgaggcaacttctcctagaatctcaatctcagctcgatgccgccaagagcgaagcccagaaacagagcgatgagcttgccctggtcaggcagcagttgagtgaaatgaagagccacgtagaggatggtgacatagctggggccccagcttcctccccagaggcgcccccagccgagcaggaccccgttcagctgaagacgcagctggagtggacagaagccatcctggaggatgagcagacacagcggcagaagctcacggccgagtttgaggaggctcagacctcggcatgtcggttacaagaagaattggagaagctccgcacagccggccccctagagtcttcagaaacagaggaggcctcacagctgaaggagagactagaaaaagagaagaagttaacaagtgacctggggcgcgccgccacgagactgcaggagcttctgaagacgacccaggagcagctggcaagggagaaggacacggtgaagaagctgcaggaacagctggaaaaggcagaggacggcagcagctcaaaggagggcacctctgtctgagtttcctctttggaaaaagaagttactgttcaacttaccaaaatgccttacacattccttacaaataaaccaaccaacctacacagcgttatccaggcccaacttccggtactccgagagaagccatgagagacaagtctcttagagccacagaagtagaccttccagagccccagtttgtaaatgaacctgtgtcacatttgataaacactatcctgggcgcagccccgggccaccgccgagtgacgccaaagccctggttgactctgacagccccgtgggtgtgtgggaggccgggcgctctggggtctgtctgtcagtgcaatcgtttagtgttttttcagtggggcggggcgggaagcgggtgggaccgggcagccagttctcaaaggctgtggggccgactggaggccacagcccctcacccctagacgttgccaaccagaactgacgtgtgacctcctgggtgttgatgccattaaaaccaacgttggtgcccggtg

SEQ ID NO: 320229 - DNA, 2429 bp, Homo sapiens
ggcacgaggcgcgcacgcagccagcgagcggccggagcggacggcagacggggcgggcggcgtcagggtcgcagcgtctacagctgctcgggggcggtttcttggcggaggcttggccggctcctctctcccggctccgcggcggctgcgaaggcggcggctcctgccctctcgctttccctctcgcgtctctggctgcagaaagaagcttccggttctgaggtcctggaggtgccatttccctctctgttgaagcaaaggccggggcagacctcctagtgaaaggaaagcaagccaggatggatatttacgacactcaaaccttgggggttgtggtctttggaggattcatggttgtttctgccattggcatcttcctggtgtcgactttctccatgaaggaaacgtcatatgaagaagccctagccaaccagcgcaaggagatggcgaaaactcaccaccagaaagtcgagaagaaaaagaaggagaaaacagtggagaagaaaggaaagaccaagaaaaaggaagagaaacctaatgggaagatacctgatcatgatccagcccccaatgtgactgtcctccttcgagaaccagtgcgggctcctgctgtggctgtggctccaaccccagtgcagccccccattatcgttgctcctgtcgccacagttccagccatgccccaggagaagctggcctcctcccccaaggacaaaaagaagaaggagaaaaaagtggcaaaagtggaaccagctgtcagctctgtagtgaattccatccaggttctcacttcgaaggctgccatcttggaaactgctcccaaggagggcagaaatacagatgtggcccagagcccagaggcaccaaagcaagaggctcctgccaagaagaagtctggttcaaagaaaaaaggtgagcctgggcccccagatgccgacggccctctctacctcccctacaagacgctggtctccacggttgggagcatggtgttcaacgagggcgaggcccagcggctcatcgagatcctgtctgagaaggctggcatcattcaggacacctggcacaaggccactcagaagggtgaccctgtggcgattctgaaacgccagctggaagagaaggaaaaactgctggccacagaacaggaagatgcggctgtcgccaagagcaaactgagggagctcaacaaggagatggcagcagaaaaggccaaagcagcagccggggaggccaaagtgaaaaagcagctggtggcccgggagcaggagagtgagggagcacacgtcgcatttggaggcagagctggaaaagcacatggcggccgccagcgccgagtgccagaactacgccaaggaggtggcagggctgaggcaacttctcctagaatctcaatctcagctcgatgccgccaagagcgaagcccagaaacagagcgatgagcttgccctggtcaggcagcagttgagtgaaatgaagagccacgtagaggatggtgacatagctggggccccagcttcctccccagaggcgcccccagccgagcaggaccccgttcagctgaagacgcagctggagtggacagaagccatcctggaggatgagcagacacagcggcagaagctcacggccgagtttgaggaggctcagacctcggcatgtcggttacaagaagaattggagaagctccgcacagccggccccctagagtcttcagaaacagaggaggcctcacagctgaaggagagactagaaaaagagaagaagttaacaagtgacctggggcgcgccgccacgagactgcaggagcttctgaagacgacccaggagcagctggcaagggagaaggacacggtgaagaagctgcaggaacagctggaaaaggcagaggacggcagcagctcaaaggagggcacctctgtctgagtttcctctttggaaaaagaagttactgttcaacttaccaaaatgccttacacattccttacaaataaaccaaccaacctacacagcgttatccaggcccaacttccggtactccgagagaagccatgagagacaagtctcttagagccacagaagtagaccttccagagccccagtttgtaaatgaacctgtgtcacatttgataaacactatcctgggcgcagccccgggccaccgccgagtgacgccaaagccctggttgactctgacagccccgtgggtgtgtgggaggccgggcgctctggggtctgtctgtcagtgcaatcgtttagtgttttttcagtggggcggggcgggaagcgggtgggaccgggcagccagttctcaaaggctgtggggccgactggaggccacagcccctcacccctagacgttgccaaccagaactgacgtgtgacctcctgggtgttgatgccattaaaaccaacgttggtgcccggtg

SEQ ID NO: 320230 - DNA, 1346 bp, Homo sapiens
tgcctcacctcggtttccccccaggagggcatgctcagagacctgcagaagagcgtggaggaggaggagcaggtgtggagggccaaggtgggcgccgcagaggaggagctccagaagtcccgggtcacagtgaagcatctcgaagagattgtagagaagctaaaaggagaacttgaaagttcggaccaggtgagggagcacacgtcgcatttggaggcagagctggaaaagcacatggcggccgccagcgccgagtgccagaactacgccaaggaggtggcagggctgaggcaacttctcctagaatctcaatctcagctcgatgccgccaagagcgaagcccagaaacagagcgatgagcttgccctggtcaggcagcagttgagtgaaatgaagagccacgtagaggatggtgacatagctggggccccagcttcctccccagaggcgcccccagccgagcaggaccccgttcagctgaagacgcagctggagtggacagaagccatcctggaggatgagcagacacagcggcagaagctcacggccgagtttgaggaggctcagacctcggcatgtcggttacaagaagaattggagaagctccgcacagccggccccctagagtcttcagaaacagaggaggcctcacagctgaaggagagactagaaaaagagaagaagttaacaagtgacctggggcgcgccgccacgagactgcaggagcttctgaagacgacccaggagcagctggcaagggagaaggacacggtgaagaagctgcaggaacagctggaaaaggcagaggacggcagcagctcaaaggagggcacctctgtctgagtttcctctttggaaaaagaagttactgttcaacttaccaaaatgccttacacattccttacaaataaaccaaccaacctacacagcgttatccaggcccaacttccggtactccgagagaagccatgagagacaagtctcttagagccacagaagtagaccttccagagccccagtttgtaaatgaacctgtgtcacatttgataaacactatcctgggcgcagccccgggccaccgccgagtgacgccaaagccctggttgactctgacagccccgtgggtgtgtgggaggccgggcgctctggggtctgtctgtcagtgcaatcgtttagtgttttttcagtggggcggggcgggaagcgggtgggaccgggcagccagttctcaaaggctgtggggccgactggaggccacagcccctcacccctagacgttgccaaccagaactgacgtgtgacctcctgggtgttgatgccattaaaaccaacgttggtgcccggtg

SEQ ID NO: 320231 - DNA, 2779 bp, Homo sapiens
catgttgtcgtgacttttgagtacgccaggcttaggctgcagttatttgaactcgagaggggcccagaaccagggcaagaaggccgagggggcccagaaccagggcaagaaggccgagggtgctcagaaccagggcaaaaaagtagaaggggcccagaaccagggcaagaaggctgagggggcccagaaccagggcaagaaggccgagggggctcagaaccagggcaaaaaggccgagggagcccagaaccagggccaaaaaggagagggagcccagaatcagggtaaaaagacagaaggggctcagggcaaaaaggcagaaaggagtcccaaccaaggcaaaaaaggagagggagctcccatccagggcaaaaaggcagattcggttgctaatcagggcacaaaggtagagggtattacaaaccaggggaaaaaagcagaagggtcccccagtgaaggcaaaaaggcagaagggtcccccaaccaaggcaaaaaggcagacgcagctgccaatcagggtaaaaagacagagtcagcttctgtccagggcagaaatacagatgtggcccagagcccagaggcaccaaagcaagaggctcctgccaagaagaagtctggttcaaagaaaaaaggtgagcctgggcccccagatgccgacggccctctctacctcccctacaagacgctggtctccacggttgggagcatggtgttcaacgagggcgaggcccagcggctcatcgagatcctgtctgagaaggctggcatcattcaggacacctggcacaaggccactcagaagggtgaccctgtggcgattctgaaacgccagctggaagagaaggaaaaactgctggccacagaacaggaagatgcggctgtcgccaagagcaaactgagggagctcaacaaggagatggcagcagaaaaggccaaagcagcagccggggaggccaaagtgaaaaagcagctggtggcccgggagcaggagatcacggctgtgcaggcacgcatgcaggccagctaccgggagcacgtgaaggaggtgcagcagctgcagggcaagatccggactcttcaggagcagctggagaatggccccaacacgcagctggcccgcctgcagcaggagaactccatcctgcgggatgccttgaaccaggccacgagccaggtggagagcaagcagaacgcagagctggccaagcttcggcaggagctcagcaaggtcagcaaagagctggtggagaagtcagaggctgtgcggcaagatgagcagcagcggaaagctctggaagccaaggcagctgccttcgagaagcaggtcctgcagctgcaggcgtcccacagggagagtgaggaggccctgcagaagcgcctggacgaggtcagccgggagctgtgccacacgcagagcagccacgccagcctccgggcggatgccgagaaggcccaggagcaacagcagcagatggccgagctgcacagcaagttacagtcctccgaggcggaggtgcgcagcaaatgcgaggagctgagtggcctccacgggcagctccaggaggccagggcggagaactcccagctcacagagagaatccgttccattgaggccctgctggaggcgggccaggcgcgggatgcccaggacgtccaggccagccaggcggaggctgaccagcagcagactcgcctcaaggagctggagtcccaggtgtcgggtctggagaaggaggccatcgagctcagggaggccgtcgagcagcagaaagtgaagaacaatgacctccgggagaagaactggaaggccatggaggcactggccacggccgagcaggcctgcaaggagaagctgcactccctgacccaggccaaggaggaatcggagaagcagctctgtctgattgaggcgcagaccatggaggccctgctggctctgctcccagaactctctgtcttggcacaacagaattacaccgagtggctgcaggatctcaaagagaaaggccccacgctgctgaagcacccgccagctcccgcggagccctcctcggacctggcctccaagttgagggaggccgaggagacgcagagcacactgcaggccgagtgtgaccagtaccgcagcatcctggcggagacggagggcatgctcagagacctgcagaagagcgtggaggaggaggagcaggtgtggagggccaaggtgggcgccgcagaggaggagctccagaagtcccgggtcacagtgaagcatctcgaagagattgtagagaagctaaaaggagaacttgaaagttcggaccaggtgagggagcacacgtcgcatttggaggcagagctggaaaagcacatggcggccgccagcgccgagtgccagaactacgccaaggaggtggcagggctgaggcaacttctcctagaatctcaatctcagctcgatgccgccaagagcgaagcccagaaacagagcgatgagcttgccctggtcaggcagcagttgagtgaaatgaagagccacgtagaggatggtgacatagctggggccccagcttcctccccagaggcgcccccagccgagcaggaccccgttcaggttagggcggtgagctggtccccagacacatcactaatcccagaagagtgcaggccctgctgcctccgttcggactaaaccccgcactggctgctccagcctccgctgcttccccaccccaccctgctttgccccatttggatcatccaggttcggagaaagccacagagcatggaacagaaa

SEQ ID NO: 320232 - DNA, 3857 bp, Homo sapiens
catgttgtcgtgacttttgagtacgccaggcttaggctgcagttatttgaactcgagaggggcccagaaccagggcaagaaggccgagggggcccagaaccagggcaagaaggccgagggtgctcagaaccagggcaaaaaagtagaaggggcccagaaccagggcaagaaggctgagggggcccagaaccagggcaagaaggccgagggggctcagaaccagggcaaaaaggccgagggagcccagaaccagggccaaaaaggagagggagcccagaatcagggtaaaaagacagaaggggctcagggcaaaaaggcagaaaggagtcccaaccaaggcaaaaaaggagagggagctcccatccagggcaaaaaggcagattcggttgctaatcagggcacaaaggtagagggtattacaaaccaggggaaaaaagcagaagggtcccccagtgaaggcaaaaaggcagaagggtcccccaaccaaggcaaaaaggcagacgcagctgccaatcagggtaaaaagacagagtcagcttctgtccagggcagaaatacagatgtggcccagagcccagaggcaccaaagcaagaggctcctgccaagaagaagtctggttcaaagaaaaaaggtgagcctgggcccccagatgccgacggccctctctacctcccctacaagacgctggtctccacggttgggagcatggtgttcaacgagggcgaggcccagcggctcatcgagatcctgtctgagaaggctggcatcattcaggacacctggcacaaggccactcagaagggtgaccctgtggcgattctgaaacgccagctggaagagaaggaaaaactgctggccacagaacaggaagatgcggctgtcgccaagagcaaactgagggagctcaacaaggagatggcagcagaaaaggccaaagcagcagccggggaggccaaagtgaaaaagcagctggtggcccgggagcaggagatcacggctgtgcaggcacgcatgcaggccagctaccgggagcacgtgaaggaggtgcagcagctgcagggcaagatccggactcttcaggagcagctggagaatggccccaacacgcagctggcccgcctgcagcaggagaactccatcctgcgggatgccttgaaccaggccacgagccaggtggagagcaagcagaacgcagagctggccaagcttcggcaggagctcagcaaggtcagcaaagagctggtggagaagtcagaggctgtgcggcaagatgagcagcagcggaaagctctggaagccaaggcagctgccttcgagaagcaggtcctgcagctgcaggcgtcccacagggagagtgaggaggccctgcagaagcgcctggacgaggtcagccgggagctgtgccacacgcagagcagccacgccagcctccgggcggatgccgagaaggcccaggagcaacagcagcagatggccgagctgcacagcaagttacagtcctccgaggcggaggtgcgcagcaaatgcgaggagctgagtggcctccacgggcagctccaggaggccagggcggagaactcccagctcacagagagaatccgttccattgaggccctgctggaggcgggccaggcgcgggatgcccaggacgtccaggccagccaggcggaggctgaccagcagcagactcgcctcaaggagctggagtcccaggtgtcgggtctggagaaggaggccatcgagctcagggaggccgtcgagcagcagaaagtgaagaacaatgacctccgggagaagaactggaaggccatggaggcactggccacggccgagcaggcctgcaaggagaagctgcactccctgacccaggccaaggaggaatcggagaagcagctctgtctgattgaggcgcagaccatggaggccctgctggctctgctcccagaactctctgtcttggcacaacagaattacaccgagtggctgcaggatctcaaagagaaaggccccacgctgctgaagcacccgccagctcccgcggagccctcctcggacctggcctccaagttgagggaggccgaggagacgcagagcacactgcaggccgagtgtgaccagtaccgcagcatcctggcggagacggagggcatgctcagagacctgcagaagagcgtggaggaggaggagcaggtgtggagggccaaggtgggcgccgcagaggaggagctccagaagtcccgggtcacagtgaagcatctcgaagagattgtagagaagctaaaaggagaacttgaaagttcggaccaggtatgtgctctgctcagagaactctttctcttgtcccgggagcctctttgaaagtgacgttaatgcagaggacacttcactgatttcttcctcatggaccgtgtgccttaagagaggcattctctctcaagccaagggatcttgtccatcctgtttttccttaatgagagacattgactacctcagaggaccctgagacccagccacgggccctgtgcagacctgcccagccctggtgaacagggcttctgccacggccttcacagtcaaggtggccccactgcccccttcagacgccacagggagccctggagaaggtacccttggtacctgcttttgcaagtaaatctaagagcatgtcagtccccaggagtgcccgggtgcagcctgccactttccgtaaggggttctcttgccgcggactagtttctcgtttgcttggtagctggtgggcctcagggatctcccgagaggcctcacctatcccagggccagcctgctccctgaggtgagtgccctttgagcagaggctgctggcgcatgcgtgtgcgtgtctgtgcatctgtccgtgagggagcacacgtcgcatttggaggcagagctggaaaagcacatggcggccgccagcgccgagtgccagaactacgccaaggaggtggcaggggtgagtctgccccccaaggagtgcagcccctgcccagcagatctgcggtcctccctgagctgcttctcctcagccctgtgggagcagctctcggtgacataagccttgaagtccgagtcctcaggcgtttgcccgaagcctcacaggcccctcgttgggctgtcaggcctgaggtgtctctcagggcaggtttcaggaggcgtttgacgttctaggttatccctccgcaaggggattctctgcctggcttgctgatgtcatatctggtggggagtggatttagatctgacactttttctgctcttcagaagcagaagcacaagcccagtatcccaattctggtttaatctcaaacttttgggccaggcacagcggctcatgcctgtaatcccagcactttgaaaggctgaggtggattgctcgaggccagaaatttgagaccggcctgggcaacatagcaagaccgcatctgtaccaaaaaaaaaaaaaaaagccaggcacactggtgggcacctccgttcccagctgcttaggaggctgatgcaggaggattgcctgagcccaagagttcaagaccagcgtggatgacagattgagaccatctctgaaaaaaaaaatcatctccaacttttggcccttttttgccagagataatcagtaaacatttgtgaaggcctgaaagaggtacgcagtgaacaccattcttcctaagtcctcaaaaaagaaatcgtagctgtaggaagcctggcgagccctgtgccggcccgatgctgtgaccctcctcagggttttggttaagtggatgtgttaggttttatgtttcggcgctaactcacggggactggttttctccttttctctccttttttcccatcacccgcctct

SEQ ID NO: 320233 - DNA, 888 bp, Homo sapiens
cgggacagtacggacgtggagctagaactggcagagaaccatgctaggtgctggcaaggaccatcctcccactgccagccaatggggagcctcacttcccggctgggggccgtgagggcacacagggtccttccaggcagcccattagcactccacactgagggacacaggctgttggctccattttagggaaaatcaacttctcccaaatgtgagggggatgtgtgggggctgaacagcaaattctagcttctctgcagctatccagtagcatgagaaaatcaatctagtcctctcttcgggaggactaagggtgaagaagctgcaggaacagctggaaaaggcagaggacggcagcagctcaaaggagggcacctctgtctgagtttcctctttggaaaaagaagttactgttcaacttaccaaaatgccttacacattccttacaaataaaccaaccaacctacacagcgttatccaggcccaacttccggtactccgagagaagccatgagagacaagtctcttagagccacagaagtagaccttccagagccccagtttgtaaatgaacctgtgtcacatttgataaacactatcctgggcgcagccccgggccaccgccgagtgacgccaaagccctggttgactctgacagccccgtgggtgtgtgggaggccgggcgctctggggtctgtctgtcagtgcaatcgtttagtgttttttcagtggggcggggcgggaagcgggtgggaccgggcagccagttctcaaaggctgtggggccgactggaggccacagcccctcacccctagacgttgccaaccagaactgacgtgtgacctcctgggtgttgatgccattaaaaccaacgttggtgcccggtg

SEQ ID NO: 320234 - DNA, 1415 bp, Homo sapiens
ggcacgaggcgcgcacgcagccagcgagcggccggagcggacggcagacggggcgggcggcgtcagggtcgcagcgtctacagctgctcgggggcggtttcttggcggaggcttggccggctcctctctcccggctccgcggcggctgcgaaggcggcggctcctgccctctcgctttccctctcgcgtctctggctgcagaaagaagcttccggttctgaggtcctggaggtgccatttccctctctgttgaagcaaaggccggggcagacctcctagtgaaaggaaagcaagccaggatggatatttacgacactcaaaccttgggggttgtggtctttggaggattcatggttgtttctgccattggcatcttcctggtgtcgactttctccatgaaggaaacgtcatatgaagaagccctagccaaccagcgcaaggagatggcgaaaactcaccaccagaaagtcgagaagaaaaagaaggagaaaacagtggagaagaaaggaaagaccaagaaaaaggaagagaaacctaatgggaagatacctgatcatgatccagcccccaatgtgactgtcctccttcgagaaccagtgcgggctcctgctgtggctgtggctccaaccccagtgcagccccccattatcgttgctcctgtcgccacagttccagccatgccccaggagaagctggcctcctcccccaaggacaaaaagaagaaggagaaaaaagtggcaaaagtggaaccagctgtcagctctgtagtgaattccatccaggttctcacttcgaaggctgccatcttggaaactgctcccaaggaggtgccgatggtggtggtgcccccagtgggtgccaagggcaacacaccagccactggcactactcagggcaaaaaggcggaggggactcagaatcaaagcaaaaaggctgaaggagccccaaaccagggcagaaaggcagagggaaccccaaaccagggcaaaaagacagagggaaccccaaaccaagggaaaaaggcagagggaaccccaaaccaaggcaaaaaggcagaaggaaccccaaaccaaggcaaaaaggcggagggggcccagaaccagggtaaaaaggtagatacaaccccaaaccaggggaaaaaggtggagggggccccaacccagggcagaaaggccgagggggctcagaaccaggccaaaaaggtagaaggggcccagaaccagggcaaaaaggcagagggggcccagaatcagggcaaaaagggagagggggcccagaaccagggcaagaaggccgagggggcccagaatcagggcaagaaggccgagggggcccagaatcagggcaagaagccgaggggcccagaatcagggcaagaagccgaggggcccagaatcaggcagaaggctgagggg

SEQ ID NO: 320235 - DNA, 657 bp, Homo sapiens
catgttgtcgtgacttttgagtacgccaggcttaggctgcagttatttgaactcgagaggggcccagaaccagggcaagaaggccgagggggcccagaaccagggcaagaaggccgagggtgctcagaaccagggcaaaaaagtagaaggggcccagaaccagggcaagaaggctgagggggcccagaaccagggcaagaaggccgagggggctcagaaccagggcaaaaaggccgagggagcccagaaccagggccaaaaaggagagggagcccagaatcagggtaaaaagacagaaggggctcagggcaaaaaggcagaaaggagtcccaaccaaggcaaaaaaggagagggagctcccatccagggcaaaaaggcagattcggttgctaatcagggcacaaaggtagagggtattacaaaccaggggaaaaaagcagaagggtcccccagtgaaggcaaaaaggcagaatcagggcaaaaagggagagggggcccagaaccagggcaagaaggccgagggggcccagaatcagggcaagaaggctgtggggccgactggaggccacagcccctcacccctagacgttgccaaccagaactgacgtgtgacctcctgggtgttgatgccattaaaaccaacgttggtgcccggtg

SEQ ID NO: 320236 - DNA, 441 bp, Homo sapiens
gcagaaatacagatgtggcccagagcccagaggcaccaaagcaagaggctcctgccaagaagaagtctggttcaaagaaaaaaggtgagcctggtaagtaactgatttctttatgaacttagaaggaaaggctgtctttaaatgacttatggattctctcggggagtgccacctgtatcagtcagctattgtcataataaggctgcgtaacaaacattcaaaaaaaaattcagtggccttcaacagcagtcatttattgttgctcatgcttctggaggttggcagatgtgagctttctcggttggtggctctgcctcaatctggttttaactgggttggtgactctttgctacaggttgagctcaggtcagttccatgtgtggtccttctggcgccctccagggcagaggcccttcatagttacaacagaggcacaaaagg

SEQ ID NO: 320237 - DNA, 549 bp, Homo sapiens
  misc_feature (12)..(12): n is a, c, g, or t
  misc_feature (42)..(42): n is a, c, g, or t
  misc_feature (50)..(50): n is a, c, g, or t
  misc_feature (71)..(71): n is a, c, g, or t
  misc_feature (114)..(114): n is a, c, g, or t
  misc_feature (118)..(118): n is a, c, g, or t
  misc_feature (182)..(182): n is a, c, g, or t
  misc_feature (330)..(330): n is a, c, g, or t
  misc_feature (355)..(355): n is a, c, g, or t
cccttccaaagnagaagcttctcccaaagttccagggttggnaggttcancctcccattatctttacattntgtgtcatgccaaggaaaaaaaacatgcccctattaccttganaagntcccgtaggtcccttactattcttaaactctcacaaagtgggtgtgacccccatccctgtgcangctcctttgttaactttggccactcattcttcacattcttgaaagcgccagaacccaccaataaatggccgggtcctctgcttaaccagattgtttcctgcaaagcgacatgtcctccaagcttcaatctcacatgccatgttggatntggcctaattccacctccaatacanaggaggcatggagatgtctgggttaatgtgccaggtcataacggcacgagagcgggtgggaccgggcagccagttctcaaaggctgtggggccgactggaggccacagcccctcacccctagacgttgccaaccagaactgacgtgtgacctcctgggtgttgatgccattaaaaccaacgttggtgcccggtg

SEQ ID NO: 320238 - DNA, 3465 bp, Homo sapiens
catgttgtcgtgacttttgagtacgccaggcttaggctgcagttatttgaactcgagaggggcccagaaccagggcaagaaggccgagggggcccagaaccagggcaagaaggccgagggtgctcagaaccagggcaaaaaagtagaaggggcccagaaccagggcaagaaggctgagggggcccagaaccagggcaagaaggccgagggggctcagaaccagggcaaaaaggccgagggagcccagaaccagggccaaaaaggagagggagcccagaatcagggtaaaaagacagaaggggctcagggcaaaaaggcagaaaggagtcccaaccaaggcaaaaaaggagagggagctcccatccagggcaaaaaggcagattcggttgctaatcagggcacaaaggtagagggtattacaaaccaggggaaaaaagcagaagggtcccccagtgaaggcaaaaaggcagaagggtcccccaaccaaggcaaaaaggcagacgcagctgccaatcagggtaaaaagacagagtcagcttctgtccagggcagaaatacagatgtggcccagagcccagaggcaccaaagcaagaggctcctgccaagaagaagtctggttcaaagaaaaaaggtgagcctgggcccccagatgccgacggccctctctacctcccctacaagacgctggtctccacggttgggagcatggtgttcaacgagggcgaggcccagcggctcatcgagatcctgtctgagaaggctggcatcattcaggacacctggcacaaggccactcagaagggtgaccctgtggcgattctgaaacgccagctggaagagaaggaaaaactgctggccacagaacaggaagatgcggctgtcgccaagagcaaactgagggagctcaacaaggagatggcagcagaaaaggccaaagcagcagccggggaggccaaagtgaaaaagcagctggtggcccgggagcaggagatcacggctgtgcaggcacgcatgcaggccagctaccgggagcacgtgaaggaggtgcagcagctgcagggcaagatccggactcttcaggagcagctggagaatggccccaacacgcagctggcccgcctgcagcaggagaactccatcctgcgggatgccttgaaccaggccacgagccaggtggagagcaagcagaacgcagagctggccaagcttcggcaggagctcagcaaggtcagcaaagagctggtggagaagtcagaggctgtgcggcaagatgagcagcagcggaaagctctggaagccaaggcagctgccttcgagaagcaggtcctgcagctgcaggcgtcccacagggagagtgaggaggccctgcagaagcgcctggacgaggtcagccgggagctgtgccacacgcagagcagccacgccagcctccgggcggatgccgagaaggcccaggagcaacagcagcagatggccgagctgcacagcaagttacagtcctccgaggcggaggtgcgcagcaaatgcgaggagctgagtggcctccacgggcagctccaggaggccagggcggagaactcccagctcacagagagaatccgttccattgaggccctgctggaggcgggccaggcgcgggatgcccaggacgtccaggccagccaggcggaggctgaccagcagcagactcgcctcaaggagctggagtcccaggtgtcgggtctggagaaggaggccatcgagctcagggaggccgtcgagcagcagaaagtgaagaacaatgacctccgggagaagaactggaaggccatggaggcactggccacggccgagcaggcctgcaaggagaagctgcactccctgacccaggccaaggaggaatcggagaagcagctctgtctgattgaggcgcagaccatggaggccctgctggctctgctcccagaactctctgtcttggcacaacagaattacaccgagtggctgcaggatctcaaagagaaaggccccacgctgctgaagcacccgccagctcccgcggagccctcctcggacctggcctccaagttgagggaggccgaggagacgcagagcacactgcaggccgagtgtgaccagtaccgcagcatcctggcggagacggagggcatgctcagagacctgcagaagagcgtggaggaggaggagcaggtgtggagggccaaggtgggcgccgcagaggaggagctccagaagtcccgggtcacagtgaagcatctcgaagagattgtagagaagctaaaaggagaacttgaaagttcggaccaggtgagggagcacacgtcgcatttggaggcagagctggaaaagcacatggcggccgccagcgccgagtgccagaactacgccaaggaggtggcagggctgaggcaacttctcctagaatctcaatctcagctcgatgccgccaagagcgaagcccagaaacagagcgatgagcttgccctggtcaggcagcagttgagtgaaatgaagagccacgtagaggatggtgacatagctggggccccagcttcctccccagaggcgcccccagccgagcaggaccccgttcagctgaagacgcagctggagtggacagaagccatcctggaggatgagcagacacagcggcagaagctcacggccgagtttgaggaggctcagacctcggcatgtcggttacaagaagaattggagaagctccgcacagccggccccctagagtcttcagaaacagaggaggcctcacagctgaaggagagactagaaaaagagaagaagttaacaagtgacctggggcgcgccgccacgagactgcaggagcttctgaagacgacccaggagcagctggcaagggagaaggacacggtgaagaagctgcaggaacagctggaaaaggcagaggacggcagcagctcaaaggagggcacctctgtctgagtttcctctttggaaaaagaagttactgttcaacttaccaaaatgccttacacattccttacaaataaaccaaccaacctacacagcgttatccaggcccaacttccggtactccgagagaagccatgagagacaagtctcttagagccacagaagtagaccttccagagccccagtttgtaaatgaacctgtgtcacatttgataaacactatcctgggcgcagccccgggccaccgccgagtgacgccaaagccctggttgactctgacagccccgtgggtgtgtgggaggccgggcgctctggggtctgtctgtcagtgcaatcgtttagtgttttttcagtggggcggggcgggaagcgggtgggaccgggcagccagttctcaaaggctgtggggccgactggaggccacagcccctcacccctagacgttgccaaccagaactgacgtgtgacctcctgggtgttgatgccattaaaaccaacgttggtgcccggtg

SEQ ID NO: 320239 - DNA, 3672 bp, Homo sapiens
actagtccacggttggctggaggggagccagaagcctggaggatgcaggcattcttactgctgcaggactctgtgggcgagttgggctggcagtcagatttctgggggctctgtggactaaccagaccaaagaagcttccggttctgaggtcctggaggtgccatttccctctctgttgaagcaaaggccggggcagacctcctagtgaaaggaaagcaagccaggatggatatttacgacactcaaaccttgggggttgtggtctttggaggattcatggttgtttctgccattggcatcttcctggtgtcgactttctccatgaaggaaacgtcatatgaagaagccctagccaaccagcgcaaggagatggcgaaaactcaccaccagaaagtcgagaagaaaaagaaggagaaaacagtggagaagaaaggaaagaccaagaaaaaggaagagaaacctaatgggaagatacctgatcatgatccagcccccaatgtgactgtcctccttcgagaaccagtgcgggctcctgctgtggctgtggctccaaccccagtgcagccccccattatcgttgctcctgtcgccacagttccagccatgccccaggagaagctggcctcctcccccaaggacaaaaagaagaaggagaaaaaagtggcaaaagtggaaccagctgtcagctctgtagtgaattccatccaggttctcacttcgaaggctgccatcttggaaactgctcccaaggagggcagaaatacagatgtggcccagagcccagaggcaccaaagcaagaggctcctgccaagaagaagtctggttcaaagaaaaaaggtgagcctgggcccccagatgccgacggccctctctacctcccctacaagacgctggtctccacggttgggagcatggtgttcaacgagggcgaggcccagcggctcatcgagatcctgtctgagaaggctggcatcattcaggacacctggcacaaggccactcagaagggtgaccctgtggcgattctgaaacgccagctggaagagaaggaaaaactgctggccacagaacaggaagatgcggctgtcgccaagagcaaactgagggagctcaacaaggagatggcagcagaaaaggccaaagcagcagccggggaggccaaagtgaaaaagcagctggtggcccgggagcaggagatcacggctgtgcaggcacgcatgcaggccagctaccgggagcacgtgaaggaggtgcagcagctgcagggcaagatccggactcttcaggagcagctggagaatggccccaacacgcagctggcccgcctgcagcaggagaactccatcctgcgggatgccttgaaccaggccacgagccaggtggagagcaagcagaacgcagagctggccaagcttcggcaggagctcagcaaggtcagcaaagagctggtggagaagtcagaggctgtgcggcaagatgagcagcagcggaaagctctggaagccaaggcagctgccttcgagaagcaggtcctgcagctgcaggcgtcccacagggagagtgaggaggccctgcagaagcgcctggacgaggtcagccgggagctgtgccacacgcagagcagccacgccagcctccgggcggatgccgagaaggcccaggagcaacagcagcagatggccgagctgcacagcaagttacagtcctccgaggcggaggtgcgcagcaaatgcgaggagctgagtggcctccacgggcagctccaggaggccagggcggagaactcccagctcacagagagaatccgttccattgaggccctgctggaggcgggccaggcgcgggatgcccaggacgtccaggccagccaggcggaggctgaccagcagcagactcgcctcaaggagctggagtcccaggtgtcgggtctggagaaggaggccatcgagctcagggaggccgtcgagcagcagaaagtgaagaacaatgacctccgggagaagaactggaaggccatggaggcactggccacggccgagcaggcctgcaaggagaagctgcactccctgacccaggccaaggaggaatcggagaagcagctctgtctgattgaggcgcagaccatggaggccctgctggctctgctcccagaactctctgtcttggcacaacagaattacaccgagtggctgcaggatctcaaagagaaaggccccacgctgctgaagcacccgccagctcccgcggagccctcctcggacctggcctccaagttgagggaggccgaggagacgcagagcacactgcaggccgagtgtgaccagtaccgcagcatcctggcggagacggagggcatgctcagagacctgcagaagagcgtggaggaggaggagcaggtgtggagggccaaggtgggcgccgcagaggaggagctccagaagtcccgggtcacagtgaagcatctcgaagagattgtagagaagctaaaaggagaacttgaaagttcggaccaggtgagggagcacacgtcgcatttggaggcagagctggaaaagcacatggcggccgccagcgccgagtgccagaactacgccaaggaggtggcagggctgaggcaacttctcctagaatctcaatctcagctcgatgccgccaagagcgaagcccagaaacagagcgatgagcttgccctggtcaggcagcagttgagtgaaatgaagagccacgtagaggatggtgacatagctggggccccagcttcctccccagaggcgcccccagccgagcaggaccccgttcagctgaagacgcagctggagtggacagaagccatcctggaggatgagcagacacagcggcagaagctcacggccgagtttgaggaggctcagacctcggcatgtcggttacaagaagaattggagaagctccgcacagccggccccctagagtcttcagaaacagaggaggcctcacagctgaaggagagactagaaaaagagaagaagttaacaagtgacctggggcgcgccgccacgagactgcaggagcttctgaagacgacccaggagcagctggcaagggagaaggacacggtgaagaagctgcaggaacagctggaaaaggcagaggacggcagcagctcaaaggagggcacctctgtctgagtttcctctttggaaaaagaagttactgttcaacttaccaaaatgccttacacattccttacaaataaaccaaccaacctacacagcgttatccaggcccaacttccggtactccgagagaagccatgagagacaagtctcttagagccacagaagtagaccttccagagccccagtttgtaaatgaacctgtgtcacatttgataaacactatcctgggcgcagccccgggccaccgccgagtgacgccaaagccctggttgactctgacagccccgtgggtgtgtgggaggccgggcgctctggggtctgtctgtcagtgcaatcgtttagtgttttttcagtggggcggggcgggaagcgggtgggaccgggcagccagttctcaaaggctgtggggccgactggaggccacagcccctcacccctagacgttgccaaccagaactgacgtgtgacctcctgggtgttgatgccattaaaaccaacgttggtgcccggtg

SEQ ID NO: 320240 - DNA, 2640 bp, Homo sapiens
gggaacacagcggatgtcgccgatatctacatccgagtggatctctatgaacgcgtagataggcctctattacacaggccataaccccagcccggcgaggctcaagagatgatcccagcacgctggtggccctcctgatgcagcgacatcacgggtgagcatgtgcggcatgcatcgccatgcgtaccgggaagcatccctgagggatcgttactcgatgtgcatggctgaactccatattcttcatgagcagctgtgtgaatggaccgctagcctagcgtgacgtctggcccgcctgcagcaggagaactccatcctgcgggatgccttgaaccaggccacgagccaggtggagagcaagcagaacgcagagctggccaagcttcggcaggagctcagcaaggtcagcaaagagctggtggagaagtcagaggctgtgcggcaagatgagcagcagcggaaagctctggaagccaaggcagctgccttcgagaagcaggtcctgcagctgcaggcgtcccacagggagagtgaggaggccctgcagaagcgcctggacgaggtcagccgggagctgtgccacacgcagagcagccacgccagcctccgggcggatgccgagaaggcccaggagcaacagcagcagatggccgagctgcacagcaagttacagtcctccgaggcggaggtgcgcagcaaatgcgaggagctgagtggcctccacgggcagctccaggaggccagggcggagaactcccagctcacagagagaatccgttccattgaggccctgctggaggcgggccaggcgcgggatgcccaggacgtccaggccagccaggcggaggctgaccagcagcagactcgcctcaaggagctggagtcccaggtgtcgggtctggagaaggaggccatcgagctcagggaggccgtcgagcagcagaaagtgaagaacaatgacctccgggagaagaactggaaggccatggaggcactggccacggccgagcaggcctgcaaggagaagctgcactccctgacccaggccaaggaggaatcggagaagcagctctgtctgattgaggcgcagaccatggaggccctgctggctctgctcccagaactctctgtcttggcacaacagaattacaccgagtggctgcaggatctcaaagagaaaggccccacgctgctgaagcacccgccagctcccgcggagccctcctcggacctggcctccaagttgagggaggccgaggagacgcagagcacactgcaggccgagtgtgaccagtaccgcagcatcctggcggagacggagggcatgctcagagacctgcagaagagcgtggaggaggaggagcaggtgtggagggccaaggtgggcgccgcagaggaggagctccagaagtcccgggtcacagtgaagcatctcgaagagattgtagagaagctaaaaggagaacttgaaagttcggaccaggtgagggagcacacgtcgcatttggaggcagagctggaaaagcacatggcggccgccagcgccgagtgccagaactacgccaaggaggtggcagggctgaggcaacttctcctagaatctcaatctcagctcgatgccgccaagagcgaagcccagaaacagagcgatgagcttgccctggtcaggcagcagttgagtgaaatgaagagccacgtagaggatggtgacatagctggggccccagcttcctccccagaggcgcccccagccgagcaggaccccgttcagctgaagacgcagctggagtggacagaagccatcctggaggatgagcagacacagcggcagaagctcacggccgagtttgaggaggctcagacctcggcatgtcggttacaagaagaattggagaagctccgcacagccggccccctagagtcttcagaaacagaggaggcctcacagctgaaggagagactagaaaaagagaagaagttaacaagtgacctggggcgcgccgccacgagactgcaggagcttctgaagacgacccaggagcagctggcaagggagaaggacacggtgaagaagctgcaggaacagctggaaaaggcagaggacggcagcagctcaaaggagggcacctctgtctgagtttcctctttggaaaaagaagttactgttcaacttaccaaaatgccttacacattccttacaaataaaccaaccaacctacacagcgttatccaggcccaacttccggtactccgagagaagccatgagagacaagtctcttagagccacagaagtagaccttccagagccccagtttgtaaatgaacctgtgtcacatttgataaacactatcctgggcgcagccccgggccaccgccgagtgacgccaaagccctggttgactctgacagccccgtgggtgtgtgggaggccgggcgctctggggtctgtctgtcagtgcaatcgtttagtgttttttcagtggggcggggcgggaagcgggtgggaccgggcagccagttctcaaaggctgtggggccgactggaggccacagcccctcacccctagacgttgccaaccagaactgacgtgtgacctcctgggtgttgatgccattaaaaccaacgttggtgcccggtg

SEQ ID NO: 320241 - DNA, 3422 bp, Homo sapiens
catgttgtcgtgacttttgagtacgccaggcttaggctgcagttatttgaactcgagaggggcccagaaccagggcaagaaggccgagggggcccagaaccagggcaagaaggccgagggtgctcagaaccagggcaaaaaagtagaaggggcccagaaccagggcaagaaggctgagggggcccagaaccagggcaagaaggccgagggggctcagaaccagggcaaaaaggccgagggagcccagaaccagggccaaaaaggagagggagcccagaatcagggtaaaaagacagaaggggctcagggcaaaaaggcagaaaggagtcccaaccaaggcaaaaaaggagagggagctcccatccagggcaaaaaggcagattcggttgctaatcagggcacaaaggtagagggtattacaaaccaggggaaaaaagcagaagggtcccccagtgaaggcaaaaaggcagaagggtcccccaaccaaggcaaaaaggcagacgcagctgccaatcagggtaaaaagacagagtcagcttctgtccagggcagaaatacagatgtggcccagagcccagaggcaccaaagcaagaggctcctgccaagaagaagtctggttcaaagaaaaaaggtgagcctgggcccccagatgccgacggccctctctacctcccctacaagacgctggtctccacggttgggagcatggtgttcaacgagggcgaggcccagcggctcatcgagatcctgtctgagaaggctggcatcattcaggacacctggcacaaggccactcagaagggtgaccctgtggcgattctgaaacgccagctggaagagaaggaaaaactgctggccacagaacaggaagatgcggctgtcgccaagagcaaactgagggagctcaacaaggagatggcagcagaaaaggccaaagcagcagccggggaggccaaagtgaaaaagcagctggtggcccgggagcaggagatcacggctgtgcaggcacgcatgcaggccagctaccgggagcacgtgaaggaggtgcagcagctgcagggcaagatccggactcttcaggagcagctggagaatggccccaacacgcagctggcccgcctgcagcaggagaactccatcctgcgggatgccttgaaccaggccacgagccaggtggagagcaagcagaacgcagagctggccaagcttcggcaggagctcagcaaggtcagcaaagagctggtggagaagtcagaggctgtgcggcaagatgagcagcagcggaaagctctggaagccaaggcagctgccttcgagaagcaggtcctgcagctgcaggcgtcccacagggagagtgaggaggccctgcagaagcgcctggacgaggtcagccgggagctgtgccacacgcagagcagccacgccagcctccgggcggatgccgagaaggcccaggagcaacagcagcagatggccgagctgcacagcaagttacagtcctccgaggcggaggtgcgcagcaaatgcgaggagctgagtggcctccacgggcagctccaggaggccagggcggagaactcccagctcacagagagaatccgttccattgaggccctgctggaggcgggccaggcgcgggatgcccaggacgtccaggccagccaggcggaggctgaccagcagcagactcgcctcaaggagctggagtcccaggtgtcgggtctggagaaggaggccatcgagctcagggaggccgtcgagcagcagaaagtgaagaacaatgacctccgggagaagaactggaaggccatggaggcactggccacggccgagcaggcctgcaaggagaagctgcactccctgacccaggccaaggaggaatcggagaagcagctctgtctgattgaggcgcagaccatggaggccctgctggctctgctcccagaactctctgtcttggcacaacagaattacaccgagtggctgcaggatctcaaagagaaaggccccacgctgctgaagcacccgccagctcccgcggagccctcctcggacctggcctccaagttgagggaggccgaggagacgcagagcacactgcaggccgagtgtgaccagtaccgcagcatcctggcggagacggagggcatgctcagagacctgcagaagagcgtggaggaggaggagcaggtgtggagggccaaggtgggcgccgcagaggaggagctccagaagtcccgggtcacagtgaagcatctcgaagagattgtagagaagctaaaaggagaacttgaaagttcggaccaggtgagggagcacacgtcgcatttggaggcagagctggaaaagcacatggcggccgccagcgccgagtgccagaactacgccaaggaggtggcagggctgaggcaacttctcctagaatctcaatctcagctcgatgccgccaagagcgaagcccagaaacagagcgatgagcttgccctggtcaggcagcagttgagtgaaatgaagagccacgtagaggatggtgacatagctggggccccagcttcctccccagaggcgcccccagccgagcaggaccccgttcagctgaagacgcagctggagtggacagaagccatcctggaggatgagcagacacagcggcagaagctcacggccgagtttgaggaggctcagacctcggcatgtcggttacaagaagaattggagaagctccgcacagccggccccctagagtcttcagaaacagaggaggcctcacagctgaaggagagactagaaaaagagaagaagttaacaagtgacctggggcgcgccgccacgagactgcaggagcttctgaagacgacccaggagcagctggcaagggagaaggacacggtgaagaagctgcaggaacagctggaaaaggcagaggacggcagcagctcaaaggagggcacctctgtctgagtttcctctttggaaaaagaagttactgttcaacttaccaaaatgccttacacattccttacaaataaaccaaccaacctacacagcgttatccaggcccaacttccggtactccgagagaagccatgagagacaagtctcttagagccacagaagtagaccttccagagccccagtttgtaaatgaacctgtgtcacatttgataaacactatcctgggcgcagccccgggccaccgccgagtgacgccaaagccctggttgactctgtctgtcagtgcaatcgtttagtgttttttcagtggggcggggcgggaagcgggtgggaccgggcagccagttctcaaaggctgtggggccgactggaggccacagcccctcacccctagacgttgccaaccagaactgacgtgtgacctcctgggtgttgatgccattaaaaccaacgttggtgcccggtg

SEQ ID NO: 320242 - DNA, 1754 bp, Homo sapiens
ctcgaattcgacggtttctccttggccatcgagctcagggaggccgtcgagcagcagaaagtgaagaacaatgacctccgggagaagaactggaaggccatggaggcactggccacggccgagcaggcctgcaaggagaagctgcactccctgacccaggccaaggaggaatcggagaagcagctctgtctgattgaggcgcagaccatggaggccctgctggctctgctcccagaactctctgtcttggcacaacagaattacaccgagtggctgcaggatctcaaagagaaaggccccacgctgctgaagcacccgccagctcccgcggagccctcctcggacctggcctccaagttgagggaggccgaggagacgcagagcacactgcaggccgagtgtgaccagtaccgcagcatcctggcggagacggagggcatgctcagagacctgcagaagagcgtggaggaggaggagcaggtgtggagggccaaggtgggcgccgcagaggaggagctccagaagtcccgggtcacagtgaagcatctcgaagagattgtagagaagctaaaaggagaacttgaaagttcggaccaggtgagggagcacacgtcgcatttggaggcagagctggaaaagcacatggcggccgccagcgccgagtgccagaactacgccaaggaggtggcagggctgaggcaacttctcctagaatctcaatctcagctcgatgccgccaagagcgaagcccagaaacagagcgatgagcttgccctggtcaggcagcagttgagtgaaatgaagagccacgtagaggatggtgacatagctggggccccagcttcctccccagaggcgcccccagccgagcaggaccccgttcagctgaagacgcagctggagtggacagaagccatcctggaggatgagcagacacagcggcagaagctcacggccgagtttgaggaggctcagacctcggcatgtcggttacaagaagaattggagaagctccgcacagccggccccctagagtcttcagaaacagaggaggcctcacagctgaaggagagactagaaaaagagaagaagttaacaagtgacctggggcgcgccgccacgagactgcaggagcttctgaagacgacccaggagcagctggcaagggagaaggacacggtgaagaagctgcaggaacagctggaaaaggcagaggacggcagcagctcaaaggagggcacctctgtctgagtttcctctttggaaaaagaagttactgttcaacttaccaaaatgccttacacattccttacaaataaaccaaccaacctacacagcgttatccaggcccaacttccggtactccgagagaagccatgagagacaagtctcttagagccacagaagtagaccttccagagccccagtttgtaaatgaacctgtgtcacatttgataaacactatcctgggcgcagccccgggccaccgccgagtgacgccaaagccctggttgactctgacagccccgtgggtgtgtgggaggccgggcgctctggggtctgtctgtcagtgcaatcgtttagtgttttttcagtggggcggggcgggaagcgggtgggaccgggcagccagttctcaaaggctgtggggccgactggaggccacagcccctcacccctagacgttgccaaccagaactgacgtgtgacctcctgggtgttgatgccattaaaaccaacgttggtgcccggtg

SEQ ID NO: 320243 - DNA, 3411 bp, Homo sapiens
catgttgtcgtgacttttgagtacgccaggcttaggctgcagttatttgaactcgagaggggcccagaaccagggcaagaaggccgagggggcccagaaccagggcaagaaggccgagggtgctcagaaccagggcaaaaaagtagaaggggcccagaaccagggcaagaaggctgagggggcccagaaccagggcaagaaggccgagggggctcagaaccagggcaaaaaggccgagggagcccagaaccagggccaaaaaggagagggagcccagaatcagggtaaaaagacagaaggggctcagggcaaaaaggcagaaaggagtcccaaccaaggcaaaaaaggagagggagctcccatccagggcaaaaaggcagattcggttgctaatcagggcacaaaggtagagggtattacaaaccaggggaaaaaagcagaagggtcccccagtgaaggcaaaaaggcagaagggtcccccaaccaaggcaaaaaggcagacgcagctgccaatcagggtaaaaagacagagtcagcttctgtccagggcagaaatacagatgtggcccagagcccagaggcaccaaagcaagaggctcctgccaagaagaagtctggttcaaagaaaaaaggtgagcctgggcccccagatgccgacggccctctctacctcccctacaagacgctggtctccacggttgggagcatggtgttcaacgagggcgaggcccagcggctcatcgagatcctgtctgagaaggctggcatcattcaggacacctggcacaaggccactcagaagggtgaccctgtggcgattctgaaacgccagctggaagagaaggaaaaactgctggccacagaacaggaagatgcggctgtcgccaagagcaaactgagggagctcaacaaggagatggcagcagaaaaggccaaagcagcagccggggaggccaaagtgaaaaagcagctggtggcccgggagcaggagatcacggctgtgcaggcacgcatgcaggccagctaccgggagcacgtgaaggaggtgcagcagctgcagggcaagatccggactcttcaggagcagctggagaatggccccaacacgcagctggcccgcctgcagcaggagaactccatcctgcgggatgccttgaaccaggccacgagccaggtggagagcaagcagaacgcagagctggccaagcttcggcaggagctcagcaaggtcagcaaagagctggtggagaagtcagaggctgtgcggcaagatgagcagcagcggaaagctctggaagccaaggcagctgccttcgagaagcaggtcctgcagctgcaggcgtcccacagggagagtgaggaggccctgcagaagcgcctggacgaggtcagccgggagctgtgccacacgcagagcagccacgccagcctccgggcggatgccgagaaggcccaggagcaacagcagcagatggccgagctgcacagcaagttacagtcctccgaggcggaggtgcgcagcaaatgcgaggagctgagtggcctccacgggcagctccaggaggccagggcggagaactcccagctcacagagagaatccgttccattgaggccctgctggaggcgggccaggcgcgggatgcccaggacgtccaggccagccaggcggaggctgaccagcagcagactcgcctcaaggagctggagtcccaggtgtcgggtctggagaaggaggccatcgagctcagggaggccgtcgagcagcagaaagtgaagaacaatgacctccgggagaagaactggaaggccatggaggcactggccacggccgagcaggcctgcaaggagaagctgcactccctgacccaggccaaggaggaatcggagaagcagctctgtctgattgaggcgcagaccatggaggccctgctggctctgctcccagaactctctgtcttggcacaacagaattacaccgagtggctgcaggatctcaaagagaaaggccccacgctgctgaagcacccgccagctcccgcggagccctcctcggacctggcctccaagttgagggaggccgaggagacgcagagcacactgcaggccgagtgtgaccagtaccgcagcatcctggcggagacggagggcatgctcagagacctgcagaagagcgtggaggaggaggagcaggtgtggagggccaaggtgggcgccgcagaggaggagctccagaagtcccgggtcacagtgaagcatctcgaagagattgtagagaagctaaaaggagaacttgaaagttcggaccaggtgagggagcacacgtcgcatttggaggcagagctggaaaagctgaggcaacttctcctagaatctcaatctcagctcgatgccgccaagagcgaagcccagaaacagagcgatgagcttgccctggtcaggcagcagttgagtgaaatgaagagccacgtagaggatggtgacatagctggggccccagcttcctccccagaggcgcccccagccgagcaggaccccgttcagctgaagacgcagctggagtggacagaagccatcctggaggatgagcagacacagcggcagaagctcacggccgagtttgaggaggctcagacctcggcatgtcggttacaagaagaattggagaagctccgcacagccggccccctagagtcttcagaaacagaggaggcctcacagctgaaggagagactagaaaaagagaagaagttaacaagtgacctggggcgcgccgccacgagactgcaggagcttctgaagacgacccaggagcagctggcaagggagaaggacacggtgaagaagctgcaggaacagctggaaaaggcagaggacggcagcagctcaaaggagggcacctctgtctgagtttcctctttggaaaaagaagttactgttcaacttaccaaaatgccttacacattccttacaaataaaccaaccaacctacacagcgttatccaggcccaacttccggtactccgagagaagccatgagagacaagtctcttagagccacagaagtagaccttccagagccccagtttgtaaatgaacctgtgtcacatttgataaacactatcctgggcgcagccccgggccaccgccgagtgacgccaaagccctggttgactctgacagccccgtgggtgtgtgggaggccgggcgctctggggtctgtctgtcagtgcaatcgtttagtgttttttcagtggggcggggcgggaagcgggtgggaccgggcagccagttctcaaaggctgtggggccgactggaggccacagcccctcacccctagacgttgccaaccagaactgacgtgtgacctcctgggtgttgatgccattaaaaccaacgttggtgcccggtg

SEQ ID NO: 320244 - DNA, 1997 bp, Homo sapiens
ggaactatttcttcattccagaagggcagagctctggccatagtatccttcagactctcacaggagggtagctgatcttctgtgaggtctgcatacctgcgaacctatgatcataggttcgcaggctgcagaagagcgtggaggaggaggagcaggtgtggagggccaaggtgggcgccgcagaggaggagctccagaagtcccgggtcacagtgaagcatctcgaagagattgtagagaagctaaaaggagaacttgaaagttcggaccaggtatgtgctctgctcagagaactctttctcttgtcccgggagcctctttgaaagtgacgttaatgcagaggacacttcactgatttcttcctcatggaccgtgtgccttaagagaggcattctctctcaagccaagggatcttgtccatcctgtttttccttaatgagagacattgactacctcagaggaccctgagacccagccacgggccctgtgcagacctgcccagccctggtgaacagggcttctgccacggccttcacagtcaaggtggccccactgcccccttcagacgccacagggagccctggagaaggtacccttggtacctgcttttgcaagtaaatctaagagcatgtcagtccccaggagtgcccgggtgcagcctgccactttccgtaaggggttctcttgccgcggactagtttctcgtttgcttggtagctggtgggcctcagggatctcccgagaggcctcacctatcccagggccagcctgctccctgaggtgagtgccctttgagcagaggctgctggcgcatgcgtgtgcgtgtctgtgcatctgtccgtgagggagcacacgtcgcatttggaggcagagctggaaaagcacatggcggccgccagcgccgagtgccagaactacgccaaggaggtggcagggctgaggcaacttctcctagaatctcaatctcagctcgatgccgccaagagcgaagcccagaaacagagcgatgagcttgccctggtcaggcagcagttgagtgaaatgaagagccacgtagaggatggtgacatagctggggccccagcttcctccccagaggcgcccccagccgagcaggaccccgttcagctgaagacgcagctggagtggacagaagccatcctggaggatgagcagacacagcggcagaagctcacggccgagtttgaggaggctcagacctcggcatgtcggttacaagaagaattggagaagctccgcacagccggccccctagagtcttcagaaacagaggaggcctcacagctgaaggagagactagaaaaagagaagaagttaacaagtgacctggggcgcgccgccacgagactgcaggagcttctgaagacgacccaggagcagctggcaagggagaaggacacggtgaagaagctgcaggaacagctggaaaaggcagaggacggcagcagctcaaaggagggcacctctgtctgagtttcctctttggaaaaagaagttactgttcaacttaccaaaatgccttacacattccttacaaataaaccaaccaacctacacagcgttatccaggcccaacttccggtactccgagagaagccatgagagacaagtctcttagagccacagaagtagaccttccagagccccagtttgtaaatgaacctgtgtcacatttgataaacactatcctgggcgcagccccgggccaccgccgagtgacgccaaagccctggttgactctgacagccccgtgggtgtgtgggaggccgggcgctctggggtctgtctgtcagtgcaatcgtttagtgttttttcagtggggcggggcgggaagcgggtgggaccgggcagccagttctcaaaggctgtggggccgactggaggccacagcccctcacccctagacgttgccaaccagaactgacgtgtgacctcctgggtgttgatgccattaaaaccaacgttggtgcccggtg

SEQ ID NO: 320245 - DNA, 3343 bp, Homo sapiens
catgttgtcgtgacttttgagtacgccaggcttaggctgcagttatttgaactcgagaggggcccagaaccagggcaagaaggccgagggggcccagaaccagggcaagaaggccgagggtgctcagaaccagggcaaaaaagtagaaggggcccagaaccagggcaagaaggctgagggggcccagaaccagggcaagaaggccgagggggctcagaaccagggcaaaaaggccgagggagcccagaaccagggccaaaaaggagagggagcccagaatcagggtaaaaagacagaaggggctcagggcaaaaaggcagaaaggagtcccaaccaaggcaaaaaaggagagggagctcccatccagggcaaaaaggcagattcggttgctaatcagggcacaaaggtagagggtattacaaaccaggggaaaaaagcagaagggtcccccagtgaaggcaaaaaggcagaagggtcccccaaccaaggcaaaaaggcagacgcagctgccaatcagggtaaaaagacagagtcagcttctgtccagggcagaaatacagatgtggcccagagcccagaggcaccaaagcaagaggctcctgccaagaagaagtctggttcaaagaaaaaaggtgagcctgggcccccagatgccgacggccctctctacctcccctacaagacgctggtctccacggttgggagcatggtgttcaacgagggcgaggcccagcggctcatcgagatcctgtctgagaaggctggcatcattcaggacacctggcacaaggccactcagaagggtgaccctgtggcgattctgaaacgccagctggaagagaaggaaaaactgctggccacagaacaggaagatgcggctgtcgccaagagcaaactgagggagctcaacaaggagatggcagcagaaaaggccaaagcagcagccggggaggccaaagtgaaaaagcagctggtggcccgggagcaggagatcacggctgtgcaggcacgcatgcaggccagctaccgggagcacgtgaaggaggtgcagcagctgcagggcaagatccggactcttcaggagcagctggagaatggccccaacacgcagctggcccgcctgcagcaggagaactccatcctgcgggatgccttgaaccaggccacgagccaggtggagagcaagcagaacgcagagctggccaagcttcggcaggagctcagcaaggtcagcaaagagctggtggagaagtcagaggctgtgcggcaagatgagcagcagcggaaagctctggaagccaaggcagctgccttcgagaagcaggtcctgcagctgcaggcgtcccacagggagagtgaggaggccctgcagaagcgcctggacgaggtcagccgggagctgtgccacacgcagagcagccacgccagcctccgggcggatgccgagaaggcccaggagcaacagcagcagatggccgagctgcacagcaagttacagtcctccgaggcggaggtgcgcagcaaatgcgaggagctgagtggcctccacgggcagctccaggaggccagggcggagaactcccagctcacagagagaatccgttccattgaggccctgctggaggcgggccaggcgcgggatgcccaggacgtccaggccagccaggcggaggctgaccagcagcagactcgcctcaaggagctggagtcccaggtgtcgggtctggagaaggaggccatcgagctcagggaggccgtcgagcagcagaaagtgaagaacaatgacctccgggagaagaactggaaggccatggaggcactggccacggccgagcaggcctgcaaggagaagctgcactccctgacccaggccaaggaggaatcggagaagcagctctgtctgattgaggcgcagaccatggaggccctgctggctctgctcccagaactctctgtcttggcacaacagaattacaccgagtggctgcaggatctcaaagagaaaggccccacgctgctgaagcacccgccagctcccgcggagccctcctcggacctggcctccaagttgagggaggccgaggagacgcagagcacactgcaggccgagtgtgaccagtaccgcagcatcctggcggagacggagggcatgctcagagacctgcagaagagcgtggaggaggaggagcaggtgtggagggccaaggtgggcgccgcagaggaggagctccagaagtcccgggtcacagtgaagcatctcgaagagattgtagagaagctaaaaggagaacttgaaagttcggaccaggtgagggagcacacgtcgcatttggaggcagagctggaaaagcacatggcggccgccagcgccgagtgccagaactacgccaaggaggtggcaggggtgagtctgccccccaaggagtgcagcccctgcccagcagatctgcggtcctccctgagctgcttctcctcagccctgtgggagcagctctcggtgacataagccttgaagtccgagtcctcaggcgtttgcccgaagcctcacaggcccctcgttgggctgtcaggcctgaggtgtctctcagggcaggtttcaaaaaggcagcctcccagccaggacaggggcagagccaggcagccctgccccgagggaggcgtttgacgttctaggttatccctccgcaaggggattctctgcctggcttgctgatgtcatatctggtggggagtggatttagatctgacactttttctgctcttcagaagcagaagcacaagcccagtatcccaattctggtttaatctcaaacttttgggccaggcacagcggctcatgcctgtaatcccagcactttgaaaggctgaggtggattgctcgaggccagaaatttgagaccggcctgggcaacatagcaagaccgcatctgtaccaaaaaaaaaaaaaaaagccaggcacactggtgggcacctccgttcccagctgcttaggaggctgatgcaggaggattgcctgagcccaagagttcaagaccagcgtggatgacagattgagaccatctctgaaaaaaaaaatcatctccaacttttggcccttttttgccagagataatcagtaaacatttgtgaaggcctgaaagaggtacgcagtgaacaccattcttcctaagtcctcaaaaaagaaatcgtagctgtaggaagcctggcgagccctgtgccggcccgatgctgtgaccctcctcagggttttggttaagtggatgtgttaggttttatgtttcggcgctaactcacggggactggttttctccttttctctccttttttcccatcacccgcctct

SEQ ID NO: 320246 - DNA, 2541 bp, Homo sapiens
catgttgtcgtgacttttgagtacgccaggcttaggctgcagttatttgaactcgagaggggcccagaaccagggcaagaaggccgagggggcccagaaccagggcaagaaggccgagggtgctcagaaccagggcaaaaaagtagaaggggcccagaaccagggcaagaaggctgagggggcccagaaccagggcaagaaggccgagggggctcagaaccagggcaaaaaggccgagggagcccagaaccagggccaaaaaggagagggagcccagaatcagggtaaaaagacagaaggggctcagggcaaaaaggcagaaaggagtcccaaccaaggcaaaaaaggagagggagctcccatccagggcaaaaaggcagattcggttgctaatcagggcacaaaggtagagggtattacaaaccaggggaaaaaagcagaagggtcccccagtgaaggcaaaaaggcagaagggtcccccaaccaaggcaaaaaggcagacgcagctgccaatcagggtaaaaagacagagtcagcttctgtccagggcagaaatacagatgtggcccagagcccagaggcaccaaagcaagaggctcctgccaagaagaagtctggttcaaagaaaaaaggtgagcctgggcccccagatgccgacggccctctctacctcccctacaagacgctggtctccacggttgggagcatggtgttcaacgagggcgaggcccagcggctcatcgagatcctgtctgagaaggctggcatcattcaggacacctggcacaaggccactcagaagggtgaccctgtggcgattctgaaacgccagctggaagagaaggaaaaactgctggccacagaacaggaagatgcggctgtcgccaagagcaaactgagggagctcaacaaggagatggcagcagaaaaggccaaagcagcagccggggaggccaaagtgaaaaagcagctggtggcccgggagcaggagatcacggctgtgcaggcacgcatgcaggccagctaccgggagcacgtgaaggaggtgcagcagctgcagggcaagatccggactcttcaggagcagctggagaatggccccaacacgcagctggcccgcctgcagcaggagaactccatcctgcgggatgccttgaaccaggccacgagccaggtggagagcaagcagaacgcagagctggccaagcttcggcaggagctcagcaaggtcagcaaagagctggtggagaagtcagaggctgtgcggcaagatgagcagcagcggaaagctctggaagccaaggcagctgccttcgagaagcaggtcctgcagctgcaggcgtcccacagggagagtgaggaggccctgcagaagcgcctggacgaggtcagccgggagctgtgccacacgcagagcagccacgccagcctccgggcggatgccgagaaggcccaggagcaacagcagcagatggccgagctgcacagcaagttacagtcctccgaggcggaggtgcgcagcaaatgcgaggagctgagtggcctccacgggcagctccaggaggccagggcggagaactcccagctcacagagagaatccgttccattgaggccctgctggaggcgggccaggcgcgggatgcccaggacgtccaggccagccaggcggaggctgaccagcagcagactcgcctcaaggagctggagtcccaggtgtcgggtctggagaaggaggccatcgagctcagggaggccgtcgagcagcagaaagtgaagaacaatgacctccgggagaagaactggaaggccatggaggcactggccacggccgagcaggcctgcaaggagaagctgcactccctgacccaggccaaggaggaatcggagaagcagctctgtctgattgaggcgcagaccatggaggccctgctggctctgctcccagaactctctgtcttggcacaacagaattacaccgagtggctgcaggatctcaaagagaaaggccccacgctgctgaagcacccgccagctcccgcggagccctcctcggacctggcctccaagttgagggaggccgaggagacgcagagcacactgcaggccgagtgtgaccagtaccgcagcatcctggcggagacggagggcatgctcagagacctgcagaagagcgtggaggaggaggagcaggtgtggagggccaaggtgggcgccgcagaggaggagctccagaagtcccgggtcacagtgaagcatctcgaagagattgtagagaagctaaaaggagaacttgaaagttcggaccaggtgagggagcacacgtcgcatttggaggcagagctggaaaagcacatggcggccgccagcgccgagtgccagaactacgccaaggaggtggcagggctgaggcaacttctcctagaatctcaatctcagctcgatgccgccaagagcgaagcccagaaacagagcgatgagcttgccctggtcaggcagtacttgagagaaatgaagagggagcagcataaggatcctctaga

SEQ ID NO: 320247 - DNA, 1101 bp, Homo sapiens
gtcctgtgagtctcgttaaaggcccctgaggttgcagaggccccatcagctgctcctgagccacaccgaagtctgtaccaggggctgaggtgccctctccccaacgaggggagcgttggggcagggaaaggggaagctagaagcagctagagagcggtgcctgtgctggatccctgggcccctggagggttcctcaccgggctgccgggttatgtttgcggtgtttgcacagctgaagacgcagctggagtggacagaagccatcctggaggatgagcagacacagcggcagaagctcacggccgagtttgaggaggctcagacctcggcatgtcggttacaagaagaattggagaagctccgcacagccggccccctagagtcttcagaaacagaggaggcctcacagctgaaggagagactagaaaaagagaagaagttaacaagtgacctggggcgcgccgccacgagactgcaggagcttctgaagacgacccaggagcagctggcaagggagaaggacacggtgaagaagctgcaggaacagctggaaaaggcagaggacggcagcagctcaaaggagggcacctctgtctgagtttcctctttggaaaaagaagttactgttcaacttaccaaaatgccttacacattccttacaaataaaccaaccaacctacacagcgttatccaggcccaacttccggtactccgagagaagccatgagagacaagtctcttagagccacagaagtagaccttccagagccccagtttgtaaatgaacctgtgtcacatttgataaacactatcctgggcgcagccccgggccaccgccgagtgacgccaaagccctggttgactctgacagccccgtgggtgtgtgggaggccgggcgctctggggtctgtctgtcagtgcaatcgtttagtgttttttcagtggggcggggcgggaagcgggtgggaccgggcagccagttctcaaaggctgtggggccgactggaggccacagcccctcacccctagacgttgccaaccagaactgacgtgtgacctcctgggtgttgatgccattaaaaccaacgttggtgcccggtg

SEQ ID NO: 320248 - DNA, 574 bp, Homo sapiens
  misc_feature (429)..(429): n is a, c, g, or t
  misc_feature (431)..(431): n is a, c, g, or t
catgttgtcgtgacttttgagtacgccaggcttaggctgcagttatttgaactcgagaggggcccagaaccagggcaagaaggccgagggggcccagaaccagggcaagaaggccgagggtgctcagaaccagggcaaaaaagtagaaggggcccagaaccagggcaagaaggctgagggggcccagaaccagggcaagaaggccgagggggctcagaaccagggcaaaaaggccgagggagcccagaaccagggccaaaaaggagagggagcccagaatcagggtaaaaagacagaaggggctcagggcaaaaaggcagaaaggagtcccaaccaaggcaaaaaaggagagggagtaaagacagtgaggcccaggcctagggggcaacgagtttctcaacaaccatgttacgccacttccccaccccnancaggcgtccttaagactaacctactcccttttctcactctcatccccaccacagatccctggattgctgggaatggaagccaggtggggtcatggcacaagttctgtaatcttcaaaataaaactttttttttgtaaaaaaaa

SEQ ID NO: 320249 - DNA, 399 bp, Homo sapiens
ggtgtagacagtgtggcggccaccccccggttccattcggattcctttgctctgtgggccatgcccatcaggggtcacctcactcccagggagggctcccctccggttgggcttggagcagagcacattgggtctcattagcccagaggcttggtggccttggtttggctcaggttggcggcgggggtggccagacataggtcacagttaccaagccaggtcccctgaagggactttggctgttgagagcagctacggtcctccgagggggtccctgcaggagtgagcatggtgggtgtgcgactggctgtgcatttgcaaacacaccccttcctgttccaggtcaggcagcagttgagtgaaatgaagagccacgtagaggatggtgacatagctggg

SEQ ID NO: 320250 - DNA, 622 bp, Homo sapiens
ccttctccagccaccactcagatctttctgcttctccttacagcaaaactcctccaaagttatcccttcttctcttcccttctgaacttacttcaatcacacttcaaatatcgtaacatcatctacaccagaggtcagtgacctgtggcccatgaaccaatccagcccactatgtgtttctgtaaataaggttttattcaaggataaccatgctcattccgtaggtactacctatgactagtgctacagcagcagaattgagtatttgcagcaaagatcagatggcctgcaaagcctaaaatatttactctctggcccgttacagaaaaagtttcctggctacttatctaaaccactttattcagggccaccaatgaacttcatgttgcccaatcaaatgttgattctcaggtctcatcttactctgttgatcttcccattagacatagttcatcatatctttcttcctgaaacgcttgcttccttgaactctggtacacctccacattttcatggtcatcctaccccatatagcatttgtcctcagtctgttttgctggatccctcttcatctttctggtctttaaaaattgggggtatttggactcagtttttgagtctc

SEQ ID NO: 320251 - DNA, 684 bp, Homo sapiens
ggccgccgagcgccgatcggctcgatgagcggaggcgctgctgcggcgctgcggccgacgccgggtccgcaccaactgtctccccctcccagcttcttacctcggcttcctactccttcccccgcccgcccagcaccgccagcccgggagagctgccgggagttccccgggagcctcaggtggtgactatcctgttgagaagcaaaagatactttgcaagtaaaaaatatgcctcccaagtttaagcgccacctcaatgatgatgatgtcacaggttctgtgaaaagtgaaaggagaaatcttttggaagatgattcagatgaagaagaggacttttttctaaggggaccatctggaccaagatttggacctagaaatgataaaattaagcatgttcagaatcaagtggatgaagttattgatgtcatgcaagaaaatattacaaaggtaattgagagaggggagagactagatgaactacaggacaaatcagaaagcttatcggataatgcaacagcttttagcaacagatccaaacaacttcgaaggcaaatgtggtggcgtggatgcaaaaataaaagcccatcatgggctttgggttgcctgcttatccctttttgcttagtggatttattcaatttctttattagtccatggaaaaataacccggcccccttggaaatt

SEQ ID NO: 320252 - DNA, 1655 bp, Homo sapiens
ggccgccgagcgccgatcggctcgatgagcggaggcgctgctgcggcgctgcggccgacgccgggtccgcaccaactgtctccccctcccagcttcttacctcggcttcctactccttcccccgcccgcccagcaccgccagcccgggagagctgccgggagttccccgggagcctcaggtggtgactatcctgttgagaagcaaaagatactttgcaagtaaaaaatatgcctcccaagtttaagcgccacctcaatgatgatgatgtcacaggttctgtgaaaagtgaaaggagaaatcttttggaagatgattcagatgaagaagaggacttttttctaaggggaccatctggaccaagatttggacctagaaatgataaaattaagcatgttcagaatcaagtggatgaagttattgatgtcatgcaagaaaatattacaaagaaagcttatcggataatgcaacagcttttagcaacagatccaaacaacttcgaaggcaaatgtggtggcgtggatgcaaaataaaagccatcatggctttggttgctgctatccttttgctagtgattatcattcttatagtcatgaaataccgtacttgatttgatgacagagatcttcattaaacaagatctgggacagtaataaaagattgctgcataatttaaatgaaacctatgtgtatataactttcaaaacttctttttcaagaaactaagaggcaagtatcacttcaaattggaacgttgagaatgtccaattatcttctccctttctaacaaaatgttcttttaataattatgtttaaggcaaagagaactagcctctatttttccatatttcaaggatctaatttgaaactagatacttgccagttcattatttgtgtatataaacactgattataatatttcatattaatattttaatggcataaggacttgcattattgcattagggagcgggtcatgctgggggtcaggaagcctgtgtagagtaccaaattatatgctgaaagagatgcataaccattctgtcaatatttgcagaaatatagttcctttcatattacagttgttttgcaagcaatttccacatttataggtgtaacaaaagctaaatgttgtaaatgttgttgccctcaggtataactaaaaacattccagtaaatatatttttgactgtgtaagagaatgtgtagtaatttttttggcattggattatggaaatggaaatttttaaacagtgtgaaaaaacatggtatggcatcataaaactggagataataaagttattgaagagtgtcattggagtatttgaaaatgaccaatatatagctgccagtcatggtccagtctgttttctgttaaactccaataaagagagaccagtcagtcctaatgtgagtaaatgaaatttacaggtaacttacttactccttaattttattttagttaatagcctctaacttccaactatctcatttaccaaaagtacaaaaagtagcaaaaccatctattaatactttgaattttatatctttgcatttcctgttcatccttgaggagatgtatgttgcacaatcaaattttgcatcagccaacagtaatgagtagtagaaagtcaggaacctatgtgtatatatatat

SEQ ID NO: 320253 - DNA, 1613 bp, Homo sapiens
ggccgccgagcgccgatcggctcgatgagcggaggcgctgctgcggcgctgcggccgacgccgggtccgcaccaactgtctccccctcccagcttcttacctcggcttcctactccttcccccgcccgcccagcaccgccagcccgggagagctgccgggagttccccgggagcctcaggtggtgactatcctgttgagaagcaaaagatactttgcaagtaaaaaatatgcctcccaagtttaagcgccacctcaatgatgatgatgtcacaggttctgtgaaaagtgaaaggtgttcagaatcaagtggatgaagttattgatgtcatgcaagaaaatattacaaagataaaagaatcctgttatgtcgtttaatccttctctccatcctctatgtgatatagaaagcttatcggataatgcaacagcttttagcaacagatccaaacaacttcgaaggcaaatgtggtggcgtggatgcaaaataaaagccatcatggctttggttgctgctatccttttgctagtgattatcattcttatagtcatgaaataccgtacttgatttgatgacagagatcttcattaaacaagatctgggacagtaataaaagattgctgcataatttaaatgaaacctatgtgtatataactttcaaaacttctttttcaagaaactaagaggcaagtatcacttcaaattggaacgttgagaatgtccaattatcttctccctttctaacaaaatgttcttttaataattatgtttaaggcaaagagaactagcctctatttttccatatttcaaggatctaatttgaaactagatacttgccagttcattatttgtgtatataaacactgattataatatttcatattaatattttaatggcataaggacttgcattattgcattagggagcgggtcatgctgggggtcaggaagcctgtgtagagtaccaaattatatgctgaaagagatgcataaccattctgtcaatatttgcagaaatatagttcctttcatattacagttgttttgcaagcaatttccacatttataggtgtaacaaaagctaaatgttgtaaatgttgttgccctcaggtataactaaaaacattccagtaaatatatttttgactgtgtaagagaatgtgtagtaatttttttggcattggattatggaaatggaaatttttaaacagtgtgaaaaaacatggtatggcatcataaaactggagataataaagttattgaagagtgtcattggagtatttgaaaatgaccaatatatagctgccagtcatggtccagtctgttttctgttaaactccaataaagagagaccagtcagtcctaatgtgagtaaatgaaatttacaggtaacttacttactccttaattttattttagttaatagcctctaacttccaactatctcatttaccaaaagtacaaaaagtagcaaaaccatctattaatactttgaattttatatctttgcatttcctgttcatccttgaggagatgtatgttgcacaatcaaattttgcatcagccaacagtaatgagtagtagaaagtcaggaacctatgtgtatatatatat

SEQ ID NO: 320254 - DNA, 533 bp, Homo sapiens
ggccgccgagcgccgatcggctcgatgagcggaggcgctgctgcggcgctgcggccgacgccgggtccgcaccaactgtctccccctcccagcttcttacctcggcttcctactccttcccccgcccgcccagcaccgccagcccgggagagctgccgggagttccccgggagcctcaggtggtgactatcctgttgagaagcaaaagatactttgcaagtaaaaaatatgcctcccaagtttaagcgccacctcaatgatgatgatgtcacaggttctgtgaaaagtgaaaggagaaatcttttggaagatgattcagatgaagaagaggacttttttctaaggggaccatctggaccaagatttggacctagaaatgataaaattaagcatgttcagaatcaagtgcgacaaggccagtggggaggggagatacaaagaacagccgtatgctctacataccaagattttatttgcatcattgagtcgacccttcaaggcagttggaagttcacctatattcggttggataa

SEQ ID NO: 320255 - DNA, 323 bp, Homo sapiens
cctgcagttcctcactcccataccagcttcagtgacctttctaccttttttagtcagttataggattctataattatgagcattttctttgcaaagtctataaatgttgtcccacatcttttagcttccagtgaaggatatgtaattacttttccctctttatggacacctggagttaagaaatttcactagtataggacttatttcattactcctctgtgacattttataagccctctgaatctgaaaactcaagtctttttctttttttgacagagaaatcttttggaagatgattcagatgaagaagaggacttttttct

SEQ ID NO: 320256 - DNA, 1701 bp, Homo sapiens
ggccgccgagcgccgatcggctcgatgagcggaggcgctgctgcggcgctgcggccgacgccgggtccgcaccaactgtctccccctcccagcttcttacctcggcttcctactccttcccccgcccgcccagcaccgccagcccgggagagctgccgggagttccccgggagcctcaggtggtgactatcctgttgagaagcaaaagatactttgcaagtaaaaaatatgcctcccaagtttaagcgccacctcaatgatgatgatgtcacaggttctgtgaaaagtgaaaggagaaatcttttggaagatgattcagatgaagaagaggacttttttctaaggggaccatctggaccaagatttggacctagaaatgataaaattaagcatgttcagaatcaagtggatgaagttattgatgtcatgcaagaaaatattacaaaggtaattgagagaggggagagactagatgaactacaggacaaatcagaaagcttatcggataatgcaacagcttttagcaacagatccaaacaacttcgaaggcaaatgtggtggcgtggatgcaaaataaaagccatcatggctttggttgctgctatccttttgctagtgattatcattcttatagtcatgaaataccgtacttgatttgatgacagagatcttcattaaacaagatctgggacagtaataaaagattgctgcataatttaaatgaaacctatgtgtatataactttcaaaacttctttttcaagaaactaagaggcaagtatcacttcaaattggaacgttgagaatgtccaattatcttctccctttctaacaaaatgttcttttaataattatgtttaaggcaaagagaactagcctctatttttccatatttcaaggatctaatttgaaactagatacttgccagttcattatttgtgtatataaacactgattataatatttcatattaatattttaatggcataaggacttgcattattgcattagggagcgggtcatgctgggggtcaggaagcctgtgtagagtaccaaattatatgctgaaagagatgcataaccattctgtcaatatttgcagaaatatagttcctttcatattacagttgttttgcaagcaatttccacatttataggtgtaacaaaagctaaatgttgtaaatgttgttgccctcaggtataactaaaaacattccagtaaatatatttttgactgtgtaagagaatgtgtagtaatttttttggcattggattatggaaatggaaatttttaaacagtgtgaaaaaacatggtatggcatcataaaactggagataataaagttattgaagagtgtcattggagtatttgaaaatgaccaatatatagctgccagtcatggtccagtctgttttctgttaaactccaataaagagagaccagtcagtcctaatgtgagtaaatgaaatttacaggtaacttacttactccttaattttattttagttaatagcctctaacttccaactatctcatttaccaaaagtacaaaaagtagcaaaaccatctattaatactttgaattttatatctttgcatttcctgttcatccttgaggagatgtatgttgcacaatcaaattttgcatcagccaacagtaatgagtagtagaaagtcaggaacctatgtgtatatatatat

SEQ ID NO: 320257 - DNA, 1239 bp, Homo sapiens
ggccgccgagcgccgatcggctcgatgagcggaggcgctgctgcggcgctgcggccgacgccgggtccgcaccaactgtctccccctcccagcttcttacctcggcttcctactccttcccccgcccgcccagcaccgccagcccgggagagctgccgggagttccccgggagcctcaggtggtgactatcctgttgagaagcaaaagatactttgcaagtaaaaaatatgcctcccaagtttaagcgccacctcaatgatgatgatgtcacaggttctgtgaaaagtgaaaggagaaatcttttggaagatgattcagatgaagaagaggacttttttctaaggggaccatctggaccaagatttggacctagaaatgataaaattaagcatgttcagaatcaagtggatgaagttattgatgtcatgcaagaaaatattacaaaggtaattgagagaggggagagactagatgaactacaggacaaatcagaaagcttatcggataatgcaacagcttttagcaacagatccaaacaacttcgaaggcaaatgtggtggcgtggatgcaaaataaaagccatcatggctttggttgctgctatccttttgctagtgattatcattcttatagtcatgaaataccgtacttgatttgatgacagagatcttcattaaacaagatctgggacagtaataaaagattgctgcataatttaaatgaaacctatgtgtatataactttcaaaacttctttttcaagaaactaagaggcaagtatcacttcaaattggaacgttgagaatgtccaattatcttctccctttctaacaaaatgttcttttaataattatgtttaaggcaaagagaactagcctctatttttccatatttcaaggatctaatttgaaactagatacttgccagttcattatttgtgtatataaacactgattataatatttcatattaatattttaatggcataaggacttgcattattgcattagggagcgggtcatgctgggggtcaggaagcctgtgtagagtaccaaattatatgctgaaagagatgcataaccattctgtcaatatttgcagaaatatagttcctttcatattacagttgttttgcaagcaatttccacatttataggtgtaacaaaagctaaatgttgtaaatgttgttgccctcaggtataactaaaaacattccagtaaatatatttttgactgtgt

SEQ ID NO: 320258 - DNA, 768 bp, Homo sapiens
ggccgccgagcgccgatcggctcgatgagcggaggcgctgctgcggcgctgcggccgacgccgggtccgcaccaactgtctccccctcccagcttcttacctcggcttcctactccttcccccgcccgcccagcaccgccagcccgggagagctgccgggagttccccgggagcctcaggtggtgactatcctgttgagaagcaaaagatactttgcaagtaaaaaatatgcctcccaagtttaagcgccacctcaatgatgatgatgtcacaggttctgtgaaaagtgaaaggagaaatcttttggaagatgattcagatgaagaagaggacttttttctaccgcagttgaccatgggtaactgaaactgtggaaagcaaaaccatgggtgagagagagcttactgtaccgtgtacctgtgacatcatcaccaaaatcaaataatgaaccatctgtcgccctgcaagtttcctcataacccttgataatccattgctctcccagtccctaggcaaccagtgctctgctttctgtcactgtagttgtatttctaaaattttttataaatgaaatcatgcagtatgccccctttttaaaacctggctttattcagcatggtttttgagattcatccatgtgttaatagttggggtttttaattttctgagtagtattccattgtatgatgctgcagttcgttatgcattcacttatgtggtggatttttgggttgtttctactttttggcttttacatataaagctgtt

SEQ ID NO: 320259 - DNA, 1123 bp, Homo sapiens
ggccgccgagcgccgatcggctcgatgagcggaggcgctgctgcggcgctgcggccgacgccgggtccgcaccaactgtctccccctcccagcttcttacctcggcttcctactccttcccccgcccgcccagcaccgccagcccgggagagctgccgggagttccccgggagcctcaggtggtgactatcctgttgagaagcaaaagatactttgcaagtaaaaaatatgcctcccaagtttaagcgccacctcaatgatgatgatgtcacaggttctgtgaaaagtgaaaggagaaatcttttggaagatgattcagatgaagaagaggacttttttctatatgcagtagtctcccttatacgtgagagatgccttccaagatcccccagtggatatgtgaaaacacagagagtagcacgttgtgacataacgttaggtactattgacctctgatgatatgtcagaaggagaatcatctatttcaggtgaccttggatcatgaagccaagaagatgttgataactaaagggctgggtagtatatacaatgtggatatgcaggacaaaggggtgattcacatttcaggtgggacaaagcggggcaatgtgaggtttcatcatgctactcagaatggtgcacaatttaaaacttatgaattgtttatttctggaattttccatttaatattttcagaccgcagttgaccatgggtaactgaaactgtggaaagcaaaaccatgggtgagagagagcttactgtaccgtgtacctgtgacatcatcaccaaaatcaaataatgaaccatctgtcgccctgcaagtttcctcataacccttgataatccattgctctcccagtccctaggcaaccagtgctctgctttctgtcactgtagttgtatttctaaaattttttataaatgaaatcatgcagtatgccccctttttaaaacctggctttattcagcatggtttttgagattcatccatgtgttaatagttggggtttttaattttctgagtagtattccattgtatgatgctgcagttcgttatgcattcacttatgtggtggatttttgggttgtttctactttttggcttttacatataaagctgtt

SEQ ID NO: 320260 - DNA, 438 bp, Homo sapiens
attactgtccccatggctggagagagttgattcatcatctgcttctcactggagagggtcgggggtacctctctgccagggctgaccaggcttctcctgagtcacctggaaccaccctcccatgctgacccagcttcctttcttgcagcatatggggtgaagaaaaacatgccccagagtcctgcggctgtgaacactggcgtttccacctccgccggtgagtgctgctcccagctgccagggatcaggctggtgcacagggaggattactctgcagtaatcctgcctgtgtatccttccaatacacatggtatactggaagaggaaataggacccatgagtggtcttaggcctgcaaacgcaacttgccccaaaggcctcttggatgtttccatgagtgaataaaggtgaacattcccatgaatgttcctatcagaa

SEQ ID NO: 320261 - DNA, 2081 bp, Homo sapiens
aacatttttgaaagatcactcagctttaacacaccttggctgggtctggataaaaaaaaagtgagcactgcaaatttctagaagaaaacatcaggagaagaaagagagagggggatttattcaaagttgtttccaattccttcaaaacctcaaaccaggtggctatggtatggatgtaaccaagaaaaacaaacgagatggaactgaagtcactgagagaattgtcactgaaacagtaaccacaagacttacatccttaccaccaaaaggcgggaccagcaatggctatgctaaaacagcctctcttggtggagggagccggctggagaaacaaagcctgactcatggcagcagcggctacataaactcaactggaagcacacgaggccatgcctccacctctagttacaggagggctcactcacctgcctccactctgcccaactccccaggctcaacctttgaaaggaaaactcacgttacccgccatgcgtatgaagggagctccagtggcaactcttctccggagtaccctcggaaggaatttgcatcttcttcaaccagaggacggagtcaaacacgagagagtgaaattcgagttcgactgcagagtgcgtccccatccacccgatggacagaattggatgatgttaagcgtttgctcaaggggagtcgatcggcaagtgtgagccccacccggaattcctccaacacactccccatccccaagaaaggcactgtggagaccaaaattgtgacagcgagctcccagtcggtgtcaggcacctacgatgcaatgatcctggatgccaaccttccctcccatgtgtggtcctccaccctgcccgcggggtcctccatggggacctatcacaacaacatgacaacccagagctcatccctcctcaacaccaatgcctactctgcgggatcagtcttcggagttccaaacaacatggcgtcctgctcacccactttgcaccctggactcagcacatcctcctcagtgtttggcatgcagaacaatctggcccccagcttgaccaccctgtcccatggcaccaccaccacttccacagcatatggggtgaagaaaaacatgccccagagtcctgcggctgtgaacactggcgtttccacctccgccgcctgcaccacaagtgtgcagagcgatgaccttttgcacaaggactgcaagttcctgatcctagagaaagacaacacacctgccaagaaggagatggagctgctcatcatgaccaaggacagcgggaaggtctttacagcctcccctgccagcatcgctgcaacttctttttcagaagacaccctaaaaaaagaaaagcaagctgcctacaatgctgactcaggcctaaaagccgaagctaatggagacctgaagactgtgtccacaaagggcaagaccaccactgcagatatccacagctacggcagcagtggtggtggtggcagtggaggaggtggcggtgttggtggcgctggcggcggcccttggggaccagcgccagcctggtgcccctgcggctcctgctgcagctggtggaagtggctgctgggcctgctgctcacctggctgctactcctggggctgctcttcggcctcattgctctggcggaggaggtgaggaagctgaagcgcgtgtggatgagctggagaggatcaggaggagcatactgccctatggggacagcatggatagaatagaaaaggaccgcctccagggcatggcacccgcggcgggagcagacctggacaaaattgggctgcacagtgacagccaggaggagctctggatgttcgtgaggaagaagctaatgatggaacaggaaaatggaaatctccgaggaagccctggccctaaaggtattgccatggattgaaccttgtctctgattcatttcctgcagttggaagtgagttttctgggtagattagaagcctttttctttgttctaaatggaaggatgaagagctgaatgatcttatggtatctgttgggaggtatctgttggttttagagtcagaatatcttagataaggcagcatctaagagaagccc

SEQ ID NO: 320262 - DNA, 1066 bp, Homo sapiens
tattcacagagggatgttccgctggcgattggtggggtgcaaatgcaccacagcgatttcacagcatatggggtgaagaaaaacatgccccagagtcctgcggctgtgaacactggcgtttccacctccgccgcctgcaccacaagtgtgcagagcgatgaccttttgcacaaggactgcaagttcctgatcctagagaaagacaacacacctgccaagaaggagatggagctgctcatcatgaccaaggacagcgggaaggtctttacagcctcccctgccagcatcgctgcaacttctttttcagaagacaccctaaaaaaagaaaagcaagctgcctacaatgctgactcaggcctaaaagccgaagctaatggagacctgaagactgtgtccacaaagggcaagaccaccactgcagatatccacagctacggcagcagtggtggtggtggcagtggaggaggtggcggtgttggtggcgctggcggcggcccttggggaccagcgccagcctggtgcccctgcggctcctgctgcagctggtggaagtggctgctgggcctgctgctcacctggctgctactcctggggctgctcttcggcctcattgctctggcggaggaggtgaggaagctgaagcgcgtgtggatgagctggagaggatcaggaggagcatactgccctatggggacagcatggatagaatagaaaaggaccgcctccagggcatggcacccgcggcgggagcagacctggacaaaattgggctgcacagtgacagccaggaggagctctggatgttcgtgaggaagaagctaatgatggaacaggaaaatggaaatctccgaggaagccctggccctaaaggtattgccatggattgaaccttgtctctgattcatttcctgcagttggaagtgagttttctgggtagattagaagcctttttctttgttctaaatggaaggatgaagagctgaatgatcttatggtatctgttgggaggtatctgttggttttagagtcagaatatcttagataaggcagcatctaagagaagccc

SEQ ID NO: 320263 - DNA, 460 bp, Homo sapiens
catcgctcagccttttctactatttaaaatttcctaatatgcaacttgctatattccacccaggagacttttcttttaaatcaggtggaatactcactctagatatttgtataaaacaaaacaaaacaaaacaaaacaaaacaaaacaaaaaaccaacgaaactggagcatggcagcttgcatcttataatgtaggtgggaaaggaaccccaaactaagaaggtcctggtgaaaaaccagggaagccttccacagggtgggggaccaggggatcctctggcctgactccaccctgaaattatcacctgcttttgttcctggcagaaggcgggaccagcaatggctatgctaaaacagcctctcttggtggagggagccggctggagaaacaaagcctgactcatggcagcagcggctacataaactcaagtgagtgcccactagtgcaagaggtcaggga

SEQ ID NO: 320264 - DNA, 2150 bp, Homo sapiens
aacatttttgaaagatcactcagctttaacacaccttggctgggtctggataaaaaaaaagtgagcactgcaaatttctagaagaaaacatcaggagaagaaagagagagggggatttattcaaagttgtttccaattccttcaaaacctcaaaccaggtggctatggtatggatgtaaccaagaaaaacaaacgagatggaactgaagtcactgagagaattgtcactgaaacagtaaccacaagacttacatccttaccaccaaaaggcgggaccagcaatggctatgctaaaacagcctctcttggtggagggagccggctggagaaacaaagcctgactcatggcagcagcggctacataaactcaactggaagcacacgaggccatgcctccacctctagttacaggagggctcactcacctgcctccactctgcccaactccccaggctcaacctttgaaaggaaaactcacgttacccgccatgcgtatgaagggagctccagtggcaactcttctccggagtaccctcggaaggaatttgcatattaaggggactatcagccacattaacttgctgtcataagcctttgctcgtggcactatagaaatgcatcttcttcaaccagaggacggagtcaaacacgagagagtgaaattcgagttcgactgcagagtgcgtccccatccacccgatggacagaattggatgatgttaagcgtttgctcaaggggagtcgatcggcaagtgtgagccccacccggaattcctccaacacactccccatccccaagaaaggcactgtggagaccaaaattgtgacagcgagctcccagtcggtgtcaggcacctacgatgcaatgatcctggatgccaaccttccctcccatgtgtggtcctccaccctgcccgcggggtcctccatggggacctatcacaacaacatgacaacccagagctcatccctcctcaacaccaatgcctactctgcgggatcagtcttcggagttccaaacaacatggcgtcctgctcacccactttgcaccctggactcagcacatcctcctcagtgtttggcatgcagaacaatctggcccccagcttgaccaccctgtcccatggcaccaccaccacttccacagcatatggggtgaagaaaaacatgccccagagtcctgcggctgtgaacactggcgtttccacctccgccgcctgcaccacaagtgtgcagagcgatgaccttttgcacaaggactgcaagttcctgatcctagagaaagacaacacacctgccaagaaggagatggagctgctcatcatgaccaaggacagcgggaaggtctttacagcctcccctgccagcatcgctgcaacttctttttcagaagacaccctaaaaaaagaaaagcaagctgcctacaatgctgactcaggcctaaaagccgaagctaatggagacctgaagactgtgtccacaaagggcaagaccaccactgcagatatccacagctacggcagcagtggtggtggtggcagtggaggaggtggcggtgttggtggcgctggcggcggcccttggggaccagcgccagcctggtgcccctgcggctcctgctgcagctggtggaagtggctgctgggcctgctgctcacctggctgctactcctggggctgctcttcggcctcattgctctggcggaggaggtgaggaagctgaagcgcgtgtggatgagctggagaggatcaggaggagcatactgccctatggggacagcatggatagaatagaaaaggaccgcctccagggcatggcacccgcggcgggagcagacctggacaaaattgggctgcacagtgacagccaggaggagctctggatgttcgtgaggaagaagctaatgatggaacaggaaaatggaaatctccgaggaagccctggccctaaaggtattgccatggattgaaccttgtctctgattcatttcctgcagttggaagtgagttttctgggtagattagaagcctttttctttgttctaaatggaaggatgaagagctgaatgatcttatggtatctgttgggaggtatctgttggttttagagtcagaatatcttagataaggcagcatctaagagaagccc

SEQ ID NO: 320265 - DNA, 1201 bp, Homo sapiens
caggataccctgggtcggctcctccacgtgaccacccactatggcttcctagtgtcagggccagctgtgtagtggctcggtgtgatttgttagctctttgaggcagggtaccctcctcaggatttcgatatgcaaaaaatcaaatctctcatgacccgacagggtctgaaaagccctcaagaaagcctcagtgatcttggtgccatagagagtctccgggtccctggaaaggaagaattcagggaacttcgagaacagccaagtgaccctcaagctgaacaagagcttattaatagtattgaacaagtatatttttctgtggattcatttgatattgttaaatatgagctggagaagcttccacctgttctcaatttgcaagaattagaggcgtatagagacaaattgaaacaacagcaagctgcagtatctaaaaaagtggcagatttaatccttgaaaaacagcctgcttatgtaaaggaacttgaaagagttacctcattgcagacaggtcttcaattagctgctgttatctgtacaaatgggagaagacacttgaatattgcaaaggaaggttttactcaagctagtttaggccttcttgcaaatcaaaggaaacgtcagttgctgattggacttctgaaatctctgagaactataaaaacattgcaaagaacagatgtacggttaagtgaaatgctggaggaggaagattatccaggagctattcagttgtgccttgaatgtcaaaaagctgccagcacttttaaacattacagttgtataagtgaactgaattcaaagctgcaagatactttggaacagattgaggaacagctggacgtagctctttccaaaatctgcaagaattttgacattaaccattataccaaggttcaacaagcttatcgacttcttggaaaaacacagacagcaatggatcaacttcatatgcacttcacccaagccattcacaacaccgtgtttcaagttgttcttggttatgtggaactatgtgcaggaaacacagacacaaaattccaaaagctgcaatataaggatctctgtacagtatgtagtgacttaattactattcatatatctctcctttagattttaaatttatatttcctttatcttggtacatacctatttgaaaatgctactaaaataaaaataaatctttgccaaaaattttttt

SEQ ID NO: 320266 - DNA, 286 bp, Homo sapiens
tacagtggaagcattcggatctaactctccttccgggatcaagactaaggaggacctgaacgaggagcaggaagacttgagtgaactgaattcaaagctgcaagatactttggaacagattgaggaacagctggacgtagctctttccaaaatctgcaagaattttgacattaaccattataccaaatgcaaacacatctgggtctgcgatatgcacagagactttggacatacgaggaccctcgaccggaggacacctgcacaactgtcgagaaagatcctgtga

SEQ ID NO: 320267 - DNA, 4523 bp, Homo sapiens
atcataatatataatgaaataattatacaactcagcataatgtagaatcagtggaatccctgagcttgttttcctgcagttagacggtcccatctgatgggagacagtgacagatcatcaggcattagagtctcataaggagcacacaacctagattccttgcatgtgcagttcacagtagggatggagttagagctcttatgagaatctaatgccaccgctgatctgatgagaggtggagctcaggttgtaatgcaagtgatggggagcggctgtaaatacagatgaagcttcgcttgctcacctgccactcacttcctgctgtgtagcctggttccccacaggccacggaccagtactctctattagtagacaatcctgtggaacctttggaattcttaaaatgatatttaggattaacattgatatttcttcattaattaaagtctaaaagccatttaaaatttgattttcttaaccttaatggaatccctctttctagacaaaaacaatgagtgtatctaaaaattaatgtacgtaatttcaaagatgcttgaagcagattaagaaaatgtgaaaggattaatgcagtagtgtagtgggtgttcaatgttttgttctcagttggcctggggaaggggagccagttgtgtttctggagcaaactccctaaataccttctgtgtgtcctgcttcatgcctcatgtgctatctctgttagtgaagttggcagagaccctgaaatggtggaattagagcctcatgttcaaaaatcattatacttctaacttgcatacgttaatattattcatagaacaatacacacaaccttagatatcttcatagcgttccaaaaaacatgttttcagcttttcagaagtggaggaccaaactacttgcttgtcttcttaggcaacataaaggatctaaaggatacaagcaagttctttttcccagatattgtcgccataaattcagttgattaaaaatctgcttaacaatttcatctttttcaatcaaatcctattcccttaaaatggttacactttttggttaatgttacttaaatcagataatgatacacatattattaacaataataatgaccatttattgagtttctgttaaggaccaggacctgtgctatgtgctttattatattacctcttttactaatttcatagcccagggaaatgtgtatggccatagtatgccaatatctgctcccaaagttattggggagatctatggaatattcttttaaaaattcaaatataaaatatcatagaaagcatgaagtttgttcttttatttcctttgtttgattacatcttcttataggtatctaaaaaagtggcagatttaatccttgaaaaacagcctgcttatgtaaaggaacttgaaagagttacctcattgcagacaggtcttcaattagctgctgttatctgtacaaatgggagaagacacttgaatattgcaaaggaaggttttactcaagctagtttaggccttcttgcaaatcaaaggaaacgtcagttgctgattggacttctgaaatctctgagaactataaaaacattgcaaagaacagatgtacggttaagtgaaatgctggaggaggaagattatccaggagctattcagttgtgccttgaatgtcaaaaagctgccagcacttttaaacattacagttgtataagtgaactgaattcaaagctgcaagatactttggaacagattgaggaacagctggacgtagctctttccaaaatctgcaagaattttgacattaaccattataccaaggttcaacaagcttatcgacttcttggaaaaacacagacagcaatggatcaacttcatatgcacttcacccaagccattcacaacaccgtgtttcaagttgttcttggttatgtggaactatgtgcaggaaacacagacacaaaattccaaaagctgcaatataaggatctctgtacacatgttacaccagacagctatattccatgccttgcagacctgtgcaaagcactatgggaagttatgctcagctattataggactatggaatggcatgaaaagcatgacaatgaggatactgcttcagcttctgaagggagtaatatgataggtactgaagaaactaattttgatcgtggctacataaaaaagaaattagaacatggacttacacgaatatggcaggatgttcagctaaaagtaaaaacctacttgcttggaactgatttgtctatattcaaatatgatgatttcatctttgttttggatataatcagcaggttgatgcaagttggagaagaattttgtggtagcaagtctgaagttttacaggaatctattagaaaacaaagtgtcaattatttcaagaattaccatagaacacggctcgatgaactgagaatgttcttagagaatgagacttgggaactttgtcctgttaagtcaaatttcagcatcttgcaacttcatgaatttaaattcatggaacagtctcgctccccatcagtttcacctagtaaacagccagtctcaacttcttcaaaaacagtgaccttgtttgagcagtactgtagtggtgggaatccatttgaaattcaggccaaccacaaagatgaagaaacagaagatgtcttagcttctaatgggtatgaatctgatgaacaagaaaagagtgcctatcaagagtatgacagtgacagtgatgttcctgaggaactcaaacgagactatgtggatgagcagacaggagatggtcctgtgaaaagtgtttctcgggaaactctaaaaagcaggaagaaatcagattacagtctaaataaagtgaatgcacctatcttaacaaatacaacattgaacgtcataagacttgttggaaaatatatgcagatgatgaacattcttaagccaattgcctttgatgttattcatttcatgtctcaactatttgattattacttgtatgcaatatataccttttttggtcggaatgattcattggaatcaactggactcggccttagtagtagtagactaagaacaactctaaacagaatacaagaaagccttattgatctagaagtttcagctgatcctactgccacactcacagcagcagaagaaagaaaggagaaggtgccaagtccacacctcagtcacctagtggttttgacatctggggatacgctgtatgggttggcagaaagagtggtagccacggaatccttggtattcttggctgaacagtttgagttccttcagccacatctggatgctgtgatgcctgcagtcaaaaagccctttcttcagcagttctattctcagacagtctcaaccgccagtgaactacggaaaccaatttactggattgtagctggtaaagcccttgattatgaacagatgctgcttctcatggctaatgtgaaatgggatgtaaaagaaattatgtcacagcacaacatatatgtagatgcactattaaaggaatttgagcagtttaacaggaggctaaatgaagtttctaagagagttcgcatacccttgcctgtgtctaatatactttgggaacattgtatacgattggctaatcgaactattgtagaaggatatgccaatgtcaagaaatgcagtaatgagggtcgtgccctgatgcaactggattttcaacagtttttaatgaaacttgaaaaactaacagatattagacccattcctgataaagaatttgtagaaacttatattaaagcttattacctaactgagaatgacatggaacggtggatcaaagagcacagggaatattcaacgaagcagctgaccaatctggtgaatgtttgcctgggatcccatatcaataagaaagcaagacaaaaacttctagcagctatagatgatatagacagacctaaaagataatgaacacagctctctttcctcaatggcattgatcctcactcaacatatatgacctgaaagccagtttttttatgcacttctgacaactatctgctaagaaaactttgtgcatgtttttttgactggaaagtggaaaatattgaaatgtgtgtggtgttctcatgacttttatatgctgtggtctcttcaacttttggtctcatttgttgtaatctgaaatgatgttgccgccttgtcataacaatggttatgtgactacagttatacattttacagaagaatgtaccataagtatataattagaagaacagtggcttaatatatgtatgggaagtttatggaaaatgaagttggcacttttctaccctctgagcttggttcttaataagcataatgtgagggtgaatatgtagtatctcctaattatgagcactgcatgagaattaaaaaacacatgtaagtaaaatagttgaaaaatcagtatgttctctgtttttaaaatgtcaaagtttatgtcagggttaatttagttataacaaagtgatcataatggtgaaatttaataaatatactctagtatgatc

SEQ ID NO: 320268 - DNA, 2663 bp, Homo sapiens
caggataccctgggtcggctcctccacgtgaccacccactatggcttcctagtgtcagggccagctgtgtagtggctcggtgtgatttgttagctctttgaggcagggtaccctcctcaggatttcgatatgcaaaaaatcaaatctctcatgacccgacagggtctgaaaagccctcaagaaagcctcagtgatcttggtgccatagagagtctccgggtccctggaaaggaagaattcagggaacttcgagaacagccaagtgaccctcaagctgaacaagagcttattaatagtattgaacaagtatatttttctgtggattcatttgatattgttaaatatgagctggagaagcttccacctgttctcaatttgcaagaattagaggcgtatagagacaaattgaaacaacagcaagctgcagtatctaaaaaagtggcagatttaatccttgaaaaacagcctgcttatgtaaaggaacttgaaagagttacctcattgcagacaggtcttcaattagctgctgttatctgtacaaatgggagaagacacttgaatattgcaaaggaaggttttactcaagctagtttaggccttcttgcaaatcaaaggaaacgtcagttgctgattggacttctgaaatctctgagaactataaaaacattgcaaagaacagatgtacggttaagtgaaatgctggaggaggaagattatccaggagctattcagttgtgccttgaatgtcaaaaagctgccagcacttttaaacattacagttgtataagtgaactgaattcaaagctgcaagatactttggaacagattgaggaacagctggacgtagctctttccaaaatctgcaagaattttgacattaaccattataccaaggttcaacaagcttatcgacttcttggaaaaacacagacagcaatggatcaacttcatatgcacttcacccaagccattcacaacaccgtgtttcaagttgttcttggttatgtggaactatgtgcaggaaacacagacacaaaattccaaaagctgcaatataaggatctctgtacacatgttacaccagacagctatattccatgccttgcagacctgtgcaaagcactatgggaagttatgctcagctattataggactatggaatggcatgaaaagcatgacaatgaggatactgcttcagcttctgaagggagtaatatgataggtactgaagaaactaattttgatcgtggctacataaaaaagaaattagaacatggacttacacgaatatggcaggatgttcagctaaaagtaaaaacctacttgcttggaactgatttgtctatattcaaatatgatgatttcatctttgttttggatataatcagcaggttgatgcaagttggagaagaattttgtggtagcaagtctgaagttttacaggaatctattagaaaacaaagtgtcaattatttcaagaattaccatagaacacggctcgatgaactgagaatgttcttagagaatgagacttgggaactttgtcctgttaagtcaaatttcagcatcttgcaacttcatgaatttaaattcatggaacagtctcgctccccatcagtttcacctagtaaacagccagtctcaacttcttcaaaaacagtgaccttgtttgagcagtactgtagtggtgggaatccatttgaaattcaggccaaccacaaagatgaagaaacagaagatgtcttagcttctaatgggtatgaatctgatgaacaagaaaagagtgcctatcaagagtatgacagtgacagtgatgttcctgaggaactcaaacgagactatgtggatgagcagacaggagatggtcctgtgaaaagtgtttctcgggaaactctaaaaagcaggaagaaatcagattacagtctaaataaagtgaatgcacctatcttaacaaatacaacattgaacgtcataagacttgttgacggagtctcactctgttgcctaggctggagtacagtggcgcatctccactcactgcaagctccgcctcccgggttcaagccattctcctgcctcagcctcccgcgtagctgggactacaggcgcccgccaccacgcccggctaattttttgtattttcttctttttagtagagacggggtttcaccgtgttagcggggatggtctctatctcctgacctcgtgatccgcccgcctcggcctcccaaagtgctgggattacaggcatgaaccaccgctcccagcttatcatttcttttagagaggaaccttaagggtttctattttgttttatgggtaaattctagcagcctacacctctaactgctggagaggagaggggaatggtggtggtggggaatgcagactgttacagtttgtcccatatgtgaacctgtagcttgatcgtttttcagccccgtttctgactcctgcagttccagcttgattctaagtagttactgtcctagtgaatagcttccacctcctttttggccctcttatggttttattggcttatgtttttccatcaacgtgttcccatctactgtctgtcatctacaacagacgttttgagatgtcaaatgttttgagctgctggctgcttgtttttgtaaataaagttttattggcacacccat

SEQ ID NO: 320269 - DNA, 824 bp, Homo sapiens
  misc_feature (26)..(26): n is a, c, g, or t
caggctggtacgaccctccgagttanggctatcgccgacccacgctgtcgatatgaaacttatattaaagcttattacctaactgagaatgacatggaacggtggatcaaagagcacagggaatattcaacgaagcagctgaccaatctggtgaatgtttgcctgggatcccatatcaataagaaagcaagacaaaaacttctagcagctatagatgatatagacagacctaaaagataatgaacacagctctctttcctcaatggcattgatcctcactcaacatatatgacctgaaagccagtttttttatgcacttctgacaactatctgctaagaaaactttgtgcatgtttttttgactggaaagtggaaaatattgaaatgtgtgtggtgttctcatgacttttatatgctgtggtctcttcaacttttggtctcatttgttgtaatctgaaatgatgttgccgccttgtcataacaatggttatgtgactacagttatacattttacagaagaatgtaccataagtatataattagaagaacagtggcttaatatatgtatgggaagtttatggaaaatgaagttggcacttttctaccctctgagcttggttcttaataagcataatgtgagggtgaatatgtagtatctcctaattatgagcactgcatgagaattaaaaaacacatgtaagtaaaatagttgaaaaatcagtatgttctctgtttttaaaatgtcaaagtttatgtcagggttaatttagttataacaaagtgatcataatggtgaaatttaataaatatactctagtatgatc

SEQ ID NO: 320270 - DNA, 645 bp, Homo sapiens
  misc_feature (29)..(29): n is a, c, g, or t
  misc_feature (35)..(35): n is a, c, g, or t
  misc_feature (73)..(73): n is a, c, g, or t
  misc_feature (87)..(87): n is a, c, g, or t
  misc_feature (133)..(133): n is a, c, g, or t
  misc_feature (138)..(138): n is a, c, g, or t
taggacttctttcttgaaaaagtgtagtnataccnatcctttccagcatacttttgaaagccagcaatcaggnactcgatgcaccgntcagtctctgtagggctgaagatttttgccatgttgaagctgagcnaggcncggaaggctgtggctgggagcggcgctgagagctctgtgcgcgcggcgtgcgggtcaggagccacttgccaccccaagtggctcatgacttttatatgctgtggtctcttcaacttttggtctcatttgttgtaatctgaaatgatgttgccgccttgtcataacaatggttatgtgactacagttatacattttacagaagaatgtaccataagtatataattagaagaacagtggcttaatatatgtatgggaagtttatggaaaatgaagttggcacttttctaccctctgagcttggttcttaataagcataatgtgagggtgaatatgtagtatctcctaattatgagcactgcatgagaattaaaaaacacatgtaagtaaaatagttgaaaaatcagtatgttctctgtttttaaaatgtcaaagtttatgtcagggttaatttagttataacaaagtgatcataatggtgaaatttaataaatatactctagtatgatc

SEQ ID NO: 320271 - DNA, 428 bp, Homo sapiens
ggaattgagaataaaatctaaatattcaaactggctagttttcttctgtagttgttagtgttaatggtcggctagttcctaatttcctgtgaacttttctgatttctgttggtttgtatccttggtcagaatcgttccaggtagatgtgactgttaagacaaatgatcatttatttccatgcagatataattttaacagctacaattactataattgtgatttttttttcttaaaggaagaattcagggaacttcgagaacagccaagtgaccctcaagctgaacaagagcttattaatagtattgaacaagtatatttttctgtggattcatttgatattgttaaatatgagctggaggtaaacagaatttcattaaaacataactaaggcctgttttgttcagtgattggatttatgagatttgaa

SEQ ID NO: 320272 - DNA, 696 bp, Homo sapiens
tgatgttattcatttcatgtctcaactatttgattattacttgtatgcaatatataccttttttggtcggaatgattcagtaagtccacctttagagggaaaaaaatctttcttttaaaatttattttataaatgtcaaagtttttcattctctctatagaagatacacaaataacattattttggggattatgcatcaaaaacaaaattattgatatcagccttctgtctgccttattgccttacttttatattaattttaagctttggtatgataaacacattcaaatttttggcagaaaaagtgcaacatctgtttctaaccttgacatattttggcaatgaaaaatgtgcaggttgctttttttaaatctggctccatctaaaatataaaacagtaaatgagacattttaaatgctggctaacaaccttagcagtcactagtatatttataagataatgatgtataagaatgcttgtgatttttgtacattgattttgtatcctgagactttgcttaaggatattttgggctgagacaatggggttttctagatatacaatcatgtcatctgcaaacagggacaatttgacttgctcttttcctaattgaataccctttatttccttctcctgcctaattgccctggccagaacttccaacactatgttgaataggagtggtgagagagggc

SEQ ID NO: 320273 - DNA, 396 bp, Homo sapiens
ccaagaatgtacataaactcatatccaaggcattcgttgcctggcatcagaatacctagaaaggtaaattagtaatgagaagatttctaatgagtatatcatcagatgaaagtaaaactgagaaatttgaagtccgatgagttttcccgaccacaaattagactgcatcactcctgttgactacatggctgtgtaactgaatcagtggttctctcctggatggtgctgaagagcctggcacaccctgcttcctgggtatccctttcctttgttcacattgaccatcttccttcttatcagcagtctgtccccagacatatacaatacagttggctctgttctagtttataacttcattctagtcctgccttcttgagattatataccagggtaacc

SEQ ID NO: 320274 - DNA, 5490 bp, Homo sapiens
atcataatatataatgaaataattatacaactcagcataatgtagaatcagtggaatccctgagcttgttttcctgcagttagacggtcccatctgatgggagacagtgacagatcatcaggcattagagtctcataaggagcacacaacctagattccttgcatgtgcagttcacagtagggatggagttagagctcttatgagaatctaatgccaccgctgatctgatgagaggtggagctcaggttgtaatgcaagtgatggggagcggctgtaaatacagatgaagcttcgcttgctcacctgccactcacttcctgctgtgtagcctggttccccacaggccacggaccagtactctctattagtagacaatcctgtggaacctttggaattcttaaaatgatatttaggattaacattgatatttcttcattaattaaagtctaaaagccatttaaaatttgattttcttaaccttaatggaatccctctttctagacaaaaacaatgagtgtatctaaaaattaatgtacgtaatttcaaagatgcttgaagcagattaagaaaatgtgaaaggattaatgcagtagtgtagtgggtgttcaatgttttgttctcagttggcctggggaaggggagccagttgtgtttctggagcaaactccctaaataccttctgtgtgtcctgcttcatgcctcatgtgctatctctgttagtgaagttggcagagaccctgaaatggtggaattagagcctcatgttcaaaaatcattatacttctaacttgcatacgttaatattattcatagaacaatacacacaaccttagatatcttcatagcgttccaaaaaacatgttttcagcttttcagaagtggaggaccaaactacttgcttgtcttcttaggcaacataaaggatctaaaggatacaagcaagttctttttcccagatattgtcgccataaattcagttgattaaaaatctgcttaacaatttcatctttttcaatcaaatcctattcccttaaaatggttacactttttggttaatgttacttaaatcagataatgatacacatattattaacaataataatgaccatttattgagtttctgttaaggaccaggacctgtgctatgtgctttattatattacctcttttactaatttcatagcccagggaaatgtgtatggccatagtatgccaatatctgctcccaaagttattggggagatctatggaatattcttttaaaaattcaaatataaaatatcatagaaagcatgaagtttgttcttttatttcctttgtttgattacatcttcttataggtatctaaaaaagtggcagatttaatccttgaaaaacagcctgcttatgtaaaggaacttgaaagagttacctcattgcagacaggtcttcaattagctgctgttatctgtacaaatgggagaaggtattgcttttgatgatattttgttctttaagctgaacaatatttcaagaataactatggaatctataatttataattgattttttaaattatggatgtggtttctagaatatcattccttaagtgaacatatatcatgatctaaagactacactaagagggtttgtgggaaatatctctaagtgtacttatgggttttaaaaaattactatttttatattatttagactagtgcttcacaaactgtttgtcgtaaagcacctacttttttctttctaaaatttccaatctgttacaggctgtgattttttaaaaatgcagtaaaaacaaattactaggcaaatgaaataaagaaggaaagacataatacagtcttaatttttttaattattagagtcacaaagaataattattctgtcagtttttgcactgtgtttttaagcgcttattctcagtttctgtaattttttgttatagaccactagcaggttgtgaattggcaccaatcttctcgtggtgttctgagtaatgctggtttagactggccattgagtacatttgtcaaatagtagtttaaatccttggttttaatagtaatccatttcactgcttcattagttacctaattgttctgtgtggatagtattcttattataataaaaaacttttaactatttattgttcacttttgcagacacttgaatattgcaaaggaaggttttactcaagctagtttaggccttcttgcaaatcaaaggaaacgtcagttgctgattggacttctgaaatctctgagaactataaaaacattgcaaagaacagatgtacggttaagtgaaatgctggaggaggaagattatccaggagctattcagttgtgccttgaatgtcaaaaagctgccagcacttttaaacattacagttgtataagtgaactgaattcaaagctgcaagatactttggaacagattgaggaacagctggacgtagctctttccaaaatctgcaagaattttgacattaaccattataccaaggttcaacaagcttatcgacttcttggaaaaacacagacagcaatggatcaacttcatatgcacttcacccaagccattcacaacaccgtgtttcaagttgttcttggttatgtggaactatgtgcaggaaacacagacacaaaattccaaaagctgcaatataaggatctctgtacacatgttacaccagacagctatattccatgccttgcagacctgtgcaaagcactatgggaagttatgctcagctattataggactatggaatggcatgaaaagcatgacaatgaggatactgcttcagcttctgaagggagtaatatgataggtactgaagaaactaattttgatcgtggctacataaaaaagaaattagaacatggacttacacgaatatggcaggatgttcagctaaaagtaaaaacctacttgcttggaactgatttgtctatattcaaatatgatgatttcatctttgttttggatataatcagcaggttgatgcaagttggagaagaattttgtggtagcaagtctgaagttttacaggaatctattagaaaacaaagtgtcaattatttcaagaattaccatagaacacggctcgatgaactgagaatgttcttagagaatgagacttgggaactttgtcctgttaagtcaaatttcagcatcttgcaacttcatgaatttaaattcatggaacagtctcgctccccatcagtttcacctagtaaacagccagtctcaacttcttcaaaaacagtgaccttgtttgagcagtactgtagtggtgggaatccatttgaaattcaggccaaccacaaagatgaagaaacagaagatgtcttagcttctaatgggtatgaatctgatgaacaagaaaagagtgcctatcaagagtatgacagtgacagtgatgttcctgaggaactcaaacgagactatgtggatgagcagacaggagatggtcctgtgaaaagtgtttctcgggaaactctaaaaagcaggaagaaatcagattacagtctaaataaagtgaatgcacctatcttaacaaatacaacattgaacgtcataagacttgttggaaaatatatgcagatgatgaacattcttaagccaattgcctttgatgttattcatttcatgtctcaactatttgattattacttgtatgcaatatataccttttttggtcggaatgattcattggaatcaactggactcggccttagtagtagtagactaagaacaactctaaacagaatacaagaaagccttattgatctagatatgtttatatgaagtccaagaatgtacataaactcatatccaaggcattcgttgcctggcatcagaatacctagaaaggtaaattagtaatgagaagatttctaatgagtatatcatcagatgaaagtaaaactgagaaatttgaagtccgatgagttttcccgaccacaaattagactgcatcactcctgttgactacatggctgtgtaactgaatcagtggttctctcctggatggtgctgaagagcctggcacaccctgcttcctgggaagtttcagctgatcctactgccacactcacagcagcagaagaaagaaaggagaaggtgccaagtccacacctcagtcacctagtggttttgacatctggggatacgctgtatgggttggcagaaagagtggtagccacggaatccttggtattcttggctgaacagtttgagttccttcagccacatctggatgctgtgatgcctgcagtcaaaaagccctttcttcagcagttctattctcagacagtctcaaccgccagtgaactacggaaaccaatttactggattgtagctggtaaagcccttgattatgaacagatgctgcttctcatggctaatgtgaaatgggatgtaaaagaaattatgtcacagcacaacatatatgtagatgcactattaaaggaatttgagcagtttaacaggaggctaaatgaagtttctaagagagttcgcatacccttgcctgtgtctaatatactttgggaacattgtatacgattggctaatcgaactattgtagaaggatatgccaatgtcaagaaatgcagtaatgagggtcgtgccctgatgcaactggattttcaacagtttttaatgaaacttgaaaaactaacagatattagacccattcctgataaagaatttgtagaaacttatattaaagcttattacctaactgagaatgacatggaacggtggatcaaagagcacagggaatattcaacgaagcagctgaccaatctggtgaatgtttgcctgggatcccatatcaataagaaagcaagacaaaaacttctagcagctatagatgatatagacagacctaaaagataatgaacacagctctctttcctcaatggcattgatcctcactcaacatatatgacctgaaagccagtttttttatgcacttctgacaactatctgctaagaaaactttgtgcatgtttttttgactggaaagtggaaaatattgaaatgtgtgtggtgttctcatgacttttatatgctgtggtctcttcaacttttggtctcatttgttgtaatctgaaatgatgttgccgccttgtcataacaatggttatgtgactacagttatacattttacagaagaatgtaccataagtatataattagaagaacagtggcttaatatatgtatgggaagtttatggaaaatgaagttggcacttttctaccctctgagcttggttcttaataagcataatgtgagggtgaatatgtagtatctcctaattatgagcactgcatgagaattaaaaaacacatgtaagtaaaatagttgaaaaatcagtatgttctctgtttttaaaatgtcaaagtttatgtcagggttaatttagttataacaaagtgatcataatggtgaaatttaataaatatactctagtatgatc

SEQ ID NO: 320275 - DNA, 3608 bp, Homo sapiens
caggataccctgggtcggctcctccacgtgaccacccactatggcttcctagtgtcagggccagctgtgtagtggctcggtgtgatttgttagctctttgaggcagggtaccctcctcaggatttcgatatgcaaaaaatcaaatctctcatgacccgacagggtctgaaaagccctcaagaaagcctcagtgatcttggtgccatagagagtctccgggtccctggaaaggaagaattcagggaacttcgagaacagccaagtgaccctcaagctgaacaagagcttattaatagtattgaacaagtatatttttctgtggattcatttgatattgttaaatatgagctggagaagcttccacctgttctcaatttgcaagaattagaggcgtatagagacaaattgaaacaacagcaagctgcagtatctaaaaaagtggcagatttaatccttgaaaaacagcctgcttatgtaaaggaacttgaaagagttacctcattgcagacaggtcttcaattagctgctgttatctgtacaaatgggagaagacacttgaatattgcaaaggaaggttttactcaagctagtttaggccttcttgcaaatcaaaggaaacgtcagttgctgattggacttctgaaatctctgagaactataaaaacattgcaaagaacagatgtacggttaagtgaaatgctggaggaggaagattatccaggagctattcagttgtgccttgaatgtcaaaaagctgccagcacttttaaacattacagttgtataagtgaactgaattcaaagctgcaagatactttggaacagattgaggaacagctggacgtagctctttccaaaatctgcaagaattttgacattaaccattataccaaggttcaacaagcttatcgacttcttggaaaaacacagacagcaatggatcaacttcatatgcacttcacccaagccattcacaacaccgtgtttcaagttgttcttggttatgtggaactatgtgcaggaaacacagacacaaaattccaaaagctgcaatataaggatctctgtacacatgttacaccagacagctatattccatgccttgcagacctgtgcaaagcactatgggaagttatgctcagctattataggactatggaatggcatgaaaagcatgacaatgaggatactgcttcagcttctgaagggagtaatatgataggtactgaagaaactaattttgatcgtggctacataaaaaagaaattagaacatggacttacacgaatatggcaggatgttcagctaaaagtaaaaacctacttgcttggaactgatttgtctatattcaaatatgatgatttcatctttgttttggatataatcagcaggttgatgcaagttggagaagaattttgtggtagcaagtctgaagttttacaggaatctattagaaaacaaagtgtcaattatttcaagaattaccatagaacacggctcgatgaactgagaatgttcttagagaatgagacttgggaactttgtcctgttaagtcaaatttcagcatcttgcaacttcatgaatttaaattcatggaacagtctcgctccccatcagtttcacctagtaaacagccagtctcaacttcttcaaaaacagtgaccttgtttgagcagtactgtagtggtgggaatccatttgaaattcaggccaaccacaaagatgaagaaacagaagatgtcttagcttctaatgggtatgaatctgatgaacaagaaaagagtgcctatcaagagtatgacagtgacagtgatgttcctgaggaactcaaacgagactatgtggatgagcagacaggagatggtcctgtgaaaagtgtttctcgggaaactctaaaaagcaggaagaaatcagattacagtctaaataaagtgaatgcacctatcttaacaaatacaacattgaacgtcataagacttgttggaaaatatatgcagatgatgaacattcttaagccaattgcctttgatgttattcatttcatgtctcaactatttgattattacttgtatgcaatatataccttttttggtcggaatgattcattggaatcaactggactcggccttagtagtagtagactaagaacaactctaaacagaatacaagaaagccttattgatctagaagtttcagctgatcctactgccacactcacagcagcagaagaaagaaaggagaaggtgccaagtccacacctcagtcacctagtggttttgacatctggggatacgctgtatgggttggcagaaagagtggtagccacggaatccttggtattcttggctgaacagtttgagttccttcagccacatctggatgctgtgatgcctgcagtcaaaaagccctttcttcagcagttctattctcagacagtctcaaccgccagtgaactacggaaaccaatttactggattgtagctggtaaagcccttgattatgaacagatgctgcttctcatggctaatgtgaaatgggatgtaaaagaaattatgtcacagcacaacatatatgtagatgcactattaaaggaatttgagcagtttaacaggaggctaaatgaagtttctaagagagttcgcatacccttgcctgtgtctaatatactttgggaacattgtatacgattggctaatcgaactattgtagaaggatatgccaatgtcaagaaatgcagtaatgagggtcgtgccctgatgcaactggattttcaacagtttttaatgaaacttgaaaaactaacagatattagacccattcctgataaagaatttgtagaaacttatattaaagcttattacctaactgagaatgacatggaacggtggatcaaagagcacagggaatattcaacgaagcagctgaccaatctggtgaatgtttgcctgggatcccatatcaataagaaagcaagacaaaaacttctagcagctatagatgatatagacagacctaaaagataatgaacacagctctctttcctcaatggcattgatcctcactcaacatatatgacctgaaagccagtttttttatgcacttctgacaactatctgctaagaaaactttgtgcatgtttttttgactggaaagtggaaaatattgaaatgtgtgtggtgttctcatgacttttatatgctgtggtctcttcaacttttggtctcatttgttgtaatctgaaatgatgttgccgccttgtcataacaatggttatgtgactacagttatacattttacagaagaatgtaccataagtatataattagaagaacagtggcttaatatatgtatgggaagtttatggaaaatgaagttggcacttttctaccctctgagcttggttcttaataagcataatgtgagggtgaatatgtagtatctcctaattatgagcactgcatgagaattaaaaaacacatgtaagtaaaatagttgaaaaatcagtatgttctctgtttttaaaatgtcaaagtttatgtcagggttaatttagttataacaaagtgatcataatggtgaaatttaataaatatactctagtatgatc

SEQ ID NO: 320276 - DNA, 4336 bp, Homo sapiens
aatagagatatatctgtggatggtagagttggggttaggttagttactgtctcacattctcctgtcacaggccgtggcagcagtgtctgtcggcctagggtccagagtccccagtggtagtggggtttctcagaaggcagagcagcagcagtgggggtaacaaggctgaatgaggggtggaaccagagggctgtgtactaaagatgtataggcttttgtggttggaacctaggagggaggttgggaggacaggtggcatggagggcagtgggatgtgacactgttttgtatgcacagtttgtagttcactagtcagaagggtccaggtaaatgaaaccaaattaaacaatttattttttcctcttctttcatgaatttttttctgtagaagcttccacctgttctcaatttgcaagaattagaggcgtatagagacaaattgaaacaacagcaagctgcagtatctaaaaaagtggcagatttaatccttgaaaaacagcctgcttatgtaaaggaacttgaaagagttacctcattgcagacaggtcttcaattagctgctgttatctgtacaaatgggagaaggtattgcttttgatgatattttgttctttaagctgaacaatatttcaagaataactatggaatctataatttataattgattttttaaattatggatgtggtttctagaatatcattccttaagtgaacatatatcatgatctaaagactacactaagagggtttgtgggaaatatctctaagtgtacttatgggttttaaaaaattactatttttatattatttagactagtgcttcacaaactgtttgtcgtaaagcacctacttttttctttctaaaatttccaatctgttacaggctgtgattttttaaaaatgcagtaaaaacaaattactaggcaaatgaaataaagaaggaaagacataatacagtcttaatttttttaattattagagtcacaaagaataattattctgtcagtttttgcactgtgtttttaagcgcttattctcagtttctgtaattttttgttatagaccactagcaggttgtgaattggcaccaatcttctcgtggtgttctgagtaatgctggtttagactggccattgagtacatttgtcaaatagtagtttaaatccttggttttaatagtaatccatttcactgcttcattagttacctaattgttctgtgtggatagtattcttattataataaaaaacttttaactatttattgttcacttttgcagacacttgaatattgcaaaggaaggttttactcaagctagtttaggccttcttgcaaatcaaaggaaacgtcagttgctgattggacttctgaaatctctgagaactataaaaacattgcaaagaacagatgtacggttaagtgaaatgctggaggaggaagattatccaggagctattcagttgtgccttgaatgtcaaaaagctgccagcacttttaaacattacagttgtataagtgaactgaattcaaagctgcaagatactttggaacagattgaggaacagctggacgtagctctttccaaaatctgcaagaattttgacattaaccattataccaaggttcaacaagcttatcgacttcttggaaaaacacagacagcaatggatcaacttcatatgcacttcacccaagccattcacaacaccgtgtttcaagttgttcttggttatgtggaactatgtgcaggaaacacagacacaaaattccaaaagctgcaatataaggatctctgtacacatgttacaccagacagctatattccatgccttgcagacctgtgcaaagcactatgggaagttatgctcagctattataggactatggaatggcatgaaaagcatgacaatgaggatactgcttcagcttctgaagggagtaatatgataggtactgaagaaactaattttgatcgtggctacataaaaaagaaattagaacatggacttacacgaatatggcaggatgttcagctaaaagtaaaaacctacttgcttggaactgatttgtctatattcaaatatgatgatttcatctttgttttggatataatcagcaggttgatgcaagttggagaagaattttgtggtagcaagtctgaagttttacaggaatctattagaaaacaaagtgtcaattatttcaagaattaccatagaacacggctcgatgaactgagaatgttcttagagaatgagacttgggaactttgtcctgttaagtcaaatttcagcatcttgcaacttcatgaatttaaattcatggaacagtctcgctccccatcagtttcacctagtaaacagccagtctcaacttcttcaaaaacagtgaccttgtttgagcagtactgtagtggtgggaatccatttgaaattcaggccaaccacaaagatgaagaaacagaagatgtcttagcttctaatgggtatgaatctgatgaacaagaaaagagtgcctatcaagagtatgacagtgacagtgatgttcctgaggaactcaaacgagactatgtggatgagcagacaggagatggtcctgtgaaaagtgtttctcgggaaactctaaaaagcaggaagaaatcagattacagtctaaataaagtgaatgcacctatcttaacaaatacaacattgaacgtcataagacttgttggaaaatatatgcagatgatgaacattcttaagccaattgcctttgatgttattcatttcatgtctcaactatttgattattacttgtatgcaatatataccttttttggtcggaatgattcattggaatcaactggactcggccttagtagtagtagactaagaacaactctaaacagaatacaagaaagccttattgatctagaagtttcagctgatcctactgccacactcacagcagcagaagaaagaaaggagaaggtgccaagtccacacctcagtcacctagtggttttgacatctggggatacgctgtatgggttggcagaaagagtggtagccacggaatccttggtattcttggctgaacagtttgagttccttcagccacatctggatgctgtgatgcctgcagtcaaaaagccctttcttcagcagttctattctcagacagtctcaaccgccagtgaactacggaaaccaatttactggattgtagctggtaaagcccttgattatgaacagatgctgcttctcatggctaatgtgaaatgggatgtaaaagaaattatgtcacagcacaacatatatgtagatgcactattaaaggaatttgagcagtttaacaggaggctaaatgaagtttctaagagagttcgcatacccttgcctgtgtctaatatactttgggaacattgtatacgattggctaatcgaactattgtagaaggatatgccaatgtcaagaaatgcagtaatgagggtcgtgccctgatgcaactggattttcaacagtttttaatgaaacttgaaaaactaacagatattagacccattcctgataaagaatttgtagaaacttatattaaagcttattacctaactgagaatgacatggaacggtggatcaaagagcacagggaatattcaacgaagcagctgaccaatctggtgaatgtttgcctgggatcccatatcaataagaaagcaagacaaaaacttctagcagctatagatgatatagacagacctaaaagataatgaacacagctctctttcctcaatggcattgatcctcactcaacatatatgacctgaaagccagtttttttatgcacttctgacaactatctgctaagaaaactttgtgcatgtttttttgactggaaagtggaaaatattgaaatgtgtgtggtgttctcatgacttttatatgctgtggtctcttcaacttttggtctcatttgttgtaatctgaaatgatgttgccgccttgtcataacaatggttatgtgactacagttatacattttacagaagaatgtaccataagtatataattagaagaacagtggcttaatatatgtatgggaagtttatggaaaatgaagttggcacttttctaccctctgagcttggttcttaataagcataatgtgagggtgaatatgtagtatctcctaattatgagcactgcatgagaattaaaaaacacatgtaagtaaaatagttgaaaaatcagtatgttctctgtttttaaaatgtcaaagtttatgtcagggttaatttagttataacaaagtgatcataatggtgaaatttaataaatatactctagtatgatc

SEQ ID NO: 320277 - DNA, 2885 bp, Homo sapiens
caggataccctgggtcggctcctccacgtgaccacccactatggcttcctagtgtcagggccagctgtgtagtggctcggtgtgatttgttagctctttgaggcagggtaccctcctcaggatttcgatatgcaaaaaatcaaatctctcatgacccgacagggtctgaaaagccctcaagaaagcctcagtgatcttggtgccatagagagtctccgggtccctggaaaggaagaattcagggaacttcgagaacagccaagtgaccctcaagctgaacaagagcttattaatagtattgaacaagtatatttttctgtggattcatttgatattgttaaatatgagctggagaagcttccacctgttctcaatttgcaagaattagaggcgtatagagacaaattgaaacaacagcaagctgcagtatctaaaaaagtggcagatttaatccttgaaaaacagcctgcttatgtaaaggaacttgaaagagttacctcattgcagacaggtcttcaattagctgctgttatctgtacaaatgggagaagacacttgaatattgcaaaggaaggttttactcaagctagtttaggccttcttgcaaatcaaaggaaacgtcagttgctgattggacttctgaaatctctgagaactataaaaacattgcaaagaacagatgtacggttaagtgaaatgctggaggaggaagattatccaggagctattcagttgtgccttgaatgtcaaaaagctgccagcacttttaaacattacagttgtataagtgaactgaattcaaagctgcaagatactttggaacagattgaggaacagctggacgtagctctttccaaaatctgcaagaattttgacattaaccattataccaaggttcaacaagcttatcgacttcttggaaaaacacagacagcaatggatcaacttcatatgcacttcacccaagccattcacaacaccgtgtttcaagttgttcttggttatgtggaactatgtgcaggaaacacagacacaaaattccaaaagctgcaatataaggatctctgtacacatgttacaccagacagctatattccatgccttgcagacctgtgcaaagcactatgggaagttatgctcagctattataggactatggaatggcatgaaaagcatgacaatgaggatactgcttcagcttctgaagggagtaatatgataggtactgaagaaactaattttgatcgtggctacataaaaaagaaattagaacatggacttacacgaatatggcaggatgttcagctaaaagtaaaaacctacttgcttggaactgatttgtctatattcaaatatgatgatttcatctttgttttggatataatcagcaggttgatgcaagttggagaagaattttgtggtagcaagtctgaagttttacaggaatctattagaaaacaaagtgtcaattatttcaagaattaccatagaacacggctcgatgaactgagaatgttcttagagaatgagacttgggaactttgtcctgttaagtcaaatttcagcatcttgcaacttcatgaatttaaattcatggaacagtctcgctccccatcagtttcacctagtaaacagccagtctcaacttcttcaaaaacagtgaccttgtttgagcagtactgtagtggtgggaatccatttgaaattcaggccaaccacaaagatgaagaaacagaagatgtcttagcttctaatgggtatgaatctgatgaacaagaaaagagtgcctatcaagagtatgacagtgacagtgatgttcctgaggaactcaaacgagactatgtggatgagcagacaggagatggtcctgtgaaaagtgtttctcgggaaactctaaaaagcaggaagaaatcagattacagtctaaataaagtgaatgcacctatcttaacaaatacaacattgaacgtcataagacttgttgacggagtctcactctgttgcctaggctggagtacagtggcgcatctccactcactgcaagctccgcctcccgggttcaagccattctcctgcctcagcctcccgcgtagctgggactacaggcgcccgccaccacgcccggctaattttttgtattttcttctttttagtagagacggggtttcaccgtgttagcggggatggtctctatctcctgacctcgtgatccgcccgcctcggcctcccaaagtgctgggattacaggcatgaaccaccgctcccagcttatcatttcttttagagaggaaccttaagggtttctattttgttttatgggtaaattctagcagcctacacctctaactgctggagaggagaggggaatggtggtggtggggaatgcagactgttacagtttgtcccatatgtgaacctgtagcttgatcgtttttcagccccgtttctgactcctgcagttccagcttgattctaagtagttactgtcctagtgaatagcttccacctcctttttggccctcttatggttttattggcttatgtttttccatcaacgtgttcccatctactgtctgtcatctacaacagacgttttgagatgtcaaatgttttgagctgctggctgcttgtttttgtaaataaagttttattggcacacccatgctcatttgtttgcatattgtctgtctgtagctgcttttgtgctacagtggcatagttgagcagttgaaacagaagacagcagagcagaattgttgccacagagactgtgcggtatgcaaagcctaaactatctactcttgggtcctttacaggaaaagtttgccaacctctggtctagaaatgttttgacatttttcattttcttgtgctcaaacctacca

SEQ ID NO: 320278 - DNA, 3598 bp, Homo sapiens
agcggaggtgggaagtatcccgggctgggggtgggggtacgccgcacagctccagtcgccgtcgcggcttccggtgctaggtggagggaaggaaggagggagccggggagtgggccaggcagcagccgggctgaagtcggcttggggagccagagggagcggagcggaacctgcggggcagaggcggcggccgcagcggcgcagctgatagcaggaacaggatcaagtcttccataccagggaccaggccaaaaccagactgccactgcccctacttgggccccactgtccccagaaagcagctgctgtgatcatgggcaatatctttggaaaccttctcaagagcctgattgggaagaaggagatgcgcatcctgatggtgggcctggatgccgcaggaaagaccaccatcctatacaagctgaaactgggggagatcgtcaccaccatccctaccattgggttcaatgtggagacagtggagtataagaacatcagctttacagtgtgggatgtgggtggccaggacaagattcgacccctctggagacactacttccagaacacccaagggttgatatttgtggtcgacagcaatgatcgggagcgagtaaatgaggcccgggaagagctgatgagaatgctggcggaggacgagctccgggatgctgtactccttgtctttgcaaacaaacaggatctgcctaatgctatgaacgctgctgagatcacagacaagctgggcctgcattcccttcgtcaccgtaactggtacattcaggccacctgtgccaccagcggggacgggctgtacgaaggcctggactggctggccaatcagctcaaaaacaagaagtgaaagccagacagccctaacaaagcaccccacccacccctgacatacctactgtcaccctgccccagtcctaccccttcctctccatgcaagtgtggccagggccctgggtatcatgtccacatgcccagcaagagccttgcctcccctgcctcccctcctttttcctgtccacctatatgaccaatccctaattgctgtcctgatgatgagtcattccaatttactggatttaaaacaaaaagttgttacggtttcatggggtggcccctctctctctctcacctctgggtttcgggaggtcgagtggggtattctctttgtttggcagtggttgctgtcctcttggcatctgagtcctttccctgtccccacaagcccttctactccctgtttgcctttcctttgccaccctctccctgttttacatggaaattgcacgggcctctctgtgtttgcgtgcatgtgtgcgcctgtatatacatgtatagagagatatatttgtgggggccggggggagcggggagggggtggagtgaagctcagggcttgcagccaggacactgcccactggagcctgtcatctgccccttccgtgttggtgagattaagggaagaaggtgggagggcattagtcaagccggactgccccagtctttgactggttaccctcctctctgcaggtaggtttttctggatgataggacagatgatggattcttcaccaccattttccttgtactcttctctccacccttcttagggctggaggatggcatttatctctagatgactgttcccaaggagatgccactctgctctgccttactgttgggaaggagagaggaacccactcactcttatcagcttagagtgttcaactgatccttccccaccatcttcagatctgttcctctggagcttgactggggggtggggatggcaagtccatggtgtgtgttagggacccagggcattgggggaagggaggcgaaggcctgaggttttccatcttcattctcttttgttattaggagaaggtgaggcatgggccaatcccattcctgccttccagtgccccaccacccttctgatcttaggggttggatgggtcatctgtccttggtcagaattttctcaccctagtactcctactggcctgaccagggctgactgggtattctaatgaggagctgggaagtggggtgacatagctgaccttagtatcaacccccctcttctccaactcttgttttctagtccaggatatgctaaaggacgaagattttctattgtttccaggccctcagaccatccttgctgtcccttcaccctccatgcccctgccatcctcactcacttctcataaatggatctgggggttagagtggaggaaataaaatcctgaagtggttgtcagtgcttgtgggatgcagtggtcttcaggattctccccgcattattatgtagttgttcagaagctgttgctactgcgtctctctgtctgcagggggcacttgttcctgaggtcctcgcctgggtcctgacttctgtagtttctgtgaagacgtggctgtcctgtgggctcctgtgtgtgctggctgcgccctgagctccgagacagctgcccataacctgctaaggtcagggcccagggccccccacagcatggctgagggaccccttcccagtagggctgtcccaagccccactccatggggccaggtttcctggccacttttgttgatagcagatggatcaatattagtaaccccatccaagattgaactgtgaaagagaggttccaggggtatctccctcagtgccagttacttagtgatgtgttacccaggatgcagcaggtgtgtgcaggtatcttgctctctaggcctgtgtgtgtgtgtgagtgtgtgtgtatatgggtgtgggtgtgtttgtgtgtggtggttgtggggggggtgttggaggttctatttcatttaaaaatgtattcatttccctggccccacagatgcttccctccatactttttatttgctctgtttcctcagatttattttgtcttgccccattgcctctccttccttgaactctttccttttcaatctcaactcattcactgctgttgctcatttgcccttttccatgtattttttcctacttaggattttccactctatctttgtggttcatgaggactttgcctcttctcctgcctcattccctgactttctctagttagatgtcagtcctaaataggttttcctcacttcaggcctcacccctcaccttgtttttttgggggctccagggaccaatctggggctggaaatgttaggaggttgccttggtgctgccccagatctgtccagcagggggcagtaagtgatcttggtagtatccctggctgctaagcccttggcaggggtggtcctttctacattcccattcacttaacagctcttttgggattgggtgtttcattccatttctgcccactccctctcctctcctctctggtaggtttaattttatgctttccctgattccagctttctgcttcctgaggactcccgctccccccaccccaaagtttgtctgtggtgttatagtggtaactgcagttcctcctctggaatgtagactgtatatgtttaataactcaccttctctatccttgctcaaaatgtgggataacgcgatgactgtgaccctggttggaaattaaacttgttttatgca

SEQ ID NO: 320279 - DNA, 698 bp, Homo sapiens
ccccgactagcccgacagggacgtccaaggaatctgtgcatttcaagaaacaaagttcatcagcttctctcctaaggtattgccctcatttgcccttttccatgtattttttcctacttaggattttccactctatctttgtggttcatgaggactttgcctcttctcctgcctcattccctgactttctctagttagatgtcagtcctaaataggttttcctcacttcaggcctcacccctcaccttgtttttttgggggctccagggaccaatctggggctggaaatgttaggaggttgccttggtgctgccccagatctgtccagcagggggcagtaagtgatcttggtagtatccctggctgctaagcccttggcaggggtggtcctttctacattcccattcacttaacagctcttttgggattgggtgtttcattccatttctgcccactccctctcctctcctctctggtaggtttaattttatgctttccctgattccagctttctgcttcctgaggactcccgctccccccaccccaaagtttgtctgtggtgttatagtggtaactgcagttcctcctctggaatgtagactgtatatgtttaataactcaccttctctatccttgctcaaaatgtgggataacgcgatgactgtgaccctggttggaaattaaacttgttttatgca

SEQ ID NO: 320280 - DNA, 583 bp, Homo sapiens
ccggcctccagaaattgggccccaggtggtttcctgagactttgcctcttctcctgcctcattccctgactttctctagttagatgtcagtcctaaataggttttcctcacttcaggcctcacccctcaccttgtttttttgggggctccagggaccaatctggggctggaaatgttaggaggttgccttggtgctgccccagatctgtccagcagggggcagtaagtgatcttggtagtatccctggctgctaagcccttggcaggggtggtcctttctacattcccattcacttaacagctcttttgggattgggtgtttcattccatttctgcccactccctctcctctcctctctggtaggtttaattttatgctttccctgattccagctttctgcttcctgaggactcccgctccccccaccccaaagtttgtctgtggtgttatagtggtaactgcagttcctcctctggaatgtagactgtatatgtttaataactcaccttctctatccttgctcaaaatgtgggataacgcgatgactgtgaccctggttggaaattaaacttgttttatgca

SEQ ID NO: 320281 - DNA, 837 bp, Homo sapiens
aagtgaattcgtgctggtgctaagggaattcgtgctggtgctaagggaattcggatggtgctacctttagggtgggtgaggtctgggtgagccaggcaagccttccccaatcttaatattttcttaagctttgaggacagaggtcttcccagcctgcttttgtgggaaagggataggatttaggcatataataagtttgagagccccaagtaccagtgtgaagcatataatttatattcagttacttccctgctgcctcccctgccaattttccttttcagcacttctattattaataggccatcaccctcaaggaccagtgcttccacccatatataactctcaaactactccaaccagacatgtcttatcaatcccaatgactttgaacattacccacctactcctcaagatcagatgacactttcctccttccaggcttctccaaagttctgcttggtgacagggtgctgataagagtatctttcccaagtgttttctttcttcttcttctttttttttttttttttttttgagacggaatttggtcttgttgcccaggctggagggcaatggcacgatatcggctcaccacagcctctcctcctgggctcccgggttcaagcaattctcctgcttcagcctcctgaggagctgggattacaggcatgcgccaccacacccggctaattttgtatttttagtagagatgggtttctccatgttagtgagactggtcttgaactcctgacctcaggtgatctgcccacctcagcctcccaaagtgctaggattacaggcgtgagccaccacgcccggccaggtgttttatttcta

SEQ ID NO: 320282 - DNA, 3902 bp, Homo sapiens
agcggaggtgggaagtatcccgggctgggggtgggggtacgccgcacagctccagtcgccgtcgcggcttccggtgctaggtggagggaaggaaggagggagccggggagtgggccaggcagcagccgggctgaagtcggcttggggagccagagggagcggagcggaacctgcggggcagaggcggcggccgcagcggcgcagctgatagcaggaacaggatcaagtcttccataccagggaccaggccaaaaccagactgccactgcccctacttgggccccactgtccccagaaagcagctgctgtgatcatgggcaatatctttggaaaccttctcaagagcctgattgggaagaaggagatgcgcatcctgatggtgggcctggatgccgcaggaaagaccaccatcctatacaagctgaaactgggggagatcgtcaccaccatccctaccattgggttcaatgtggagacagtggagtataagaacatcagctttacagtgtgggatgtgggtggccaggacaagattcgacccctctggagacactacttccagaacacccaagggttgatatttgtggtcgacagcaatgatcgggagcgagtaaatgaggcccgggaagagctgatgagaatgctggcggaggacgagctccgggatgctgtactccttgtctttgcaaacaaacaggatctgcctaatgctatgaacgctgctgagatcacagacaagctgggcctgcattcccttcgtcaccgtaactggtacattcaggccacctgtgccaccagcggggacgggctgtacgaaggcctggactggctggccaatcagctcaaaaacaagaagtgaaagccagacagccctaacaaagcaccccacccacccctgacatacctactgtcaccctgccccagtcctaccccttcctctccatgcaagtgtggccagggccctgggtatcatgtccacatgcccagcaagagccttgcctcccctgcctcccctcctttttcctgtccacctatatgaccaatccctaattgctgtcctgatgatgagtcattccaatttactggatttaaaacaaaaagttgttacggtttcatggggtggcccctctctctctctcacctctgggtttcgggaggtcgagtggggtattctctttgtttggcagtggttgctgtcctcttggcatctgagtcctttccctgtccccacaagcccttctactccctgtttgcctttcctttgccaccctctccctgttttacatggaaattgcacgggcctctctgtgtttgcgtgcatgtgtgcgcctgtatatacatgtatagagagatatatttgtgggggccggggggagcggggagggggtggagtgaagctcagggcttgcagccaggacactgcccactggagcctgtcatctgccccttccgtgttggtgagattaagggaagaaggtgggagggcattagtcaagccggactgccccagtctttgactggttaccctcctctctgcaggtaggtttttctggatgataggacagatgatggattcttcaccaccattttccttgtactcttctctccacccttcttagggctggaggatggcatttatctctagatgactgttcccaaggagatgccactctgctctgccttactgttgggaaggagagaggaacccactcactcttatcagcttagagtgttcaactgatccttccccaccatcttcagatctgttcctctggagcttgactggggggtggggatggcaagtccatggtgtgtgttagggacccagggcattgggggaagggaggcgaaggcctgaggttttccatcttcattctcttttgttattaggagaaggtgaggcatgggccaatcccattcctgccttccagtgccccaccacccttctgatcttaggggttggatgggtcatctgtccttggtcagaattttctcaccctagtactcctactggcctgaccagggctgactgggtattctaatgaggagctgggaagtggggtgacatagctgaccttagtatcaacccccctcttctccaactcttgttttctagtccaggatatgctaaaggacgaagattttctattgtttccaggccctcagaccatccttgctgtcccttcaccctccatgcccctgccatcctcactcacttctcataaatggatctgggggttagagtggaggaaataaaatcctgaagtggttgtcagtgcttgtgggatgcagtggtcttcaggattctccccgcattattatgtagttgttcagaagctgttgctactgcgtctctctgtctgcagggggcacttgttcctgaggtcctcgcctgggtcctgacttctgtagtttctgtgaagacgtggctgtcctgtgggctcctgtgtgtgctggctgcgccctgagctccgagacagctgcccataacctgctaaggtcagggcccagggccccccacagcatggctgagggaccccttcccagtagggctgtcccaagccccactccatggggccaggtttcctggccacttttgttgatagcagatggatcaatattagtaaccccatccaagattgaactgtgaaagagaggttccaggggtatctccctcagtgccagttacttagtgatgtgttacccaggatgcagcaggtgtgtgcaggtatcttgctctctaggcctgtgtgtgtgtgtgagtgtgtgtgtatatgggtgtgggtgtgtttgtgtgtggtggttgtggggggggtgttggaggttctatttcatttaaaaatgtattcatttccctggccccacagatgcttccctccatactttttatttgctctgtttcctcagatttattttgtcttgccccattgcctctccttccttgaactctttccttttcaatctcaactcattcactgctgttgctcatttgcccttttccatgtattttttcctacttaggattttccactctatctttgtggttcatgaggactttgcctcttctcctgcctcattccctgactttctctagttagatgtcagtcctaaataggttttcctcacttcaggcctcacccctcaccttgtttttttgggggctccagggaccaatctggggctggaaatgttaggaggttgccttggtgctgccccagatctgtccagcagggggcagtaagtgatcttggtagtatccctggctgctaagcccttggcaggggtggtcctttctacattcccattcacttaacagctcttttgggattgggtgtttcattccatttctgcccactccctctcctctcctctctggtaggtttaattttatgctttccctgattccagctttctgcttcctgaggactcccgctccccccaccccaaagtttgtctgtggtgttatagtggtaactgcagttcctcctctggaatgtagactgtatatgtttaataactcaccttctctatccttgctcaaaatgtgggataacgcgatgactgtgaccctggttggaaattaaacttgttttatgcaaaaaaaaaaaaaaaaaaaaaaaaaaaaaaacattttggttcgggccggactacgggcctccggaagacggttttcataaacaccactcgggttggggccgcgagggccccaaatagggaaggggcgacgttggccacaacgcgtggtccccagagaacaccgggcgcagcagcaaggcgtggggttctcccacgaataaaaaagcgcgcggggggaaccaccgggtgtctgagcaacccagaagagtcccggagcgctaggggctaccaacgggccagggggctgaatcaatacagcccggggg

SEQ ID NO: 320283 - DNA, 3870 bp, Homo sapiens
agcggaggtgggaagtatcccgggctgggggtgggggtacgccgcacagctccagtcgccgtcgcggcttccggtgctaggtggagggaaggaaggagggagccggggagtgggccaggcagcagccgggctgaagtcggcttggggagccagagggagcggagcggaacctgcggggcagaggcggcggccgcagcggcgcagctgatagcaggaacaggatcaagtcttccataccagggaccaggccaaaaccagactgccactgcccctacttgggccccactgtccccagaaagcagctgctgtgatcatgggcaatatctttggaaaccttctcaagagcctgattgggaagaaggagatgcgcatcctgatggtgggcctggatgccgcaggaaagaccaccatcctatacaagctgaaactgggggagatcgtcaccaccatccctaccattgggttcaatgtggagacagtggagtataagaacatcagctttacagtgtgggatgtgggtggccaggacaagattcgacccctctggagacactacttccagaacacccaagggttgatatttgtggtcgacagcaatgatcgggagcgagtaaatgaggcccgggaagagctgatgagaatgctggcggaggacgagctccgggatgctgtactccttgtctttgcaaacaaacaggatctgcctaatgctatgaacgctgctgagatcacagacaagctgggcctgcattcccttcgtcaccgtaactggtacattcaggccacctgtgccaccagcggggacgggctgtacgaaggcctggactggctggccaatcagctcaaaaacaagaagtgaaagccagacagccctaacaaagcaccccacccacccctgacatacctactgtcaccctgccccagtcctaccccttcctctccatgcaagtgtggccagggccctgggtatcatgtccacatgcccagcaagagccttgcctcccctgcctcccctcctttttcctgtccacctatatgaccaatccctaattgctgtcctgatgatgagtcattccaatttactggatttaaaacaaaaagttgttacggtttcatggggtggcccctctctctctctcacctctgggtttcgggaggtcgagtggggtattctctttgtttggcagtggttgctgtcctcttggcatctgagtcctttccctgtccccacaagcccttctactccctgtttgcctttcctttgccaccctctccctgttttacatggaaattgcacgggcctctctgtgtttgcgtgcatgtgtgcgcctgtatatacatgtatagagagatatatttgtgggggccggggggagcggggagggggtggagtgaagctcagggcttgcagccaggacactgcccactggagcctgtcatctgccccttccgtgttggtgagattaagggaagaaggtgggagggcattagtcaagccggactgccccagtctttgactggttaccctcctctctgcaggtaggtttttctggatgataggacagatgatggattcttcaccaccattttccttgtactcttctctccacccttcttagggctggaggatggcatttatctctagatgactgttcccaaggagatgccactctgctctgccttactgttgggaaggagagaggaacccactcactcttatcagcttagagtgttcaactgatccttccccaccatcttcagatctgttcctctggagcttgactggggggtggggatggcaagtccatggtgtgtgttagggacccagggcattgggggaagggaggcgaaggcctgaggttttccatcttcattctcttttgttattaggagaaggtgaggcatgggccaatcccattcctgccttccagtgccccaccacccttctgatcttaggggttggatgggtcatctgtccttggtcagaattttctcaccctagtactcctactggcctgaccagggctgactgggtattctaatgaggagctgggaagtggggtgacatagctgaccttagtatcaacccccctcttctccaactcttgttttctagtccaggatatgctaaaggacgaagattttctattgtttccaggccctcagaccatccttgctgtcccttcaccctccatgcccctgccatcctcactcacttctcataaatggatctgggggttagagtggaggaaataaaatcctgaagtggttgtcagtgcttgtgggatgcagtggtcttcaggattctccccgcattattatgtagttgttcagaagctgttgctactgcgtctctctgtctgcagggggcacttgttcctgaggtcctcgcctgggtcctgacttctgtagtttctgtgaagacgtggctgtcctgtgggctcctgtgtgtgctggctgcgccctgagctccgagacagctgcccataacctgctaaggtcagggcccagggccccccacagcatggctgagggaccccttcccagtagggctgtcccaagccccactccatggggccaggtttcctggccacttttgttgatagcagatggatcaatattagtaaccccatccaagattgaactgtgaaagagaggttccaggggtatctccctcagtgccagttacttagtgatgtgttacccaggatgcagcaggtgtgtgcaggtatcttgctctctaggcctgtgtgtgtgtgtgagtgtgtgtgtatatgggtgtgggtgtgtttgtgtgtggtggttgtggggggggtgttggaggttctatttcatttaaaaatgtattcatttccctggccccacagatgcttccctccatactttttatttgctctgtttcctcagatttattttgtcttgccccattgcctctccttccttgaactctttccttttcaatctcaactcattcactgctgttgctcatttgcccttttccatgtattttttcctacttaggattttccactctatctttgtggttcatgaggactttgcctcttctcctgcctcattccctgactttctctagttagatgtcagtcctaaataggttttcctcacttcaggcctcacccctcaccttgtttttttgggggctccagggaccaatctggggctggaaatgttaggaggttgccttggtgctgccccagatctgtccagcagggggcagtaagtgatcttggtagtatccctggctgctaagcccttggcaggggtggtcctttctacattcccattcacttaacagctcttttgggattgggtgtttcattccatttctgcccactccctctcctctcctctctggtaggtttaattttatgctttccctgattccagctttctgcttcctgaggactcccgctccccccaccccaaagtttgtctgtggtgttatagtggtaactgcagttcctcctctggaatgtagactgtatatgtttaataactcaccttctctatccttgctcaaaatgtgggataacgcgatgactgtgaccctggttggaaattaaacttgttttatgcaactcatcaaacatagtgactcaatgtcatcaaggtcagagtctactaggggacacccgcttctacaatgtgcccccagggatagggtcccgcaaggtctgaggtccacccccatgattatttgccgcagcggaggccccgcgttgaaagggcggatccatagcactacctcaccaggccgtcatgttgtcccagcgggcttggcggagcataaccgcaggagggacacacttctggcggacgacctgcctcctggggggtgccctatatcga

SEQ ID NO: 320284 - DNA, 4082 bp, Homo sapiens
agcggaggtgggaagtatcccgggctgggggtgggggtacgccgcacagctccagtcgccgtcgcggcttccggtgctaggtggagggaaggaaggagggagccggggagtgggccaggcagcagccgggctgaagtcggcttggggagccagagggagcggagcggaacctgcggggcagaggcggcggccgcagcggcgcagctgatagcaggaacaggatcaagtcttccataccagggaccaggccaaaaccagactgccactgcccctacttgggccccactgtccccagaaagcagctgctgtgatcatgggcaatatctttggaaaccttctcaagagcctgattgggaagaaggagatgcgcatcctgatggtgggcctggatgccgcaggaaagaccaccatcctatacaagctgaaactgggggagatcgtcaccaccatccctaccattgggttcaatgtggagacagtggagtataagaacatcagctttacagtgtgggatgtgggtggccaggacaagattcgacccctctggagacactacttccagaacacccaagggttgatatttgtggtcgacagcaatgatcgggagcgagtaaatgaggcccgggaagagctgatgagaatgctggcggaggacgagctccgggatgctgtactccttgtctttgcaaacaaacaggatctgcctaatgctatgaacgctgctgagatcacagacaagctgggcctgcattcccttcgtcaccgtaactggtacattcaggccacctgtgccaccagcggggacgggctgtacgaaggcctggactggctggccaatcagctcaaaaacaagaagtgaaagccagacagccctaacaaagcaccccacccacccctgacatacctactgtcaccctgccccagtcctaccccttcctctccatgcaagtgtggccagggccctgggtatcatgtccacatgcccagcaagagccttgcctcccctgcctcccctcctttttcctgtccacctatatgaccaatccctaattgctgtcctgatgatgagtcattccaatttactggatttaaaacaaaaagttgttacggtttcatggggtggcccctctctctctctcacctctgggtttcgggaggtcgagtggggtattctctttgtttggcagtggttgctgtcctcttggcatctgagtcctttccctgtccccacaagcccttctactccctgtttgcctttcctttgccaccctctccctgttttacatggaaattgcacgggcctctctgtgtttgcgtgcatgtgtgcgcctgtatatacatgtatagagagatatatttgtgggggccggggggagcggggagggggtggagtgaagctcagggcttgcagccaggacactgcccactggagcctgtcatctgccccttccgtgttggtgagattaagggaagaaggtgggagggcattagtcaagccggactgccccagtctttgactggttaccctcctctctgcaggtaggtttttctggatgataggacagatgatggattcttcaccaccattttccttgtactcttctctccacccttcttagggctggaggatggcatttatctctagatgactgttcccaaggagatgccactctgctctgccttactgttgggaaggagagaggaacccactcactcttatcagcttagagtgttcaactgatccttccccaccatcttcagatctgttcctctggagcttgactggggggtggggatggcaagtccatggtgtgtgttagggacccagggcattgggggaagggaggcgaaggcctgaggttttccatcttcattctcttttgttattaggagaaggtgaggcatgggccaatcccattcctgccttccagtgccccaccacccttctgatcttaggggttggatgggtcatctgtccttggtcagaattttctcaccctagtactcctactggcctgaccagggctgactgggtattctaatgaggagctgggaagtggggtgacatagctgaccttagtatcaacccccctcttctccaactcttgttttctagtccaggatatgctaaaggacgaagattttctattgtttccaggccctcagaccatccttgctgtcccttcaccctccatgcccctgccatcctcactcacttctcataaatggatctgggggttagagtggaggaaataaaatcctgaagtggttgtcagtgcttgtgggatgcagtggtcttcaggattctccccgcattattatgtagttgttcagaagctgttgctactgcgtctctctgtctgcagggggcacttgttcctgaggtcctcgcctgggtcctgacttctgtagtttctgtgaagacgtggctgtcctgtgggctcctgtgtgtgctggctgcgccctgagctccgagacagctgcccataacctgctaaggtcagggcccagggccccccacagcatggctgagggaccccttcccagtagggctgtcccaagccccactccatggggccaggtttcctggccacttttgttgatagcagatggatcaatattagtaaccccatccaagattgaactgtgaaagagaggttccaggggtatctccctcagtgccagttacttagtgatgtgttacccaggatgcagcaggtgtgtgcaggtatcttgctctctaggcctgtgtgtgtgtgtgagtgtgtgtgtatatgggtgtgggtgtgtttgtgtgtggtggttgtggggggggtgttggaggttctatttcatttaaaaatgtattcatttccctggccccacagatgcttccctccatactttttatttgctctgtttcctcagatttattttgtcttgccccattgcctctccttccttgaactctttccttttcaatctcaactcattcactgctgttgctcatttgcccttttccatgtattttttcctacttaggattttccactctatctttgtggttcatgaggactttgcctcttctcctgcctcattccctgactttctctagttagatgtcagtcctaaataggttttcctcacttcaggcctcacccctcaccttgtttttttgggggctccagggaccaatctggggctggaaatgttaggaggttgccttggtgctgccccagatctgtccagcagggggcagtaagtgatcttggtagtatccctggctgctaagcccttggcaggggtggtcctttctacattcccattcacttaacagctcttttgggattgggtgtttcattccatttctgcccactccctctcctctcctctctggtaggtttaattttatgctttccctgattccagctttctgcttcctgaggactcccgctccccccaccccaaagtttgtctgtggtgttatagtggtaactgcagttcctcctctggaatgtagactgtatatgtttaataactcaccttctctatccttgctcaaaatgtgggataacgcgatgactgtgaccctggttggaaattaaacttgttttatgcatttggagccgaccttcatctttgctgtgcagcagccgtgggacagtagtttcatggtgaggggagtcctgtttctggtccctctctccatagtgctccttctttcagcaaaggggtaaaaggcacacttgattgatagagagtaaggttatggaggaacttagtgccactccacactggttatttcttcccatcataccccgcggcgggggagcccaaatgaattgggcatcagagtgtgagggcttcgtgactttcctcctctagttctaaagggtttaaacctgaaatcagctgtatttctcacctgttggtagactgtatggacttcactggctgaagggccctgaacttggagggccccatgtgcctctactctcagatctcctcagccttgcacatgaggtgcttctagtttgaacagagaccccctcactagtctagttctggactttggcagtgaataaacatgaaggataaacgtc

SEQ ID NO: 320285 - DNA, 3650 bp, Homo sapiens
agcggaggtgggaagtatcccgggctgggggtgggggtacgccgcacagctccagtcgccgtcgcggcttccggtgctaggtggagggaaggaaggagggagccggggagtgggccaggcagcagccgggctgaagtcggcttggggagccagagggagcggagcggaacctgcggggcagaggcggcggccgcagcggcgcagctgatagcaggaacaggatcaagtcttccataccagggaccaggccaaaaccagactgccactgcccctacttgggccccactgtccccagaaagcagctgctgtgatcatgggcaatatctttggaaaccttctcaagagcctgattgggaagaaggagatgcgcatcctgatggtgggcctggatgccgcaggaaagaccaccatcctatacaagctgaaactgggggagatcgtcaccaccatccctaccattgggttcaatgtggagacagtggagtataagaacatcagctttacagtgtgggatgtgggtggccaggacaagattcgacccctctggagacactacttccagaacacccaagggttgatatttgtggtcgacagcaatgatcgggagcgagtaaatgaggcccgggaagagctgatgagaatgctggcggaggacgagctccgggatgctgtactccttgtctttgcaaacaaacaggatctgcctaatgctatgaacgctgctgagatcacagacaagctgggcctgcattcccttcgtcaccgtaactggtacattcaggccacctgtgccaccagcggggacgggctgtacgaaggcctggactggctggccaatcagctcaaaaacaagaagtgaaagccagacagccctaacaaagcaccccacccacccctgacatacctactgtcaccctgccccagtcctaccccttcctctccatgcaagtgtggccagggccctgggtatcatgtccacatgcccagcaagagccttgcctcccctgcctcccctcctttttcctgtccacctatatgaccaatccctaattgctgtcctgatgatgagtcattccaatttactggatttaaaacaaaaagttgttacggtttcatggggtggcccctctctctctctcacctctgggtttcgggaggtcgagtggggtattctctttgtttggcagtggttgctgtcctcttggcatctgagtcctttccctgtccccacaagcccttctactccctgtttgcctttcctttgccaccctctccctgttttacatggaaattgcacgggcctctctgtgtttgcgtgcatgtgtgcgcctgtatatacatgtatagagagatatatttgtgggggccggggggagcggggagggggtggagtgaagctcagggcttgcagccaggacactgcccactggagcctgtcatctgccccttccgtgttggtgagattaagggaagaaggtgggagggcattagtcaagccggactgccccagtctttgactggttaccctcctctctgcaggtaggtttttctggatgataggacagatgatggattcttcaccaccattttccttgtactcttctctccacccttcttagggctggaggatggcatttatctctagatgactgttcccaaggagatgccactctgctctgccttactgttgggaaggagagaggaacccactcactcttatcagcttagagtgttcaactgatccttccccaccatcttcagatctgttcctctggagcttgactggggggtggggatggcaagtccatggtgtgtgttagggacccagggcattgggggaagggaggcgaaggcctgaggttttccatcttcattctcttttgttattaggagaaggtgaggcatgggccaatcccattcctgccttccagtgccccaccacccttctgatcttaggggttggatgggtcatctgtccttggtcagaattttctcaccctagtactcctactggcctgaccagggctgactgggtattctaatgaggagctgggaagtggggtgacatagctgaccttagtatcaacccccctcttctccaactcttgttttctagtccaggatatgctaaaggacgaagattttctattgtttccaggccctcagaccatccttgctgtcccttcaccctccatgcccctgccatcctcactcacttctcataaatggatctgggggttagagtggaggaaataaaatcctgaagtggttgtcagtgcttgtgggatgcagtggtcttcaggattctccccgcattattatgtagttgttcagaagctgttgctactgcgtctctctgtctgcagggggcacttgttcctgaggtcctcgcctgggtcctgacttctgtagtttctgtgaagacgtggctgtcctgtgggctcctgtgtgtgctggctgcgccctgagctccgagacagctgcccataacctgctaaggtcagggcccagggccccccacagcatggctgagggaccccttcccagtagggctgtcccaagccccactccatggggccaggtttcctggccacttttgttgatagcagatggatcaatattagtaaccccatccaagattgaactgtgaaagagaggttccaggggtatctccctcagtgccagttacttagtgatgtgttacccaggatgcagcaggtgtgtgcaggtatcttgctctctaggcctgtgtgtgtgtgtgagtgtgtgtgtatatgggtgtgggtgtgtttgtgtgtggtggttgtggggggggtgttggaggttctatttcatttaaaaatgtattcatttccctggccccacagatgcttccctccatactttttatttgctctgtttcctcagatttattttgtcttgccccattgcctctccttccttgaactctttccttttcaatctcaactcattcactgctgttgctcatttgcccttttccatgtattttttcctacttaggattttccactctatctttgtggttcatgaggactttgcctcttctcctgcctcattccctgactttctctagttagatgtcagtcctaaataggttttcctcacttcaggcctcacccctcaccttgtttttttgggggctccagggaccaatctggggctggaaatgttaggaggttgccttggtgctgccccagatctgtccagcagggggcagtaagtgatcttggtagtatccctggctgctaagcccttggcaggggtggtcctttctacattcccattcacttaacagctcttttgggattgggtgtttcattccatttctgcccactccctctcctctcctctctggtaggtttaattttatgctttccctgattccagctttctgcttcctgaggactcccgctccccccaccccaaagtttgtctgtggtgttatagtggtaactgcagttcctcctctggaatgtagactgtatatgtttaataactcaccttctctatccttgctcaaaatgtgggataacgcgatgactgtgaccctggttggaaattaaacttgttttatgcaaaaaaccccaaccacacaacaaaaagggggccccaaaaataccccgggggcc

SEQ ID NO: 320286 - DNA, 3594 bp, Homo sapiens
gtgcctgtcgcggcttccggtgctacggtggagtggaatgtgacaggatgtgtgacgccggaggagtgggtgccatgggcatgcatgcctgtgtgcttgaatgtctgtcgcttggtggatgccagcagggatgctggagctggatactctgctgtggtgcaggatgtgctgtgctgtgactgcatgctgtgctgcagcttgatagcagtgaacagtgatcaagtcttccataccagggaccaggccaaaaccagactgccactgcccctacttgggccccactgtccccagaaagcagctgctgtgatcatgggcaatatctttggaaaccttctcaagagcctgattgggaagaaggagatgcgcatcctgatggtgggcctggatgccgcaggaaagaccaccatcctatacaagctgaaactgggggagatcgtcaccaccatccctaccattgggttcaatgtggagacagtggagtataagaacatcagctttacagtgtgggatgtgggtggccaggacaagattcgacccctctggagacactacttccagaacacccaagggttgatatttgtggtcgacagcaatgatcgggagcgagtaaatgaggcccgggaagagctgatgagaatgctggcggaggacgagctccgggatgctgtactccttgtctttgcaaacaaacaggatctgcctaatgctatgaacgctgctgagatcacagacaagctgggcctgcattcccttcgtcaccgtaactggtacattcaggccacctgtgccaccagcggggacgggctgtacgaaggcctggactggctggccaatcagctcaaaaacaagaagtgaaagccagacagccctaacaaagcaccccacccacccctgacatacctactgtcaccctgccccagtcctaccccttcctctccatgcaagtgtggccagggccctgggtatcatgtccacatgcccagcaagagccttgcctcccctgcctcccctcctttttcctgtccacctatatgaccaatccctaattgctgtcctgatgatgagtcattccaatttactggatttaaaacaaaaagttgttacggtttcatggggtggcccctctctctctctcacctctgggtttcgggaggtcgagtggggtattctctttgtttggcagtggttgctgtcctcttggcatctgagtcctttccctgtccccacaagcccttctactccctgtttgcctttcctttgccaccctctccctgttttacatggaaattgcacgggcctctctgtgtttgcgtgcatgtgtgcgcctgtatatacatgtatagagagatatatttgtgggggccggggggagcggggagggggtggagtgaagctcagggcttgcagccaggacactgcccactggagcctgtcatctgccccttccgtgttggtgagattaagggaagaaggtgggagggcattagtcaagccggactgccccagtctttgactggttaccctcctctctgcaggtaggtttttctggatgataggacagatgatggattcttcaccaccattttccttgtactcttctctccacccttcttagggctggaggatggcatttatctctagatgactgttcccaaggagatgccactctgctctgccttactgttgggaaggagagaggaacccactcactcttatcagcttagagtgttcaactgatccttccccaccatcttcagatctgttcctctggagcttgactggggggtggggatggcaagtccatggtgtgtgttagggacccagggcattgggggaagggaggcgaaggcctgaggttttccatcttcattctcttttgttattaggagaaggtgaggcatgggccaatcccattcctgccttccagtgccccaccacccttctgatcttaggggttggatgggtcatctgtccttggtcagaattttctcaccctagtactcctactggcctgaccagggctgactgggtattctaatgaggagctgggaagtggggtgacatagctgaccttagtatcaacccccctcttctccaactcttgttttctagtccaggatatgctaaaggacgaagattttctattgtttccaggccctcagaccatccttgctgtcccttcaccctccatgcccctgccatcctcactcacttctcataaatggatctgggggttagagtggaggaaataaaatcctgaagtggttgtcagtgcttgtgggatgcagtggtcttcaggattctccccgcattattatgtagttgttcagaagctgttgctactgcgtctctctgtctgcagggggcacttgttcctgaggtcctcgcctgggtcctgacttctgtagtttctgtgaagacgtggctgtcctgtgggctcctgtgtgtgctggctgcgccctgagctccgagacagctgcccataacctgctaaggtcagggcccagggccccccacagcatggctgagggaccccttcccagtagggctgtcccaagccccactccatggggccaggtttcctggccacttttgttgatagcagatggatcaatattagtaaccccatccaagattgaactgtgaaagagaggttccaggggtatctccctcagtgccagttacttagtgatgtgttacccaggatgcagcaggtgtgtgcaggtatcttgctctctaggcctgtgtgtgtgtgtgagtgtgtgtgtatatgggtgtgggtgtgtttgtgtgtggtggttgtggggggggtgttggaggttctatttcatttaaaaatgtattcatttccctggccccacagatgcttccctccatactttttatttgctctgtttcctcagatttattttgtcttgccccattgcctctccttccttgaactctttccttttcaatctcaactcattcactgctgttgctcatttgcccttttccatgtattttttcctacttaggattttccactctatctttgtggttcatgaggactttgcctcttctcctgcctcattccctgactttctctagttagatgtcagtcctaaataggttttcctcacttcaggcctcacccctcaccttgtttttttgggggctccagggaccaatctggggctggaaatgttaggaggttgccttggtgctgccccagatctgtccagcagggggcagtaagtgatcttggtagtatccctggctgctaagcccttggcaggggtggtcctttctacattcccattcacttaacagctcttttgggattgggtgtttcattccatttctgcccactccctctcctctcctctctggtaggtttaattttatgctttccctgattccagctttctgcttcctgaggactcccgctccccccaccccaaagtttgtctgtggtgttatagtggtaactgcagttcctcctctggaatgtagactgtatatgtttaataactcaccttctctatccttgctcaaaatgtgggataacgcgatgactgtgaccctggttggaaattaaacttgttttatgca

SEQ ID NO: 320287 - DNA, 4180 bp, Homo sapiens
ccacgatcacccgaaacccagagggtgagagagagaggggccaccccatgaaaccgtaacagctgttttgttttaaatccagtaaattggaagtgactcatcatctaggacagcaattagggattggtcatatatggtggacaggaaaaaggaggaatgtggtggtggaggtggaggattgtggtatgtggtcaggagtgagaagaaatagtaaggccgtcccggtgagggagaaatgtaacctaaaacctgtctctgctgttgttggattgggtcacccctggtctatggcatgaaagttttattgggaggagatctgctgcaagagtctgattgcttgggtcagtgcaacaggacagaatctagtcgctgcatacctccttccctgtcctcaatcaggtaggtagtaacagtctttgctgctattttgtcttgggcttgttgttggggtaggtgtttccacttgccgtgacttgggacatgggacagtgttatgggacagtggattatcatagcccattggacttgagtttgaaaaacatgtctgtaaaagttcattctaagaaagaaactaatccattaaggttcagcttttcaccgaatgaatgattgaccttggattcagccaggaaaggctcccatgtatcacatattcacatgcgtcctgtttcccagcatagaattattaccttgcatagttagaatttttatagttgtctatcttgcttttccaaagagactagacgcttttcgactgcaggaactggatttcgtctcctcttccacaatgcccatgcaaacagatcaagtcttccataccagggaccaggccaaaaccagactgccactgcccctacttgggccccactgtccccagaaagcagctgctgtgatcatgggcaatatctttggaaaccttctcaagagcctgattgggaagaaggagatgcgcatcctgatggtgggcctggatgccgcaggaaagaccaccatcctatacaagctgaaactgggggagatcgtcaccaccatccctaccattgggttcaatgtggagacagtggagtataagaacatcagctttacagtgtgggatgtgggtggccaggacaagattcgacccctctggagacactacttccagaacacccaagggttgatatttgtggtcgacagcaatgatcgggagcgagtaaatgaggcccgggaagagctgatgagaatgctggcggaggacgagctccgggatgctgtactccttgtctttgcaaacaaacaggatctgcctaatgctatgaacgctgctgagatcacagacaagctgggcctgcattcccttcgtcaccgtaactggtacattcaggccacctgtgccaccagcggggacgggctgtacgaaggcctggactggctggccaatcagctcaaaaacaagaagtgaaagccagacagccctaacaaagcaccccacccacccctgacatacctactgtcaccctgccccagtcctaccccttcctctccatgcaagtgtggccagggccctgggtatcatgtccacatgcccagcaagagccttgcctcccctgcctcccctcctttttcctgtccacctatatgaccaatccctaattgctgtcctgatgatgagtcattccaatttactggatttaaaacaaaaagttgttacggtttcatggggtggcccctctctctctctcacctctgggtttcgggaggtcgagtggggtattctctttgtttggcagtggttgctgtcctcttggcatctgagtcctttccctgtccccacaagcccttctactccctgtttgcctttcctttgccaccctctccctgttttacatggaaattgcacgggcctctctgtgtttgcgtgcatgtgtgcgcctgtatatacatgtatagagagatatatttgtgggggccggggggagcggggagggggtggagtgaagctcagggcttgcagccaggacactgcccactggagcctgtcatctgccccttccgtgttggtgagattaagggaagaaggtgggagggcattagtcaagccggactgccccagtctttgactggttaccctcctctctgcaggtaggtttttctggatgataggacagatgatggattcttcaccaccattttccttgtactcttctctccacccttcttagggctggaggatggcatttatctctagatgactgttcccaaggagatgccactctgctctgccttactgttgggaaggagagaggaacccactcactcttatcagcttagagtgttcaactgatccttccccaccatcttcagatctgttcctctggagcttgactggggggtggggatggcaagtccatggtgtgtgttagggacccagggcattgggggaagggaggcgaaggcctgaggttttccatcttcattctcttttgttattaggagaaggtgaggcatgggccaatcccattcctgccttccagtgccccaccacccttctgatcttaggggttggatgggtcatctgtccttggtcagaattttctcaccctagtactcctactggcctgaccagggctgactgggtattctaatgaggagctgggaagtggggtgacatagctgaccttagtatcaacccccctcttctccaactcttgttttctagtccaggatatgctaaaggacgaagattttctattgtttccaggccctcagaccatccttgctgtcccttcaccctccatgcccctgccatcctcactcacttctcataaatggatctgggggttagagtggaggaaataaaatcctgaagtggttgtcagtgcttgtgggatgcagtggtcttcaggattctccccgcattattatgtagttgttcagaagctgttgctactgcgtctctctgtctgcagggggcacttgttcctgaggtcctcgcctgggtcctgacttctgtagtttctgtgaagacgtggctgtcctgtgggctcctgtgtgtgctggctgcgccctgagctccgagacagctgcccataacctgctaaggtcagggcccagggccccccacagcatggctgagggaccccttcccagtagggctgtcccaagccccactccatggggccaggtttcctggccacttttgttgatagcagatggatcaatattagtaaccccatccaagattgaactgtgaaagagaggttccaggggtatctccctcagtgccagttacttagtgatgtgttacccaggatgcagcaggtgtgtgcaggtatcttgctctctaggcctgtgtgtgtgtgtgagtgtgtgtgtatatgggtgtgggtgtgtttgtgtgtggtggttgtggggggggtgttggaggttctatttcatttaaaaatgtattcatttccctggccccacagatgcttccctccatactttttatttgctctgtttcctcagatttattttgtcttgccccattgcctctccttccttgaactctttccttttcaatctcaactcattcactgctgttgctcatttgcccttttccatgtattttttcctacttaggattttccactctatctttgtggttcatgaggactttgcctcttctcctgcctcattccctgactttctctagttagatgtcagtcctaaataggttttcctcacttcaggcctcacccctcaccttgtttttttgggggctccagggaccaatctggggctggaaatgttaggaggttgccttggtgctgccccagatctgtccagcagggggcagtaagtgatcttggtagtatccctggctgctaagcccttggcaggggtggtcctttctacattcccattcacttaacagctcttttgggattgggtgtttcattccatttctgcccactccctctcctctcctctctggtaggtttaattttatgctttccctgattccagctttctgcttcctgaggactcccgctccccccaccccaaagtttgtctgtggtgttatagtggtaactgcagttcctcctctggaatgtagactgtatatgtttaataactcaccttctctatccttgctcaaaatgtgggataacgcgatgactgtgaccctggttggaaattaaacttgttttatgca

SEQ ID NO: 320288 - DNA, 3839 bp, Homo sapiens
cgcgaatcgtttgagggaaggggcgggagttggggaggtggagttccctgttaaaacgggccacttgattagcaaagtggtagctgttattttgggggaattcccgtcttgattgcattaaggcgggtctccatctttccaggccaggaggaatgtggtggtggaggtggaggattgtggtatgtggtcaggagtgagaagaaatagtaaggccgtcccggtgagggagaaatgtaacctaaaacctgtctctgctgttgttggattgggtcacccctggtctatggcatgaaagttttattgggaggagatctgctgcaagagtctgattgcttgggtcagtgcaacaggacagaatctagtcgctgcatacctccttccctgtcctcaatcagagactagacgcttttcgactgcaggaactggatttcgtctcctcttccacaatgcccatgcaaacagatcaagtcttccataccagggaccaggccaaaaccagactgccactgcccctacttgggccccactgtccccagaaagcagctgctgtgatcatgggcaatatctttggaaaccttctcaagagcctgattgggaagaaggagatgcgcatcctgatggtgggcctggatgccgcaggaaagaccaccatcctatacaagctgaaactgggggagatcgtcaccaccatccctaccattgggttcaatgtggagacagtggagtataagaacatcagctttacagtgtgggatgtgggtggccaggacaagattcgacccctctggagacactacttccagaacacccaagggttgatatttgtggtcgacagcaatgatcgggagcgagtaaatgaggcccgggaagagctgatgagaatgctggcggaggacgagctccgggatgctgtactccttgtctttgcaaacaaacaggatctgcctaatgctatgaacgctgctgagatcacagacaagctgggcctgcattcccttcgtcaccgtaactggtacattcaggccacctgtgccaccagcggggacgggctgtacgaaggcctggactggctggccaatcagctcaaaaacaagaagtgaaagccagacagccctaacaaagcaccccacccacccctgacatacctactgtcaccctgccccagtcctaccccttcctctccatgcaagtgtggccagggccctgggtatcatgtccacatgcccagcaagagccttgcctcccctgcctcccctcctttttcctgtccacctatatgaccaatccctaattgctgtcctgatgatgagtcattccaatttactggatttaaaacaaaaagttgttacggtttcatggggtggcccctctctctctctcacctctgggtttcgggaggtcgagtggggtattctctttgtttggcagtggttgctgtcctcttggcatctgagtcctttccctgtccccacaagcccttctactccctgtttgcctttcctttgccaccctctccctgttttacatggaaattgcacgggcctctctgtgtttgcgtgcatgtgtgcgcctgtatatacatgtatagagagatatatttgtgggggccggggggagcggggagggggtggagtgaagctcagggcttgcagccaggacactgcccactggagcctgtcatctgccccttccgtgttggtgagattaagggaagaaggtgggagggcattagtcaagccggactgccccagtctttgactggttaccctcctctctgcaggtaggtttttctggatgataggacagatgatggattcttcaccaccattttccttgtactcttctctccacccttcttagggctggaggatggcatttatctctagatgactgttcccaaggagatgccactctgctctgccttactgttgggaaggagagaggaacccactcactcttatcagcttagagtgttcaactgatccttccccaccatcttcagatctgttcctctggagcttgactggggggtggggatggcaagtccatggtgtgtgttagggacccagggcattgggggaagggaggcgaaggcctgaggttttccatcttcattctcttttgttattaggagaaggtgaggcatgggccaatcccattcctgccttccagtgccccaccacccttctgatcttaggggttggatgggtcatctgtccttggtcagaattttctcaccctagtactcctactggcctgaccagggctgactgggtattctaatgaggagctgggaagtggggtgacatagctgaccttagtatcaacccccctcttctccaactcttgttttctagtccaggatatgctaaaggacgaagattttctattgtttccaggccctcagaccatccttgctgtcccttcaccctccatgcccctgccatcctcactcacttctcataaatggatctgggggttagagtggaggaaataaaatcctgaagtggttgtcagtgcttgtgggatgcagtggtcttcaggattctccccgcattattatgtagttgttcagaagctgttgctactgcgtctctctgtctgcagggggcacttgttcctgaggtcctcgcctgggtcctgacttctgtagtttctgtgaagacgtggctgtcctgtgggctcctgtgtgtgctggctgcgccctgagctccgagacagctgcccataacctgctaaggtcagggcccagggccccccacagcatggctgagggaccccttcccagtagggctgtcccaagccccactccatggggccaggtttcctggccacttttgttgatagcagatggatcaatattagtaaccccatccaagattgaactgtgaaagagaggttccaggggtatctccctcagtgccagttacttagtgatgtgttacccaggatgcagcaggtgtgtgcaggtatcttgctctctaggcctgtgtgtgtgtgtgagtgtgtgtgtatatgggtgtgggtgtgtttgtgtgtggtggttgtggggggggtgttggaggttctatttcatttaaaaatgtattcatttccctggccccacagatgcttccctccatactttttatttgctctgtttcctcagatttattttgtcttgccccattgcctctccttccttgaactctttccttttcaatctcaactcattcactgctgttgctcatttgcccttttccatgtattttttcctacttaggattttccactctatctttgtggttcatgaggactttgcctcttctcctgcctcattccctgactttctctagttagatgtcagtcctaaataggttttcctcacttcaggcctcacccctcaccttgtttttttgggggctccagggaccaatctggggctggaaatgttaggaggttgccttggtgctgccccagatctgtccagcagggggcagtaagtgatcttggtagtatccctggctgctaagcccttggcaggggtggtcctttctacattcccattcacttaacagctcttttgggattgggtgtttcattccatttctgcccactccctctcctctcctctctggtaggtttaattttatgctttccctgattccagctttctgcttcctgaggactcccgctccccccaccccaaagtttgtctgtggtgttatagtggtaactgcagttcctcctctggaatgtagactgtatatgtttaataactcaccttctctatccttgctcaaaatgtgggataacgcgatgactgtgaccctggttggaaattaaacttgttttatgca

SEQ ID NO: 320289 - DNA, 3416 bp, Homo sapiens
  misc_feature (1)..(1): n is a, c, g, or t
  misc_feature (14)..(14): n is a, c, g, or t
  misc_feature (29)..(29): n is a, c, g, or t
  misc_feature (37)..(37): n is a, c, g, or t
ngtcggccagctgnagtagcaggttcatnaaatcatnagatcaagtcttccataccagggaccaggccaaaaccagactgccactgcccctacttgggccccactgtccccagaaagcagctgctgtgatcatgggcaatatctttggaaaccttctcaagagcctgattgggaagaaggagatgcgcatcctgatggtgggcctggatgccgcaggaaagaccaccatcctatacaagctgaaactgggggagatcgtcaccaccatccctaccattgggttcaatgtggagacagtggagtataagaacatcagctttacagtgtgggatgtgggtggccaggacaagattcgacccctctggagacactacttccagaacacccaagggttgatatttgtggtcgacagcaatgatcgggagcgagtaaatgaggcccgggaagagctgatgagaatgctggcggaggacgagctccgggatgctgtactccttgtctttgcaaacaaacaggatctgcctaatgctatgaacgctgctgagatcacagacaagctgggcctgcattcccttcgtcaccgtaactggtacattcaggccacctgtgccaccagcggggacgggctgtacgaaggcctggactggctggccaatcagctcaaaaacaagaagtgaaagccagacagccctaacaaagcaccccacccacccctgacatacctactgtcaccctgccccagtcctaccccttcctctccatgcaagtgtggccagggccctgggtatcatgtccacatgcccagcaagagccttgcctcccctgcctcccctcctttttcctgtccacctatatgaccaatccctaattgctgtcctgatgatgagtcattccaatttactggatttaaaacaaaaagttgttacggtttcatggggtggcccctctctctctctcacctctgggtttcgggaggtcgagtggggtattctctttgtttggcagtggttgctgtcctcttggcatctgagtcctttccctgtccccacaagcccttctactccctgtttgcctttcctttgccaccctctccctgttttacatggaaattgcacgggcctctctgtgtttgcgtgcatgtgtgcgcctgtatatacatgtatagagagatatatttgtgggggccggggggagcggggagggggtggagtgaagctcagggcttgcagccaggacactgcccactggagcctgtcatctgccccttccgtgttggtgagattaagggaagaaggtgggagggcattagtcaagccggactgccccagtctttgactggttaccctcctctctgcaggtaggtttttctggatgataggacagatgatggattcttcaccaccattttccttgtactcttctctccacccttcttagggctggaggatggcatttatctctagatgactgttcccaaggagatgccactctgctctgccttactgttgggaaggagagaggaacccactcactcttatcagcttagagtgttcaactgatccttccccaccatcttcagatctgttcctctggagcttgactggggggtggggatggcaagtccatggtgtgtgttagggacccagggcattgggggaagggaggcgaaggcctgaggttttccatcttcattctcttttgttattaggagaaggtgaggcatgggccaatcccattcctgccttccagtgccccaccacccttctgatcttaggggttggatgggtcatctgtccttggtcagaattttctcaccctagtactcctactggcctgaccagggctgactgggtattctaatgaggagctgggaagtggggtgacatagctgaccttagtatcaacccccctcttctccaactcttgttttctagtccaggatatgctaaaggacgaagattttctattgtttccaggccctcagaccatccttgctgtcccttcaccctccatgcccctgccatcctcactcacttctcataaatggatctgggggttagagtggaggaaataaaatcctgaagtggttgtcagtgcttgtgggatgcagtggtcttcaggattctccccgcattattatgtagttgttcagaagctgttgctactgcgtctctctgtctgcagggggcacttgttcctgaggtcctcgcctgggtcctgacttctgtagtttctgtgaagacgtggctgtcctgtgggctcctgtgtgtgctggctgcgccctgagctccgagacagctgcccataacctgctaaggtcagggcccagggccccccacagcatggctgagggaccccttcccagtagggctgtcccaagccccactccatggggccaggtttcctggccacttttgttgatagcagatggatcaatattagtaaccccatccaagattgaactgtgaaagagaggttccaggggtatctccctcagtgccagttacttagtgatgtgttacccaggatgcagcaggtgtgtgcaggtatcttgctctctaggcctgtgtgtgtgtgtgagtgtgtgtgtatatgggtgtgggtgtgtttgtgtgtggtggttgtggggggggtgttggaggttctatttcatttaaaaatgtattcatttccctggccccacagatgcttccctccatactttttatttgctctgtttcctcagatttattttgtcttgccccattgcctctccttccttgaactctttccttttcaatctcaactcattcactgctgttgctcatttgcccttttccatgtattttttcctacttaggattttccactctatctttgtggttcatgaggactttgcctcttctcctgcctcattccctgactttctctagttagatgtcagtcctaaataggttttcctcacttcaggcctcacccctcaccttgtttttttgggggctccagggaccaatctggggctggaaatgttaggaggttgccttggtgctgccccagatctgtccagcagggggcagtaagtgatcttggtagtatccctggctgctaagcccttggcaggggtggtcctttctacattcccattcacttaacagctcttttgggattgggtgtttcattccatttctgcccactccctctcctctcctctctggtaggtttaattttatgctttccctgattccagctttctgcttcctgaggactcccgctccccccaccccaaagtttgtctgtggtgttatagtggtaactgcagttcctcctctggaatgtagactgtatatgtttaataactcaccttctctatccttgctcaaaatgtgggataacgcgatgactgtgaccctggttggaaattaaacttgttttatgca

SEQ ID NO: 320290 - DNA, 3255 bp, Homo sapiens
tgatctaaggatcccctgtctcagttcgggacgttagtgggcctggatgccgcaggaaagaccaccatcctatacaagctgaaactgggggagatcgtcaccaccatccctaccattgggttcaatgtggagacagtggagtataagaacatcagctttacagtgtgggatgtgggtggccaggacaagattcgacccctctggagacactacttccagaacacccaagggttgatatttgtggtcgacagcaatgatcgggagcgagtaaatgaggcccgggaagagctgatgagaatgctggcggaggacgagctccgggatgctgtactccttgtctttgcaaacaaacaggatctgcctaatgctatgaacgctgctgagatcacagacaagctgggcctgcattcccttcgtcaccgtaactggtacattcaggccacctgtgccaccagcggggacgggctgtacgaaggcctggactggctggccaatcagctcaaaaacaagaagtgaaagccagacagccctaacaaagcaccccacccacccctgacatacctactgtcaccctgccccagtcctaccccttcctctccatgcaagtgtggccagggccctgggtatcatgtccacatgcccagcaagagccttgcctcccctgcctcccctcctttttcctgtccacctatatgaccaatccctaattgctgtcctgatgatgagtcattccaatttactggatttaaaacaaaaagttgttacggtttcatggggtggcccctctctctctctcacctctgggtttcgggaggtcgagtggggtattctctttgtttggcagtggttgctgtcctcttggcatctgagtcctttccctgtccccacaagcccttctactccctgtttgcctttcctttgccaccctctccctgttttacatggaaattgcacgggcctctctgtgtttgcgtgcatgtgtgcgcctgtatatacatgtatagagagatatatttgtgggggccggggggagcggggagggggtggagtgaagctcagggcttgcagccaggacactgcccactggagcctgtcatctgccccttccgtgttggtgagattaagggaagaaggtgggagggcattagtcaagccggactgccccagtctttgactggttaccctcctctctgcaggtaggtttttctggatgataggacagatgatggattcttcaccaccattttccttgtactcttctctccacccttcttagggctggaggatggcatttatctctagatgactgttcccaaggagatgccactctgctctgccttactgttgggaaggagagaggaacccactcactcttatcagcttagagtgttcaactgatccttccccaccatcttcagatctgttcctctggagcttgactggggggtggggatggcaagtccatggtgtgtgttagggacccagggcattgggggaagggaggcgaaggcctgaggttttccatcttcattctcttttgttattaggagaaggtgaggcatgggccaatcccattcctgccttccagtgccccaccacccttctgatcttaggggttggatgggtcatctgtccttggtcagaattttctcaccctagtactcctactggcctgaccagggctgactgggtattctaatgaggagctgggaagtggggtgacatagctgaccttagtatcaacccccctcttctccaactcttgttttctagtccaggatatgctaaaggacgaagattttctattgtttccaggccctcagaccatccttgctgtcccttcaccctccatgcccctgccatcctcactcacttctcataaatggatctgggggttagagtggaggaaataaaatcctgaagtggttgtcagtgcttgtgggatgcagtggtcttcaggattctccccgcattattatgtagttgttcagaagctgttgctactgcgtctctctgtctgcagggggcacttgttcctgaggtcctcgcctgggtcctgacttctgtagtttctgtgaagacgtggctgtcctgtgggctcctgtgtgtgctggctgcgccctgagctccgagacagctgcccataacctgctaaggtcagggcccagggccccccacagcatggctgagggaccccttcccagtagggctgtcccaagccccactccatggggccaggtttcctggccacttttgttgatagcagatggatcaatattagtaaccccatccaagattgaactgtgaaagagaggttccaggggtatctccctcagtgccagttacttagtgatgtgttacccaggatgcagcaggtgtgtgcaggtatcttgctctctaggcctgtgtgtgtgtgtgagtgtgtgtgtatatgggtgtgggtgtgtttgtgtgtggtggttgtggggggggtgttggaggttctatttcatttaaaaatgtattcatttccctggccccacagatgcttccctccatactttttatttgctctgtttcctcagatttattttgtcttgccccattgcctctccttccttgaactctttccttttcaatctcaactcattcactgctgttgctcatttgcccttttccatgtattttttcctacttaggattttccactctatctttgtggttcatgaggactttgcctcttctcctgcctcattccctgactttctctagttagatgtcagtcctaaataggttttcctcacttcaggcctcacccctcaccttgtttttttgggggctccagggaccaatctggggctggaaatgttaggaggttgccttggtgctgccccagatctgtccagcagggggcagtaagtgatcttggtagtatccctggctgctaagcccttggcaggggtggtcctttctacattcccattcacttaacagctcttttgggattgggtgtttcattccatttctgcccactccctctcctctcctctctggtaggtttaattttatgctttccctgattccagctttctgcttcctgaggactcccgctccccccaccccaaagtttgtctgtggtgttatagtggtaactgcagttcctcctctggaatgtagactgtatatgtttaataactcaccttctctatccttgctcaaaatgtgggataacgcgatgactgtgaccctggttggaaattaaacttgttttatgca

SEQ ID NO: 320291 - DNA, 3511 bp, Homo sapiens
agcggaggtgggaagtatcccgggctgggggtgggggtacgccgcacagctccagtcgccgtcgcggcttccggtgctaggtggagggaaggaaggagggagccggggagtgggccaggcagcagccgggctgaagtcggcttggggagccagagggagcggagcggaacctgcggggcagaggcggcggccgcagcggcgcagctgatagcaggaacaggatcaagtcttccataccagggaccaggccaaaaccagactgccactgcccctacttgggccccactgtccccagaaagcagctgctgtgatcatgggcaatatctttggaaaccttctcaagagcctgattgggaagaaggagatgcgcatcctgatggtgggcctggatgccgcaggaaagaccaccatcctatacaagctgaaactgggggagatcgtcaccaccatccctaccattgggttcaatgtggagacagtggagtataagaacatcagctttacagtgtgggatgtgggtggccaggacaagattcgacccctctggagacactacttccagaacacccaagggttgatatttgtggtcgacagcaatgatcgggagcgagtaaatgaggcccgggaagagctgatgagaatgctggcggaggacgagctccgggatgctgtactccttgtctttgcaaacaaacaggatctgcctaatgctatgaacgctgctgagatcacagacaagctgggcctgcattcccttcgtcaccgtaactggtacattcaggccacctgtgccaccagcggggacgggctgtacgaaggcctggactggctggccaatcagctcaaaaacaagaagtgaaagccagacagccctaacaaagcaccccacccacccctgacatacctactgtcaccctgccccagtcctaccccttcctctccatgcaagtgtggccagggccctgggtatcatgtccacatgcccagcaagagccttgcctcccctgcctcccctcctttttcctgtccacctatatgaccaatccctaattgctgtcctgatgatgagtcattccaatttactggatttaaaacaaaaagttgttacggtttcatggggtggcccctctctctctctcacctctgggtttcgggaggtcgagtggggtattctctttgtttggcagtggttgctgtcctcttggcatctgagtcctttccctgtccccacaagcccttctactccctgtttgcctttcctttgccaccctctccctgttttacatggaaattgcacgggcctctctgtgtttgcgtgcatgtgtgcgcctgtatatacatgtatagagagatatatttgtgggggccggggggagcggggagggggtggagtgaagctcagggcttgcagccaggacactgcccactggagcctgtcatctgccccttccgtgttggtgagattaagggaagaaggtgggagggcattagtcaagccggactgccccagtctttgactggttaccctcctctctgcaggtaggtttttctggatgataggacagatgatggattcttcaccaccattttccttgtactcttctctccacccttcttagggctggaggatggcatttatctctagatgactgttcccaaggagatgccactctgctctgccttactgttgggaaggagagaggaacccactcactcttatcagcttagagtgttcaactgatccttccccaccatcttcagatctgttcctctggagcttgactggggggtggggatggcaagtccatggtgtgtgttagggacccagggcattgggggaagggaggcgaaggcctgaggttttccatcttcattctcttttgttattaggagaaggtgaggcatgggccaatcccattcctgccttccagtgccccaccacccttctgatcttaggggttggatgggtcatctgtccttggtcagaattttctcaccctagtactcctactggcctgaccagggctgactgggtattctaatgaggagctgggaagtggggtgacatagctgaccttagtatcaacccccctcttctccaactcttgttttctagtccaggatatgctaaaggacgaagattttctattgtttccaggccctcagaccatccttgctgtcccttcaccctccatgcccctgccatcctcactcacttctcataaatggatctgggggttagagtggaggaaataaaatcctgaagtggttgtcagtgcttgtgggatgcagtggtcttcaggattctccccgcattattatgtatttctgtgaagacgtggctgtcctgtgggctcctgtgtgtgctggctgcgccctgagctccgagacagctgcccataacctgctaaggtcagggcccagggccccccacagcatggctgagggaccccttcccagtagggctgtcccaagccccactccatggggccaggtttcctggccacttttgttgatagcagatggatcaatattagtaaccccatccaagattgaactgtgaaagagaggttccaggggtatctccctcagtgccagttacttagtgatgtgttacccaggatgcagcaggtgtgtgcaggtatcttgctctctaggcctgtgtgtgtgtgtgagtgtgtgtgtatatgggtgtgggtgtgtttgtgtgtggtggttgtggggggggtgttggaggttctatttcatttaaaaatgtattcatttccctggccccacagatgcttccctccatactttttatttgctctgtttcctcagatttattttgtcttgccccattgcctctccttccttgaactctttccttttcaatctcaactcattcactgctgttgctcatttgcccttttccatgtattttttcctacttaggattttccactctatctttgtggttcatgaggactttgcctcttctcctgcctcattccctgactttctctagttagatgtcagtcctaaataggttttcctcacttcaggcctcacccctcaccttgtttttttgggggctccagggaccaatctggggctggaaatgttaggaggttgccttggtgctgccccagatctgtccagcagggggcagtaagtgatcttggtagtatccctggctgctaagcccttggcaggggtggtcctttctacattcccattcacttaacagctcttttgggattgggtgtttcattccatttctgcccactccctctcctctcctctctggtaggtttaattttatgctttccctgattccagctttctgcttcctgaggactcccgctccccccaccccaaagtttgtctgtggtgttatagtggtaactgcagttcctcctctggaatgtagactgtatatgtttaataactcaccttctctatccttgctcaaaatgtgggataacgcgatgactgtgaccctggttggaaattaaacttgttttatgca

SEQ ID NO: 320292 - DNA, 3447 bp, Homo sapiens
agctatgtaagtatagagattgcacatcgtgcctgagcactctccagttggtctagaaagtcgttccatggacaaacaaatacctggagacacgctttacaccactcctcattcggaaacgtaggccaatgtctcttttctcttttccttagtcctttcagtgtctaggcggatctgatggataactcagagctcatcagaaatgtgacccttggtggacatctccaccatggcaaggtaagagagaactttcagctacttggaacaggatttctcttttgtacctgctcatgtctgagcccttagagtcggttcaatgtggagacagtggagtataagaacatcagctttacagtgtgggatgtgggtggccaggacaagattcgacccctctggagacactacttccagaacacccaagggttgatatttgtggtcgacagcaatgatcgggagcgagtaaatgaggcccgggaagagctgatgagaatgctggcggaggacgagctccgggatgctgtactccttgtctttgcaaacaaacaggatctgcctaatgctatgaacgctgctgagatcacagacaagctgggcctgcattcccttcgtcaccgtaactggtacattcaggccacctgtgccaccagcggggacgggctgtacgaaggcctggactggctggccaatcagctcaaaaacaagaagtgaaagccagacagccctaacaaagcaccccacccacccctgacatacctactgtcaccctgccccagtcctaccccttcctctccatgcaagtgtggccagggccctgggtatcatgtccacatgcccagcaagagccttgcctcccctgcctcccctcctttttcctgtccacctatatgaccaatccctaattgctgtcctgatgatgagtcattccaatttactggatttaaaacaaaaagttgttacggtttcatggggtggcccctctctctctctcacctctgggtttcgggaggtcgagtggggtattctctttgtttggcagtggttgctgtcctcttggcatctgagtcctttccctgtccccacaagcccttctactccctgtttgcctttcctttgccaccctctccctgttttacatggaaattgcacgggcctctctgtgtttgcgtgcatgtgtgcgcctgtatatacatgtatagagagatatatttgtgggggccggggggagcggggagggggtggagtgaagctcagggcttgcagccaggacactgcccactggagcctgtcatctgccccttccgtgttggtgagattaagggaagaaggtgggagggcattagtcaagccggactgccccagtctttgactggttaccctcctctctgcaggtaggtttttctggatgataggacagatgatggattcttcaccaccattttccttgtactcttctctccacccttcttagggctggaggatggcatttatctctagatgactgttcccaaggagatgccactctgctctgccttactgttgggaaggagagaggaacccactcactcttatcagcttagagtgttcaactgatccttccccaccatcttcagatctgttcctctggagcttgactggggggtggggatggcaagtccatggtgtgtgttagggacccagggcattgggggaagggaggcgaaggcctgaggttttccatcttcattctcttttgttattaggagaaggtgaggcatgggccaatcccattcctgccttccagtgccccaccacccttctgatcttaggggttggatgggtcatctgtccttggtcagaattttctcaccctagtactcctactggcctgaccagggctgactgggtattctaatgaggagctgggaagtggggtgacatagctgaccttagtatcaacccccctcttctccaactcttgttttctagtccaggatatgctaaaggacgaagattttctattgtttccaggccctcagaccatccttgctgtcccttcaccctccatgcccctgccatcctcactcacttctcataaatggatctgggggttagagtggaggaaataaaatcctgaagtggttgtcagtgcttgtgggatgcagtggtcttcaggattctccccgcattattatgtagttgttcagaagctgttgctactgcgtctctctgtctgcagggggcacttgttcctgaggtcctcgcctgggtcctgacttctgtagtttctgtgaagacgtggctgtcctgtgggctcctgtgtgtgctggctgcgccctgagctccgagacagctgcccataacctgctaaggtcagggcccagggccccccacagcatggctgagggaccccttcccagtagggctgtcccaagccccactccatggggccaggtttcctggccacttttgttgatagcagatggatcaatattagtaaccccatccaagattgaactgtgaaagagaggttccaggggtatctccctcagtgccagttacttagtgatgtgttacccaggatgcagcaggtgtgtgcaggtatcttgctctctaggcctgtgtgtgtgtgtgagtgtgtgtgtatatgggtgtgggtgtgtttgtgtgtggtggttgtggggggggtgttggaggttctatttcatttaaaaatgtattcatttccctggccccacagatgcttccctccatactttttatttgctctgtttcctcagatttattttgtcttgccccattgcctctccttccttgaactctttccttttcaatctcaactcattcactgctgttgctcatttgcccttttccatgtattttttcctacttaggattttccactctatctttgtggttcatgaggactttgcctcttctcctgcctcattccctgactttctctagttagatgtcagtcctaaataggttttcctcacttcaggcctcacccctcaccttgtttttttgggggctccagggaccaatctggggctggaaatgttaggaggttgccttggtgctgccccagatctgtccagcagggggcagtaagtgatcttggtagtatccctggctgctaagcccttggcaggggtggtcctttctacattcccattcacttaacagctcttttgggattgggtgtttcattccatttctgcccactccctctcctctcctctctggtaggtttaattttatgctttccctgattccagctttctgcttcctgaggactcccgctccccccaccccaaagtttgtctgtggtgttatagtggtaactgcagttcctcctctggaatgtagactgtatatgtttaataactcaccttctctatccttgctcaaaatgtgggataacgcgatgactgtgaccctggttggaaattaaacttgttttatgca

SEQ ID NO: 320293 - DNA, 3279 bp, Homo sapiens
agcggaggtgggaagtatcccgggctgggggtgggggtacgccgcacagctccagtcgccgtcgcggcttccggtgctaggtggagggaaggaaggagggagccggggagtgggccaggcagcagccgggctgaagtcggcttggggagccagagggagcggagcggaacctgcggggcagaggcggcggccgcagcggcgcagctgatagcaggaacaggatcaagtcttccataccagggaccaggccaaaaccagactgccactgcccctacttgggccccactgtccccagaaagcagctgctgtgatcatgggcaatatctttggaaaccttctcaagagcctgattgggaagaaggagatgcgcatcctgatggtgggcctggatgccgcaggaaagaccaccatcctatacaagctgaaactgggggagatcgtcaccaccatccctaccattgggttcaatgtggagacagtggagtataagaacatcagctttacagtgtgggatgtgggtggccaggacaagattcgacccctctggagacactacttccagaacacccaagggttgatatttgtggtcgacagcaatgatcgggagcgagtaaatgaggcccgggaagagctgatgagaatgctggcggaggacgagctccgggatgctgtactccttgtctttgcaaacaaacaggatctgcctaatgctatgaacgctgctgagatcacagacaagctgggcctgcattcccttcgtcaccgtaactggtacattcaggccacctgtgccaccagcggggacgggctgtacgaaggcctggactggctggccaatcagctcaaaaacaagaagtgaaagccagacagccctaacaaagcaccccacccacccctgacatacctactgtcaccctgccccagtcctaccccttcctctccatgcaagtgtggccagggccctgggtatcatgtccacatgcccagcaagagccttgcctcccctgcctcccctcctttttcctgtccacctatatgaccaatccctaattgctgtcctgatgatgagtcattccaatttactggatttaaaacaaaaagttgttacggtttcatggggtggcccctctctctctctcacctctgggtttcgggaggtcgagtggggtattctctttgtttggcagtggttgctgtcctcttggcatctgagtcctttccctgtccccacaagcccttctactccctgtttgcctttcctttgccaccctctccctgttttacatggaaattgcacgggcctctctgtgtttgcgtgcatgtgtgcgcctgtatatacatgtatagagagatatatttgtgggggccggggggagcggggagggggtggagtgaagctcagggcttgcagccaggacactgcccactggagcctgtcatctgccccttccgtgttggtgagattaagggaagaaggtgggagggcattagtcaagccggactgccccagtctttgactggttaccctcctctctgcaggtaggtttttctggatgataggacagatgatggattcttcaccaccattttccttgtactcttctctccacccttcttagggctggaggatggcatttatctctagatgactgttcccaaggagatgccactctgctctgccttactgttgggaaggagagaggaacccactcactcttatcagcttagagtgttcaactgatccttccccaccatcttcagatctgttcctctggagcttgactggggggtggggatggcaagtccatggtgtgtgttagggacccagggcattgggggaagggaggcgaaggcctgaggttttccatcttcattctcttttgttattaggagaaggtgaggcatgggccaatcccattcctgccttccagtgccccaccacccttctgatcttaggggttggatgggtcatctgtccttggtcagaattttctcaccctagtactcctactggcctgaccagggctgactgggtattctaatgaggagctgggaagtggggtgacatagctgaccttagtatcaacccccctcttctccaactcttgttttctagtccaggatatgctaaaggacgaagattttctattgtttccaggccctcagaccatccttgctgtcccttcaccctccatgcccctgccatcctcactcacttctcataaatggatctgggggttagagtggaggaaataaaatcctgaagtggttgtcagtgcttgtgggatgcagtggtcttcaggattctccccgcattattatgtagttgttcagaagctgttgctactgcgtctctctgtctgcagggggcacttgttcctgaggtcctcgcctgggtcctgacttctgtagtttctgtgaagacgtggctgtcctgtgggctcctgtgtgtgctggctgcgccctgagctccgagacagctgcccataacctgctaaggtcagggcccagggccccccacagcatggctgagggaccccttcccagtagggctgtcccaagccccactccatggggccaggtttcctggccacttttgttgatagcagatggatcaatattagtaaccccatccaagattgaactgtgaaagagaggttccaggggtatctccctcagtgccagttacttagtgatgtgttacccaggatgcagcaggtgtgtgcaggtatcttgctctctaggcctgtgtgtgtgtgtgagtgtgtgtgtatatgggtgtgggtgtgtttgtgtgtggtggttgtggggggggtgttggaggttctatttcatttaaaaatgtattcatttccctggccccacagatgcttccctccatactttttatttgctctgtttcctcagatttattttgtcttgccccattgcctctccttccttgaactctttccttttcaatctcaactcattcactgctgttgctcatttgcccttttccatgtattttttcctacttaggattttccactctatctttgtggttcatgaggactttgcctcttctcctgcctcattccctgactttctctagttagatgtcagtcctaaataggttttcctcacttcaggcctcacccctcaccttgtttttttgggggctccagggaccaatctggggctggaaatgtttaataactcaccttctctatccttgctcaaaatgtgggataacgcgatgactgtgaccctggttggaaattaaacttgttttatgca

SEQ ID NO: 320294 - DNA, 3169 bp, Homo sapiens
agcggaggtgggaagtatcccgggctgggggtgggggtacgccgcacagctccagtcgccgtcgcggcttccggtgctaggtggagggaaggaaggagggagccggggagtgggccaggcagcagccgggctgaagtcggcttggggagccagagggagcggagcggaacctgcggggcagaggcggcggccgcagcggcgcagctgatagcaggaacaggatcaagtcttccataccagggaccaggccaaaaccagactgccactgcccctacttgggccccactgtccccagaaagcagctgctgtgatcatgggcaatatctttggaaaccttctcaagagcctgattgggaagaaggagatgcgcatcctgatggtgggcctggatgccgcaggaaagaccaccatcctatacaagctgaaactgggggagatcgtcaccaccatccctaccattgggttcaatgtggagacagtggagtataagaacatcagctttacagtgtgggatgtgggtggccaggacaagattcgacccctctggagacactacttccagaacacccaagggttgatatttgtggtcgacagcaatgatcgggagcgagtaaatgaggcccgggaagagctgatgagaatgctggcggaggacgagctccgggatgctgtactccttgtctttgcaaacaaacaggatctgcctaatgctatgaacgctgctgagatcacagacaagctgggcctgcattcccttcgtcaccgtaactggtacattcaggccacctgtgccaccagcggggacgggctgtacgaaggcctggactggctggccaatcagctcaaaaacaagaagtgaaagccagacagccctaacaaagcaccccacccacccctgacatacctactgtcaccctgccccagtcctaccccttcctctccatgcaagtgtggccagggccctgggtatcatgtccacatgcccagcaagagccttgcctcccctgcctcccctcctttttcctgtccacctatatgaccaatccctaattgctgtcctgatgatgagtcattccaatttactggatttaaaacaaaaagttgttacggtttcatggggtggcccctctctctctctcacctctgggtttcgggaggtcgagtggggtattctctttgtttggcagtggttgctgtcctcttggcatctgagtcctttccctgtccccacaagcccttctactccctgtttgcctttcctttgccaccctctccctgttttacatggaaattgcacgggcctctctgtgtttgcgtgcatgtgtgcgcctgtatatacatgtatagagagatatatttgtgggggccggggggagcggggagggggtggagtgaagctcagggcttgcagccaggacactgcccactggagcctgtcatctgccccttccgtgttggtgagattaagggaagaaggtgggagggcattagtcaagccggactgccccagtctttgactggttaccctcctctctgcaggtaggtttttctggatgataggacagatgatggattcttcaccaccattttccttgtactcttctctccacccttcttagggctggaggatggcatttatctctagatgactgttcccaaggagatgccactctgctctgccttactgttgggaaggagagaggaacccactcactcttatcagcttagagtgttcaactgatccttccccaccatcttcagatctgttcctctggagcttgactggggggtggggatggcaagtccatggtgtgtgttagggacccagggcattgggggaagggaggcgaaggcctgaggttttccatcttcattctcttttgttattaggagaaggtgaggcatgggccaatcccattcctgccttccagtgccccaccacccttctgatcttaggggttggatgggtcatctgtccttggtcagaattttctcaccctagtactcctactggcctgaccagggctgactgggtattctaatgaggagctgggaagtggggtgacatagctgaccttagtatcaacccccctcttctccaactcttgttttctagtccaggatatgctaaaggacgaagattttctattgtttccaggccctcagaccatccttgctgtcccttcaccctccatgcccctgccatcctcactcacttctcataaatggatctgggggttagagtggaggaaataaaatcctgaagtggttgtcagtgcttgtgggatgcagtggtcttcaggattctccccgcattattatgtagttgttcagaagctgttgctactgcgtctctctgtctgcagggggcacttgttcctgaggtcctcgcctgggtcctgacttctgtagtttctgtgaagacgtggctgtcctgtgggctcctgtgtgtgctggctgcgccctgagctccgagacagctgcccataacctgctaaggtcagggcccagggccccccacagcatggctgagggaccccttcccagtagggctgtcccaagccccactccatggggccaggtttcctggccacttttgttgatagcagatggatcaatattagtaaccccatccaagattgaactgtgaaagagaggttccaggggtatctccctcagtgccagttacttagtgatgtgttacccaggatgcagcaggtgtgtgcaggtatcttgctctctaggcctgtgtgtgtgtgtgagtgtgtgtgtatatgggtgtgggtgtgtttgtgtgtggtggttgtggggggggtgttggaggttctatttcatttaaaaatgtattcatttccctggccccacagatgcttccctccatactttttatttgctctgtttcctcagatttattttgtcttgccccattgcctcctctcctctctggtaggtttaattttatgctttccctgattccagctttctgcttcctgaggactcccgctccccccaccccaaagtttgtctgtggtgttatagtggtaactgcagttcctcctctggaatgtagactgtatatgtttaataactcaccttctctatccttgctcaaaatgtgggataacgcgatgactgtgaccctggttggaaattaaacttgttttatgca

SEQ ID NO: 320295 - DNA, 2952 bp, Homo sapiens
agcggaggtgggaagtatcccgggctgggggtgggggtacgccgcacagctccagtcgccgtcgcggcttccggtgctaggtggagggaaggaaggagggagccggggagtgggccaggcagcagccgggctgaagtcggcttggggagccagagggagcggagcggaacctgcggggcagaggcggcggccgcagcggcgcagctgatagcaggaacaggatcaagtcttccataccagggaccaggccaaaaccagactgccactgcccctacttgggccccactgtccccagaaagcagctgctgtgatcatgggcaatatctttggaaaccttctcaagagcctgattgggaagaaggagatgcgcatcctgatggtgggcctggatgccgcaggaaagaccaccatcctatacaagctgaaactgggggagatcgtcaccaccatccctaccattgggttcaatgtggagacagtggagtataagaacatcagctttacagtgtgggatgtgggtggccaggacaagattcgacccctctggagacactacttccagaacacccaagggttgatatttgtggtcgacagcaatgatcgggagcgagtaaatgaggcccgggaagagctgatgagaatgctggcggaggacgagctccgggatgctgtactccttgtctttgcaaacaaacaggatctgcctaatgctatgaacgctgctgagatcacagacaagctgggcctgcattcccttcgtcaccgtaactggtacattcaggccacctgtgccaccagcggggacgggctgtacgaaggcctggactggctggccaatcagctcaaaaacaagaagtgaaagccagacagccctaacaaagcaccccacccacccctgacatacctactgtcaccctgccccagtcctaccccttcctctccatgcaagtgtggccagggccctgggtatcatgtccacatgcccagcaagagccttgcctcccctgcctcccctcctttttcctgtccacctatatgaccaatccctaattgctgtcctgatgatgagtcattccaatttactggatttaaaacaaaaagttgttacggtttcatggggtggcccctctctctctctcacctctgggtttcgggaggtcgagtggggtattctctttgtttggcagtggttgctgtcctcttggcatctgagtcctttccctgtccccacaagcccttctactccctgtttgcctttcctttgccaccctctccctgttttacatggaaattgcacgggcctctctgtgtttgcgtgcatgtgtgcgcctgtatatacatgtatagagagatatatttgtgggggccggggggagcggggagggggtggagtgaagctcagggcttgcagccaggacactgcccactggagcctgtcatctgccccttccgtgttggtgagattaagggaagaaggtgggagggcattagtcaagccggactgccccagtctttgactggttaccctcctctctgcaggtaggtttttctggatgataggacagatgatggattcttcaccaccattttccttgtactcttctctccacccttcttagggctggaggatggcatttatctctagatgactgttcccaaggagatgccactctgctctgccttactgttgggaaggagagaggaacccactcactcttatcagcttagagtgttcaactgatccttccccaccatcttcagatctgttcctctggagcttgactggggggtggggatggcaagtccatggtgtgtgttagggacccagggcattgggggaagggaggcgaaggcctgaggttttccatcttcattctcttttgttattaggagaaggtgaggcatgggccaatcccattcctgccttccagtgccccaccacccttctgatcttaggggttggatgggtcatctgtccttggtcagaattttctcaccctagtactcctactggcctgaccagggctgactgggtattctaatgaggagctgggaagtggggtgacatagctgaccttagtatcaacccccctcttctccaactcttgttttctagtccaggatatgctaaaggacgaagattttctattgtttccaggccctcagaccatccttgctgtcccttcaccctccatgcccctgccatcctcactcacttctcataaatggatctgggggttagagtggaggaaataaaatcctgaagtggttgtcagtgcttgtgggatgcagtggtcttcaggattctccccgcattattatgtagttgttcagaagctgttgctactgcgtctctctgtctgcagggggcacttgttcctgaggtcctcgcctgggtcctgacttctgtagtttctgtgaagacgtggctgtcctgtgggctcctgtgtgtgctggctgcgccctgagctccgagacagctgcccataacctgctaaggtcagggcccagggccccccacagcatggctgagggaccccttcccagtagggctgtcccaagccccactccatggggccaggtttcctggccacttttgttgatagcagatggatcaatattagtaaccccatccaagattgaactgtgaaagagaggttccaggggtatctccctcagtgccagttacttagtgatgtgttacccaggatgcagcaggtgtgtgcaggtatcttgctctctaggcctgtgtgtgtgtgtgagtgtgtgtgtatatgggtgtgggtgtgtttgtgccccaaagtttgtctgtggtgttatagtggtaactgcagttcctcctctggaatgtagactgtatatgtttaataactcaccttctctatccttgctcaaaatgtgggataacgcgatgactgtgaccctggttggaaattaaacttgttttatgca

SEQ ID NO: 320296 - DNA, 3235 bp, Homo sapiens
agcggaggtgggaagtatcccgggctgggggtgggggtacgccgcacagctccagtcgccgtcgcggcttccggtgctaggtggagggaaggaaggagggagccggggagtgggccaggcagcagccgggctgaagtcggcttggggagccagagggagcggagcggaacctgcggggcagaggcggcggccgcagcggcgcagctgatagcaggaacaggatcaagtcttccataccagggaccaggccaaaaccagactgccactgcccctacttgggccccactgtccccagaaagcagctgctgtgatcatgggcaatatctttggaaaccttctcaagagcctgattgggaagaaggagatgcgcatcctgatggtgggcctggatgccgcaggaaagaccaccatcctatacaagctgaaactgggggagatcgtcaccaccatccctaccattgggttcaatgtggagacagtggagtataagaacatcagctttacagtgtgggatgtgggtggccaggacaagattcgacccctctggagacactacttccagaacacccaagggttgatatttgtggtcgacagcaatgatcgggagcgagtaaatgaggcccgggaagagctgatgagaatgctggcggaggacgagctccgggatgctgtactccttgtctttgcaaacaaacaggatctgcctaatgctatgaacgctgctgagatcacagacaagctgggcctgcattcccttcgtcaccgtaactggtacattcaggccacctgtgccaccagcggggacgggctgtacgaaggcctggactggctggccaatcagctcaaaaacaagaagtgaaagccagacagccctaacaaagcaccccacccacccctgacatacctactgtcaccctgccccagtcctaccccttcctctccatgcaagtgtggccagggccctgggtatcatgtccacatgcccagcaagagccttgcctcccctgcctcccctcctttttcctgtccacctatatgaccaatccctaattgctgtcctgatgatgagtcattccaatttactggatttaaaacaaaaagttgttacggtttcatggggtggcccctctctctctctcacctctgggtttcgggaggtcgagtggggtattctctttgtttggcagtggttgctgtcctcttggcatctgagtcctttccctgtccccacaagcccttctactccctgtttgcctttcctttgccaccctctccctgttttacatggaaattgcacgggcctctctgtgtttgcgtgcatgtgtgcgcctgtatatacatgtatagagagatatatttgtgggggccggggggagcggggagggggtggagtgaagctcagggcttgcagccaggacactgcccactggagcctgtcatctgccccttccgtgttggtgagattaagggaagaaggtgggagggcattagtcaagccggactgccccagtctttgactggttaccctcctctctgcaggtaggtttttctggatgataggacagatgatggattcttcaccaccattttccttgtactcttctctccacccttcttagggctggaggatggcatttatctctagatgactgttcccaaggagatgccactctgctctgccttactgttgggaaggagagaggaacccactcactcttatcagcttagagtgttcaactgatccttccccaccatcttcagatctgttcctctggagcttgactggggggtggggatggcaagtccatggtgtgtgttagggacccagggcattgggggaagggaggcgaaggcctgaggttttccatcttcattctcttttgttattaggagaaggtgaggcatgggccaatcccattcctgccttccagtgccccaccacccttctgatcttaggggttggatgggtcatctgtccttggtcagaattttctcaccctagtactcctactggcctgaccagggctgactgggtattctaatgaggagctgggaagtggggtgacatagctgaccttagtatcaacccccctcttctccaactcttgttttctagtccaggatatgctaaaggacgaagattttctattgtttccaggccctcagaccatccttgctgtcccttcaccctccatgcccctgccatcctcactcacttctcataaatggatctgggggttagagtggaggaaataaaatcctgaagtggttgtcagtgcttgtgggatgcagtggtcttcaggattctccccgcattattatgtagttgttcagaagctgttgctactgcgtctctctgtctgcagggggcacttgttcctgaggtcctcgcctgggtcctgacttctgtagtttctgtgaagacgtggctgtcctgtgggctcctgtgtgtgctggctgcgccctgagctccgagacagctgcccataacctgctaaggtcagggcccagggccccccacagcatggctgagggaccccttcccagtagggctgtcccaagccccactccatggggccaggtttcctggccacttttgttgatagcagatggatcaatattagtaaccccatccaagattgaactgtgaaagagaggttccaggggtatctccctcagtgccagttacttagtgatgtgttacccaggatgcagcaggtgtgtgcaggtatcttgctctctaggcctgtgtgtgtgtgtgagtgtgtgtgtatatgggtgtgggtgtgtttgtgatataatttatatttttttttatattatattattttttatattttattttaattttttttattttattatttttatatatttatttattattttaatattattttttattttttttttattttttttttacttatttattcttttttttctgtattttattttatttttttctttattactcatttttttctcttcttttcttttatttttcgttttttttctctcttctgtttttttttcttttctcttcctatcttttttctcttatcttttttcttcttcttatttctatttactctttgttttctgctttgtttgttgttcgatttattctttttctttttacttatcttttttgtattttttcttttttttctatctactctcttttttatctctctttttgttttctcttacttctcttcccttttttcctccc

SEQ ID NO: 320297 - DNA, 2645 bp, Homo sapiens
tcaagcttctaacgatgtacggggacatgcccagcaagagccttgcctcccctgcctcccctcctttttcctgtccacctatatgaccaatccctaattgctgtcctgatgatgagtcattccaatttactggatttaaaacaaaaagttgttacggtttcatggggtggcccctctctctctctcacctctgggtttcgggaggtcgagtggggtattctctttgtttggcagtggttgctgtcctcttggcatctgagtcctttccctgtccccacaagcccttctactccctgtttgcctttcctttgccaccctctccctgttttacatggaaattgcacgggcctctctgtgtttgcgtgcatgtgtgcgcctgtatatacatgtatagagagatatatttgtgggggccggggggagcggggagggggtggagtgaagctcagggcttgcagccaggacactgcccactggagcctgtcatctgccccttccgtgttggtgagattaagggaagaaggtgggagggcattagtcaagccggactgccccagtctttgactggttaccctcctctctgcaggtaggtttttctggatgataggacagatgatggattcttcaccaccattttccttgtactcttctctccacccttcttagggctggaggatggcatttatctctagatgactgttcccaaggagatgccactctgctctgccttactgttgggaaggagagaggaacccactcactcttatcagcttagagtgttcaactgatccttccccaccatcttcagatctgttcctctggagcttgactggggggtggggatggcaagtccatggtgtgtgttagggacccagggcattgggggaagggaggcgaaggcctgaggttttccatcttcattctcttttgttattaggagaaggtgaggcatgggccaatcccattcctgccttccagtgccccaccacccttctgatcttaggggttggatgggtcatctgtccttggtcagaattttctcaccctagtactcctactggcctgaccagggctgactgggtattctaatgaggagctgggaagtggggtgacatagctgaccttagtatcaacccccctcttctccaactcttgttttctagtccaggatatgctaaaggacgaagattttctattgtttccaggccctcagaccatccttgctgtcccttcaccctccatgcccctgccatcctcactcacttctcataaatggatctgggggttagagtggaggaaataaaatcctgaagtggttgtcagtgcttgtgggatgcagtggtcttcaggattctccccgcattattatgtagttgttcagaagctgttgctactgcgtctctctgtctgcagggggcacttgttcctgaggtcctcgcctgggtcctgacttctgtagtttctgtgaagacgtggctgtcctgtgggctcctgtgtgtgctggctgcgccctgagctccgagacagctgcccataacctgctaaggtcagggcccagggccccccacagcatggctgagggaccccttcccagtagggctgtcccaagccccactccatggggccaggtttcctggccacttttgttgatagcagatggatcaatattagtaaccccatccaagattgaactgtgaaagagaggttccaggggtatctccctcagtgccagttacttagtgatgtgttacccaggatgcagcaggtgtgtgcaggtatcttgctctctaggcctgtgtgtgtgtgtgagtgtgtgtgtatatgggtgtgggtgtgtttgtgtgtggtggttgtggggggggtgttggaggttctatttcatttaaaaatgtattcatttccctggccccacagatgcttccctccatactttttatttgctctgtttcctcagatttattttgtcttgccccattgcctctccttccttgaactctttccttttcaatctcaactcattcactgctgttgctcatttgcccttttccatgtattttttcctacttaggattttccactctatctttgtggttcatgaggactttgcctcttctcctgcctcattccctgactttctctagttagatgtcagtcctaaataggttttcctcacttcaggcctcacccctcaccttgtttttttgggggctccagggaccaatctggggctggaaatgttaggaggttgccttggtgctgccccagatctgtccagcagggggcagtaagtgatcttggtagtatccctggctgctaagcccttggcaggggtggtcctttctacattcccattcacttaacagctcttttgggattgggtgtttcattccatttctgcccactccctctcctctcctctctggtaggtttaattttatgctttccctgattccagctttctgcttcctgaggactcccgctccccccaccccaaagtttgtctgtggtgttatagtggtaactgcagttcctcctctggaatgtagactgtatatgtttaataactcaccttctctatccttgctcaaaatgtgggataacgcgatgactgtgaccctggttggaaattaaacttgttttatgca

SEQ ID NO: 320298 - DNA, 2242 bp, Homo sapiens
aaggctgatgtcaataaggtgctgagtgcctcggggtgttttaatatcaaggcgacggaagggggcccgcttggagcctgtcatctgccccttccgtgttggtgagattaagggaagaaggtgggagggcattagtcaagccggactgccccagtctttgactggttaccctcctctctgcaggtaggtttttctggatgataggacagatgatggattcttcaccaccattttccttgtactcttctctccacccttcttagggctggaggatggcatttatctctagatgactgttcccaaggagatgccactctgctctgccttactgttgggaaggagagaggaacccactcactcttatcagcttagagtgttcaactgatccttccccaccatcttcagatctgttcctctggagcttgactggggggtggggatggcaagtccatggtgtgtgttagggacccagggcattgggggaagggaggcgaaggcctgaggttttccatcttcattctcttttgttattaggagaaggtgaggcatgggccaatcccattcctgccttccagtgccccaccacccttctgatcttaggggttggatgggtcatctgtccttggtcagaattttctcaccctagtactcctactggcctgaccagggctgactgggtattctaatgaggagctgggaagtggggtgacatagctgaccttagtatcaacccccctcttctccaactcttgttttctagtccaggatatgctaaaggacgaagattttctattgtttccaggccctcagaccatccttgctgtcccttcaccctccatgcccctgccatcctcactcacttctcataaatggatctgggggttagagtggaggaaataaaatcctgaagtggttgtcagtgcttgtgggatgcagtggtcttcaggattctccccgcattattatgtagttgttcagaagctgttgctactgcgtctctctgtctgcagggggcacttgttcctgaggtcctcgcctgggtcctgacttctgtagtttctgtgaagacgtggctgtcctgtgggctcctgtgtgtgctggctgcgccctgagctccgagacagctgcccataacctgctaaggtcagggcccagggccccccacagcatggctgagggaccccttcccagtagggctgtcccaagccccactccatggggccaggtttcctggccacttttgttgatagcagatggatcaatattagtaaccccatccaagattgaactgtgaaagagaggttccaggggtatctccctcagtgccagttacttagtgatgtgttacccaggatgcagcaggtgtgtgcaggtatcttgctctctaggcctgtgtgtgtgtgtgagtgtgtgtgtatatgggtgtgggtgtgtttgtgtgtggtggttgtggggggggtgttggaggttctatttcatttaaaaatgtattcatttccctggccccacagatgcttccctccatactttttatttgctctgtttcctcagatttattttgtcttgccccattgcctctccttccttgaactctttccttttcaatctcaactcattcactgctgttgctcatttgcccttttccatgtattttttcctacttaggattttccactctatctttgtggttcatgaggactttgcctcttctcctgcctcattccctgactttctctagttagatgtcagtcctaaataggttttcctcacttcaggcctcacccctcaccttgtttttttgggggctccagggaccaatctggggctggaaatgttaggaggttgccttggtgctgccccagatctgtccagcagggggcagtaagtgatcttggtagtatccctggctgctaagcccttggcaggggtggtcctttctacattcccattcacttaacagctcttttgggattgggtgtttcattccatttctgcccactccctctcctctcctctctggtaggtttaattttatgctttccctgattccagctttctgcttcctgaggactcccgctccccccaccccaaagtttgtctgtggtgttatagtggtaactgcagttcctcctctggaatgtagactgtatatgtttaataactcaccttctctatccttgctcaaaatgtgggataacgcgatgactgtgaccctggttggaaattaaacttgttttatgca

SEQ ID NO: 320299 - DNA, 1868 bp, Homo sapiens
aaccacttcaggattttatttcctccactctaacccccagatccatttatgagaagtgggtggggatggcaagtccatggtgtgtgttagggacccagggcattgggggaagggaggcgaaggcctgaggttttccatcttcattctcttttgttattaggagaaggtgaggcatgggccaatcccattcctgccttccagtgccccaccacccttctgatcttaggggttggatgggtcatctgtccttggtcagaattttctcaccctagtactcctactggcctgaccagggctgactgggtattctaatgaggagctgggaagtggggtgacatagctgaccttagtatcaacccccctcttctccaactcttgttttctagtccaggatatgctaaaggacgaagattttctattgtttccaggccctcagaccatccttgctgtcccttcaccctccatgcccctgccatcctcactcacttctcataaatggatctgggggttagagtggaggaaataaaatcctgaagtggttgtcagtgcttgtgggatgcagtggtcttcaggattctccccgcattattatgtagttgttcagaagctgttgctactgcgtctctctgtctgcagggggcacttgttcctgaggtcctcgcctgggtcctgacttctgtagtttctgtgaagacgtggctgtcctgtgggctcctgtgtgtgctggctgcgccctgagctccgagacagctgcccataacctgctaaggtcagggcccagggccccccacagcatggctgagggaccccttcccagtagggctgtcccaagccccactccatggggccaggtttcctggccacttttgttgatagcagatggatcaatattagtaaccccatccaagattgaactgtgaaagagaggttccaggggtatctccctcagtgccagttacttagtgatgtgttacccaggatgcagcaggtgtgtgcaggtatcttgctctctaggcctgtgtgtgtgtgtgagtgtgtgtgtatatgggtgtgggtgtgtttgtgtgtggtggttgtggggggggtgttggaggttctatttcatttaaaaatgtattcatttccctggccccacagatgcttccctccatactttttatttgctctgtttcctcagatttattttgtcttgccccattgcctctccttccttgaactctttccttttcaatctcaactcattcactgctgttgctcatttgcccttttccatgtattttttcctacttaggattttccactctatctttgtggttcatgaggactttgcctcttctcctgcctcattccctgactttctctagttagatgtcagtcctaaataggttttcctcacttcaggcctcacccctcaccttgtttttttgggggctccagggaccaatctggggctggaaatgttaggaggttgccttggtgctgccccagatctgtccagcagggggcagtaagtgatcttggtagtatccctggctgctaagcccttggcaggggtggtcctttctacattcccattcacttaacagctcttttgggattgggtgtttcattccatttctgcccactccctctcctctcctctctggtaggtttaattttatgctttccctgattccagctttctgcttcctgaggactcccgctccccccaccccaaagtttgtctgtggtgttatagtggtaactgcagttcctcctctggaatgtagactgtatatgtttaataactcaccttctctatccttgctcaaaatgtgggataacgcgatgactgtgaccctggttggaaattaaacttgttttatgca

SEQ ID NO: 320300 - DNA, 1374 bp, Homo sapiens
gggctaggtgcgaggctgggtgtcggaaataaaatcctgaagtggttgtcagtgcttgtgggatgcagtggtcttcaggattctccccgcattattatgtagttgttcagaagctgttgctactgcgtctctctgtctgcagggggcacttgttcctgaggtcctcgcctgggtcctgacttctgtagtttctgtgaagacgtggctgtcctgtgggctcctgtgtgtgctggctgcgccctgagctccgagacagctgcccataacctgctaaggtcagggcccagggccccccacagcatggctgagggaccccttcccagtagggctgtcccaagccccactccatggggccaggtttcctggccacttttgttgatagcagatggatcaatattagtaaccccatccaagattgaactgtgaaagagaggttccaggggtatctccctcagtgccagttacttagtgatgtgttacccaggatgcagcaggtgtgtgcaggtatcttgctctctaggcctgtgtgtgtgtgtgagtgtgtgtgtatatgggtgtgggtgtgtttgtgtgtggtggttgtggggggggtgttggaggttctatttcatttaaaaatgtattcatttccctggccccacagatgcttccctccatactttttatttgctctgtttcctcagatttattttgtcttgccccattgcctctccttccttgaactctttccttttcaatctcaactcattcactgctgttgctcatttgcccttttccatgtattttttcctacttaggattttccactctatctttgtggttcatgaggactttgcctcttctcctgcctcattccctgactttctctagttagatgtcagtcctaaataggttttcctcacttcaggcctcacccctcaccttgtttttttgggggctccagggaccaatctggggctggaaatgttaggaggttgccttggtgctgccccagatctgtccagcagggggcagtaagtgatcttggtagtatccctggctgctaagcccttggcaggggtggtcctttctacattcccattcacttaacagctcttttgggattgggtgtttcattccatttctgcccactccctctcctctcctctctggtaggtttaattttatgctttccctgattccagctttctgcttcctgaggactcccgctccccccaccccaaagtttgtctgtggtgttatagtggtaactgcagttcctcctctggaatgtagactgtatatgtttaataactcaccttctctatccttgctcaaaatgtgggataacgcgatgactgtgaccctggttggaaattaaacttgttttatgca

SEQ ID NO: 320301 - DNA, 1386 bp, Homo sapiens
cgagctaggtacgaggctggtgtgaatcggccgaggggaaataaaatcctgaagtggttgtcagtgcttgtgggatgcagtggtcttcaggattctccccgcattattatgtagttgttcagaagctgttgctactgcgtctctctgtctgcagggggcacttgttcctgaggtcctcgcctgggtcctgacttctgtagtttctgtgaagacgtggctgtcctgtgggctcctgtgtgtgctggctgcgccctgagctccgagacagctgcccataacctgctaaggtcagggcccagggccccccacagcatggctgagggaccccttcccagtagggctgtcccaagccccactccatggggccaggtttcctggccacttttgttgatagcagatggatcaatattagtaaccccatccaagattgaactgtgaaagagaggttccaggggtatctccctcagtgccagttacttagtgatgtgttacccaggatgcagcaggtgtgtgcaggtatcttgctctctaggcctgtgtgtgtgtgtgagtgtgtgtgtatatgggtgtgggtgtgtttgtgtgtggtggttgtggggggggtgttggaggttctatttcatttaaaaatgtattcatttccctggccccacagatgcttccctccatactttttatttgctctgtttcctcagatttattttgtcttgccccattgcctctccttccttgaactctttccttttcaatctcaactcattcactgctgttgctcatttgcccttttccatgtattttttcctacttaggattttccactctatctttgtggttcatgaggactttgcctcttctcctgcctcattccctgactttctctagttagatgtcagtcctaaataggttttcctcacttcaggcctcacccctcaccttgtttttttgggggctccagggaccaatctggggctggaaatgttaggaggttgccttggtgctgccccagatctgtccagcagggggcagtaagtgatcttggtagtatccctggctgctaagcccttggcaggggtggtcctttctacattcccattcacttaacagctcttttgggattgggtgtttcattccatttctgcccactccctctcctctcctctctggtaggtttaattttatgctttccctgattccagctttctgcttcctgaggactcccgctccccccaccccaaagtttgtctgtggtgttatagtggtaactgcagttcctcctctggaatgtagactgtatatgtttaataactcaccttctctatccttgctcaaaatgtgggataacgcgatgactgtgaccctggttggaaattaaacttgttttatgca

SEQ ID NO: 320302 - DNA, 1492 bp, Homo sapiens
agcggaggtgggaagtatcccgggctgggggtgggggtacgccgcacagctccagtcgccgtcgcggcttccggtgctaggtggagggaaggaaggagggagccggggagtgggccaggcagcagccgggctgaagtcggcttggggagccagagggagcggagcggaacctgcggggcagaggcggcggccgcagcggcgcagctgatagcaggaacaggatcaagtcttccataccagggaccaggccaaaaccagactgccactgcccctacttgggccccactgtccccagaaagcagctgctgtgatcatgggcaatatctttggaaaccttctcaagagcctgattgggaagaaggagatgcgcatcctgatggtgggcctggatgccgcaggaaagaccaccatcctatacaagctgaaactgggggagatcgtcaccaccatccctaccattgggttcaatgtggagacagtggagtataagaacatcagctttacagtgtgggatgtgggtggccaggacaagattcgacccctctggagacactacttccagaacacccaagggttgatatttgtggtcgacagcaatgatcgggagcgagtaaatgaggcccgggaagagctgatgagaatgctggcggaggacgagctccgggatgctgtactccttgtctttgcaaacaaacaggatctgcctaatgctatgaacgctgctgagatcacagacaagctgggcctgcattcccttcgtcaccgtaactggtacattcaggccacctgtgccaccagcggggacgggctgtacgaaggcctggactggctggccaatcagctcaaaaacaagaagtgaaagccagacagccctaacaaagcaccccacccacccctgacatacctactgtcaccctgccccagtcctaccccttcctctccatgcaagtgtggccagggccctgggtatcatgtccacatgcccagcaagagccttgcctcccctgcctcccctcctttttcctgtccacctatatgaccaatccctaattgctgtcctgatgatgagtcattccaatttactggatttaaaacaaaaagttgttacggtttcatggggtggcccctctctctctctcacctctgggtttcgggaggtcgagtggggtattctctttgtttggcagtggttgctgtcctcttggcatctgagtcctttccctgtccccacaagcccttctactccctgtttgcctcctctcctctctggtaggtttaattttatgctttccctgattccagctttctgcttcctgaggactcccgctccccccaccccaaagtttgtctgtggtgttatagtggtaactgcagttcctcctctggaatgtagactgtatatgtttaataactcaccttctctatccttgctcaaaatgtgggataacgcgatgactgtgaccctggttggaaattaaacttgttttatgca

SEQ ID NO: 320303 - DNA, 1125 bp, Homo sapiens
aaaatgagtaatgaggtcagagaccgagtgttaagtcggacgaggcacagcatggctgagggaccccttcccagtagggctgtcccaagccccactccatggggccaggtttcctggccacttttgttgatagcagatggatcaatattagtaaccccatccaagattgaactgtgaaagagaggttccaggggtatctccctcagtgccagttacttagtgatgtgttacccaggatgcagcaggtgtgtgcaggtatcttgctctctaggcctgtgtgtgtgtgtgagtgtgtgtgtatatgggtgtgggtgtgtttgtgtgtggtggttgtggggggggtgttggaggttctatttcatttaaaaatgtattcatttccctggccccacagatgcttccctccatactttttatttgctctgtttcctcagatttattttgtcttgccccattgcctctccttccttgaactctttccttttcaatctcaactcattcactgctgttgctcatttgcccttttccatgtattttttcctacttaggattttccactctatctttgtggttcatgaggactttgcctcttctcctgcctcattccctgactttctctagttagatgtcagtcctaaataggttttcctcacttcaggcctcacccctcaccttgtttttttgggggctccagggaccaatctggggctggaaatgttaggaggttgccttggtgctgccccagatctgtccagcagggggcagtaagtgatcttggtagtatccctggctgctaagcccttggcaggggtggtcctttctacattcccattcacttaacagctcttttgggattgggtgtttcattccatttctgcccactccctctcctctcctctctggtaggtttaattttatgctttccctgattccagctttctgcttcctgaggactcccgctccccccaccccaaagtttgtctgtggtgttatagtggtaactgcagttcctcctctggaatgtagactgtatatgtttaataactcaccttctctatccttgctcaaaatgtgggataacgcgatgactgtgaccctggttggaaattaaacttgttttatgca

SEQ ID NO: 320304 - DNA, 955 bp, Homo sapiens
agcggaggtgggaagtatcccgggctgggggtgggggtacgccgcacagctccagtcgccgtcgcggcttccggtgctaggtggagggaaggaaggagggagccggggagtgggccaggcagcagccgggctgaagtcggcttggggagccagagggagcggagcggaacctgcggggcagaggcggcggccgcagcggcgcagctgatagcaggaacaggatcaagtcttccataccagggaccaggccaaaaccagactgccactgcccctacttgggccccactgtccccagaaagcagctgctgtgatcatgggcaatatctttggaaaccttctcaagagcctgattgggaagaaggagatgcgcatcctgatggtgggcctggatgccgcaggaaagaccaccatcctatacaagctgaaactgggggagatcgtcaccaccatccctaccattgggttcaatgtggagacagtggagtataagaacatcagctttacagtgtgggatgtgggtggccaggacaagattcgacccctctggagacactacttccagaacacccaagggttgatatttgtggtcgacagcaatgatcgggagcgagtaaatgaggcccgggaagagctgatgagaatgctggcggaggacgagctccgggatgctgtactccttgtctttgcaaacaaacaggatctgcctaatgctatgaacgctgctgagatcacagacaagctgggcctgcattcccttcgtcaccgtaactggtacattcaggccacctgtgccaccagcggggacgggctgtacgaaggcctggactggctggccaatcagctcaaaaacaagaagtgaaagccagacagccctaacaaagcaccccacccacccctgacatacctactgtcaccctgccctctccctgaaataaagaacagcttgacagaaaaa

SEQ ID NO: 320305 - DNA, 925 bp, Homo sapiens
agcggaggtgggaagtatcccgggctgggggtgggggtacgccgcacagctccagtcgccgtcgcggcttccggtgctaggtggagggaaggaaggagggagccggggagtgggccaggcagcagccgggctgaagtcggcttggggagccagagggagcggagcggaacctgcggggcagaggcggcggccgcagcggcgcagctgatagcaggaacaggatcaagtcttccataccagggaccaggccaaaaccagactgccactgcccctacttgggccccactgtccccagaaagcagctgctgtgatcatgggcaatatctttggaaaccttctcaagagcctgattgggaagaaggagatgcgcatcctgatggtgggcctggatgccgcaggaaagaccaccatcctatacaagctgaaactgggggagatcgtcaccaccatccctaccattgggttcaatgtggagacagtggagtataagaacatcagctttacagtgtgggatgtgggtggccaggacaagattcgacccctctggagacactacttccagaacacccaagggttgatatttgtggtcgacagcaatgatcgggagcgagtaaatgaggcccgggaagagctgatgagaatgctggcggaggacgagctccgggatgctgtactccttgtctttgcaaacaaacaggatctgcctaatgctatgaacgctgctgagatcacagacaagctgggcctgcattcccttcgtcaccgtaactggtacattcaggccacctgtgccaccagcggggacgggctgtacgaaggcctggactggctggccaatcagctcaaaaacaagaagtgaaagccagacagccctaacaaagcaccccacccactcaatttgagatcctctagagtaccgcagata

SEQ ID NO: 320306 - DNA, 1691 bp, Homo sapiens
tttgcgtggtcacttacgggcgtttgcgtggtgcacttacgacccccaaagtttgtctgtggtgttatagtggtaactgcagttcctcctctggaatgtagactgtatatgtttaataactcaccttctctatccttgctcaaaatgtgggataacgcgatgactgtgaccctggttggaaattaaacttgttttatgcatttggagccgaccttcatctttgctgtgcagcagccgtgggacagtagtttcatggtgaggggagtcctgtttctggtccctctctccatagtgctccttctttcagcaaaggggtaaaaggcacacttgattgatagagagtaaggttatggaggaacttagtgccactccacactggttatttcttcccatcataccccgcggcgggggagcccaaatgaattgggcatcagagtgtgagggcttcgtgactttcctcctctagttctaaagggtttaaacctgaaatcagctgtatttctcacctgttggtagactgtatggacttcactggctgaagggccctgaacttggagggccccatgtgcctctactctcagatctcctcagccttgcacatgaggtgcttctagtttgaacagagaccccctcactagtctagttctggactttggcagtgaataaacatgaaggataaacgtctgggcagtgtaatgaccttaatccttcttacaactgatggccctgcatcagctctacttcaggcgtgtggtttttcattgtcaggatgccaagcctcatccagagatcccacaaatgtcttgaggaatagaccttttccataaagcctccatcctcccatcgcactcccaccactattctgttcctcccctgctaccagtgtctggctccaggcaaagaaagggatggtgctacctttagggtgggtgaggtctgggtgagccaggcaagccttccccaatcttaatattttcttaagctttgaggacagaggtcttcccagcctgcttttgtgggaaagggataggatttaggcatataataagtttgagagccccaagtaccagtgtgaagcatataatttatattcagttacttccctgctgcctcccctgccaattttccttttcagcacttctattattaataggccatcaccctcaaggaccagtgcttccacccatatataactctcaaactactccaaccagacatgtcttatcaatcccaatgactttgaacattacccacctactcctcaagatcagatgacactttcctccttccaggcttctccaaagttctgcttggtgacagggtgctgataagagtatctttcccaagtgttttctttcttcttcttctttttttttttttttttttttgagacggaatttggtcttgttgcccaggctggagggcaatggcacgatatcggctcaccacagcctctcctcctgggctcccgggttcaagcaattctcctgcttcagcctcctgaggagctgggattacaggcatgcgccaccacacccggctaattttgtatttttagtagagatgggtttctccatgttagtgagactggtcttgaactcctgacctcaggtgatctgcccacctcagcctcccaaagtgctaggattacaggcgtgagccaccacgcccggccaggtgttttatttcta

SEQ ID NO: 320307 - DNA, 3708 bp, Homo sapiens
gtgcagatcttggtggtaggttgaggccatctcctgggccgcctggcggccatcgtggctaaacaggtactgctgggccggaaggtggtggtcgtacgctgtgaaggcatcaacatttctggcaatttctacagaaacaagttgaagtacctggctttcctccgcaagccggtgcagatctgggtgctaggtggagggaaggaaggagggagccggggagtgggccaggcagcagccgggctgaagtcggcttggggagccagagggagcggagcggaacctgcggggcagaggcggcggccgcagcggcgcagctgatagcaggaacaggatcaagtcttccataccagggaccaggccaaaaccagactgccactgcccctacttgggccccactgtccccagaaagcagctgctgtgatcatgggcaatatctttggaaaccttctcaagagcctgattgggaagaaggagatgcgcatcctgatggtgggcctggatgccgcaggaaagaccaccatcctatacaagctgaaactgggggagatcgtcaccaccatccctaccattgggttcaatgtggagacagtggagtataagaacatcagctttacagtgtgggatgtgggtggccaggacaagattcgacccctctggagacactacttccagaacacccaagggttgatatttgtggtcgacagcaatgatcgggagcgagtaaatgaggcccgggaagagctgatgagaatgctggcggaggacgagctccgggatgctgtactccttgtctttgcaaacaaacaggatctgcctaatgctatgaacgctgctgagatcacagacaagctgggcctgcattcccttcgtcaccgtaactggtacattcaggccacctgtgccaccagcggggacgggctgtacgaaggcctggactggctggccaatcagctcaaaaacaagaagtgaaagccagacagccctaacaaagcaccccacccacccctgacatacctactgtcaccctgccccagtcctaccccttcctctccatgcaagtgtggccagggccctgggtatcatgtccacatgcccagcaagagccttgcctcccctgcctcccctcctttttcctgtccacctatatgaccaatccctaattgctgtcctgatgatgagtcattccaatttactggatttaaaacaaaaagttgttacggtttcatggggtggcccctctctctctctcacctctgggtttcgggaggtcgagtggggtattctctttgtttggcagtggttgctgtcctcttggcatctgagtcctttccctgtccccacaagcccttctactccctgtttgcctttcctttgccaccctctccctgttttacatggaaattgcacgggcctctctgtgtttgcgtgcatgtgtgcgcctgtatatacatgtatagagagatatatttgtgggggccggggggagcggggagggggtggagtgaagctcagggcttgcagccaggacactgcccactggagcctgtcatctgccccttccgtgttggtgagattaagggaagaaggtgggagggcattagtcaagccggactgccccagtctttgactggttaccctcctctctgcaggtaggtttttctggatgataggacagatgatggattcttcaccaccattttccttgtactcttctctccacccttcttagggctggaggatggcatttatctctagatgactgttcccaaggagatgccactctgctctgccttactgttgggaaggagagaggaacccactcactcttatcagcttagagtgttcaactgatccttccccaccatcttcagatctgttcctctggagcttgactggggggtggggatggcaagtccatggtgtgtgttagggacccagggcattgggggaagggaggcgaaggcctgaggttttccatcttcattctcttttgttattaggagaaggtgaggcatgggccaatcccattcctgccttccagtgccccaccacccttctgatcttaggggttggatgggtcatctgtccttggtcagaattttctcaccctagtactcctactggcctgaccagggctgactgggtattctaatgaggagctgggaagtggggtgacatagctgaccttagtatcaacccccctcttctccaactcttgttttctagtccaggatatgctaaaggacgaagattttctattgtttccaggccctcagaccatccttgctgtcccttcaccctccatgcccctgccatcctcactcacttctcataaatggatctgggggttagagtggaggaaataaaatcctgaagtggttgtcagtgcttgtgggatgcagtggtcttcaggattctccccgcattattatgtagttgttcagaagctgttgctactgcgtctctctgtctgcagggggcacttgttcctgaggtcctcgcctgggtcctgacttctgtagtttctgtgaagacgtggctgtcctgtgggctcctgtgtgtgctggctgcgccctgagctccgagacagctgcccataacctgctaaggtcagggcccagggccccccacagcatggctgagggaccccttcccagtagggctgtcccaagccccactccatggggccaggtttcctggccacttttgttgatagcagatggatcaatattagtaaccccatccaagattgaactgtgaaagagaggttccaggggtatctccctcagtgccagttacttagtgatgtgttacccaggatgcagcaggtgtgtgcaggtatcttgctctctaggcctgtgtgtgtgtgtgagtgtgtgtgtatatgggtgtgggtgtgtttgtgtgtggtggttgtggggggggtgttggaggttctatttcatttaaaaatgtattcatttccctggccccacagatgcttccctccatactttttatttgctctgtttcctcagatttattttgtcttgccccattgcctctccttccttgaactctttccttttcaatctcaactcattcactgctgttgctcatttgcccttttccatgtattttttcctacttaggattttccactctatctttgtggttcatgaggactttgcctcttctcctgcctcattccctgactttctctagttagatgtcagtcctaaataggttttcctcacttcaggcctcacccctcaccttgtttttttgggggctccagggaccaatctggggctggaaatgttaggaggttgccttggtgctgccccagatctgtccagcagggggcagtaagtgatcttggtagtatccctggctgctaagcccttggcaggggtggtcctttctacattcccattcacttaacagctcttttgggattgggtgtttcattccatttctgcccactccctctcctctcctctctggtaggtttaattttatgctttccctgattccagctttctgcttcctgaggactcccgctccccccaccccaaagtttgtctgtggtgttatagtggtaactgcagttcctcctctggaatgtagactgtatatgtttaataactcaccttctctatccttgctcaaaatgtgggataacgcgatgactgtgaccctggttggaaattaaacttgttttatgca

SEQ ID NO: 320308 - DNA, 5089 bp, Homo sapiens
agcggaggtgggaagtatcccgggctgggggtgggggtacgccgcacagctccagtcgccgtcgcggcttccggtgctaggtggagggaaggaaggagggagccggggagtgggccaggcagcagccgggctgaagtcggcttggggagccagagggagcggagcggaacctgcggggcagaggcggcggccgcagcggcgcagctgatagcaggaacaggatcaagtcttccataccagggaccaggccaaaaccagactgccactgcccctacttgggccccactgtccccagaaagcagctgctgtgatcatgggcaatatctttggaaaccttctcaagagcctgattgggaagaaggagatgcgcatcctgatggtgggcctggatgccgcaggaaagaccaccatcctatacaagctgaaactgggggagatcgtcaccaccatccctaccattgggttcaatgtggagacagtggagtataagaacatcagctttacagtgtgggatgtgggtggccaggacaagattcgacccctctggagacactacttccagaacacccaagggttgatatttgtggtcgacagcaatgatcgggagcgagtaaatgaggcccgggaagagctgatgagaatgctggcggaggacgagctccgggatgctgtactccttgtctttgcaaacaaacaggatctgcctaatgctatgaacgctgctgagatcacagacaagctgggcctgcattcccttcgtcaccgtaactggtacattcaggccacctgtgccaccagcggggacgggctgtacgaaggcctggactggctggccaatcagctcaaaaacaagaagtgaaagccagacagccctaacaaagcaccccacccacccctgacatacctactgtcaccctgccccagtcctaccccttcctctccatgcaagtgtggccagggccctgggtatcatgtccacatgcccagcaagagccttgcctcccctgcctcccctcctttttcctgtccacctatatgaccaatccctaattgctgtcctgatgatgagtcattccaatttactggatttaaaacaaaaagttgttacggtttcatggggtggcccctctctctctctcacctctgggtttcgggaggtcgagtggggtattctctttgtttggcagtggttgctgtcctcttggcatctgagtcctttccctgtccccacaagcccttctactccctgtttgcctttcctttgccaccctctccctgttttacatggaaattgcacgggcctctctgtgtttgcgtgcatgtgtgcgcctgtatatacatgtatagagagatatatttgtgggggccggggggagcggggagggggtggagtgaagctcagggcttgcagccaggacactgcccactggagcctgtcatctgccccttccgtgttggtgagattaagggaagaaggtgggagggcattagtcaagccggactgccccagtctttgactggttaccctcctctctgcaggtaggtttttctggatgataggacagatgatggattcttcaccaccattttccttgtactcttctctccacccttcttagggctggaggatggcatttatctctagatgactgttcccaaggagatgccactctgctctgccttactgttgggaaggagagaggaacccactcactcttatcagcttagagtgttcaactgatccttccccaccatcttcagatctgttcctctggagcttgactggggggtggggatggcaagtccatggtgtgtgttagggacccagggcattgggggaagggaggcgaaggcctgaggttttccatcttcattctcttttgttattaggagaaggtgaggcatgggccaatcccattcctgccttccagtgccccaccacccttctgatcttaggggttggatgggtcatctgtccttggtcagaattttctcaccctagtactcctactggcctgaccagggctgactgggtattctaatgaggagctgggaagtggggtgacatagctgaccttagtatcaacccccctcttctccaactcttgttttctagtccaggatatgctaaaggacgaagattttctattgtttccaggccctcagaccatccttgctgtcccttcaccctccatgcccctgccatcctcactcacttctcataaatggatctgggggttagagtggaggaaataaaatcctgaagtggttgtcagtgcttgtgggatgcagtggtcttcaggattctccccgcattattatgtagttgttcagaagctgttgctactgcgtctctctgtctgcagggggcacttgttcctgaggtcctcgcctgggtcctgacttctgtagtttctgtgaagacgtggctgtcctgtgggctcctgtgtgtgctggctgcgccctgagctccgagacagctgcccataacctgctaaggtcagggcccagggccccccacagcatggctgagggaccccttcccagtagggctgtcccaagccccactccatggggccaggtttcctggccacttttgttgatagcagatggatcaatattagtaaccccatccaagattgaactgtgaaagagaggttccaggggtatctccctcagtgccagttacttagtgatgtgttacccaggatgcagcaggtgtgtgcaggtatcttgctctctaggcctgtgtgtgtgtgtgagtgtgtgtgtatatgggtgtgggtgtgtttgtgtgtggtggttgtggggggggtgttggaggttctatttcatttaaaaatgtattcatttccctggccccacagatgcttccctccatactttttatttgctctgtttcctcagatttattttgtcttgccccattgcctctccttccttgaactctttccttttcaatctcaactcattcactgctgttgctcatttgcccttttccatgtattttttcctacttaggattttccactctatctttgtggttcatgaggactttgcctcttctcctgcctcattccctgactttctctagttagatgtcagtcctaaataggttttcctcacttcaggcctcacccctcaccttgtttttttgggggctccagggaccaatctggggctggaaatgttaggaggttgccttggtgctgccccagatctgtccagcagggggcagtaagtgatcttggtagtatccctggctgctaagcccttggcaggggtggtcctttctacattcccattcacttaacagctcttttgggattgggtgtttcattccatttctgcccactccctctcctctcctctctggtaggtttaattttatgctttccctgattccagctttctgcttcctgaggactcccgctccccccaccccaaagtttgtctgtggtgttatagtggtaactgcagttcctcctctggaatgtagactgtatatgtttaataactcaccttctctatccttgctcaaaatgtgggataacgcgatgactgtgaccctggttggaaattaaacttgttttatgcatttggagccgaccttcatctttgctgtgcagcagccgtgggacagtagtttcatggtgaggggagtcctgtttctggtccctctctccatagtgctccttctttcagcaaaggggtaaaaggcacacttgattgatagagagtaaggttatggaggaacttagtgccactccacactggttatttcttcccatcataccccgcggcgggggagcccaaatgaattgggcatcagagtgtgagggcttcgtgactttcctcctctagttctaaagggtttaaacctgaaatcagctgtatttctcacctgttggtagactgtatggacttcactggctgaagggccctgaacttggagggccccatgtgcctctactctcagatctcctcagccttgcacatgaggtgcttctagtttgaacagagaccccctcactagtctagttctggactttggcagtgaataaacatgaaggataaacgtctgggcagtgtaatgaccttaatccttcttacaactgatggccctgcatcagctctacttcaggcgtgtggtttttcattgtcaggatgccaagcctcatccagagatcccacaaatgtcttgaggaatagaccttttccataaagcctccatcctcccatcgcactcccaccactattctgttcctcccctgctaccagtgtctggctccaggcaaagaaagggatggtgctacctttagggtgggtgaggtctgggtgagccaggcaagccttccccaatcttaatattttcttaagctttgaggacagaggtcttcccagcctgcttttgtgggaaagggataggatttaggcatataataagtttgagagccccaagtaccagtgtgaagcatataatttatattcagttacttccctgctgcctcccctgccaattttccttttcagcacttctattattaataggccatcaccctcaaggaccagtgcttccacccatatataactctcaaactactccaaccagacatgtcttatcaatcccaatgactttgaacattacccacctactcctcaagatcagatgacactttcctccttccaggcttctccaaagttctgcttggtgacagggtgctgataagagtatctttcccaagtgttttctttcttcttcttctttttttttttttttttttttgagacggaatttggtcttgttgcccaggctggagggcaatggcacgatatcggctcaccacagcctctcctcctgggctcccgggttcaagcaattctcctgcttcagcctcctgaggagctgggattacaggcatgcgccaccacacccggctaattttgtatttttagtagagatgggtttctccatgttagtgagactggtcttgaactcctgacctcaggtgatctgcccacctcagcctcccaaagtgctaggattacaggcgtgagccaccacgcccggccaggtgttttatttcta

SEQ ID NO: 320309 - DNA, 3663 bp, Homo sapiens
agcggaggtgggaagtatcccgggctgggggtgggggtacgccgcacagctccagtcgccgtcgcggcttccggtgctaggtggagggaaggaaggagggagccggggagtgggccaggcagcagccgggctgaagtcggcttggggagccagagggagcggagcggaacctgcggggcagaggcggcggccgcagcggcgcagctgatagcaggaacaggatcaagtcttccataccagggaccaggccaaaaccagactgccactgcccctacttgggccccactgtccccagaaagcagctgctgtgatcatgggcaatatctttggaaaccttctcaagagcctgattgggaagaaggagatgcgcatcctgatggtgggcctggatgccgcaggaaagaccaccatcctatacaagctgaaactgggggagatcgtcaccaccatccctaccattgggttcaatgtggagacagtggagtataagaacatcagctttacagtgtgggatgtgggtggccaggacaagattcgacccctctggagacactacttccagaacacccaagggttgatatttgtggtcgacagcaatgatcgggagcgagtaaatgaggcccgggaagagctgatgagaatgctggcggaggacgagctccgggatgctgtactccttgtctttgcaaacaaacaggatctgcctaatgctatgaacgctgctgagatcacagacaagctgggcctgcattcccttcgtcaccgtaactggtacattcaggccacctgtgccaccagcggggacgggctgtacgaaggcctggactggctggccaatcagctcaaaaacaagaagtgaaagccagacagccctaacaaagcaccccacccacccctgacatacctactgtcaccctgccccagtcctaccccttcctctccatgcaagtgtggccagggccctgggtatcatgtccacatgcccagcaagagccttgcctcccctgcctcccctcctttttcctgtccacctatatgaccaatccctaattgctgtcctgatgatgagtcattccaatttactggatttaaaacaaaaagttgttacggtttcatggggtggcccctctctctctctcacctctgggtttcgggaggtcgagtggggtattctctttgtttggcagtggttgctgtcctcttggcatctgagtcctttccctgtccccacaagcccttctactccctgtttgcctttcctttgccaccctctccctgttttacatggaaattgcacgggcctctctgtgtttgcgtgcatgtgtgcgcctgtatatacatgtatagagagatatatttgtgggggccggggggagcggggagggggtggagtgaagctcagggcttgcagccaggacactgcccactggagcctgtcatctgccccttccgtgttggtgagattaagggaagaaggtgggagggcattagtcaagccggactgccccagtctttgactggttaccctcctctctgcaggtaggtttttctggatgataggacagatgatggattcttcaccaccattttccttgtactcttctctccacccttcttagggctggaggatggcatttatctctagatgactgttcccaaggagatgccactctgctctgccttactgttgggaaggagagaggaacccactcactcttatcagcttagagtgttcaactgatccttccccaccatcttcagatctgttcctctggagcttgactggggggtggggatggcaagtccatggtgtgtgttagggacccagggcattgggggaagggaggcgaaggcctgaggttttccatcttcattctcttttgttattaggagaaggtgaggcatgggccaatcccattcctgccttccagtgccccaccacccttctgatcttaggggttggatgggtcatctgtccttggtcagaattttctcaccctagtactcctactggcctgaccagggctgactgggtattctaatgaggagctgggaagtggggtgacatagctgaccttagtatcaacccccctcttctccaactcttgttttctagtccaggatatgctaaaggacgaagattttctattgtttccaggccctcagaccatccttgctgtcccttcaccctccatgcccctgccatcctcactcacttctcataaatggatctgggggttagagtggaggaaataaaatcctgaagtggttgtcagtgcttgtgggatgcagtggtcttcaggattctccccgcattattatgtagttgttcagaagctgttgctactgcgtctctctgtctgcagggggcacttgttcctgaggtcctcgcctgggtcctgacttctgtagtttctgtgaagacgtggctgtcctgtgggctcctgtgtgtgctggctgcgccctgagctccgagacagctgcccataacctgctaaggtcagggcccagggccccccacagcatggctgagggaccccttcccagtagggctgtcccaagccccactccatggggccaggtttcctggccacttttgttgatagcagatggatcaatattagtaaccccatccaagattgaactgtgaaagagaggttccaggggtatctccctcagtgccagttacttagtgatgtgttacccaggatgcagcaggtgtgtgcaggtatcttgctctctaggcctgtgtgtgtgtgtgagtgtgtgtgtatatgggtgtgggtgtgtttgtgtgtggtggttgtggggggggtgttggaggttctatttcatttaaaaatgtattcatttccctggccccacagatgcttccctccatactttttatttgctctgtttcctcagatttattttgtcttgccccattgcctctccttccttgaactctttccttttcaatctcaactcattcactgctgttgctcatttgcccttttccatgtattttttcctacttaggattttccactctatctttgtggttcatgaggactttgcctcttctcctgcctcattccctgactttctctagttagatgtcagtcctaaataggttttcctcacttcaggcctcacccctcaccttgtttttttgggggctccagggaccaatctggggctggaaatgttaggaggttgccttggtgctgccccagatctgtccagcagggggcagtaagtgatcttggtagtatccctggctgctaagcccttggcaggggtggtcctttctacattcccattcacttaacagctcttttgggattgggtgtttcattccatttctgcccactccctctcctctcctctctggtaggtttaattttatgctttccctgattccagctttctgcttcctgaggactcccgctccccccaccccaaagtttgtctgtggtgttatagtggtaactgcagttcctcctctggaatgtagactgtatatgtttaataactcaccttctctatccttgctcaaaatgtgggataacgcgatgactgtgaccctggttggaaattaaacttgttttatgcaaaaaaaaaaggggggcggcaaaaaatcccgaggggccaagtaggtaccgttttgcaatggcccaa

SEQ ID NO: 320310 - DNA, 3648 bp, Homo sapiens
gagctgtagtcgctagcctaagccagagccacagcaacgtgggacccgaaatgcttctgtgacctcctccacagctcagagcaatgccagacccttaacccacagagcaaggccagggatggaacctgcgtcctcatggatactagtcagattcgtttccgctgagccacaaggggaactccaggaatgccgcatgtccgcatgttcgcttaagcggaacctgcggggcagaggcggcggccgcagcggcgcagctgatagcaggaacaggatcaagtcttccataccagggaccaggccaaaaccagactgccactgcccctacttgggccccactgtccccagaaagcagctgctgtgatcatgggcaatatctttggaaaccttctcaagagcctgattgggaagaaggagatgcgcatcctgatggtgggcctggatgccgcaggaaagaccaccatcctatacaagctgaaactgggggagatcgtcaccaccatccctaccattgggttcaatgtggagacagtggagtataagaacatcagctttacagtgtgggatgtgggtggccaggacaagattcgacccctctggagacactacttccagaacacccaagggttgatatttgtggtcgacagcaatgatcgggagcgagtaaatgaggcccgggaagagctgatgagaatgctggcggaggacgagctccgggatgctgtactccttgtctttgcaaacaaacaggatctgcctaatgctatgaacgctgctgagatcacagacaagctgggcctgcattcccttcgtcaccgtaactggtacattcaggccacctgtgccaccagcggggacgggctgtacgaaggcctggactggctggccaatcagctcaaaaacaagaagtgaaagccagacagccctaacaaagcaccccacccacccctgacatacctactgtcaccctgccccagtcctaccccttcctctccatgcaagtgtggccagggccctgggtatcatgtccacatgcccagcaagagccttgcctcccctgcctcccctcctttttcctgtccacctatatgaccaatccctaattgctgtcctgatgatgagtcattccaatttactggatttaaaacaaaaagttgttacggtttcatggggtggcccctctctctctctcacctctgggtttcgggaggtcgagtggggtattctctttgtttggcagtggttgctgtcctcttggcatctgagtcctttccctgtccccacaagcccttctactccctgtttgcctttcctttgccaccctctccctgttttacatggaaattgcacgggcctctctgtgtttgcgtgcatgtgtgcgcctgtatatacatgtatagagagatatatttgtgggggccggggggagcggggagggggtggagtgaagctcagggcttgcagccaggacactgcccactggagcctgtcatctgccccttccgtgttggtgagattaagggaagaaggtgggagggcattagtcaagccggactgccccagtctttgactggttaccctcctctctgcaggtaggtttttctggatgataggacagatgatggattcttcaccaccattttccttgtactcttctctccacccttcttagggctggaggatggcatttatctctagatgactgttcccaaggagatgccactctgctctgccttactgttgggaaggagagaggaacccactcactcttatcagcttagagtgttcaactgatccttccccaccatcttcagatctgttcctctggagcttgactggggggtggggatggcaagtccatggtgtgtgttagggacccagggcattgggggaagggaggcgaaggcctgaggttttccatcttcattctcttttgttattaggagaaggtgaggcatgggccaatcccattcctgccttccagtgccccaccacccttctgatcttaggggttggatgggtcatctgtccttggtcagaattttctcaccctagtactcctactggcctgaccagggctgactgggtattctaatgaggagctgggaagtggggtgacatagctgaccttagtatcaacccccctcttctccaactcttgttttctagtccaggatatgctaaaggacgaagattttctattgtttccaggccctcagaccatccttgctgtcccttcaccctccatgcccctgccatcctcactcacttctcataaatggatctgggggttagagtggaggaaataaaatcctgaagtggttgtcagtgcttgtgggatgcagtggtcttcaggattctccccgcattattatgtagttgttcagaagctgttgctactgcgtctctctgtctgcagggggcacttgttcctgaggtcctcgcctgggtcctgacttctgtagtttctgtgaagacgtggctgtcctgtgggctcctgtgtgtgctggctgcgccctgagctccgagacagctgcccataacctgctaaggtcagggcccagggccccccacagcatggctgagggaccccttcccagtagggctgtcccaagccccactccatggggccaggtttcctggccacttttgttgatagcagatggatcaatattagtaaccccatccaagattgaactgtgaaagagaggttccaggggtatctccctcagtgccagttacttagtgatgtgttacccaggatgcagcaggtgtgtgcaggtatcttgctctctaggcctgtgtgtgtgtgtgagtgtgtgtgtatatgggtgtgggtgtgtttgtgtgtggtggttgtggggggggtgttggaggttctatttcatttaaaaatgtattcatttccctggccccacagatgcttccctccatactttttatttgctctgtttcctcagatttattttgtcttgccccattgcctctccttccttgaactctttccttttcaatctcaactcattcactgctgttgctcatttgcccttttccatgtattttttcctacttaggattttccactctatctttgtggttcatgaggactttgcctcttctcctgcctcattccctgactttctctagttagatgtcagtcctaaataggttttcctcacttcaggcctcacccctcaccttgtttttttgggggctccagggaccaatctggggctggaaatgttaggaggttgccttggtgctgccccagatctgtccagcagggggcagtaagtgatcttggtagtatccctggctgctaagcccttggcaggggtggtcctttctacattcccattcacttaacagctcttttgggattgggtgtttcattccatttctgcccactccctctcctctcctctctggtaggtttaattttatgctttccctgattccagctttctgcttcctgaggactcccgctccccccaccccaaagtttgtctgtggtgttatagtggtaactgcagttcctcctctggaatgtagactgtatatgtttaataactcaccttctctatccttgctcaaaatgtgggataacgcgatgactgtgaccctggttggaaattaaacttgttttatgca

SEQ ID NO: 320311 - DNA, 4087 bp, Homo sapiens
tgagctggggaggggaagtaaaggcgtccttaatcgtgtctccacctgccttccaagatgctgccttcgattttgttttgagtaagggatgataagccatcctcttgagaagaaatagtaaggccgtcccggtgagggagaaatgtaacctaaaacctgtctctgctgttgttggattgggtcacccctggtctatggcatgaaagttttattgggaggagatctgctgcaagagtctgattgcttgggtcagtgcaacaggacagaatctagtcgctgcatacctccttccctgtcctcaatcaggtaggtagtaacagtctttgctgctattttgtcttgggcttgttgttggggtaggtgtttccacttgccgtgacttgggacatgggacagtgttatgggacagtggattatcatagcccattggacttgagtttgaaaaacatgtctgtaaaagttcattctaagaaagaaactaatccattaaggttcagcttttcaccgaatgaatgattgaccttggattcagccaggaaaggctcccatgtatcacatattcacatgcgtcctgtttcccagcatagaattattaccttgcatagttagaatttttatagttgtctatcttgcttttccaaagagactagacgcttttcgactgcaggaactggatttcgtctcctcttccacaatgcccatgcaaacagatcaagtcttccataccagggaccaggccaaaaccagactgccactgcccctacttgggccccactgtccccagaaagcagctgctgtgatcatgggcaatatctttggaaaccttctcaagagcctgattgggaagaaggagatgcgcatcctgatggtgggcctggatgccgcaggaaagaccaccatcctatacaagctgaaactgggggagatcgtcaccaccatccctaccattgggttcaatgtggagacagtggagtataagaacatcagctttacagtgtgggatgtgggtggccaggacaagattcgacccctctggagacactacttccagaacacccaagggttgatatttgtggtcgacagcaatgatcgggagcgagtaaatgaggcccgggaagagctgatgagaatgctggcggaggacgagctccgggatgctgtactccttgtctttgcaaacaaacaggatctgcctaatgctatgaacgctgctgagatcacagacaagctgggcctgcattcccttcgtcaccgtaactggtacattcaggccacctgtgccaccagcggggacgggctgtacgaaggcctggactggctggccaatcagctcaaaaacaagaagtgaaagccagacagccctaacaaagcaccccacccacccctgacatacctactgtcaccctgccccagtcctaccccttcctctccatgcaagtgtggccagggccctgggtatcatgtccacatgcccagcaagagccttgcctcccctgcctcccctcctttttcctgtccacctatatgaccaatccctaattgctgtcctgatgatgagtcattccaatttactggatttaaaacaaaaagttgttacggtttcatggggtggcccctctctctctctcacctctgggtttcgggaggtcgagtggggtattctctttgtttggcagtggttgctgtcctcttggcatctgagtcctttccctgtccccacaagcccttctactccctgtttgcctttcctttgccaccctctccctgttttacatggaaattgcacgggcctctctgtgtttgcgtgcatgtgtgcgcctgtatatacatgtatagagagatatatttgtgggggccggggggagcggggagggggtggagtgaagctcagggcttgcagccaggacactgcccactggagcctgtcatctgccccttccgtgttggtgagattaagggaagaaggtgggagggcattagtcaagccggactgccccagtctttgactggttaccctcctctctgcaggtaggtttttctggatgataggacagatgatggattcttcaccaccattttccttgtactcttctctccacccttcttagggctggaggatggcatttatctctagatgactgttcccaaggagatgccactctgctctgccttactgttgggaaggagagaggaacccactcactcttatcagcttagagtgttcaactgatccttccccaccatcttcagatctgttcctctggagcttgactggggggtggggatggcaagtccatggtgtgtgttagggacccagggcattgggggaagggaggcgaaggcctgaggttttccatcttcattctcttttgttattaggagaaggtgaggcatgggccaatcccattcctgccttccagtgccccaccacccttctgatcttaggggttggatgggtcatctgtccttggtcagaattttctcaccctagtactcctactggcctgaccagggctgactgggtattctaatgaggagctgggaagtggggtgacatagctgaccttagtatcaacccccctcttctccaactcttgttttctagtccaggatatgctaaaggacgaagattttctattgtttccaggccctcagaccatccttgctgtcccttcaccctccatgcccctgccatcctcactcacttctcataaatggatctgggggttagagtggaggaaataaaatcctgaagtggttgtcagtgcttgtgggatgcagtggtcttcaggattctccccgcattattatgtagttgttcagaagctgttgctactgcgtctctctgtctgcagggggcacttgttcctgaggtcctcgcctgggtcctgacttctgtagtttctgtgaagacgtggctgtcctgtgggctcctgtgtgtgctggctgcgccctgagctccgagacagctgcccataacctgctaaggtcagggcccagggccccccacagcatggctgagggaccccttcccagtagggctgtcccaagccccactccatggggccaggtttcctggccacttttgttgatagcagatggatcaatattagtaaccccatccaagattgaactgtgaaagagaggttccaggggtatctccctcagtgccagttacttagtgatgtgttacccaggatgcagcaggtgtgtgcaggtatcttgctctctaggcctgtgtgtgtgtgtgagtgtgtgtgtatatgggtgtgggtgtgtttgtgtgtggtggttgtggggggggtgttggaggttctatttcatttaaaaatgtattcatttccctggccccacagatgcttccctccatactttttatttgctctgtttcctcagatttattttgtcttgccccattgcctctccttccttgaactctttccttttcaatctcaactcattcactgctgttgctcatttgcccttttccatgtattttttcctacttaggattttccactctatctttgtggttcatgaggactttgcctcttctcctgcctcattccctgactttctctagttagatgtcagtcctaaataggttttcctcacttcaggcctcacccctcaccttgtttttttgggggctccagggaccaatctggggctggaaatgttaggaggttgccttggtgctgccccagatctgtccagcagggggcagtaagtgatcttggtagtatccctggctgctaagcccttggcaggggtggtcctttctacattcccattcacttaacagctcttttgggattgggtgtttcattccatttctgcccactccctctcctctcctctctggtaggtttaattttatgctttccctgattccagctttctgcttcctgaggactcccgctccccccaccccaaagtttgtctgtggtgttatagtggtaactgcagttcctcctctggaatgtagactgtatatgtttaataactcaccttctctatccttgctcaaaatgtgggataacgcgatgactgtgaccctggttggaaattaaacttgttttatgca

SEQ ID NO: 320312 - DNA, 3569 bp, Homo sapiens
agcggaggtgggaagtatcccgggctgggggtgggggtacgccgcacagctccagtcgccgtcgcggcttccggtgctaggtggagggaaggaaggagggagccggggagtgggccaggcagcagccgggctgaagtcggcttggggagccagagggagcggagcggaacctgcggggcagaggcggcggccgcagcggcgcagctgatagcaggaacaggatcaagtcttccataccagggaccaggccaaaaccagactgccactgcccctacttgggccccactgtccccagaaagcagctgctgtgatcatgggcaatatctttggaaaccttctcaagagcctgattgggaagaaggagatgcgcatcctgatggtgggcctggatgccgcaggaaagaccaccatcctatacaagctgaaactgggggagatcgtcaccaccatccctaccattgggttcaatgtggagacagtggagtataagaacatcagctttacagtgtgggatgtgggtggccaggacaagattcgacccctctggagacactacttccagaacacccaagggttgatatttgtggtcgacagcaatgatcgggagcgagtaaatgaggcccgggaagagctgatgagaatgctggcggaggacgagctccgggatgctgtactccttgtctttgcaaacaaacaggatctgcctaatgctatgaacgctgctgagatcacagacaagctgggcctgcattcccttcgtcaccgtaactggtacattcaggccacctgtgccaccagcggggacgggctgtacgaaggcctggactggctggccaatcagctcaaaaacaagaagtgaaagccagacagccctaacaaagcaccccacccacccctgacatacctactgtcaccctgccccagtcctaccccttcctctccatgcaagtgtggccagggccctgggtatcatgtccacatgcccagcaagagccttgcctcccctgcctcccctcctttttcctgtccacctatatgaccaatccctaattgctgtcctgatgatgagtcattccaatttactggatttaaaacaaaaagttgttacggtttcatggggtggcccctctctctctctcacctctgggtttcgggaggtcgagtggggtattctctttgtttggcagtggttgctgtcctcttggcatctgagtcctttccctgtccccacaagcccttctactccctgtttgcctttcctttgccaccctctccctgttttacatggaaattgcacgggcctctctgtgtttgcgtgcatgtgtgcgcctgtatatacatgtatagagagatatatttgtgggggccggggggagcggggagggggtggagtgaagctcagggcttgcagccaggacactgcccactggagcctgtcatctgccccttccgtgttggtgagattaagggaagaaggtgggagggcattagtcaagccggactgccccagtctttgactggttaccctcctctctgcaggtaggtttttctggatgataggacagatgatggattcttcaccaccattttccttgtactcttctctccacccttcttagggctggaggatggcatttatctctagatgactgttcccaaggagatgccactctgctctgccttactgttgggaaggagagaggaacccactcactcttatcagcttagagtgttcaactgatccttccccaccatcttcagatctgttcctctggagcttgactggggggtggggatggcaagtccatggtgtgtgttagggacccagggcattgggggaagggaggcgaaggcctgaggttttccatcttcattctcttttgttattaggagaaggtgaggcatgggccaatcccattcctgccttccagtgccccaccacccttctgatcttaggggttggatgggtcatctgtccttggtcagaattttctcaccctagtactcctactggcctgaccagggctgactgggtattctaatgaggagctgggaagtggggtgacatagctgaccttagtatcaacccccctcttctccaactcttgttttctagtccaggatatgctaaaggacgaagattttctattgtttccaggccctcagaccatccttgctgtcccttcaccctccatgcccctgccatcctcactcacttctcataaatggatctgggggttagagtggaggaaataaaatcctgaagtggttgtcagtgcttgtgggatgcagtggtcttcaggattctccccgcattattatgtagttgttcagaagctgttgctactgcgtctctctgtctgcagggggcacttgttcctgaggtcctcgcctgggtcctgacttctgtagtttctgtgaagacgtggctgtcctgtgggctcctgtgtgtgctggctgcgccctgagctccgagacagctgcccataacctgctaaggtcagggcccagggccccccacagcatggctgagggaccccttcccagtagggctgtcccaagccccactccatggggccaggtttcctggccacttttgttgatagcagatggatcaatattagtaaccccatccaagattgaactgtgaaagagaggttccaggggtatctccctcagtgccagttacttagtgatgtgttacccaggatgcagcaggtgtgtgcaggtatcttgctctctaggcctgtgtgtgtgtgtgagtgtgtgtgtatatgggtgtgggtgtgtttgtgtgtggtggttgtggggggggtgttggaggttctatttcatttaaaaatgtattcatttccctggccccacagatgcttccctccatactttttatttgctctgtttcctcagatttattttgtcttgccccattgcctctccttccttgaactctttccttttcaatctcaactcattcactgctgttgctcatttgcccttttccatgtattttttcctacttaggattttccactctatctttgtggttcatgaggactttgcctcttctcctgcctcattccctgactttctctagttagatgtcagtcctaaataggttttcctcacttcaggcctcacccctcaccttgtttttttgggggctccagggaccaatctggggctggaaatgttaggaggttgccttggtgctgccccagatctgtccagcagggggcagtaagtgatcttggtagtatccctggctgctaagcccttggcaggggtggtcctttctacattcccattcacttaacagctcttttgggattgggtgtttcattccatttctgcccactccctctcctctcctctctggtaggtttaattttatgctttccctgattccagctttctgcttcctgaggactcccgctccccccaacttgagcccagaggaccactcgagcccacgtaatcgtgactacagctgtacactgccatacctggttattcgcttattattgtaaagatagggtttcgtcacattgcccaggctagtctcaaacccg

SEQ ID NO: 320313 - DNA, 3495 bp, Homo sapiens
  misc_feature (250)..(250): n is a, c, g, or t
  misc_feature (275)..(275): n is a, c, g, or t
gcagctggctgcgcgtcctggaggggcctgccgagcctccacccatgattcaagcctccatgatctgatcttcaattctctgaactatctgcgaggaaccatgactagggactggcaggtacctatggggcctgcgaagggttctgggtgatgagcttctgcccgatgcaatcatgtggtgcgacgtatgtcctggatgatccctgtccatttacgtcctagaagttcgagtgaactgaggtatcattgncacggtcacatgactagggatcagncctgggcctggatgccgcaggaaagaccaccatcctatacaagctgaaactgggggagatcgtcaccaccatccctaccattgggttcaatgtggagacagtggagtataagaacatcagctttacagtgtgggatgtgggtggccaggacaagattcgacccctctggagacactacttccagaacacccaagggttgatatttgtggtcgacagcaatgatcgggagcgagtaaatgaggcccgggaagagctgatgagaatgctggcggaggacgagctccgggatgctgtactccttgtctttgcaaacaaacaggatctgcctaatgctatgaacgctgctgagatcacagacaagctgggcctgcattcccttcgtcaccgtaactggtacattcaggccacctgtgccaccagcggggacgggctgtacgaaggcctggactggctggccaatcagctcaaaaacaagaagtgaaagccagacagccctaacaaagcaccccacccacccctgacatacctactgtcaccctgccccagtcctaccccttcctctccatgcaagtgtggccagggccctgggtatcatgtccacatgcccagcaagagccttgcctcccctgcctcccctcctttttcctgtccacctatatgaccaatccctaattgctgtcctgatgatgagtcattccaatttactggatttaaaacaaaaagttgttacggtttcatggggtggcccctctctctctctcacctctgggtttcgggaggtcgagtggggtattctctttgtttggcagtggttgctgtcctcttggcatctgagtcctttccctgtccccacaagcccttctactccctgtttgcctttcctttgccaccctctccctgttttacatggaaattgcacgggcctctctgtgtttgcgtgcatgtgtgcgcctgtatatacatgtatagagagatatatttgtgggggccggggggagcggggagggggtggagtgaagctcagggcttgcagccaggacactgcccactggagcctgtcatctgccccttccgtgttggtgagattaagggaagaaggtgggagggcattagtcaagccggactgccccagtctttgactggttaccctcctctctgcaggtaggtttttctggatgataggacagatgatggattcttcaccaccattttccttgtactcttctctccacccttcttagggctggaggatggcatttatctctagatgactgttcccaaggagatgccactctgctctgccttactgttgggaaggagagaggaacccactcactcttatcagcttagagtgttcaactgatccttccccaccatcttcagatctgttcctctggagcttgactggggggtggggatggcaagtccatggtgtgtgttagggacccagggcattgggggaagggaggcgaaggcctgaggttttccatcttcattctcttttgttattaggagaaggtgaggcatgggccaatcccattcctgccttccagtgccccaccacccttctgatcttaggggttggatgggtcatctgtccttggtcagaattttctcaccctagtactcctactggcctgaccagggctgactgggtattctaatgaggagctgggaagtggggtgacatagctgaccttagtatcaacccccctcttctccaactcttgttttctagtccaggatatgctaaaggacgaagattttctattgtttccaggccctcagaccatccttgctgtcccttcaccctccatgcccctgccatcctcactcacttctcataaatggatctgggggttagagtggaggaaataaaatcctgaagtggttgtcagtgcttgtgggatgcagtggtcttcaggattctccccgcattattatgtagttgttcagaagctgttgctactgcgtctctctgtctgcagggggcacttgttcctgaggtcctcgcctgggtcctgacttctgtagtttctgtgaagacgtggctgtcctgtgggctcctgtgtgtgctggctgcgccctgagctccgagacagctgcccataacctgctaaggtcagggcccagggccccccacagcatggctgagggaccccttcccagtagggctgtcccaagccccactccatggggccaggtttcctggccacttttgttgatagcagatggatcaatattagtaaccccatccaagattgaactgtgaaagagaggttccaggggtatctccctcagtgccagttacttagtgatgtgttacccaggatgcagcaggtgtgtgcaggtatcttgctctctaggcctgtgtgtgtgtgtgagtgtgtgtgtatatgggtgtgggtgtgtttgtgtgtggtggttgtggggggggtgttggaggttctatttcatttaaaaatgtattcatttccctggccccacagatgcttccctccatactttttatttgctctgtttcctcagatttattttgtcttgccccattgcctctccttccttgaactctttccttttcaatctcaactcattcactgctgttgctcatttgcccttttccatgtattttttcctacttaggattttccactctatctttgtggttcatgaggactttgcctcttctcctgcctcattccctgactttctctagttagatgtcagtcctaaataggttttcctcacttcaggcctcacccctcaccttgtttttttgggggctccagggaccaatctggggctggaaatgttaggaggttgccttggtgctgccccagatctgtccagcagggggcagtaagtgatcttggtagtatccctggctgctaagcccttggcaggggtggtcctttctacattcccattcacttaacagctcttttgggattgggtgtttcattccatttctgcccactccctctcctctcctctctggtaggtttaattttatgctttccctgattccagctttctgcttcctgaggactcccgctccccccaccccaaagtttgtctgtggtgttatagtggtaactgcagttcctcctctggaatgtagactgtatatgtttaataactcaccttctctatccttgctcaaaatgtgggataacgcgatgactgtgaccctggttggaaattaaacttgttttatgca

SEQ ID NO: 320314 - DNA, 3159 bp, Homo sapiens
ttgcctgttttttttccaaaggggttcaatgtggagacagtggagtataagaacatcagctttacagtgtgggatgtgggtggccaggacaagattcgacccctctggagacactacttccagaacacccaagggttgatatttgtggtcgacagcaatgatcgggagcgagtaaatgaggcccgggaagagctgatgagaatgctggcggaggacgagctccgggatgctgtactccttgtctttgcaaacaaacaggatctgcctaatgctatgaacgctgctgagatcacagacaagctgggcctgcattcccttcgtcaccgtaactggtacattcaggccacctgtgccaccagcggggacgggctgtacgaaggcctggactggctggccaatcagctcaaaaacaagaagtgaaagccagacagccctaacaaagcaccccacccacccctgacatacctactgtcaccctgccccagtcctaccccttcctctccatgcaagtgtggccagggccctgggtatcatgtccacatgcccagcaagagccttgcctcccctgcctcccctcctttttcctgtccacctatatgaccaatccctaattgctgtcctgatgatgagtcattccaatttactggatttaaaacaaaaagttgttacggtttcatggggtggcccctctctctctctcacctctgggtttcgggaggtcgagtggggtattctctttgtttggcagtggttgctgtcctcttggcatctgagtcctttccctgtccccacaagcccttctactccctgtttgcctttcctttgccaccctctccctgttttacatggaaattgcacgggcctctctgtgtttgcgtgcatgtgtgcgcctgtatatacatgtatagagagatatatttgtgggggccggggggagcggggagggggtggagtgaagctcagggcttgcagccaggacactgcccactggagcctgtcatctgccccttccgtgttggtgagattaagggaagaaggtgggagggcattagtcaagccggactgccccagtctttgactggttaccctcctctctgcaggtaggtttttctggatgataggacagatgatggattcttcaccaccattttccttgtactcttctctccacccttcttagggctggaggatggcatttatctctagatgactgttcccaaggagatgccactctgctctgccttactgttgggaaggagagaggaacccactcactcttatcagcttagagtgttcaactgatccttccccaccatcttcagatctgttcctctggagcttgactggggggtggggatggcaagtccatggtgtgtgttagggacccagggcattgggggaagggaggcgaaggcctgaggttttccatcttcattctcttttgttattaggagaaggtgaggcatgggccaatcccattcctgccttccagtgccccaccacccttctgatcttaggggttggatgggtcatctgtccttggtcagaattttctcaccctagtactcctactggcctgaccagggctgactgggtattctaatgaggagctgggaagtggggtgacatagctgaccttagtatcaacccccctcttctccaactcttgttttctagtccaggatatgctaaaggacgaagattttctattgtttccaggccctcagaccatccttgctgtcccttcaccctccatgcccctgccatcctcactcacttctcataaatggatctgggggttagagtggaggaaataaaatcctgaagtggttgtcagtgcttgtgggatgcagtggtcttcaggattctccccgcattattatgtagttgttcagaagctgttgctactgcgtctctctgtctgcagggggcacttgttcctgaggtcctcgcctgggtcctgacttctgtagtttctgtgaagacgtggctgtcctgtgggctcctgtgtgtgctggctgcgccctgagctccgagacagctgcccataacctgctaaggtcagggcccagggccccccacagcatggctgagggaccccttcccagtagggctgtcccaagccccactccatggggccaggtttcctggccacttttgttgatagcagatggatcaatattagtaaccccatccaagattgaactgtgaaagagaggttccaggggtatctccctcagtgccagttacttagtgatgtgttacccaggatgcagcaggtgtgtgcaggtatcttgctctctaggcctgtgtgtgtgtgtgagtgtgtgtgtatatgggtgtgggtgtgtttgtgtgtggtggttgtggggggggtgttggaggttctatttcatttaaaaatgtattcatttccctggccccacagatgcttccctccatactttttatttgctctgtttcctcagatttattttgtcttgccccattgcctctccttccttgaactctttccttttcaatctcaactcattcactgctgttgctcatttgcccttttccatgtattttttcctacttaggattttccactctatctttgtggttcatgaggactttgcctcttctcctgcctcattccctgactttctctagttagatgtcagtcctaaataggttttcctcacttcaggcctcacccctcaccttgtttttttgggggctccagggaccaatctggggctggaaatgttaggaggttgccttggtgctgccccagatctgtccagcagggggcagtaagtgatcttggtagtatccctggctgctaagcccttggcaggggtggtcctttctacattcccattcacttaacagctcttttgggattgggtgtttcattccatttctgcccactccctctcctctcctctctggtaggtttaattttatgctttccctgattccagctttctgcttcctgaggactcccgctccccccaccccaaagtttgtctgtggtgttatagtggtaactgcagttcctcctctggaatgtagactgtatatgtttaataactcaccttctctatccttgctcaaaatgtgggataacgcgatgactgtgaccctggttggaaattaaacttgttttatgca

SEQ ID NO: 320315 - DNA, 3237 bp, Homo sapiens
gtgcagatcttggtggtaggttgaggccatctcctgggccgcctggcggccatcgtggctaaacaggtactgctgggccggaaggtggtggtcgtacgctgtgaaggcatcaacatttctggcaatttctacagaaacaagttgaagtacctggctttcctccgcaagccggtgcagatctgggtgctaggtggagggaaggaaggagggagccggggagtgggccaggcagccaatgatcgggagcgagtaaatgaggcccgggaagagctgatgagaatgctggcggaggacgagctccgggatgctgtactccttgtctttgcaaacaaacaggatctgcctaatgctatgaacgctgctgagatcacagacaagctgggcctgcattcccttcgtcaccgtaactggtacattcaggccacctgtgccaccagcggggacgggctgtacgaaggcctggactggctggccaatcagctcaaaaacaagaagtgaaagccagacagccctaacaaagcaccccacccacccctgacatacctactgtcaccctgccccagtcctaccccttcctctccatgcaagtgtggccagggccctgggtatcatgtccacatgcccagcaagagccttgcctcccctgcctcccctcctttttcctgtccacctatatgaccaatccctaattgctgtcctgatgatgagtcattccaatttactggatttaaaacaaaaagttgttacggtttcatggggtggcccctctctctctctcacctctgggtttcgggaggtcgagtggggtattctctttgtttggcagtggttgctgtcctcttggcatctgagtcctttccctgtccccacaagcccttctactccctgtttgcctttcctttgccaccctctccctgttttacatggaaattgcacgggcctctctgtgtttgcgtgcatgtgtgcgcctgtatatacatgtatagagagatatatttgtgggggccggggggagcggggagggggtggagtgaagctcagggcttgcagccaggacactgcccactggagcctgtcatctgccccttccgtgttggtgagattaagggaagaaggtgggagggcattagtcaagccggactgccccagtctttgactggttaccctcctctctgcaggtaggtttttctggatgataggacagatgatggattcttcaccaccattttccttgtactcttctctccacccttcttagggctggaggatggcatttatctctagatgactgttcccaaggagatgccactctgctctgccttactgttgggaaggagagaggaacccactcactcttatcagcttagagtgttcaactgatccttccccaccatcttcagatctgttcctctggagcttgactggggggtggggatggcaagtccatggtgtgtgttagggacccagggcattgggggaagggaggcgaaggcctgaggttttccatcttcattctcttttgttattaggagaaggtgaggcatgggccaatcccattcctgccttccagtgccccaccacccttctgatcttaggggttggatgggtcatctgtccttggtcagaattttctcaccctagtactcctactggcctgaccagggctgactgggtattctaatgaggagctgggaagtggggtgacatagctgaccttagtatcaacccccctcttctccaactcttgttttctagtccaggatatgctaaaggacgaagattttctattgtttccaggccctcagaccatccttgctgtcccttcaccctccatgcccctgccatcctcactcacttctcataaatggatctgggggttagagtggaggaaataaaatcctgaagtggttgtcagtgcttgtgggatgcagtggtcttcaggattctccccgcattattatgtagttgttcagaagctgttgctactgcgtctctctgtctgcagggggcacttgttcctgaggtcctcgcctgggtcctgacttctgtagtttctgtgaagacgtggctgtcctgtgggctcctgtgtgtgctggctgcgccctgagctccgagacagctgcccataacctgctaaggtcagggcccagggccccccacagcatggctgagggaccccttcccagtagggctgtcccaagccccactccatggggccaggtttcctggccacttttgttgatagcagatggatcaatattagtaaccccatccaagattgaactgtgaaagagaggttccaggggtatctccctcagtgccagttacttagtgatgtgttacccaggatgcagcaggtgtgtgcaggtatcttgctctctaggcctgtgtgtgtgtgtgagtgtgtgtgtatatgggtgtgggtgtgtttgtgtgtggtggttgtggggggggtgttggaggttctatttcatttaaaaatgtattcatttccctggccccacagatgcttccctccatactttttatttgctctgtttcctcagatttattttgtcttgccccattgcctctccttccttgaactctttccttttcaatctcaactcattcactgctgttgctcatttgcccttttccatgtattttttcctacttaggattttccactctatctttgtggttcatgaggactttgcctcttctcctgcctcattccctgactttctctagttagatgtcagtcctaaataggttttcctcacttcaggcctcacccctcaccttgtttttttgggggctccagggaccaatctggggctggaaatgttaggaggttgccttggtgctgccccagatctgtccagcagggggcagtaagtgatcttggtagtatccctggctgctaagcccttggcaggggtggtcctttctacattcccattcacttaacagctcttttgggattgggtgtttcattccatttctgcccactccctctcctctcctctctggtaggtttaattttatgctttccctgattccagctttctgcttcctgaggactcccgctccccccaccccaaagtttgtctgtggtgttatagtggtaactgcagttcctcctctggaatgtagactgtatatgtttaataactcaccttctctatccttgctcaaaatgtgggataacgcgatgactgtgaccctggttggaaattaaacttgttttatgca

SEQ ID NO: 320316 - DNA, 3022 bp, Homo sapiens
agcggaggtgggaagtatcccgggctgggggtgggggtacgccgcacagctccagtcgccgtcgcggcttccggtgctaggtggagggaaggaaggagggagccggggagtgggccaggcagcagccgggctgaagtcggcttggggagccagagggagcggagcggaacctgcggggcagaggcggcggccgcagcggcgcagctgatagcaggaacaggatcaagtcttccataccagggaccaggccaaaaccagactgccactgcccctacttgggccccactgtccccagaaagcagctgctgtgatcatgggcaatatctttggaaaccttctcaagagcctgattgggaagaaggagatgcgcatcctgatggtgggcctggatgccgcaggaaagaccaccatcctatacaagctgaaactgggggagatcgtcaccaccatccctaccattgggttcaatgtggagacagtggagtataagaacatcagctttacagtgtgggatgtgggtggccaggacaagattcgacccctctggagacactacttccagaacacccaagggttgatatttgtggtcgacagcaatgatcgggagcgagtaaatgaggcccgggaagagctgatgagaatgctggcggaggacgagctccgggatgctgtactccttgtctttgcaaacaaacaggatctgcctaatgctatgaacgctgctgagatcacagacaagctgggcctgcattcccttcgtcaccgtaactggtacattcaggccacctgtgccaccagcggggacgggctgtacgaaggcctggactggctggccaatcagctcaaaaacaagaagtgaaagccagacagccctaacaaagcaccccacccacccctgacatacctactgtcaccctgccccagtcctaccccttcctctccatgcaagtgtggccagggccctgggtatcatgtccacatgcccagcaagagccttgcctcccctgcctcccctcctttttcctgtccacctatatgaccaatccctaattgctgtcctgatgatgagtcattccaatttactggatttaaaacaaaaagttgttacggtttcatggggtggcccctctctctctctcacctctgggtttcgggaggtcgagtggggtattctctttgtttggcagtggttgctgtcctcttggcatctgagtcctttccctgtccccacaagcccttctactccctgtttgcctttcctttgccaccctctccctgttttacatggaaattgcacgggcctctctgtgtttgcgtgcatgtgtgcgcctgtatatacatgtatagagagatatatttgtgggggccggggggagcggggagggggtggagtgaagctcagggcttgcagccaggacactgcccactggagcctgtcatctgccccttccgtgttggtgagattaagggaagaaggtgggagggcattagtcaagccggactgccccagtctttgactggttaccctcctctctgcaggtaggtttttctggatgataggacagatgatggattcttcaccaccattttccttgtactcttctctccacccttcttagggctggaggatggcatttatctctagatgactgttcccaaggagatgccactctgctctgccttactgttgggaaggagagaggaacccactcactcttatcagcttagagtgttcaactgatccttccccaccatcttcagatctgttcctctggagcttgactggggggtggggatggcaagtccatggtgtgtgttagggacccagggcattgggggaagggaggcgaaggcctgaggttttccatcttcattctcttttgttattaggagaaggtgaggcatgggccaatcccattcctgccttccagtgccccaccacccttctgatcttaggggttggatgggtcatctgtccttggtcagaattttctcaccctagtactcctactggcctgaccagggctgactgggtattctaatgaggagctgggaagtggggtgacatagctgaccttagtatcaacccccctcttctccaactcttgttttctagtccaggatatgctaaaggacgaagattttctattgtttccaggccctcagaccatccttgctgtcccttcaccctccatgcccctgccatcctcactcacttctcataaatggatctgggggttagagtggaggaaataaaatcctgaagtggttgtcagtgcttgtgggatgcagtggtcttcaggattctccccgcattattatgtagttgttcagaagctgttgctactgcgtctctctgtctgcagggggcacttgttcctgaggtcctcgcctgggtcctgacttctgtagtttctgtgaagacgtggctgtcctgtgggctcctgtgtgtgctggctgcgccctgagctccgagacagctgcccataacctgctaaggtcagggcccagggccccccacagcatggctgagggaccccttcccagtagggctgtcccaagccccactccatggggccaggtttcctggccacttttgttgatagcagatggatcaatattagtaaccccatccaagattgaactgtgaaagagaggttccaggggtatctccctcagtgccagttacttagtgatgtgttacccaggatgcagcaggtgtgtgcaggtatcttgctctctaggcctgtgtgtgtgtgtgagtgtgtgtgtatatgggtgtgggtgtgtttgtgtgtggtggttgtggggggggtgttggaggttctatttcatttaaaaatgtattcatttccctggccccacccccaaagtttgtctgtggtgttatagtggtaactgcagttcctcctctggaatgtagactgtatatgtttaataactcaccttctctatccttgctcaaaatgtgggataacgcgatgactgtgaccctggttggaaattaaacttgttttatgca

SEQ ID NO: 320317 - DNA, 2870 bp, Homo sapiens
gtgcagatcttggtggtaggttgaggccatctcctgggccgcctggcggccatcgtggctaaacaggtactgctgggccggaaggtggtggtcgtacgctgtgaaggcatcaacatttctggcaatttctacagaaacaagttgaagtacctggctttcctccgcaagccggtgcagatctgggtgctaggtggagggaaggaaggagggagccggggagtgggccaggcagccctgggtatcatgtccacatgcccagcaagagccttgcctcccctgcctcccctcctttttcctgtccacctatatgaccaatccctaattgctgtcctgatgatgagtcattccaatttactggatttaaaacaaaaagttgttacggtttcatggggtggcccctctctctctctcacctctgggtttcgggaggtcgagtggggtattctctttgtttggcagtggttgctgtcctcttggcatctgagtcctttccctgtccccacaagcccttctactccctgtttgcctttcctttgccaccctctccctgttttacatggaaattgcacgggcctctctgtgtttgcgtgcatgtgtgcgcctgtatatacatgtatagagagatatatttgtgggggccggggggagcggggagggggtggagtgaagctcagggcttgcagccaggacactgcccactggagcctgtcatctgccccttccgtgttggtgagattaagggaagaaggtgggagggcattagtcaagccggactgccccagtctttgactggttaccctcctctctgcaggtaggtttttctggatgataggacagatgatggattcttcaccaccattttccttgtactcttctctccacccttcttagggctggaggatggcatttatctctagatgactgttcccaaggagatgccactctgctctgccttactgttgggaaggagagaggaacccactcactcttatcagcttagagtgttcaactgatccttccccaccatcttcagatctgttcctctggagcttgactggggggtggggatggcaagtccatggtgtgtgttagggacccagggcattgggggaagggaggcgaaggcctgaggttttccatcttcattctcttttgttattaggagaaggtgaggcatgggccaatcccattcctgccttccagtgccccaccacccttctgatcttaggggttggatgggtcatctgtccttggtcagaattttctcaccctagtactcctactggcctgaccagggctgactgggtattctaatgaggagctgggaagtggggtgacatagctgaccttagtatcaacccccctcttctccaactcttgttttctagtccaggatatgctaaaggacgaagattttctattgtttccaggccctcagaccatccttgctgtcccttcaccctccatgcccctgccatcctcactcacttctcataaatggatctgggggttagagtggaggaaataaaatcctgaagtggttgtcagtgcttgtgggatgcagtggtcttcaggattctccccgcattattatgtagttgttcagaagctgttgctactgcgtctctctgtctgcagggggcacttgttcctgaggtcctcgcctgggtcctgacttctgtagtttctgtgaagacgtggctgtcctgtgggctcctgtgtgtgctggctgcgccctgagctccgagacagctgcccataacctgctaaggtcagggcccagggccccccacagcatggctgagggaccccttcccagtagggctgtcccaagccccactccatggggccaggtttcctggccacttttgttgatagcagatggatcaatattagtaaccccatccaagattgaactgtgaaagagaggttccaggggtatctccctcagtgccagttacttagtgatgtgttacccaggatgcagcaggtgtgtgcaggtatcttgctctctaggcctgtgtgtgtgtgtgagtgtgtgtgtatatgggtgtgggtgtgtttgtgtgtggtggttgtggggggggtgttggaggttctatttcatttaaaaatgtattcatttccctggccccacagatgcttccctccatactttttatttgctctgtttcctcagatttattttgtcttgccccattgcctctccttccttgaactctttccttttcaatctcaactcattcactgctgttgctcatttgcccttttccatgtattttttcctacttaggattttccactctatctttgtggttcatgaggactttgcctcttctcctgcctcattccctgactttctctagttagatgtcagtcctaaataggttttcctcacttcaggcctcacccctcaccttgtttttttgggggctccagggaccaatctggggctggaaatgttaggaggttgccttggtgctgccccagatctgtccagcagggggcagtaagtgatcttggtagtatccctggctgctaagcccttggcaggggtggtcctttctacattcccattcacttaacagctcttttgggattgggtgtttcattccatttctgcccactccctctcctctcctctctggtaggtttaattttatgctttccctgattccagctttctgcttcctgaggactcccgctccccccaccccaaagtttgtctgtggtgttatagtggtaactgcagttcctcctctggaatgtagactgtatatgtttaataactcaccttctctatccttgctcaaaatgtgggataacgcgatgactgtgaccctggttggaaattaaacttgttttatgca

SEQ ID NO: 320318 - DNA, 2872 bp, Homo sapiens
agcggaggtgggaagtatcccgggctgggggtgggggtacgccgcacagctccagtcgccgtcgcggcttccggtgctaggtggagggaaggaaggagggagccggggagtgggccaggcagcagccgggctgaagtcggcttggggagccagagggagcggagcggaacctgcggggcagaggcggcggccgcagcggcgcagctgatagcaggaacaggatcaagtcttccataccagggaccaggccaaaaccagactgccactgcccctacttgggccccactgtccccagaaagcagctgctgtgatcatgggcaatatctttggaaaccttctcaagagcctgattgggaagaaggagatgcgcatcctgatggtgggcctggatgccgcaggaaagaccaccatcctatacaagctgaaactgggggagatcgtcaccaccatccctaccattgtggttgctgtcctcttggcatctgagtcctttccctgtccccacaagcccttctactccctgtttgcctttcctttgccaccctctccctgttttacatggaaattgcacgggcctctctgtgtttgcgtgcatgtgtgcgcctgtatatacatgtatagagagatatatttgtgggggccggggggagcggggagggggtggagtgaagctcagggcttgcagccaggacactgcccactggagcctgtcatctgccccttccgtgttggtgagattaagggaagaaggtgggagggcattagtcaagccggactgccccagtctttgactggttaccctcctctctgcaggtaggtttttctggatgataggacagatgatggattcttcaccaccattttccttgtactcttctctccacccttcttagggctggaggatggcatttatctctagatgactgttcccaaggagatgccactctgctctgccttactgttgggaaggagagaggaacccactcactcttatcagcttagagtgttcaactgatccttccccaccatcttcagatctgttcctctggagcttgactggggggtggggatggcaagtccatggtgtgtgttagggacccagggcattgggggaagggaggcgaaggcctgaggttttccatcttcattctcttttgttattaggagaaggtgaggcatgggccaatcccattcctgccttccagtgccccaccacccttctgatcttaggggttggatgggtcatctgtccttggtcagaattttctcaccctagtactcctactggcctgaccagggctgactgggtattctaatgaggagctgggaagtggggtgacatagctgaccttagtatcaacccccctcttctccaactcttgttttctagtccaggatatgctaaaggacgaagattttctattgtttccaggccctcagaccatccttgctgtcccttcaccctccatgcccctgccatcctcactcacttctcataaatggatctgggggttagagtggaggaaataaaatcctgaagtggttgtcagtgcttgtgggatgcagtggtcttcaggattctccccgcattattatgtagttgttcagaagctgttgctactgcgtctctctgtctgcagggggcacttgttcctgaggtcctcgcctgggtcctgacttctgtagtttctgtgaagacgtggctgtcctgtgggctcctgtgtgtgctggctgcgccctgagctccgagacagctgcccataacctgctaaggtcagggcccagggccccccacagcatggctgagggaccccttcccagtagggctgtcccaagccccactccatggggccaggtttcctggccacttttgttgatagcagatggatcaatattagtaaccccatccaagattgaactgtgaaagagaggttccaggggtatctccctcagtgccagttacttagtgatgtgttacccaggatgcagcaggtgtgtgcaggtatcttgctctctaggcctgtgtgtgtgtgtgagtgtgtgtgtatatgggtgtgggtgtgtttgtgtgtggtggttgtggggggggtgttggaggttctatttcatttaaaaatgtattcatttccctggccccacagatgcttccctccatactttttatttgctctgtttcctcagatttattttgtcttgccccattgcctctccttccttgaactctttccttttcaatctcaactcattcactgctgttgctcatttgcccttttccatgtattttttcctacttaggattttccactctatctttgtggttcatgaggactttgcctcttctcctgcctcattccctgactttctctagttagatgtcagtcctaaataggttttcctcacttcaggcctcacccctcaccttgtttttttgggggctccagggaccaatctggggctggaaatgttaggaggttgccttggtgctgccccagatctgtccagcagggggcagtaagtgatcttggtagtatccctggctgctaagcccttggcaggggtggtcctttctacattcccattcacttaacagctcttttgggattgggtgtttcattccatttctgcccactccctctcctctcctctctggtaggtttaattttatgctttccctgattccagctttctgcttcctgaggactcccgctccccccaccccaaagtttgtctgtggtgttatagtggtaactgcagttcctcctctggaatgtagactgtatatgtttaataactcaccttctctatccttgctcaaaatgtgggataacgcgatgactgtgaccctggttggaaattaaacttgttttatgca

SEQ ID NO: 320319 - DNA, 1050 bp, Homo sapiens
agcggaggtgggaagtatcccgggctgggggtgggggtacgccgcacagctccagtcgccgtcgcggcttccggtgctaggtggagggaaggaaggagggagccggggagtgggccaggcagcagccgggctgaagtcggcttggggagccagagggagcggagcggaacctgcggggcagaggcggcggccgcagcggcgcagctgatagcaggaacaggatcaagtcttccataccagggaccaggccaaaaccagactgccactgcccctacttgggccccactgtccccagaaagcagctgctgtgatcatgggcaatatctttggaaaccttctcaagagcctgattgggaagaaggagatgcgcatcctgatggtgggcctggatgccgcaggaaagaccaccatcctatacaagctgaaactgggggagatcgtcaccaccatccctaccattgggttcaatgtggagacagtggagtataagaacatcagctttacagtgtgggatgtgggtggccaggacaagattcgacccctctggagacactacttccagaacacccaagggttgatatttgtggtcgacagcaatgatcgggagcgagtaaatgaggcccgggaagagctgatgagaatgctggcggaggacgagctccgggatgctgtactccttgtctttgcaaacaaacaggatctgcctaatgctatgaacgctgctgagatcacagacaagctgggcctgcattcccttcgtcaccgtaactggtacattcaggccacctgtgccaccagcggggacgggctgtacgaaggcctggactggctggccaatcagctcaaaaacaagaagtgaaagccagacagccctaacaaagcaccccacccacccccaaagtttgtctgtggtgttatagtggtaactgcagttcctcctctggaatgtagactgtatatgtttaataactcaccttctctatccttgctcaaaatgtgggataacgcgatgactgtgaccctggttggaaattaaacttgttttatgca

SEQ ID NO: 320320 - DNA, 944 bp, Homo sapiens
agacattcaagagctaatggtcacgtcagaggaattaacagaagacaacttgatgaagaagagtgcttccaaaccagtgccagacggtcaggaagcagcacgccgaagcagtgccagaaaacaaatctactttagacaatctggcagaagggttacaattatccaagagtgcttttgatttatttttaggacacaaaccctgctatgacacaggcactaaaattaaagccaacggtggaagaagaattggcgccatggtatagaaacatttttagagaaatgaaaaagcaaaaaagttggacagaaattattatttctgtaaagttacacctcatttgcccttttccatgtattttttcctacttaggattttccactctatctttgtggttcatgaggactttgcctcttctcctgcctcattccctgactttctctagttagatgtcagtcctaaataggttttcctcacttcaggcctcacccctcaccttgtttttttgggggctccagggaccaatctggggctggaaatgttaggaggttgccttggtgctgccccagatctgtccagcagggggcagtaagtgatcttggtagtatccctggctgctaagcccttggcaggggtggtcctttctacattcccattcacttaacagctcttttgggattgggtgtttcattccatttctgcccactccctctcctctcctctctggtaggtttaattttatgctttccctgattccagctttctgcttcctgaggactcccgctccccccaccccaaagtttgtctgtggtgttatagtggtaactgcagttcctcctctggaatgtagactgtatatgtttaataactcaccttctctatccttgctcaaaatgtgggataacgcgatgactgtgaccctggttggaaattaaacttgttttatgca

SEQ ID NO: 320321 - DNA, 1692 bp, Homo sapiens
ctaaggcgccatcagccgcccgggagatatccgccgggggagaatagggttgcaccatcccagaagctgctgttagctcgccggtcctcggcacgccgcccgttcgcccctgcgctgtccgcccttcccctagcgttacttccggtccctcgctgagggggttcgtgcggctcccaggaggcgtgaaccgcggaccatgagcgtgggcttcatcggggccggccagctggcctatgctctggcgcggggcttcacggccgcaggcatcctgtcggctcacaagataatagccagctccccagaaatgaacctgcccacggtgtccgcgctcaggaagatgggtgtgaacctgacacgcagcaacaaggagacggtgaagcacagcgacgtcctgtttctggctgtgaagccacatatcatccccttcatcctggatgagattggggccgacgtgcaagccagacacatcgtggtctcctgtgcggctggtgtcaccatcagctctgtggagaagaagctgatggcattccagccagcccccaaagtgattcgctgcatgaccaacacacctgtggtagtgcaggaaggcgctacagtgtacgccacgggcacccatgccctggtggaggatgggcagctcctggagcagctcatgagcagcgtgggcttctgcactgaggtggaagaggacctcatcgatgccgtcacggggctcagtggcagcgggcctgcctatgcattcatggctctggacgcattggctgatggtggggtgaagatgggtttgccacggcgcctggcaatccaactcggggcccaggctttgctgggagctgccaagatgctgctggactcggagcagcatccatgccagcttaaggacaatgtctgctcccctgggggagccaccatccacgccctgcactttctagagagtgggggcttccgctctctgctcatcaatgcagttgaggcctcctgtatccgaacacgagagctacagtccatggccgaccaagaaaagatctccccagctgcccttaagaagaccctcttagacagagtgaagctggaatcccccacagtctccacactgaccccctccagcccagggaagctcctcacaagaagcctggccctgggaggcaagaaggactaaggcagcatctgtcccctctgtgattcagagcccttagttgagagccctcctcagctgtgcaaggagaaagcatgcttaggaagttttcaggtccttgtgataaaacctccttaaatctgttcagaccaagcaatgcgagcttcctctcctgtcccatgttggaagttgctctgaaggggtggtagatgctggaagccagacacaaccctgcgtacgctgctcagttggtggagactggggctgggactggagtcagcccagctgggaggaggggctggggaggatctgcagctgaagcccgaggcagggttggtgtgatgccaaggcaaagtggtgaggagaaaacaggaaacgggctttctctgaattggtaaatgggaaagaagtgagcaacttaagattgtcacaattaatcacaagtgtacaggattagactgggtttatatttaactcttgcttcataggtgtaccatttaaagagtgttatttaatgctaagtttaactgctttaataaagtttatttttaaatatc

SEQ ID NO: 320322 - DNA, 1637 bp, Homo sapiens
ctaaggcgccatcagccgcccgggagatatccgccgggggagaatagggttgcaccatcccagaagctgctgttagctcgccggtcctcggcacgccgcccgttcgcccctgcgctgtccgcccttcccctagcgttacttccggtccctcgctgagggggttcgtgcggctcccaggaggcgtgaaccgcggaccatgagcgtgggcttcatcggggccggccagctggcctatgctctggcgcggggcttcacggccgcaggcatcctgtcggctcacaagataatagccagctccccagaaatgaacctgcccacggtgtccgcgctcaggaagatgggtgtgaacctgacacgcagcaacaaggagacggtgaagcacagcgacgtcctgtttctggctgtgaagccacatatcatccccttcatcctggatgagattggggccgacgtgcaagccagacacatcgtggtctcctgtgcggctggtgtcaccatcagctctgtggagaagaagctgatggcattccagccagcccccaaagtgattcgctgcatgaccaacacacctgtggtagtgcaggaaggcgctacagtgtacgccacgggcacccatgccctggtggaggatgggcagctcctggagcagctcatgagcagcgtgggcttctgcactgaggtggaagaggacctcatcgatgccgtcacggggctcagtggcagcgggcctgcctatgcattcatggctctggacgcattggctgatggtggggtgaagatgggtttgccacggcgcctggcaatccaactcggggcccaggctttgctgggagctgccaagatgctgctggactcggagcagcatccatgccagcttaaggacaatgtctgctcccctgggggagccaccatccacgccctgcactttctagagagtgggggcttccgctctctgctcatcaatgcagttgaggcctcctgtatccgaacacgagagctacagtccatggccgaccaagaaaagatctccccagctgcccttaagaagaccctcttagacagagtgaagctggaatcccccacagtctccacactgaccccctccagcccagggaagctcctcacaagaagcctggccctgggaggcaagaaggactaaggcagcatctgtcccctctgtgattcagagcccttagttgagagcccctgccgcccctgccacccccctgccccgctcccaccattgcccctcctcagctgtgcaaggagaaagcatgcttaggaagttttcaggtccttgtgataaaacctccttaaatgctgctcagttggtggagactggggctgggactggagtcagcccagctgggaggaggggctggggaggatctgcagctgaagcccgaggcagggttggtgtgatgccaaggcaaagtggtgaggagaaaacaggaaacgggctttctctgaattggtaaatgggaaagaagtgagcaacttaagattgtcacaattaatcacaagtgtacaggattagactgggtttatatttaactcttgcttcataggtgtaccatttaaagagtgttatttaatgctaagtttaactgctttaataaagtttatttttaaatatc

SEQ ID NO: 320323 - DNA, 1899 bp, Homo sapiens
  misc_feature (1213)..(1213): n is a, c, g, or t
ctaaggcgccatcagccgcccgggagatatccgccgggggagaatagggttgcaccatcccagaagctgctgttagctcgccggtcctcggcacgccgcccgttcgcccctgcgctgtccgcccttcccctagcgttacttccggtccctcgctgagggggttcgtgcggctcccaggaggcgtgaaccgcggaccatgagcgtgggcttcatcggggccggccagctggcctatgctctggcgcggggcttcacggccgcaggcatcctgtcggctcacaagataatagccagctccccagaaatgaacctgcccacggtgtccgcgctcaggaagatgggtgtgaacctgacacgcagcaacaaggagacggtgaagcacagcgacgtcctgtttctggctgtgaagccacatatcatccccttcatcctggatgagattggggccgacgtgcaagccagacacatcgtggtctcctgtgcggctggtgtcaccatcagctctgtggagaagaagctgatggcattccagccagcccccaaagtgattcgctgcatgaccaacacacctgtggtagtgcaggaaggcgctacagtgtacgccacgggcacccatgccctggtggaggatgggcagctcctggagcagctcatgagcagcgtgggcttctgcactgaggtggaagaggacctcatcgatgccgtcacggggctcagtggcagcgggcctgcctatgcattcatggctctggacgcattggctgatggtggggtgaagatgggtttgccacggcgcctggcaatccaactcggggcccaggctttgctgggagctgccaagatgctgctggactcggagcagcatccatgccagcttaaggacaatgtctgctcccctgggggagccaccatccacgccctgcactttctagagagtgggggcttccgctctctgctcatcaatgcagttgaggcctcctgtatccgaacacgagagctacagtccatggccgaccaagaaaagatctccccagctgcccttaagaagaccctcttagacagagtgaagctggaatcccccacagtctccacactgaccccctccagcccagggaagctcctcacaagaagcctggccctgggaggcaagaaggactaaggcagcatctgtcccctctgtgattcagagcccttagttgagagccctgggcgnctggaccctggccgggaatggatcagacggagcaaagggcagaaagcattgacgtaagagagccgggtgtacagaggtcatgcagagtaacaaacaacacggagaggtactgagcagaaagagggcgaaaagacaaacgacaaggatcaacaaggaagcaactggggggacagaaggctcattgacccacaggcgcccgcacacacatgccacgacgaaccccaagacaaccacaacccatggaggaaagccaggacggaaagcagaacaacaagggcgagcgcgaacagaaacacaccaaatggcaagaggggaacagacagagtggaaagcaggcgacgcacgagtaccagaggcaggagtgcaatacaaggaaacgtcgacacgacgaaaaagcaaagcagctcacaggaagcggagaccacaacgaacacaaccacagccagcatccggccaccacaacacgcacaccaaccaaaccggaaggacaacagagaagacacaacaccaaagacgcctacctaccccggcaacaccaacagacagaccgcacaagaggcaggcagaagaggagcaacaggagcgaaacgtaccaatgagagagacaaaaagtgagaggaaaaacggacaagaaaaggtgagacgagacacaccaggaggatccgaagcagaaagaatacaaatga

SEQ ID NO: 320324 - DNA, 3186 bp, Homo sapiens
ctaaggcgccatcagccgcccgggagatatccgccgggggagaatagggttgcaccatcccagaagctgctgttagctcgccggtcctcggcacgccgcccgttcgcccctgcgctgtccgcccttcccctagcgttacttccggtccctcgctgagggggttcgtgcggctcccaggaggcgtgaaccgcggaccatgagcgtgggcttcatcggggccggccagctggcctatgctctggcgcggggcttcacggccgcaggcaagcgcgtggaggcgggaggcggcttcgcgggcggtcccgaggcccgagggggcctccgtcccaccagcatgagcgaatgaaaggggagtttgcgtccggtggggtagatgagactctggttgagcagcaagcatcctgtcggctcacaagataatagccagctccccagaaatgaacctgcccacggtgtccgcgctcagggtaggtggagccgggcggagtgggaagcgggtggaggcccaggaaaaggatgacctgagatgaagtgagtctggccggcccctgcgcccaagtgctggtctttggccggcggtgacctttactccaggaacgtgacaatctttccaccttctcttgggcagctcaatgtggtgggaacacccagggagacataactgggggtcagatccagacactggagtggtagaggattaactgaggtgattatgtgatgaaagcacctggcacatagtaggtacctaataaatactcattttttaaattttttttcagacagggtcttactctgtcgcccaagctggagtgcagtggcgcgatctcagctcactgtaacctccgcctcccacctcagcctcccacctcagcctcccgagtagctggaattacaggcatccaccacgcgcagctaatttttgtatttttggtagagaatactgttggccaggctggtctcgaactcctggcctcaagtgatctgcccgccttggcctcccaaagtgctgggattacaggggtgagccactgcgctcagccatttttcttaatagacgagttgtatgaccttaaagtactcagccactttgaggctatttcctcatttacaacagtggccactttgctgttattctgagtcgtgaatgagcatattgggaagaatctggtgagttagttgttctgttctccaaaaacatattccaagtcttcacccaaaacctgtgctctgtgggagaggatggctgatgaggcaggtgacaggcagtgtctgtgcctagggtgggctgatgtccctagcactggagggtcctgcttctcagtttggagtcatagagggatggatggcttccagcctagccctggaccacatggagactgtgcggtccccacgaacaagcggccagggttaggatagggcctgactcagctgtgcttttaacgaccaggtattagcatttccctttgccctgccactttcaccatagggccttcttacctggcagaggagtgccttagataccagaagattggcagggaagaagggcagccacttcctggttaccatggagaagcttgtcatgctccaagcctgtgcttacttgtccagtagcaacaatgggaaactgtattatttggggtaggggtagaaccctgagggcataaagctaagaattccaggctgcatctggcagaatcggtttggcaggggttcagctgctccctgggaggccttggcatagccaggctgctccagcactgtgagctgggagtctcctcttgcagaagatgggtgtgaacctgacacgcagcaacaaggagacggtgaagcacagcgacgtcctgtttctggctgtgaagccacatatcatccccttcatcctggatgagattggggccgacgtgcaagccagacacatcgtggtctcctgtgcggctggtgtcaccatcagctctgtggagaagaagctgatggcattccagccagcccccaaagtgattcgctgcatgaccaacacacctgtggtagtgcaggaaggcgctacagtgtacgccacgggcacccatgccctggtggaggatgggcagctcctggagcagctcatgagcagcgtgggcttctgcactgaggtggaagaggacctcatcgatgccgtcacggggctcagtggcagcgggcctgcctatgcattcatggctctggacgcattggctgatggtggggtgaagatgggtttgccacggcgcctggcaatccaactcggggcccaggctttgctgggagctgccaagatgctgctggactcggagcagcatccatgccagcttaaggacaatgtctgctcccctgggggagccaccatccacgccctgcactttctagagagtgggggcttccgctctctgctcatcaatgcagttgaggcctcctgtatccgaacacgagagctacagtccatggccgaccaagaaaagatctccccagctgcccttaagaagaccctcttagacagagtgaagctggaatcccccacagtctccacactgaccccctccagcccagggaagctcctcacaagaagcctggccctgggaggcaagaaggactaaggcagcatctgtcccctctgtgattcagagcccttagttgagagcccctgccgcccctgccacccccctgccccgctcccaccattgcccctcctcagctgtgcaaggagaaagcatgcttaggaagttttcaggtccttgtgataaaacctccttaaatctgttcagaccaagcaatgcgagcttcctctcctgtcccatgttggaagttgctctgaaggggtggtagatgctggaagccagacacaaccctgcgtacgctgctcagttggtggagactggggctgggactggagtcagcccagctgggaggaggggctggggaggatctgcagctgaagcccgaggcagggttggtgtgatgccaaggcaaagtggtgaggagaaaacaggaaacgggctttctctgaattggtaaatgggaaagaagtgagcaacttaagattgtcacaattaatcacaagtgtacaggattagactgggtttatatttaactcttgcttcataggtgtaccatttaaagagtgttatttaatgctaagtttaactgctttaataaagtttatttttaaatatc

SEQ ID NO: 320325 - DNA, 1869 bp, Homo sapiens
ctaaggcgccatcagccgcccgggagatatccgccgggggagaatagggttgcaccatcccagaagctgctgttagctcgccggtcctcggcacgccgcccgttcgcccctgcgctgtccgcccttcccctagcgttacttccggtccctcgctgagggggttcgtgcggctcccaggaggcgtgaaccgcggaccatgagcgtgggcttcatcggggccggccagctggcctatgctctggcgcggggcttcacggccgcaggcaagcgcgtggaggcgggaggcggcttcgcgggcggtcccgaggcccgagggggcctccgtcccaccagcatgagcgaatgaaaggggagtttgcgtccggtggggtagatgagactctggttgagcagcaagcatcctgtcggctcacaagataatagccagctccccagaaatgaacctgcccacggtgtccgcgctcaggaagatgggtgtgaacctgacacgcagcaacaaggagacggtgaagcacagcgacgtcctgtttctggctgtgaagccacatatcatccccttcatcctggatgagattggggccgacgtgcaagccagacacatcgtggtctcctgtgcggctggtgtcaccatcagctctgtggagaagaagctgatggcattccagccagcccccaaagtgattcgctgcatgaccaacacacctgtggtagtgcaggaaggcgctacagtgtacgccacgggcacccatgccctggtggaggatgggcagctcctggagcagctcatgagcagcgtgggcttctgcactgaggtggaagaggacctcatcgatgccgtcacggggctcagtggcagcgggcctgcctatgcattcatggctctggacgcattggctgatggtggggtgaagatgggtttgccacggcgcctggcaatccaactcggggcccaggctttgctgggagctgccaagatgctgctggactcggagcagcatccatgccagcttaaggacaatgtctgctcccctgggggagccaccatccacgccctgcactttctagagagtgggggcttccgctctctgctcatcaatgcagttgaggcctcctgtatccgaacacgagagctacagtccatggccgaccaagaaaagatctccccagctgcccttaagaagaccctcttagacagagtgaagctggaatcccccacagtctccacactgaccccctccagcccagggaagctcctcacaagaagcctggccctgggaggcaagaaggactaaggcagcatctgtcccctctgtgattcagagcccttagttgagagcccctgccgcccctgccacccccctgccccgctcccaccattgcccctcctcagctgtgcaaggagaaagcatgcttaggaagttttcaggtccttgtgataaaacctccttaaatctgttcagaccaagcaatgcgagcttcctctcctgtcccatgttggaagttgctctgaaggggtggtagatgctggaagccagacacaaccctgcgtacgctgctcagttggtggagactggggctgggactggagtcagcccagctgggaggaggggctggggaggatctgcagctgaagcccgaggcagggttggtgtgatgccaaggcaaagtggtgaggagaaaacaggaaacgggctttctctgaattggtaaatgggaaagaagtgagcaacttaagattgtcacaattaatcacaagtgtacaggattagactgggtttatatttaactcttgcttcataggtgtaccatttaaagagtgttatttaatgctaagtttaactgctttaataaagtttatttttaaatatc

SEQ ID NO: 320326 - DNA, 1665 bp, Homo sapiens
ctaaggcgccatcagccgcccgggagatatccgccgggggagaatagggttgcaccatcccagaagctgctgttagctcgccggtcctcggcacgccgcccgttcgcccctgcgctgtccgcccttcccctagcgttacttccggtccctcgctgagggggttcgtgcggctcccaggaggcgtgaaccgcggaccatgagcgtgggcttcatcggggccggccagctggcctatgctctggcgcggggcttcacggccgcagaagatgggtgtgaacctgacacgcagcaacaaggagacggtgaagcacagcgacgtcctgtttctggctgtgaagccacatatcatccccttcatcctggatgagattggggccgacgtgcaagccagacacatcgtggtctcctgtgcggctggtgtcaccatcagctctgtggagaagaagctgatggcattccagccagcccccaaagtgattcgctgcatgaccaacacacctgtggtagtgcaggaaggcgctacagtgtacgccacgggcacccatgccctggtggaggatgggcagctcctggagcagctcatgagcagcgtgggcttctgcactgaggtggaagaggacctcatcgatgccgtcacggggctcagtggcagcgggcctgcctatgcattcatggctctggacgcattggctgatggtggggtgaagatgggtttgccacggcgcctggcaatccaactcggggcccaggctttgctgggagctgccaagatgctgctggactcggagcagcatccatgccagcttaaggacaatgtctgctcccctgggggagccaccatccacgccctgcactttctagagagtgggggcttccgctctctgctcatcaatgcagttgaggcctcctgtatccgaacacgagagctacagtccatggccgaccaagaaaagatctccccagctgcccttaagaagaccctcttagacagagtgaagctggaatcccccacagtctccacactgaccccctccagcccagggaagctcctcacaagaagcctggccctgggaggcaagaaggactaaggcagcatctgtcccctctgtgattcagagcccttagttgagagcccctgccgcccctgccacccccctgccccgctcccaccattgcccctcctcagctgtgcaaggagaaagcatgcttaggaagttttcaggtccttgtgataaaacctccttaaatctgttcagaccaagcaatgcgagcttcctctcctgtcccatgttggaagttgctctgaaggggtggtagatgctggaagccagacacaaccctgcgtacgctgctcagttggtggagactggggctgggactggagtcagcccagctgggaggaggggctggggaggatctgcagctgaagcccgaggcagggttggtgtgatgccaaggcaaagtggtgaggagaaaacaggaaacgggctttctctgaattggtaaatgggaaagaagtgagcaacttaagattgtcacaattaatcacaagtgtacaggattagactgggtttatatttaactcttgcttcataggtgtaccatttaaagagtgttatttaatgctaagtttaactgctttaataaagtttatttttaaatatc

SEQ ID NO: 320327 - DNA, 939 bp, Homo sapiens
ctaaggcgccatcagccgcccgggagatatccgccgggggagaatagggttgcaccatcccagaagctgctgttagctcgccggtcctcggcacgccgcccgttcgcccctgcgctgtccgcccttcccctagcgttacttccggtccctcgctgagggggttcgtgcggctcccaggaggcgtgaaccgcggaccatgagcgtgggcttcatcggggccggccagctggcctatgctctggcgcggggcttcacggccgcaggcatcctgtcggctcacaagataatagccagctccccagaaatgaacctgcccacggtgtccgcgctcaggaagatgggtgtgaacctgacacgcagcaacaaggagacggtgaagcacagcgacgtcctgtttctggctgtgaagccacatatcatccccttcatcctggatgagattggggccgacgtgcaagccagacacatcgtggtctcctgtgcggctggtgtcaccatcagctctgtggagaagaagctgatggcattccagccagcccccaaagtgattcgctgcatgaccaacacacctgtggtagtgcaggaaggcgctacagtgtacgccacgggcacccatgccctggtggaggatgggcagctcctggagcagctcatgagcagcgtgggcttctgcactgaggtggaagaggatctgcagctgaagcccgaggcagggttggtgtgatgccaaggcaaagtggtgaggagaaaacaggaaacgggctttctctgaattggtaaatgggaaagaagtgagcaacttaagattgtcacaattaatcacaagtgtacaggattagactgggtttatatttaactcttgcttcataggtgtaccatttaaagagtgttatttaatgctaagtttaactgctttaataaagtttatttttaaatatc

SEQ ID NO: 320328 - DNA, 3177 bp, Homo sapiens
ctaaggcgccatcagccgcccgggagatatccgccgggggagaatagggttgcaccatcccagaagctgctgttagctcgccggtcctcggcacgccgcccgttcgcccctgcgctgtccgcccttcccctagcgttacttccggtccctcgctgagggggttcgtgcggctcccaggaggcgtgaaccgcggaccatgagcgtgggcttcatcggggccggccagctggcctatgctctggcgcggggcttcacggccgcaggcatcctgtcggctcacaagataatagccagctccccagaaatgaacctgcccacggtgtccgcgctcagggtaggtggagccgggcggagtgggaagcgggtggaggcccaggaaaaggatgacctgagatgaagtgagtctggccggcccctgcgcccaagtgctggtctttggccggcggtgacctttactccaggaacgtgacaatctttccaccttctcttgggcagctcaatgtggtgggaacacccagggagacataactgggggtcagatccagacactggagtggtagaggattaactgaggtgattatgtgatgaaagcacctggcacatagtaggtacctaataaatactcattttttaaattttttttcagacagggtcttactctgtcgcccaagctggagtgcagtggcgcgatctcagctcactgtaacctccgcctcccacctcagcctcccacctcagcctcccgagtagctggaattacaggcatccaccacgcgcagctaatttttgtatttttggtagagaatactgttggccaggctggtctcgaactcctggcctcaagtgatctgcccgccttggcctcccaaagtgctgggattacaggggtgagccactgcgctcagccatttttcttaatagacgagttgtatgaccttaaagtactcagccactttgaggctatttcctcatttacaacagtggccactttgctgttattctgagtcgtgaatgagcatattgggaagaatctggtgagttagttgttctgttctccaaaaacatattccaagtcttcacccaaaacctgtgctctgtgggagaggatggctgatgaggcaggtgacaggcagtgtctgtgcctagggtgggctgatgtccctagcactggagggtcctgcttctcagtttggagtcatagagggatggatggcttccagcctagccctggaccacatggagactgtgcggtccccacgaacaagcggccagggttaggatagggcctgactcagctgtgcttttaacgaccaggtattagcatttccctttgccctgccactttcaccatagggccttcttacctggcagaggagtgccttagataccagaagattggcagggaagaagggcagccacttcctggttaccatggagaagcttgtcatgctccaagcctgtgcttacttgtccagtagcaacaatgggaaactgtattatttggggtaggggtagaaccctgagggcataaagctaagaattccaggctgcatctggcagaatcggtttggcaggggttcagctgctccctgggaggccttggcatagccaggctgctccagcactgtgagctgggagtctcctcttgcagaagatgggtgtgaacctgacacgcagcaacaaggagacggtgaagcacagcgacgtcctgtttctggctgtgaagccacatatcatccccttcatcctggatgagattggggccgacgtgcaagccagacacatcgtggtctcctgtgcggctggtgtcaccatcagctctgtggagaaggtgcccatctcagccctgatgccccttgtgtgaggggagggttgacccacgaatggcagctaatgggtgggtgctggtgggagccgtgccctggccactcattcggctctctccctcaccctagaagctgatggcattccagccagcccccaaagtgattcgctgcatgaccaacacacctgtggtagtgcaggaaggcgctacagtgtacgccacgggcacccatgccctggtggaggatgggcagctcctggagcagctcatgagcagcgtgggcttctgcactgaggtggaagaggacctcatcgatgccgtcacggggctcagtggcagcgggcctgcctatgcattcatggctctggacgcattggctgatggtggggtgaagatgggtttgccacggcgcctggcaatccaactcggggcccaggctttgctgggagctgccaagatgctgctggactcggagcagcatccatgccagcttaaggacaatgtctgctcccctgggggagccaccatccacgccctgcactttctagagagtgggggcttccgctctctgctcatcaatgcagttgaggcctcctgtatccgaacacgagagctacagtccatggccgaccaagaaaagatctccccagctgcccttaagaagaccctcttagacagagtgaagctggaatcccccacagtctccacactgaccccctccagcccagggaagctcctcacaagaagcctggccctgggaggcaagaaggactaaggcagcatctgtcccctctgtgattcagagcccttagttgagagcccctgccgcccctgccacccccctgccccgctcccaccattgcccctcctcagctgtgcaaggagaaagcatgcttaggaagttttcaggtccttgtgataaaacctccttaaatctgttcagaccaagcaatgcgagcttcctctcctgtcccatgttggaagttgctctgaaggggtggtagatgctggaagccagacacaaccctgcgtacgctgctcagttggtggagactggggctgggactggagtcagcccagctgggaggaggggctggggaggatctgcagctgaagcccgaggcagggttggtgtgatgccaaggcaaagtggtgaggagaaaacaggaaacgggctttctctgaattggtaaatgggaaagaagtgagcaacttaagattgtcacaattaatcacaagtgtacaggattagactgggtttatatttaactcttgcttcataggtgtaccatttaaagagtgttatttaatgctaagtttaactgctttaataaagtttatttttaaatatc

SEQ ID NO: 320329 - DNA, 1736 bp, Homo sapiens
ctaaggcgccatcagccgcccgggagatatccgccgggggagaatagggttgcaccatcccagaagctgctgttagctcgccggtcctcggcacgccgcccgttcgcccctgcgctgtccgcccttcccctagcgttacttccggtccctcgctgagggggttcgtgcggctcccaggaggcgtgaaccgcggaccatgagcgtgggcttcatcggggccggccagctggcctatgctctggcgcggggcttcacggccgcaggcatcctgtcggctcacaagataatagccagctccccagaaatgaacctgcccacggtgtccgcgctcaggaagatgggtgtgaacctgacacgcagcaacaaggagacggtgaagcacagcgacgtcctgtttctggctgtgaagccacatatcatccccttcatcctggatgagattggggccgacgtgcaagccagacacatcgtggtctcctgtgcggctggtgtcaccatcagctctgtggagaagaagctgatggcattccagccagcccccaaagtgattcgctgcatgaccaacacacctgtggtagtgcaggaaggcgctacagtgtacgccacgggcacccatgccctggtggaggatgggcagctcctggagcagctcatgagcagcgtgggcttctgcactgaggtggaagaggacctcatcgatgccgtcacggggctcagtggcagcgggcctgcctatgcattcatggctctggacgcattggctgatggtggggtgaagatgggtttgccacggcgcctggcaatccaactcggggcccaggctttgctgggagctgccaagatgctgctggactcggagcagcatccatgccagcttaaggacaatgtctgctcccctgggggagccaccatccacgccctgcactttctagagagtgggggcttccgctctctgctcatcaatgcagttgaggcctcctgtatccgaacacgagagctacagtccatggccgaccaagaaaagatctccccagctgcccttaagaagaccctcttagacagagtgaagctggaatcccccacagtctccacactgaccccctccagcccagggaagctcctcacaagaagcctggccctgggaggcaagaaggactaaggcagcatctgtcccctctgtgattcagagcccttagttgagagcccctgccgcccctgccacccccctgccccgctcccaccattgcccctcctcagctgtgcaaggagaaagcatgcttaggaagttttcaggtccttgtgataaaacctccttaaatctgttcagaccaagcaatgcgagcttcctctcctgtcccatgttggaagttgctctgaaggggtggtagatgctggaagccagacacaaccctgcgtacgctgctcagttggtggagactggggctgggactggagtcagcccagctgggaggaggggctggggaggatctgcagctgaagcccgaggcagggttggtgtgatgccaaggcaaagtggtgaggagaaaacaggaaacgggctttctctgaattggtaaatgggaaagaagtgagcaacttaagattgtcacaattaatcacaagtgtacaggattagactgggtttatatttaactcttgcttcataggtgtaccatttaaagagtgttatttaatgctaagtttaactgctttaataaagtttatttttaaatatc

SEQ ID NO: 320330 - DNA, 3325 bp, Homo sapiens
ctaaggcgccatcagccgcccgggagatatccgccgggggagaatagggttgcaccatcccagaagctgctgttagctcgccggtcctcggcacgccgcccgttcgcccctgcgctgtccgcccttcccctagcgttacttccggtccctcgctgagggggttcgtgcggctcccaggaggcgtgaaccgcggaccatgagcgtgggcttcatcggggccggccagctggcctatgctctggcgcggggcttcacggccgcaggcaagcgcgtggaggcgggaggcggcttcgcgggcggtcccgaggcccgagggggcctccgtcccaccagcatgagcgaatgaaaggggagtttgcgtccggtggggtagatgagactctggttgagcagcaagtgcgtcttctgtcctcgtagagggttgagggggagagggagactggcactgttaggacggctctgggttttagagccagggaaagcgtggtaacgggctgggccgcgacccctagttgaaaagctctgtcttctgcaggcatcctgtcggctcacaagataatagccagctccccagaaatgaacctgcccacggtgtccgcgctcagggtaggtggagccgggcggagtgggaagcgggtggaggcccaggaaaaggatgacctgagatgaagtgagtctggccggcccctgcgcccaagtgctggtctttggccggcggtgacctttactccaggaacgtgacaatctttccaccttctcttgggcagctcaatgtggtgggaacacccagggagacataactgggggtcagatccagacactggagtggtagaggattaactgaggtgattatgtgatgaaagcacctggcacatagtaggtacctaataaatactcattttttaaattttttttcagacagggtcttactctgtcgcccaagctggagtgcagtggcgcgatctcagctcactgtaacctccgcctcccacctcagcctcccacctcagcctcccgagtagctggaattacaggcatccaccacgcgcagctaatttttgtatttttggtagagaatactgttggccaggctggtctcgaactcctggcctcaagtgatctgcccgccttggcctcccaaagtgctgggattacaggggtgagccactgcgctcagccatttttcttaatagacgagttgtatgaccttaaagtactcagccactttgaggctatttcctcatttacaacagtggccactttgctgttattctgagtcgtgaatgagcatattgggaagaatctggtgagttagttgttctgttctccaaaaacatattccaagtcttcacccaaaacctgtgctctgtgggagaggatggctgatgaggcaggtgacaggcagtgtctgtgcctagggtgggctgatgtccctagcactggagggtcctgcttctcagtttggagtcatagagggatggatggcttccagcctagccctggaccacatggagactgtgcggtccccacgaacaagcggccagggttaggatagggcctgactcagctgtgcttttaacgaccaggtattagcatttccctttgccctgccactttcaccatagggccttcttacctggcagaggagtgccttagataccagaagattggcagggaagaagggcagccacttcctggttaccatggagaagcttgtcatgctccaagcctgtgcttacttgtccagtagcaacaatgggaaactgtattatttggggtaggggtagaaccctgagggcataaagctaagaattccaggctgcatctggcagaatcggtttggcaggggttcagctgctccctgggaggccttggcatagccaggctgctccagcactgtgagctgggagtctcctcttgcagaagatgggtgtgaacctgacacgcagcaacaaggagacggtgaagcacagcgacgtcctgtttctggctgtgaagccacatatcatccccttcatcctggatgagattggggccgacgtgcaagccagacacatcgtggtctcctgtgcggctggtgtcaccatcagctctgtggagaagaagctgatggcattccagccagcccccaaagtgattcgctgcatgaccaacacacctgtggtagtgcaggaaggcgctacagtgtacgccacgggcacccatgccctggtggaggatgggcagctcctggagcagctcatgagcagcgtgggcttctgcactgaggtggaagaggacctcatcgatgccgtcacggggctcagtggcagcgggcctgcctatgcattcatggctctggacgcattggctgatggtggggtgaagatgggtttgccacggcgcctggcaatccaactcggggcccaggctttgctgggagctgccaagatgctgctggactcggagcagcatccatgccagcttaaggacaatgtctgctcccctgggggagccaccatccacgccctgcactttctagagagtgggggcttccgctctctgctcatcaatgcagttgaggcctcctgtatccgaacacgagagctacagtccatggccgaccaagaaaagatctccccagctgcccttaagaagaccctcttagacagagtgaagctggaatcccccacagtctccacactgaccccctccagcccagggaagctcctcacaagaagcctggccctgggaggcaagaaggactaaggcagcatctgtcccctctgtgattcagagcccttagttgagagcccctgccgcccctgccacccccctgccccgctcccaccattgcccctcctcagctgtgcaaggagaaagcatgcttaggaagttttcaggtccttgtgataaaacctccttaaatctgttcagaccaagcaatgcgagcttcctctcctgtcccatgttggaagttgctctgaaggggtggtagatgctggaagccagacacaaccctgcgtacgctgctcagttggtggagactggggctgggactggagtcagcccagctgggaggaggggctggggaggatctgcagctgaagcccgaggcagggttggtgtgatgccaaggcaaagtggtgaggagaaaacaggaaacgggctttctctgaattggtaaatgggaaagaagtgagcaacttaagattgtcacaattaatcacaagtgtacaggattagactgggtttatatttaactcttgcttcataggtgtaccatttaaagagtgttatttaatgctaagtttaactgctttaataaagtttatttttaaatatc

SEQ ID NO: 320331 - DNA, 2008 bp, Homo sapiens
ctaaggcgccatcagccgcccgggagatatccgccgggggagaatagggttgcaccatcccagaagctgctgttagctcgccggtcctcggcacgccgcccgttcgcccctgcgctgtccgcccttcccctagcgttacttccggtccctcgctgagggggttcgtgcggctcccaggaggcgtgaaccgcggaccatgagcgtgggcttcatcggggccggccagctggcctatgctctggcgcggggcttcacggccgcaggcaagcgcgtggaggcgggaggcggcttcgcgggcggtcccgaggcccgagggggcctccgtcccaccagcatgagcgaatgaaaggggagtttgcgtccggtggggtagatgagactctggttgagcagcaagtgcgtcttctgtcctcgtagagggttgagggggagagggagactggcactgttaggacggctctgggttttagagccagggaaagcgtggtaacgggctgggccgcgacccctagttgaaaagctctgtcttctgcaggcatcctgtcggctcacaagataatagccagctccccagaaatgaacctgcccacggtgtccgcgctcaggaagatgggtgtgaacctgacacgcagcaacaaggagacggtgaagcacagcgacgtcctgtttctggctgtgaagccacatatcatccccttcatcctggatgagattggggccgacgtgcaagccagacacatcgtggtctcctgtgcggctggtgtcaccatcagctctgtggagaagaagctgatggcattccagccagcccccaaagtgattcgctgcatgaccaacacacctgtggtagtgcaggaaggcgctacagtgtacgccacgggcacccatgccctggtggaggatgggcagctcctggagcagctcatgagcagcgtgggcttctgcactgaggtggaagaggacctcatcgatgccgtcacggggctcagtggcagcgggcctgcctatgcattcatggctctggacgcattggctgatggtggggtgaagatgggtttgccacggcgcctggcaatccaactcggggcccaggctttgctgggagctgccaagatgctgctggactcggagcagcatccatgccagcttaaggacaatgtctgctcccctgggggagccaccatccacgccctgcactttctagagagtgggggcttccgctctctgctcatcaatgcagttgaggcctcctgtatccgaacacgagagctacagtccatggccgaccaagaaaagatctccccagctgcccttaagaagaccctcttagacagagtgaagctggaatcccccacagtctccacactgaccccctccagcccagggaagctcctcacaagaagcctggccctgggaggcaagaaggactaaggcagcatctgtcccctctgtgattcagagcccttagttgagagcccctgccgcccctgccacccccctgccccgctcccaccattgcccctcctcagctgtgcaaggagaaagcatgcttaggaagttttcaggtccttgtgataaaacctccttaaatctgttcagaccaagcaatgcgagcttcctctcctgtcccatgttggaagttgctctgaaggggtggtagatgctggaagccagacacaaccctgcgtacgctgctcagttggtggagactggggctgggactggagtcagcccagctgggaggaggggctggggaggatctgcagctgaagcccgaggcagggttggtgtgatgccaaggcaaagtggtgaggagaaaacaggaaacgggctttctctgaattggtaaatgggaaagaagtgagcaacttaagattgtcacaattaatcacaagtgtacaggattagactgggtttatatttaactcttgcttcataggtgtaccatttaaagagtgttatttaatgctaagtttaactgctttaataaagtttatttttaaatatc

SEQ ID NO: 320332 - DNA, 1643 bp, Homo sapiens
ctaaggcgccatcagccgcccgggagatatccgccgggggagaatagggttgcaccatcccagaagctgctgttagctcgccggtcctcggcacgccgcccgttcgcccctgcgctgtccgcccttcccctagcgttacttccggtccctcgctgagggggttcgtgcggctcccaggaggcgtgaaccgcggaccatgagcgtgggcttcatcggggccggccagctggcctatgctctggcgcggggcttcacggccgcaggcatcctgtcggctcacaagataatagccagctccccagaaatgaacctgcccacggtgtccgcgctcaggaagatgggtgtgaacctgacacgcagcaacaaggagacggtgaagcacagcgacgtcctgtttctggctgtgaagccacatatcatccccttcatcctggatgagattggggccgacgtgcaagccagacacatcgtggtctcctgtgcggctggtgtcaccatcagctctgtggagaagaagctgatggcattccagccagcccccaaagtgattcgctgcatgaccaacacacctgtggtagtgcaggaaggcgctacagtgtacgccacgggcacccatgccctggtggaggatgggcagctcctggagcagctcatgagcagcgtgggcttctgcactgaggtggaagaggacctcatcgatgccgtcacggggctcagtggcagcgggcctgcctatggagctgccaagatgctgctggactcggagcagcatccatgccagcttaaggacaatgtctgctcccctgggggagccaccatccacgccctgcactttctagagagtgggggcttccgctctctgctcatcaatgcagttgaggcctcctgtatccgaacacgagagctacagtccatggccgaccaagaaaagatctccccagctgcccttaagaagaccctcttagacagagtgaagctggaatcccccacagtctccacactgaccccctccagcccagggaagctcctcacaagaagcctggccctgggaggcaagaaggactaaggcagcatctgtcccctctgtgattcagagcccttagttgagagcccctgccgcccctgccacccccctgccccgctcccaccattgcccctcctcagctgtgcaaggagaaagcatgcttaggaagttttcaggtccttgtgataaaacctccttaaatctgttcagaccaagcaatgcgagcttcctctcctgtcccatgttggaagttgctctgaaggggtggtagatgctggaagccagacacaaccctgcgtacgctgctcagttggtggagactggggctgggactggagtcagcccagctgggaggaggggctggggaggatctgcagctgaagcccgaggcagggttggtgtgatgccaaggcaaagtggtgaggagaaaacaggaaacgggctttctctgaattggtaaatgggaaagaagtgagcaacttaagattgtcacaattaatcacaagtgtacaggattagactgggtttatatttaactcttgcttcataggtgtaccatttaaagagtgttatttaatgctaagtttaactgctttaataaagtttatttttaaatatc

SEQ ID NO: 320333 - DNA, 622 bp, Homo sapiens
ctaaggcgccatcagccgcccgggagatatccgccgggggagaatagggttgcaccatcccagaagctgctgttagctcgccggtcctcggcacgccgcccgttcgcccctgcgctgtccgcccttcccctagcgttacttccggtccctcgctgagggggttcgtgcggctcccaggaggcgtgaaccgcggaccatgagcgtgggcttcatcggggccggccagctggcctatgctctggcgcggggcttcacggccgcaggcatcctgtcggctcacaagataatagccagctccccagaaatgaacctgcccacggtgtccgcgctcaggaagatgggtgtgaacctgacacgcagcaacaaggagacggtgaagcacagcgacgtcctgtttctggctgtgaagccacatatcatccccttcatcctggatgagattggggccgacgtgcaagccagacacatcgtggtctcctgtgcggctggtgtcaccatcagctctgtggagaagaagctgatggcattccagccagcccccaaagtgattcgctgcatgaccaacacaaacccccatggctggcgcttaaaggtttggccccaaggggggcaaaaagggggc

SEQ ID NO: 320334 - DNA, 302 bp, Homo sapiens
actgccttctgagttattatagtggcttatacattttatggtttctagaatctttttgagtgagaatcattgagaatatttgtgtttttaatctcttctgtttatctcttctgttgatgtgctttttgttaattatttggctggcttttagtggatcttgcacaatttaatgctggcacatgataagttcataataaatgtttctgattatcgagctgagccccagtcatgaaccattgatttctaacatactctctccctttagcaacctggttacctctgcccttaaatgaacataaccc

SEQ ID NO: 320335 - DNA, 276 bp, Homo sapiens
ttcgagttccacagtgaagctggtctgaccatagtcacagagacaataaaccctaaagacttatgatcagcatccctcttgaaagctcatcttatctttccatactttttcaattcaaacctataccttgaaatgtcttgataggctccagaatccaagaataccaggcctctatcttataaattaaaatagcattaaggccatacctccctttctctcttctgacacatattctttttttttttttgagacagagtctcactatatcgcccagga

SEQ ID NO: 320336 - DNA, 535 bp, Homo sapiens
cacgtgccaccacacctggctgatttttgtatttttagtagagacggggtttcaccatgttggccaggctggtctcgaactcctgacctcaggtgatccacctgcctctgcctcccagagtgctgggattacaggcgtgagccaccacactcagccaacagcttcttactgagtgcttcctgtgtgccaagcaccagggatccaactgggtctcaatagggtgtgaagaagttatgcttttattttctacttaagtttctacctatatcatgccaatttccaaaaattcccttgagaaattagttcaagaaagtgctagacacgtgtagggagcctagattcacaggtggttggaggggggttgggtggtggaaggcaggtcctgggaagctccaggctgttgacctgcacccacctggttcacctgtggctctggttcccattgagctactcctccacactcaggaaggacaggtcttcagagtgtccaaatggtttgacacacatcccatacatgatggagggggccctgagg

SEQ ID NO: 320337 - DNA, 672 bp, Homo sapiens
catctcacgtccagggatgaatttagcaagctctgtaatgaccccggggttcctgaagccacagagggagcacaggtgagggcatccaagtgcaaatgagccctctggggaggcctgcttgagctgacacataaatggggttgaagccattgtgagcccatgggcacgggccaggcagggtggtgagagctccagacagggcgggctgggctcaggctgtgtccacccagggaaccagtgtcatgggcccaacataactcgtggtcagtttctgtgagggctgcttcaaagcaggggcccaaggctctgttaggggctttctgccacccaaaatgcactttccttcttttgttctctccccaacactcagaactgtccacaccaccttgagattctctatgtattttattttaaatttttattttttgagacagggtctagctagtcccccaggctggagtgcagagagaggctgtctcaagaaagaaagaaaggaaagataagaaagaaagcaatcaagatcacaagaactttcaacagcttagattttaaagtgcattaacaatttcctagacctaagtgacgcttcagtgtacagctagtatacatggaatgtcattcccacctgtatgttgagggacatgtatcccgtactccgaggcgtaccgcctg

SEQ ID NO: 320338 - DNA, 2151 bp, Homo sapiens
catctcacgtccagggatgaatttagcaagctctgtaatgaccccggggttcctgaagccacagagggagcacaggtgagggcatccaagtgcaaatgagccctctggggaggcctgcttgagctgacacataaatggggttgaagccattgtgagcccatgggcacgggccaggcagggtggtgagagctccagacagggcgggctgggctcaggctgtgtccacccagggaaccagtgtcatgggcccaacataactcgtggtcagtttctgtgagggctgcttcaaagcaggggcccaaggctctgttaggggctttctgccacccaaaatgcactttccttcttttgttctctccccaacactcagaactgtccacaccaccttgagattctctatgtattttattttaaatttttattttttgagacagggtctagctagtcccccaggctggagtgcagtggcacaaccatagctcactgcagcctccgtctcctgggctcaagagatcctccagcctcagcctctggagtagctgggactacaggtgcatgctaccatgcgctgctaatttttaaaaattatttgtagagatggggtcttgctctgttgcccaggctggtctcaaactcctgggctcaagtgatcctcccaccttggcctccctaagtgttggaattacaggtgtgagccactgtgcccgacctgccaagtatttgaattttatacacaggacctgtatcatgatcccatgctcagctgaaccaccctccaaaggatgcccatgtccccattcccggatcctgtgaatgttacctcatgtggcaaaggaaggactttgctgacgggattaaattgaggtggaaggcctccctggatcatccaggtgggttctacgtgtcatcccaaaggtcctcataagagaggggcaaagtgaggcttgaccacacagagaagccacatggccactgaggcggctgctggagctaagcacagggatgcctgggccacccagagctgggagaggcaggtaggatactcccctagcgcctccaccaggcaggcttccgctctccagggctgagagagaatagactgctgttgttttgagccagcaagcgtgaggtcgttagttccagcgcccacaggaaacgaacatacagtcatgcaccacataaccttcggtcaacaagcaatgccacagtgctcccatatcacagcgcggtatttttactgcacctgttctatgtttagatggctttagatacacaaataccagtgagtcacagctgcctacgctattcagcacagtcacctgccgcgtaggctcgtggccctggagcagcaggctgtgacacacagcctcggcgtgtagcaggctgtgccaccagggccagtgtgtgcactctgtgttcacacaaggacaaaatcacctaaggacgcatttctcagaaggaatgtatccttttcgttaaacaatgtatgactgttccccgaagagaaaagatcttccttggaccagaagttgagctctcagcatcagcggacgcccatgctgtcaaacgcaggttgctgtgccagaccccaaaaggacccgggcctggaggtgcatcaaggtggagatcagaagacccccacgccctcgaaacggcagagcagggcggcctggggctaggggcatcaggcagctgcttcctgcttaagcactacgactcgcacccagagcctcgaactccaggctgcacaaatacgattcctgcttggttcccagttggccctggacgctgccaaggggccctctctccacacccctagaacaaaagcctatcctgccggcccaagaaacagtcacggttgagggggaaaacgaaaaccttcctttgactacaggaaacttcccaaaggtttccctgtttcttcatctaaacccatctaagtgttgtgacacatgtgccggtgtgctgtgtgcgttcacttacaacagccccattcatgtatatgtcacacgtcaggggatgcaggcaccaaggggctaaggaactttctggggtcacacagctccggagttgggatctgaaccagccaccgcttaccgtggtctccgaggttcctgggctggtcctggcaccctcccccgcggccgcctc

SEQ ID NO: 320339 - DNA, 473 bp, Homo sapiens
aattaaggaggggagaagggggtacagtggggtatgaaggaggagagtcatcataggtagtgttcaggtatgtatatactctagttttggatacatgacaataattttctttttaagcaaaggcaatgtcaaaaagaggttgcaaagacctgctggaaaaaggagaaaagttttgcttcatgaaaaggtccatggagtcaatctttacttactctcgagctcttcctggagagtgaattctttactttaggcgctcgatgctcagtaaattgtgaaactcttccccctctgcgtataggcattagagacttttggagatgcatccagaatttatcaaactcctcagcaatcaaataatgataaattacatggttgctttagtgcctcgatggccttgtaagacaactgggggaaacagagactaacgtgcccagctagactaagaacttcattagagcaacacggctattttc

SEQ ID NO: 320340 - DNA, 381 bp, Homo sapiens
catgttgcccaggctggtctggaactcctgagctcaagcaatctgcttgcctctggcctcccaaagtgctgggaatacaggtgtaagtcactgcacccagcctggaatgtttttgaaaatgtatttttatatttttgtttttaacagtagtattgaggtatagggacagggacacacacacacacacacacacacacacacagagacacacacatccatccctccacagagtgcaatttgtgttaagttttaacttatgtgattatctgtgaaaccattaccacaaccaagattatgagcagatcaggacatcagaaggggcaggagggaaggattatcaaagactgtgaagaagcttttgggtgacagatttgttgtcac

SEQ ID NO: 320341 - DNA, 479 bp, Homo sapiens
tcctccctcacacactacactgaccatcaaatgctgctgtgtgccccttcggtgtgccccttcccctaagccctagtctcagaccagcacagcctgccttcttcatatcagattcatcacagagttgatggtaaactaaatgtagagcaaacaaaaagtaaagaatttccttttcccttgacattctcctccaatggctctccactgactacaaggtaaatcccaaatccttagcaagccaatgagatcctcccattttcaagtctctccttccctcccagactagagccaccaaaagcagcagtgaactgggatgctcttgacttgaggtctgatgctccatctagcggtagagaacatcgccttgggatgggactgagaaacacgccaggtcagacgctgggagagccaacaacctgccaagatgagagtttgtcacctctagtcagatttggaaggcaccgcaaaggtgaattcca

SEQ ID NO: 320342 - DNA, 406 bp, Homo sapiens
catacgtgggacaaggcaaagtaatgaagagacgggtggttgtgtagggcacctatggggacaggagcagagatttaacgacgagaggaaatagaggacggagcaagaagaataccccaagccagtgacacagaactttgtattgatcatgtgaccagctcatatcctgagcagttgctatctaggatgccctatcactagctcctagtgtataaggaccctatgaggtaggtaccatcatcacctccagttcacagatgaagaactaactcccccaagatcagacagttcacaagtgatggggccataatagcaacatcagcaatgagctgaacaagacaaacaaggcctgtgtcctcccggggcacacagacagatggggagacagacctacagcaagcaaaga

SEQ ID NO: 320343 - DNA, 624 bp, Homo sapiens
ttaatacaatgcctaaaagataattttattgaaaatatattgggtatgtttgagaagatggctttccaggttctcgcatgactgctgtagcatgtatgcccccagatgtgtcatttgtccctgaacaaggccaagtgagatcttcaaggacagcaggcaaaattccctttagctttcaagcgtctgatccagccttcaaatcctacacctaacgatgctctcttccaaagggccccttatctgtgttttcggctaacaagcggtggacgcctcctcgaagcatccgcttcactgcagaagaaggggacttggggttcaccttgagagggaacgcccccgttcaggttcacttcctggatccttactgctctgcctcggtggcaggagcccgggaaggagattatattgtctccattcagcttgtggattgtaagtggctgacgctgagtgaggttatgaagctgctgaagagctttggcgaggacgagatcgagatgaaagtcgtgagcctcctggactccacatcatccatggtgagcgccttcaccttcttgagcagcccccagtggagtggagttaatggtgaaagaggtctcctgctgaagagtgacggacagtgaatct

SEQ ID NO: 320344 - DNA, 2900 bp, Homo sapiens
ccgcgcctcagtccgccgtccgccctccgcgcccgcgccgctagcatgaccgacgcgctgttgcccgcggccccccagccgctggagaaggagaacgacggctactttcggaagggctgtaatccccttgcacaaaccggccggagtaaattgcagaatcaaagagctgctttgaatcagcagatcctgaaagccgtgcggatgaggaccggagcggaaaaccttctgaaagtggccacaaactcaaaggtgcgggagcaagtgcggctggagctgagcttcgtcaactcagacctgcagatgctcaaggaagagctggaggggctgaacatctcggtgggcgtctatcagaacacagaggaggcatttacgattcccctgattcctcttggcctgaaggaaacgaaagacgtcgactttgcagtcgtcctcaaggattttatcctggaacattacagtgaagatggctatttatatgaagatgaaattgcagatcttatggatctgagacaagcttgtcggacgcctagccgggatgaggccggggtggaactgctgatgacatacttcatccagctgggctttgtcgagagtcgattcttcccgcccacacggcagatgggactcctgttcacctggtatgactctctcaccggggttccggtcagccagcagaacctgctgctggagaaggccagtgtcctgttcaacactggggccctctacacccagattgggacccggtgtgatcggcagacgcaggctgggctggagagtgccatagatgcctttcagagagccgcaggggttttaaattacctgaaagacacatttacccatactccaagttacgacatgagccctgccatgctcagcgtgctcgtcaaaatgatgcttgcacaagcccaagaaagcgtgtttgagaaaatcagccttcctgggatccggaatgaattcttcatgctggtgaaggtggctcaggaggctgctaaggtgggagaggtctaccaacagctacacgcagccatgagccaggcgccggtgaaagagaacatcccctacttctgggccagcttagcctgcgtgaaggcccaccactacgcggccctggcccactacttcactgccatcctcctcatcgaccaccaggtgaagccaggcacggatctggaccaccaggagaagtgcctgtcccagctctacgaccacatgccagaggggctgacacccttggccacactgaagaatgatcagcagcgccgacagctggggaagtccacttgcgcagagccatggctcatcacgaggagtcggtgcgggaggccagcctctgcaagaagctgcggagcgattgaggtgctacagaaggtgctgtgtgccgcacaggaacgctcccggctcacgtacgcccagcaccaggaggaggatgacctgctgaacctgatcgacgcccccagtgttgttgctaaaactgagcaagaggttgacattatattgccccagttctccaagctgacagtcacggacttcttccagaagctgggccccttatctgtgttttcggctaacaagcggtggacgcctcctcgaagcatccgcttcactgcagaagaaggggacttggggttcaccttgagagggaacgcccccgttcaggttcacttcctggatccttactgctctgcctcggtggcaggagcccgggaaggagattatattgtctccattcagcttgtggattgtaagtggctgacgctgagtgaggttatgaagctgctgaagagctttggcgaggacgagatcgagatgaaagtcgtgagcctcctggactccacatcatccatgcataataagagtgccacatactccgtgggaatgcagaaaacgtactccatgatctgcttagccattgatgatgacgacaaaactgataaaaccaagaaaatctccaagaagctttccttcctgagttggggcaccaacaaagaacagacagaagtcagccagcaccttgtgcctcccatcggtcggggctgcacggcctcaggtcaagaagaagctgccctcccctttcagccttctcaactcagacagttcttggtactaatgtgaggaaacaaacatgttcaggccctgaacatttccggtgctgactcggccttaaacgtttgtgccataatggaaaatatctatctatctgttctcaaatcctgtttttctcatagtgtaaactcacatttgatgtgtttttatgaaggaaagtaaccaagaaacctctaggaattagtgaaaaaagaacttttttgaggtgtgttactatactgctgtaagttatttattatataaagtattgtaaatagaatagtgttgaagatatgaaatatggctatttttaatggtgacaattatgacttttagtcactattaaattggggttacctatatcagtacaatttgtagttgtttccaggtttggctaataatcattccttaacctagaattcagatgatcctggaattaaggcaggtcagaggactgtaatgatagaattaaattagtgtcactaaaaactgtcccaaatgctgggattacaggcatgagccaccacaaccgtcccactattttactttttaaaatgacattcctactgattgatttttatcttgctataagttcgatgacaccgtgaatctaataaggttcactgttgacacagtacaagttacatagctaaaatacatagcattgaagactaattttaaggattgacaagagtttattttctattgtgcaatatcttaaaggaagcaaccacctttgggaaagtgtatctgctgctcctagggccatgcttgtatacatatttaaataaacatattcatttacccgaaaaaatatt

SEQ ID NO: 320345 - DNA, 1915 bp, Homo sapiens
gcgcgatcttggttcactgcaacctccacctcctgggttcaagtaattctcctgcctcaggctgctgagtagctgggattacaggtggcaggagcccgggaaggagattatattgtctccattcagcttgtggattgtaagtggctgacgctgagtgaggttatgaagctgctgaagagctttggcgaggacgagatcgagatgaaagtcgtgagcctcctggactccacatcatccatgcataataagagtgccacatactccgtgggaatgcagaaaacgtactccatgatctgcttagccattgatgatgacgacaaaactgataaaaccaagaaaatctccaagaagctttccttcctgagttggggcaccaacaaagaacagacagaagtcagccagcaccttgtgcctcccatcggtcggggctgcacggcctcaggtcaagaagaagctgccctcccctttcagccttctcaactcagacagttcttggtactaatgtgaggaaacaaacatgttcaggccctgaacatttccggtgctgactcggccttaaacgtttgtgccataatggaaaatatctatctatctgttctcaaatcctgtttttctcatagtgtaaactcacatttgatgtgtttttatgaaggaaagtaaccaagaaacctctaggaattagtgaaaaaagaacttttttgaggtgtgttactatactgctgtaagttatttattatataaagtattgtaaatagaatagtgttgaagatatgaaatatggctatttttaatggtgacaattatgacttttagtcactattaaattggggttacctatatcagtacaatttgtagttgtttccaggtttggctaataatcattccttaacctagaattcagatgatcctggaattaaggcaggtcagaggactgtaatgatagaattaaattagtgtcactaaaaactgtcccaaagtgctgcttcctaataggaattcattaacctaaaacaagatgttactattatatcgatagactatgaatgctatttctagaaaaagtctagtgccaaatttgtcttattaaataaaaacaatgtaggagcagcttttcttctagtttgatgtcatttaagaattactaacacagtggcagtgttagatgaagatgctgtctacaaggtagataatatactgtttgatactcaaaacatttttcattttgtttaaagtagaagttacataattctatattttaagtcttgggtaaaaaagtagttttacattttataaagtaaagatgtaaatgattcaggtttaaagctctatttgacttcctttttttgtttgagatagcgtcttgctgtgttgcccaggctggagtgcagtggtgtgatctcagctcagtgcaacctccgccccctgggatcaagcgattctcctacctcagcctcccaaatagctgggactacaaggtgccctccagcatgcctggctgatttttgtatttttagttgaggtgaggtttcaccatgttggccaggcgggtttcgaaatcctgacctcaaatgatccacccacctcagcctcccaaagtgctgggattacaggcatgagccaccacaaccgtcccactattttactttttaaaatgacattcctactgattgatttttatcttgctataagttcgatgacaccgtgaatctaataaggttcactgttgacacagtacaagttacatagctaaaatacatagcattgaagactaattttaaggattgacaagagtttattttctattgtgcaatatcttaaaggaagcaaccacctttgggaaagtgtatctgctgctcctagggccatgcttgtatacatatttaaataaacatattcatttacccgaaaaaatatt

SEQ ID NO: 320346 - DNA, 803 bp, Homo sapiens
ccgcgcctcagtccgccgtccgccctccgcgcccgcgccgctagcatgaccgacgcgctgttgcccgcggccccccagccgctggagaaggagaacgacggctactttcggaagggctgtaatccccttgcacaaaccggccggagtaaattgcagaatcaaagagctgctttgaatcagcagatcctgaaagccgtgcggatgaggaccggagcggaaaaccttctgaaagtggccacaaactcaaaggtgcgggagcaagtgcggctggagctgagcttcgtcaactcagacctgcagatgctcaaggaagagctggaggggctgaacatctcggtgggcgtctatcagaacacagaggaggcatttacgattcccctgattcctcttggcctgaaggaaacgaaagacgtcgactttgcagtcgtcctcaaggttggtttgaaggtaattgcagtttttccattgaaagtaatggctaaagtgctgggattacaggcatgagccaccacaaccgtcccactattttactttttaaaatgacattcctactgattgatttttatcttgctataagttcgatgacaccgtgaatctaataaggttcactgttgacacagtacaagttacatagctaaaatacatagcattgaagactaattttaaggattgacaagagtttattttctattgtgcaatatcttaaaggaagcaaccacctttgggaaagtgtatctgctgctcctagggccatgcttgtatacatatttaaataaacatattcatttacccgaaaaaatatt

SEQ ID NO: 320347 - DNA, 218 bp, Homo sapiens
cacccaaagtgaatttttgctttcttgatgcgaacttacgcaaatacctattttgttaatggggactgattcaaggatttgagtgaacaaaacgttgacttaatttcaacaatactttttcaggtggcaggagcccgggaaggagattatattgtctccattcagcttgtggattgtaagtggctgacgctgagtgaggttatgaagctgctgaagag

SEQ ID NO: 320348 - DNA, 3520 bp, Homo sapiens
ccgcgcctcagtccgccgtccgccctccgcgcccgcgccgctagcatgaccgacgcgctgttgcccgcggccccccagccgctggagaaggagaacgacggctactttcggaagggctgtaatccccttgcacaaaccggccggagtaaattgcagaatcaaagagctgctttgaatcagcagatcctgaaagccgtgcggatgaggaccggagcggaaaaccttctgaaagtggccacaaactcaaaggtgcgggagcaagtgcggctggagctgagcttcgtcaactcagacctgcagatgctcaaggaagagctggaggggctgaacatctcggtgggcgtctatcagaacacagaggaggcatttacgattcccctgattcctcttggcctgaaggaaacgaaagacgtcgactttgcagtcgtcctcaaggattttatcctggaacattacagtgaagatggctatttatatgaagatgaaattgcagatcttatggatctgagacaagcttgtcggacgcctagccgggatgaggccggggtggaactgctgatgacatacttcatccagctgggctttgtcgagagtcgattcttcccgcccacacggcagatgggactcctgttcacctggtatgactctctcaccggggttccggtcagccagcagaacctgctgctggagaaggccagtgtcctgttcaacactggggccctctacacccagattgggacccggtgtgatcggcagacgcaggctgggctggagagtgccatagatgcctttcagagagccgcaggggttttaaattacctgaaagacacatttacccatactccaagttacgacatgagccctgccatgctcagcgtgctcgtcaaaatgatgcttgcacaagcccaagaaagcgtgtttgagaaaatcagccttcctgggatccggaatgaattcttcatgctggtgaaggtggctcaggaggctgctaaggtgggagaggtctaccaacagctacacgcagccatgagccaggcgccggtgaaagagaacatcccctacttctgggccagcttagcctgcgtgaaggcccaccactacgcggccctggcccactacttcactgccatcctcctcatcgaccaccaggtgaagccaggcacggatctggaccaccaggagaagtgcctgtcccagctctacgaccacatgccagaggggctgacacccttggccacactgaagaatgatcagcagcgccgacagctggggaagtccacttgcgcagagccatggctcatcacgaggagtcggtgcgggaggccagcctctgcaagaagctgcggagcgattgaggtgctacagaaggtgctgtgtgccgcacaggaacgctcccggctcacgtacgcccagcaccaggaggaggatgacctgctgaacctgatcgacgcccccagtgttgttgctaaaactgagcaagaggttgacattatattgccccagttctccaagctgacagtcacggacttcttccagaagctgggccccttatctgtgttttcggctaacaagcggtggacgcctcctcgaagcatccgcttcactgcagaagaaggggacttggggttcaccttgagagggaacgcccccgttcaggttcacttcctggatccttactgctctgcctcggtggcaggagcccgggaaggagattatattgtctccattcagcttgtggattgtaagtggctgacgctgagtgaggttatgaagctgctgaagagctttggcgaggacgagatcgagatgaaagtcgtgagcctcctggactccacatcatccatgcataataagagtgccacatactccgtgggaatgcagaaaacgtactccatgatctgcttagccattgatgatgacgacaaaactgataaaaccaagaaaatctccaagaagctttccttcctgagttggggcaccaacaaagaacagacagaagtcagccagcaccttgtgcctcccatcggtcggggctgcacggcctcaggtcaagaagaagctgccctcccctttcagccttctcaactcagacagttcttggtactaatgtgaggaaacaaacatgttcaggccctgaacatttccggtgctgactcggccttaaacgtttgtgccataatggaaaatatctatctatctgttctcaaatcctgtttttctcatagtgtaaactcacatttgatgtgtttttatgaaggaaagtaaccaagaaacctctaggaattagtgaaaaaagaacttttttgaggtgtgttactatactgctgtaagttatttattatataaagtattgtaaatagaatagtgttgaagatatgaaatatggctatttttaatggtgacaattatgacttttagtcactattaaattggggttacctatatcagtacaatttgtagttgtttccaggtttggctaataatcattccttaacctagaattcagatgatcctggaattaaggcaggtcagaggactgtaatgatagaattaaattagtgtcactaaaaactgtcccaaagtgctgcttcctaataggaattcattaacctaaaacaagatgttactattatatcgatagactatgaatgctatttctagaaaaagtctagtgccaaatttgtcttattaaataaaaacaatgtaggagcagcttttcttctagtttgatgtcatttaagaattactaacacagtggcagtgttagatgaagatgctgtctacaaggtagataatatactgtttgatactcaaaacatttttcattttgtttaaagtagaagttacataattctatattttaagtcttgggtaaaaaagtagttttacattttataaagtaaagatgtaaatgattcaggtttaaagctctatttgacttcctttttttgtttgagatagcgtcttgctgtgttgcccaggctggagtgcagtggtgtgatctcagctcagtgcaacctccgccccctgggatcaagcgattctcctacctcagcctcccaaatagctgggactacaaggtgccctccagcatgcctggctgatttttgtatttttagttgaggtgaggtttcaccatgttggccaggcgggtttcgaaatcctgacctcaaatgatccacccacctcagcctcccaaagtgctgggattacaggcatgagccaccacaaccgtcccactattttactttttaaaatgacattcctactgattgatttttatcttgctataagttcgatgacaccgtgaatctaataaggttcactgttgacacagtacaagttacatagctaaaatacatagcattgaagactaattttaaggattgacaagagtttattttctattgtgcaatatcttaaaggaagcaaccacctttgggaaagtgtatctgctgctcctagggccatgcttgtatacatatttaaataaacatattcatttacccgaaaaaatatt

SEQ ID NO: 320349 - DNA, 2208 bp, Homo sapiens
ttaatacaatgcctaaaagataattttattgaaaatatattgggtatgtttgagaagatggctttccaggttctcgcatgactgctgtagcatgtatgcccccagatgtgtcatttgtccctgaacaaggccaagtgagatcttcaaggacagcaggcaaaattccctttagctttcaagcgtctgatccagccttcaaatcctacacctaacgatgctctcttccaaagggccccttatctgtgttttcggctaacaagcggtggacgcctcctcgaagcatccgcttcactgcagaagaaggggacttggggttcaccttgagagggaacgcccccgttcaggttcacttcctggatccttactgctctgcctcggtggcaggagcccgggaaggagattatattgtctccattcagcttgtggattgtaagtggctgacgctgagtgaggttatgaagctgctgaagagctttggcgaggacgagatcgagatgaaagtcgtgagcctcctggactccacatcatccatgcataataagagtgccacatactccgtgggaatgcagaaaacgtactccatgatctgcttagccattgatgatgacgacaaaactgataaaaccaagaaaatctccaagaagctttccttcctgagttggggcaccaacaaagaacagacagaagtcagccagcaccttgtgcctcccatcggtcggggctgcacggcctcaggtcaagaagaagctgccctcccctttcagccttctcaactcagacagttcttggtactaatgtgaggaaacaaacatgttcaggccctgaacatttccggtgctgactcggccttaaacgtttgtgccataatggaaaatatctatctatctgttctcaaatcctgtttttctcatagtgtaaactcacatttgatgtgtttttatgaaggaaagtaaccaagaaacctctaggaattagtgaaaaaagaacttttttgaggtgtgttactatactgctgtaagttatttattatataaagtattgtaaatagaatagtgttgaagatatgaaatatggctatttttaatggtgacaattatgacttttagtcactattaaattggggttacctatatcagtacaatttgtagttgtttccaggtttggctaataatcattccttaacctagaattcagatgatcctggaattaaggcaggtcagaggactgtaatgatagaattaaattagtgtcactaaaaactgtcccaaagtgctgcttcctaataggaattcattaacctaaaacaagatgttactattatatcgatagactatgaatgctatttctagaaaaagtctagtgccaaatttgtcttattaaataaaaacaatgtaggagcagcttttcttctagtttgatgtcatttaagaattactaacacagtggcagtgttagatgaagatgctgtctacaaggtagataatatactgtttgatactcaaaacatttttcattttgtttaaagtagaagttacataattctatattttaagtcttgggtaaaaaagtagttttacattttataaagtaaagatgtaaatgattcaggtttaaagctctatttgacttcctttttttgtttgagatagcgtcttgctgtgttgcccaggctggagtgcagtggtgtgatctcagctcagtgcaacctccgccccctgggatcaagcgattctcctacctcagcctcccaaatagctgggactacaaggtgccctccagcatgcctggctgatttttgtatttttagttgaggtgaggtttcaccatgttggccaggcgggtttcgaaatcctgacctcaaatgatccacccacctcagcctcccaaagtgctgggattacaggcatgagccaccacaaccgtcccactattttactttttaaaatgacattcctactgattgatttttatcttgctataagttcgatgacaccgtgaatctaataaggttcactgttgacacagtacaagttacatagctaaaatacatagcattgaagactaattttaaggattgacaagagtttattttctattgtgcaatatcttaaaggaagcaaccacctttgggaaagtgtatctgctgctcctagggccatgcttgtatacatatttaaataaacatattcatttacccgaaaaaatatt

SEQ ID NO: 320350 - DNA, 1077 bp, Homo sapiens
ccgcgcctcagtccgccgtccgccctccgcgcccgcgccgctagcatgaccgacgcgctgttgcccgcggccccccagccgctggagaaggagaacgacggctactttcggaagggctgtaatccccttgcacaaaccggccggagtaaattgcagaatcaaagagctgctttgaatcagcagatcctgaaagccgtgcggatgaggaccggagcggaaaaccttctgaaagtggccacaaactcaaaggtgcgggagcaagtgcggctggagctgagcttcgtcaactcagacctgcagatgctcaaggaagagctggaggggctgaacatctcggtgggcgtctatcagaacacagaggaggcatttacgattcccctgattcctcttggcctgaaggaaacgaaagacgtcgactttgcagtcgtcctcaaggattttatcctggaacattacagtgaagatggctatttatatgaagatgaaattgcagatcttatggatctgagacaagcttgtcggacgcctagccgggatgaggccggggtggaactgctgatgacatacttcatccagctgggctttgtcgagagtcgattcttcccgcccacacggcagatgggactcctgttcacctggtatgactctctcaccggggttccggtcagccagcagaacctgctgctggagaaggccagtgtcctgttcaacactggggccctctacacccagattgggacccggtgtgatcggcagacgcaggctgggctggagagtgccatagatgcctttcagagagccgcaggtatgtctcctccagggctgaccagacggagccttggccccacccggtggcaccaggggaccccccactgaagagaatctacaggtcatccctcgcaagggccagaccagtctccagctctggtgtaacttcccattaagaaacttgctccggccgggcgcggtggctcacgcctgtaatcccagcacttcgggaggccaaagcgggtggatcacaaggtcaggagatcgaggccagactgcatctcaaaaaaaaaaaaaaaaacttgctcg

SEQ ID NO: 320351 - DNA, 576 bp, Homo sapiens
tcttgcctctctctctctttctctctctctgtctctcagccttgcagccgtttccctctgcgattcatgtaagtgtgactcgatttcagggaaagggaactcgcgtgggctgaggagaccggagtggacgggctggggaaggcaccgtgatgcccgcaaccccgtccctgaaggtggtccatgagctgcctgcctgtaccctctgtgcggggccgctggaggatgcggtgaccattccctgtggacacaccttctgccggctctgcctccccgcgctctcccagatgggggcccaatcctcgggcaagatcctgctctgcccgctctgccaagaggaggagcaggcagagactcccatggcccctgtgcccctgggcccgctgggagaaacttactgcgaggagcacggcgagaagatctacttcttctgcgagaacgatgccgagttcctctgtcctcagagtgcagaaccacagacggcttcggctgtgcctagggcaacagccaacctaggagccagcgggctttcggggaaaaaaaagaaaaagacatctaaaataaaatgtttaaactgtt

SEQ ID NO: 320352 - DNA, 434 bp, Homo sapiens
cttaggtttaactgaaatgcctactattttagtaactacacatttccagcaaaagtaaagaaatgatactcaatttgattattcaccacagacgccaagatcattctttagtctgattttagcctcacgtggtctcacccgaacatttgtttttggaatttggacctaactggttaccaaccagagcaggtgtgagatgaagacttttgtgagtcctgaggccatttctcctgaccttgtcaagaagatccgtgatttccacaggaaaatactcaccctcccagagatgatgaggatgttctcagaaaacttggcgcatcatctggaaatagattcaggtaaacagcttgggatttggggagtcattcttccattcatccattcaatccatggcagcaaacagagcaataaaatgcatgaattctggagcttga

SEQ ID NO: 320353 - DNA, 2336 bp, Homo sapiens
tcttgcctctctctctctttctctctctctgtctctcagccttgcagccgtttccctctgcgattcatgtaagtgtgactcgatttcagggaaagggaactcgcgtgggctgaggagaccggagtggacgggctggggaaggcaccgtgatgcccgcaaccccgtccctgaaggtggtccatgagctgcctgcctgtaccctctgtgcggggccgctggaggatgcggtgaccattccctgtggacacaccttctgccggctctgcctccccgcgctctcccagatgggggcccaatcctcgggcaagatcctgctctgcccgctctgccaagaggaggagcaggcagagactcccatggcccctgtgcccctgggcccgctgggagaaacttactgcgaggagcacggcgagaagatctacttcttctgcgagaacgatgccgagttcctctgtgtgttctgcagggagggtcccacgcaccaggcgcacaccgtggggttcctggacgaggccattcagccctaccgggatcgtctcaggagtcgactggaagctctgagcacggagagagatgagattgaggatgtaaagtgtcaagaagaccagaagcttcaagtgctgctgactcagatcgaaagcaagaagcatcaggtggaaacagcttttgagaggctgcagcaggagctggagcagcagcgatgtctcctgctggccaggctgagggagctggagcagcagatttggaaggagagggatgaatatatcacaaaggtctctgaggaagtcacccggcttggagcccaggtcaaggagctggaggagaagtgtcagcagccagcaagtgagcttctacaagatgtcagagtcaaccagagcaggtgtgagatgaagacttttgtgagtcctgaggccatttctcctgaccttgtcaagaagatccgtgatttccacaggaaaatactcaccctcccagagatgatgaggatgttctcagaaaacttggcgcatcatctggaaatagattcagaccgccagccggagcctggttctctcggaagacaggaagtcagtgaggtacacccggcagaagaagagcctgccagacagccccctgcgcttcgacggcctcccggcggttctgggcttcccgggcttctcctccgggcgccaccgctggcaggttgacctgcagctgggcgacggcggcggctgcacggtgggggtggccggggagggggtgaggaggaagggagagatgggactcagcgccgaggacggcgtctgggccgtgatcatctcgcaccagcagtgctgggccagcacctccccgggcaccgacctgccgctgagcgagatcccgcgcggcgtgagagtcgccctggactacgaggcggggcaggtgaccctccacaacgcccagacccaggagcccatcttcaccttcactgcctctttctccggcaaagtcttccctttctttgccgtctggaaaaaaggttcctgccttacgctgaaaggctgaagtggggcgcgcgaagggcggcgaagcggagacggcggctctccgggatccagctccgcccctggccagtgtgcggcccgggggctccctgtgcccgcgtgaggcgagagaacaggggacttgagtctcgaacagcggttgtttttactttatttatcttaggccctcagctccctgacgtcctgagcctccctgtgacgctctggccttctctgcacctcagagtgcagaaccacagacggcttcggctgtgcctagggcaacagccaacctaggagccagcgggctttcggggaaaaaaaagaaaaagacatctaaaataaaatgtttaaactgtttcaaaataattatcttgggaaaaatcagggttttgctggacttgcactaatttgtacagttaacttcgtactttgacacacacctgaagatgcctccacctttgtagggcttagggcctttttatcagccctgggtggaccccagggccccttcctttcccttcccttctggtcatttctctggacttgtagagaatgtcctaagaaagtgtgactcacagacctctggattccatgtgtccaattagcgctgatgggactggagaaaggcttaaatccaatgggatctgcctgtgttggcaatttagggccgagatggctcgagggagtagatgcagagaggaagggtgatgatccctctgtgaccaagacacaatcctgtcccttcttttagtcaggatatccctgatgacagacagtgggacaatcaccaggccccattgtttaataaaacgaggcttttgctcaggtcta

SEQ ID NO: 320354 - DNA, 2718 bp, Homo sapiens
tcttgcctctctctctctttctctctctctgtctctcagccttgcagccgtttccctctgcgattcatgtaagtgtgactcgatttcagggaaagggaactcgcgtgggctgaggagaccggagtggacgggctggggaaggcaccgtgatgcccgcaaccccgtccctgaaggtggtccatgagctgcctgcctgtaccctctgtgcggggccgctggaggatgcggtgaccattccctgtggacacaccttctgccggctctgcctccccgcgctctcccagatgggggcccaatcctcgggcaagatcctgctctgcccgctctgccaagaggaggagcaggcagagactcccatggcccctgtgcccctgggcccgctgggagaaacttactgcgaggagcacggcgagaagatctacttcttctgcgagaacgatgccgagttcctctgtgtgttctgcagggagggtcccacgcaccaggcgcacaccgtggggttcctggacgaggccattcagccctaccgggatcgtctcaggagtcgactggaagctctgagcacggagagagatgagattgaggatgtaaagtgtcaagaagaccagaagcttcaagtgctgctgactcagatcgaaagcaagaagcatcaggtggaaacagcttttgagaggctgcagcaggagctggagcagcagcgatgtctcctgctggccaggctgagggagctggagcagcagatttggaaggagagggatgaatatatcacaaaggtctctgaggaagtcacccggcttggagcccaggtcaaggagctggaggagaagtgtcagcagccagcaagtgagcttctacaagatgtcagagtcaaccagagcaggtgtgagatgaagacttttgtgagtcctgaggccatttctcctgaccttgtcaagaagatccgtgatttccacaggaaaatactcaccctcccagagatgatgaggatgttctcaggtaaaggggaaggcgccacagttttccccagtcccattagctgccctcctgtcttccacccatctccatccttctctgcccttgaaacctggctcgagacatcttccctccccagagccttcccttagtgatctcaatttattcaggggcactattcccagagcatctcctccactccctaaggacaggtgcaggactgagagtccaggagggtgaggacccttctcctccactagaccacagcagaagccgagtcttctgtcctcatcttcacattgtactcaagtcaccttgcccctgggggtgcctataagaagtaataagtcacagatctctctttctatttctgcttccctcagaaaacttggcgcatcatctggaaatagattcaggggtcatcactctggaccctcagaccgccagccggagcctggttctctcggaagacaggaagtcagtgaggtacacccggcagaagaagagcctgccagacagccccctgcgcttcgacggcctcccggcggttctgggcttcccgggcttctcctccgggcgccaccgctggcaggttgacctgcagctgggcgacggcggcggctgcacggtgggggtggccggggagggggtgaggaggaagggagagatgggactcagcgccgaggacggcgtctgggccgtgatcatctcgcaccagcagtgctgggccagcacctccccgggcaccgacctgccgctgagcgagatcccgcgcggcgtgagagtcgccctggactacgaggcggggcaggtgaccctccacaacgcccagacccaggagcccatcttcaccttcactgcctctttctccggcaaagtcttccctttctttgccgtctggaaaaaaggttcctgccttacgctgaaaggctgaagtggggcgcgcgaagggcggcgaagcggagacggcggctctccgggatccagctccgcccctggccagtgtgcggcccgggggctccctgtgcccgcgtgaggcgagagaacaggggacttgagtctcgaacagcggttgtttttactttatttatcttaggccctcagctccctgacgtcctgagcctccctgtgacgctctggccttctctgcacctcagagtgcagaaccacagacggcttcggctgtgcctagggcaacagccaacctaggagccagcgggctttcggggaaaaaaaagaaaaagacatctaaaataaaatgtttaaactgtttcaaaataattatcttgggaaaaatcagggttttgctggacttgcactaatttgtacagttaacttcgtactttgacacacacctgaagatgcctccacctttgtagggcttagggcctttttatcagccctgggtggaccccagggccccttcctttcccttcccttctggtcatttctctggacttgtagagaatgtcctaagaaagtgtgactcacagacctctggattccatgtgtccaattagcgctgatgggactggagaaaggcttaaatccaatgggatctgcctgtgttggcaatttagggccgagatggctcgagggagtagatgcagagaggaagggtgatgatccctctgtgaccaagacacaatcctgtcccttcttttagtcaggatatccctgatgacagacagtgggacaatcaccaggccccattgtttaataaaacgaggcttttgctcaggtcta

SEQ ID NO: 320355 - DNA, 1484 bp, Homo sapiens
tcttgcctctctctctctttctctctctctgtctctcagccttgcagccgtttccctctgcgattcatgtaagtgtgactcgatttcagggaaagggaactcgcgtgggctgaggagaccggagtggacgggctggggaaggcaccgtgatgcccgcaaccccgtccctgaaggtggtccatgagctgcctgcctgtaccctctgtgcggggccgctggaggatgcggtgaccattccctgtggacacaccttctgccggctctgcctccccgcgctctcccagatgggggcccaatcctcgggcaagatcctgctctgcccgctctgccaagaggaggagcaggcagagactcccatggcccctgtgcccctgggcccgctgggagaaacttactgcgaggagcacggcgagaagatctacttcttctgcgagaacgatgccgagttcctctgtgtgttctgcagggagggtcccacgcaccaggcgcacaccgtggggttcctggacgaggccattcagccctaccgggatcgtctcaggagtcgactggaagctctgagcacggagagagatgagattgaggatgtaaagtgtcaagaagaccagaagcttcaagtgctgctgactcagatcgaaagcaagaagcatcaggtggaaacagcttttgagaggctgcagcaggagctggagcagcagcgatgtctcctgctggccaggctgagggagctggagcagcagatttggaaggagagggatgaatatatcacaaaggtctctgaggaagtcacccggcttggagcccaggtcaaggagctggaggagaagtgtcagcagccagcaagtgagcttctacaagatgtcagagtcaaccagagcaggtgtgagatgaagacttttgtgagtcctgaggccatttctcctgaccttgtcaagaagatccgtgatttccacaggaaaatactcaccctcccagagatgatgaggatgttctcaggtaaaggggaaggcgccacagttttccccagtcccattagctgccctcctgtcttccacccatctccatccttctctgcccttgaaacctggctcgagacatcttccctccccagagccttcccttagtgatctcaatttattcaggggcactattcccagagcatctcctccactccctaaggacaggtgcaggactgagagtccaggagggtgaggacccttctcctccactagaccacagcagaagccgagtcttctgtcctcatcttcacattgtactcaagtcaccttgcccctgggggtgcctataagaagtaataagtcacagatctctctttctatttctgcttccctcagaaaacttggcgcatcatctggaaatagattcaggtaaacagcttgggatttggggagtcattcttccattcatccattcaatccatggcagcaaacagagcaataaaatgcatgaattctggagcttga

SEQ ID NO: 320356 - DNA, 1885 bp, Homo sapiens
tcttgcctctctctctctttctctctctctgtctctcagccttgcagccgtttccctctgcgattcatgtaagtgtgactcgatttcagggaaagggaactcgcgtgggctgaggagaccggagtggacgggctggggaaggcaccgtgatgcccgcaaccccgtccctgaaggtggtccatgagctgcctgcctgtaccctctgtgcggggccgctggaggatgcggtgaccattccctgtggacacaccttctgccggctctgcctccccgcgctctcccagatgggggcccaatcctcgggcaagatcctgctctgcccgctctgccaagaggaggagcaggcagagactcccatggcccctgtgcccctgggcccgctgggagaaacttactgcgaggagcacggcgagaagatctacttcttctgcgagaacgatgccgagttcctctgtgtgttctgcagggagggtcccacgcaccaggcgcacaccgtggggttcctggacgaggccattcagccctaccgggatcgtctcaggagtcgactggaagctctgagcacggagagagatgagattgaggatgtaaagtgtcaagaagaccagaagcttcaagtgctgctgactcagatcgaaagcaagaagcatcaggtggaaacagcttttgagaggctgcagcaggagctggagcagcagcgatgtctcctgctggccaggctgagggagctggagcagcagatttggaaggagagggatgaatatatcacaaaggtctctgaggaagtcacccggcttggagcccaggtcaaggagctggaggagaagtgtcagcagccagcaagtgagcttctacaagatgtcagagtcaaccagagcaggtgtgagatgaagacttttgtgagtcctgaggccatttctcctgaccttgtcaagaagatccgtgatttccacaggaaaatactcaccctcccagagatgatgaggatgttctcagaaaacttggcgcatcatctggaaatagattcaggggtcatcactctggaccctcagaccgccagccggagcctggttctctcggaagacaggaagtcagtgaggtacacccggcagaagaagagcctgccagacagccccctgcgcttcgacggcctcccggcggttctgggcttcccgggcttctcctccgggcgccaccgctggcaggttgacctgcagctgggcgacggcggcggctgcacggtgggggtggccggggagggggtgaggaggaagggagagatgggactcagcgccgaggacggcgtctgggccgtgatcatctcgcaccagcagtgctgggccagcacctccccgggcaccgacctgccgctgagcgagatcccgcgcggcgtgagagtcgccctggactacgaggcggggcaggtgaccctccacaacgcccagacccaggagcccatcttcaccttcactgcctctttctccggcaaagtcttccctttctttgccgtctggaaaaaaggttcctgccttacgctgaaaggctgaagtggggcgcgcgaagggcggcgaagcggagacggcggctctccgggatccagctccgcccctggccagtgtgcggcccgggggctccctgtgcccgcgtgaggcgagagaacaggggacttgagtctcgaacagcggttgtttttactttatttatcttaggccctcagctccctgacgtcctgagcctccctgtgacgctctggccttctctgcacctcagagtgcagaaccacagacggcttcggctgtgcctagggcaacagccaacctaggagccagcgggctttcggggaaaaaaaagaaaaagacatctaaaataaaatgtttaaactgtt

SEQ ID NO: 320357 - DNA, 2359 bp, Homo sapiens
tcttgcctctctctctctttctctctctctgtctctcagccttgcagccgtttccctctgcgattcatgtaagtgtgactcgatttcagggaaagggaactcgcgtgggctgaggagaccggagtggacgggctggggaaggcaccgtgatgcccgcaaccccgtccctgaaggtggtccatgagctgcctgcctgtaccctctgtgcggggccgctggaggatgcggtgaccattccctgtggacacaccttctgccggctctgcctccccgcgctctcccagatgggggcccaatcctcgggcaagatcctgctctgcccgctctgccaagaggaggagcaggcagagactcccatggcccctgtgcccctgggcccgctgggagaaacttactgcgaggagcacggcgagaagatctacttcttctgcgagaacgatgccgagttcctctgtgtgttctgcagggagggtcccacgcaccaggcgcacaccgtggggttcctggacgaggccattcagccctaccgggatcgtctcaggagtcgactggaagctctgagcacggagagagatgagattgaggatgtaaagtgtcaagaagaccagaagcttcaagtgctgctgactcagatcgaaagcaagaagcatcaggtggaaacagcttttgagaggctgcagcaggagctggagcagcagcgatgtctcctgctggccaggctgagggagctggagcagcagatttggaaggagagggatgaatatatcacaaaggtctctgaggaagtcacccggcttggagcccaggtcaaggagctggaggagaagtgtcagcagccagcaagtgagcttctacaagatgtcagagtcaaccagagcaggtgtgagatgaagacttttgtgagtcctgaggccatttctcctgaccttgtcaagaagatccgtgatttccacaggaaaatactcaccctcccagagatgatgaggatgttctcagaaaacttggcgcatcatctggaaatagattcaggggtcatcactctggaccctcagaccgccagccggagcctggttctctcggaagacaggaagtcagtgaggtacacccggcagaagaagagcctgccagacagccccctgcgcttcgacggcctcccggcggttctgggcttcccgggcttctcctccgggcgccaccgctggcaggttgacctgcagctgggcgacggcggcggctgcacggtgggggtggccggggagggggtgaggaggaagggagagatgggactcagcgccgaggacggcgtctgggccgtgatcatctcgcaccagcagtgctgggccagcacctccccgggcaccgacctgccgctgagcgagatcccgcgcggcgtgagagtcgccctggactacgaggcggggcaggtgaccctccacaacgcccagacccaggagcccatcttcaccttcactgcctctttctccggcaaagtcttccctttctttgccgtctggaaaaaaggttcctgccttacgctgaaaggctgaagtggggcgcgcgaagggcggcgaagcggagacggcggctctccgggatccagctccgcccctggccagtgtgcggcccgggggctccctgtgcccgcgtgaggcgagagaacaggggacttgagtctcgaacagcggttgtttttactttatttatcttaggccctcagctccctgacgtcctgagcctccctgtgacgctctggccttctctgcacctcagagtgcagaaccacagacggcttcggctgtgcctagggcaacagccaacctaggagccagcgggctttcggggaaaaaaaagaaaaagacatctaaaataaaatgtttaaactgtttcaaaataattatcttgggaaaaatcagggttttgctggacttgcactaatttgtacagttaacttcgtactttgacacacacctgaagatgcctccacctttgtagggcttagggcctttttatcagccctgggtggaccccagggccccttcctttcccttcccttctggtcatttctctggacttgtagagaatgtcctaagaaagtgtgactcacagacctctggattccatgtgtccaattagcgctgatgggactggagaaaggcttaaatccaatgggatctgcctgtgttggcaatttagggccgagatggctcgagggagtagatgcagagaggaagggtgatgatccctctgtgaccaagacacaatcctgtcccttcttttagtcaggatatccctgatgacagacagtgggacaatcaccaggccccattgtttaataaaacgaggcttttgctcaggtcta

SEQ ID NO: 320358 - DNA, 1685 bp, Homo sapiens
tcttgcctctctctctctttctctctctctgtctctcagccttgcagccgtttccctctgcgattcatgtaagtgtgactcgatttcagggaaagggaactcgcgtgggctgaggagaccggagtggacgggctggggaaggcaccgtgatgcccgcaaccccgtccctgaaggtggtccatgagctgcctgcctgtaccctctgtgcggggccgctggaggatgcggtgaccattccctgtggacacaccttctgccggctctgcctccccgcgctctcccagatgggggcccaatcctcgggcaagatcctgctctgcccgctctgccaagaggaggagcaggcagagactcccatggcccctgtgcccctgggcccgctgggagaaacttactgcgaggagcacggcgagaagatctacttcttctgcgagaacgatgccgagttcctctgtgtgttctgcagggagggtcccacgcaccaggcgcacaccgtggggttcctggacgaggccattcagccctaccgggatcgtctcaggagtcgactggaagctctgagcacggagagagatgagattgaggatgtaaagtgtcaagaagaccagaagcttcaagtgctgctgactcagatcgaaagcaagaagcatcaggtggaaacagcttttgagaggctgcagcaggagctggagcagcagcgatgtctcctgctggccaggctgagggagctggagcagcagatttggaaggagagggatgaatatatcacaaaggtctctgaggaagtcacccggcttggagcccaggtcaaggagctggaggagaagtgtcagcagccagcaagtgagcttctacaagatgtcagagtcaaccagagcaggtgtgagatgaagacttttgtgagtcctgaggccatttctcctgaccttgtcaagaagatccgtgatttccacaggaaaatactcaccctcccagagatgatgaggatgttctcagaaaacttggcgcatcatctggaaatagattcaggggtcatcactctggaccctcagaccgccagccggagcctggttctctcggaagacaggaacctcagagtgcagaaccacagacggcttcggctgtgcctagggcaacagccaacctaggagccagcgggctttcggggaaaaaaaagaaaaagacatctaaaataaaatgtttaaactgtttcaaaataattatcttgggaaaaatcagggttttgctggacttgcactaatttgtacagttaacttcgtactttgacacacacctgaagatgcctccacctttgtagggcttagggcctttttatcagccctgggtggaccccagggccccttcctttcccttcccttctggtcatttctctggacttgtagagaatgtcctaagaaagtgtgactcacagacctctggattccatgtgtccaattagcgctgatgggactggagaaaggcttaaatccaatgggatctgcctgtgttggcaatttagggccgagatggctcgagggagtagatgcagagaggaagggtgatgatccctctgtgaccaagacacaatcctgtcccttcttttagtcaggatatccctgatgacagacagtgggacaatcaccaggccccattgtttaataaaacgaggcttttgctcaggtcta

SEQ ID NO: 320359 - DNA, 1372 bp, Homo sapiens
tcttgcctctctctctctttctctctctctgtctctcagccttgcagccgtttccctctgcgattcatgtaagtgtgactcgatttcagggaaagggaactcgcgtgggctgaggagaccggagtggacgggctggggaaggcaccgtgatgcccgcaaccccgtccctgaaggtggtccatgagctgcctgcctgtaccctctgtgcggggccgctggaggatgcggtgaccattccctgtggacacaccttctgccggctctgcctccccgcgctctcccagatgggggcccaatcctcgggcaagatcctgctctgcccgctctgccaagaggaggagcaggcagagactcccatggcccctgtgcccctgggcccgctgggagaaacttactgcgaggagcacggcgagaagatctacttcttctgcgagaacgatgccgagttcctctgtgtgttctgcagggagggtcccacgcaccaggcgcacaccgtggggttcctggacgaggccattcagccctaccgggatcgtctcaggagtcgactggaagctctgagcacggagagagatgagattgaggatgtaaagtgtcaagaagaccagaagcttcaagtgctgctgcagtgtgcggcccgggggctccctgtgcccgcgtgaggcgagagaacaggggacttgagtctcgaacagcggttgtttttactttatttatcttaggccctcagctccctgacgtcctgagcctccctgtgacgctctggccttctctgcacctcagagtgcagaaccacagacggcttcggctgtgcctagggcaacagccaacctaggagccagcgggctttcggggaaaaaaaagaaaaagacatctaaaataaaatgtttaaactgtttcaaaataattatcttgggaaaaatcagggttttgctggacttgcactaatttgtacagttaacttcgtactttgacacacacctgaagatgcctccacctttgtagggcttagggcctttttatcagccctgggtggaccccagggccccttcctttcccttcccttctggtcatttctctggacttgtagagaatgtcctaagaaagtgtgactcacagacctctggattccatgtgtccaattagcgctgatgggactggagaaaggcttaaatccaatgggatctgcctgtgttggcaatttagggccgagatggctcgagggagtagatgcagagaggaagggtgatgatccctctgtgaccaagacacaatcctgtcccttcttttagtcaggatatccctgatgacagacagtgggacaatcaccaggccccattgtttaataaaacgaggcttttgctcaggtcta

SEQ ID NO: 320360 - DNA, 172 bp, Homo sapiens
tgggcagaagttatgagtaaagccgggtggagtcttgccatgggagtcaagagtccgctggatcacgcaggggtggggacatggtgatagggaagaaacctcccaggaccgacgggctgcaatgtgatcagtgccccacacaaaggactaaggtctatatcccagcagcccc

SEQ ID NO: 320361 - DNA, 531 bp, Homo sapiens
gagctactgtaggcctggcccaatacttggtacttttccatactgtaagcactttatttaacatcacgataatcctgaaagaagtacgtatttctttttctttcttttttttttttgagacaaggtcacccaggatagagtgcagtgatgcaatcatggctcgctgaagcctcgacctcctgggctcaagtcatcctccgatctcagccttctgtgtagctaggactacaggcctgtgccaccatgtctcgctattttttttggtattttttatagagatggcagggtctcaccatgttgtccaggctggtcttgaactcctgggctcaagtgatcctcctgcctcagcctcccaaagttctgggactacaagcatgagccactgtgcccagccaagaagtaaatatttctttcttttttaaaattatctcatgcaacagatgaaagaagtatatatttctttatctgcactttgtagttgaaagaaaccaagctcagagaggttaaatatcatttccaatgtcacagagc

SEQ ID NO: 320362 - DNA, 807 bp, Homo sapiens
gagctactgtaggcctggcccaatacttggtacttttccatactgtaagcactttatttaacatcacgataatcctgaaagaagtacgtatttctttttctttcttttttttttttgagacaaggtcacccaggatagagtgcagtgatgcaatcatggctcgctgaagcctcgacctcctgggctcaagtcatcctccgatctcagccttctgtgtagctaggaactagtgaaaacgatgactatgcacaagagtaagcaccattgtttttcggcacccccttttccatcgggtgcacgcaggcacgcggacacacaagcctctcccctgcccccgcgccccgcctgcgcggggaatctgccacacggtatgaactgtgctctcagcggagaaatactctggcccagcaatttatgtgtgttttgtttgttttaagtgggaaggaaaggaagagagtggggcgtgaaaatgggagatcagttttaactcagatttaattcaatggttcgcgtttcctcccatctttctctgcatcaaaatgcaggtagatcggtgaaatttcaagtttcttgggtcgttaaataccccaatttaaacgatggaggctgggaactggggatataaggaggaaacctagggttggaagggcgggcagggttaaagaggttcgggagctccgcagatctgagcgaagcatgcgaggctgccgcgcccgggcagcggctgcgtctcgggttctcgccctgcccgctgcctcgggtttttgccagtgactgcgccgtcttggctgcccacccacacctcgg

SEQ ID NO: 320363 - DNA, 810 bp, Homo sapiens
gagtttgctgactccctctggtttccggtcaggtcggtcggtccccactatgggcctggagctgtacctggacctgctgtcccagccctgccgcgctgtttacatctttgccaagaagaacgacattcccttcgagctgcgcatcgtggatctgattaaaggtgatgttccctgttttcctgggtgagccagtatctccccagacactggcagccaccctggcagagttggatgtgaccctgcagttgctcgaggacaagttcctccagaacaaggccttccttactggtcctcacatctccttagctgacctcgtagccatcacggagctgatgcatcccgtgggtgctggctgccaagtcttcgaaggccgacccaagctggccacatggcggcagcgcgtggaggcagcagtgggggaggacctcttccaggaggcccatgaggtcattctgaaggccaaggacttcccacctgcagaccccaccataaagcagaagctgatgccctgggtgctggccatgatccggtgagctgggaaacctcacccttgcaccgtcctcagcagtccacaaagcattttcatttctaatggcccatgggagccaggcccagaaagcaggaatggcttgcttaagacttgcccaagtcccagagcacctcacctcccgaagccaccatccccaccctgtcttccacagccgcctgaaagccacaatgagaatgatgcacactgaggccttgtgtcctttaatcactgcatttcattttgattttggataataaacctgggctcagcctgagcctctg

SEQ ID NO: 320364 - DNA, 909 bp, Homo sapiens
gagtttgctgactccctctggtttccggtcaggtcggtcggtccccactatgggcctggagctgtacctggacctgctgtcccagccctgccgcgctgtttacatctttgccaagaagaacgacattcccttcgagctgcgcatcgtggatctgattaaagtaccctcaggacctgcaggcccgtgcccgtgtggatgagtacctggcatggcagcacacgactctgcggagaagctgcctccgggccttgtggcataaggtgatgttccctgttttcctgggtgagccagtatctccccagacactggcagccaccctggcagagttggatgtgaccctgcagttgctcgaggacaagttcctccagaacaaggccttccttactggtcctcacatctccttagctgacctcgtagccatcacggagctgatgcatcccgtgggtgctggctgccaagtcttcgaaggccgacccaagctggccacatggcggcagcgcgtggaggcagcagtgggggaggacctcttccaggaggcccatgaggtcattctgaaggccaaggacttcccacctgcagaccccaccataaagcagaagctgatgccctgggtgctggccatgatccggtgagctgggaaacctcacccttgcaccgtcctcagcagtccacaaagcattttcatttctaatggcccatgggagccaggcccagaaagcaggaatggcttgcttaagacttgcccaagtcccagagcacctcacctcccgaagccaccatccccaccctgtcttccacagccgcctgaaagccacaatgagaatgatgcacactgaggccttgtgtcctttaatcactgcatttcattttgattttggataataaacctgggctcagcctgagcctctg

SEQ ID NO: 320365 - DNA, 4380 bp, Homo sapiens
  misc_feature (327)..(327): n is a, c, g, or t
  misc_feature (967)..(967): n is a, c, g, or t
  misc_feature (4380)..(4380): n is a, c, g, or t
gagtttgctgactccctctggtttccggtcaggtcggtcggtccccactatgggcctggagctgtacctggacctgctgtcccagccctgccgcgctgtttacatctttgccaagaagaacgacattcccttcgagctgcgcatcgtggatctgattaaaggtaggtccagcctcgggtttggggaaccgaaaagtcaggaaggggacaggtaggcatacatagcttagggaacttctcccagcgccaccttcttcctggggccattgctggtctggtttggagaccgaacagagaaaggtgagccagcagggagatccaagagtcngggctccccaaaactctgctcggtctcacggaatagaccacggggttcccctgaggccgaataaaggggtggggatcatgaagagaagccagacaggaggacaaaaacgggcgcagctgggtgcaggggcacacgcctgtagtcccagcaactcgagaggctggggtgggaggatcgcttgagcccaggaattccaggccgcagtgcactatcatggtgcccttgaatagccactgcactcccgtcagggcaatctagcgagaccccgtcttaaaaaaaaaaaacaaaaaaaaacaaaatgaaagcaggtgtgacctcggcctagggaaaggtgggatgagagaggtcaagggtgccaagtgtagagactgggacagcgtcaagtcccttctttatggcccagctgctgagattctgcaacagcaaacagctcaggacgtgactttccatccctgccctctgcactcgtccagtctgcattggggtccctctttgtcccttccttcctctgttcctcctgttttgcctctgaccttgtccttgtccttttttttttgagacagagtcttgcttttgctttgttgcagtgcagtggcacggatctcgaatcactgcaaccaccacctcccgggttcaagcnattctcctgcttcagcctcctgagtagctagattacaaatgtgtgccactatgtctggctaatttttttgtatttttaacagagatgggatttcacaattttggtcaggctgttctcgaactcctgacatcaaatgatctgccggcttagcctcccaaagtgctgggattacaggcatgagccactgtgcctggcccaaggcattttgtttatttgtttgtttgtttttgagacggagtctcgctctgtcgcccaggctggagtgcagtggcaggatcacagctcactgcaacctctgccgcccgaaaccttgtcctctgcctcttgttcctgctggggaggtaggttgccccaggctgctgatgctggaagcagcagggggaccctggggcttgatgagccctacaccctgttttgtttctctagcatgcctccaaggcccttgaggactcagctggcaggcccaggcccaggcccagtgcagggtggggtagtaggaggggttggaagcagaatccaggtatggctggtggggcaagtaaggcgactctacttggctaagccttctgcccagggctcccactccatggctggccctctgcctgaaacttctccacataatctcttctgcaaactgcccactgtcctgcgcaaggacttcctctgcagagtgtggagtagaggaaagggaatgggggacaagaggacgtccaagctggttgtcaaatgtagtggtgcagagggaagtgtgttttcccaggagacagaggagggttttcctggtgaaggaacagtctgaagggagggtgaagagagggtagcaggctgggcatggtggctcacacctgtaatcccagcactttgggaggccgaagtaggaagattacttgaggccagtagttcaagaccagcctgggcaacatagtgagaccccaactgtaaggggaataaaagtttggggcacagggggtggtagcaggtatgctacacacagctccacagtgcccagggcagggtgaacaaagggacatggtggggccagtagaagttgcttctaagtaggtagataccagaaaaagaccacttctctgtgtttcatgaccctgccttagaattaatggtggaagggacaaggtagtcagtcccctcaggtgacctatcgtgcagcttggggtgctctgattgtgagttcatgaagctggcaatagtggaaagaggagatgggtagggtgcatgcaaaggtccaggaaccacaccctgcacagtgagctctgttgcagaggggcagcctgtgggaggaggctgtgcctacaggacttagcaaggggtgttgtctattttgtaccagccggtggagtggtctcctcctcctcccgcaggggcccttccagtctttgccaaccaggagtgcagactggtgggaagaagaactgtgaaactggggccagagcattgcagggaggggcacaggccatggcgggctcagcgttctcctcccaccacccaccatgctggactcttcccaggtcagcacttaagcgatgcctttgcccaggtgaaccccctcaagaaggtgccagccttgaaggacggggacttcaccttgacggagaggtaactgggaccctaggactgctgccaggcctgctggaaccatcctgttctaaccctctatttcatagacaaggaaactaaagtcttcagaggcagagagtctctgtgccccgcatcctgcagagagtcagtactggaccccaggcccttgccttcctgctattccagttcaccctgatgattagaaaagcaaatatctactttacttccacaccagtgctttggttgctggtgagtggtgagagtatccttgagacagggtaggccagaggacgatggcagctttgcccaccatggggcaggcctctggccaagcttgtgtggcgatggctcagtggcatctgggctgcccggtggctccatctctgggctgcagcttcccaggatgggtcttccccatggaagagccaccagatatggacgtcttacatcacagctggtcccaagaagttgaatcctcttcaggaaaagccaatctttccccagttctgccccttttgtcaccagagtcacccttcccctaacaagaacctggagtttgtgctttaaagctcatctctgaaatctcaggatggacgcacctccgatgaattcctctgacattctgccagggcccttcttcctccctggtgccccaggtgtcctgagtccttgtgtcactcagcgttgtgacccccaggtaccagccagagtcaatgtgcaatctctgcctctgtcactactctcaccttcaggtctgtggctcacagagacctgcagccctcctcagaggtggcttgaacaattggctgggagcaaaaggagctcctgggcaccctgcacagacaacggagtcgttaagctgggacacgtgtgtagccccagcttaaaagagaatataggcccgtggcagatacagaggttttctgcccttttggcctgcatgcccaacctttgggaaaccccaagttcctgaaagcttttctgtgtctccaaatggacacatcctgtgtccttccaggtccatgctcatctcatcaccatggcggccctcaaaacccagggaaggaggagagtgccagggggccttgtctgttctgttgttctaggatcctgcagctgcaggagtgcttcctgagtggtactttaggaagccaaactaccccagtcagcttagataggagctgattcttggcagaaagaatgacagaaagaacaaagggacacggaagcctttttgaacagtcaggccatcagaggctggtcggaatcccagcagatgagagtggataccgaatggaaagaactgagcttctttaaagctcagctttgatgccccgttctccctggaagctctctctggttctctgatcagaaactgtctctaaacatttggcaagacattctgttgtgggattttgcctggtggtaggaaaagcttgggtattagcctcagaaagattctcagctctgccattaagagctgttgtccctagggcaagtctctgcctttctaagcctggttttcttctctggaaaatgaggctaatactttggcaaattgtcagaaaggttaaagaaagttgctgggcacagtggttcatgcctataatgccagcgctttgggattccaaggctggaggattgcttgaggataggagtttaagaccagcctggcaatacagtgagatcccatctctacaaaaaagaaaaaaggtagccaggcatggtggtgcactcctataaaaattgaagctgcagtgagctgagactgcaccactgcactccagcctgggtgactgaggaagaccttgtctccn

SEQ ID NO: 320366 - DNA, 1670 bp, Homo sapiens
gagtttgctgactccctctggtttccggtcaggtcggtcggtccccactatgggcctggagctgtacctggacctgctgtcccagccctgccgcgctgtttacatctttgccaagaagaacgacattcccttcgagctgcgcatcgtggatctgattaaaggtcagcacttaagcgatgcctttgcccaggtgaaccccctcaagaaggtgccagccttgaaggacggggacttcaccttgacggagagtgtggccatcctgctctacctgacgcgcaaatataaggtccctgactactggtaccctcaggacctgcaggcccgtgcccgtgtggatgagtacctggcatggcagcacacgactctgcggagaagctgcctccgggccttgtggcataaggtgatgttccctgttttcctgggtgagccagtatctccccagacactggcagccaccctggcagagttggatgtgaccctgcagttgctcgaggacaagttcctccagaacaaggccttccttactggtcctcacatctccttagctgacctcgtagccatcacggagctgatgcatcccgtgggtgctggctgccaagtcttcgaaggccgacccaagctggccacatggcggcagcgcgtggaggcagcagtgggggaggacctcttccaggaggcccatgaggtcattctgaaggccaaggacttcccacctgcagaccccaccataaagcagaagctgatgccctgggtgctggccatgatccggtgagctgggaaacctcacccttgcaccgtcctcagcagtccacaaagcattttcatttctaatggcccatgggagccaggcccagaaagcaggaatggcttgcttaagacttgcccaagtcccagagcacctcacctcccgaagccaccatccccaccctgtcttccacagccgcctgaaagccacaatgagaatgatgcacactgaggccttgtgtcctttaatcactgcatttcattttgattttggataataaacctgggctcagcctgagcctctgcttctaactctaatgtgtgatttatttgactttcctctgtcccagacctggtcatggtctctatgcaaaagacaacccccttcccaggccgtgtgggtcagcttccccctgatgtttgccaagagtgaaattaataaatgtggctgaggccgcgtgcggtggctcacgcttgtaatcccagcatcttactgttaatcactagttttgcatttctcttgaggaactggtcaggaagagaaaacctagacagcagctctcctggtcaagacccagtcattcagaagcctaaatggcctgcctaggtgtttggctttaaactgttagcaggaatggagtactctgattgtgttttagaataatattccgggcctactacccctgcgcaccggtcctggcccagggctagctccttggtgagaaactcaaagaagtgggcactgtggctgcggttgtcctcggcggtgcccactacgccgatggaggagatggacagctgcgcgcagggctcggtggacccgctcagcgccctggccaggcccggccgtaccgtcacgttcacaagctgaggggaacatgaaaagttttacccgaagctggagccagtcgggctacgtctggggt

SEQ ID NO: 320367 - DNA, 997 bp, Homo sapiens
gagtttgctgactccctctggtttccggtcaggtcggtcggtccccactatgggcctggagctgtacctggacctgctgtcccagccctgccgcgctgtttacatctttgccaagaagaacgacattcccttcgagctgcgcatcgtggatctgattaaaggtcagcacttaagcgatgcctttgcccaggtgaaccccctcaagaaggtgccagccttgaaggacggggacttcaccttgacggagagtaccctcaggacctgcaggcccgtgcccgtgtggatgagtacctggcatggcagcacacgactctgcggagaagctgcctccgggccttgtggcataaggtgatgttccctgttttcctgggtgagccagtatctccccagacactggcagccaccctggcagagttggatgtgaccctgcagttgctcgaggacaagttcctccagaacaaggccttccttactggtcctcacatctccttagctgacctcgtagccatcacggagctgatgcatcccgtgggtgctggctgccaagtcttcgaaggccgacccaagctggccacatggcggcagcgcgtggaggcagcagtgggggaggacctcttccaggaggcccatgaggtcattctgaaggccaaggacttcccacctgcagaccccaccataaagcagaagctgatgccctgggtgctggccatgatccggtgagctgggaaacctcacccttgcaccgtcctcagcagtccacaaagcattttcatttctaatggcccatgggagccaggcccagaaagcaggaatggcttgcttaagacttgcccaagtcccagagcacctcacctcccgaagccaccatccccaccctgtcttccacagccgcctgaaagccacaatgagaatgatgcacactgaggccttgtgtcctttaatcactgcatttcattttgattttggataataaacctgggctcagcctgagcctctg

SEQ ID NO: 320368 - DNA, 1007 bp, Homo sapiens
gagtttgctgactccctctggtttccggtcaggtcggtcggtccccactatgggcctggagctgtacctggacctgctgtcccagccctgccgcgctgtttacatctttgccaagaagaacgacattcccttcgagctgcgcatcgtggatctgattaaagacggagtctcgctctgtcgcccaggctggagtgcagtggcaggatcacagctcactgcaacctctgccgcccgaaaccttgtcctctgcctcttgttcctgctggggaggtcagcacttaagcgatgcctttgcccaggtgaaccccctcaagaaggtgccagccttgaaggacggggacttcaccttgacggagaggtgatgttccctgttttcctgggtgagccagtatctccccagacactggcagccaccctggcagagttggatgtgaccctgcagttgctcgaggacaagttcctccagaacaaggccttccttactggtcctcacatctccttagctgacctcgtagccatcacggagctgatgcatcccgtgggtgctggctgccaagtcttcgaaggccgacccaagctggccacatggcggcagcgcgtggaggcagcagtgggggaggacctcttccaggaggcccatgaggtcattctgaaggccaaggacttcccacctgcagaccccaccataaagcagaagctgatgccctgggtgctggccatgatccggtgagctgggaaacctcacccttgcaccgtcctcagcagtccacaaagcattttcatttctaatggcccatgggagccaggcccagaaagcaggaatggcttgcttaagacttgcccaagtcccagagcacctcacctcccgaagccaccatccccaccctgtcttccacagccgcctgaaagccacaatgagaatgatgcacactgaggccttgtgtcctttaatcactgcatttcattttgattttggataataaacctgggctcagcctgagcctctg

SEQ ID NO: 320369 - DNA, 721 bp, Homo sapiens
gagtttgctgactccctctggtttccggtcaggtcggtcggtccccactatgggcctggagctgtacctggacctgctgtcccagccctgccgcgctgtttacatctttgccaagaagaacgacattcccttcgagctgcgcatcgtggatctgattaaaggtcagcacttaagcgatgcctttgcccaggtgaaccccctcaagaaggtgccagccttgaaggacggggacttcaccttgacggagagcccgtgggtgctggctgccaagtcttcgaaggccgacccaagctggccacatggcggcagcgcgtggaggcagcagtgggggaggacctcttccaggaggcccatgaggtcattctgaaggccaaggacttcccacctgcagaccccaccataaagcagaagctgatgccctgggtgctggccatgatccggtgagctgggaaacctcacccttgcaccgtcctcagcagtccacaaagcattttcatttctaatggcccatgggagccaggcccagaaagcaggaatggcttgcttaagacttgcccaagtcccagagcacctcacctcccgaagccaccatccccaccctgtcttccacagccgcctgaaagccacaatgagaatgatgcacactgaggccttgtgtcctttaatcactgcatttcattttgattttggataataaacctgggctcagcctgagcctctg

SEQ ID NO: 320370 - DNA, 755 bp, Homo sapiens
gagtttgctgactccctctggtttccggtcaggtcggtcggtccccactatgggcctggagctgtacctggacctgctgtcccagccctgccgcgctgtttacatctttgccaagaagaacgacattcccttcgagctgcgcatcgtggatctgattaaaggtcagcacttaagcgatgcctttgcccaggtgaaccccctcaagaaggtgccagccttgaaggacggggacttcaccttgacggagagtgtggccatcctgctctacctgacgcgcaaatataaggtccctgactactggtaccctcaggacctgcaggcccgtgcccgtgtggatgagtacctggcatggcagcacacgactctgcggagaagctgcctccgggccttgtggcataaggtgatgttccctgttttcctgggtgagccagtatctccccagacactggcagccaccctggcagagttggatgtgaccctgcagttgctcgaggacaagttcctccagaacaaggccttccttactggtcctcacatctccttagctgacctcgtagccatcacggagctgatgcatgtgagtgctgtgggcaggtgaacccactaggcagggggccctggctagttgctgaagtcctgcttatgctgccacaccgggctatggcactgtgcttaagtgtgtgtgcaaacacctcctggagatctgtggtccccaaatcagatgctgcccatccctgccctcacaaccatccatc

SEQ ID NO: 320371 - DNA, 1049 bp, Homo sapiens
gagtttgctgactccctctggtttccggtcaggtcggtcggtccccactatgggcctggagctgtacctggacctgctgtcccagccctgccgcgctgtttacatctttgccaagaagaacgacattcccttcgagctgcgcatcgtggatctgattaaaggtcagcacttaagcgatgcctttgcccaggtgaaccccctcaagaaggtgccagccttgaaggacggggacttcaccttgacggagagtgtggccatcctgctctacctgacgcgcaaatataaggtccctgactactggtaccctcaggacctgcaggcccgtgcccgtgtggatgagtacctggcatggcagcacacgactctgcggagaagctgcctccgggccttgtggcataaggtgatgttccctgttttcctgggtgagccagtatctccccagacactggcagccaccctggcagagttggatgtgaccctgcagttgctcgaggacaagttcctccagaacaaggccttccttactggtcctcacatctccttagctgacctcgtagccatcacggagctgatgcatcccgtgggtgctggctgccaagtcttcgaaggccgacccaagctggccacatggcggcagcgcgtggaggcagcagtgggggaggacctcttccaggaggcccatgaggtcattctgaaggccaaggacttcccacctgcagaccccaccataaagcagaagctgatgccctgggtgctggccatgatccggtgagctgggaaacctcacccttgcaccgtcctcagcagtccacaaagcattttcatttctaatggcccatgggagccaggcccagaaagcaggaatggcttgcttaagacttgcccaagtcccagagcacctcacctcccgaagccaccatccccaccctgtcttccacagccgcctgaaagccacaatgagaatgatgcacactgaggccttgtgtcctttaatcactgcatttcattttgattttggataataaacctgggctcagcctgagcctctg

SEQ ID NO: 320372 - DNA, 898 bp, Homo sapiens
gagtttgctgactccctctggtttccggtcaggtcggtcggtccccactatgggcctggagctgtacctggacctgctgtcccagccctgccgcgctgtttacatctttgccaagaagaacgacattcccttcgagctgcgcatcgtggatctgattaaaggtcagcacttaagcgatgcctttgcccaggtgaaccccctcaagaaggtgccagccttgaaggacggggacttcaccttgacggagaggtgatgttccctgttttcctgggtgagccagtatctccccagacactggcagccaccctggcagagttggatgtgaccctgcagttgctcgaggacaagttcctccagaacaaggccttccttactggtcctcacatctccttagctgacctcgtagccatcacggagctgatgcatcccgtgggtgctggctgccaagtcttcgaaggccgacccaagctggccacatggcggcagcgcgtggaggcagcagtgggggaggacctcttccaggaggcccatgaggtcattctgaaggccaaggacttcccacctgcagaccccaccataaagcagaagctgatgccctgggtgctggccatgatccggtgagctgggaaacctcacccttgcaccgtcctcagcagtccacaaagcattttcatttctaatggcccatgggagccaggcccagaaagcaggaatggcttgcttaagacttgcccaagtcccagagcacctcacctcccgaagccaccatccccaccctgtcttccacagccgcctgaaagccacaatgagaatgatgcacactgaggccttgtgtcctttaatcactgcatttcattttgattttggataataaacctgggctcagcctgagcctctg

SEQ ID NO: 320373 - DNA, 2048 bp, Homo sapiens
  misc_feature (2048)..(2048): n is a, c, g, or t
gagtttgctgactccctctggtttccggtcaggtcggtcggtccccactatgggcctggagctgtacctggacctgctgtcccagccctgccgcgctgtttacatctttgccaagaagaacgacattcccttcgagctgcgcatcgtggatctgattaaaggtcagcacttaagcgatgcctttgcccaggtgaaccccctcaagaaggtgccagccttgaaggacggggacttcaccttgacggagaggtaactgggaccctaggactgctgccaggcctgctggaaccatcctgttctaaccctctatttcatagacaaggaaactaaagtcttcagaggcagagagtctctgtgccccgcatcctgcagagagtcagtactggaccccaggcccttgccttcctgctattccagttcaccctgatgattagaaaagcaaatatctactttacttccacaccagtgctttggttgctggtgagtggtgagagtatccttgagacagggtaggccagaggacgatggcagctttgcccaccatggggcaggcctctggccaagcttgtgtggcgatggctcagtggcatctgggctgcccggtggctccatctctgggctgcagcttcccaggatgggtcttccccatggaagagccaccagatatggacgtcttacatcacagctggtcccaagaagttgaatcctcttcaggaaaagccaatctttccccagttctgccccttttgtcaccagagtcacccttcccctaacaagaacctggagtttgtgctttaaagctcatctctgaaatctcaggatggacgcacctccgatgaattcctctgacattctgccagggcccttcttcctccctggtgccccaggtgtcctgagtccttgtgtcactcagcgttgtgacccccaggtaccagccagagtcaatgtgcaatctctgcctctgtcactactctcaccttcaggtctgtggctcacagagacctgcagccctcctcagaggtggcttgaacaattggctgggagcaaaaggagctcctgggcaccctgcacagacaacggagtcgttaagctgggacacgtgtgtagccccagcttaaaagagaatataggcccgtggcagatacagaggttttctgcccttttggcctgcatgcccaacctttgggaaaccccaagttcctgaaagcttttctgtgtctccaaatggacacatcctgtgtccttccaggtccatgctcatctcatcaccatggcggccctcaaaacccagggaaggaggagagtgccagggggccttgtctgttctgttgttctaggatcctgcagctgcaggagtgcttcctgagtggtactttaggaagccaaactaccccagtcagcttagataggagctgattcttggcagaaagaatgacagaaagaacaaagggacacggaagcctttttgaacagtcaggccatcagaggctggtcggaatcccagcagatgagagtggataccgaatggaaagaactgagcttctttaaagctcagctttgatgccccgttctccctggaagctctctctggttctctgatcagaaactgtctctaaacatttggcaagacattctgttgtgggattttgcctggtggtaggaaaagcttgggtattagcctcagaaagattctcagctctgccattaagagctgttgtccctagggcaagtctctgcctttctaagcctggttttcttctctggaaaatgaggctaatactttggcaaattgtcagaaaggttaaagaaagttgctgggcacagtggttcatgcctataatgccagcgctttgggattccaaggctggaggattgcttgaggataggagtttaagaccagcctggcaatacagtgagatcccatctctacaaaaaagaaaaaaggtagccaggcatggtggtgcactcctataaaaattgaagctgcagtgagctgagactgcaccactgcactccagcctgggtgactgaggaagaccttgtctccn

SEQ ID NO: 320374 - DNA, 961 bp, Homo sapiens
gagtttgctgactccctctggtttccggtcaggtcggtcggtccccactatgggcctggagctgtacctggacctgctgtcccagccctgccgcgctgtttacatctttgccaagaagaacgacattcccttcgagctgcgcatcgtggatctgattaaagtgtggccatcctgctctacctgacgcgcaaatataaggtccctgactactggtaccctcaggacctgcaggcccgtgcccgtgtggatgagtacctggcatggcagcacacgactctgcggagaagctgcctccgggccttgtggcataaggtgatgttccctgttttcctgggtgagccagtatctccccagacactggcagccaccctggcagagttggatgtgaccctgcagttgctcgaggacaagttcctccagaacaaggccttccttactggtcctcacatctccttagctgacctcgtagccatcacggagctgatgcatcccgtgggtgctggctgccaagtcttcgaaggccgacccaagctggccacatggcggcagcgcgtggaggcagcagtgggggaggacctcttccaggaggcccatgaggtcattctgaaggccaaggacttcccacctgcagaccccaccataaagcagaagctgatgccctgggtgctggccatgatccggtgagctgggaaacctcacccttgcaccgtcctcagcagtccacaaagcattttcatttctaatggcccatgggagccaggcccagaaagcaggaatggcttgcttaagacttgcccaagtcccagagcacctcacctcccgaagccaccatccccaccctgtcttccacagccgcctgaaagccacaatgagaatgatgcacactgaggccttgtgtcctttaatcactgcatttcattttgattttggataataaacctgggctcagcctgagcctctg

SEQ ID NO: 320375 - DNA, 827 bp, Homo sapiens
cttggacagcagtgtccagtgtacatgctccagtgcccatagtgggtgacctgacctgactgaccggaaaccagagggataccctcaggacctgcaggcccgtgcccgtgtggatgagtacctggcatggcagcacacgactctgcggagaagctgcctccgggccttgtggcataaggtgatgttccctgttttcctgggtgagccagtatctccccagacactggcagccaccctggcagagttggatgtgaccctgcagttgctcgaggacaagttcctccagaacaaggccttccttactggtcctcacatctccttagctgacctcgtagccatcacggagctgatgcatcccgtgggtgctggctgccaagtcttcgaaggccgacccaagctggccacatggcggcagcgcgtggaggcagcagtgggggaggacctcttccaggaggcccatgaggtcattctgaaggccaaggacttcccacctgcagaccccaccataaagcagaagctgatgccctgggtgctggccatgatccggtgagctgggaaacctcacccttgcaccgtcctcagcagtccacaaagcattttcatttctaatggcccatgggagccaggcccagaaagcaggaatggcttgcttaagacttgcccaagtcccagagcacctcacctcccgaagccaccatccccaccctgtcttccacagccgcctgaaagccacaatgagaatgatgcacactgaggccttgtgtcctttaatcactgcatttcattttgattttggataataaacctgggctcagcctgagcctctg

SEQ ID NO: 320376 - DNA, 731 bp, Homo sapiens
ttcatagctgttctagcaggatcctttatagcttaggacacgactctgcgcgagaagctgcatccgggcttgttggcataaggtgatgttccctgttttcctgggtgagccagtatctccccagacactggcagccaccctggcagagttggatgtgaccctgcagttgctcgaggacaagttcctccagaacaaggccttccttactggtcctcacatctccttagctgacctcgtagccatcacggagctgatgcatcccgtgggtgctggctgccaagtcttcgaaggccgacccaagctggccacatggcggcagcgcgtggaggcagcagtgggggaggacctcttccaggaggcccatgaggtcattctgaaggccaaggacttcccacctgcagaccccaccataaagcagaagctgatgccctgggtgctggccatgatccggtgagctgggaaacctcacccttgcaccgtcctcagcagtccacaaagcattttcatttctaatggcccatgggagccaggcccagaaagcaggaatggcttgcttaagacttgcccaagtcccagagcacctcacctcccgaagccaccatccccaccctgtcttccacagccgcctgaaagccacaatgagaatgatgcacactgaggccttgtgtcctttaatcactgcatttcattttgattttggataataaacctgggctcagcctgagcctctg

SEQ ID NO: 320377 - DNA, 609 bp, Homo sapiens
tatccaggaacaaagactttagaccatatgttctatgtcatgccagttgttcaggtatcctaacagttagaaccctttttcactcccagagtttctcagtttggctgataaattatgcgatcagacttcccattccagtcaagatggagcagcccaatttcctactagtctttcctcttacaacttaaaaaccctggacgtaatgcaacaaacataggaaaattgaaagatggaaagaaggagaggcttctagggacatcaggactcgaggaacaacacagaggtgagttccctgggttttcttttatcctctcatatatcccagattggacaatagagaagcctgcaacccggaactgccaataggtacaggtaaagaaacttgtccctataatcaaaggaccagaaaaagggcacaagaagaacctttttgataatgcttacctgcccaaaacaccaaaggaaaaactgtccatacccaccacctccaggtgtcagtggggctaagcagagagctgaatgtccacccacatgtggtggcaacaagctggggacgtaagtgggccttctgcttttgcaggaataatgtcagccaggcccatcagagaa

SEQ ID NO: 320378 - DNA, 345 bp, Homo sapiens
ccgcgggaatgtgaggctgcggcacgaccaggggccgccagggggcgcccgtcctccttcccgcctgtgcctcccctcatcctcgctctgcttggacagagggtggggaagactagaattcagctctcactccggcccgcctgcaaggtgatccaaaggaagtcgcttaccctcctggcatttccctttggaaaagacatacaaaaatagtccccacccacaagccccagaggggcgccccaagagcacaacgagctgtctcaggaatgctctggcaatagcagcctatttgcacgaattattattactaataatgtcttccttgttcaagtcaaacagacatct

SEQ ID NO: 320379 - DNA, 310 bp, Homo sapiens
gaggggctgaggagcggctcagtgtcacctcccacagccaccggccctgacccttaatccagacaccgatggaagtcgacttttcatatctttctcctgaaatgaactctgtttttaagccttttaccatttgaaatgcatgtgttgtgcgcgttggggatgggaggaggggctgaggagcggctcagtgtcacctcccacagccaccggccctgacccttaatccagacaccgatggaagtcgacttttcatatctttctcctgaaatgaactctgttttaaattggaataaattttgttcctaaatgc

SEQ ID NO: 320380 - DNA, 4089 bp, Homo sapiens
gccctcggccccgggccggcccgccccgcctcggccgccgcctggcgagccgccgggtccccgctcggccggtggccgaggccggagggccgcggcgggcggcggccgaggcggctccggccagggccgggccgggggccggggggcggcggcgggcaggcggccgcgtcggccggggccgggacgatgactctggagtccatgatggcgtgttgcctgagcgatgaggtgaaggagtccaagcggatcaacgccgagatcgagaagcagctgcggcgggacaagcgcgacgcccggcgcgagctcaagctgctgctgctcggcacgggcgagagcgggaagagcacgttcatcaagcagatgcgcatcatccacggcgccggctactcggaggaggacaagcgcggcttcaccaagctcgtctaccagaacatcttcaccgccatgcaggccatgatccgggccatggagacgctcaagatcctctacaagtacgagcagaacaaggccaatgcgctcctgatccgggaggtggacgtggagaaggtgaccaccttcgagcatcagtacgtcagtgccatcaagaccctgtgggaggacccgggcatccaggaatgctacgaccgcaggcgcgagtaccagctctccgactctgccaagtactacctgaccgacgttgaccgcatcgccaccttgggctacctgcccacccagcaggacgtgctgcgggtccgcgtgcccaccaccggcatcatcgagtaccctttcgacctggagaacatcatcttccggatggtggatgtggggggccagcggtcggagcggaggaagtggatccactgctttgagaacgtgacatccatcatgtttctcgtcgccctcagcgaatacgaccaagtcctggtggagtcggacaacgagaaccggatggaggagagcaaagccctgttccggactatcatcacctacccctggttccagaactcctccgtcatcctcttcctcaacaagaaggacctgctggaggacaagatcctgtactcgcacctggtggactacttccccgagttcgatggtccccagcgggacgcccaggcggcgcgggagttcatcctgaagatgttcgtggacctgaaccccgacagcgacaagatcatctactcacacttcacgtgtgccaccgacacggagaacatccgcttcgtgttcgcggccgtgaaggacaccatcctgcagctcaacctcaaggagtacaacctggtctgagcgcccaggcccagggagacgggatggagacacggggcaggaccttccttccacggagcctgcggctgccgggcgggtggcgctgccgagtccgggccggggcctctgcccgcgggaggagatttttttttttcatatttttaacaaatggtttttatttcacagttatcaggggatgtacatctctccctccgtacacttcgcgcaccttctcaccttttgtcaacggcaaaggcagcctttttctggccttgacttatggctcgcttttttctaaaaaaaaaaaaaaaaagaaagaaagaaaaaaagcaacgaaacataaaacacacaagcgccccgtgcccccagtgactctgggcctcacagagcccccgccagccagcatggggccccgccctgcagccagtcacgcgcccccacaccgcagccccccgtggctgtccttccaaccccacgtgctttttctttctcctgcccgcttcttttcttcatcacaaaaggcgtggagactcggagacggacgtttttccccttttttaagttattgacgcccagcgcgcctcgcctcttcacccatcaacgctgtgctttgcccactggactcctgaagagggggtggggggctccctcggtcgcccaccctgggaagtgcctaaccttttattttattttatttttttgaggaaaaagaacgcctgactcacaggttgaagaaacaccctgggccctctctcatggccgggttccccgtccctctgcagaggctgggaagggtccccgggctggagccacgggggcttctctgggctgtgcctccggggccaacactggctgcttggggctgcccggggactccagagggctgcacggccaccctgccctggctagagcgcaccccaccggagcccacgtgggctgggcggctggagggatggtcccccggtgacactgggagaaaggccacttggatgggggcgtttctgttttgttccgctttgtgatgtcaccaatttggaaacagcgagggtgggtggggacttttacagaatattctcaggtgtgtacccgagaggcagagagagggacgtggccggcagctctgtgcgtggccttgtcccaagcacttgcgcccgcccccgagcgccgcccccggggagcgggaagccagcactcgcactttggccaggggcgcgtggaaggtggtggcaggcaccggcctgggcagcttccaggcctggctggccacgaccacggcccgagggggagcccgccaggccacgccgcactgagccacagccccgggggccgcctcccggggccccttgaggcactgaggcaccgagactggttctccccgagagactcggaaggtggggaacgaggggactgtgtttggggaggtggctttttcgtctgctgttgactgaacactacagcgccctgtggttccgggcttcgcacagctgtcccagggatggatcgcctgtgctgccttcgcccgccgccacaccgggaccctgcacggctgcttctggcctcgacagatgacaaaagaaacagccccaaaatacgaccactccaaccagcagttcccgcctgcctgcccgccactgtcaggcctgccctggcctcctcgtccgcagggctgtctgctggcttctgggggcagaagagcggggagccccgtggaagggtcaggggagaccaggtcagggcagctacatttctggtgatcagccccatggggagacggggctggcgggatacccccccccggcttccccacaccacttctgtctcacccggaagcgtcctttttttgtgccaggtgtctacctaagagggttggtgccagaagccccccatggcgagtgctggggcccggcggtgccctgggggagcagatggggccacccctggcagggccgctacaaccttttccagcagcggagccctctggggggcctgtgcttgtggcatctctgagggcccagattgcacaaggtgacctggccgtggcctgagggtggagtcgcccagcacgcaggccggggcgctgcggggctaagtattaggccttcccagggagggggcgtgccaagcatcccagagccgggctgggaccgccaaaacgtcgtggcctggatcctctgggtctgagtgcctgatcccctgccccccaaaaaagcagaggtaggtgttgcaggcccagggcaggggtgcctgccccaggagagtcccaggcagtggttctcgtgccagtggcacccaggggcaaggacagccaacccccacccttgccacgtgtggggccacgtgggcatgtggggtgtgtgtttttaccttggtgaatctcacctgccaacgatttctcgtgagtgccgaccaccttctccgaccatgttacgcccgggcggcagcagcccccggccactgcaaacccatgccctgggtcccccggctcccccagggaggcatccccgtgccaatgtcccccagtggtggcagcagatcctgtggccggcctggcggacgggacccagtgatacttgtatattacacagtcctgatttcagacaatttcaaccttaatctatttaaaaaagaatattctatacaagctgtttttaagccttttaccatttgaaatgcatgtgttgtgcgcgttggggatgggaggaggggctgaggagcggctcagtgtcacctcccacagccaccggccctgacccttaatccagacaccgatggaagtcgacttttcatatctttctcctgaaatgaactctgttttaaattggaataaattttgttcctaaatgc

SEQ ID NO: 320381 - DNA, 3904 bp, Homo sapiens
gccctcggccccgggccggcccgccccgcctcggccgccgcctggcgagccgccgggtccccgctcggccggtggccgaggccggagggccgcggcgggcggcggccgaggcggctccggccagggccgggccgggggccggggggcggcggcgggcaggcggccgcgtcggccggggccgggacgatgactctggagtccatgatggcgtgttgcctgagcgatgaggtgaaggagtccaagcggatcaacgccgagatcgagaagcagctgcggcgggacaagcgcgacgcccggcgcgagctcaagctgctgctgctcggccaatgcgctcctgatccgggaggtggacgtggagaaggtgaccaccttcgagcatcagtacgtcagtgccatcaagaccctgtgggaggacccgggcatccaggaatgctacgaccgcaggcgcgagtaccagctctccgactctgccaagtactacctgaccgacgttgaccgcatcgccaccttgggctacctgcccacccagcaggacgtgctgcgggtccgcgtgcccaccaccggcatcatcgagtaccctttcgacctggagaacatcatcttccggatggtggatgtggggggccagcggtcggagcggaggaagtggatccactgctttgagaacgtgacatccatcatgtttctcgtcgccctcagcgaatacgaccaagtcctggtggagtcggacaacgagaaccggatggaggagagcaaagccctgttccggactatcatcacctacccctggttccagaactcctccgtcatcctcttcctcaacaagaaggacctgctggaggacaagatcctgtactcgcacctggtggactacttccccgagttcgatggtccccagcgggacgcccaggcggcgcgggagttcatcctgaagatgttcgtggacctgaaccccgacagcgacaagatcatctactcacacttcacgtgtgccaccgacacggagaacatccgcttcgtgttcgcggccgtgaaggacaccatcctgcagctcaacctcaaggagtacaacctggtctgagcgcccaggcccagggagacgggatggagacacggggcaggaccttccttccacggagcctgcggctgccgggcgggtggcgctgccgagtccgggccggggcctctgcccgcgggaggagatttttttttttcatatttttaacaaatggtttttatttcacagttatcaggggatgtacatctctccctccgtacacttcgcgcaccttctcaccttttgtcaacggcaaaggcagcctttttctggccttgacttatggctcgcttttttctaaaaaaaaaaaaaaaaagaaagaaagaaaaaaagcaacgaaacataaaacacacaagcgccccgtgcccccagtgactctgggcctcacagagcccccgccagccagcatggggccccgccctgcagccagtcacgcgcccccacaccgcagccccccgtggctgtccttccaaccccacgtgctttttctttctcctgcccgcttcttttcttcatcacaaaaggcgtggagactcggagacggacgtttttccccttttttaagttattgacgcccagcgcgcctcgcctcttcacccatcaacgctgtgctttgcccactggactcctgaagagggggtggggggctccctcggtcgcccaccctgggaagtgcctaaccttttattttattttatttttttgaggaaaaagaacgcctgactcacaggttgaagaaacaccctgggccctctctcatggccgggttccccgtccctctgcagaggctgggaagggtccccgggctggagccacgggggcttctctgggctgtgcctccggggccaacactggctgcttggggctgcccggggactccagagggctgcacggccaccctgccctggctagagcgcaccccaccggagcccacgtgggctgggcggctggagggatggtcccccggtgacactgggagaaaggccacttggatgggggcgtttctgttttgttccgctttgtgatgtcaccaatttggaaacagcgagggtgggtggggacttttacagaatattctcaggtgtgtacccgagaggcagagagagggacgtggccggcagctctgtgcgtggccttgtcccaagcacttgcgcccgcccccgagcgccgcccccggggagcgggaagccagcactcgcactttggccaggggcgcgtggaaggtggtggcaggcaccggcctgggcagcttccaggcctggctggccacgaccacggcccgagggggagcccgccaggccacgccgcactgagccacagccccgggggccgcctcccggggccccttgaggcactgaggcaccgagactggttctccccgagagactcggaaggtggggaacgaggggactgtgtttggggaggtggctttttcgtctgctgttgactgaacactacagcgccctgtggttccgggcttcgcacagctgtcccagggatggatcgcctgtgctgccttcgcccgccgccacaccgggaccctgcacggctgcttctggcctcgacagatgacaaaagaaacagccccaaaatacgaccactccaaccagcagttcccgcctgcctgcccgccactgtcaggcctgccctggcctcctcgtccgcagggctgtctgctggcttctgggggcagaagagcggggagccccgtggaagggtcaggggagaccaggtcagggcagctacatttctggtgatcagccccatggggagacggggctggcgggatacccccccccggcttccccacaccacttctgtctcacccggaagcgtcctttttttgtgccaggtgtctacctaagagggttggtgccagaagccccccatggcgagtgctggggcccggcggtgccctgggggagcagatggggccacccctggcagggccgctacaaccttttccagcagcggagccctctggggggcctgtgcttgtggcatctctgagggcccagattgcacaaggtgacctggccgtggcctgagggtggagtcgcccagcacgcaggccggggcgctgcggggctaagtattaggccttcccagggagggggcgtgccaagcatcccagagccgggctgggaccgccaaaacgtcgtggcctggatcctctgggtctgagtgcctgatcccctgccccccaaaaaagcagaggtaggtgttgcaggcccagggcaggggtgcctgccccaggagagtcccaggcagtggttctcgtgccagtggcacccaggggcaaggacagccaacccccacccttgccacgtgtggggccacgtgggcatgtggggtgtgtgtttttaccttggtgaatctcacctgccaacgatttctcgtgagtgccgaccaccttctccgaccatgttacgcccgggcggcagcagcccccggccactgcaaacccatgccctgggtcccccggctcccccagggaggcatccccgtgccaatgtcccccagtggtggcagcagatcctgtggccggcctggcggacgggacccagtgatacttgtatattacacagtcctgatttcagacaatttcaaccttaatctatttaaaaaagaatattctatacaagctgtttttaagccttttaccatttgaaatgcatgtgttgtgcgcgttggggatgggaggaggggctgaggagcggctcagtgtcacctcccacagccaccggccctgacccttaatccagacaccgatggaagtcgacttttcatatctttctcctgaaatgaactctgttttaaattggaataaattttgttcctaaatgc

SEQ ID NO: 320382 - DNA, 4483 bp, Homo sapiens
cattgtttctctgccagccgcctctgtccaccacacgctggcagagggccggccaggtgctgtgggatgcagctggaggccttgaaggccggtgggatcgtcccagtgcgtgaggagaggctcctgctccctcaggtggggacaagacacggggggacccggatcccagccctgccggccgccgcaggcgtgcaggagaggcctcgcgctccagacgggctgtggcctggtgtcggcacacccactgtcctcccgcctggccacagctgctggtgcgggccctcttgtcccttagagtcacctggcacatctgtcatccaccggtgcctgctggactcccccgcagaccagaccaggtggatttcaccactcacatgcccaaagcagccccgctctcctcggcagagttgcagggaccccggccttccctggggcctggggccagggcctgaggggcactctccgcttctgcctttgtattctttcaaggagaccaaagtgccttttctcgttatagaaaacttagaaaagtcacaagtagaaagaggcaaacgtcccgtaaggaacgcacgcccgcagacatcgtctgagctgattttctttctcccgcctgtgcgtggcctgagagtgtgaggttgagctgctcaccacgcggggcagggcgctgcgcctgctcttctgccccaggaggataccggcaactctgccctctgcagccgtcactggagggtccctgcagggagcaactgtggcatcagtgtttactcctgcgagtgacgcttggtgaacatctgtgtccctggcccagtgaggggaaaggcttctgtgctcagggtgacatccagatgccagatgtagggtccctgggcacccatcgcaggttcccgcagcagctggcgcccagaatcctctgggttctcacacccccacactagcgcccgcttccctgggcccagtggtctcaggcccctttgccagtgagggaagggtctgcggtggtcacccctggaggcggtgcggccgctctctgagagcgtccttgcccgttctaagagtgggggctcttcctgctccagccgatgtcagtctggtgtggcaggaggggcttgggtgggagccgtcctgggattgcagattgggccttggggcgccaggtggctgagtcctggcgctgtgtcctttcaggatggtggatgtggggggccagcggtcggagcggaggaagtggatccactgctttgagaacgtgacatccatcatgtttctcgtcgccctcagcgaatacgaccaagtcctggtggagtcggacaacgagaaccggatggaggagagcaaagccctgttccggactatcatcacctacccctggttccagaactcctccgtcatcctcttcctcaacaagaaggacctgctggaggacaagatcctgtactcgcacctggtggactacttccccgagttcgatggtccccagcgggacgcccaggcggcgcgggagttcatcctgaagatgttcgtggacctgaaccccgacagcgacaagatcatctactcacacttcacgtgtgccaccgacacggagaacatccgcttcgtgttcgcggccgtgaaggacaccatcctgcagctcaacctcaaggagtacaacctggtctgagcgcccaggcccagggagacgggatggagacacggggcaggaccttccttccacggagcctgcggctgccgggcgggtggcgctgccgagtccgggccggggcctctgcccgcgggaggagatttttttttttcatatttttaacaaatggtttttatttcacagttatcaggggatgtacatctctccctccgtacacttcgcgcaccttctcaccttttgtcaacggcaaaggcagcctttttctggccttgacttatggctcgcttttttctaaaaaaaaaaaaaaaaagaaagaaagaaaaaaagcaacgaaacataaaacacacaagcgccccgtgcccccagtgactctgggcctcacagagcccccgccagccagcatggggccccgccctgcagccagtcacgcgcccccacaccgcagccccccgtggctgtccttccaaccccacgtgctttttctttctcctgcccgcttcttttcttcatcacaaaaggcgtggagactcggagacggacgtttttccccttttttaagttattgacgcccagcgcgcctcgcctcttcacccatcaacgctgtgctttgcccactggactcctgaagagggggtggggggctccctcggtcgcccaccctgggaagtgcctaaccttttattttattttatttttttgaggaaaaagaacgcctgactcacaggttgaagaaacaccctgggccctctctcatggccgggttccccgtccctctgcagaggctgggaagggtccccgggctggagccacgggggcttctctgggctgtgcctccggggccaacactggctgcttggggctgcccggggactccagagggctgcacggccaccctgccctggctagagcgcaccccaccggagcccacgtgggctgggcggctggagggatggtcccccggtgacactgggagaaaggccacttggatgggggcgtttctgttttgttccgctttgtgatgtcaccaatttggaaacagcgagggtgggtggggacttttacagaatattctcaggtgtgtacccgagaggcagagagagggacgtggccggcagctctgtgcgtggccttgtcccaagcacttgcgcccgcccccgagcgccgcccccggggagcgggaagccagcactcgcactttggccaggggcgcgtggaaggtggtggcaggcaccggcctgggcagcttccaggcctggctggccacgaccacggcccgagggggagcccgccaggccacgccgcactgagccacagccccgggggccgcctcccggggccccttgaggcactgaggcaccgagactggttctccccgagagactcggaaggtggggaacgaggggactgtgtttggggaggtggctttttcgtctgctgttgactgaacactacagcgccctgtggttccgggcttcgcacagctgtcccagggatggatcgcctgtgctgccttcgcccgccgccacaccgggaccctgcacggctgcttctggcctcgacagatgacaaaagaaacagccccaaaatacgaccactccaaccagcagttcccgcctgcctgcccgccactgtcaggcctgccctggcctcctcgtccgcagggctgtctgctggcttctgggggcagaagagcggggagccccgtggaagggtcaggggagaccaggtcagggcagctacatttctggtgatcagccccatggggagacggggctggcgggatacccccccccggcttccccacaccacttctgtctcacccggaagcgtcctttttttgtgccaggtgtctacctaagagggttggtgccagaagccccccatggcgagtgctggggcccggcggtgccctgggggagcagatggggccacccctggcagggccgctacaaccttttccagcagcggagccctctggggggcctgtgcttgtggcatctctgagggcccagattgcacaaggtgacctggccgtggcctgagggtggagtcgcccagcacgcaggccggggcgctgcggggctaagtattaggccttcccagggagggggcgtgccaagcatcccagagccgggctgggaccgccaaaacgtcgtggcctggatcctctgggtctgagtgcctgatcccctgccccccaaaaaagcagaggtaggtgttgcaggcccagggcaggggtgcctgccccaggagagtcccaggcagtggttctcgtgccagtggcacccaggggcaaggacagccaacccccacccttgccacgtgtggggccacgtgggcatgtggggtgtgtgtttttaccttggtgaatctcacctgccaacgatttctcgtgagtgccgaccaccttctccgaccatgttacgcccgggcggcagcagcccccggccactgcaaacccatgccctgggtcccccggctcccccagggaggcatccccgtgccaatgtcccccagtggtggcagcagatcctgtggccggcctggcggacgggacccagtgatacttgtatattacacagtcctgatttcagacaatttcaaccttaatctatttaaaaaagaatattctatacaagctgtttttaagccttttaccatttgaaatgcatgtgttgtgcgcgttggggatgggaggaggggctgaggagcggctcagtgtcacctcccacagccaccggccctgacccttaatccagacaccgatggaagtcgacttttcatatctttctcctgaaatgaactctgttttaaattggaataaattttgttcctaaatgc

SEQ ID NO: 320383 - DNA, 3204 bp, Homo sapiens
gccctcggccccgggccggcccgccccgcctcggccgccgcctggcgagccgccgggtccccgctcggccggtggccgaggccggagggccgcggcgggcggcggccgaggcggctccggccagggccgggccgggggccggggggcggcggcgggcaggcggccgcgtcggccggggccgggacgatgactctggagtccatgatggcgtgttgcctgagcgatgaggtgaagatgttcgtggacctgaaccccgacagcgacaagatcatctactcacacttcacgtgtgccaccgacacggagaacatccgcttcgtgttcgcggccgtgaaggacaccatcctgcagctcaacctcaaggagtacaacctggtctgagcgcccaggcccagggagacgggatggagacacggggcaggaccttccttccacggagcctgcggctgccgggcgggtggcgctgccgagtccgggccggggcctctgcccgcgggaggagatttttttttttcatatttttaacaaatggtttttatttcacagttatcaggggatgtacatctctccctccgtacacttcgcgcaccttctcaccttttgtcaacggcaaaggcagcctttttctggccttgacttatggctcgcttttttctaaaaaaaaaaaaaaaaagaaagaaagaaaaaaagcaacgaaacataaaacacacaagcgccccgtgcccccagtgactctgggcctcacagagcccccgccagccagcatggggccccgccctgcagccagtcacgcgcccccacaccgcagccccccgtggctgtccttccaaccccacgtgctttttctttctcctgcccgcttcttttcttcatcacaaaaggcgtggagactcggagacggacgtttttccccttttttaagttattgacgcccagcgcgcctcgcctcttcacccatcaacgctgtgctttgcccactggactcctgaagagggggtggggggctccctcggtcgcccaccctgggaagtgcctaaccttttattttattttatttttttgaggaaaaagaacgcctgactcacaggttgaagaaacaccctgggccctctctcatggccgggttccccgtccctctgcagaggctgggaagggtccccgggctggagccacgggggcttctctgggctgtgcctccggggccaacactggctgcttggggctgcccggggactccagagggctgcacggccaccctgccctggctagagcgcaccccaccggagcccacgtgggctgggcggctggagggatggtcccccggtgacactgggagaaaggccacttggatgggggcgtttctgttttgttccgctttgtgatgtcaccaatttggaaacagcgagggtgggtggggacttttacagaatattctcaggtgtgtacccgagaggcagagagagggacgtggccggcagctctgtgcgtggccttgtcccaagcacttgcgcccgcccccgagcgccgcccccggggagcgggaagccagcactcgcactttggccaggggcgcgtggaaggtggtggcaggcaccggcctgggcagcttccaggcctggctggccacgaccacggcccgagggggagcccgccaggccacgccgcactgagccacagccccgggggccgcctcccggggccccttgaggcactgaggcaccgagactggttctccccgagagactcggaaggtggggaacgaggggactgtgtttggggaggtggctttttcgtctgctgttgactgaacactacagcgccctgtggttccgggcttcgcacagctgtcccagggatggatcgcctgtgctgccttcgcccgccgccacaccgggaccctgcacggctgcttctggcctcgacagatgacaaaagaaacagccccaaaatacgaccactccaaccagcagttcccgcctgcctgcccgccactgtcaggcctgccctggcctcctcgtccgcagggctgtctgctggcttctgggggcagaagagcggggagccccgtggaagggtcaggggagaccaggtcagggcagctacatttctggtgatcagccccatggggagacggggctggcgggatacccccccccggcttccccacaccacttctgtctcacccggaagcgtcctttttttgtgccaggtgtctacctaagagggttggtgccagaagccccccatggcgagtgctggggcccggcggtgccctgggggagcagatggggccacccctggcagggccgctacaaccttttccagcagcggagccctctggggggcctgtgcttgtggcatctctgagggcccagattgcacaaggtgacctggccgtggcctgagggtggagtcgcccagcacgcaggccggggcgctgcggggctaagtattaggccttcccagggagggggcgtgccaagcatcccagagccgggctgggaccgccaaaacgtcgtggcctggatcctctgggtctgagtgcctgatcccctgccccccaaaaaagcagaggtaggtgttgcaggcccagggcaggggtgcctgccccaggagagtcccaggcagtggttctcgtgccagtggcacccaggggcaaggacagccaacccccacccttgccacgtgtggggccacgtgggcatgtggggtgtgtgtttttaccttggtgaatctcacctgccaacgatttctcgtgagtgccgaccaccttctccgaccatgttacgcccgggcggcagcagcccccggccactgcaaacccatgccctgggtcccccggctcccccagggaggcatccccgtgccaatgtcccccagtggtggcagcagatcctgtggccggcctggcggacgggacccagtgatacttgtatattacacagtcctgatttcagacaatttcaaccttaatctatttaaaaaagaatattctatacaagctgtttttaagccttttaccatttgaaatgcatgtgttgtgcgcgttggggatgggaggaggggctgaggagcggctcagtgtcacctcccacagccaccggccctgacccttaatccagacaccgatggaagtcgacttttcatatctttctcctgaaatgaactctgttttaaattggaataaattttgttcctaaatgc

SEQ ID NO: 320384 - DNA, 960 bp, Homo sapiens
gccctcggccccgggccggcccgccccgcctcggccgccgcctggcgagccgccgggtccccgctcggccggtggccgaggccggagggccgcggcgggcggcggccgaggcggctccggccagggccgggccgggggccggggggcggcggcgggcaggcggccgcgtcggccggggccgggacgatgactctggagtccatgatggcgtgttgcctgagcgatgaggtgaaggagtccaagcggatcaacgccgagatcgagaagcagctgcggcgggacaagcgcgacgcccggcgcgagctcaagctgctgctgctcggcacgggcgagagcgggaagagcacgttcatcaagcagatgcgcatcatccacggcgccggctactcggaggaggacaagcgcggcttcaccaagctcgtctaccagaacatcttcaccgccatgcaggccatgatccgggccatggagacgctcaagatcctctacaagtacgagcagaacaaggccaatgcgctcctgatccgggaggtggacgtggagaaggtgaccaccttcgagcatcagtacgtcagtgccatcaagaccctgtgggaggacccgggcatccaggaatgctacgaccgcaggcgcgagtaccagctctccgactctgccaagtactacctgaccgacgttgaccgcatcgccaccttgggctacctgcccacccagcaggacgtgctgcgggtccgcgtgcccaccaccggcatcatcgagtaccctttcgacctggagaacatcatcttccgctgggcgtggttgtgtgcacctgtggtcccagctactcaggaggctgaggcaggaggatcgctcaagcccaggaggttgaggctgaagtgagccatgatggcaccactggactccagcctgggcgacagagggagaccctgtttcgtcttattaaacaaaagaaagccc

SEQ ID NO: 320385 - DNA, 405 bp, Homo sapiens
gaggcctgggccgtgacagtagtgccctggggctacagtgggattggcaccgcagctcacctggggagggaggggagctgcggcccgtcaggcatgcagtgggctgggggtcgagctgggtgggccgtgggccttactcgctcatcccctgggagtgacaaaggggcccacgagtcccttgccctgggccgggctggggcacagcctcaccctctgccctcccccaggtccccagcgggacgcccaggcggcgcgggagttcatcctgaagatgttcgtggacctgaaccccgacagcgacaagatcatctactcacacttcacgtgtgccaccgacacggagaacatccgcttcgtgttcgcggccgtgaaggacaccatcctgcagctcaacctcaaggagta

SEQ ID NO: 320386 - DNA, 3918 bp, Homo sapiens
gccctcggccccgggccggcccgccccgcctcggccgccgcctggcgagccgccgggtccccgctcggccggtggccgaggccggagggccgcggcgggcggcggccgaggcggctccggccagggccgggccgggggccggggggcggcggcgggcaggcggccgcgtcggccggggccgggacgatgactctggagtccatgatggcgtgttgcctgagcgatgaggtgaaggagtccaagcggatcaacgccgagatcgagaagcagctgcggcgggacaagcgcgacgcccggcgcgagctcaagctgctgctgctcggcacgggcgagagcgggaagagcacgttcatcaagcagatgcgcatcatccacggcgccggctactcggaggaggacaagcgcggcttcaccaagctcgtctaccagaacatcttcaccgccatgcaggccatgatccgggccatggagacgctcaagatcctctacaagtacgagcagaacaaggccaatgcgctcctgatccgggaggtggacgtggagaaggtgaccaccttcgagcatcagtacgtcagtgccatcaagaccctgtgggaggacccgggcatccaggaatgctacgaccgcaggcgcgagtaccagctctccgactctgccaagtactacctgaccgacgttgaccgcatcgccaccttgggctacctgcccacccagcaggacgtgctgcgggtccgcgtgcccaccaccggcatcatcgagtaccctttcgacctggagaacatcatcttccggatggtggatgtggggggccagcggtcggagcggaggaagtggatccactgctttgagaacgtgacatccatcatgtttctcgtcgccctcagcgaatacgaccaagtcctggtggagtcggacaacgagaaccggatggaggagagcaaagccctgttccggactatcatcacctacccctggttccagaactcctccgtcatcctcttcctcaacaagaaggacctgctggaggacaagatcctgtactcgcacctggtggactacttccccgagttcgatggtccccagcgggacgcccaggcggcgcgggagttcatcctgaagatgttcgtggacctgaaccccgacagcgacaagatcatctactcacacttcacgtgtgccaccgacacggagaacatccgcttcgtgttcgcggccgtgaaggacaccatcctgcagctcaacctcaaggagtacaacctgttatcaggggatgtacatctctccctccgtacacttcgcgcaccttctcaccttttgtcaacggcaaaggcagcctttttctggccttgacttatggctcgcttttttctaaaaaaaaaaaaaaaaagaaagaaagaaaaaaagcaacgaaacataaaacacacaagcgccccgtgcccccagtgactctgggcctcacagagcccccgccagccagcatggggccccgccctgcagccagtcacgcgcccccacaccgcagccccccgtggctgtccttccaaccccacgtgctttttctttctcctgcccgcttcttttcttcatcacaaaaggcgtggagactcggagacggacgtttttccccttttttaagttattgacgcccagcgcgcctcgcctcttcacccatcaacgctgtgctttgcccactggactcctgaagagggggtggggggctccctcggtcgcccaccctgggaagtgcctaaccttttattttattttatttttttgaggaaaaagaacgcctgactcacaggttgaagaaacaccctgggccctctctcatggccgggttccccgtccctctgcagaggctgggaagggtccccgggctggagccacgggggcttctctgggctgtgcctccggggccaacactggctgcttggggctgcccggggactccagagggctgcacggccaccctgccctggctagagcgcaccccaccggagcccacgtgggctgggcggctggagggatggtcccccggtgacactgggagaaaggccacttggatgggggcgtttctgttttgttccgctttgtgatgtcaccaatttggaaacagcgagggtgggtggggacttttacagaatattctcaggtgtgtacccgagaggcagagagagggacgtggccggcagctctgtgcgtggccttgtcccaagcacttgcgcccgcccccgagcgccgcccccggggagcgggaagccagcactcgcactttggccaggggcgcgtggaaggtggtggcaggcaccggcctgggcagcttccaggcctggctggccacgaccacggcccgagggggagcccgccaggccacgccgcactgagccacagccccgggggccgcctcccggggccccttgaggcactgaggcaccgagactggttctccccgagagactcggaaggtggggaacgaggggactgtgtttggggaggtggctttttcgtctgctgttgactgaacactacagcgccctgtggttccgggcttcgcacagctgtcccagggatggatcgcctgtgctgccttcgcccgccgccacaccgggaccctgcacggctgcttctggcctcgacagatgacaaaagaaacagccccaaaatacgaccactccaaccagcagttcccgcctgcctgcccgccactgtcaggcctgccctggcctcctcgtccgcagggctgtctgctggcttctgggggcagaagagcggggagccccgtggaagggtcaggggagaccaggtcagggcagctacatttctggtgatcagccccatggggagacggggctggcgggatacccccccccggcttccccacaccacttctgtctcacccggaagcgtcctttttttgtgccaggtgtctacctaagagggttggtgccagaagccccccatggcgagtgctggggcccggcggtgccctgggggagcagatggggccacccctggcagggccgctacaaccttttccagcagcggagccctctggggggcctgtgcttgtggcatctctgagggcccagattgcacaaggtgacctggccgtggcctgagggtggagtcgcccagcacgcaggccggggcgctgcggggctaagtattaggccttcccagggagggggcgtgccaagcatcccagagccgggctgggaccgccaaaacgtcgtggcctggatcctctgggtctgagtgcctgatcccctgccccccaaaaaagcagaggtaggtgttgcaggcccagggcaggggtgcctgccccaggagagtcccaggcagtggttctcgtgccagtggcacccaggggcaaggacagccaacccccacccttgccacgtgtggggccacgtgggcatgtggggtgtgtgtttttaccttggtgaatctcacctgccaacgatttctcgtgagtgccgaccaccttctccgaccatgttacgcccgggcggcagcagcccccggccactgcaaacccatgccctgggtcccccggctcccccagggaggcatccccgtgccaatgtcccccagtggtggcagcagatcctgtggccggcctggcggacgggacccagtgatacttgtatattacacagtcctgatttcagacaatttcaaccttaatctatttaaaaaagaatattctatacaagctgtttttaagccttttaccatttgaaatgcatgtgttgtgcgcgttggggatgggaggaggggctgaggagcggctcagtgtcacctcccacagccaccggccctgacccttaatccagacaccgatggaagtcgacttttcatatctttctcctgaaatgaactctgttttaaattggaataaattttgttcctaaatgc

SEQ ID NO: 320387 - DNA, 4435 bp, Homo sapiens
cattgtttctctgccagccgcctctgtccaccacacgctggcagagggccggccaggtgctgtgggatgcagctggaggccttgaaggccggtgggatcgtcccagtgcgtgaggagaggctcctgctccctcaggtggggacaagacacggggggacccggatcccagccctgccggccgccgcaggcgtgcaggagaggcctcgcgctccagacgggctgtggcctggtgtcggcacacccactgtcctcccgcctggccacagctgctggtgcgggccctcttgtcccttagagtcacctggcacatctgtcatccaccggtgcctgctggactcccccgcagaccagaccaggtggatttcaccactcacatgcccaaagcagccccgctctcctcggcagagttgcagggaccccggccttccctggggcctggggccagggcctgaggggcactctccgcttctgcctttgtattctttcaaggagaccaaagtgccttttctcgttatagaaaacttagaaaagtcacaagtagaaagaggcaaacgtcccgtaaggaacgcacgcccgcagacatcgtctgagctgattttctttctcccgcctgtgcgtggcctgagagtgtgaggttgagctgctcaccacgcggggcagggcgctgcgcctgctcttctgccccaggaggataccggcaactctgccctctgcagccgtcactggagggtccctgcagggagcaactgtggcatcagtgtttactcctgcgagtgacgcttggtgaacatctgtgtccctggcccagtgaggggaaaggcttctgtgctcagggtgacatccagatgccagatgtagggtccctgggcacccatcgcaggttcccgcagcagctggcgcccagaatcctctgggttctcacacccccacactagcgcccgcttccctgggcccagtggtctcaggcccctttgccagtgagggaagggtctgcggtggtcacccctggaggcggtgcggccgctctctgagagcgtccttgcccgttctaagagtgggggctcttcctgctccagccgatgtcagtctggtgtggcaggaggggcttgggtgggagccgtcctgggattgcagattgggccttggggcgccaggtggctgagtcctggcgctgtgtcctttcaggatggtggatgtggggggccagcggtcggagcggaggaagtggatccactgctttgagaacgtgacatccatcatgtttctcgtcgccctcagcgaatacgaccaagtcctggtggagtcggacaacgagccctggttccagaactcctccgtcatcctcttcctcaacaagaaggacctgctggaggacaagatcctgtactcgcacctggtggactacttccccgagttcgatggtccccagcgggacgcccaggcggcgcgggagttcatcctgaagatgttcgtggacctgaaccccgacagcgacaagatcatctactcacacttcacgtgtgccaccgacacggagaacatccgcttcgtgttcgcggccgtgaaggacaccatcctgcagctcaacctcaaggagtacaacctggtctgagcgcccaggcccagggagacgggatggagacacggggcaggaccttccttccacggagcctgcggctgccgggcgggtggcgctgccgagtccgggccggggcctctgcccgcgggaggagatttttttttttcatatttttaacaaatggtttttatttcacagttatcaggggatgtacatctctccctccgtacacttcgcgcaccttctcaccttttgtcaacggcaaaggcagcctttttctggccttgacttatggctcgcttttttctaaaaaaaaaaaaaaaaagaaagaaagaaaaaaagcaacgaaacataaaacacacaagcgccccgtgcccccagtgactctgggcctcacagagcccccgccagccagcatggggccccgccctgcagccagtcacgcgcccccacaccgcagccccccgtggctgtccttccaaccccacgtgctttttctttctcctgcccgcttcttttcttcatcacaaaaggcgtggagactcggagacggacgtttttccccttttttaagttattgacgcccagcgcgcctcgcctcttcacccatcaacgctgtgctttgcccactggactcctgaagagggggtggggggctccctcggtcgcccaccctgggaagtgcctaaccttttattttattttatttttttgaggaaaaagaacgcctgactcacaggttgaagaaacaccctgggccctctctcatggccgggttccccgtccctctgcagaggctgggaagggtccccgggctggagccacgggggcttctctgggctgtgcctccggggccaacactggctgcttggggctgcccggggactccagagggctgcacggccaccctgccctggctagagcgcaccccaccggagcccacgtgggctgggcggctggagggatggtcccccggtgacactgggagaaaggccacttggatgggggcgtttctgttttgttccgctttgtgatgtcaccaatttggaaacagcgagggtgggtggggacttttacagaatattctcaggtgtgtacccgagaggcagagagagggacgtggccggcagctctgtgcgtggccttgtcccaagcacttgcgcccgcccccgagcgccgcccccggggagcgggaagccagcactcgcactttggccaggggcgcgtggaaggtggtggcaggcaccggcctgggcagcttccaggcctggctggccacgaccacggcccgagggggagcccgccaggccacgccgcactgagccacagccccgggggccgcctcccggggccccttgaggcactgaggcaccgagactggttctccccgagagactcggaaggtggggaacgaggggactgtgtttggggaggtggctttttcgtctgctgttgactgaacactacagcgccctgtggttccgggcttcgcacagctgtcccagggatggatcgcctgtgctgccttcgcccgccgccacaccgggaccctgcacggctgcttctggcctcgacagatgacaaaagaaacagccccaaaatacgaccactccaaccagcagttcccgcctgcctgcccgccactgtcaggcctgccctggcctcctcgtccgcagggctgtctgctggcttctgggggcagaagagcggggagccccgtggaagggtcaggggagaccaggtcagggcagctacatttctggtgatcagccccatggggagacggggctggcgggatacccccccccggcttccccacaccacttctgtctcacccggaagcgtcctttttttgtgccaggtgtctacctaagagggttggtgccagaagccccccatggcgagtgctggggcccggcggtgccctgggggagcagatggggccacccctggcagggccgctacaaccttttccagcagcggagccctctggggggcctgtgcttgtggcatctctgagggcccagattgcacaaggtgacctggccgtggcctgagggtggagtcgcccagcacgcaggccggggcgctgcggggctaagtattaggccttcccagggagggggcgtgccaagcatcccagagccgggctgggaccgccaaaacgtcgtggcctggatcctctgggtctgagtgcctgatcccctgccccccaaaaaagcagaggtaggtgttgcaggcccagggcaggggtgcctgccccaggagagtcccaggcagtggttctcgtgccagtggcacccaggggcaaggacagccaacccccacccttgccacgtgtggggccacgtgggcatgtggggtgtgtgtttttaccttggtgaatctcacctgccaacgatttctcgtgagtgccgaccaccttctccgaccatgttacgcccgggcggcagcagcccccggccactgcaaacccatgccctgggtcccccggctcccccagggaggcatccccgtgccaatgtcccccagtggtggcagcagatcctgtggccggcctggcggacgggacccagtgatacttgtatattacacagtcctgatttcagacaatttcaaccttaatctatttaaaaaagaatattctatacaagctgtttttaagccttttaccatttgaaatgcatgtgttgtgcgcgttggggatgggaggaggggctgaggagcggctcagtgtcacctcccacagccaccggccctgacccttaatccagacaccgatggaagtcgacttttcatatctttctcctgaaatgaactctgttttaaattggaataaattttgttcctaaatgc

SEQ ID NO: 320388 - DNA, 1059 bp, Homo sapiens
ggctaggtagcgaggctgggtttgcacttctgtctcacccggaagcgtcctttttttgtgccaggtgtctacctaagagggttggtgccagaagccccccatggcgagtgctggggcccggcggtgccctgggggagcagatggggccacccctggcagggccgctacaaccttttccagcagcggagccctctggggggcctgtgcttgtggcatctctgagggcccagattgcacaaggtgacctggccgtggcctgagggtggagtcgcccagcacgcaggccggggcgctgcggggctaagtattaggccttcccagggagggggcgtgccaagcatcccagagccgggctgggaccgccaaaacgtcgtggcctggatcctctgggtctgagtgcctgatcccctgccccccaaaaaagcagaggtaggtgttgcaggcccagggcaggggtgcctgccccaggagagtcccaggcagtggttctcgtgccagtggcacccaggggcaaggacagccaacccccacccttgccacgtgtggggccacgtgggcatgtggggtgtgtgtttttaccttggtgaatctcacctgccaacgatttctcgtgagtgccgaccaccttctccgaccatgttacgcccgggcggcagcagcccccggccactgcaaacccatgccctgggtcccccggctcccccagggaggcatccccgtgccaatgtcccccagtggtggcagcagatcctgtggccggcctggcggacgggacccagtgatacttgtatattacacagtcctgatttcagacaatttcaaccttaatctatttaaaaaagaatattctatacaagctgtttttaagccttttaccatttgaaatgcatgtgttgtgcgcgttggggatgggaggaggggctgaggagcggctcagtgtcacctcccacagccaccggccctgacccttaatccagacaccgatggaagtcgacttttcatatctttctcctgaaatgaactctgttttaaattggaataaattttgttcctaaatgc

SEQ ID NO: 320389 - DNA, 975 bp, Homo sapiens
gccctcggccccgggccggcccgccccgcctcggccgccgcctggcgagccgccgggtccccgctcggccggtggccgaggccggagggccgcggcgggcggcggccgaggcggctccggccagggccgggccgggggccggggggcggcggcgggcaggcggccgcgtcggccggggccgggacgatgactctggagtccatgatggcgtgttgcctgagcgatgaggtgaaggagtccaagcggatcaacgccgagatcgagaagcagctgcggcgggacaagcgcgacgcccggcgcgagctcaagctgctgctgctcggcacgggcgagagcgggaagagcacgttcatcaagcagatgcgcatcatccacggcgccggctactcggaggaggacaagcgcggcttcaccaagctcgtctaccagaacatcttcaccgccatgcaggccatgatccgggccatggagacgctcaagatcctctacaagtacgagcagaacaaggccaatgcgctcctgatccgggaggtggacgtggagaaggtgaccaccttcgagcatcagtacgtcagtgccatcaagaccctgtgggaggacccgggcatccaggaatgctacgaccgcaggcgcgagtaccagctctccgactctgccaagtactacctgaccgacgttgaccgcatcgccaccatggacactacacccagcaatagagacgggactgcggaggaaggaggacccaggacaggatccaggccggcttgccacaccccccacccctaggacttattcccgctgactgagtctctgaggggctaccaggaaagcgcctccaaccctagcaaaagtgcaagatggggagtgagaggctgggaatggaggggcagagccaggaagatcccccagaaaagccagctacagaagaaactggggctcctccagggtggcagcaacaataaatagactcgcgac

SEQ ID NO: 320390 - DNA, 166 bp, Homo sapiens
tggttggcttcagcttctttcgtcttagctcaccacaggcgagcaccttgctggacgacatggtcttaccgaggagatgggggtgctggggtcttaccgaggagaccggggtggcggggcgttttggctacagcagtgctgttcccacctttggactttgtctgtt

SEQ ID NO: 320391 - DNA, 504 bp, Homo sapiens
agagagtgaatggtttgaatgaatacatcctaatttaagcattaaaaacatagttctctaacatttgatgttttgcattgtcatttccttagttatttttgttcatcccagctcttgagaatggctgaaataatgcaatttgtatttaaaaggctgtggcatttttctcatagcttttcaatataaagatttaaatcagttaaaggcagcagtggtgcccgtcacatgctagttagaggacaacttgggctgcaggagaaggagcaagatgacagcagagagggtgagaagctgggaggagagccagctttcaaggggtgagaatttgtgactaaagagctgagacttacatcctaaaaaacagccatcaagtttctgaagtggcaaacttaacccctggagatgatccaaggaagtgttagggacaaatcaccatgccttagaggaccacagaagttctcattgccagattatctccacattttcttttttaagcaaatctaa

SEQ ID NO: 320392 - DNA, 434 bp, Homo sapiens
cctgtactcaagagtcctagaggctttggacagtctctccagagacactggctgaccccacgcagggagggccaagctgctcacctggggctccctgccccatggggccaggtgcagtccacatccatcagggaccacctcacaagccccactctcttcttcccatcactggctcacgccatcatctcccctcatccggagctctgaagggctcaccgctacctccaggtgtatttgagccaaggcccgggagatgaggctgctcacccagctgtgcgctgagctgggacaaaagctctgggacctcagcacccagcaaagagggctgggagaaagctgacttataacgagtgcttgcactcattaaataagtgaatgaatggaagacagcaggcctcaaggggctgtcagggggttcagggacaagatacacg

SEQ ID NO: 320393 - DNA, 339 bp, Homo sapiens
  misc_feature (13)..(13): n is a, c, g, or t
tagtaatcaacgngttttattttcctagaactgaaatcatctacggttctcagagctaaacttccaaagctacagtcagcaatttttcatcagagcccaaggttgttcgggccaaggacctgagacctgaagggttgactttacccatttgggtgggagtgttgagcatctgtccccctttagatctctgaagccacaaataggatgcttgggaagactcctagctgtcctttttcctctccacacagtgctcaaggccagcttatagtcatatatatcacccagacataaaggaaaagacacattttttaggaaatgtttttaataaaagaaaattac

SEQ ID NO: 320394 - DNA, 1226 bp, Homo sapiens
gagacagactttcgctcttgtcacccaggctggagtgcaatggaatgatcttggctcactgcaaacttcgccttccagggttcaagcgattctcctgcctcagcctccccagtagctgggattacaggcatgtgccaccacgccaggttcattttgtattttcagtagagactgggtttcatcgtgctggccaggctggtctcgaactcctgacctcaagtgttccacccacctcagccttcccaaagtgctgggattacaggcgtgacgaccaagcctggccaaccctctcgtctttcaggggcttaaataaatttgcttttctccccaaattctttgcccaccccatcagccagtttcaaagggtggagtgtaacgtgggttgcccaatcctgcttgccatgaagtacttagcttacagcagtttgccaggcgcagacaccatgctttatttctatttctacgaacaagaagcgtctcttgcagtctgcaatatttgtcgtcaaaaatttcactgggtgttgtatcaaatcagccacctgtatagaggtgtgatcgttgacaattttttgttacatcccgatggccgttttacctggaccattttcttcctttcatgggtgaagcaaaactccttggtagactttttttttgggacagagtctcgctctgtcgctctgttgcccaggctggagtgcagtggtgcgatgtcgaaaggccagcttatagtcatatatatcacccagacataaaggaaaagacacattttttaggaaatgtttttaataaaagaaaattacaaaaaaaaattttaaagacccctaaccctttgtgtgctctccattctgctccttccccatcgttgcccccatttctgaggtgcactgggaggctccccttctatttggggcttgatgactttctttttgtagctggggctttgatgttccttccagtgtcatttctcatccacataccctgacctggccccctcagtgttgtcaccagatctgatttgtaacccactgagaggacagagagaaataagtgccctctcccaccctcttcctactggtctctctatgcctctctacagtctcgtctcttttaccctggcccctctcccttgggctctgatgaaaaattgctgactgtagctttggaagtttagctctgagaaccgtagatgatttcagttctaggaaaataaaacccgttgattacta

SEQ ID NO: 320395 - DNA, 818 bp, Homo sapiens
  misc_feature (2)..(2): n is a, c, g, or t
  misc_feature (28)..(28): n is a, c, g, or t
anggctaggtacgaggctgggtggctgngctggacctctgggttgggatcaggggtaggaatggaaaggatggagcatcaacagcagggtgggcttgtggggcctgggaggggcaatcctcaaatgcggggtgggggcagcacaggagggcggcctccttctgagctcctgtcccctgctacacctattatcccagctgcctagattcagggaaagtgggacagcttgtaggggaggggctcctttccataaatccttgatgattgacaacacccatttttccttttgccgaccccaagagttttgggagttgtagttaatcatcaagagaatttggggcttccaagttgttcgggccaaggacctgagacctgaagggttgactttacccatttgggtgggagtgttgagcatctgtccccctttagatctctgaagccacaaataggatgcttgggaagactcctagctgtcctttttcctctccacacagtgctcaaggccagcttatagtcatatatatcacccagacataaaggaaaagacacattttttaggaaatgtttttaataaaagaaaattacaaaaaaaaattttaaagacccctaaccctttgtgtgctctccattctgctccttccccatcgttgcccccatttctgaggtgcactgggaggctccccttctatttggggcttgatgactttctttttgtagctggggctttgatgttccttccagttcttctcatccatttcctgactggcccttgtggtgtcccattgttgttccctgtggggccggcatttgtgccttccc

SEQ ID NO: 320396 - DNA, 830 bp, Homo sapiens
  misc_feature (22)..(22): n is a, c, g, or t
  misc_feature (28)..(28): n is a, c, g, or t
  misc_feature (790)..(790): n is a, c, g, or t
gaactacggctagtacgaggcngggttnaatcggccgagacaacacccatttttccttttgccgaccccaagagttttgggagttgtagttaatcatcaagagaatttggggcttccaagttgttcgggccaaggacctgagacctgaagggttgactttacccatttgggtgggagtgttgagcatctgtccccctttagatctctgaagccacaaataggatgcttgggaagactcctagctgtcctttttcctctccacacagtgctcaaggccagcttatagtcatatatatcacccagacataaaggaaaagacacattttttaggaaatgtttttaataaaagaaaattacaaaaaaaaattttaaagacccctaaccctttgtgtgctctccattctgctccttccccatcgttgcccccatttctgaggtgcactgggaggctccccttctatttggggcttgatgactttctttttgtagctggggctttgatgttccttccagtgtcatttctcatccacataccctgacctggccccctcagtgttgtcaccagatctgatttgtaacccactgagaggacagagagaaataagtgccctctcccaccctcttcctactggtctctctatgcctctctacagtctcgtctcttttaccctggcccctctcccttgggctctgatgaaaaattgctgactgtagctttggaagtttagctctgagaaccgtagatgatttcagttctaggaaaataaaacccgttgattactaaaaaaanaaaccggcctttgtgggggaaagggtgaggcaggaggtcg

SEQ ID NO: 320397 - DNA, 2005 bp, Homo sapiens
  misc_feature (2)..(2): n is a, c, g, or t
  misc_feature (28)..(28): n is a, c, g, or t
anggctaggtacgaggctgggtggctgngattgacgagatgcctgaggctgccgtgaaatcaacagccaacaaataccaagtcttttttttcgggacccacgagacggcattcctgggccccaaagacctcttcccttacgaggaatccaaggagaagtttggcaagcccaacaagaggaaagggttcagcgaggggctgtgggagatcgagaacaaccctactgtcaaggcttccggctatcagtcctcccagaaaaagagctgtgtggaagagcctgaaccagagcccgaagctgcagagggtgacggtgataagaaggggaatgcagagggcagcagcgacgaggaagggaagctggtcattgatgagccagccaaggagaagaacgagaaaggagcgttgaagaggagagcaggggacttgctggaggactctcctaaacgtcccaaggaggcagaaaaccctgaaggagaggagaaggaggcagccaccttggaggttgagaggccccttcctatggaggtggaaaagaatagcaccccctctgagcccggctctggccgggggcctccccaagaggaagaagaagaggaggatgaagaggaagaggctaccaaggaagatgctgaggccccaggcatcagagatcatgagagcctgtagccaccaatgtttcaagaggagcccccaccctgttcctgctgctgtctgggtgctactggggaaactggccatggcctgcaaactgggaacccctttcccaccccaacctgctctcctcttctactcacttttcccactccaagcccagcccatggagattgacctggatggggcaggccacctggctctcacctctaggtccccatactcctatgatctgagtcagagccatgtcttctccctggaatgagttgaggccactgtgttccttccgcttggagctattttccaggcttctgctggggcctgggacaactgctcccacctcctgacacccttctcccactctcctaggcattctggacctctgggttgggatcaggggtaggaatggaaaggatggagcatcaacagcagggtgggcttgtggggcctgggaggggcaatcctcaaatgcggggtgggggcagcacaggagggcggcctccttctgagctcctgtcccctgctacacctattatcccagctgcctagattcagggaaagtgggacagcttgtaggggaggggctcctttccataaatccttgatgattgacaacacccatttttccttttgccgaccccaagagttttgggagttgtagttaatcatcaagagaatttggggcttccaagttgttcgggccaaggacctgagacctgaagggttgactttacccatttgggtgggagtgttgagcatctgtccccctttagatctctgaagccacaaataggatgcttgggaagactcctagctgtcctttttcctctccacacagtgctcaaggccagcttatagtcatatatatcacccagacataaaggaaaagacacattttttaggaaatgtttttaataaaagaaaattacaaaaaaaaattttaaagacccctaaccctttgtgtgctctccattctgctccttccccatcgttgcccccatttctgaggtgcactgggaggctccccttctatttggggcttgatgactttctttttgtagctggggctttgatgttccttccagtgtcatttctcatccacataccctgacctggccccctcagtgttgtcaccagatctgatttgtaacccactgagaggacagagagaaataagtgccctctcccaccctcttcctactggtctctctatgcctctctacagtctcgtctcttttaccctggcccctctcccttgggctctgatgaaaaattgctgactgtagctttggaagtttagctctgagaaccgtagatgatttcagttctaggaaaataaaacccgttgattacta

SEQ ID NO: 320398 - DNA, 2075 bp, Homo sapiens
  misc_feature (2)..(2): n is a, c, g, or t
  misc_feature (28)..(28): n is a, c, g, or t
anggctaggtacgaggctgggtggctgngattgacgagatgcctgaggctgccgtgaaatcaacagccaacaaataccaagtcttttttttcgggacccacgagacggcattcctgggccccaaagacctcttcccttacgaggaatccaaggagaagtttggcaagcccaacaagaggaaagggttcagcgaggggctgtgggagatcgagaacaaccctactgtcaaggcttccggctatcagccctcccccctcctgcacagagccctgcctgcccggccagtgggtttaccccggggctaatccgacagagtcctcccagaaaaagagctgtgtggaagagcctgaaccagagcccgaagctgcagagggtgacggtgataagaaggggaatgcagagggcagcagcgacgaggaagggaagctggtcattgatgagccagccaaggagaagaacgagaaaggagcgttgaagaggagagcaggggacttgctggaggactctcctaaacgtcccaaggaggcagaaaaccctgaaggagaggagaaggaggcagccaccttggaggttgagaggccccttcctatggaggtggaaaagaatagcaccccctctgagcccggctctggccgggggcctccccaagaggaagaagaagaggaggatgaagaggaagaggctaccaaggaagatgctgaggccccaggcatcagagatcatgagagcctgtagccaccaatgtttcaagaggagcccccaccctgttcctgctgctgtctgggtgctactggggaaactggccatggcctgcaaactgggaacccctttcccaccccaacctgctctcctcttctactcacttttcccactccaagcccagcccatggagattgacctggatggggcaggccacctggctctcacctctaggtccccatactcctatgatctgagtcagagccatgtcttctccctggaatgagttgaggccactgtgttccttccgcttggagctattttccaggcttctgctggggcctgggacaactgctcccacctcctgacacccttctcccactctcctaggcattctggacctctgggttgggatcaggggtaggaatggaaaggatggagcatcaacagcagggtgggcttgtggggcctgggaggggcaatcctcaaatgcggggtgggggcagcacaggagggcggcctccttctgagctcctgtcccctgctacacctattatcccagctgcctagattcagggaaagtgggacagcttgtaggggaggggctcctttccataaatccttgatgattgacaacacccatttttccttttgccgaccccaagagttttgggagttgtagttaatcatcaagagaatttggggcttccaagttgttcgggccaaggacctgagacctgaagggttgactttacccatttgggtgggagtgttgagcatctgtccccctttagatctctgaagccacaaataggatgcttgggaagactcctagctgtcctttttcctctccacacagtgctcaaggccagcttatagtcatatatatcacccagacataaaggaaaagacacattttttaggaaatgtttttaataaaagaaaattacaaaaaaaaattttaaagacccctaaccctttgtgtgctctccattctgctccttccccatcgttgcccccatttctgaggtgcactgggaggctccccttctatttggggcttgatgactttctttttgtagctggggctttgatgttccttccagtgtcatttctcatccacataccctgacctggccccctcagtgttgtcaccagatctgatttgtaacccactgagaggacagagagaaataagtgccctctcccaccctcttcctactggtctctctatgcctctctacagtctcgtctcttttaccctggcccctctcccttgggctctgatgaaaaattgctgactgtagctttggaagtttagctctgagaaccgtagatgatttcagttctaggaaaataaaacccgttgattacta

SEQ ID NO: 320399 - DNA, 1735 bp, Homo sapiens
  misc_feature (22)..(22): n is a, c, g, or t
  misc_feature (28)..(28): n is a, c, g, or t
gaactacggctagtacgaggcngggttnaatcggccgaggtgataagaaggggaatgcagagggcagcagcgacgaggaagggaagctggtcattgatgagccagccaaggagaagaacgagaaaggagcgttgaagaggagagcaggggacttgctggaggactctcctaaacgtcccaaggaggcagaaaaccctgaaggagaggagaaggaggcagccaccttggaggttgagaggccccttcctatggaggtggaaaagaatagcaccccctctgagcccggctctggccgggggcctccccaagaggaagaagaagaggaggatgaagaggaagaggctaccaaggaagatgctgaggccccaggcatcagagatcatgagagcctgtagccaccaatgtttcaagaggagcccccaccctgttcctgctgctgtctgggtgctactggggaaactggccatggcctgcaaactgggaacccctttcccaccccaacctgctctcctcttctactcacttttcccactccaagcccagcccatggagattgacctggatggggcaggccacctggctctcacctctaggtccccatactcctatgatctgagtcagagccatgtcttctccctggaatgagttgaggccactgtgttccttccgcttggagctattttccaggcttctgctggggcctgggacaactgctcccacctcctgacacccttctcccactctcctaggcattctggacctctgggttgggatcaggggtaggaatggaaaggatggagcatcaacagcagggtgggcttgtggggcctgggaggggcaatcctcaaatgcggggtgggggcagcacaggagggcggcctccttctgagctcctgtcccctgctacacctattatcccagctgcctagattcagggaaagtgggacagcttgtaggggaggggctcctttccataaatccttgatgattgacaacacccatttttccttttgccgaccccaagagttttgggagttgtagttaatcatcaagagaatttggggcttccaagttgttcgggccaaggacctgagacctgaagggttgactttacccatttgggtgggagtgttgagcatctgtccccctttagatctctgaagccacaaataggatgcttgggaagactcctagctgtcctttttcctctccacacagtgctcaaggccagcttatagtcatatatatcacccagacataaaggaaaagacacattttttaggaaatgtttttaataaaagaaaattacaaaaaaaaattttaaagacccctaaccctttgtgtgctctccattctgctccttccccatcgttgcccccatttctgaggtgcactgggaggctccccttctatttggggcttgatgactttctttttgtagctggggctttgatgttccttccagtgtcatttctcatccacataccctgacctggccccctcagtgttgtcaccagatctgatttgtaacccactgagaggacagagagaaataagtgccctctcccaccctcttcctactggtctctctatgcctctctacagtctcgtctcttttaccctggcccctctcccttgggctctgatgaaaaattgctgactgtagctttggaagtttagctctgagaaccgtagatgatttcagttctaggaaaataaaacccgttgattacta

SEQ ID NO: 320400 - DNA, 2201 bp, Homo sapiens
  misc_feature (2)..(2): n is a, c, g, or t
  misc_feature (28)..(28): n is a, c, g, or t
anggctaggtacgaggctgggtggctgngattgacgagatgcctgaggctgccgtgaaatcaacagccaacaaataccaagtcttttttttcgggacccacgagacggcattcctgggccccaaagacctcttcccttacgaggaatccaaggagaagtttggcaagcccaacaagaggaaagggttcagcgaggggctgtgggagatcgagaacaaccctactgtcaaggcttccggctatcagtcctcccagaaaaagagctgtgtggaagagcctgaaccagagcccgaagctgcagagggtgacggtgataagaaggggaatgcagagggcagcagcgacgaggaagggaagctggtcattgatgagccagccaaggagaagaacgagaaaggagcgttgaagaggagagcaggggacttgctggaggactctcctaaacgtcccaaggaggcagaaaaccctgaaggagaggagaaggaggcagccaccttggaggttgagaggccccttcctatggaggtggaaaagaatagcaccccctctgagcccggctctggccgggggcctccccaagaggaagaagaagaggaggatgaagaggaagaggctaccaaggaagatgctgaggccccaggcatcagagatcatgagaggtgagtgagccccctgaccccttggcagctggactaggggggaccggccactctcggagaagaggatgaaaagggcctgcagtggtcagcctctcgggaggcagggtgggctctcctaggagaccggcactggctggggcaaggccaggccaaggccacaccattaacccttctcccctccaaccctccctcacagcctgtagccaccaatgtttcaagaggagcccccaccctgttcctgctgctgtctgggtgctactggggaaactggccatggcctgcaaactgggaacccctttcccaccccaacctgctctcctcttctactcacttttcccactccaagcccagcccatggagattgacctggatggggcaggccacctggctctcacctctaggtccccatactcctatgatctgagtcagagccatgtcttctccctggaatgagttgaggccactgtgttccttccgcttggagctattttccaggcttctgctggggcctgggacaactgctcccacctcctgacacccttctcccactctcctaggcattctggacctctgggttgggatcaggggtaggaatggaaaggatggagcatcaacagcagggtgggcttgtggggcctgggaggggcaatcctcaaatgcggggtgggggcagcacaggagggcggcctccttctgagctcctgtcccctgctacacctattatcccagctgcctagattcagggaaagtgggacagcttgtaggggaggggctcctttccataaatccttgatgattgacaacacccatttttccttttgccgaccccaagagttttgggagttgtagttaatcatcaagagaatttggggcttccaagttgttcgggccaaggacctgagacctgaagggttgactttacccatttgggtgggagtgttgagcatctgtccccctttagatctctgaagccacaaataggatgcttgggaagactcctagctgtcctttttcctctccacacagtgctcaaggccagcttatagtcatatatatcacccagacataaaggaaaagacacattttttaggaaatgtttttaataaaagaaaattacaaaaaaaaattttaaagacccctaaccctttgtgtgctctccattctgctccttccccatcgttgcccccatttctgaggtgcactgggaggctccccttctatttggggcttgatgactttctttttgtagctggggctttgatgttccttccagtgtcatttctcatccacataccctgacctggccccctcagtgttgtcaccagatctgatttgtaacccactgagaggacagagagaaataagtgccctctcccaccctcttcctactggtctctctatgcctctctacagtctcgtctcttttaccctggcccctctcccttgggctctgatgaaaaattgctgactgtagctttggaagtttagctctgagaaccgtagatgatttcagttctaggaaaataaaacccgttgattacta

SEQ ID NO: 320401 - DNA, 2557 bp, Homo sapiens
  misc_feature (2)..(2): n is a, c, g, or t
  misc_feature (28)..(28): n is a, c, g, or t
  misc_feature (2204)..(2204): n is a, c, g, or t
anggctaggtacgaggctgggtggctgngattgacgagatgcctgaggctgccgtgaaatcaacagccaacaaataccaagtcttttttttcgggacccacgagacggcattcctgggccccaaagacctcttcccttacgaggaatccaaggagaagtttggcaagcccaacaagaggaaagggttcagcgaggggctgtgggagatcgagaacaaccctactgtcaaggcttccggctatcagtcctcccagaaaaagagctgtgtggaagagcctgaaccagagcccgaagctgcagagggtgacggtgataagaaggggaatgcagagggcagcagcgacgaggaagggaagctggtcattgatgagccagccaaggagaagaacgagaaaggagcgttgaagaggagagcaggggacttgctggaggactctcctaaacgtcccaaggaggcagaaaaccctgaaggagaggagaaggaggcagccaccttggaggttgagaggccccttcctatggaggtggaaaagaatagcaccccctctgagcccggctctggccgggggcctccccaagaggaagaagaagaggaggatgaagaggaagaggctaccaaggaagatgctgaggccccaggcatcagagatcatgagagcctgtagccaccaatgtttcaagaggagcccccaccctgttcctgctgctgtctgggtgctactggggaaactggccatggcctgcaaactgggaacccctttcccaccccaacctgctctcctcttctactcacttttcccactccaagcccagcccatggagattgacctggatggggcaggccacctggctctcacctctaggtccccatactcctatgatctgagtcagagccatgtcttctccctggaatgagttgaggccactgtgttccttccgcttggagctattttccaggcttctgctggggcctgggacaactgctcccacctcctgacacccttctcccactctcctaggcattctggacctctgggttgggatcaggggtaggaatggaaaggatggagcatcaacagcagggtgggcttgtggggcctgggaggggcaatcctcaaatgcggggtgggggcagcacaggagggcggcctccttctgagctcctgtcccctgctacacctattatcccagctgcctagattcagggaaagtgggacagcttgtaggggaggggctcctttccataaatccttgatgattgacaacacccatttttccttttgccgaccccaagagttttgggagttgtagttaatcatcaagagaatttggggcttccaagttgttcgggccaaggacctgagacctgaagggttgactttacccatttgggtgggagtgttgagcatctgtccccctttagatctctgaagccacaaataggatgcttgggaagactcctagctgtcctttttcctctccacacagtgctcaaggccagcttatagtcatatatatcacccagacataaaggaaaagacacattttttaggaaatgtttttaataaaagaaaattacaaaaaaaaattttaaagacccctaaccctttgtgtgctctccattctgctccttccccatcgttgcccccatttctgaggtgcactgggaggctccccttctatttggggcttgatgactttctttttgtagctggggctttgatgttccttccagtgtcatttctcatccacataccctgacctggccccctcagtgttgtcaccagatctgatttgtaacccactgagaggacagagagaaataagtgccctctcccaccctcttcctactggtctctctatgcctctctacagtctcgtctcttttaccctggcccctctcccttgggctctgatgaaaaattgctgactgtagctttggaagtttagctctgagaaccgtagatgatttcagttctaggaaaataaaacccgttgattactaaaaaaaaaaaaaaaaaaaaaaaaaaaaaaaaaatgggggggggctgggccggaaaaagttttaaaaccattgcggtggggcgcgcgggggcgcccaagagggttaacggagaccgggcgcccaataggcgggtcccagagaggaacccgggcacccagagaccaagggcgcgcgggattctcttcacccattataaaanaaagcgcccggggggggcacacccgagaagggtttctcggaaacccaaattccccagagaggggagtcccagagaaggggaccaaaacaccggggaagtcctctatcacacgagagaggagactccccaagaggggaaaaccccgcggacaaatactccaaaatttatagcccccgcgacggaggggggggaacaaacagaaccacccccggggaccagcgccacccacatatcagacgacataaacaacagacaagtacaaacacaaacaacaaccaaaacaaacacaccagctacacacagagatacagcacaaaacaaaccacacacacaccacagcgcgacgagaggat

SEQ ID NO: 320402 - DNA, 1950 bp, Homo sapiens
  misc_feature (2)..(2): n is a, c, g, or t
  misc_feature (28)..(28): n is a, c, g, or t
anggctaggtacgaggctgggtggctgngattgacgagatgcctgaggctgccgtgaaatcaacagccaacaaataccaagtcttttttttcgggacccacgagacggcattcctgggccccaaagacctcttcccttacgaggaatccaaggagaagtttggcaagcccaacaagaggaaagggttcagcgaggggctgtgggagatcgagaacaaccctactgtcaaggcttccggctatcagtcctcccagaaaaagagctgtgtggaagagcctgaaccagagcccgaagctgcagagggtgacggtgataagaaggggaatgcagagggcagcagcgacgaggaagggaagctggtcattgatgagccagccaaggagaagaacgagaaaggagcgttgaagaggagagcaggggacttgctggaggactctcctaaacgtcccaaggaggcagaaaaccctgaaggagaggagaaggaggcagccaccttggaggttgagaggccccttcctatggaggtggaaaagaatagcaccccctctgagcccggctctggccgggggcctccccaagaggaagaagaagaggaggatgaagaggaagaggctaccaaggaagatgctgaggccccaggcatcagagatcatgagagcctgtagccaccaatgtttcaagaggagcccccaccctgttcctgctgctgtctgggtgctactggggaaactggccatggcctgcaaactgggaaccagcccatggagattgacctggatggggcaggccacctggctctcacctctaggtccccatactcctatgatctgagtcagagccatgtcttctccctggaatgagttgaggccactgtgttccttccgcttggagctattttccaggcttctgctggggcctgggacaactgctcccacctcctgacacccttctcccactctcctaggcattctggacctctgggttgggatcaggggtaggaatggaaaggatggagcatcaacagcagggtgggcttgtggggcctgggaggggcaatcctcaaatgcggggtgggggcagcacaggagggcggcctccttctgagctcctgtcccctgctacacctattatcccagctgcctagattcagggaaagtgggacagcttgtaggggaggggctcctttccataaatccttgatgattgacaacacccatttttccttttgccgaccccaagagttttgggagttgtagttaatcatcaagagaatttggggcttccaagttgttcgggccaaggacctgagacctgaagggttgactttacccatttgggtgggagtgttgagcatctgtccccctttagatctctgaagccacaaataggatgcttgggaagactcctagctgtcctttttcctctccacacagtgctcaaggccagcttatagtcatatatatcacccagacataaaggaaaagacacattttttaggaaatgtttttaataaaagaaaattacaaaaaaaaattttaaagacccctaaccctttgtgtgctctccattctgctccttccccatcgttgcccccatttctgaggtgcactgggaggctccccttctatttggggcttgatgactttctttttgtagctggggctttgatgttccttccagtgtcatttctcatccacataccctgacctggccccctcagtgttgtcaccagatctgatttgtaacccactgagaggacagagagaaataagtgccctctcccaccctcttcctactggtctctctatgcctctctacagtctcgtctcttttaccctggcccctctcccttgggctctgatgaaaaattgctgactgtagctttggaagtttagctctgagaaccgtagatgatttcagttctaggaaaataaaacccgttgattacta

SEQ ID NO: 320403 - DNA, 1243 bp, Homo sapiens
ataacggcttaggtgcgaggccccgggtgtgaatcggcacgaggtggagagcccatggagattgacctggatggggcaggccacctggctctcacctctaggtccccatactcctatgatctgagtcagagccatgtcttctccctggaatgagttgaggccactgtgttccttccgcttggagctattttccaggcttctgctggggcctgggacaactgctcccacctcctgacacccttctcccactctcctaggcattctggacctctgggttgggatcaggggtaggaatggaaaggatggagcatcaacagcagggtgggcttgtggggcctgggaggggcaatcctcaaatgcggggtgggggcagcacaggagggcggcctccttctgagctcctgtcccctgctacacctattatcccagctgcctagattcagggaaagtgggacagcttgtaggggaggggctcctttccataaatccttgatgattgacaacacccatttttccttttgccgaccccaagagttttgggagttgtagttaatcatcaagagaatttggggcttccaagttgttcgggccaaggacctgagacctgaagggttgactttacccatttgggtgggagtgttgagcatctgtccccctttagatctctgaagccacaaataggatgcttgggaagactcctagctgtcctttttcctctccacacagtgctcaaggccagcttatagtcatatatatcacccagacataaaggaaaagacacattttttaggaaatgtttttaataaaagaaaattacaaaaaaaaattttaaagacccctaaccctttgtgtgctctccattctgctccttccccatcgttgcccccatttctgaggtgcactgggaggctccccttctatttggggcttgatgactttctttttgtagctggggctttgatgttccttccagtgtcatttctcatccacataccctgacctggccccctcagtgttgtcaccagatctgatttgtaacccactgagaggacagagagaaataagtgccctctcccaccctcttcctactggtctctctatgcctctctacagtctcgtctcttttaccctggcccctctcccttgggctctgatgaaaaattgctgactgtagctttggaagtttagctctgagaaccgtagatgatttcagttctaggaaaataaaacccgttgattacta

SEQ ID NO: 320404 - DNA, 2096 bp, Homo sapiens
  misc_feature (2)..(2): n is a, c, g, or t
  misc_feature (28)..(28): n is a, c, g, or t
  misc_feature (2060)..(2060): n is a, c, g, or t
anggctaggtacgaggctgggtggctgngattgacgagatgcctgaggctgccgtgaaatcaacagccaacaaataccaagtcttttttttcgggacccacgagacggcattcctgggccccaaagacctcttcccttacgaggaatccaaggagaagtttggcaagcccaacaagaggaaagggttcagcgaggggctgtgggagatcgagaacaaccctactgtcaaggcttccggctatcagtcctcccagaaaaagagctgtgtggaagagcctgaaccagagcccgaagctgcagagggtgacggtgataagaaggggaatgcagagggcagcagcgacgaggaagggaagctggtcattgatgagccagccaaggagaagaacgagaaaggagcgttgaagaggagagcaggggacttgctggaggactctcctaaacgtcccaaggaggcagaaaaccctgaaggagaggagaaggaggcagccaccttggaggttgagaggccccttcctatggaggtggaaaagaatagcaccccctctgagcccggctctggccgggggcctccccaagaggaagaagaagaggaggatgaagaggaagaggctaccaaggaagatgctgaggccccaggcatcagagatcatgagagcctgtagccaccaatgtttcaagaggagcccccaccctgttcctgctgctgtctgggtgctactggggaaactggccatggcctgcaaactgggaacccctttcccaccccaacctgctctcctcttctactcacttttcccactccaagcccagcccatggagattgacctggatggggcaggccacctggctctcacctctaggtccccatactcctatgatctgagtcagagccatgtcttctccctggaatgagttgaggccactgtgttccttccgcttggagctattttccaggcttctgctggggcctgggacaactgctcccacctcctgacacccttctcccactctcctaggcattctggacctctgggttgggatcaggggtaggaatggaaaggatggagcatcaacagcagggtgggcttgtggggcctgggaggggcaatcctcaaatgcggggtgggggcagcacaggagggcggcctccttctgagctcctgtcccctgctacacctattatcccagctgcctagattcagggaaagtgggacagcttgtaggggaggggctcctttccataaatccttgatgattgacaacacccatttttccttttgccgaccccaagagttttgggagttgtagttaatcatcaagagaatttggggcttccaagttgttcgggccaaggacctgagacctgaagggttgactttacccatttgggtgggagtgttgagcatctgtccccctttagatctctgaagccacaaataggatgcttgggaagactcctagctgtcctttttcctctccacacagtgctcaaggccagcttatagtcatatatatcacccagacataaaggaaaagacacattttttaggaaatgtttttaataaaagaaaattacaaaaaaaaattttaaagacccctaaccctttgtgtgctctccattctgctccttccccatcgttgcccccatttctgaggtgcactgggaggctccccttctatttggggcttgatgactttctttttgtagctggggctttgatgttccttccagtgtcatttctcatccacataccctgacctggccccctcagtgttgtcaccagatctgatttgtaacccactgagaggacagagagaaataagtgccctctcccaccctcttcctactggtctctctatgcctctctacagtctcgtctcttttaccctggcccctctcccttgggctctgatgaaaaattgctgactgtagctttggaagtttagctctgagaaccgtagatgatttcagttctaggaaaataaaacccgttgattactaaaaaaaaaaaaaaaaacaaaaaaaacaaaaaacaaaaaaaaaaaaaaaaaaaaangggggggggcccccaaaattccccccgggggggccc

SEQ ID NO: 320405 - DNA, 2110 bp, Homo sapiens
  misc_feature (2)..(2): n is a, c, g, or t
  misc_feature (28)..(28): n is a, c, g, or t
anggctaggtacgaggctgggtggctgngattgacgagatgcctgaggctgccgtgaaatcaacagccaacaaataccaagtcttttttttcgggacccacgagacggcattcctgggccccaaagacctcttcccttacgaggaatccaaggagaagtttggcaagcccaacaagaggaaagggttcagcgaggggctgtgggagatcgagaacaaccctactgtcaaggcttccggctatcagtcctcccagaaaaagagctgtgtggaagagcctgaaccagagcccgaagctgcagagggtgacggtgataagaaggggaatgcagagggcagcagcgacgaggaagggaagctggtcattgatgagccagccaaggagaagaacgagaaaggagcgttgaagaggagagcaggggacttgctggaggactctcctaaacgtcccaaggaggcagaaaaccctgaaggagaggagaaggaggcagccaccttggaggttgagaggccccttcctatggaggtggaaaagaatagcaccccctctgagcccggctctggccgggggcctccccaagaggaagaagaagaggaggatgaagaggaagaggctaccaaggaagatgctgaggccccaggcatcagagatcatgagagcctgtagccaccaatgtttcaagaggagcccccaccctgttcctgctgctgtctgggtgctactggggaaactggccatggcctgcaaactgggaacccctttcccaccccaacctgctctcctcttctactcacttttcccactccaagcccagcccatggagattgacctggatggggcaggccacctggctctcacctctaggtccccatactcctatgatctgagtcagagccatgtcttctccctggaatgagttgaggccactgtgttccttccgcttggagctattttccaggcttctgctggggcctgggacaactgctcccacctcctgacacccttctcccactctcctaggcattctggacctctgggttgggatcaggggtaggaatggaaaggatggagcatcaacagcagggtgggcttgtggggcctgggaggggcaatcctcaaatgcggggtgggggcagcacaggagggcggcctccttctgagctcctgtcccctgctacacctattatcccagctgcctagattcagggaaagtgggacagcttgtaggggaggggctcctttccataaatccttgatgattgacaacacccatttttccttttgccgaccccaagagttttgggagttgtagttaatcatcaagagaatttggggcttccaagttgttcgggccaaggacctgagacctgaagggttgactttacccatttgggtgggagtgttgagcatctgtccccctttagatctctgaagccacaaataggatgcttgggaagactcctagctgtcctttttcctctccacacagtgctcaaggccagcttatagtcatatatatcacccagacataaaggaaaagacacattttttaggaaatgtttttaataaaagaaaattacaaaaaaaaattttaaagacccctaaccctttgtgtgctctccattctgctccttccccatcgttgcccccatttctgaggtgcactgggaggctccccttctatttggggcttgatgactttctttttgtagctggggctttgatgttccttccagtgtcatttctcatccacataccctgacctggccccctcagtgttgtcaccagatctgatttgtaacccactgagaggacagagagaaataagtgccctctcccaccctcttcctactggtctctctatgcctctctacagtctcgtctcttttaccctggcccctctcccttgggctctgatgaaaaattgctgactgtagctttggaagtttagctctgagaaccgtagatgatttcagttctaggaaaataaaacccgttgattactaaaaaaaaaagactgacacaagaagccaccaagcagacaaacaaaccacactaatcaacacttatccgtttcgtacgaccaaaactataccaaacgaaagaagggg

SEQ ID NO: 320406 - DNA, 2561 bp, Homo sapiens
  misc_feature (2)..(2): n is a, c, g, or t
  misc_feature (28)..(28): n is a, c, g, or t
anggctaggtacgaggctgggtggctgngattgacgagatgcctgaggctgccgtgaaatcaacagccaacaaataccaagtcttttttttcgggacccacgagacggcattcctgggccccaaagacctcttcccttacgaggaatccaaggagaagtttggcaagcccaacaagaggaaagggttcagcgaggggctgtgggagatcgagaacaaccctactgtcaaggcttccggctatcagtcctcccagaaaaagagctgtgtggaagagcctgaaccagagcccgaagctgcagagggtgacggtgataagaaggggaatgcagagggcagcagcgacgaggaagggaagctggtcattgatgagccagccaaggagaagaacgagaaaggagcgttgaagaggagagcaggggacttgctggaggactctcctaaacgtcccaaggaggcagaaaaccctgaaggagaggagaaggaggcagccaccttggaggttgagaggccccttcctatggaggtggaaaagaatagcaccccctctgagcccggctctggccgggggcctccccaagaggaagaagaagaggaggatgaagaggaagaggctaccaaggaagatgctgaggccccaggcatcagagatcatgagagcctgtagccaccaatgtttcaagaggagcccccaccctgttcctgctgctgtctgggtgctactggggaaactggccatggcctgcaaactgggaacccctttcccaccccaacctgctctcctcttctactcacttttcccactccaagcccagcccatggagattgacctggatggggcaggccacctggctctcacctctaggtccccatactcctatgatctgagtcagagccatgtcttctccctggaatgagttgaggccactgtgttccttccgcttggagctattttccaggcttctgctggggcctgggacaactgctcccacctcctgacacccttctcccactctcctaggcattctggacctctgggttgggatcaggggtaggaatggaaaggatggagcatcaacagcagggtgggcttgtggggcctgggaggggcaatcctcaaatgcggggtgggggcagcacaggagggcggcctccttctgagctcctgtcccctgctacacctattatcccagctgcctagattcagggaaagtgggacagcttgtaggggaggggctcctttccataaatccttgatgattgacaacacccatttttccttttgccgaccccaagagttttgggagttgtagttaatcatcaagagaatttggggcttccaagttgttcgggccaaggacctgagacctgaagggttgactttacccatttgggtgggagtgttgagcatctgtccccctttagatctctgaagccacaaataggatgcttgggaagactcctagctgtcctttttcctctccacacagtgctcaaggccagcttatagtcatatatatcacccagacataaaggaaaagacacattttttaggaaatgtttttaataaaagaaaattacaaaaaaaaattttaaagacccctaaccctttgtgtgctctccattctgctccttccccatcgttgcccccatttctgaggtgcactgggaggctccccttctatttggggcttgatgactttctttttgtagctggggctttgatgttccttccagtgtcatttctcatccacataccctgacctggccccctcagtgttgtcaccagatctgatttgtaacccactgagaggacagagagaaataagtgccctctcccaccctcttcctactggtctctctatgcctctctacagtctcgtctcttttaccctggcccctctcccttgggctctgatgaaaaattgctgactgtagctttggaagtttagctctgagaaccgtagatgatttcagttctaggaaaataaaacccgttgattactaaaggaaacacaacataaaaaaaaaaaaaagaataacaaaacttttgtgggcgccccgcacgggcacccctcaaaaagctttgtgacacccatcctttgggggccggggcccccagatggataagagcggccagcaggggccatcacagcgtgagaatcccaagagagacaagacccgggcaaggaaacaagcgggtggagtggtcttcctcactcctatttaaaatagccgcccggcgggcaagccacgaagctgtttcggaaatatgaccgccaacaaggtagctccggggagcgagcagcggggggccatttctatgcgacatggcgcatcatcaagtcggaatccttccatactattaaacttttccccccccggcgcggctgggggttaacgttaacccttccagttagcacgaagggctttggacacttatgaccccttgttcctgtacctgctacagtacgaaaaatctttttaggtaggaataaaaagccaaggggtttgtgaaaacttatgaatattgaggggtaaagaatttcaactgataaccaag

SEQ ID NO: 320407 - DNA, 2026 bp, Homo sapiens
  misc_feature (2)..(2): n is a, c, g, or t
  misc_feature (28)..(28): n is a, c, g, or t
  misc_feature (1964)..(1964): n is a, c, g, or t
  misc_feature (1974)..(1974): n is a, c, g, or t
  misc_feature (1976)..(1976): n is a, c, g, or t
  misc_feature (1992)..(1992): n is a, c, g, or t
  misc_feature (1995)..(1995): n is a, c, g, or t
anggctaggtacgaggctgggtggctgngattgacgagatgcctgaggctgccgtgaaatcaacagccaacaaataccaagtcttttttttcgggacccacgagacggcattcctgggccccaaagacctcttcccttacgaggaatccaaggagaagtttggcaagcccaacaagaggaaagggttcagcgaggggctgtgggagatcgagaacaaccctactgtcaaggcttccggctatcagtcctcccagaaaaagagctgtgtggaagagcctgaaccagagcccgaagctgcagagggtgacggtgataagaaggggaatgcagagggcagcagcgacgaggaagggaagctggtcattgatgagccagccaaggagaagaacgagaaaggagcgttgaagaggagagcaggggacttgctggaggactctcctaaacgtcccaaggaggcagaaaaccctgaaggagaggagaaggaggcagccaccttggaggttgagaggccccttcctatggaggtggaaaagaatagcaccccctctgagcccggctctggccgggggcctccccaagaggaagaagaagaggaggatgaagaggaagaggctaccaaggaagatgctgaggccccaggcatcagagatcatgagagcctgtagccaccaatgtttcaagaggagcccccaccctgttcctgctgctgtctgggtgctactggggaaactggccatggcctgcaaactgggaacccctttcccaccccaacctgctctcctcttctactcacttttcccactccaagcccagcccatggagattgacctggatggggcaggccacctggctctcacctctaggtccccatactcctatgatctgagtcagagccatgtcttctccctggaatgagttgaggccactgtgttccttccgcttggagctattttccaggcttctgctggggcctgggacaactgctcccacctcctgacacccttctcccactctcctaggcattctggacctctgggttgggatcaggggtaggaatggaaaggatggagcatcaacagcagggtgggcttgtggggcctgggaggggcaatcctcaaatgcggggtgggggcagcacaggagggcggcctccttctgagctcctgtcccctgctacacctattatcccagctgcctagattcagggaaagtgggacagcttgtaggggaggggctcctttccataaatccttgatgattgacaacacccatttttccttttgccgaccccaagagttttgggagttgtagttaatcatcaagagaatttggggcttccaagttgttcgggccaaggacctgagacctgaagggttgactttacccatttgggtgggagtgttgagcatctgtccccctttagatctctgaagccacaaataggatgcttgggaagactcctagctgtcctttttcctctccacacagtgctcaaggccagcttatagtcatatatatcacccagacataaaggaaaagacacattttttaggaaatgtttttaataaaagaaaattacaaaaaaaaattttaaagacccctaaccctttgtgtgctctccattctgctccttccccatcgttgcccccatttctgaggtgcactgggaggctccccttctatttggggcttgatgactttctttttgtagctggggctttgatgttccttccagtgtcatttctcatccacataccctgacctggccccctcagtgttgtcaccagatctgatttgtaacccactgagaggacagagagaaataagtgccctctcccaccctcttcctactggtctctctatgcctctctacagtctcgtctcttttaccctggcccctctcccttgggctctgatgaaaaattgctgactgtagctttggaagtttagctctgagaacgganatgatcagtntngaaataaccgtgtccnaanaaaaaaaaaaaatgggggcggaaaaataaac

SEQ ID NO: 320408 - DNA, 1249 bp, Homo sapiens
aaagatgtatagctgcgatcctcggtttaatttcagtacgagggcaggcgctttccctttgatattgagccggtagtgtcgcaatgccacctggctctcacctctaggtccccatactcctatgatctgagtcagagccatgtcttctccctggaatgagttgaggccactgtgttccttccgcttggagctattttccaggcttctgctggggcctgggacaactgctcccacctcctgacacccttctcccactctcctaggcattctggacctctgggttgggatcaggggtaggaatggaaaggatggagcatcaacagcagggtgggcttgtggggcctgggaggggcaatcctcaaatgcggggtgggggcagcacaggagggcggcctccttctgagctcctgtcccctgctacacctattatcccagctgcctagattcagggaaagtgggacagcttgtaggggaggggctcctttccataaatccttgatgattgacaacacccatttttccttttgccgaccccaagagttttgggagttgtagttaatcatcaagagaatttggggcttccaagttgttcgggccaaggacctgagacctgaagggttgactttacccatttgggtgggagtgttgagcatctgtccccctttagatctctgaagccacaaataggatgcttgggaagactcctagctgtcctttttcctctccacacagtgctcaaggccagcttatagtcatatatatcacccagacataaaggaaaagacacattttttaggaaatgtttttaataaaagaaaattacaaaaaaaaattttaaagacccctaaccctttgtgtgctctccattctgctccttccccatcgttgcccccatttctgaggtgcactgggaggctccccttctatttggggcttgatgactttctttttgtagctggggctttgatgttccttccagtgtcatttctcatccacataccctgacctggccccctcagtgttgtcaccagatctgatttgtaacccactgagaggacagagagaaataagtgccctctcccaccctcttcctactggtctctctatgcctctctacagtctcgtctcttttaccctggcccctctcccttgggctctgatgaaaaattgctgactgtagctttggaagtttagctctgagaaccgtagatgatttcagttctaggaaaataaaacccgttgattacta

SEQ ID NO: 320409 - DNA, 1198 bp, Homo sapiens
ggcacgaggacggagactgacccggatggatccggccacctagctatgacccctagtttgcgatactcgcacacgtgaagcaccatccatgtcttctccctggaatgagttgaggccactgtgttccttccgcttggagctattttccaggcttctgctggggcctgggacaactgctcccacctcctgacacccttctcccactctcctaggcattctggacctctgggttgggatcaggggtaggaatggaaaggatggagcatcaacagcagggtgggcttgtggggcctgggaggggcaatcctcaaatgcggggtgggggcagcacaggagggcggcctccttctgagctcctgtcccctgctacacctattatcccagctgcctagattcagggaaagtgggacagcttgtaggggaggggctcctttccataaatccttgatgattgacaacacccatttttccttttgccgaccccaagagttttgggagttgtagttaatcatcaagagaatttggggcttccaagttgttcgggccaaggacctgagacctgaagggttgactttacccatttgggtgggagtgttgagcatctgtccccctttagatctctgaagccacaaataggatgcttgggaagactcctagctgtcctttttcctctccacacagtgctcaaggccagcttatagtcatatatatcacccagacataaaggaaaagacacattttttaggaaatgtttttaataaaagaaaattacaaaaaaaaattttaaagacccctaaccctttgtgtgctctccattctgctccttccccatcgttgcccccatttctgaggtgcactgggaggctccccttctatttggggcttgatgactttctttttgtagctggggctttgatgttccttccagtgtcatttctcatccacataccctgacctggccccctcagtgttgtcaccagatctgatttgtaacccactgagaggacagagagaaataagtgccctctcccaccctcttcctactggtctctctatgcctctctacagtctcgtctcttttaccctggcccctctcccttgggctctgatgaaaaattgctgactgtagctttggaagtttagctctgagaaccgtagatgatttcagttctaggaaaataaaacccgttgattacta

SEQ ID NO: 320410 - DNA, 1596 bp, Homo sapiens
  misc_feature (2)..(2): n is a, c, g, or t
  misc_feature (28)..(28): n is a, c, g, or t
anggctaggtacgaggctgggtggctgngattgacgagatgcctgaggctgccgtgaaatcaacagccaacaaataccaagtcttttttttcgggacccacgagacggcattcctgggccccaaagacctcttcccttacgaggaatccaaggagaagtttggcaagcccaacaagaggaaagggttcagcgaggggctgtgggagatcgagaacaaccctactgtcaaggcttccggctatcagtcctcccagaaaaagagctgtgtggaagagcctgaaccagagcccgaagctgcagagggtgacggtgataagaaggggaatgcagagggcagcagcgacgaggaagggaagctggtcattgatgagccagccaaggagaagaacgagaaaggagcgttgaagaggagagcaggggacttgctggaggactctcctaaacgtcccaaggaggcagaaaaccctgaaggagaggagaaggaggcagccaccttggaggttgagaggccccttcctatggaggtggaaaagaatagcaccccctctgagcccggctctggccgggggcctccccaagaggaagaagaagaggaggatgaagaggaagaggctaccaaggaagatgctgaggccccaggcatcagagatcatgagagcctgtagccaccaatgtttcaagaggagcccccaccctgttcctgctgctgtctgggtgctagggcagcacaggagggcggcctccttctgagctcctgtcccctgctacacctattatcccagctgcctagattcagggaaagtgggacagcttgtaggggaggggctcctttccataaatccttgatgattgacaacacccatttttccttttgccgaccccaagagttttgggagttgtagttaatcatcaagagaatttggggcttccaagttgttcgggccaaggacctgagacctgaagggttgactttacccatttgggtgggagtgttgagcatctgtccccctttagatctctgaagccacaaataggatgcttgggaagactcctagctgtcctttttcctctccacacagtgctcaaggccagcttatagtcatatatatcacccagacataaaggaaaagacacattttttaggaaatgtttttaataaaagaaaattacaaaaaaaaattttaaagacccctaaccctttgtgtgctctccattctgctccttccccatcgttgcccccatttctgaggtgcactgggaggctccccttctatttggggcttgatgactttctttttgtagctggggctttgatgttccttccagtgtcatttctcatccacataccctgacctggccccctcagtgttgtcaccagatctgatttgtaacccactgagaggacagagagaaataagtgccctctcccaccctcttcctactggtctctctatgcctctctacagtctcgtctcttttaccctggcccctctcccttgggctctgatgaaaaattgctgactgtagctttggaagtttagctctgagaaccgtagatgatttcagttctaggaaaataaaacccgttgattacta

SEQ ID NO: 320411 - DNA, 1045 bp, Homo sapiens
cgtttctgtgtttttgttttttttgtttaagaacccccggtttttcctagccgaatcatccccgtttcagactaacttccaactacatcacaatttttcatcagacccaagggagaggcccaggtaaagagacgaggctgtagagagcatagagagaccagtaggaagagggcagcacaggagggcggcctccttctgagctcctgtcccctgctacacctattatcccagctgcctagattcagggaaagtgggacagcttgtaggggaggggctcctttccataaatccttgatgattgacaacacccatttttccttttgccgaccccaagagttttgggagttgtagttaatcatcaagagaatttggggcttccaagttgttcgggccaaggacctgagacctgaagggttgactttacccatttgggtgggagtgttgagcatctgtccccctttagatctctgaagccacaaataggatgcttgggaagactcctagctgtcctttttcctctccacacagtgctcaaggccagcttatagtcatatatatcacccagacataaaggaaaagacacattttttaggaaatgtttttaataaaagaaaattacaaaaaaaaattttaaagacccctaaccctttgtgtgctctccattctgctccttccccatcgttgcccccatttctgaggtgcactgggaggctccccttctatttggggcttgatgactttctttttgtagctggggctttgatgttccttccagtgtcatttctcatccacataccctgacctggccccctcagtgttgtcaccagatctgatttgtaacccactgagaggacagagagaaataagtgccctctcccaccctcttcctactggtctctctatgcctctctacagtctcgtctcttttaccctggcccctctcccttgggctctgatgaaaaattgctgactgtagctttggaagtttagctctgagaaccgtagatgatttcagttctaggaaaataaaacccgttgattacta

SEQ ID NO: 320412 - DNA, 1977 bp, Homo sapiens
  misc_feature (2)..(2): n is a, c, g, or t
  misc_feature (28)..(28): n is a, c, g, or t
anggctaggtacgaggctgggtggctgngattgacgagatgcctgaggctgccgtgaaatcaacagccaacaaataccaagtcttttttttcgggacccacgagacggcattcctgggccccaaagacctcttcccttacgaggaatccaaggagaagtttggcaagcccaacaagaggaaagggttcagcgaggggctgtgggagatcgagaacaaccctactgtcaaggcttccggctatcagtcctcccagaaaaagagctgtgtggaagagcctgaaccagagcccgaagctgcagagggtgacggtgataagaaggggaatgcagagggcagcagcgacgaggaagggaagctggtcattgatgagccagccaaggagaagaacgagaaaggagcgttgaagaggagagcaggggacttgctggaggactctcctaaacgtcccaaggaggcagaaaaccctgaaggagaggagaaggaggcagccaccttggaggttgagaggccccttcctatggaggtggaaaagaatagcaccccctctgagcccggctctggccgggggcctccccaagaggaagaagaagaggaggatgaagaggaagaggctaccaaggaagatgctgaggccccaggcatcagagatcatgagagcctgtagccaccaatgtttcaagaggagcccccaccctgttcctgctgctgtctgggtgctactggggaaactggccatggcctgcaaactgggaacccctttcccaccccaacctgctctcctcttctactcacttttcccactccaagcccagcccatggagattgacctggatggggcaggccacctggctctcacctctaggtccccatactcctatgatctgagtcagagccatgtcttctccctggaatgagttgaggccactgtgttccttccgcttggagctattttccaggcttctgctggggcctgggacaactgctcccacctcctgacacccttctcccactctcctaggcattctggacctctgggttgggatcaggggtaggaatggaaaggatggagcatcaacagcagggtgggcttgtggggcctgggaggggcaatcctcaaatgcggggtgggggcagcacaggagggcggcctccttctgagctcctgtcccctgctacacctattatcccagctgcctagattcagggaaagtgggacagcttgtaggggaggggctcctttccataaatccttgatgattgacaacacccatttttccttttgccgaccccaagagttttgggagttgtagttaatcatcaagagaatttggggcttccaagttgttcgggccaaggacctgagacctgaagggttgactttacccatttgggtgggagtgttgagcatctgtccccctttagatctctgaagccacaaataggatgcttgggaagactcctagctgtcctttttcctctccacacagtgctcaaggccagcttatagtcatatatatcacccagacataaaggaaaagacacattttttaggaaatgtttttaataaaagaaaattacaaaaaaaaattttaaagacccctaaccctttgtgtgctctccattctgctccttccccatcgtgctccccttctatttggggcttgatgactttctttttgtagctggggctttgatgttccttccagtgtcatttctcatccacataccctgacctggccccctcagtgttgtcaccagatctgatttgtaacccactgagaggacagagagaaataagtgccctctcccaccctcttcctactggtctctctatgcctctctacagtctcgtctcttttaccctggcccctctcccttgggctctgatgaaaaattgctgactgtagctttggaagtttagctctgagaaccgtagatgatttcagttctaggaaaataaaacccgttgattacta

SEQ ID NO: 320413 - DNA, 1579 bp, Homo sapiens
  misc_feature (2)..(2): n is a, c, g, or t
  misc_feature (28)..(28): n is a, c, g, or t
anggctaggtacgaggctgggtggctgngattgacgagatgcctgaggctgccgtgaaatcaacagccaacaaataccaagtcttttttttcgggacccacgagacggcattcctgggccccaaagacctcttcccttacgaggaatccaaggagaagtttggcaagcccaacaagaggaaagggttcagcgaggggctgtgggagatcgagaacaaccctactgtcaaggcttccggctatcagtcctcccagaaaaagagctgtgtggaagagcctgaaccagagcccgaagctgcagagggtgacggtgataagaaggggaatgcagagggcagcagcgacgaggaagggaagctggtcattgatgagccagccaaggagaagaacgagaaaggagcgttgaagaggagagcaggggacttgctggaggactctcctaaacgtcccaaggaggcagaaaaccctgaaggagaggagaaggaggcagccaccttggaggttgagaggccccttcctatggaggtggaaaagaatagcaccccctctgagcccggctctggccgggggcctccccaagaggaagaagaagaggaggatgaagaggaagaggctaccaaggaagatgctgaggccccaggcatcagagatcatgagagcctgtagccaccaatgtttcaagaggagcccccaccctgttcctgctgctgtctgggtgctactggggaaactggccatggcctgcaaactgggaacccctttcccaccccaacctgctctcctcttctactcacttttcccactccaagcccagcccatggagattgacctggatggggcaggccacctggctctcacctctaggtccccatactcctatgatctgagtcagagccatgtcttctccctggaatgagttgaggccactgtgttccttccgcttggagctattttccaggcttctgctggggcctgggacaactgctcccacctcctgacacccttctcccactctcctaggcattctggacctctgggttgggatcaggggtaggaatggaaaggatggagcatcaacagcagggtgggcttgtggggcctgggaggggcaatcctcaaatgcggggtgggggcagcacaggagggcggcctccttctgagctcctgtcccctgctacacctattatcccagctgcctagattcagggaaagtgggacagcttgtaggggaggggctcctttccataaatccttgatgattgacaacacccatttttccttttgccgaccccaagagttttgggagttgtagttaatcatcaagagaatttggggcttccaagttgttcgggccaaggacctgagacctgaagggttgactttacccatttgggtgggagtgttgagcatctgtccccctttagatctctgaagccacaaataggatgcttgggaagactcctagctgtcctttttcctctccacacagtgctcaaggccagcttatagtcatatatatcacccagacataaaggaaaagacacattttttaggaaatgtttttaataaaagaaaattac

SEQ ID NO: 320414 - DNA, 1686 bp, Homo sapiens
  misc_feature (2)..(2): n is a, c, g, or t
  misc_feature (28)..(28): n is a, c, g, or t
  misc_feature (1650)..(1650): n is a, c, g, or t
anggctaggtacgaggctgggtggctgngattgacgagatgcctgaggctgccgtgaaatcaacagccaacaaataccaagtcttttttttcgggacccacgagacggcattcctgggccccaaagacctcttcccttacgaggaatccaaggagaagtttggcaagcccaacaagaggaaagggttcagcgaggggctgtgggagatcgagaacaaccctactgtcaaggcttccggctatcagtcctcccagaaaaagagctgtgtggaagagcctgaaccagagcccgaagctgcagagggtgacggtgataagaaggggaatgcagagggcagcagcgacgaggaagggaagctggtcattgatgagccagccaaggagaagaacgagaaaggagcgttgaagaggagagcaggggacttgctggaggactctcctaaacgtcccaaggaggcagaaaaccctgaaggagaggagaaggaggcagccaccttggaggttgagaggccccttcctatggaggtggaaaagaatagcaccccctctgagcccggctctggccgggggcctccccaagaggaagaagaagaggaggatgaagaggaagaggctaccaaggaagatgctgaggccccaggcatcagagatcatgagagcctgtagccaccaatgtttcaagaggagcccccaccctgttcctgctgctgtctgggtgctactggggaaactggccatggcctgcaaactgggaacccctttcccaccccaacctgctctcctcttctactcacttttcccactccaagcccagcccatggagattgacctggatggggcaggccacctggctctcacctctaggtccccatactcctatgatctgagtcagagccatgtcttctccctggaatgagttgaggccactgtgttccttccgcttggagctattttccaggcttctgctggggcctgggacaactgctcccacctcctgacacccttctcccactctcctaggcattctggacctctgggttgggatcaggggtaggaatggaaaggatggagcatcaacagcagggtgggcttgtggggcctgggaggggcaatcctcaaatgcggggtgggggcagcacaggagggcggcctccttctgagctcctgtcccctgctacacctattatcccagctgcctagattcagggaaagtgggacagcttgtaggggaggggctcctttccataaatccttgatgattgacaacacccatttttccttttgccgaccccaagagttttgggagttgtagttaatcatcaagagaatttggggcttccaagttgttcgggccaaggacctgagacctgaagggttgactttacccatttgggtgggagtgttgagcatctgtccccctttagatctctgaagccacaaataggatgcttgggaagactcctagctgtcctttttcctctccacacagtgctcaaggccagcttatagtcatatatatcacccagacataaaggaaaagacacattttttaggaaatgtttttaataaaagaaaattacaaaaaaaaattttaaaaaaaaaaaaaaaaaaacaaaaaaaacaaaaaacaaaaaaaaaaaaaaaaaaaaangggggggggcccccaaaattccccccgggggggccc

SEQ ID NO: 320415 - DNA, 1703 bp, Homo sapiens
  misc_feature (2)..(2): n is a, c, g, or t
  misc_feature (28)..(28): n is a, c, g, or t
anggctaggtacgaggctgggtggctgngattgacgagatgcctgaggctgccgtgaaatcaacagccaacaaataccaagtcttttttttcgggacccacgagacggcattcctgggccccaaagacctcttcccttacgaggaatccaaggagaagtttggcaagcccaacaagaggaaagggttcagcgaggggctgtgggagatcgagaacaaccctactgtcaaggcttccggctatcagtcctcccagaaaaagagctgtgtggaagagcctgaaccagagcccgaagctgcagagggtgacggtgataagaaggggaatgcagagggcagcagcgacgaggaagggaagctggtcattgatgagccagccaaggagaagaacgagaaaggagcgttgaagaggagagcaggggacttgctggaggactctcctaaacgtcccaaggaggcagaaaaccctgaaggagaggagaaggaggcagccaccttggaggttgagaggccccttcctatggaggtggaaaagaatagcaccccctctgagcccggctctggccgggggcctccccaagaggaagaagaagaggaggatgaagaggaagaggctaccaaggaagatgctgaggccccaggcatcagagatcatgagagcctgtagccaccaatgtttcaagaggagcccccaccctgttcctgctgctgtctgggtgctactggggaaactggccatggcctgcaaactgggaacccctttcccaccccaacctgctctcctcttctactcacttttcccactccaagcccagcccatggagattgacctggatggggcaggccacctggctctcacctctaggtccccatactcctatgatctgagtcagagccatgtcttctccctggaatgagttgaggccactgtgttccttccgcttggagctattttccaggcttctgctggggcctgggacaactgctcccacctcctgacacccttctcccactctcctaggcattctggacctctgggttgggatcaggggtaggaatggaaaggatggagcatcaacagcagggtgggcttgtggggcctgggaggggcaatcctcaaatgcggggtgggggcagcacaggagggcggcctccttctgagctcctgtcccctgctacacctattatcccagaaggccagcttatagtcatatatatcacccagacataaaggaaaagacacattttttaggaaatgtttttaataaaagaaaattacaaaaaaaaattttaaagacccctaaccctttgtgtgctctccattctgctccttccccatcgttgcccccatttctgaggtgcactgggaggctccccttctatttggggcttgatgactttctttttgtagctggggctttgatgttccttccagtgtcatttctcatccacataccctgacctggccccctcagtgttgtcaccagatctgatttgtaacccactgagaggacagagagaaataagtgccctctcccaccctcttcctactggtctctctatgcctctctacagtctcgtctcttttaccctggcccctctcccttgggctctgatgaaaaattgctgactgtagctttggaagtttagctctgagaaccgtagatgatttcagttctaggaaaataaaacccgttgattacta

SEQ ID NO: 320416 - DNA, 1746 bp, Homo sapiens
  misc_feature (2)..(2): n is a, c, g, or t
  misc_feature (28)..(28): n is a, c, g, or t
anggctaggtacgaggctgggtggctgngattgacgagatgcctgaggctgccgtgaaatcaacagccaacaaataccaagtcttttttttcgggacccacgagacggcattcctgggccccaaagacctcttcccttacgaggaatccaaggagaagtttggcaagcccaacaagaggaaagggttcagcgaggggctgtgggagatcgagaacaaccctactgtcaaggcttccggctatcagtcctcccagaaaaagagctgtgtggaagagcctgaaccagagcccgaagctgcagagggtgacggtgataagaaggggaatgcagagggcagcagcgacgaggaagggaagctggtcattgatgagccagccaaggagaagaacgagaaaggagcgttgaagaggagagcaggggacttgctggaggactctcctaaacgtcccaaggaggcagaaaaccctgaaggagaggagaaggaggcagccaccttggaggttgagaggccccttcctatggaggtggaaaagaatagcaccccctctgagcccggctctggccgggggcctccccaagaggaagaagaagaggaggatgaagaggaagaggctaccaaggaagatgctgaggccccaggcatcagagatcatgagagcctgtagccaccaatgtttcaagaggagcccccaccctgttcctgctgctgtctgggtgctactggggaaactggccatggcctgcaaactgggaacccctttcccaccccaacctgctctcctcttctactcacttttcccactccaagcccagcccatggagattgacctggatggggcaggccacctggctctcacctctaggtccccatactcctatgatctgagtcagagccatgtcttctccctggaatgagttgaggccactgtgttccttccgcttggagctattttccaggcttctgctggggcctgggacaactgctcccacctcctgacacccttctcccactctcctaggcattctggacctctgggttgggatcaggggtaggaatggaaaggatggagcatcaacagcagggtgggcttgtggggcctgggaggggcaatcctcaaatgcggggtgggggcagcacaggagggcggcctccttctgagctcctgtcccctgctacacctattatcccagctgcctagattcagggaaagtgggacagcttgtaggggaggggctcctttccataaatccttgatgattgacaacacccatttttccttttgccgaccccaagagttttgggagttgtagttaatcatcaagagaatttggggcttccaagttgttcgggccaaggacctgagacctgaagggttgactttatgcccccatttctgaggtgcactgggaggctccccttctatttggggcttgatgactttctttttgtagctggggctttgatgttccttccagtgtcatttctcatccacataccctgacctggccccctcagtgttgtcaccagatctgatttgtaacccactgagaggacagagagaaataagtgccctctcccaccctcttcctactggtctctctatgcctctctacagtctcgtctcttttaccctggcccctctcccttgggctctgatgaaaaattgctgactgtagctttggaagtttagctctgagaaccgtagatgatttcagttctaggaaaataaaacccgttgattacta

SEQ ID NO: 320417 - DNA, 1763 bp, Homo sapiens
  misc_feature (2)..(2): n is a, c, g, or t
  misc_feature (28)..(28): n is a, c, g, or t
anggctaggtacgaggctgggtggctgngattgacgagatgcctgaggctgccgtgaaatcaacagccaacaaataccaagtcttttttttcgggacccacgagacggcattcctgggccccaaagacctcttcccttacgaggaatccaaggagaagtttggcaagcccaacaagaggaaagggttcagcgaggggctgtgggagatcgagaacaaccctactgtcaaggcttccggctatcagtcctcccagaaaaagagctgtgtggaagagcctgaaccagagcccgaagctgcagagggtgacggtgataagaaggggaatgcagagggcagcagcgacgaggaagggaagctggtcattgatgagccagccaaggagaagaacgagaaaggagcgttgaagaggagagcaggggacttgctggaggactctcctaaacgtcccaaggaggcagaaaaccctgaaggagaggagaaggaggcagccaccttggaggttgagaggccccttcctatggaggtggaaaagaatagcaccccctctgagcccggctctggccgggggcctccccaagaggaagaagaagaggaggatgaagaggaagaggctaccaaggaagatgctgaggccccaggcatcagagatcatgagagcctgtagccaccaatgtttcaagaggagcccccaccctgttcctgctgctgtctgggtgctactggggaaactggccatggcctgcaaactgggaacccctttcccaccccaacctgctctcctcttctactcacttttcccactccaagcccagcccatggagattgacctggatggggcaggccacctggctctcacctctaggtccccatactcctatgatctgagtcagagccatgtcttctccctggaatgagttgaggccactgtgttccttccgcttggagctattttccaggcttctgctggggcctgggacaactgctcccacctcctgacacccttctcccactctcctaggcattctggacctctgggttgggatcaggggtaggaatggaaaggatggagcatcaacagcagggtgggcttgtggggcctgggaggggcaatcctcaaatgcggggtgggggcagcacaggagggcggcctccttctgagctcctgtcccctgctacacctattatcccagctgcctagattcagggaaagtgggacagcttgtaggggaggggctcctttccataaatccttgatgattgacaacacccatttttccttttgccgaccccaagagttttgggagttgtagttaatcatcaagagaatttggggcttccaagttgttcgggccaaggacctgagacctgaagggttgactttacccatttgggtgggagtgttgaggcgagtgttgggcgataacatcacatgttatcgcccaacacgcccacacacacacacacacacacacacacacacactcttaacagatccttccttatttgagccaaagccacaaatttcattctagagggaaagaagagtttattaccaaaggcctcatgagacacagacagtttcattatgaatggggccagggcacaaaacagaagagaaaggagatgtgacaaacgctaagacacagagaaaaggagacacagagaaaaccatccggaaagacagaggcatgttctggatgattctgaggcggaggaaggcagcgcaaggccagagaacatctgggtgttggggataacatca

SEQ ID NO: 320418 - DNA, 1872 bp, Homo sapiens
  misc_feature (2)..(2): n is a, c, g, or t
  misc_feature (28)..(28): n is a, c, g, or t
anggctaggtacgaggctgggtggctgngattgacgagatgcctgaggctgccgtgaaatcaacagccaacaaataccaagtcttttttttcgggacccacgagacggcattcctgggccccaaagacctcttcccttacgaggaatccaaggagaagtttggcaagcccaacaagaggaaagggttcagcgaggggctgtgggagatcgagaacaaccctactgtcaaggcttccggctatcagtcctcccagaaaaagagctgtgtggaagagcctgaaccagagcccgaagctgcagagggtgacggtgataagaaggggaatgcagagggcagcagcgacgaggaagggaagctggtcattgatgagccagccaaggagaagaacgagaaaggagcgttgaagaggagagcaggggacttgctggaggactctcctaaacgtcccaaggaggcagaaaaccctgaaggagaggagaaggaggcagccaccttggaggttgagaggccccttcctatggaggtggaaaagaatagcaccccctctgagcccggctctggccgggggcctccccaagaggaagaagaagaggaggatgaagaggaagaggctaccaaggaagatgctgaggccccaggcatcagagatcatgagagcctgtagccaccaatgtttcaagaggagcccccaccctgttcctgctgctgtctgggtgctactggggaaactggccatggcctgcaaactgggaacccctttcccaccccaacctgctctcctcttctactcacttttcccactccaagcccagcccatggagattgacctggatggggcaggccacctggctctcacctctaggtccccatactcctatgatctgagtcagagccatgtcttctccctggaatgagttgaggccactgtgttccttccgcttggagctattttccaggcttctgctggggcctgggacaactgctcccacctcctgacacccttctcccactctcctaggcattctggacctctgggttgggatcaggggtaggaatggaaaggatggagcatcaacagcagggtgggcttgtggggcctgggaggggcaatcctcaaatgcggggtggctcctttccataaatccttgatgattgacaacacccatttttccttttgccgaccccaagagttttgggagttgtagttaatcatcaagagaatttggggcttccaagttgttcgggccaaggacctgagacctgaagggttgactttacccatttgggtgggagtgttgagcatctgtccccctttagatctctgaagccacaaataggatgcttgggaagactcctagctgtcctttttcctctccacacagtgctcaaggccagcttatagtcatatatatcacccagacataaaggaaaagacacattttttaggaaatgtttttaataaaagaaaattacaaaaaaaaattttaaagacccctaaccctttgtgtgctctccattctgctccttccccatcgtgctccccttctatttggggcttgatgactttctttttgtagctggggctttgatgttccttccagtgtcatttctcatccacataccctgacctggccccctcagtgttgtcaccagatctgatttgtaacccactgagaggacagagagaaataagtgccctctcccaccctcttcctactggtctctctatgcctctctacagtctcgtctcttttaccctggcccctctcccttgggctctgatgaaaaattgctgactgtagctttggaagtttagctctgagaaccgtagatgatttcagttctaggaaaataaaacccgttgattacta

SEQ ID NO: 320419 - DNA, 1492 bp, Homo sapiens
  misc_feature (2)..(2): n is a, c, g, or t
  misc_feature (28)..(28): n is a, c, g, or t
anggctaggtacgaggctgggtggctgngattgacgagatgcctgaggctgccgtgaaatcaacagccaacaaataccaagtcttttttttcgggacccacgagacggcattcctgggccccaaagacctcttcccttacgaggaatccaaggagaagtttggcaagcccaacaagaggaaagggttcagcgaggggctgtgggagatcgagaacaaccctactgtcaaggcttccggctatcagtcctcccagaaaaagagctgtgtggaagagcctgaaccagagcccgaagctgcagagggtgacggtgataagaaggggaatgcagagggcagcagcgacgaggaagggaagctggtcattgatgagccagccaaggagaagaacgagaaaggagcgttgaagaggagagcaggggacttgctggaggactctcctaaacgtcccaaggaggcagaaaaccctgaaggagaggagaaggaggcagccaccttggaggttgagaggccccttcctatggaggtggaaaagaatagcaccccctctgagcccggctctggccgggggcctccccaagaggaagaagaagaggaggatgaagaggaagaggctaccaaggaagatgctgaggccccaggcatcagagatcatgagagcctgtagccaccaatgtttcaagaggagcccccaccctgttcctgctgctgtctgggtgctactggggaaactggccatggcctgcaaactgggaacccctttcccaccccaacctgctctcctcttctactcacttttcccactccaagcccagcccatggagattgacctggatggggcaggccacctggctctcacctctaggtccccatactcctatgatctgagtcagagccatgtcttctccctggaatgagttgaggccactgtgttccttccgcttggagctattttccaggcttctgctggggcctgggacaactgctcccacctcctgacacccttctcccactctcctaggcattctggacctctgggttgggatcaggggtaggaatggaaaggatggagcatcaacagcagggtgggcttgtggggcctgggaggggcaatcctcaaatgcggggtggtgcccccatttctgaggtgcactgggaggctccccttctatttggggcttgatgactttctttttgtagctggggctttgatgttccttccagtgtcatttctcatccacataccctgacctggccccctcagtgttgtcaccagatctgatttgtaacccactgagaggacagagagaaataagtgccctctcccaccctcttcctactggtctctctatgcctctctacagtctcgtctcttttaccctggcccctctcccttgggctctgatgaaaaattgctgactgtagctttggaagtttagctctgagaaccgtagatgatttcagttctaggaaaataaaacccgttgattacta

SEQ ID NO: 320420 - DNA, 804 bp, Homo sapiens
  misc_feature (2)..(2): n is a, c, g, or t
  misc_feature (28)..(28): n is a, c, g, or t
anggctaggtacgaggctgggtggctgngattgacgagatgcctgaggctgccgtgaaatcaacagccaacaaataccaagtcttttttttcgggacccacgagacggcattcctgggccccaaagacctcttcccttacgaggaatccaaggagaagtttggcaagcccaacaagaggaaagggttcagcgaggggctgtgggagatcgagaacaaccctactgtcaaggcttccggctatcagtcctcccagaaaaagagctgtgtggaagagcctgaaccagagcccgaagctgcagagggtgacggtgataagaaggggaatgcagagggcagcagcgacgaggaaggaaatgtttttaataaaagaaaattacaaaaaaaaattttaaagacccctaaccctttgtgtgctctccattctgctccttccccatcgttgcccccatttctgaggtgcactgggaggctccccttctatttggggcttgatgactttctttttgtagctggggctttgatgttccttccagtgtcatttctcatccacataccctgacctggccccctcagtgttgtcaccagatctgatttgtaacccactgagaggacagagagaaataagtgccctctcccaccctcttcctactggtctctctatgcctctctacagtctcgtctcttttaccctggcccctctcccttgggctctgatgaaaaattgctgactgtagctttggaagtttagctctgagaaccgtagatgatttcagttctaggaaaataaaacccgttgattacta

SEQ ID NO: 320421 - DNA, 525 bp, Homo sapiens
  misc_feature (11)..(11): n is a, c, g, or t
ctctctccacnctggctctctccacctggctctcacctctaggtccccatactcctatgatctgagtctgagccatgtcttctcctttcccaccccaacctgctctcctcttctactcacttttcccactccaagcccagcccatggagattgacctggatggggcaggccacctggctctcacctctaggctccccttctatttggggcttgatgactttctttttgtagctggggctttgatgttccttccagtgtcatttctcatccacataccctgacctggccccctcagtgttgtcaccagatctgatttgtaacccactgagaggacagagagaaataagtgccctctcccaccctcttcctactggtctctctatgcctctctacagtctcgtctcttttaccctggcccctctcccttgggctctgatgaaaaattgctgactgtagctttggaagtttagctctgagaaccgtagatgatttcagttctaggaaaataaaacccgttgattacta

SEQ ID NO: 320422 - DNA, 845 bp, Homo sapiens
  misc_feature (2)..(2): n is a, c, g, or t
  misc_feature (28)..(28): n is a, c, g, or t
anggctaggtacgaggctgggtggctgngattgacgagatgcctgaggctgccgtgaaatcaacagccaacaaataccaagtcttttttttcgggacccacgagacgtgagtggaggccaaaggggtataggtcgggagggccccgggaggactactctggggaaggtgaggtggtgttggtgcccctttcatgccgggctgtgcagctcaggggcagtgaggggcttgagagcacagtctcccatctctcaccagggcattcctgggccccaaagacctcttcccttacgaggaatccaaggagaagtttggcaagcccaacaagaggaaagggttcagcgaggggctgtgggagatcgagaacaaccctactgtcaaggcttccggctatcaggtgagccaccgcctgccccagagaccccctggaaagcagatgtggctgtgggctctggcagcccccggcccacagatgatgcttagtcttcagaaactccagggctttcagggtaggagctaatcagggtggtgggaagggggcttcctgcaagaagggatagggttgggctgtgtggtgtagttgtggttagggacaactgtgagacagcagtctggggggcaagaacaggatggaggcggtaagtggggacaggcctttgttgggcctagtgtgagtataggacacagccttaactctttccacaaaggcttccaggaggaggtgcttgtgagccgggcaggacgaggcgggagggttgccgcccggccgttgcccctgacaggttgctcacttccctctctcacactccgacccctcgctcgctacctctaggccccctccctcccc
